United States Patent Application Publication US 2005/0255487 A1 - sequence listing, part 84

SEQ ID NO: 2309037 - RNA, 19 nt, Homo sapiens
  misc_RNA (1)...(19): siRNA sense strand
agaagcaagugguggugga

SEQ ID NO: 2309038 - RNA, 19 nt, Homo sapiens
  misc_RNA (1)...(19): siRNA sense strand
aaguggaacaggugaaguu

SEQ ID NO: 2309039 - RNA, 19 nt, Homo sapiens
  misc_RNA (1)...(19): siRNA sense strand
cggagaagcaagugguggu

SEQ ID NO: 2309040 - RNA, 19 nt, Homo sapiens
  misc_RNA (1)...(19): siRNA sense strand
gagaagaaggccgcagcaa

SEQ ID NO: 2309041 - RNA, 19 nt, Homo sapiens
  misc_RNA (1)...(19): siRNA sense strand
ccaguggaauggaccggaa

SEQ ID NO: 2309042 - RNA, 19 nt, Homo sapiens
  misc_RNA (1)...(19): siRNA sense strand
gaaagcacccguauggaga

SEQ ID NO: 2309043 - RNA, 19 nt, Homo sapiens
  misc_RNA (1)...(19): siRNA sense strand
ugguggacggagagaauga

SEQ ID NO: 2309044 - RNA, 19 nt, Homo sapiens
  misc_RNA (1)...(19): siRNA sense strand
ugaagaucuacguguggaa

SEQ ID NO: 2309045 - RNA, 19 nt, Homo sapiens
  misc_RNA (1)...(19): siRNA sense strand
uggccaagaugguugcuga

SEQ ID NO: 2309046 - RNA, 19 nt, Homo sapiens
  misc_RNA (1)...(19): siRNA sense strand
augacuuggaagaggauga

SEQ ID NO: 2309047 - RNA, 19 nt, Homo sapiens
  misc_RNA (1)...(19): siRNA sense strand
aggaugacuuggaagagga

SEQ ID NO: 2309048 - RNA, 19 nt, Homo sapiens
  misc_RNA (1)...(19): siRNA sense strand
ggaaacaugccaacgagga

SEQ ID NO: 2309049 - RNA, 19 nt, Homo sapiens
  misc_RNA (1)...(19): siRNA sense strand
cuggagagguagagauguc

SEQ ID NO: 2309050 - RNA, 19 nt, Homo sapiens
  misc_RNA (1)...(19): siRNA sense strand
ccuaugacguccagaggcu

SEQ ID NO: 2309051 - RNA, 19 nt, Homo sapiens
  misc_RNA (1)...(19): siRNA sense strand
uggacguguucaaugcuaa

SEQ ID NO: 2309052 - RNA, 19 nt, Homo sapiens
  misc_RNA (1)...(19): siRNA sense strand
gagaaggaggagagggaga

SEQ ID NO: 2309053 - RNA, 19 nt, Homo sapiens
  misc_RNA (1)...(19): siRNA sense strand
gaggagagggagagggagu

SEQ ID NO: 2309054 - RNA, 19 nt, Homo sapiens
  misc_RNA (1)...(19): siRNA sense strand
aggaggagagggagaggga

SEQ ID NO: 2309055 - RNA, 19 nt, Homo sapiens
  misc_RNA (1)...(19): siRNA sense strand
ucucugagcugcagccuga

SEQ ID NO: 2309056 - RNA, 19 nt, Homo sapiens
  misc_RNA (1)...(19): siRNA sense strand
aggcaaaggaagaagaaaa

SEQ ID NO: 2309057 - RNA, 19 nt, Homo sapiens
  misc_RNA (1)...(19): siRNA sense strand
gcagauggguagaaggcau

SEQ ID NO: 2309058 - RNA, 19 nt, Homo sapiens
  misc_RNA (1)...(19): siRNA sense strand
uggauaaggcaaaggaaga

SEQ ID NO: 2309059 - RNA, 19 nt, Homo sapiens
  misc_RNA (1)...(19): siRNA sense strand
cagugagauuaaacagaaa

SEQ ID NO: 2309060 - RNA, 19 nt, Homo sapiens
  misc_RNA (1)...(19): siRNA sense strand
ucaugaaagaggaaagaau

SEQ ID NO: 2309061 - RNA, 19 nt, Homo sapiens
  misc_RNA (1)...(19): siRNA sense strand
ggagaauccagaugggaga

SEQ ID NO: 2309062 - RNA, 19 nt, Homo sapiens
  misc_RNA (1)...(19): siRNA sense strand
aggaagugacccagaaaca

SEQ ID NO: 2309063 - RNA, 19 nt, Homo sapiens
  misc_RNA (1)...(19): siRNA sense strand
aaucaaacccauauggaga

SEQ ID NO: 2309064 - RNA, 19 nt, Homo sapiens
  misc_RNA (1)...(19): siRNA sense strand
augaaagaggaaagaauca

SEQ ID NO: 2309065 - RNA, 19 nt, Homo sapiens
  misc_RNA (1)...(19): siRNA sense strand
aggauuucaaggagacuua

SEQ ID NO: 2309066 - RNA, 19 nt, Homo sapiens
  misc_RNA (1)...(19): siRNA sense strand
cguuuggguagaagguuua

SEQ ID NO: 2309067 - RNA, 19 nt, Homo sapiens
  misc_RNA (1)...(19): siRNA sense strand
cagaaacacagaaagaaaa

SEQ ID NO: 2309068 - RNA, 19 nt, Homo sapiens
  misc_RNA (1)...(19): siRNA sense strand
guuuaagugaagaugguuu

SEQ ID NO: 2309069 - RNA, 19 nt, Homo sapiens
  misc_RNA (1)...(19): siRNA sense strand
acccagaaacacagaaaga

SEQ ID NO: 2309070 - RNA, 19 nt, Homo sapiens
  misc_RNA (1)...(19): siRNA sense strand
acuggaagucacagccaaa

SEQ ID NO: 2309071 - RNA, 19 nt, Homo sapiens
  misc_RNA (1)...(19): siRNA sense strand
agugaagaccguuugggua

SEQ ID NO: 2309072 - RNA, 19 nt, Homo sapiens
  misc_RNA (1)...(19): siRNA sense strand
cuuaagaaaucaaacccau

SEQ ID NO: 2309073 - RNA, 19 nt, Homo sapiens
  misc_RNA (1)...(19): siRNA sense strand
auaaggaaaauguggcaaa

SEQ ID NO: 2309074 - RNA, 19 nt, Homo sapiens
  misc_RNA (1)...(19): siRNA sense strand
ucagauucgcauagugauu

SEQ ID NO: 2309075 - RNA, 19 nt, Homo sapiens
  misc_RNA (1)...(19): siRNA sense strand
ugacccagaaacacagaaa

SEQ ID NO: 2309076 - RNA, 19 nt, Homo sapiens
  misc_RNA (1)...(19): siRNA sense strand
ucuagaaauuuaaggcaac

SEQ ID NO: 2309077 - RNA, 19 nt, Homo sapiens
  misc_RNA (1)...(19): siRNA sense strand
gugaagaccguuuggguag

SEQ ID NO: 2309078 - RNA, 19 nt, Homo sapiens
  misc_RNA (1)...(19): siRNA sense strand
acagaauucauuagguuca

SEQ ID NO: 2309079 - RNA, 19 nt, Homo sapiens
  misc_RNA (1)...(19): siRNA sense strand
gaguuauggcagauggagu

SEQ ID NO: 2309080 - RNA, 19 nt, Homo sapiens
  misc_RNA (1)...(19): siRNA sense strand
agcugaugguggcggagaa

SEQ ID NO: 2309081 - RNA, 19 nt, Homo sapiens
  misc_RNA (1)...(19): siRNA sense strand
acccaaagugguauuuaaa

SEQ ID NO: 2309082 - RNA, 19 nt, Homo sapiens
  misc_RNA (1)...(19): siRNA sense strand
agguaaaugcauugguaaa

SEQ ID NO: 2309083 - RNA, 19 nt, Homo sapiens
  misc_RNA (1)...(19): siRNA sense strand
cugucgaaauggagguaaa

SEQ ID NO: 2309084 - RNA, 19 nt, Homo sapiens
  misc_RNA (1)...(19): siRNA sense strand
uggagugaacugugacaaa

SEQ ID NO: 2309085 - RNA, 19 nt, Homo sapiens
  misc_RNA (1)...(19): siRNA sense strand
ccaaagguuaccagggaga

SEQ ID NO: 2309086 - RNA, 19 nt, Homo sapiens
  misc_RNA (1)...(19): siRNA sense strand
auguaugaaugguggacuu

SEQ ID NO: 2309087 - RNA, 19 nt, Homo sapiens
  misc_RNA (1)...(19): siRNA sense strand
guucaaagccugucugcga

SEQ ID NO: 2309088 - RNA, 19 nt, Homo sapiens
  misc_RNA (1)...(19): siRNA sense strand
ggauaaaggcaucauggca

SEQ ID NO: 2309089 - RNA, 19 nt, Homo sapiens
  misc_RNA (1)...(19): siRNA sense strand
gguaaaugcauugguaaaa

SEQ ID NO: 2309090 - RNA, 19 nt, Homo sapiens
  misc_RNA (1)...(19): siRNA sense strand
uuaugaauucugaaggcaa

SEQ ID NO: 2309091 - RNA, 19 nt, Homo sapiens
  misc_RNA (1)...(19): siRNA sense strand
auaaaggcaucauggcaga

SEQ ID NO: 2309092 - RNA, 19 nt, Homo sapiens
  misc_RNA (1)...(19): siRNA sense strand
augcauugguaaaagcaaa

SEQ ID NO: 2309093 - RNA, 19 nt, Homo sapiens
  misc_RNA (1)...(19): siRNA sense strand
cagcauuugaaguggaugu

SEQ ID NO: 2309094 - RNA, 19 nt, Homo sapiens
  misc_RNA (1)...(19): siRNA sense strand
acagagaaugccagcuauu

SEQ ID NO: 2309095 - RNA, 19 nt, Homo sapiens
  misc_RNA (1)...(19): siRNA sense strand
aaacaugucuacaagcuga

SEQ ID NO: 2309096 - RNA, 19 nt, Homo sapiens
  misc_RNA (1)...(19): siRNA sense strand
cagugugaaaucagcaaau

SEQ ID NO: 2309097 - RNA, 19 nt, Homo sapiens
  misc_RNA (1)...(19): siRNA sense strand
aguucaagguggacaggga

SEQ ID NO: 2309098 - RNA, 19 nt, Homo sapiens
  misc_RNA (1)...(19): siRNA sense strand
ggaagaagauccggcacca

SEQ ID NO: 2309099 - RNA, 19 nt, Homo sapiens
  misc_RNA (1)...(19): siRNA sense strand
acaacuggguacaagacau

SEQ ID NO: 2309100 - RNA, 19 nt, Homo sapiens
  misc_RNA (1)...(19): siRNA sense strand
gggaaucacaacuggguac

SEQ ID NO: 2309101 - RNA, 19 nt, Homo sapiens
  misc_RNA (1)...(19): siRNA sense strand
ugaaauuauaccaggcaau

SEQ ID NO: 2309102 - RNA, 19 nt, Homo sapiens
  misc_RNA (1)...(19): siRNA sense strand
uguagaaagugcaggcgau

SEQ ID NO: 2309103 - RNA, 19 nt, Homo sapiens
  misc_RNA (1)...(19): siRNA sense strand
gauugaaagaugagguucu

SEQ ID NO: 2309104 - RNA, 19 nt, Homo sapiens
  misc_RNA (1)...(19): siRNA sense strand
ucuugugguagguggauaa

SEQ ID NO: 2309105 - RNA, 19 nt, Homo sapiens
  misc_RNA (1)...(19): siRNA sense strand
uggacaaacccgagacgga

SEQ ID NO: 2309106 - RNA, 19 nt, Homo sapiens
  misc_RNA (1)...(19): siRNA sense strand
cugaaauuauaccaggcaa

SEQ ID NO: 2309107 - RNA, 19 nt, Homo sapiens
  misc_RNA (1)...(19): siRNA sense strand
ugggagugauggauggaca

SEQ ID NO: 2309108 - RNA, 19 nt, Homo sapiens
  misc_RNA (1)...(19): siRNA sense strand
agaaagugcaggcgaucau

SEQ ID NO: 2309109 - RNA, 19 nt, Homo sapiens
  misc_RNA (1)...(19): siRNA sense strand
gggaucacaaacaggaaaa

SEQ ID NO: 2309110 - RNA, 19 nt, Homo sapiens
  misc_RNA (1)...(19): siRNA sense strand
uucucaaaccagaggcuaa

SEQ ID NO: 2309111 - RNA, 19 nt, Homo sapiens
  misc_RNA (1)...(19): siRNA sense strand
augaaaagcuccagauucu

SEQ ID NO: 2309112 - RNA, 19 nt, Homo sapiens
  misc_RNA (1)...(19): siRNA sense strand
acaaaagguuacagagaag

SEQ ID NO: 2309113 - RNA, 19 nt, Homo sapiens
  misc_RNA (1)...(19): siRNA sense strand
ccagaucaccugagggaag

SEQ ID NO: 2309114 - RNA, 19 nt, Homo sapiens
  misc_RNA (1)...(19): siRNA sense strand
ccgugaaggaaguggaccu

SEQ ID NO: 2309115 - RNA, 19 nt, Homo sapiens
  misc_RNA (1)...(19): siRNA sense strand
uuacaaaagguuacagaga

SEQ ID NO: 2309116 - RNA, 19 nt, Homo sapiens
  misc_RNA (1)...(19): siRNA sense strand
aaacagagcuucaugggaa

SEQ ID NO: 2309117 - RNA, 19 nt, Homo sapiens
  misc_RNA (1)...(19): siRNA sense strand
uggccgaggugaugggcaa

SEQ ID NO: 2309118 - RNA, 19 nt, Homo sapiens
  misc_RNA (1)...(19): siRNA sense strand
uuggcaaacgggagagaaa

SEQ ID NO: 2309119 - RNA, 19 nt, Homo sapiens
  misc_RNA (1)...(19): siRNA sense strand
gccaagaggaggagaggca

SEQ ID NO: 2309120 - RNA, 19 nt, Homo sapiens
  misc_RNA (1)...(19): siRNA sense strand
cggaagauaugcaagcaga

SEQ ID NO: 2309121 - RNA, 19 nt, Homo sapiens
  misc_RNA (1)...(19): siRNA sense strand
gcauggagaaggaggagga

SEQ ID NO: 2309122 - RNA, 19 nt, Homo sapiens
  misc_RNA (1)...(19): siRNA sense strand
gggcaagcauuaugggaug

SEQ ID NO: 2309123 - RNA, 19 nt, Homo sapiens
  misc_RNA (1)...(19): siRNA sense strand
ucccaggagcugaaggaua

SEQ ID NO: 2309124 - RNA, 19 nt, Homo sapiens
  misc_RNA (1)...(19): siRNA sense strand
aggugaugggcaagcauua

SEQ ID NO: 2309125 - RNA, 19 nt, Homo sapiens
  misc_RNA (1)...(19): siRNA sense strand
aacagagcuucaugggaaa

SEQ ID NO: 2309126 - RNA, 19 nt, Homo sapiens
  misc_RNA (1)...(19): siRNA sense strand
gcauauggauguggagcca

SEQ ID NO: 2309127 - RNA, 19 nt, Homo sapiens
  misc_RNA (1)...(19): siRNA sense strand
gcggaugaaccaaggccau

SEQ ID NO: 2309128 - RNA, 19 nt, Homo sapiens
  misc_RNA (1)...(19): siRNA sense strand
cggcuuggcaaacgggaga

SEQ ID NO: 2309129 - RNA, 19 nt, Homo sapiens
  misc_RNA (1)...(19): siRNA sense strand
aggauacagaccuggacua

SEQ ID NO: 2309130 - RNA, 19 nt, Homo sapiens
  misc_RNA (1)...(19): siRNA sense strand
gcgagaagaugaagcuccu

SEQ ID NO: 2309131 - RNA, 19 nt, Homo sapiens
  misc_RNA (1)...(19): siRNA sense strand
gagagaaaacagagcuuca

SEQ ID NO: 2309132 - RNA, 19 nt, Homo sapiens
  misc_RNA (1)...(19): siRNA sense strand
gggagcagcacucagggaa

SEQ ID NO: 2309133 - RNA, 19 nt, Homo sapiens
  misc_RNA (1)...(19): siRNA sense strand
aggaggaggaugagaggcu

SEQ ID NO: 2309134 - RNA, 19 nt, Homo sapiens
  misc_RNA (1)...(19): siRNA sense strand
agaugaagcuccugccgca

SEQ ID NO: 2309135 - RNA, 19 nt, Homo sapiens
  misc_RNA (1)...(19): siRNA sense strand
aggugaggcuauugggaaa

SEQ ID NO: 2309136 - RNA, 19 nt, Homo sapiens
  misc_RNA (1)...(19): siRNA sense strand
gugcaauggcuguggaaaa

SEQ ID NO: 2309137 - RNA, 19 nt, Homo sapiens
  misc_RNA (1)...(19): siRNA sense strand
cauaauagaaacagugcaa

SEQ ID NO: 2309138 - RNA, 19 nt, Homo sapiens
  misc_RNA (1)...(19): siRNA sense strand
caacaaagaaccuuggcaa

SEQ ID NO: 2309139 - RNA, 19 nt, Homo sapiens
  misc_RNA (1)...(19): siRNA sense strand
aauccauacaggagagaaa

SEQ ID NO: 2309140 - RNA, 19 nt, Homo sapiens
  misc_RNA (1)...(19): siRNA sense strand
augcaaggacugcgggaaa

SEQ ID NO: 2309141 - RNA, 19 nt, Homo sapiens
  misc_RNA (1)...(19): siRNA sense strand
auguaguaaaugugggaaa

SEQ ID NO: 2309142 - RNA, 19 nt, Homo sapiens
  misc_RNA (1)...(19): siRNA sense strand
ggagaaaagucccgugaau

SEQ ID NO: 2309143 - RNA, 19 nt, Homo sapiens
  misc_RNA (1)...(19): siRNA sense strand
ccuuuuaagucaugugaaa

SEQ ID NO: 2309144 - RNA, 19 nt, Homo sapiens
  misc_RNA (1)...(19): siRNA sense strand
ccucaaaauacaucagaaa

SEQ ID NO: 2309145 - RNA, 19 nt, Homo sapiens
  misc_RNA (1)...(19): siRNA sense strand
ugaucaacccauaggagaa

SEQ ID NO: 2309146 - RNA, 19 nt, Homo sapiens
  misc_RNA (1)...(19): siRNA sense strand
ccucaguauacaucagaaa

SEQ ID NO: 2309147 - RNA, 19 nt, Homo sapiens
  misc_RNA (1)...(19): siRNA sense strand
uaauagaaacagugcaaca

SEQ ID NO: 2309148 - RNA, 19 nt, Homo sapiens
  misc_RNA (1)...(19): siRNA sense strand
aauucacaccggagagaaa

SEQ ID NO: 2309149 - RNA, 19 nt, Homo sapiens
  misc_RNA (1)...(19): siRNA sense strand
augcagcgacugugggaaa

SEQ ID NO: 2309150 - RNA, 19 nt, Homo sapiens
  misc_RNA (1)...(19): siRNA sense strand
ccuuaugcuuguacagaau

SEQ ID NO: 2309151 - RNA, 19 nt, Homo sapiens
  misc_RNA (1)...(19): siRNA sense strand
uguuugagcaucagagaau

SEQ ID NO: 2309152 - RNA, 19 nt, Homo sapiens
  misc_RNA (1)...(19): siRNA sense strand
guguacucaaugugggaaa

SEQ ID NO: 2309153 - RNA, 19 nt, Homo sapiens
  misc_RNA (1)...(19): siRNA sense strand
cugaauguguaaugggcuu

SEQ ID NO: 2309154 - RNA, 19 nt, Homo sapiens
  misc_RNA (1)...(19): siRNA sense strand
cccuauauauguacagaau

SEQ ID NO: 2309155 - RNA, 19 nt, Homo sapiens
  misc_RNA (1)...(19): siRNA sense strand
aacucauaccggagagaaa

SEQ ID NO: 2309156 - RNA, 19 nt, Homo sapiens
  misc_RNA (1)...(19): siRNA sense strand
cagauaauucauacaggaa

SEQ ID NO: 2309157 - RNA, 19 nt, Homo sapiens
  misc_RNA (1)...(19): siRNA sense strand
aauccacacgggagagaaa

SEQ ID NO: 2309158 - RNA, 19 nt, Homo sapiens
  misc_RNA (1)...(19): siRNA sense strand
augugacacuagagaacua

SEQ ID NO: 2309159 - RNA, 19 nt, Homo sapiens
  misc_RNA (1)...(19): siRNA sense strand
acuaagaaugagaaugcua

SEQ ID NO: 2309160 - RNA, 19 nt, Homo sapiens
  misc_RNA (1)...(19): siRNA sense strand
aacucacacuggagagaaa

SEQ ID NO: 2309161 - RNA, 19 nt, Homo sapiens
  misc_RNA (1)...(19): siRNA sense strand
gggaaagccuucauccaga

SEQ ID NO: 2309162 - RNA, 19 nt, Homo sapiens
  misc_RNA (1)...(19): siRNA sense strand
cuaagaaugagaaugcuaa

SEQ ID NO: 2309163 - RNA, 19 nt, Homo sapiens
  misc_RNA (1)...(19): siRNA sense strand
gauaauucauacaggaaag

SEQ ID NO: 2309164 - RNA, 19 nt, Homo sapiens
  misc_RNA (1)...(19): siRNA sense strand
ggaugugacacuagagaac

SEQ ID NO: 2309165 - RNA, 19 nt, Homo sapiens
  misc_RNA (1)...(19): siRNA sense strand
augcagugaauguggaaaa

SEQ ID NO: 2309166 - RNA, 19 nt, Homo sapiens
  misc_RNA (1)...(19): siRNA sense strand
augcagugaauguggaaaa

SEQ ID NO: 2309167 - RNA, 19 nt, Homo sapiens
  misc_RNA (1)...(19): siRNA sense strand
ccguaugaaugcagugacu

SEQ ID NO: 2309168 - RNA, 19 nt, Homo sapiens
  misc_RNA (1)...(19): siRNA sense strand
gggaaggccuuuauccaga

SEQ ID NO: 2309169 - RNA, 19 nt, Homo sapiens
  misc_RNA (1)...(19): siRNA sense strand
ccuuaugaaugcagcgacu

SEQ ID NO: 2309170 - RNA, 19 nt, Homo sapiens
  misc_RNA (1)...(19): siRNA sense strand
aguaaaugugggaaagcuu

SEQ ID NO: 2309171 - RNA, 19 nt, Homo sapiens
  misc_RNA (1)...(19): siRNA sense strand
acuaaguaugcaucagaua

SEQ ID NO: 2309172 - RNA, 19 nt, Homo sapiens
  misc_RNA (1)...(19): siRNA sense strand
agaaacacuaugaaugcaa

SEQ ID NO: 2309173 - RNA, 19 nt, Homo sapiens
  misc_RNA (1)...(19): siRNA sense strand
ucaggaugcaucagagaau

SEQ ID NO: 2309174 - RNA, 19 nt, Homo sapiens
  misc_RNA (1)...(19): siRNA sense strand
cccuacaaaugcagugaau

SEQ ID NO: 2309175 - RNA, 19 nt, Homo sapiens
  misc_RNA (1)...(19): siRNA sense strand
aaaugcagcaacagggaau

SEQ ID NO: 2309176 - RNA, 19 nt, Homo sapiens
  misc_RNA (1)...(19): siRNA sense strand
cugugagagauuugaucaa

SEQ ID NO: 2309177 - RNA, 19 nt, Homo sapiens
  misc_RNA (1)...(19): siRNA sense strand
ggagcaaauuccugugaac

SEQ ID NO: 2309178 - RNA, 19 nt, Homo sapiens
  misc_RNA (1)...(19): siRNA sense strand
auccagaaaucaacacuaa

SEQ ID NO: 2309179 - RNA, 19 nt, Homo sapiens
  misc_RNA (1)...(19): siRNA sense strand
cuuuauguguguacugaau

SEQ ID NO: 2309180 - RNA, 19 nt, Homo sapiens
  misc_RNA (1)...(19): siRNA sense strand
ucuuuagacaucugagaau

SEQ ID NO: 2309181 - RNA, 19 nt, Homo sapiens
  misc_RNA (1)...(19): siRNA sense strand
ucaacacacaucagagaau

SEQ ID NO: 2309182 - RNA, 19 nt, Homo sapiens
  misc_RNA (1)...(19): siRNA sense strand
cuauaugugugcugaaugu

SEQ ID NO: 2309183 - RNA, 19 nt, Homo sapiens
  misc_RNA (1)...(19): siRNA sense strand
gcccaauauaugugcugaa

SEQ ID NO: 2309184 - RNA, 19 nt, Homo sapiens
  misc_RNA (1)...(19): siRNA sense strand
acccauaggagaagauuca

SEQ ID NO: 2309185 - RNA, 19 nt, Homo sapiens
  misc_RNA (1)...(19): siRNA sense strand
aggugaggcuauugggaaa

SEQ ID NO: 2309186 - RNA, 19 nt, Homo sapiens
  misc_RNA (1)...(19): siRNA sense strand
gugcaauggcuguggaaaa

SEQ ID NO: 2309187 - RNA, 19 nt, Homo sapiens
  misc_RNA (1)...(19): siRNA sense strand
cauaauagaaacagugcaa

SEQ ID NO: 2309188 - RNA, 19 nt, Homo sapiens
  misc_RNA (1)...(19): siRNA sense strand
caacaaagaaccuuggcaa

SEQ ID NO: 2309189 - RNA, 19 nt, Homo sapiens
  misc_RNA (1)...(19): siRNA sense strand
aauccauacaggagagaaa

SEQ ID NO: 2309190 - RNA, 19 nt, Homo sapiens
  misc_RNA (1)...(19): siRNA sense strand
augcaaggacugcgggaaa

SEQ ID NO: 2309191 - RNA, 19 nt, Homo sapiens
  misc_RNA (1)...(19): siRNA sense strand
auguaguaaaugugggaaa

SEQ ID NO: 2309192 - RNA, 19 nt, Homo sapiens
  misc_RNA (1)...(19): siRNA sense strand
ggagaaaagucccgugaau

SEQ ID NO: 2309193 - RNA, 19 nt, Homo sapiens
  misc_RNA (1)...(19): siRNA sense strand
ccuuuuaagucaugugaaa

SEQ ID NO: 2309194 - RNA, 19 nt, Homo sapiens
  misc_RNA (1)...(19): siRNA sense strand
ccucaaaauacaucagaaa

SEQ ID NO: 2309195 - RNA, 19 nt, Homo sapiens
  misc_RNA (1)...(19): siRNA sense strand
ugaucaacccauaggagaa

SEQ ID NO: 2309196 - RNA, 19 nt, Homo sapiens
  misc_RNA (1)...(19): siRNA sense strand
ccucaguauacaucagaaa

SEQ ID NO: 2309197 - RNA, 19 nt, Homo sapiens
  misc_RNA (1)...(19): siRNA sense strand
uaauagaaacagugcaaca

SEQ ID NO: 2309198 - RNA, 19 nt, Homo sapiens
  misc_RNA (1)...(19): siRNA sense strand
aauucacaccggagagaaa

SEQ ID NO: 2309199 - RNA, 19 nt, Homo sapiens
  misc_RNA (1)...(19): siRNA sense strand
augcagcgacugugggaaa

SEQ ID NO: 2309200 - RNA, 19 nt, Homo sapiens
  misc_RNA (1)...(19): siRNA sense strand
ccuuaugcuuguacagaau

SEQ ID NO: 2309201 - RNA, 19 nt, Homo sapiens
  misc_RNA (1)...(19): siRNA sense strand
uguuugagcaucagagaau

SEQ ID NO: 2309202 - RNA, 19 nt, Homo sapiens
  misc_RNA (1)...(19): siRNA sense strand
guguacucaaugugggaaa

SEQ ID NO: 2309203 - RNA, 19 nt, Homo sapiens
  misc_RNA (1)...(19): siRNA sense strand
cugaauguguaaugggcuu

SEQ ID NO: 2309204 - RNA, 19 nt, Homo sapiens
  misc_RNA (1)...(19): siRNA sense strand
cccuauauauguacagaau

SEQ ID NO: 2309205 - RNA, 19 nt, Homo sapiens
  misc_RNA (1)...(19): siRNA sense strand
aacucauaccggagagaaa

SEQ ID NO: 2309206 - RNA, 19 nt, Homo sapiens
  misc_RNA (1)...(19): siRNA sense strand
cagauaauucauacaggaa

SEQ ID NO: 2309207 - RNA, 19 nt, Homo sapiens
  misc_RNA (1)...(19): siRNA sense strand
aauccacacgggagagaaa

SEQ ID NO: 2309208 - RNA, 19 nt, Homo sapiens
  misc_RNA (1)...(19): siRNA sense strand
augugacacuagagaacua

SEQ ID NO: 2309209 - RNA, 19 nt, Homo sapiens
  misc_RNA (1)...(19): siRNA sense strand
acuaagaaugagaaugcua

SEQ ID NO: 2309210 - RNA, 19 nt, Homo sapiens
  misc_RNA (1)...(19): siRNA sense strand
aacucacacuggagagaaa

SEQ ID NO: 2309211 - RNA, 19 nt, Homo sapiens
  misc_RNA (1)...(19): siRNA sense strand
gggaaagccuucauccaga

SEQ ID NO: 2309212 - RNA, 19 nt, Homo sapiens
  misc_RNA (1)...(19): siRNA sense strand
cuaagaaugagaaugcuaa

SEQ ID NO: 2309213 - RNA, 19 nt, Homo sapiens
  misc_RNA (1)...(19): siRNA sense strand
gauaauucauacaggaaag

SEQ ID NO: 2309214 - RNA, 19 nt, Homo sapiens
  misc_RNA (1)...(19): siRNA sense strand
ggaugugacacuagagaac

SEQ ID NO: 2309215 - RNA, 19 nt, Homo sapiens
  misc_RNA (1)...(19): siRNA sense strand
augcagugaauguggaaaa

SEQ ID NO: 2309216 - RNA, 19 nt, Homo sapiens
  misc_RNA (1)...(19): siRNA sense strand
augcagugaauguggaaaa

SEQ ID NO: 2309217 - RNA, 19 nt, Homo sapiens
  misc_RNA (1)...(19): siRNA sense strand
ccguaugaaugcagugacu

SEQ ID NO: 2309218 - RNA, 19 nt, Homo sapiens
  misc_RNA (1)...(19): siRNA sense strand
gggaaggccuuuauccaga

SEQ ID NO: 2309219 - RNA, 19 nt, Homo sapiens
  misc_RNA (1)...(19): siRNA sense strand
ccuuaugaaugcagcgacu

SEQ ID NO: 2309220 - RNA, 19 nt, Homo sapiens
  misc_RNA (1)...(19): siRNA sense strand
aguaaaugugggaaagcuu

SEQ ID NO: 2309221 - RNA, 19 nt, Homo sapiens
  misc_RNA (1)...(19): siRNA sense strand
acuaaguaugcaucagaua

SEQ ID NO: 2309222 - RNA, 19 nt, Homo sapiens
  misc_RNA (1)...(19): siRNA sense strand
agaaacacuaugaaugcaa

SEQ ID NO: 2309223 - RNA, 19 nt, Homo sapiens
  misc_RNA (1)...(19): siRNA sense strand
ucaggaugcaucagagaau

SEQ ID NO: 2309224 - RNA, 19 nt, Homo sapiens
  misc_RNA (1)...(19): siRNA sense strand
cccuacaaaugcagugaau

SEQ ID NO: 2309225 - RNA, 19 nt, Homo sapiens
  misc_RNA (1)...(19): siRNA sense strand
aaaugcagcaacagggaau

SEQ ID NO: 2309226 - RNA, 19 nt, Homo sapiens
  misc_RNA (1)...(19): siRNA sense strand
cugugagagauuugaucaa

SEQ ID NO: 2309227 - RNA, 19 nt, Homo sapiens
  misc_RNA (1)...(19): siRNA sense strand
ggagcaaauuccugugaac

SEQ ID NO: 2309228 - RNA, 19 nt, Homo sapiens
  misc_RNA (1)...(19): siRNA sense strand
auccagaaaucaacacuaa

SEQ ID NO: 2309229 - RNA, 19 nt, Homo sapiens
  misc_RNA (1)...(19): siRNA sense strand
cuuuauguguguacugaau

SEQ ID NO: 2309230 - RNA, 19 nt, Homo sapiens
  misc_RNA (1)...(19): siRNA sense strand
ucuuuagacaucugagaau

SEQ ID NO: 2309231 - RNA, 19 nt, Homo sapiens
  misc_RNA (1)...(19): siRNA sense strand
ucaacacacaucagagaau

SEQ ID NO: 2309232 - RNA, 19 nt, Homo sapiens
  misc_RNA (1)...(19): siRNA sense strand
cuauaugugugcugaaugu

SEQ ID NO: 2309233 - RNA, 19 nt, Homo sapiens
  misc_RNA (1)...(19): siRNA sense strand
gcccaauauaugugcugaa

SEQ ID NO: 2309234 - RNA, 19 nt, Homo sapiens
  misc_RNA (1)...(19): siRNA sense strand
acccauaggagaagauuca

SEQ ID NO: 2309235 - RNA, 19 nt, Homo sapiens
  misc_RNA (1)...(19): siRNA sense strand
cgguguugcuugugggcua

SEQ ID NO: 2309236 - RNA, 19 nt, Homo sapiens
  misc_RNA (1)...(19): siRNA sense strand
aagccaagucuguggguga

SEQ ID NO: 2309237 - RNA, 19 nt, Homo sapiens
  misc_RNA (1)...(19): siRNA sense strand
caggcaauguggagggcca

SEQ ID NO: 2309238 - RNA, 19 nt, Homo sapiens
  misc_RNA (1)...(19): siRNA sense strand
ggcuggagacagaggauga

SEQ ID NO: 2309239 - RNA, 19 nt, Homo sapiens
  misc_RNA (1)...(19): siRNA sense strand
ucacaaaagucaaagacca

SEQ ID NO: 2309240 - RNA, 19 nt, Homo sapiens
  misc_RNA (1)...(19): siRNA sense strand
aagucaaagaccagggcau

SEQ ID NO: 2309241 - RNA, 19 nt, Homo sapiens
  misc_RNA (1)...(19): siRNA sense strand
ccauaaagaauuugggagg

SEQ ID NO: 2309242 - RNA, 19 nt, Homo sapiens
  misc_RNA (1)...(19): siRNA sense strand
acauaugagucaaaggaag

SEQ ID NO: 2309243 - RNA, 19 nt, Homo sapiens
  misc_RNA (1)...(19): siRNA sense strand
aggacuugccugugaagau

SEQ ID NO: 2309244 - RNA, 19 nt, Homo sapiens
  misc_RNA (1)...(19): siRNA sense strand
gcaacaagaugaagcaagc

SEQ ID NO: 2309245 - RNA, 19 nt, Homo sapiens
  misc_RNA (1)...(19): siRNA sense strand
gcagagaaggccaaggucu

SEQ ID NO: 2309246 - RNA, 19 nt, Homo sapiens
  misc_RNA (1)...(19): siRNA sense strand
ccagacaacagaaacgaga

SEQ ID NO: 2309247 - RNA, 19 nt, Homo sapiens
  misc_RNA (1)...(19): siRNA sense strand
gaacaggagcucuuggacu

SEQ ID NO: 2309248 - RNA, 19 nt, Homo sapiens
  misc_RNA (1)...(19): siRNA sense strand
cggucaagcucaaggaacu

SEQ ID NO: 2309249 - RNA, 19 nt, Homo sapiens
  misc_RNA (1)...(19): siRNA sense strand
uggugauggcagagggcaa

SEQ ID NO: 2309250 - RNA, 19 nt, Homo sapiens
  misc_RNA (1)...(19): siRNA sense strand
guguggagcgcaagggcaa

SEQ ID NO: 2309251 - RNA, 19 nt, Homo sapiens
  misc_RNA (1)...(19): siRNA sense strand
uggcagagggcaaggagau

SEQ ID NO: 2309252 - RNA, 19 nt, Homo sapiens
  misc_RNA (1)...(19): siRNA sense strand
uggacuguguggagcgcaa

SEQ ID NO: 2309253 - RNA, 19 nt, Homo sapiens
  misc_RNA (1)...(19): siRNA sense strand
aggagggcgugcuggagaa

SEQ ID NO: 2309254 - RNA, 19 nt, Homo sapiens
  misc_RNA (1)...(19): siRNA sense strand
cuggaaacggagaggccga

SEQ ID NO: 2309255 - RNA, 19 nt, Homo sapiens
  misc_RNA (1)...(19): siRNA sense strand
agacauaguaagagaacaa

SEQ ID NO: 2309256 - RNA, 19 nt, Homo sapiens
  misc_RNA (1)...(19): siRNA sense strand
ccacagugauauuggacaa

SEQ ID NO: 2309257 - RNA, 19 nt, Homo sapiens
  misc_RNA (1)...(19): siRNA sense strand
ggacaaaaugagugagcaa

SEQ ID NO: 2309258 - RNA, 19 nt, Homo sapiens
  misc_RNA (1)...(19): siRNA sense strand
gcacuggaggcgugggaaa

SEQ ID NO: 2309259 - RNA, 19 nt, Homo sapiens
  misc_RNA (1)...(19): siRNA sense strand
cugcugagggugugagaaa

SEQ ID NO: 2309260 - RNA, 19 nt, Homo sapiens
  misc_RNA (1)...(19): siRNA sense strand
guucaauccuggagcagaa

SEQ ID NO: 2309261 - RNA, 19 nt, Homo sapiens
  misc_RNA (1)...(19): siRNA sense strand
cuuaagaaaccaacgguaa

SEQ ID NO: 2309262 - RNA, 19 nt, Homo sapiens
  misc_RNA (1)...(19): siRNA sense strand
gugcauaaauggaagaacu

SEQ ID NO: 2309263 - RNA, 19 nt, Homo sapiens
  misc_RNA (1)...(19): siRNA sense strand
cagaaagucaaaugaacaa

SEQ ID NO: 2309264 - RNA, 19 nt, Homo sapiens
  misc_RNA (1)...(19): siRNA sense strand
aagcaauagugauaaggaa

SEQ ID NO: 2309265 - RNA, 19 nt, Homo sapiens
  misc_RNA (1)...(19): siRNA sense strand
cagaaaggucuaacagaau

SEQ ID NO: 2309266 - RNA, 19 nt, Homo sapiens
  misc_RNA (1)...(19): siRNA sense strand
aagcagaaggaguggucaa

SEQ ID NO: 2309267 - RNA, 19 nt, Homo sapiens
  misc_RNA (1)...(19): siRNA sense strand
gaagauaaaagcagagaau

SEQ ID NO: 2309268 - RNA, 19 nt, Homo sapiens
  misc_RNA (1)...(19): siRNA sense strand
agcaauagugauaaggaaa

SEQ ID NO: 2309269 - RNA, 19 nt, Homo sapiens
  misc_RNA (1)...(19): siRNA sense strand
aguaagcauucuuggacua

SEQ ID NO: 2309270 - RNA, 19 nt, Homo sapiens
  misc_RNA (1)...(19): siRNA sense strand
ccagaaagucaaaugaaca

SEQ ID NO: 2309271 - RNA, 19 nt, Homo sapiens
  misc_RNA (1)...(19): siRNA sense strand
auaaagaagcagaguuuga

SEQ ID NO: 2309272 - RNA, 19 nt, Homo sapiens
  misc_RNA (1)...(19): siRNA sense strand
ggacaauaagauggacaaa

SEQ ID NO: 2309273 - RNA, 19 nt, Homo sapiens
  misc_RNA (1)...(19): siRNA sense strand
gcaauagugauaaggaaaa

SEQ ID NO: 2309274 - RNA, 19 nt, Homo sapiens
  misc_RNA (1)...(19): siRNA sense strand
cugauaagagacauaguaa

SEQ ID NO: 2309275 - RNA, 19 nt, Homo sapiens
  misc_RNA (1)...(19): siRNA sense strand
cucgaaagcaccaggcaaa

SEQ ID NO: 2309276 - RNA, 19 nt, Homo sapiens
  misc_RNA (1)...(19): siRNA sense strand
ugagaaaauaccagcaaaa

SEQ ID NO: 2309277 - RNA, 19 nt, Homo sapiens
  misc_RNA (1)...(19): siRNA sense strand
uuaagaaaccaacgguaaa

SEQ ID NO: 2309278 - RNA, 19 nt, Homo sapiens
  misc_RNA (1)...(19): siRNA sense strand
ugaugaugccuuagaaaga

SEQ ID NO: 2309279 - RNA, 19 nt, Homo sapiens
  misc_RNA (1)...(19): siRNA sense strand
cauaaauguaccuccgaua

SEQ ID NO: 2309280 - RNA, 19 nt, Homo sapiens
  misc_RNA (1)...(19): siRNA sense strand
cagagaaagcagaaggagu

SEQ ID NO: 2309281 - RNA, 19 nt, Homo sapiens
  misc_RNA (1)...(19): siRNA sense strand
gugaaugauguaaggaaca

SEQ ID NO: 2309282 - RNA, 19 nt, Homo sapiens
  misc_RNA (1)...(19): siRNA sense strand
uuuagugguugauggaaua

SEQ ID NO: 2309283 - RNA, 19 nt, Homo sapiens
  misc_RNA (1)...(19): siRNA sense strand
gugaauguaaggcaagaaa

SEQ ID NO: 2309284 - RNA, 19 nt, Homo sapiens
  misc_RNA (1)...(19): siRNA sense strand
agacaaugacauaugaaca

SEQ ID NO: 2309285 - RNA, 19 nt, Homo sapiens
  misc_RNA (1)...(19): siRNA sense strand
ucauacagcuguuggcaga

SEQ ID NO: 2309286 - RNA, 19 nt, Homo sapiens
  misc_RNA (1)...(19): siRNA sense strand
ugacauaugaacaaccaaa

SEQ ID NO: 2309287 - RNA, 19 nt, Homo sapiens
  misc_RNA (1)...(19): siRNA sense strand
cagaauuuguggaaccaau

SEQ ID NO: 2309288 - RNA, 19 nt, Homo sapiens
  misc_RNA (1)...(19): siRNA sense strand
acucaaagaaacacggaca

SEQ ID NO: 2309289 - RNA, 19 nt, Homo sapiens
  misc_RNA (1)...(19): siRNA sense strand
gacacaacuuacuuagaaa

SEQ ID NO: 2309290 - RNA, 19 nt, Homo sapiens
  misc_RNA (1)...(19): siRNA sense strand
uguacugauaagagacaua

SEQ ID NO: 2309291 - RNA, 19 nt, Homo sapiens
  misc_RNA (1)...(19): siRNA sense strand
ccagagaugagaaacuaaa

SEQ ID NO: 2309292 - RNA, 19 nt, Homo sapiens
  misc_RNA (1)...(19): siRNA sense strand
gaggaguauucaagcugua

SEQ ID NO: 2309293 - RNA, 19 nt, Homo sapiens
  misc_RNA (1)...(19): siRNA sense strand
cugcagaagaagauugaca

SEQ ID NO: 2309294 - RNA, 19 nt, Homo sapiens
  misc_RNA (1)...(19): siRNA sense strand
uggaagauggccucaauaa

SEQ ID NO: 2309295 - RNA, 19 nt, Homo sapiens
  misc_RNA (1)...(19): siRNA sense strand
cuaaauugaaggaaguaca

SEQ ID NO: 2309296 - RNA, 19 nt, Homo sapiens
  misc_RNA (1)...(19): siRNA sense strand
agguaucagaccagaagaa

SEQ ID NO: 2309297 - RNA, 19 nt, Homo sapiens
  misc_RNA (1)...(19): siRNA sense strand
acccagaagugaugcaaaa

SEQ ID NO: 2309298 - RNA, 19 nt, Homo sapiens
  misc_RNA (1)...(19): siRNA sense strand
aaacacaguuggaggcacu

SEQ ID NO: 2309299 - RNA, 19 nt, Homo sapiens
  misc_RNA (1)...(19): siRNA sense strand
gaaaagucagcgaagauaa

SEQ ID NO: 2309300 - RNA, 19 nt, Homo sapiens
  misc_RNA (1)...(19): siRNA sense strand
aguacagggucgugaugau

SEQ ID NO: 2309301 - RNA, 19 nt, Homo sapiens
  misc_RNA (1)...(19): siRNA sense strand
gggucgugaugaugccuua

SEQ ID NO: 2309302 - RNA, 19 nt, Homo sapiens
  misc_RNA (1)...(19): siRNA sense strand
cgugaugaugccuuagaaa

SEQ ID NO: 2309303 - RNA, 19 nt, Homo sapiens
  misc_RNA (1)...(19): siRNA sense strand
cucaauaagacaaugacua

SEQ ID NO: 2309304 - RNA, 19 nt, Homo sapiens
  misc_RNA (1)...(19): siRNA sense strand
ccucgaaagcaccaggcaa

SEQ ID NO: 2309305 - RNA, 19 nt, Homo sapiens
  misc_RNA (1)...(19): siRNA sense strand
uggacaauaagauggacaa

SEQ ID NO: 2309306 - RNA, 19 nt, Homo sapiens
  misc_RNA (1)...(19): siRNA sense strand
gggaacucucagaagacua

SEQ ID NO: 2309307 - RNA, 19 nt, Homo sapiens
  misc_RNA (1)...(19): siRNA sense strand
gucuauaggaugcaacaua

SEQ ID NO: 2309308 - RNA, 19 nt, Homo sapiens
  misc_RNA (1)...(19): siRNA sense strand
aggacacagaagagaauuu

SEQ ID NO: 2309309 - RNA, 19 nt, Homo sapiens
  misc_RNA (1)...(19): siRNA sense strand
aauggaagaacuagcuuua

SEQ ID NO: 2309310 - RNA, 19 nt, Homo sapiens
  misc_RNA (1)...(19): siRNA sense strand
ggucaugucggcggagaua

SEQ ID NO: 2309311 - RNA, 19 nt, Homo sapiens
  misc_RNA (1)...(19): siRNA sense strand
ccaaccaggcugaaaguca

SEQ ID NO: 2309312 - RNA, 19 nt, Homo sapiens
  misc_RNA (1)...(19): siRNA sense strand
cugugaaugauguaaggaa

SEQ ID NO: 2309313 - RNA, 19 nt, Homo sapiens
  misc_RNA (1)...(19): siRNA sense strand
cggcccacuuugacugaua

SEQ ID NO: 2309314 - RNA, 19 nt, Homo sapiens
  misc_RNA (1)...(19): siRNA sense strand
ugucaauuauggagcuuca

SEQ ID NO: 2309315 - RNA, 19 nt, Homo sapiens
  misc_RNA (1)...(19): siRNA sense strand
cuauaggaugcaacauaaa

SEQ ID NO: 2309316 - RNA, 19 nt, Homo sapiens
  misc_RNA (1)...(19): siRNA sense strand
gcauuaauguacugauaag

SEQ ID NO: 2309317 - RNA, 19 nt, Homo sapiens
  misc_RNA (1)...(19): siRNA sense strand
ggaacuaaggaaucacauu

SEQ ID NO: 2309318 - RNA, 19 nt, Homo sapiens
  misc_RNA (1)...(19): siRNA sense strand
caggaacacucaagaagca

SEQ ID NO: 2309319 - RNA, 19 nt, Homo sapiens
  misc_RNA (1)...(19): siRNA sense strand
ccaaaggaagcaauaguga

SEQ ID NO: 2309320 - RNA, 19 nt, Homo sapiens
  misc_RNA (1)...(19): siRNA sense strand
uugaaaugcagaagggaga

SEQ ID NO: 2309321 - RNA, 19 nt, Homo sapiens
  misc_RNA (1)...(19): siRNA sense strand
acaaauggaucuuggcagu

SEQ ID NO: 2309322 - RNA, 19 nt, Homo sapiens
  misc_RNA (1)...(19): siRNA sense strand
acauacaucugcaugcaaa

SEQ ID NO: 2309323 - RNA, 19 nt, Homo sapiens
  misc_RNA (1)...(19): siRNA sense strand
caugcaaaggacuguguaa

SEQ ID NO: 2309324 - RNA, 19 nt, Homo sapiens
  misc_RNA (1)...(19): siRNA sense strand
ccucgagcuuuaaaggcua

SEQ ID NO: 2309325 - RNA, 19 nt, Homo sapiens
  misc_RNA (1)...(19): siRNA sense strand
ggaucuuggcagugggaag

SEQ ID NO: 2309326 - RNA, 19 nt, Homo sapiens
  misc_RNA (1)...(19): siRNA sense strand
ucgcuguagccaugggaau

SEQ ID NO: 2309327 - RNA, 19 nt, Homo sapiens
  misc_RNA (1)...(19): siRNA sense strand
auaacuuggaucugaagaa

SEQ ID NO: 2309328 - RNA, 19 nt, Homo sapiens
  misc_RNA (1)...(19): siRNA sense strand
cgaaaguuacuguggccca

SEQ ID NO: 2309329 - RNA, 19 nt, Homo sapiens
  misc_RNA (1)...(19): siRNA sense strand
guucaacuccaaauacaua

SEQ ID NO: 2309330 - RNA, 19 nt, Homo sapiens
  misc_RNA (1)...(19): siRNA sense strand
uucugaaaguauacagcaa

SEQ ID NO: 2309331 - RNA, 19 nt, Homo sapiens
  misc_RNA (1)...(19): siRNA sense strand
agucaaaagcaaauguaga

SEQ ID NO: 2309332 - RNA, 19 nt, Homo sapiens
  misc_RNA (1)...(19): siRNA sense strand
ccaaauacauacaucugca

SEQ ID NO: 2309333 - RNA, 19 nt, Homo sapiens
  misc_RNA (1)...(19): siRNA sense strand
gaacacaacuucugaggca

SEQ ID NO: 2309334 - RNA, 19 nt, Homo sapiens
  misc_RNA (1)...(19): siRNA sense strand
guucugugcacaagggcua

SEQ ID NO: 2309335 - RNA, 19 nt, Homo sapiens
  misc_RNA (1)...(19): siRNA sense strand
gaagaagggugauggaggu

SEQ ID NO: 2309336 - RNA, 19 nt, Homo sapiens
  misc_RNA (1)...(19): siRNA sense strand
guuaaagagcagugagcug

SEQ ID NO: 2309337 - RNA, 19 nt, Homo sapiens
  misc_RNA (1)...(19): siRNA sense strand
aggcaagcaauguaaccaa

SEQ ID NO: 2309338 - RNA, 19 nt, Homo sapiens
  misc_RNA (1)...(19): siRNA sense strand
aggaagagcuggaacacag

SEQ ID NO: 2309339 - RNA, 19 nt, Homo sapiens
  misc_RNA (1)...(19): siRNA sense strand
cuggagagccuaagccuga

SEQ ID NO: 2309340 - RNA, 19 nt, Homo sapiens
  misc_RNA (1)...(19): siRNA sense strand
agaucaaguuaaagagcag

SEQ ID NO: 2309341 - RNA, 19 nt, Homo sapiens
  misc_RNA (1)...(19): siRNA sense strand
acaucaacauggcuggaga

SEQ ID NO: 2309342 - RNA, 19 nt, Homo sapiens
  misc_RNA (1)...(19): siRNA sense strand
gaacacaacuucugaggca

SEQ ID NO: 2309343 - RNA, 19 nt, Homo sapiens
  misc_RNA (1)...(19): siRNA sense strand
guucugugcacaagggcua

SEQ ID NO: 2309344 - RNA, 19 nt, Homo sapiens
  misc_RNA (1)...(19): siRNA sense strand
gaagaagggugauggaggu

SEQ ID NO: 2309345 - RNA, 19 nt, Homo sapiens
  misc_RNA (1)...(19): siRNA sense strand
guuaaagagcagugagcug

SEQ ID NO: 2309346 - RNA, 19 nt, Homo sapiens
  misc_RNA (1)...(19): siRNA sense strand
aggcaagcaauguaaccaa

SEQ ID NO: 2309347 - RNA, 19 nt, Homo sapiens
  misc_RNA (1)...(19): siRNA sense strand
aggaagagcuggaacacag

SEQ ID NO: 2309348 - RNA, 19 nt, Homo sapiens
  misc_RNA (1)...(19): siRNA sense strand
cuggagagccuaagccuga

SEQ ID NO: 2309349 - RNA, 19 nt, Homo sapiens
  misc_RNA (1)...(19): siRNA sense strand
agaucaaguuaaagagcag

SEQ ID NO: 2309350 - RNA, 19 nt, Homo sapiens
  misc_RNA (1)...(19): siRNA sense strand
acaucaacauggcuggaga

SEQ ID NO: 2309351 - RNA, 19 nt, Homo sapiens
  misc_RNA (1)...(19): siRNA sense strand
gagaugaauuccugggaga

SEQ ID NO: 2309352 - RNA, 19 nt, Homo sapiens
  misc_RNA (1)...(19): siRNA sense strand
acucggaagugcagggcaa

SEQ ID NO: 2309353 - RNA, 19 nt, Homo sapiens
  misc_RNA (1)...(19): siRNA sense strand
uggagaagcuggaggagga

SEQ ID NO: 2309354 - RNA, 19 nt, Homo sapiens
  misc_RNA (1)...(19): siRNA sense strand
aggaggaagacguggacaa

SEQ ID NO: 2309355 - RNA, 19 nt, Homo sapiens
  misc_RNA (1)...(19): siRNA sense strand
acgaaagugaagaggaaga

SEQ ID NO: 2309356 - RNA, 19 nt, Homo sapiens
  misc_RNA (1)...(19): siRNA sense strand
ccgagcaagaugagggauu

SEQ ID NO: 2309357 - RNA, 19 nt, Homo sapiens
  misc_RNA (1)...(19): siRNA sense strand
gugaagaggaagaccaaca

SEQ ID NO: 2309358 - RNA, 19 nt, Homo sapiens
  misc_RNA (1)...(19): siRNA sense strand
ccaaagugagccagugcaa

SEQ ID NO: 2309359 - RNA, 19 nt, Homo sapiens
  misc_RNA (1)...(19): siRNA sense strand
ucuucaaugagcagaaaua

SEQ ID NO: 2309360 - RNA, 19 nt, Homo sapiens
  misc_RNA (1)...(19): siRNA sense strand
aguucaagaagacgaaaua

SEQ ID NO: 2309361 - RNA, 19 nt, Homo sapiens
  misc_RNA (1)...(19): siRNA sense strand
acaacugcguggaggccaa

SEQ ID NO: 2309362 - RNA, 19 nt, Homo sapiens
  misc_RNA (1)...(19): siRNA sense strand
gcaagagccuaaagccaga

SEQ ID NO: 2309363 - RNA, 19 nt, Homo sapiens
  misc_RNA (1)...(19): siRNA sense strand
aguccaaaucugcgaguuu

SEQ ID NO: 2309364 - RNA, 19 nt, Homo sapiens
  misc_RNA (1)...(19): siRNA sense strand
gagauaugccagagccaca

SEQ ID NO: 2309365 - RNA, 19 nt, Homo sapiens
  misc_RNA (1)...(19): siRNA sense strand
gcccaguauaagagggaca

SEQ ID NO: 2309366 - RNA, 19 nt, Homo sapiens
  misc_RNA (1)...(19): siRNA sense strand
cguugaaaguccugcggca

SEQ ID NO: 2309367 - RNA, 19 nt, Homo sapiens
  misc_RNA (1)...(19): siRNA sense strand
aaugguagcaagagccuaa

SEQ ID NO: 2309368 - RNA, 19 nt, Homo sapiens
  misc_RNA (1)...(19): siRNA sense strand
gccaaggacuggaucgaca

SEQ ID NO: 2309369 - RNA, 19 nt, Homo sapiens
  misc_RNA (1)...(19): siRNA sense strand
agggacaaguucaagaaga

SEQ ID NO: 2309370 - RNA, 19 nt, Homo sapiens
  misc_RNA (1)...(19): siRNA sense strand
augcugaugcggugaagaa

SEQ ID NO: 2309371 - RNA, 19 nt, Homo sapiens
  misc_RNA (1)...(19): siRNA sense strand
aagugaagaggaagaccaa

SEQ ID NO: 2309372 - RNA, 19 nt, Homo sapiens
  misc_RNA (1)...(19): siRNA sense strand
ucaacuuguacaugagcaa

SEQ ID NO: 2309373 - RNA, 19 nt, Homo sapiens
  misc_RNA (1)...(19): siRNA sense strand
cagaagcaaagaagacgaa

SEQ ID NO: 2309374 - RNA, 19 nt, Homo sapiens
  misc_RNA (1)...(19): siRNA sense strand
ggacaaugguagcaagagc

SEQ ID NO: 2309375 - RNA, 19 nt, Homo sapiens
  misc_RNA (1)...(19): siRNA sense strand
aggagcacgcccaguauaa

SEQ ID NO: 2309376 - RNA, 19 nt, Homo sapiens
  misc_RNA (1)...(19): siRNA sense strand
acuuugacuuugaggagga

SEQ ID NO: 2309377 - RNA, 19 nt, Homo sapiens
  misc_RNA (1)...(19): siRNA sense strand
uagcaagagccuaaagcca

SEQ ID NO: 2309378 - RNA, 19 nt, Homo sapiens
  misc_RNA (1)...(19): siRNA sense strand
aggaagacguggacaagcu

SEQ ID NO: 2309379 - RNA, 19 nt, Homo sapiens
  misc_RNA (1)...(19): siRNA sense strand
gcuccuacgaggcguggua

SEQ ID NO: 2309380 - RNA, 19 nt, Homo sapiens
  misc_RNA (1)...(19): siRNA sense strand
guugaaagacggagaaaac

SEQ ID NO: 2309381 - RNA, 19 nt, Homo sapiens
  misc_RNA (1)...(19): siRNA sense strand
cgcuguacauccaggccaa

SEQ ID NO: 2309382 - RNA, 19 nt, Homo sapiens
  misc_RNA (1)...(19): siRNA sense strand
aagaagacgaaauauggaa

SEQ ID NO: 2309383 - RNA, 19 nt, Homo sapiens
  misc_RNA (1)...(19): siRNA sense strand
cgggacaaugguagcaaga

SEQ ID NO: 2309384 - RNA, 19 nt, Homo sapiens
  misc_RNA (1)...(19): siRNA sense strand
ugaaguugaaagacggaga

SEQ ID NO: 2309385 - RNA, 19 nt, Homo sapiens
  misc_RNA (1)...(19): siRNA sense strand
ccacaaaagcaaaggggac

SEQ ID NO: 2309386 - RNA, 19 nt, Homo sapiens
  misc_RNA (1)...(19): siRNA sense strand
gggcuuuggagcaggagca

SEQ ID NO: 2309387 - RNA, 19 nt, Homo sapiens
  misc_RNA (1)...(19): siRNA sense strand
ccaucggagacaagagcuu

SEQ ID NO: 2309388 - RNA, 19 nt, Homo sapiens
  misc_RNA (1)...(19): siRNA sense strand
ccauccagaaggaggacuu

SEQ ID NO: 2309389 - RNA, 19 nt, Homo sapiens
  misc_RNA (1)...(19): siRNA sense strand
gcaaagugcaccuggagcu

SEQ ID NO: 2309390 - RNA, 19 nt, Homo sapiens
  misc_RNA (1)...(19): siRNA sense strand
aguauaagagggacaaguu

SEQ ID NO: 2309391 - RNA, 19 nt, Homo sapiens
  misc_RNA (1)...(19): siRNA sense strand
auaagagggacaaguucaa

SEQ ID NO: 2309392 - RNA, 19 nt, Homo sapiens
  misc_RNA (1)...(19): siRNA sense strand
uugaaaacaacauggagaa

SEQ ID NO: 2309393 - RNA, 19 nt, Homo sapiens
  misc_RNA (1)...(19): siRNA sense strand
ccaaagaagaagaaggaga

SEQ ID NO: 2309394 - RNA, 19 nt, Homo sapiens
  misc_RNA (1)...(19): siRNA sense strand
gagaagaagaagaaggaca

SEQ ID NO: 2309395 - RNA, 19 nt, Homo sapiens
  misc_RNA (1)...(19): siRNA sense strand
gagaagaaggagaaggaga

SEQ ID NO: 2309396 - RNA, 19 nt, Homo sapiens
  misc_RNA (1)...(19): siRNA sense strand
aggagaaggagaaggagaa

SEQ ID NO: 2309397 - RNA, 19 nt, Homo sapiens
  misc_RNA (1)...(19): siRNA sense strand
aggacaaggagaaggagaa

SEQ ID NO: 2309398 - RNA, 19 nt, Homo sapiens
  misc_RNA (1)...(19): siRNA sense strand
aagugaaggccgaggaaga

SEQ ID NO: 2309399 - RNA, 19 nt, Homo sapiens
  misc_RNA (1)...(19): siRNA sense strand
aggaagagaagaaggccaa

SEQ ID NO: 2309400 - RNA, 19 nt, Homo sapiens
  misc_RNA (1)...(19): siRNA sense strand
agaagaaggagcuggaaaa

SEQ ID NO: 2309401 - RNA, 19 nt, Homo sapiens
  misc_RNA (1)...(19): siRNA sense strand
aggagaaggagaagcacaa

SEQ ID NO: 2309402 - RNA, 19 nt, Homo sapiens
  misc_RNA (1)...(19): siRNA sense strand
aggccgaggaagagaagaa

SEQ ID NO: 2309403 - RNA, 19 nt, Homo sapiens
  misc_RNA (1)...(19): siRNA sense strand
aagaagaaggagcuggaaa

SEQ ID NO: 2309404 - RNA, 19 nt, Homo sapiens
  misc_RNA (1)...(19): siRNA sense strand
ggaagaaacaggcagccaa

SEQ ID NO: 2309405 - RNA, 19 nt, Homo sapiens
  misc_RNA (1)...(19): siRNA sense strand
acucagaggaagaggagga

SEQ ID NO: 2309406 - RNA, 19 nt, Homo sapiens
  misc_RNA (1)...(19): siRNA sense strand
aggagaagaaggagaagga

SEQ ID NO: 2309407 - RNA, 19 nt, Homo sapiens
  misc_RNA (1)...(19): siRNA sense strand
ccaagaaggaccuggagga

SEQ ID NO: 2309408 - RNA, 19 nt, Homo sapiens
  misc_RNA (1)...(19): siRNA sense strand
aggaagaggaggagggccu

SEQ ID NO: 2309409 - RNA, 19 nt, Homo sapiens
  misc_RNA (1)...(19): siRNA sense strand
agaaauugacuuugagacu

SEQ ID NO: 2309410 - RNA, 19 nt, Homo sapiens
  misc_RNA (1)...(19): siRNA sense strand
cagcaagcgggaagaaaca

SEQ ID NO: 2309411 - RNA, 19 nt, Homo sapiens
  misc_RNA (1)...(19): siRNA sense strand
aagaaggagaagaaggaga

SEQ ID NO: 2309412 - RNA, 19 nt, Homo sapiens
  misc_RNA (1)...(19): siRNA sense strand
ccuacgacucagaggaaga

SEQ ID NO: 2309413 - RNA, 19 nt, Homo sapiens
  misc_RNA (1)...(19): siRNA sense strand
gaggagagcucuucggacu

SEQ ID NO: 2309414 - RNA, 19 nt, Homo sapiens
  misc_RNA (1)...(19): siRNA sense strand
aagaagaaggacaaggaga

SEQ ID NO: 2309415 - RNA, 19 nt, Homo sapiens
  misc_RNA (1)...(19): siRNA sense strand
aggagaagcacaaagugaa

SEQ ID NO: 2309416 - RNA, 19 nt, Homo sapiens
  misc_RNA (1)...(19): siRNA sense strand
acgcaggcaagaagggcaa

SEQ ID NO: 2309417 - RNA, 19 nt, Homo sapiens
  misc_RNA (1)...(19): siRNA sense strand
aggagaagaagaagaagga

SEQ ID NO: 2309418 - RNA, 19 nt, Homo sapiens
  misc_RNA (1)...(19): siRNA sense strand
aaggagaaggagaaggaga

SEQ ID NO: 2309419 - RNA, 19 nt, Homo sapiens
  misc_RNA (1)...(19): siRNA sense strand
aaggagaaggagaagaaga

SEQ ID NO: 2309420 - RNA, 19 nt, Homo sapiens
  misc_RNA (1)...(19): siRNA sense strand
gaggaagagaagaaggcca

SEQ ID NO: 2309421 - RNA, 19 nt, Homo sapiens
  misc_RNA (1)...(19): siRNA sense strand
gugaagacgcucuggaaac

SEQ ID NO: 2309422 - RNA, 19 nt, Homo sapiens
  misc_RNA (1)...(19): siRNA sense strand
aaggagaagcacaaaguga

SEQ ID NO: 2309423 - RNA, 19 nt, Homo sapiens
  misc_RNA (1)...(19): siRNA sense strand
cggcagacagcugaagaaa

SEQ ID NO: 2309424 - RNA, 19 nt, Homo sapiens
  misc_RNA (1)...(19): siRNA sense strand
caguaaacaaaccaaagaa

SEQ ID NO: 2309425 - RNA, 19 nt, Homo sapiens
  misc_RNA (1)...(19): siRNA sense strand
gagaguacccagacgcaca

SEQ ID NO: 2309426 - RNA, 19 nt, Homo sapiens
  misc_RNA (1)...(19): siRNA sense strand
gcgugaagcggaaagcaga

SEQ ID NO: 2309427 - RNA, 19 nt, Homo sapiens
  misc_RNA (1)...(19): siRNA sense strand
ugucggagcaccugcgcua

SEQ ID NO: 2309428 - RNA, 19 nt, Homo sapiens
  misc_RNA (1)...(19): siRNA sense strand
ggacuauuaagaagagacu

SEQ ID NO: 2309429 - RNA, 19 nt, Homo sapiens
  misc_RNA (1)...(19): siRNA sense strand
ccagaugccccaagaggaa

SEQ ID NO: 2309430 - RNA, 19 nt, Homo sapiens
  misc_RNA (1)...(19): siRNA sense strand
acauagugcuaauggccca

SEQ ID NO: 2309431 - RNA, 19 nt, Homo sapiens
  misc_RNA (1)...(19): siRNA sense strand
ccggcagacagcugaagaa

SEQ ID NO: 2309432 - RNA, 19 nt, Homo sapiens
  misc_RNA (1)...(19): siRNA sense strand
gauggauggccgagaguac

SEQ ID NO: 2309433 - RNA, 19 nt, Homo sapiens
  misc_RNA (1)...(19): siRNA sense strand
aagaagaagaaggagaaga

SEQ ID NO: 2309434 - RNA, 19 nt, Homo sapiens
  misc_RNA (1)...(19): siRNA sense strand
agaagaaggcuccugccaa

SEQ ID NO: 2309435 - RNA, 19 nt, Homo sapiens
  misc_RNA (1)...(19): siRNA sense strand
gaagaaggcuccugccaag

SEQ ID NO: 2309436 - RNA, 19 nt, Homo sapiens
  misc_RNA (1)...(19): siRNA sense strand
gugaaaaggaagauggaug

SEQ ID NO: 2309437 - RNA, 19 nt, Homo sapiens
  misc_RNA (1)...(19): siRNA sense strand
gggaaaagagagagauaua

SEQ ID NO: 2309438 - RNA, 19 nt, Homo sapiens
  misc_RNA (1)...(19): siRNA sense strand
uggacaagguggacagcaa

SEQ ID NO: 2309439 - RNA, 19 nt, Homo sapiens
  misc_RNA (1)...(19): siRNA sense strand
gcauuaagugguagagaca

SEQ ID NO: 2309440 - RNA, 19 nt, Homo sapiens
  misc_RNA (1)...(19): siRNA sense strand
uggcugaaguggaggauca

SEQ ID NO: 2309441 - RNA, 19 nt, Homo sapiens
  misc_RNA (1)...(19): siRNA sense strand
agccaaugcugaagagcua

SEQ ID NO: 2309442 - RNA, 19 nt, Homo sapiens
  misc_RNA (1)...(19): siRNA sense strand
ccacaggagcuaugggaga

SEQ ID NO: 2309443 - RNA, 19 nt, Homo sapiens
  misc_RNA (1)...(19): siRNA sense strand
gggagauauuggagaggca

SEQ ID NO: 2309444 - RNA, 19 nt, Homo sapiens
  misc_RNA (1)...(19): siRNA sense strand
aguaaauggaacuggcuua

SEQ ID NO: 2309445 - RNA, 19 nt, Homo sapiens
  misc_RNA (1)...(19): siRNA sense strand
gaagaaaaggacaaggaaa

SEQ ID NO: 2309446 - RNA, 19 nt, Homo sapiens
  misc_RNA (1)...(19): siRNA sense strand
gggauauggaucagaguga

SEQ ID NO: 2309447 - RNA, 19 nt, Homo sapiens
  misc_RNA (1)...(19): siRNA sense strand
gggccaacuuugaugaaga

SEQ ID NO: 2309448 - RNA, 19 nt, Homo sapiens
  misc_RNA (1)...(19): siRNA sense strand
gagauauuggagaggcaaa

SEQ ID NO: 2309449 - RNA, 19 nt, Homo sapiens
  misc_RNA (1)...(19): siRNA sense strand
ucaaaggagggaaaggaaa

SEQ ID NO: 2309450 - RNA, 19 nt, Homo sapiens
  misc_RNA (1)...(19): siRNA sense strand
uggaucagagugagagaaa

SEQ ID NO: 2309451 - RNA, 19 nt, Homo sapiens
  misc_RNA (1)...(19): siRNA sense strand
guggacagcaagacagaua

SEQ ID NO: 2309452 - RNA, 19 nt, Homo sapiens
  misc_RNA (1)...(19): siRNA sense strand
gugagaaagguguggccua

SEQ ID NO: 2309453 - RNA, 19 nt, Homo sapiens
  misc_RNA (1)...(19): siRNA sense strand
caaaggagggaaaggaaaa

SEQ ID NO: 2309454 - RNA, 19 nt, Homo sapiens
  misc_RNA (1)...(19): siRNA sense strand
aggaggaagaggaagacaa

SEQ ID NO: 2309455 - RNA, 19 nt, Homo sapiens
  misc_RNA (1)...(19): siRNA sense strand
agagcaagauggagcccaa

SEQ ID NO: 2309456 - RNA, 19 nt, Homo sapiens
  misc_RNA (1)...(19): siRNA sense strand
caugaagaggcuugaagaa

SEQ ID NO: 2309457 - RNA, 19 nt, Homo sapiens
  misc_RNA (1)...(19): siRNA sense strand
guuaauagaucuccggcau

SEQ ID NO: 2309458 - RNA, 19 nt, Homo sapiens
  misc_RNA (1)...(19): siRNA sense strand
cguauauggaggagggagu

SEQ ID NO: 2309459 - RNA, 19 nt, Homo sapiens
  misc_RNA (1)...(19): siRNA sense strand
cgaggaaauaacaauguaa

SEQ ID NO: 2309460 - RNA, 19 nt, Homo sapiens
  misc_RNA (1)...(19): siRNA sense strand
cauugaucauucagagauu

SEQ ID NO: 2309461 - RNA, 19 nt, Homo sapiens
  misc_RNA (1)...(19): siRNA sense strand
gaacagacauggaggaagc

SEQ ID NO: 2309462 - RNA, 19 nt, Homo sapiens
  misc_RNA (1)...(19): siRNA sense strand
ugccaucagugcugggaaa

SEQ ID NO: 2309463 - RNA, 19 nt, Homo sapiens
  misc_RNA (1)...(19): siRNA sense strand
agaugacauugaagaggaa

SEQ ID NO: 2309464 - RNA, 19 nt, Homo sapiens
  misc_RNA (1)...(19): siRNA sense strand
ucgauucaaaggagggaaa

SEQ ID NO: 2309465 - RNA, 19 nt, Homo sapiens
  misc_RNA (1)...(19): siRNA sense strand
cagcaagacagauaagaca

SEQ ID NO: 2309466 - RNA, 19 nt, Homo sapiens
  misc_RNA (1)...(19): siRNA sense strand
ggguauucgagaugacauu

SEQ ID NO: 2309467 - RNA, 19 nt, Homo sapiens
  misc_RNA (1)...(19): siRNA sense strand
gcacaggaagagcggguga

SEQ ID NO: 2309468 - RNA, 19 nt, Homo sapiens
  misc_RNA (1)...(19): siRNA sense strand
augaagaggcuugaagaaa

SEQ ID NO: 2309469 - RNA, 19 nt, Homo sapiens
  misc_RNA (1)...(19): siRNA sense strand
ggaaccaggugauggacca

SEQ ID NO: 2309470 - RNA, 19 nt, Homo sapiens
  misc_RNA (1)...(19): siRNA sense strand
aagaaaagucgaugggaca

SEQ ID NO: 2309471 - RNA, 19 nt, Homo sapiens
  misc_RNA (1)...(19): siRNA sense strand
gguucaggaggaagaggaa

SEQ ID NO: 2309472 - RNA, 19 nt, Homo sapiens
  misc_RNA (1)...(19): siRNA sense strand
gaucaggcagcuagagaca

SEQ ID NO: 2309473 - RNA, 19 nt, Homo sapiens
  misc_RNA (1)...(19): siRNA sense strand
ugcaaaugauggucggaau

SEQ ID NO: 2309474 - RNA, 19 nt, Homo sapiens
  misc_RNA (1)...(19): siRNA sense strand
cgaauaaccuuaaacagga

SEQ ID NO: 2309475 - RNA, 19 nt, Homo sapiens
  misc_RNA (1)...(19): siRNA sense strand
gauauggaucagagugaga

SEQ ID NO: 2309476 - RNA, 19 nt, Homo sapiens
  misc_RNA (1)...(19): siRNA sense strand
agucacaguacaagaguca

SEQ ID NO: 2309477 - RNA, 19 nt, Homo sapiens
  misc_RNA (1)...(19): siRNA sense strand
gagaugacauugaagagga

SEQ ID NO: 2309478 - RNA, 19 nt, Homo sapiens
  misc_RNA (1)...(19): siRNA sense strand
aggaagaggaagacaaucu

SEQ ID NO: 2309479 - RNA, 19 nt, Homo sapiens
  misc_RNA (1)...(19): siRNA sense strand
ggaccuaguaaauggaacu

SEQ ID NO: 2309480 - RNA, 19 nt, Homo sapiens
  misc_RNA (1)...(19): siRNA sense strand
acgggaaaagagagagaua

SEQ ID NO: 2309481 - RNA, 19 nt, Homo sapiens
  misc_RNA (1)...(19): siRNA sense strand
acauugaagaggaagauga

SEQ ID NO: 2309482 - RNA, 19 nt, Homo sapiens
  misc_RNA (1)...(19): siRNA sense strand
aauguaagcgguuuggaaa

SEQ ID NO: 2309483 - RNA, 19 nt, Homo sapiens
  misc_RNA (1)...(19): siRNA sense strand
gcugaacauugguggagga

SEQ ID NO: 2309484 - RNA, 19 nt, Homo sapiens
  misc_RNA (1)...(19): siRNA sense strand
ggagaucgacuaacggcaa

SEQ ID NO: 2309485 - RNA, 19 nt, Homo sapiens
  misc_RNA (1)...(19): siRNA sense strand
gagaacagacauggaggaa

SEQ ID NO: 2309486 - RNA, 19 nt, Homo sapiens
  misc_RNA (1)...(19): siRNA sense strand
uugaagaugaggaagaaga

SEQ ID NO: 2309487 - RNA, 19 nt, Homo sapiens
  misc_RNA (1)...(19): siRNA sense strand
agaauaugauagugacgga

SEQ ID NO: 2309488 - RNA, 19 nt, Homo sapiens
  misc_RNA (1)...(19): siRNA sense strand
aauaugauagugacggaaa

SEQ ID NO: 2309489 - RNA, 19 nt, Homo sapiens
  misc_RNA (1)...(19): siRNA sense strand
gagaacauggaucgaggaa

SEQ ID NO: 2309490 - RNA, 19 nt, Homo sapiens
  misc_RNA (1)...(19): siRNA sense strand
ggaucgaggaaauaacaau

SEQ ID NO: 2309491 - RNA, 19 nt, Homo sapiens
  misc_RNA (1)...(19): siRNA sense strand
ggccaacuuugaugaagaa

SEQ ID NO: 2309492 - RNA, 19 nt, Homo sapiens
  misc_RNA (1)...(19): siRNA sense strand
auaugauagugacggaaau

SEQ ID NO: 2309493 - RNA, 19 nt, Homo sapiens
  misc_RNA (1)...(19): siRNA sense strand
gaauuuaccucuucaggga

SEQ ID NO: 2309494 - RNA, 19 nt, Homo sapiens
  misc_RNA (1)...(19): siRNA sense strand
gaggaagacaaucuagaau

SEQ ID NO: 2309495 - RNA, 19 nt, Homo sapiens
  misc_RNA (1)...(19): siRNA sense strand
ggcaaaugaagaugugaca

SEQ ID NO: 2309496 - RNA, 19 nt, Homo sapiens
  misc_RNA (1)...(19): siRNA sense strand
gcaagauggacaaggugga

SEQ ID NO: 2309497 - RNA, 19 nt, Homo sapiens
  misc_RNA (1)...(19): siRNA sense strand
aaaaggacaaggaaagaaa

SEQ ID NO: 2309498 - RNA, 19 nt, Homo sapiens
  misc_RNA (1)...(19): siRNA sense strand
guaugugggagcaggccaa

SEQ ID NO: 2309499 - RNA, 19 nt, Homo sapiens
  misc_RNA (1)...(19): siRNA sense strand
ugacaugggauuugaguac

SEQ ID NO: 2309500 - RNA, 19 nt, Homo sapiens
  misc_RNA (1)...(19): siRNA sense strand
accuuaaacaggaggguca

SEQ ID NO: 2309501 - RNA, 19 nt, Homo sapiens
  misc_RNA (1)...(19): siRNA sense strand
ccgccuaaacgcaagaaaa

SEQ ID NO: 2309502 - RNA, 19 nt, Homo sapiens
  misc_RNA (1)...(19): siRNA sense strand
ugaagaggaagaugaccaa

SEQ ID NO: 2309503 - RNA, 19 nt, Homo sapiens
  misc_RNA (1)...(19): siRNA sense strand
auauaauggaccagaagga

SEQ ID NO: 2309504 - RNA, 19 nt, Homo sapiens
  misc_RNA (1)...(19): siRNA sense strand
ucgacuaacggcaaugaaa

SEQ ID NO: 2309505 - RNA, 19 nt, Homo sapiens
  misc_RNA (1)...(19): siRNA sense strand
agagagauauacugagaac

SEQ ID NO: 2309506 - RNA, 19 nt, Homo sapiens
  misc_RNA (1)...(19): siRNA sense strand
acgaacaacuuaugcacca

SEQ ID NO: 2309507 - RNA, 19 nt, Homo sapiens
  misc_RNA (1)...(19): siRNA sense strand
gaacauugguggaggaggc

SEQ ID NO: 2309508 - RNA, 19 nt, Homo sapiens
  misc_RNA (1)...(19): siRNA sense strand
cauugguggaggaggccua

SEQ ID NO: 2309509 - RNA, 19 nt, Homo sapiens
  misc_RNA (1)...(19): siRNA sense strand
gggaaaagagagagauaua

SEQ ID NO: 2309510 - RNA, 19 nt, Homo sapiens
  misc_RNA (1)...(19): siRNA sense strand
uggacaagguggacagcaa

SEQ ID NO: 2309511 - RNA, 19 nt, Homo sapiens
  misc_RNA (1)...(19): siRNA sense strand
gcauuaagugguagagaca

SEQ ID NO: 2309512 - RNA, 19 nt, Homo sapiens
  misc_RNA (1)...(19): siRNA sense strand
uggcugaaguggaggauca

SEQ ID NO: 2309513 - RNA, 19 nt, Homo sapiens
  misc_RNA (1)...(19): siRNA sense strand
agccaaugcugaagagcua

SEQ ID NO: 2309514 - RNA, 19 nt, Homo sapiens
  misc_RNA (1)...(19): siRNA sense strand
ccacaggagcuaugggaga

SEQ ID NO: 2309515 - RNA, 19 nt, Homo sapiens
  misc_RNA (1)...(19): siRNA sense strand
gggagauauuggagaggca

SEQ ID NO: 2309516 - RNA, 19 nt, Homo sapiens
  misc_RNA (1)...(19): siRNA sense strand
aguaaauggaacuggcuua

SEQ ID NO: 2309517 - RNA, 19 nt, Homo sapiens
  misc_RNA (1)...(19): siRNA sense strand
gaagaaaaggacaaggaaa

SEQ ID NO: 2309518 - RNA, 19 nt, Homo sapiens
  misc_RNA (1)...(19): siRNA sense strand
gggauauggaucagaguga

SEQ ID NO: 2309519 - RNA, 19 nt, Homo sapiens
  misc_RNA (1)...(19): siRNA sense strand
gggccaacuuugaugaaga

SEQ ID NO: 2309520 - RNA, 19 nt, Homo sapiens
  misc_RNA (1)...(19): siRNA sense strand
gagauauuggagaggcaaa

SEQ ID NO: 2309521 - RNA, 19 nt, Homo sapiens
  misc_RNA (1)...(19): siRNA sense strand
ucaaaggagggaaaggaaa

SEQ ID NO: 2309522 - RNA, 19 nt, Homo sapiens
  misc_RNA (1)...(19): siRNA sense strand
uggaucagagugagagaaa

SEQ ID NO: 2309523 - RNA, 19 nt, Homo sapiens
  misc_RNA (1)...(19): siRNA sense strand
guggacagcaagacagaua

SEQ ID NO: 2309524 - RNA, 19 nt, Homo sapiens
  misc_RNA (1)...(19): siRNA sense strand
gugagaaagguguggccua

SEQ ID NO: 2309525 - RNA, 19 nt, Homo sapiens
  misc_RNA (1)...(19): siRNA sense strand
caaaggagggaaaggaaaa

SEQ ID NO: 2309526 - RNA, 19 nt, Homo sapiens
  misc_RNA (1)...(19): siRNA sense strand
aggaggaagaggaagacaa

SEQ ID NO: 2309527 - RNA, 19 nt, Homo sapiens
  misc_RNA (1)...(19): siRNA sense strand
agagcaagauggagcccaa

SEQ ID NO: 2309528 - RNA, 19 nt, Homo sapiens
  misc_RNA (1)...(19): siRNA sense strand
caugaagaggcuugaagaa

SEQ ID NO: 2309529 - RNA, 19 nt, Homo sapiens
  misc_RNA (1)...(19): siRNA sense strand
guuaauagaucuccggcau

SEQ ID NO: 2309530 - RNA, 19 nt, Homo sapiens
  misc_RNA (1)...(19): siRNA sense strand
cguauauggaggagggagu

SEQ ID NO: 2309531 - RNA, 19 nt, Homo sapiens
  misc_RNA (1)...(19): siRNA sense strand
cgaggaaauaacaauguaa

SEQ ID NO: 2309532 - RNA, 19 nt, Homo sapiens
  misc_RNA (1)...(19): siRNA sense strand
cauugaucauucagagauu

SEQ ID NO: 2309533 - RNA, 19 nt, Homo sapiens
  misc_RNA (1)...(19): siRNA sense strand
gaacagacauggaggaagc

SEQ ID NO: 2309534 - RNA, 19 nt, Homo sapiens
  misc_RNA (1)...(19): siRNA sense strand
ugccaucagugcugggaaa

SEQ ID NO: 2309535 - RNA, 19 nt, Homo sapiens
  misc_RNA (1)...(19): siRNA sense strand
agaugacauugaagaggaa

SEQ ID NO: 2309536 - RNA, 19 nt, Homo sapiens
  misc_RNA (1)...(19): siRNA sense strand
ucgauucaaaggagggaaa

SEQ ID NO: 2309537 - RNA, 19 nt, Homo sapiens
  misc_RNA (1)...(19): siRNA sense strand
cagcaagacagauaagaca

SEQ ID NO: 2309538 - RNA, 19 nt, Homo sapiens
  misc_RNA (1)...(19): siRNA sense strand
ggguauucgagaugacauu

SEQ ID NO: 2309539 - RNA, 19 nt, Homo sapiens
  misc_RNA (1)...(19): siRNA sense strand
gcacaggaagagcggguga

SEQ ID NO: 2309540 - RNA, 19 nt, Homo sapiens
  misc_RNA (1)...(19): siRNA sense strand
augaagaggcuugaagaaa

SEQ ID NO: 2309541 - RNA, 19 nt, Homo sapiens
  misc_RNA (1)...(19): siRNA sense strand
ggaaccaggugauggacca

SEQ ID NO: 2309542 - RNA, 19 nt, Homo sapiens
  misc_RNA (1)...(19): siRNA sense strand
aagaaaagucgaugggaca

SEQ ID NO: 2309543 - RNA, 19 nt, Homo sapiens
  misc_RNA (1)...(19): siRNA sense strand
gguucaggaggaagaggaa

SEQ ID NO: 2309544 - RNA, 19 nt, Homo sapiens
  misc_RNA (1)...(19): siRNA sense strand
gaucaggcagcuagagaca

SEQ ID NO: 2309545 - RNA, 19 nt, Homo sapiens
  misc_RNA (1)...(19): siRNA sense strand
ugcaaaugauggucggaau

SEQ ID NO: 2309546 - RNA, 19 nt, Homo sapiens
  misc_RNA (1)...(19): siRNA sense strand
cgaauaaccuuaaacagga

SEQ ID NO: 2309547 - RNA, 19 nt, Homo sapiens
  misc_RNA (1)...(19): siRNA sense strand
gauauggaucagagugaga

SEQ ID NO: 2309548 - RNA, 19 nt, Homo sapiens
  misc_RNA (1)...(19): siRNA sense strand
agucacaguacaagaguca

SEQ ID NO: 2309549 - RNA, 19 nt, Homo sapiens
  misc_RNA (1)...(19): siRNA sense strand
gagaugacauugaagagga

SEQ ID NO: 2309550 - RNA, 19 nt, Homo sapiens
  misc_RNA (1)...(19): siRNA sense strand
aggaagaggaagacaaucu

SEQ ID NO: 2309551 - RNA, 19 nt, Homo sapiens
  misc_RNA (1)...(19): siRNA sense strand
ggaccuaguaaauggaacu

SEQ ID NO: 2309552 - RNA, 19 nt, Homo sapiens
  misc_RNA (1)...(19): siRNA sense strand
acgggaaaagagagagaua

SEQ ID NO: 2309553 - RNA, 19 nt, Homo sapiens
  misc_RNA (1)...(19): siRNA sense strand
acauugaagaggaagauga

SEQ ID NO: 2309554 - RNA, 19 nt, Homo sapiens
  misc_RNA (1)...(19): siRNA sense strand
aauguaagcgguuuggaaa

SEQ ID NO: 2309555 - RNA, 19 nt, Homo sapiens
  misc_RNA (1)...(19): siRNA sense strand
gcugaacauugguggagga

SEQ ID NO: 2309556 - RNA, 19 nt, Homo sapiens
  misc_RNA (1)...(19): siRNA sense strand
ggagaucgacuaacggcaa

SEQ ID NO: 2309557 - RNA, 19 nt, Homo sapiens
  misc_RNA (1)...(19): siRNA sense strand
gagaacagacauggaggaa

SEQ ID NO: 2309558 - RNA, 19 nt, Homo sapiens
  misc_RNA (1)...(19): siRNA sense strand
uugaagaugaggaagaaga

SEQ ID NO: 2309559 - RNA, 19 nt, Homo sapiens
  misc_RNA (1)...(19): siRNA sense strand
agaauaugauagugacgga

SEQ ID NO: 2309560 - RNA, 19 nt, Homo sapiens
  misc_RNA (1)...(19): siRNA sense strand
aauaugauagugacggaaa

SEQ ID NO: 2309561 - RNA, 19 nt, Homo sapiens
  misc_RNA (1)...(19): siRNA sense strand
gagaacauggaucgaggaa

SEQ ID NO: 2309562 - RNA, 19 nt, Homo sapiens
  misc_RNA (1)...(19): siRNA sense strand
ggaucgaggaaauaacaau

SEQ ID NO: 2309563 - RNA, 19 nt, Homo sapiens
  misc_RNA (1)...(19): siRNA sense strand
ggccaacuuugaugaagaa

SEQ ID NO: 2309564 - RNA, 19 nt, Homo sapiens
  misc_RNA (1)...(19): siRNA sense strand
auaugauagugacggaaau

SEQ ID NO: 2309565 - RNA, 19 nt, Homo sapiens
  misc_RNA (1)...(19): siRNA sense strand
gaauuuaccucuucaggga

SEQ ID NO: 2309566 - RNA, 19 nt, Homo sapiens
  misc_RNA (1)...(19): siRNA sense strand
gaggaagacaaucuagaau

SEQ ID NO: 2309567 - RNA, 19 nt, Homo sapiens
  misc_RNA (1)...(19): siRNA sense strand
ggcaaaugaagaugugaca

SEQ ID NO: 2309568 - RNA, 19 nt, Homo sapiens
  misc_RNA (1)...(19): siRNA sense strand
gcaagauggacaaggugga

SEQ ID NO: 2309569 - RNA, 19 nt, Homo sapiens
  misc_RNA (1)...(19): siRNA sense strand
aaaaggacaaggaaagaaa

SEQ ID NO: 2309570 - RNA, 19 nt, Homo sapiens
  misc_RNA (1)...(19): siRNA sense strand
guaugugggagcaggccaa

SEQ ID NO: 2309571 - RNA, 19 nt, Homo sapiens
  misc_RNA (1)...(19): siRNA sense strand
ugacaugggauuugaguac

SEQ ID NO: 2309572 - RNA, 19 nt, Homo sapiens
  misc_RNA (1)...(19): siRNA sense strand
accuuaaacaggaggguca

SEQ ID NO: 2309573 - RNA, 19 nt, Homo sapiens
  misc_RNA (1)...(19): siRNA sense strand
ccgccuaaacgcaagaaaa

SEQ ID NO: 2309574 - RNA, 19 nt, Homo sapiens
  misc_RNA (1)...(19): siRNA sense strand
ugaagaggaagaugaccaa

SEQ ID NO: 2309575 - RNA, 19 nt, Homo sapiens
  misc_RNA (1)...(19): siRNA sense strand
auauaauggaccagaagga

SEQ ID NO: 2309576 - RNA, 19 nt, Homo sapiens
  misc_RNA (1)...(19): siRNA sense strand
ucgacuaacggcaaugaaa

SEQ ID NO: 2309577 - RNA, 19 nt, Homo sapiens
  misc_RNA (1)...(19): siRNA sense strand
agagagauauacugagaac

SEQ ID NO: 2309578 - RNA, 19 nt, Homo sapiens
  misc_RNA (1)...(19): siRNA sense strand
acgaacaacuuaugcacca

SEQ ID NO: 2309579 - RNA, 19 nt, Homo sapiens
  misc_RNA (1)...(19): siRNA sense strand
gaacauugguggaggaggc

SEQ ID NO: 2309580 - RNA, 19 nt, Homo sapiens
  misc_RNA (1)...(19): siRNA sense strand
cauugguggaggaggccua

SEQ ID NO: 2309581 - RNA, 19 nt, Homo sapiens
  misc_RNA (1)...(19): siRNA sense strand
guuagaaagaaguggaaga

SEQ ID NO: 2309582 - RNA, 19 nt, Homo sapiens
  misc_RNA (1)...(19): siRNA sense strand
cuacagagcaguuggggua

SEQ ID NO: 2309583 - RNA, 19 nt, Homo sapiens
  misc_RNA (1)...(19): siRNA sense strand
agucaggcccaucggguaa

SEQ ID NO: 2309584 - RNA, 19 nt, Homo sapiens
  misc_RNA (1)...(19): siRNA sense strand
aggacaugacugaggauga

SEQ ID NO: 2309585 - RNA, 19 nt, Homo sapiens
  misc_RNA (1)...(19): siRNA sense strand
uaauauggguggugggaug

SEQ ID NO: 2309586 - RNA, 19 nt, Homo sapiens
  misc_RNA (1)...(19): siRNA sense strand
guggagaggacuugaucau

SEQ ID NO: 2309587 - RNA, 19 nt, Homo sapiens
  misc_RNA (1)...(19): siRNA sense strand
ggguaaccgaagaugagaa

SEQ ID NO: 2309588 - RNA, 19 nt, Homo sapiens
  misc_RNA (1)...(19): siRNA sense strand
uugaaauaccaucggaaga

SEQ ID NO: 2309589 - RNA, 19 nt, Homo sapiens
  misc_RNA (1)...(19): siRNA sense strand
auuuaauaguguugggucu

SEQ ID NO: 2309590 - RNA, 19 nt, Homo sapiens
  misc_RNA (1)...(19): siRNA sense strand
ugguaauccagguggcuuu

SEQ ID NO: 2309591 - RNA, 19 nt, Homo sapiens
  misc_RNA (1)...(19): siRNA sense strand
caguuagaaagaaguggaa

SEQ ID NO: 2309592 - RNA, 19 nt, Homo sapiens
  misc_RNA (1)...(19): siRNA sense strand
gaggaugagcugcgggagu

SEQ ID NO: 2309593 - RNA, 19 nt, Homo sapiens
  misc_RNA (1)...(19): siRNA sense strand
ucauauauccaaugccgaa

SEQ ID NO: 2309594 - RNA, 19 nt, Homo sapiens
  misc_RNA (1)...(19): siRNA sense strand
augccgaaccuaagcacaa

SEQ ID NO: 2309595 - RNA, 19 nt, Homo sapiens
  misc_RNA (1)...(19): siRNA sense strand
guggagcugguuugggaaa

SEQ ID NO: 2309596 - RNA, 19 nt, Homo sapiens
  misc_RNA (1)...(19): siRNA sense strand
ggguggagcugguuuggga

SEQ ID NO: 2309597 - RNA, 19 nt, Homo sapiens
  misc_RNA (1)...(19): siRNA sense strand
ggguaauaaccaaaaccaa

SEQ ID NO: 2309598 - RNA, 19 nt, Homo sapiens
  misc_RNA (1)...(19): siRNA sense strand
acauaugauagauggacga

SEQ ID NO: 2309599 - RNA, 19 nt, Homo sapiens
  misc_RNA (1)...(19): siRNA sense strand
gaaaguaaugucacagcga

SEQ ID NO: 2309600 - RNA, 19 nt, Homo sapiens
  misc_RNA (1)...(19): siRNA sense strand
cauugaaauaccaucggaa

SEQ ID NO: 2309601 - RNA, 19 nt, Homo sapiens
  misc_RNA (1)...(19): siRNA sense strand
augaaacacaagugaaagu

SEQ ID NO: 2309602 - RNA, 19 nt, Homo sapiens
  misc_RNA (1)...(19): siRNA sense strand
acaugcagagggagccaaa

SEQ ID NO: 2309603 - RNA, 19 nt, Homo sapiens
  misc_RNA (1)...(19): siRNA sense strand
gauagauggacgauggugu

SEQ ID NO: 2309604 - RNA, 19 nt, Homo sapiens
  misc_RNA (1)...(19): siRNA sense strand
ggaaugggaugaugggcga

SEQ ID NO: 2309605 - RNA, 19 nt, Homo sapiens
  misc_RNA (1)...(19): siRNA sense strand
agagaagccucgaggguac

SEQ ID NO: 2309606 - RNA, 19 nt, Homo sapiens
  misc_RNA (1)...(19): siRNA sense strand
ccauccaggccgugagaga

SEQ ID NO: 2309607 - RNA, 19 nt, Homo sapiens
  misc_RNA (1)...(19): siRNA sense strand
ucauggaagaccuggacaa

SEQ ID NO: 2309608 - RNA, 19 nt, Homo sapiens
  misc_RNA (1)...(19): siRNA sense strand
cggcauauggagaagcaca

SEQ ID NO: 2309609 - RNA, 19 nt, Homo sapiens
  misc_RNA (1)...(19): siRNA sense strand
gcucagaaacgccuggaga

SEQ ID NO: 2309610 - RNA, 19 nt, Homo sapiens
  misc_RNA (1)...(19): siRNA sense strand
ggcauauggagaagcacaa

SEQ ID NO: 2309611 - RNA, 19 nt, Homo sapiens
  misc_RNA (1)...(19): siRNA sense strand
gguuugagaugaugcgugu

SEQ ID NO: 2309612 - RNA, 19 nt, Homo sapiens
  misc_RNA (1)...(19): siRNA sense strand
gcaucaugaaccugcagaa

SEQ ID NO: 2309613 - RNA, 19 nt, Homo sapiens
  misc_RNA (1)...(19): siRNA sense strand
cgggugaacaacagcaaca

SEQ ID NO: 2309614 - RNA, 19 nt, Homo sapiens
  misc_RNA (1)...(19): siRNA sense strand
aagaaggaguggaauggga

SEQ ID NO: 2309615 - RNA, 19 nt, Homo sapiens
  misc_RNA (1)...(19): siRNA sense strand
acaacaagcugcaugccuu

SEQ ID NO: 2309616 - RNA, 19 nt, Homo sapiens
  misc_RNA (1)...(19): siRNA sense strand
ccguuaacguguggcggaa

SEQ ID NO: 2309617 - RNA, 19 nt, Homo sapiens
  misc_RNA (1)...(19): siRNA sense strand
ccgugaaccaggccaacaa

SEQ ID NO: 2309618 - RNA, 19 nt, Homo sapiens
  misc_RNA (1)...(19): siRNA sense strand
aguccaaggcagagaaggu

SEQ ID NO: 2309619 - RNA, 19 nt, Homo sapiens
  misc_RNA (1)...(19): siRNA sense strand
gcguggaguucaaugagga

SEQ ID NO: 2309620 - RNA, 19 nt, Homo sapiens
  misc_RNA (1)...(19): siRNA sense strand
ggaaugggaugaugggcga

SEQ ID NO: 2309621 - RNA, 19 nt, Homo sapiens
  misc_RNA (1)...(19): siRNA sense strand
agagaagccucgaggguac

SEQ ID NO: 2309622 - RNA, 19 nt, Homo sapiens
  misc_RNA (1)...(19): siRNA sense strand
ccauccaggccgugagaga

SEQ ID NO: 2309623 - RNA, 19 nt, Homo sapiens
  misc_RNA (1)...(19): siRNA sense strand
ucauggaagaccuggacaa

SEQ ID NO: 2309624 - RNA, 19 nt, Homo sapiens
  misc_RNA (1)...(19): siRNA sense strand
cggcauauggagaagcaca

SEQ ID NO: 2309625 - RNA, 19 nt, Homo sapiens
  misc_RNA (1)...(19): siRNA sense strand
gcucagaaacgccuggaga

SEQ ID NO: 2309626 - RNA, 19 nt, Homo sapiens
  misc_RNA (1)...(19): siRNA sense strand
ggcauauggagaagcacaa

SEQ ID NO: 2309627 - RNA, 19 nt, Homo sapiens
  misc_RNA (1)...(19): siRNA sense strand
gguuugagaugaugcgugu

SEQ ID NO: 2309628 - RNA, 19 nt, Homo sapiens
  misc_RNA (1)...(19): siRNA sense strand
gcaucaugaaccugcagaa

SEQ ID NO: 2309629 - RNA, 19 nt, Homo sapiens
  misc_RNA (1)...(19): siRNA sense strand
cgggugaacaacagcaaca

SEQ ID NO: 2309630 - RNA, 19 nt, Homo sapiens
  misc_RNA (1)...(19): siRNA sense strand
aagaaggaguggaauggga

SEQ ID NO: 2309631 - RNA, 19 nt, Homo sapiens
  misc_RNA (1)...(19): siRNA sense strand
acaacaagcugcaugccuu

SEQ ID NO: 2309632 - RNA, 19 nt, Homo sapiens
  misc_RNA (1)...(19): siRNA sense strand
ccguuaacguguggcggaa

SEQ ID NO: 2309633 - RNA, 19 nt, Homo sapiens
  misc_RNA (1)...(19): siRNA sense strand
ccgugaaccaggccaacaa

SEQ ID NO: 2309634 - RNA, 19 nt, Homo sapiens
  misc_RNA (1)...(19): siRNA sense strand
aguccaaggcagagaaggu

SEQ ID NO: 2309635 - RNA, 19 nt, Homo sapiens
  misc_RNA (1)...(19): siRNA sense strand
gcguggaguucaaugagga

SEQ ID NO: 2309636 - RNA, 19 nt, Homo sapiens
  misc_RNA (1)...(19): siRNA sense strand
ggaaugggaugaugggcga

SEQ ID NO: 2309637 - RNA, 19 nt, Homo sapiens
  misc_RNA (1)...(19): siRNA sense strand
agagaagccucgaggguac

SEQ ID NO: 2309638 - RNA, 19 nt, Homo sapiens
  misc_RNA (1)...(19): siRNA sense strand
ccauccaggccgugagaga

SEQ ID NO: 2309639 - RNA, 19 nt, Homo sapiens
  misc_RNA (1)...(19): siRNA sense strand
ucauggaagaccuggacaa

SEQ ID NO: 2309640 - RNA, 19 nt, Homo sapiens
  misc_RNA (1)...(19): siRNA sense strand
cggcauauggagaagcaca

SEQ ID NO: 2309641 - RNA, 19 nt, Homo sapiens
  misc_RNA (1)...(19): siRNA sense strand
gcucagaaacgccuggaga

SEQ ID NO: 2309642 - RNA, 19 nt, Homo sapiens
  misc_RNA (1)...(19): siRNA sense strand
ggcauauggagaagcacaa

SEQ ID NO: 2309643 - RNA, 19 nt, Homo sapiens
  misc_RNA (1)...(19): siRNA sense strand
gguuugagaugaugcgugu

SEQ ID NO: 2309644 - RNA, 19 nt, Homo sapiens
  misc_RNA (1)...(19): siRNA sense strand
gcaucaugaaccugcagaa

SEQ ID NO: 2309645 - RNA, 19 nt, Homo sapiens
  misc_RNA (1)...(19): siRNA sense strand
cgggugaacaacagcaaca

SEQ ID NO: 2309646 - RNA, 19 nt, Homo sapiens
  misc_RNA (1)...(19): siRNA sense strand
aagaaggaguggaauggga

SEQ ID NO: 2309647 - RNA, 19 nt, Homo sapiens
  misc_RNA (1)...(19): siRNA sense strand
acaacaagcugcaugccuu

SEQ ID NO: 2309648 - RNA, 19 nt, Homo sapiens
  misc_RNA (1)...(19): siRNA sense strand
ccguuaacguguggcggaa

SEQ ID NO: 2309649 - RNA, 19 nt, Homo sapiens
  misc_RNA (1)...(19): siRNA sense strand
ccgugaaccaggccaacaa

SEQ ID NO: 2309650 - RNA, 19 nt, Homo sapiens
  misc_RNA (1)...(19): siRNA sense strand
aguccaaggcagagaaggu

SEQ ID NO: 2309651 - RNA, 19 nt, Homo sapiens
  misc_RNA (1)...(19): siRNA sense strand
gcguggaguucaaugagga

SEQ ID NO: 2309652 - RNA, 19 nt, Homo sapiens
  misc_RNA (1)...(19): siRNA sense strand
ggacagaggacaauggcuu

SEQ ID NO: 2309653 - RNA, 19 nt, Homo sapiens
  misc_RNA (1)...(19): siRNA sense strand
ccaccaagguccaaagcga

SEQ ID NO: 2309654 - RNA, 19 nt, Homo sapiens
  misc_RNA (1)...(19): siRNA sense strand
aggaaauggcugaacuaga

SEQ ID NO: 2309655 - RNA, 19 nt, Homo sapiens
  misc_RNA (1)...(19): siRNA sense strand
ucagaggagauguggucaa

SEQ ID NO: 2309656 - RNA, 19 nt, Homo sapiens
  misc_RNA (1)...(19): siRNA sense strand
gcaagagaaucccaggaca

SEQ ID NO: 2309657 - RNA, 19 nt, Homo sapiens
  misc_RNA (1)...(19): siRNA sense strand
augccuggacagaggacaa

SEQ ID NO: 2309658 - RNA, 19 nt, Homo sapiens
  misc_RNA (1)...(19): siRNA sense strand
cgagaguggguguuggaca

SEQ ID NO: 2309659 - RNA, 19 nt, Homo sapiens
  misc_RNA (1)...(19): siRNA sense strand
agauguggucaauggaaga

SEQ ID NO: 2309660 - RNA, 19 nt, Homo sapiens
  misc_RNA (1)...(19): siRNA sense strand
accacucagcagagggaua

SEQ ID NO: 2309661 - RNA, 19 nt, Homo sapiens
  misc_RNA (1)...(19): siRNA sense strand
ugaagacugcucagggcua

SEQ ID NO: 2309662 - RNA, 19 nt, Homo sapiens
  misc_RNA (1)...(19): siRNA sense strand
ggacagaggacaauggcuu

SEQ ID NO: 2309663 - RNA, 19 nt, Homo sapiens
  misc_RNA (1)...(19): siRNA sense strand
ccaccaagguccaaagcga

SEQ ID NO: 2309664 - RNA, 19 nt, Homo sapiens
  misc_RNA (1)...(19): siRNA sense strand
aggaaauggcugaacuaga

SEQ ID NO: 2309665 - RNA, 19 nt, Homo sapiens
  misc_RNA (1)...(19): siRNA sense strand
ucagaggagauguggucaa

SEQ ID NO: 2309666 - RNA, 19 nt, Homo sapiens
  misc_RNA (1)...(19): siRNA sense strand
gcaagagaaucccaggaca

SEQ ID NO: 2309667 - RNA, 19 nt, Homo sapiens
  misc_RNA (1)...(19): siRNA sense strand
augccuggacagaggacaa

SEQ ID NO: 2309668 - RNA, 19 nt, Homo sapiens
  misc_RNA (1)...(19): siRNA sense strand
cgagaguggguguuggaca

SEQ ID NO: 2309669 - RNA, 19 nt, Homo sapiens
  misc_RNA (1)...(19): siRNA sense strand
agauguggucaauggaaga

SEQ ID NO: 2309670 - RNA, 19 nt, Homo sapiens
  misc_RNA (1)...(19): siRNA sense strand
accacucagcagagggaua

SEQ ID NO: 2309671 - RNA, 19 nt, Homo sapiens
  misc_RNA (1)...(19): siRNA sense strand
ugaagacugcucagggcua

SEQ ID NO: 2309672 - RNA, 19 nt, Homo sapiens
  misc_RNA (1)...(19): siRNA sense strand
ggacagaggacaauggcuu

SEQ ID NO: 2309673 - RNA, 19 nt, Homo sapiens
  misc_RNA (1)...(19): siRNA sense strand
ccaccaagguccaaagcga

SEQ ID NO: 2309674 - RNA, 19 nt, Homo sapiens
  misc_RNA (1)...(19): siRNA sense strand
aggaaauggcugaacuaga

SEQ ID NO: 2309675 - RNA, 19 nt, Homo sapiens
  misc_RNA (1)...(19): siRNA sense strand
ucagaggagauguggucaa

SEQ ID NO: 2309676 - RNA, 19 nt, Homo sapiens
  misc_RNA (1)...(19): siRNA sense strand
gcaagagaaucccaggaca

SEQ ID NO: 2309677 - RNA, 19 nt, Homo sapiens
  misc_RNA (1)...(19): siRNA sense strand
augccuggacagaggacaa

SEQ ID NO: 2309678 - RNA, 19 nt, Homo sapiens
  misc_RNA (1)...(19): siRNA sense strand
cgagaguggguguuggaca

SEQ ID NO: 2309679 - RNA, 19 nt, Homo sapiens
  misc_RNA (1)...(19): siRNA sense strand
agauguggucaauggaaga

SEQ ID NO: 2309680 - RNA, 19 nt, Homo sapiens
  misc_RNA (1)...(19): siRNA sense strand
accacucagcagagggaua

SEQ ID NO: 2309681 - RNA, 19 nt, Homo sapiens
  misc_RNA (1)...(19): siRNA sense strand
ugaagacugcucagggcua

SEQ ID NO: 2309682 - RNA, 19 nt, Homo sapiens
  misc_RNA (1)...(19): siRNA sense strand
ggacagaggacaauggcuu

SEQ ID NO: 2309683 - RNA, 19 nt, Homo sapiens
  misc_RNA (1)...(19): siRNA sense strand
ccaccaagguccaaagcga

SEQ ID NO: 2309684 - RNA, 19 nt, Homo sapiens
  misc_RNA (1)...(19): siRNA sense strand
aggaaauggcugaacuaga

SEQ ID NO: 2309685 - RNA, 19 nt, Homo sapiens
  misc_RNA (1)...(19): siRNA sense strand
ucagaggagauguggucaa

SEQ ID NO: 2309686 - RNA, 19 nt, Homo sapiens
  misc_RNA (1)...(19): siRNA sense strand
gcaagagaaucccaggaca

SEQ ID NO: 2309687 - RNA, 19 nt, Homo sapiens
  misc_RNA (1)...(19): siRNA sense strand
augccuggacagaggacaa

SEQ ID NO: 2309688 - RNA, 19 nt, Homo sapiens
  misc_RNA (1)...(19): siRNA sense strand
cgagaguggguguuggaca

SEQ ID NO: 2309689 - RNA, 19 nt, Homo sapiens
  misc_RNA (1)...(19): siRNA sense strand
agauguggucaauggaaga

SEQ ID NO: 2309690 - RNA, 19 nt, Homo sapiens
  misc_RNA (1)...(19): siRNA sense strand
accacucagcagagggaua

SEQ ID NO: 2309691 - RNA, 19 nt, Homo sapiens
  misc_RNA (1)...(19): siRNA sense strand
ugaagacugcucagggcua

SEQ ID NO: 2309692 - RNA, 19 nt, Homo sapiens
  misc_RNA (1)...(19): siRNA sense strand
ggacagaggacaauggcuu

SEQ ID NO: 2309693 - RNA, 19 nt, Homo sapiens
  misc_RNA (1)...(19): siRNA sense strand
ccaccaagguccaaagcga

SEQ ID NO: 2309694 - RNA, 19 nt, Homo sapiens
  misc_RNA (1)...(19): siRNA sense strand
aggaaauggcugaacuaga

SEQ ID NO: 2309695 - RNA, 19 nt, Homo sapiens
  misc_RNA (1)...(19): siRNA sense strand
ucagaggagauguggucaa

SEQ ID NO: 2309696 - RNA, 19 nt, Homo sapiens
  misc_RNA (1)...(19): siRNA sense strand
gcaagagaaucccaggaca

SEQ ID NO: 2309697 - RNA, 19 nt, Homo sapiens
  misc_RNA (1)...(19): siRNA sense strand
augccuggacagaggacaa

SEQ ID NO: 2309698 - RNA, 19 nt, Homo sapiens
  misc_RNA (1)...(19): siRNA sense strand
cgagaguggguguuggaca

SEQ ID NO: 2309699 - RNA, 19 nt, Homo sapiens
  misc_RNA (1)...(19): siRNA sense strand
agauguggucaauggaaga

SEQ ID NO: 2309700 - RNA, 19 nt, Homo sapiens
  misc_RNA (1)...(19): siRNA sense strand
accacucagcagagggaua

SEQ ID NO: 2309701 - RNA, 19 nt, Homo sapiens
  misc_RNA (1)...(19): siRNA sense strand
ugaagacugcucagggcua

SEQ ID NO: 2309702 - RNA, 19 nt, Homo sapiens
  misc_RNA (1)...(19): siRNA sense strand
ggacagaggacaauggcuu

SEQ ID NO: 2309703 - RNA, 19 nt, Homo sapiens
  misc_RNA (1)...(19): siRNA sense strand
ccaccaagguccaaagcga

SEQ ID NO: 2309704 - RNA, 19 nt, Homo sapiens
  misc_RNA (1)...(19): siRNA sense strand
aggaaauggcugaacuaga

SEQ ID NO: 2309705 - RNA, 19 nt, Homo sapiens
  misc_RNA (1)...(19): siRNA sense strand
ucagaggagauguggucaa

SEQ ID NO: 2309706 - RNA, 19 nt, Homo sapiens
  misc_RNA (1)...(19): siRNA sense strand
gcaagagaaucccaggaca

SEQ ID NO: 2309707 - RNA, 19 nt, Homo sapiens
  misc_RNA (1)...(19): siRNA sense strand
augccuggacagaggacaa

SEQ ID NO: 2309708 - RNA, 19 nt, Homo sapiens
  misc_RNA (1)...(19): siRNA sense strand
cgagaguggguguuggaca

SEQ ID NO: 2309709 - RNA, 19 nt, Homo sapiens
  misc_RNA (1)...(19): siRNA sense strand
agauguggucaauggaaga

SEQ ID NO: 2309710 - RNA, 19 nt, Homo sapiens
  misc_RNA (1)...(19): siRNA sense strand
accacucagcagagggaua

SEQ ID NO: 2309711 - RNA, 19 nt, Homo sapiens
  misc_RNA (1)...(19): siRNA sense strand
ugaagacugcucagggcua

SEQ ID NO: 2309712 - RNA, 19 nt, Homo sapiens
  misc_RNA (1)...(19): siRNA sense strand
ggacagaggacaauggcuu

SEQ ID NO: 2309713 - RNA, 19 nt, Homo sapiens
  misc_RNA (1)...(19): siRNA sense strand
ccaccaagguccaaagcga

SEQ ID NO: 2309714 - RNA, 19 nt, Homo sapiens
  misc_RNA (1)...(19): siRNA sense strand
aggaaauggcugaacuaga

SEQ ID NO: 2309715 - RNA, 19 nt, Homo sapiens
  misc_RNA (1)...(19): siRNA sense strand
ucagaggagauguggucaa

SEQ ID NO: 2309716 - RNA, 19 nt, Homo sapiens
  misc_RNA (1)...(19): siRNA sense strand
gcaagagaaucccaggaca

SEQ ID NO: 2309717 - RNA, 19 nt, Homo sapiens
  misc_RNA (1)...(19): siRNA sense strand
augccuggacagaggacaa

SEQ ID NO: 2309718 - RNA, 19 nt, Homo sapiens
  misc_RNA (1)...(19): siRNA sense strand
cgagaguggguguuggaca

SEQ ID NO: 2309719 - RNA, 19 nt, Homo sapiens
  misc_RNA (1)...(19): siRNA sense strand
agauguggucaauggaaga

SEQ ID NO: 2309720 - RNA, 19 nt, Homo sapiens
  misc_RNA (1)...(19): siRNA sense strand
accacucagcagagggaua

SEQ ID NO: 2309721 - RNA, 19 nt, Homo sapiens
  misc_RNA (1)...(19): siRNA sense strand
ugaagacugcucagggcua

SEQ ID NO: 2309722 - RNA, 19 nt, Homo sapiens
  misc_RNA (1)...(19): siRNA sense strand
aggaaauggcugaacuaga

SEQ ID NO: 2309723 - RNA, 19 nt, Homo sapiens
  misc_RNA (1)...(19): siRNA sense strand
accacucagcagagggaua

SEQ ID NO: 2309724 - RNA, 19 nt, Homo sapiens
  misc_RNA (1)...(19): siRNA sense strand
ugaagacugcucagggcua

SEQ ID NO: 2309725 - RNA, 19 nt, Homo sapiens
  misc_RNA (1)...(19): siRNA sense strand
ggacagaggacaauggcuu

SEQ ID NO: 2309726 - RNA, 19 nt, Homo sapiens
  misc_RNA (1)...(19): siRNA sense strand
ccaccaagguccaaagcga

SEQ ID NO: 2309727 - RNA, 19 nt, Homo sapiens
  misc_RNA (1)...(19): siRNA sense strand
aggaaauggcugaacuaga

SEQ ID NO: 2309728 - RNA, 19 nt, Homo sapiens
  misc_RNA (1)...(19): siRNA sense strand
ucagaggagauguggucaa

SEQ ID NO: 2309729 - RNA, 19 nt, Homo sapiens
  misc_RNA (1)...(19): siRNA sense strand
gcaagagaaucccaggaca

SEQ ID NO: 2309730 - RNA, 19 nt, Homo sapiens
  misc_RNA (1)...(19): siRNA sense strand
augccuggacagaggacaa

SEQ ID NO: 2309731 - RNA, 19 nt, Homo sapiens
  misc_RNA (1)...(19): siRNA sense strand
cgagaguggguguuggaca

SEQ ID NO: 2309732 - RNA, 19 nt, Homo sapiens
  misc_RNA (1)...(19): siRNA sense strand
agauguggucaauggaaga

SEQ ID NO: 2309733 - RNA, 19 nt, Homo sapiens
  misc_RNA (1)...(19): siRNA sense strand
accacucagcagagggaua

SEQ ID NO: 2309734 - RNA, 19 nt, Homo sapiens
  misc_RNA (1)...(19): siRNA sense strand
ugaagacugcucagggcua

SEQ ID NO: 2309735 - RNA, 19 nt, Homo sapiens
  misc_RNA (1)...(19): siRNA sense strand
ggacagaggacaauggcuu

SEQ ID NO: 2309736 - RNA, 19 nt, Homo sapiens
  misc_RNA (1)...(19): siRNA sense strand
ccaccaagguccaaagcga

SEQ ID NO: 2309737 - RNA, 19 nt, Homo sapiens
  misc_RNA (1)...(19): siRNA sense strand
aggaaauggcugaacuaga

SEQ ID NO: 2309738 - RNA, 19 nt, Homo sapiens
  misc_RNA (1)...(19): siRNA sense strand
ucagaggagauguggucaa

SEQ ID NO: 2309739 - RNA, 19 nt, Homo sapiens
  misc_RNA (1)...(19): siRNA sense strand
gcaagagaaucccaggaca

SEQ ID NO: 2309740 - RNA, 19 nt, Homo sapiens
  misc_RNA (1)...(19): siRNA sense strand
augccuggacagaggacaa

SEQ ID NO: 2309741 - RNA, 19 nt, Homo sapiens
  misc_RNA (1)...(19): siRNA sense strand
cgagaguggguguuggaca

SEQ ID NO: 2309742 - RNA, 19 nt, Homo sapiens
  misc_RNA (1)...(19): siRNA sense strand
agauguggucaauggaaga

SEQ ID NO: 2309743 - RNA, 19 nt, Homo sapiens
  misc_RNA (1)...(19): siRNA sense strand
accacucagcagagggaua

SEQ ID NO: 2309744 - RNA, 19 nt, Homo sapiens
  misc_RNA (1)...(19): siRNA sense strand
ugaagacugcucagggcua

SEQ ID NO: 2309745 - RNA, 19 nt, Homo sapiens
  misc_RNA (1)...(19): siRNA sense strand
ggacagaggacaauggcuu

SEQ ID NO: 2309746 - RNA, 19 nt, Homo sapiens
  misc_RNA (1)...(19): siRNA sense strand
ccaccaagguccaaagcga

SEQ ID NO: 2309747 - RNA, 19 nt, Homo sapiens
  misc_RNA (1)...(19): siRNA sense strand
aggaaauggcugaacuaga

SEQ ID NO: 2309748 - RNA, 19 nt, Homo sapiens
  misc_RNA (1)...(19): siRNA sense strand
ucagaggagauguggucaa

SEQ ID NO: 2309749 - RNA, 19 nt, Homo sapiens
  misc_RNA (1)...(19): siRNA sense strand
gcaagagaaucccaggaca

SEQ ID NO: 2309750 - RNA, 19 nt, Homo sapiens
  misc_RNA (1)...(19): siRNA sense strand
augccuggacagaggacaa

SEQ ID NO: 2309751 - RNA, 19 nt, Homo sapiens
  misc_RNA (1)...(19): siRNA sense strand
cgagaguggguguuggaca

SEQ ID NO: 2309752 - RNA, 19 nt, Homo sapiens
  misc_RNA (1)...(19): siRNA sense strand
agauguggucaauggaaga

SEQ ID NO: 2309753 - RNA, 19 nt, Homo sapiens
  misc_RNA (1)...(19): siRNA sense strand
accacucagcagagggaua

SEQ ID NO: 2309754 - RNA, 19 nt, Homo sapiens
  misc_RNA (1)...(19): siRNA sense strand
ugaagacugcucagggcua

SEQ ID NO: 2309755 - RNA, 19 nt, Homo sapiens
  misc_RNA (1)...(19): siRNA sense strand
ggacagaggacaauggcuu

SEQ ID NO: 2309756 - RNA, 19 nt, Homo sapiens
  misc_RNA (1)...(19): siRNA sense strand
ccaccaagguccaaagcga

SEQ ID NO: 2309757 - RNA, 19 nt, Homo sapiens
  misc_RNA (1)...(19): siRNA sense strand
aggaaauggcugaacuaga

SEQ ID NO: 2309758 - RNA, 19 nt, Homo sapiens
  misc_RNA (1)...(19): siRNA sense strand
ucagaggagauguggucaa

SEQ ID NO: 2309759 - RNA, 19 nt, Homo sapiens
  misc_RNA (1)...(19): siRNA sense strand
gcaagagaaucccaggaca

SEQ ID NO: 2309760 - RNA, 19 nt, Homo sapiens
  misc_RNA (1)...(19): siRNA sense strand
augccuggacagaggacaa

SEQ ID NO: 2309761 - RNA, 19 nt, Homo sapiens
  misc_RNA (1)...(19): siRNA sense strand
cgagaguggguguuggaca

SEQ ID NO: 2309762 - RNA, 19 nt, Homo sapiens
  misc_RNA (1)...(19): siRNA sense strand
agauguggucaauggaaga

SEQ ID NO: 2309763 - RNA, 19 nt, Homo sapiens
  misc_RNA (1)...(19): siRNA sense strand
accacucagcagagggaua

SEQ ID NO: 2309764 - RNA, 19 nt, Homo sapiens
  misc_RNA (1)...(19): siRNA sense strand
ugaagacugcucagggcua

SEQ ID NO: 2309765 - RNA, 19 nt, Homo sapiens
  misc_RNA (1)...(19): siRNA sense strand
cagaagagauugaagcuga

SEQ ID NO: 2309766 - RNA, 19 nt, Homo sapiens
  misc_RNA (1)...(19): siRNA sense strand
cugcgauuacuuugagaaa

SEQ ID NO: 2309767 - RNA, 19 nt, Homo sapiens
  misc_RNA (1)...(19): siRNA sense strand
ggaugaaauggaagaaaau

SEQ ID NO: 2309768 - RNA, 19 nt, Homo sapiens
  misc_RNA (1)...(19): siRNA sense strand
gcugaagagaagaugaaca

SEQ ID NO: 2309769 - RNA, 19 nt, Homo sapiens
  misc_RNA (1)...(19): siRNA sense strand
aagagaagaugaacagcca

SEQ ID NO: 2309770 - RNA, 19 nt, Homo sapiens
  misc_RNA (1)...(19): siRNA sense strand
aagaaauuccagaagcaga

SEQ ID NO: 2309771 - RNA, 19 nt, Homo sapiens
  misc_RNA (1)...(19): siRNA sense strand
caggaugaaauggaagaaa

SEQ ID NO: 2309772 - RNA, 19 nt, Homo sapiens
  misc_RNA (1)...(19): siRNA sense strand
gcacaggaaccgaaagcac

SEQ ID NO: 2309773 - RNA, 19 nt, Homo sapiens
  misc_RNA (1)...(19): siRNA sense strand
gccaauacccucuucggaa

SEQ ID NO: 2309774 - RNA, 19 nt, Homo sapiens
  misc_RNA (1)...(19): siRNA sense strand
gggcagaacgggagaaaca

SEQ ID NO: 2309775 - RNA, 19 nt, Homo sapiens
  misc_RNA (1)...(19): siRNA sense strand
gagcuuagucagaaagaaa

SEQ ID NO: 2309776 - RNA, 19 nt, Homo sapiens
  misc_RNA (1)...(19): siRNA sense strand
gguuaaagaagcugaagaa

SEQ ID NO: 2309777 - RNA, 19 nt, Homo sapiens
  misc_RNA (1)...(19): siRNA sense strand
ucaagaaagggaagagaaa

SEQ ID NO: 2309778 - RNA, 19 nt, Homo sapiens
  misc_RNA (1)...(19): siRNA sense strand
ugucaagacuggaaacaaa

SEQ ID NO: 2309779 - RNA, 19 nt, Homo sapiens
  misc_RNA (1)...(19): siRNA sense strand
gcaaaggagaugcaagaaa

SEQ ID NO: 2309780 - RNA, 19 nt, Homo sapiens
  misc_RNA (1)...(19): siRNA sense strand
gggacaagcauuugaaaga

SEQ ID NO: 2309781 - RNA, 19 nt, Homo sapiens
  misc_RNA (1)...(19): siRNA sense strand
aguuaaaggcauuggaaga

SEQ ID NO: 2309782 - RNA, 19 nt, Homo sapiens
  misc_RNA (1)...(19): siRNA sense strand
guugaaagacaaagagauu

SEQ ID NO: 2309783 - RNA, 19 nt, Homo sapiens
  misc_RNA (1)...(19): siRNA sense strand
cagaagaagauaagcggaa

SEQ ID NO: 2309784 - RNA, 19 nt, Homo sapiens
  misc_RNA (1)...(19): siRNA sense strand
augaagaauuccagaguuu

SEQ ID NO: 2309785 - RNA, 19 nt, Homo sapiens
  misc_RNA (1)...(19): siRNA sense strand
ccacagaacuuuuggaaga

SEQ ID NO: 2309786 - RNA, 19 nt, Homo sapiens
  misc_RNA (1)...(19): siRNA sense strand
cgaaauugaaagagcaaga

SEQ ID NO: 2309787 - RNA, 19 nt, Homo sapiens
  misc_RNA (1)...(19): siRNA sense strand
agacuaagaccauggcaaa

SEQ ID NO: 2309788 - RNA, 19 nt, Homo sapiens
  misc_RNA (1)...(19): siRNA sense strand
aagccaaacuuaagaaaga

SEQ ID NO: 2309789 - RNA, 19 nt, Homo sapiens
  misc_RNA (1)...(19): siRNA sense strand
uggaaauggcacaggcuaa

SEQ ID NO: 2309790 - RNA, 19 nt, Homo sapiens
  misc_RNA (1)...(19): siRNA sense strand
gaagagaugaacaaggaaa

SEQ ID NO: 2309791 - RNA, 19 nt, Homo sapiens
  misc_RNA (1)...(19): siRNA sense strand
uggaagacgacaagagcaa

SEQ ID NO: 2309792 - RNA, 19 nt, Homo sapiens
  misc_RNA (1)...(19): siRNA sense strand
ccuugaugcucgugaagaa

SEQ ID NO: 2309793 - RNA, 19 nt, Homo sapiens
  misc_RNA (1)...(19): siRNA sense strand
ggagaaaacugaaggcaga

SEQ ID NO: 2309794 - RNA, 19 nt, Homo sapiens
  misc_RNA (1)...(19): siRNA sense strand
agcaagaagcagagacuua

SEQ ID NO: 2309795 - RNA, 19 nt, Homo sapiens
  misc_RNA (1)...(19): siRNA sense strand
ucacaaacuagaagaggaa

SEQ ID NO: 2309796 - RNA, 19 nt, Homo sapiens
  misc_RNA (1)...(19): siRNA sense strand
gagaaggacagaagaaaga

SEQ ID NO: 2309797 - RNA, 19 nt, Homo sapiens
  misc_RNA (1)...(19): siRNA sense strand
agaaagugauggagagcca

SEQ ID NO: 2309798 - RNA, 19 nt, Homo sapiens
  misc_RNA (1)...(19): siRNA sense strand
caagauaagggaaugguaa

SEQ ID NO: 2309799 - RNA, 19 nt, Homo sapiens
  misc_RNA (1)...(19): siRNA sense strand
ugguaaucgcagagacaaa

SEQ ID NO: 2309800 - RNA, 19 nt, Homo sapiens
  misc_RNA (1)...(19): siRNA sense strand
aggcagaaauggaugaaca

SEQ ID NO: 2309801 - RNA, 19 nt, Homo sapiens
  misc_RNA (1)...(19): siRNA sense strand
ggauaaaucacuucggaga

SEQ ID NO: 2309802 - RNA, 19 nt, Homo sapiens
  misc_RNA (1)...(19): siRNA sense strand
cugaaagaucaaacagaua

SEQ ID NO: 2309803 - RNA, 19 nt, Homo sapiens
  misc_RNA (1)...(19): siRNA sense strand
ugaugaaagaagagcuuaa

SEQ ID NO: 2309804 - RNA, 19 nt, Homo sapiens
  misc_RNA (1)...(19): siRNA sense strand
gugaaauggaagacgacaa

SEQ ID NO: 2309805 - RNA, 19 nt, Homo sapiens
  misc_RNA (1)...(19): siRNA sense strand
ucucaaacagcaagaauua

SEQ ID NO: 2309806 - RNA, 19 nt, Homo sapiens
  misc_RNA (1)...(19): siRNA sense strand
ucaagaaacugaagcaaaa

SEQ ID NO: 2309807 - RNA, 19 nt, Homo sapiens
  misc_RNA (1)...(19): siRNA sense strand
cgaacaucuuccagagaau

SEQ ID NO: 2309808 - RNA, 19 nt, Homo sapiens
  misc_RNA (1)...(19): siRNA sense strand
acaaaagccuagaggacaa

SEQ ID NO: 2309809 - RNA, 19 nt, Homo sapiens
  misc_RNA (1)...(19): siRNA sense strand
gaaaaggacaacaggguua

SEQ ID NO: 2309810 - RNA, 19 nt, Homo sapiens
  misc_RNA (1)...(19): siRNA sense strand
cugaagacuugguagggaa

SEQ ID NO: 2309811 - RNA, 19 nt, Homo sapiens
  misc_RNA (1)...(19): siRNA sense strand
guaacaaagaacaggaaca

SEQ ID NO: 2309812 - RNA, 19 nt, Homo sapiens
  misc_RNA (1)...(19): siRNA sense strand
cagaagaaauaccagcaaa

SEQ ID NO: 2309813 - RNA, 19 nt, Homo sapiens
  misc_RNA (1)...(19): siRNA sense strand
acaaagaauugguucagaa

SEQ ID NO: 2309814 - RNA, 19 nt, Homo sapiens
  misc_RNA (1)...(19): siRNA sense strand
cagaaauggaugaacaaau

SEQ ID NO: 2309815 - RNA, 19 nt, Homo sapiens
  misc_RNA (1)...(19): siRNA sense strand
agaacaaauugcuaagcua

SEQ ID NO: 2309816 - RNA, 19 nt, Homo sapiens
  misc_RNA (1)...(19): siRNA sense strand
ccacauagaagaaaugaau

SEQ ID NO: 2309817 - RNA, 19 nt, Homo sapiens
  misc_RNA (1)...(19): siRNA sense strand
cauuaaagaacacgaggua

SEQ ID NO: 2309818 - RNA, 19 nt, Homo sapiens
  misc_RNA (1)...(19): siRNA sense strand
acuugaagaugguaacaaa

SEQ ID NO: 2309819 - RNA, 19 nt, Homo sapiens
  misc_RNA (1)...(19): siRNA sense strand
ggaaggaggcaaucagcaa

SEQ ID NO: 2309820 - RNA, 19 nt, Homo sapiens
  misc_RNA (1)...(19): siRNA sense strand
gguuguugauguaaugaaa

SEQ ID NO: 2309821 - RNA, 19 nt, Homo sapiens
  misc_RNA (1)...(19): siRNA sense strand
ucggagaauagcagaauua

SEQ ID NO: 2309822 - RNA, 19 nt, Homo sapiens
  misc_RNA (1)...(19): siRNA sense strand
cuacagaagcuucaugaaa

SEQ ID NO: 2309823 - RNA, 19 nt, Homo sapiens
  misc_RNA (1)...(19): siRNA sense strand
ccacacaugagcagacaaa

SEQ ID NO: 2309824 - RNA, 19 nt, Homo sapiens
  misc_RNA (1)...(19): siRNA sense strand
aagaacaggaacagacaaa

SEQ ID NO: 2309825 - RNA, 19 nt, Homo sapiens
  misc_RNA (1)...(19): siRNA sense strand
agagaaaagcugaacaaaa

SEQ ID NO: 2309826 - RNA, 19 nt, Homo sapiens
  misc_RNA (1)...(19): siRNA sense strand
agaaagaaguacauagagu

SEQ ID NO: 2309827 - RNA, 19 nt, Homo sapiens
  misc_RNA (1)...(19): siRNA sense strand
acaaagaacaguugauuca

SEQ ID NO: 2309828 - RNA, 19 nt, Homo sapiens
  misc_RNA (1)...(19): siRNA sense strand
cagaagaacaaauugcuaa

SEQ ID NO: 2309829 - RNA, 19 nt, Homo sapiens
  misc_RNA (1)...(19): siRNA sense strand
aggaacaguuaaagcagaa

SEQ ID NO: 2309830 - RNA, 19 nt, Homo sapiens
  misc_RNA (1)...(19): siRNA sense strand
acagauggauggaagaaau

SEQ ID NO: 2309831 - RNA, 19 nt, Homo sapiens
  misc_RNA (1)...(19): siRNA sense strand
aagcaaaggagaugcaaga

SEQ ID NO: 2309832 - RNA, 19 nt, Homo sapiens
  misc_RNA (1)...(19): siRNA sense strand
cagaaagccauuugaguga

SEQ ID NO: 2309833 - RNA, 19 nt, Homo sapiens
  misc_RNA (1)...(19): siRNA sense strand
cagaagacauaugaagaaa

SEQ ID NO: 2309834 - RNA, 19 nt, Homo sapiens
  misc_RNA (1)...(19): siRNA sense strand
aagaggagcuugaagaaaa

SEQ ID NO: 2309835 - RNA, 19 nt, Homo sapiens
  misc_RNA (1)...(19): siRNA sense strand
gggaaaauauucugagcuu

SEQ ID NO: 2309836 - RNA, 19 nt, Homo sapiens
  misc_RNA (1)...(19): siRNA sense strand
aggaaagggacaagcauuu

SEQ ID NO: 2309837 - RNA, 19 nt, Homo sapiens
  misc_RNA (1)...(19): siRNA sense strand
aagcaaaucuugguggaaa

SEQ ID NO: 2309838 - RNA, 19 nt, Homo sapiens
  misc_RNA (1)...(19): siRNA sense strand
guauaacacaguugaagaa

SEQ ID NO: 2309839 - RNA, 19 nt, Homo sapiens
  misc_RNA (1)...(19): siRNA sense strand
agauccagcuugaguuaaa

SEQ ID NO: 2309840 - RNA, 19 nt, Homo sapiens
  misc_RNA (1)...(19): siRNA sense strand
aggcaaagcaacaugaaga

SEQ ID NO: 2309841 - RNA, 19 nt, Homo sapiens
  misc_RNA (1)...(19): siRNA sense strand
acauagaguugaaauggaa

SEQ ID NO: 2309842 - RNA, 19 nt, Homo sapiens
  misc_RNA (1)...(19): siRNA sense strand
agaaacagaaacugggcaa

SEQ ID NO: 2309843 - RNA, 19 nt, Homo sapiens
  misc_RNA (1)...(19): siRNA sense strand
cgguaaaguuggugaagau

SEQ ID NO: 2309844 - RNA, 19 nt, Homo sapiens
  misc_RNA (1)...(19): siRNA sense strand
ugauaaagauguuggucaa

SEQ ID NO: 2309845 - RNA, 19 nt, Homo sapiens
  misc_RNA (1)...(19): siRNA sense strand
gagaagaagaugaagaaau

SEQ ID NO: 2309846 - RNA, 19 nt, Homo sapiens
  misc_RNA (1)...(19): siRNA sense strand
gugaagaagaggaggauga

SEQ ID NO: 2309847 - RNA, 19 nt, Homo sapiens
  misc_RNA (1)...(19): siRNA sense strand
gacuauagaauuugggaaa

SEQ ID NO: 2309848 - RNA, 19 nt, Homo sapiens
  misc_RNA (1)...(19): siRNA sense strand
gcauaaaacaucugguaaa

SEQ ID NO: 2309849 - RNA, 19 nt, Homo sapiens
  misc_RNA (1)...(19): siRNA sense strand
gcgcgguguuggagauaua

SEQ ID NO: 2309850 - RNA, 19 nt, Homo sapiens
  misc_RNA (1)...(19): siRNA sense strand
guucaugcuuagugcgaaa

SEQ ID NO: 2309851 - RNA, 19 nt, Homo sapiens
  misc_RNA (1)...(19): siRNA sense strand
aguaaaaucuggagaagaa

SEQ ID NO: 2309852 - RNA, 19 nt, Homo sapiens
  misc_RNA (1)...(19): siRNA sense strand
guuuaaagagagagccaaa

SEQ ID NO: 2309853 - RNA, 19 nt, Homo sapiens
  misc_RNA (1)...(19): siRNA sense strand
aggaaaggacagugggauu

SEQ ID NO: 2309854 - RNA, 19 nt, Homo sapiens
  misc_RNA (1)...(19): siRNA sense strand
gggaagaugcuuuggauga

SEQ ID NO: 2309855 - RNA, 19 nt, Homo sapiens
  misc_RNA (1)...(19): siRNA sense strand
aaacaagaaucaugagaca

SEQ ID NO: 2309856 - RNA, 19 nt, Homo sapiens
  misc_RNA (1)...(19): siRNA sense strand
ucuaaugagacgagagcaa

SEQ ID NO: 2309857 - RNA, 19 nt, Homo sapiens
  misc_RNA (1)...(19): siRNA sense strand
ucauaaaccuauugcagaa

SEQ ID NO: 2309858 - RNA, 19 nt, Homo sapiens
  misc_RNA (1)...(19): siRNA sense strand
ggacaaaaucugcuggaaa

SEQ ID NO: 2309859 - RNA, 19 nt, Homo sapiens
  misc_RNA (1)...(19): siRNA sense strand
gcagauaaugagaaagaau

SEQ ID NO: 2309860 - RNA, 19 nt, Homo sapiens
  misc_RNA (1)...(19): siRNA sense strand
aaucuaaacccaagcaaua

SEQ ID NO: 2309861 - RNA, 19 nt, Homo sapiens
  misc_RNA (1)...(19): siRNA sense strand
uggcauggauacugugaaa

SEQ ID NO: 2309862 - RNA, 19 nt, Homo sapiens
  misc_RNA (1)...(19): siRNA sense strand
ggaagaaaacacagacaaa

SEQ ID NO: 2309863 - RNA, 19 nt, Homo sapiens
  misc_RNA (1)...(19): siRNA sense strand
acuaugcacuggagagaaa

SEQ ID NO: 2309864 - RNA, 19 nt, Homo sapiens
  misc_RNA (1)...(19): siRNA sense strand
cagcagauaaugagaaaga

SEQ ID NO: 2309865 - RNA, 19 nt, Homo sapiens
  misc_RNA (1)...(19): siRNA sense strand
aggugaagauggauggaau

SEQ ID NO: 2309866 - RNA, 19 nt, Homo sapiens
  misc_RNA (1)...(19): siRNA sense strand
caaguagcccugugagaaa

SEQ ID NO: 2309867 - RNA, 19 nt, Homo sapiens
  misc_RNA (1)...(19): siRNA sense strand
gugcaggaaaguagagaau

SEQ ID NO: 2309868 - RNA, 19 nt, Homo sapiens
  misc_RNA (1)...(19): siRNA sense strand
ccauaaacuuguagauacu

SEQ ID NO: 2309869 - RNA, 19 nt, Homo sapiens
  misc_RNA (1)...(19): siRNA sense strand
ugaagaugguagugaugaa

SEQ ID NO: 2309870 - RNA, 19 nt, Homo sapiens
  misc_RNA (1)...(19): siRNA sense strand
gcauguaguauuuggguuu

SEQ ID NO: 2309871 - RNA, 19 nt, Homo sapiens
  misc_RNA (1)...(19): siRNA sense strand
gcuugaaagagcagccaaa

SEQ ID NO: 2309872 - RNA, 19 nt, Homo sapiens
  misc_RNA (1)...(19): siRNA sense strand
aaauaaggguucagguaca

SEQ ID NO: 2309873 - RNA, 19 nt, Homo sapiens
  misc_RNA (1)...(19): siRNA sense strand
gcauaguaguaauguucaa

SEQ ID NO: 2309874 - RNA, 19 nt, Homo sapiens
  misc_RNA (1)...(19): siRNA sense strand
ucacuaagaaggagggaca

SEQ ID NO: 2309875 - RNA, 19 nt, Homo sapiens
  misc_RNA (1)...(19): siRNA sense strand
ucacuaagaaggagggaca

SEQ ID NO: 2309876 - RNA, 19 nt, Homo sapiens
  misc_RNA (1)...(19): siRNA sense strand
aaugaagaguggacugaaa

SEQ ID NO: 2309877 - RNA, 19 nt, Homo sapiens
  misc_RNA (1)...(19): siRNA sense strand
agauguuggucaauggaaa

SEQ ID NO: 2309878 - RNA, 19 nt, Homo sapiens
  misc_RNA (1)...(19): siRNA sense strand
caguugaagagaaggcaaa

SEQ ID NO: 2309879 - RNA, 19 nt, Homo sapiens
  misc_RNA (1)...(19): siRNA sense strand
agauuaugcugauggagaa

SEQ ID NO: 2309880 - RNA, 19 nt, Homo sapiens
  misc_RNA (1)...(19): siRNA sense strand
auggaaagaacgugggauu

SEQ ID NO: 2309881 - RNA, 19 nt, Homo sapiens
  misc_RNA (1)...(19): siRNA sense strand
ccacaagucaugauaacaa

SEQ ID NO: 2309882 - RNA, 19 nt, Homo sapiens
  misc_RNA (1)...(19): siRNA sense strand
gcugaugcgaagagaacaa

SEQ ID NO: 2309883 - RNA, 19 nt, Homo sapiens
  misc_RNA (1)...(19): siRNA sense strand
gcaaaauacuggcuugaaa

SEQ ID NO: 2309884 - RNA, 19 nt, Homo sapiens
  misc_RNA (1)...(19): siRNA sense strand
cucaagaagaagagagaga

SEQ ID NO: 2309885 - RNA, 19 nt, Homo sapiens
  misc_RNA (1)...(19): siRNA sense strand
ggaaauugauacagauucu

SEQ ID NO: 2309886 - RNA, 19 nt, Homo sapiens
  misc_RNA (1)...(19): siRNA sense strand
ugguagugaugaagaagua

SEQ ID NO: 2309887 - RNA, 19 nt, Homo sapiens
  misc_RNA (1)...(19): siRNA sense strand
cgaaaugcagauucagaaa

SEQ ID NO: 2309888 - RNA, 19 nt, Homo sapiens
  misc_RNA (1)...(19): siRNA sense strand
aggaagaugaagaagaauu

SEQ ID NO: 2309889 - RNA, 19 nt, Homo sapiens
  misc_RNA (1)...(19): siRNA sense strand
acuuguaacaggagaagaa

SEQ ID NO: 2309890 - RNA, 19 nt, Homo sapiens
  misc_RNA (1)...(19): siRNA sense strand
ugauguuacucaagaagaa

SEQ ID NO: 2309891 - RNA, 19 nt, Homo sapiens
  misc_RNA (1)...(19): siRNA sense strand
cagaauaacuccagacaug

SEQ ID NO: 2309892 - RNA, 19 nt, Homo sapiens
  misc_RNA (1)...(19): siRNA sense strand
cugaugaagacaauggaaa

SEQ ID NO: 2309893 - RNA, 19 nt, Homo sapiens
  misc_RNA (1)...(19): siRNA sense strand
aguagaggccauuaagaaa

SEQ ID NO: 2309894 - RNA, 19 nt, Homo sapiens
  misc_RNA (1)...(19): siRNA sense strand
aggcugacguggagcggua

SEQ ID NO: 2309895 - RNA, 19 nt, Homo sapiens
  misc_RNA (1)...(19): siRNA sense strand
ugaugaagacaauggaaau

SEQ ID NO: 2309896 - RNA, 19 nt, Homo sapiens
  misc_RNA (1)...(19): siRNA sense strand
cagaauguggacagauaua

SEQ ID NO: 2309897 - RNA, 19 nt, Homo sapiens
  misc_RNA (1)...(19): siRNA sense strand
gggcagaagaucagaauuc

SEQ ID NO: 2309898 - RNA, 19 nt, Homo sapiens
  misc_RNA (1)...(19): siRNA sense strand
agucaugauaacaaggaua

SEQ ID NO: 2309899 - RNA, 19 nt, Homo sapiens
  misc_RNA (1)...(19): siRNA sense strand
cagaaaaggcaaaagagaa

SEQ ID NO: 2309900 - RNA, 19 nt, Homo sapiens
  misc_RNA (1)...(19): siRNA sense strand
ccagaaaggacauguauca

SEQ ID NO: 2309901 - RNA, 19 nt, Homo sapiens
  misc_RNA (1)...(19): siRNA sense strand
cugcagaaucuaagacuau

SEQ ID NO: 2309902 - RNA, 19 nt, Homo sapiens
  misc_RNA (1)...(19): siRNA sense strand
ugaugaagauuucgaaaca

SEQ ID NO: 2309903 - RNA, 19 nt, Homo sapiens
  misc_RNA (1)...(19): siRNA sense strand
caagaauagaccagauuau

SEQ ID NO: 2309904 - RNA, 19 nt, Homo sapiens
  misc_RNA (1)...(19): siRNA sense strand
ccucugaaacuauggacaa

SEQ ID NO: 2309905 - RNA, 19 nt, Homo sapiens
  misc_RNA (1)...(19): siRNA sense strand
uggagaagaagaugaagaa

SEQ ID NO: 2309906 - RNA, 19 nt, Homo sapiens
  misc_RNA (1)...(19): siRNA sense strand
gcagaauuaucaaaggaga

SEQ ID NO: 2309907 - RNA, 19 nt, Homo sapiens
  misc_RNA (1)...(19): siRNA sense strand
cgaugauauuggaaacauu

SEQ ID NO: 2309908 - RNA, 19 nt, Homo sapiens
  misc_RNA (1)...(19): siRNA sense strand
ggugaaggauuaaggccau

SEQ ID NO: 2309909 - RNA, 19 nt, Homo sapiens
  misc_RNA (1)...(19): siRNA sense strand
uugcagauggagaaagaaa

SEQ ID NO: 2309910 - RNA, 19 nt, Homo sapiens
  misc_RNA (1)...(19): siRNA sense strand
uggcauacaaugaagaauu

SEQ ID NO: 2309911 - RNA, 19 nt, Homo sapiens
  misc_RNA (1)...(19): siRNA sense strand
caccaaacaugauggaaca

SEQ ID NO: 2309912 - RNA, 19 nt, Homo sapiens
  misc_RNA (1)...(19): siRNA sense strand
augacuaaguugagagaau

SEQ ID NO: 2309913 - RNA, 19 nt, Homo sapiens
  misc_RNA (1)...(19): siRNA sense strand
cuuugaaaucagaggaauu

SEQ ID NO: 2309914 - RNA, 19 nt, Homo sapiens
  misc_RNA (1)...(19): siRNA sense strand
cggaauuguacuuugagaa

SEQ ID NO: 2309915 - RNA, 19 nt, Homo sapiens
  misc_RNA (1)...(19): siRNA sense strand
gguuuauauucgaagcaca

SEQ ID NO: 2309916 - RNA, 19 nt, Homo sapiens
  misc_RNA (1)...(19): siRNA sense strand
ggaaugagacgcagcacga

SEQ ID NO: 2309917 - RNA, 19 nt, Homo sapiens
  misc_RNA (1)...(19): siRNA sense strand
aguacuuuguggagaugua

SEQ ID NO: 2309918 - RNA, 19 nt, Homo sapiens
  misc_RNA (1)...(19): siRNA sense strand
cggacuuugaugagugcua

SEQ ID NO: 2309919 - RNA, 19 nt, Homo sapiens
  misc_RNA (1)...(19): siRNA sense strand
ugaugagugcuaugacaaa

SEQ ID NO: 2309920 - RNA, 19 nt, Homo sapiens
  misc_RNA (1)...(19): siRNA sense strand
auucacaagcagaaagaga

SEQ ID NO: 2309921 - RNA, 19 nt, Homo sapiens
  misc_RNA (1)...(19): siRNA sense strand
uugagagaauugucagaau

SEQ ID NO: 2309922 - RNA, 19 nt, Homo sapiens
  misc_RNA (1)...(19): siRNA sense strand
cuuggagaguauauaagaa

SEQ ID NO: 2309923 - RNA, 19 nt, Homo sapiens
  misc_RNA (1)...(19): siRNA sense strand
uuauagcuaccuugggaaa

SEQ ID NO: 2309924 - RNA, 19 nt, Homo sapiens
  misc_RNA (1)...(19): siRNA sense strand
cuuuauauugugagagugu

SEQ ID NO: 2309925 - RNA, 19 nt, Homo sapiens
  misc_RNA (1)...(19): siRNA sense strand
gcacagacguugaccggac

SEQ ID NO: 2309926 - RNA, 19 nt, Homo sapiens
  misc_RNA (1)...(19): siRNA sense strand
ugggcauggagcagcauua

SEQ ID NO: 2309927 - RNA, 19 nt, Homo sapiens
  misc_RNA (1)...(19): siRNA sense strand
gcuagaccgaaguguacua

SEQ ID NO: 2309928 - RNA, 19 nt, Homo sapiens
  misc_RNA (1)...(19): siRNA sense strand
acucagauaccaagcuaca

SEQ ID NO: 2309929 - RNA, 19 nt, Homo sapiens
  misc_RNA (1)...(19): siRNA sense strand
agacgcagcacgagccgua

SEQ ID NO: 2309930 - RNA, 19 nt, Homo sapiens
  misc_RNA (1)...(19): siRNA sense strand
gguaauggucaauggccaa

SEQ ID NO: 2309931 - RNA, 19 nt, Homo sapiens
  misc_RNA (1)...(19): siRNA sense strand
acacugagaugaaggagga

SEQ ID NO: 2309932 - RNA, 19 nt, Homo sapiens
  misc_RNA (1)...(19): siRNA sense strand
cugugaagauggugcaagu

SEQ ID NO: 2309933 - RNA, 19 nt, Homo sapiens
  misc_RNA (1)...(19): siRNA sense strand
agguaauggucaauggcca

SEQ ID NO: 2309934 - RNA, 19 nt, Homo sapiens
  misc_RNA (1)...(19): siRNA sense strand
aagaauuugaacugagcau

SEQ ID NO: 2309935 - RNA, 19 nt, Homo sapiens
  misc_RNA (1)...(19): siRNA sense strand
augaagaagagcugaucaa

SEQ ID NO: 2309936 - RNA, 19 nt, Homo sapiens
  misc_RNA (1)...(19): siRNA sense strand
ccgagcaggagguggaaaa

SEQ ID NO: 2309937 - RNA, 19 nt, Homo sapiens
  misc_RNA (1)...(19): siRNA sense strand
gaugauuucuucaagguga

SEQ ID NO: 2309938 - RNA, 19 nt, Homo sapiens
  misc_RNA (1)...(19): siRNA sense strand
gcaaacaucugcugagccu

SEQ ID NO: 2309939 - RNA, 19 nt, Homo sapiens
  misc_RNA (1)...(19): siRNA sense strand
acaaguacccugugccaga

SEQ ID NO: 2309940 - RNA, 19 nt, Homo sapiens
  misc_RNA (1)...(19): siRNA sense strand
gagcugaaguggagcgagc

SEQ ID NO: 2309941 - RNA, 19 nt, Homo sapiens
  misc_RNA (1)...(19): siRNA sense strand
ugcagaaugaggaggguga

SEQ ID NO: 2309942 - RNA, 19 nt, Homo sapiens
  misc_RNA (1)...(19): siRNA sense strand
uguaugucuuugauggcaa

SEQ ID NO: 2309943 - RNA, 19 nt, Homo sapiens
  misc_RNA (1)...(19): siRNA sense strand
gcaugauggagaacggcau

SEQ ID NO: 2309944 - RNA, 19 nt, Homo sapiens
  misc_RNA (1)...(19): siRNA sense strand
gugccauccgggagaauga

SEQ ID NO: 2309945 - RNA, 19 nt, Homo sapiens
  misc_RNA (1)...(19): siRNA sense strand
cagagaagcagcugcagca

SEQ ID NO: 2309946 - RNA, 19 nt, Homo sapiens
  misc_RNA (1)...(19): siRNA sense strand
uccagaagcacaagagcau

SEQ ID NO: 2309947 - RNA, 19 nt, Homo sapiens
  misc_RNA (1)...(19): siRNA sense strand
gcacaagagcaucgaggag

SEQ ID NO: 2309948 - RNA, 19 nt, Homo sapiens
  misc_RNA (1)...(19): siRNA sense strand
uccacuaagaagaaggcaa

SEQ ID NO: 2309949 - RNA, 19 nt, Homo sapiens
  misc_RNA (1)...(19): siRNA sense strand
ggugacuagucguggaaua

SEQ ID NO: 2309950 - RNA, 19 nt, Homo sapiens
  misc_RNA (1)...(19): siRNA sense strand
gggauuuaucggagcaaua

SEQ ID NO: 2309951 - RNA, 19 nt, Homo sapiens
  misc_RNA (1)...(19): siRNA sense strand
gaauggaagcacagggcaa

SEQ ID NO: 2309952 - RNA, 19 nt, Homo sapiens
  misc_RNA (1)...(19): siRNA sense strand
agauggagauucuggcaaa

SEQ ID NO: 2309953 - RNA, 19 nt, Homo sapiens
  misc_RNA (1)...(19): siRNA sense strand
acaugagcgaugagagaaa

SEQ ID NO: 2309954 - RNA, 19 nt, Homo sapiens
  misc_RNA (1)...(19): siRNA sense strand
ccaucaagguguacggaca

SEQ ID NO: 2309955 - RNA, 19 nt, Homo sapiens
  misc_RNA (1)...(19): siRNA sense strand
ggaucaugauucaggaaca

SEQ ID NO: 2309956 - RNA, 19 nt, Homo sapiens
  misc_RNA (1)...(19): siRNA sense strand
agacaugagcgaugagaga

SEQ ID NO: 2309957 - RNA, 19 nt, Homo sapiens
  misc_RNA (1)...(19): siRNA sense strand
auaggaaacuggagcgauu

SEQ ID NO: 2309958 - RNA, 19 nt, Homo sapiens
  misc_RNA (1)...(19): siRNA sense strand
agcaaagauuccagcauaa

SEQ ID NO: 2309959 - RNA, 19 nt, Homo sapiens
  misc_RNA (1)...(19): siRNA sense strand
ggucauaauuacacguuca

SEQ ID NO: 2309960 - RNA, 19 nt, Homo sapiens
  misc_RNA (1)...(19): siRNA sense strand
ccaacaagcagcuguggaa

SEQ ID NO: 2309961 - RNA, 19 nt, Homo sapiens
  misc_RNA (1)...(19): siRNA sense strand
ucaagaacuuauuggucaa

SEQ ID NO: 2309962 - RNA, 19 nt, Homo sapiens
  misc_RNA (1)...(19): siRNA sense strand
aagcaagagaggagaacuu

SEQ ID NO: 2309963 - RNA, 19 nt, Homo sapiens
  misc_RNA (1)...(19): siRNA sense strand
gcacagggcaagaggugau

SEQ ID NO: 2309964 - RNA, 19 nt, Homo sapiens
  misc_RNA (1)...(19): siRNA sense strand
agguuaaaguacagguuca

SEQ ID NO: 2309965 - RNA, 19 nt, Homo sapiens
  misc_RNA (1)...(19): siRNA sense strand
cuggagacccacagcaaua

SEQ ID NO: 2309966 - RNA, 19 nt, Homo sapiens
  misc_RNA (1)...(19): siRNA sense strand
cacgggauauggagagaaa

SEQ ID NO: 2309967 - RNA, 19 nt, Homo sapiens
  misc_RNA (1)...(19): siRNA sense strand
guuggagccuggcgggaaa

SEQ ID NO: 2309968 - RNA, 19 nt, Homo sapiens
  misc_RNA (1)...(19): siRNA sense strand
ccacaugcuucaauggaga

SEQ ID NO: 2309969 - RNA, 19 nt, Homo sapiens
  misc_RNA (1)...(19): siRNA sense strand
auaucaaggugaauggcua

SEQ ID NO: 2309970 - RNA, 19 nt, Homo sapiens
  misc_RNA (1)...(19): siRNA sense strand
ggaaauccaucuaccgcua

SEQ ID NO: 2309971 - RNA, 19 nt, Homo sapiens
  misc_RNA (1)...(19): siRNA sense strand
ugggaauacuacugacaau

SEQ ID NO: 2309972 - RNA, 19 nt, Homo sapiens
  misc_RNA (1)...(19): siRNA sense strand
ugucuuacgacuauggaaa

SEQ ID NO: 2309973 - RNA, 19 nt, Homo sapiens
  misc_RNA (1)...(19): siRNA sense strand
uggaaaugugacagggaga

SEQ ID NO: 2309974 - RNA, 19 nt, Homo sapiens
  misc_RNA (1)...(19): siRNA sense strand
ucaguaaggaugagcagua

SEQ ID NO: 2309975 - RNA, 19 nt, Homo sapiens
  misc_RNA (1)...(19): siRNA sense strand
gggaacaugagcaaagauu

SEQ ID NO: 2309976 - RNA, 19 nt, Homo sapiens
  misc_RNA (1)...(19): siRNA sense strand
cuaugaaugaggagaacau

SEQ ID NO: 2309977 - RNA, 19 nt, Homo sapiens
  misc_RNA (1)...(19): siRNA sense strand
gggaggacuaugaguguga

SEQ ID NO: 2309978 - RNA, 19 nt, Homo sapiens
  misc_RNA (1)...(19): siRNA sense strand
ggucauugucaguaaggau

SEQ ID NO: 2309979 - RNA, 19 nt, Homo sapiens
  misc_RNA (1)...(19): siRNA sense strand
agacggucauugucaguaa

SEQ ID NO: 2309980 - RNA, 19 nt, Homo sapiens
  misc_RNA (1)...(19): siRNA sense strand
aagcaggggcuaugagaua

SEQ ID NO: 2309981 - RNA, 19 nt, Homo sapiens
  misc_RNA (1)...(19): siRNA sense strand
gcucagugggaaagaacuu

SEQ ID NO: 2309982 - RNA, 19 nt, Homo sapiens
  misc_RNA (1)...(19): siRNA sense strand
agaagaagugcaauggauu

SEQ ID NO: 2309983 - RNA, 19 nt, Homo sapiens
  misc_RNA (1)...(19): siRNA sense strand
cgggauauggagagaaaau

SEQ ID NO: 2309984 - RNA, 19 nt, Homo sapiens
  misc_RNA (1)...(19): siRNA sense strand
uggaaaccaacgagcuaaa

SEQ ID NO: 2309985 - RNA, 19 nt, Homo sapiens
  misc_RNA (1)...(19): siRNA sense strand
cagcaaacauugugauggu

SEQ ID NO: 2309986 - RNA, 19 nt, Homo sapiens
  misc_RNA (1)...(19): siRNA sense strand
cauggaaaccaacgagcua

SEQ ID NO: 2309987 - RNA, 19 nt, Homo sapiens
  misc_RNA (1)...(19): siRNA sense strand
cuguaugcugugaggaaau

SEQ ID NO: 2309988 - RNA, 19 nt, Homo sapiens
  misc_RNA (1)...(19): siRNA sense strand
gggacuggucugaugagaa

SEQ ID NO: 2309989 - RNA, 19 nt, Homo sapiens
  misc_RNA (1)...(19): siRNA sense strand
ccaucuacauugaacgaca

SEQ ID NO: 2309990 - RNA, 19 nt, Homo sapiens
  misc_RNA (1)...(19): siRNA sense strand
gcucgaacaaagagaaugu

SEQ ID NO: 2309991 - RNA, 19 nt, Homo sapiens
  misc_RNA (1)...(19): siRNA sense strand
cggacagguuagucugaau

SEQ ID NO: 2309992 - RNA, 19 nt, Homo sapiens
  misc_RNA (1)...(19): siRNA sense strand
uggaauacacccuuaacaa

SEQ ID NO: 2309993 - RNA, 19 nt, Homo sapiens
  misc_RNA (1)...(19): siRNA sense strand
cuugaggaagugagagauu

SEQ ID NO: 2309994 - RNA, 19 nt, Homo sapiens
  misc_RNA (1)...(19): siRNA sense strand
ggaagaacacuggaagcaa

SEQ ID NO: 2309995 - RNA, 19 nt, Homo sapiens
  misc_RNA (1)...(19): siRNA sense strand
cugcagguguccagaggau

SEQ ID NO: 2309996 - RNA, 19 nt, Homo sapiens
  misc_RNA (1)...(19): siRNA sense strand
gcaacgugaucguggccuu

SEQ ID NO: 2309997 - RNA, 19 nt, Homo sapiens
  misc_RNA (1)...(19): siRNA sense strand
gggaaauaggagugaagcu

SEQ ID NO: 2309998 - RNA, 19 nt, Homo sapiens
  misc_RNA (1)...(19): siRNA sense strand
cagcaguggcccuggacuu

SEQ ID NO: 2309999 - RNA, 19 nt, Homo sapiens
  misc_RNA (1)...(19): siRNA sense strand
gaggaugacuguggagaca

SEQ ID NO: 2310000 - RNA, 19 nt, Homo sapiens
  misc_RNA (1)...(19): siRNA sense strand
cagaauggagugugcauca

SEQ ID NO: 2310001 - RNA, 19 nt, Homo sapiens
  misc_RNA (1)...(19): siRNA sense strand
ggggagaccuggaaaacau

SEQ ID NO: 2310002 - RNA, 19 nt, Homo sapiens
  misc_RNA (1)...(19): siRNA sense strand
gcuucaauggagaggacuu

SEQ ID NO: 2310003 - RNA, 19 nt, Homo sapiens
  misc_RNA (1)...(19): siRNA sense strand
cggcgauuauucugaugaa

SEQ ID NO: 2310004 - RNA, 19 nt, Homo sapiens
  misc_RNA (1)...(19): siRNA sense strand
ggaaaugugacagggagaa

SEQ ID NO: 2310005 - RNA, 19 nt, Homo sapiens
  misc_RNA (1)...(19): siRNA sense strand
gggauagcccucuggcauu

SEQ ID NO: 2310006 - RNA, 19 nt, Homo sapiens
  misc_RNA (1)...(19): siRNA sense strand
uaaacuuuggcuugggaaa

SEQ ID NO: 2310007 - RNA, 19 nt, Homo sapiens
  misc_RNA (1)...(19): siRNA sense strand
acuacagggugguuggaga

SEQ ID NO: 2310008 - RNA, 19 nt, Homo sapiens
  misc_RNA (1)...(19): siRNA sense strand
agagugauaucaaggugaa

SEQ ID NO: 2310009 - RNA, 19 nt, Homo sapiens
  misc_RNA (1)...(19): siRNA sense strand
acgagaggcuaccggaaga

SEQ ID NO: 2310010 - RNA, 19 nt, Homo sapiens
  misc_RNA (1)...(19): siRNA sense strand
gggaagaacacuggaagca

SEQ ID NO: 2310011 - RNA, 19 nt, Homo sapiens
  misc_RNA (1)...(19): siRNA sense strand
gagaaugacuacaagcugu

SEQ ID NO: 2310012 - RNA, 19 nt, Homo sapiens
  misc_RNA (1)...(19): siRNA sense strand
gcagggaguuccagugcga

SEQ ID NO: 2310013 - RNA, 19 nt, Homo sapiens
  misc_RNA (1)...(19): siRNA sense strand
cggacgagagcgaugaaaa

SEQ ID NO: 2310014 - RNA, 19 nt, Homo sapiens
  misc_RNA (1)...(19): siRNA sense strand
uaaauagcaugguggccua

SEQ ID NO: 2310015 - RNA, 19 nt, Homo sapiens
  misc_RNA (1)...(19): siRNA sense strand
gaaaagucucagaaagcua

SEQ ID NO: 2310016 - RNA, 19 nt, Homo sapiens
  misc_RNA (1)...(19): siRNA sense strand
cugcugauuuauacagaca

SEQ ID NO: 2310017 - RNA, 19 nt, Homo sapiens
  misc_RNA (1)...(19): siRNA sense strand
gagugugacaagacugcaa

SEQ ID NO: 2310018 - RNA, 19 nt, Homo sapiens
  misc_RNA (1)...(19): siRNA sense strand
ggcauauauccaucugaaa

SEQ ID NO: 2310019 - RNA, 19 nt, Homo sapiens
  misc_RNA (1)...(19): siRNA sense strand
cccucaagcagaagaagaa

SEQ ID NO: 2310020 - RNA, 19 nt, Homo sapiens
  misc_RNA (1)...(19): siRNA sense strand
agaagaucaagcugagcaa

SEQ ID NO: 2310021 - RNA, 19 nt, Homo sapiens
  misc_RNA (1)...(19): siRNA sense strand
ucaccgagggcauggacaa

SEQ ID NO: 2310022 - RNA, 19 nt, Homo sapiens
  misc_RNA (1)...(19): siRNA sense strand
agcagaagaagaagcggua

SEQ ID NO: 2310023 - RNA, 19 nt, Homo sapiens
  misc_RNA (1)...(19): siRNA sense strand
ccucuaacaucucggccuu

SEQ ID NO: 2310024 - RNA, 19 nt, Homo sapiens
  misc_RNA (1)...(19): siRNA sense strand
cugggaaauccgagacaaa

SEQ ID NO: 2310025 - RNA, 19 nt, Homo sapiens
  misc_RNA (1)...(19): siRNA sense strand
aggccgacuuggagaggaa

SEQ ID NO: 2310026 - RNA, 19 nt, Homo sapiens
  misc_RNA (1)...(19): siRNA sense strand
gugaagaggaggaggccga

SEQ ID NO: 2310027 - RNA, 19 nt, Homo sapiens
  misc_RNA (1)...(19): siRNA sense strand
ggaaaggugaagaggagga

SEQ ID NO: 2310028 - RNA, 19 nt, Homo sapiens
  misc_RNA (1)...(19): siRNA sense strand
cgggaaaggugaagaggag

SEQ ID NO: 2310029 - RNA, 19 nt, Homo sapiens
  misc_RNA (1)...(19): siRNA sense strand
gggcagaacuacccgcgua

SEQ ID NO: 2310030 - RNA, 19 nt, Homo sapiens
  misc_RNA (1)...(19): siRNA sense strand
ggagaagaaaauugaggaa

SEQ ID NO: 2310031 - RNA, 19 nt, Homo sapiens
  misc_RNA (1)...(19): siRNA sense strand
gaggaauacaaaagagaga

SEQ ID NO: 2310032 - RNA, 19 nt, Homo sapiens
  misc_RNA (1)...(19): siRNA sense strand
guaaauucgggaaagguga

SEQ ID NO: 2310033 - RNA, 19 nt, Homo sapiens
  misc_RNA (1)...(19): siRNA sense strand
ggcauguucagcugggaaa

SEQ ID NO: 2310034 - RNA, 19 nt, Homo sapiens
  misc_RNA (1)...(19): siRNA sense strand
uggagaggaaggaggcaga

SEQ ID NO: 2310035 - RNA, 19 nt, Homo sapiens
  misc_RNA (1)...(19): siRNA sense strand
gggcauguucagcugggaa

SEQ ID NO: 2310036 - RNA, 19 nt, Homo sapiens
  misc_RNA (1)...(19): siRNA sense strand
ccgcauccugagaaguaaa

SEQ ID NO: 2310037 - RNA, 19 nt, Homo sapiens
  misc_RNA (1)...(19): siRNA sense strand
cugggaaauccgagacaaa

SEQ ID NO: 2310038 - RNA, 19 nt, Homo sapiens
  misc_RNA (1)...(19): siRNA sense strand
aggccgacuuggagaggaa

SEQ ID NO: 2310039 - RNA, 19 nt, Homo sapiens
  misc_RNA (1)...(19): siRNA sense strand
gugaagaggaggaggccga

SEQ ID NO: 2310040 - RNA, 19 nt, Homo sapiens
  misc_RNA (1)...(19): siRNA sense strand
ggaaaggugaagaggagga

SEQ ID NO: 2310041 - RNA, 19 nt, Homo sapiens
  misc_RNA (1)...(19): siRNA sense strand
cgggaaaggugaagaggag

SEQ ID NO: 2310042 - RNA, 19 nt, Homo sapiens
  misc_RNA (1)...(19): siRNA sense strand
gggcagaacuacccgcgua

SEQ ID NO: 2310043 - RNA, 19 nt, Homo sapiens
  misc_RNA (1)...(19): siRNA sense strand
ggagaagaaaauugaggaa

SEQ ID NO: 2310044 - RNA, 19 nt, Homo sapiens
  misc_RNA (1)...(19): siRNA sense strand
gaggaauacaaaagagaga

SEQ ID NO: 2310045 - RNA, 19 nt, Homo sapiens
  misc_RNA (1)...(19): siRNA sense strand
guaaauucgggaaagguga

SEQ ID NO: 2310046 - RNA, 19 nt, Homo sapiens
  misc_RNA (1)...(19): siRNA sense strand
ggcauguucagcugggaaa

SEQ ID NO: 2310047 - RNA, 19 nt, Homo sapiens
  misc_RNA (1)...(19): siRNA sense strand
uggagaggaaggaggcaga

SEQ ID NO: 2310048 - RNA, 19 nt, Homo sapiens
  misc_RNA (1)...(19): siRNA sense strand
gggcauguucagcugggaa

SEQ ID NO: 2310049 - RNA, 19 nt, Homo sapiens
  misc_RNA (1)...(19): siRNA sense strand
ccgcauccugagaaguaaa

SEQ ID NO: 2310050 - RNA, 19 nt, Homo sapiens
  misc_RNA (1)...(19): siRNA sense strand
cugggaaauccgagacaaa

SEQ ID NO: 2310051 - RNA, 19 nt, Homo sapiens
  misc_RNA (1)...(19): siRNA sense strand
aggccgacuuggagaggaa

SEQ ID NO: 2310052 - RNA, 19 nt, Homo sapiens
  misc_RNA (1)...(19): siRNA sense strand
gugaagaggaggaggccga

SEQ ID NO: 2310053 - RNA, 19 nt, Homo sapiens
  misc_RNA (1)...(19): siRNA sense strand
ggaaaggugaagaggagga

SEQ ID NO: 2310054 - RNA, 19 nt, Homo sapiens
  misc_RNA (1)...(19): siRNA sense strand
cgggaaaggugaagaggag

SEQ ID NO: 2310055 - RNA, 19 nt, Homo sapiens
  misc_RNA (1)...(19): siRNA sense strand
gggcagaacuacccgcgua

SEQ ID NO: 2310056 - RNA, 19 nt, Homo sapiens
  misc_RNA (1)...(19): siRNA sense strand
ggagaagaaaauugaggaa

SEQ ID NO: 2310057 - RNA, 19 nt, Homo sapiens
  misc_RNA (1)...(19): siRNA sense strand
gaggaauacaaaagagaga

SEQ ID NO: 2310058 - RNA, 19 nt, Homo sapiens
  misc_RNA (1)...(19): siRNA sense strand
guaaauucgggaaagguga

SEQ ID NO: 2310059 - RNA, 19 nt, Homo sapiens
  misc_RNA (1)...(19): siRNA sense strand
ggcauguucagcugggaaa

SEQ ID NO: 2310060 - RNA, 19 nt, Homo sapiens
  misc_RNA (1)...(19): siRNA sense strand
uggagaggaaggaggcaga

SEQ ID NO: 2310061 - RNA, 19 nt, Homo sapiens
  misc_RNA (1)...(19): siRNA sense strand
gggcauguucagcugggaa

SEQ ID NO: 2310062 - RNA, 19 nt, Homo sapiens
  misc_RNA (1)...(19): siRNA sense strand
ccgcauccugagaaguaaa

SEQ ID NO: 2310063 - RNA, 19 nt, Homo sapiens
  misc_RNA (1)...(19): siRNA sense strand
cugggaaauccgagacaaa

SEQ ID NO: 2310064 - RNA, 19 nt, Homo sapiens
  misc_RNA (1)...(19): siRNA sense strand
aggccgacuuggagaggaa

SEQ ID NO: 2310065 - RNA, 19 nt, Homo sapiens
  misc_RNA (1)...(19): siRNA sense strand
gugaagaggaggaggccga

SEQ ID NO: 2310066 - RNA, 19 nt, Homo sapiens
  misc_RNA (1)...(19): siRNA sense strand
ggaaaggugaagaggagga

SEQ ID NO: 2310067 - RNA, 19 nt, Homo sapiens
  misc_RNA (1)...(19): siRNA sense strand
cgggaaaggugaagaggag

SEQ ID NO: 2310068 - RNA, 19 nt, Homo sapiens
  misc_RNA (1)...(19): siRNA sense strand
gggcagaacuacccgcgua

SEQ ID NO: 2310069 - RNA, 19 nt, Homo sapiens
  misc_RNA (1)...(19): siRNA sense strand
ggagaagaaaauugaggaa

SEQ ID NO: 2310070 - RNA, 19 nt, Homo sapiens
  misc_RNA (1)...(19): siRNA sense strand
gaggaauacaaaagagaga

SEQ ID NO: 2310071 - RNA, 19 nt, Homo sapiens
  misc_RNA (1)...(19): siRNA sense strand
guaaauucgggaaagguga

SEQ ID NO: 2310072 - RNA, 19 nt, Homo sapiens
  misc_RNA (1)...(19): siRNA sense strand
ggcauguucagcugggaaa

SEQ ID NO: 2310073 - RNA, 19 nt, Homo sapiens
  misc_RNA (1)...(19): siRNA sense strand
uggagaggaaggaggcaga

SEQ ID NO: 2310074 - RNA, 19 nt, Homo sapiens
  misc_RNA (1)...(19): siRNA sense strand
gggcauguucagcugggaa

SEQ ID NO: 2310075 - RNA, 19 nt, Homo sapiens
  misc_RNA (1)...(19): siRNA sense strand
ccgcauccugagaaguaaa

SEQ ID NO: 2310076 - RNA, 19 nt, Homo sapiens
  misc_RNA (1)...(19): siRNA sense strand
cugggaaauccgagacaaa

SEQ ID NO: 2310077 - RNA, 19 nt, Homo sapiens
  misc_RNA (1)...(19): siRNA sense strand
aggccgacuuggagaggaa

SEQ ID NO: 2310078 - RNA, 19 nt, Homo sapiens
  misc_RNA (1)...(19): siRNA sense strand
gugaagaggaggaggccga

SEQ ID NO: 2310079 - RNA, 19 nt, Homo sapiens
  misc_RNA (1)...(19): siRNA sense strand
ggaaaggugaagaggagga

SEQ ID NO: 2310080 - RNA, 19 nt, Homo sapiens
  misc_RNA (1)...(19): siRNA sense strand
cgggaaaggugaagaggag

SEQ ID NO: 2310081 - RNA, 19 nt, Homo sapiens
  misc_RNA (1)...(19): siRNA sense strand
gggcagaacuacccgcgua

SEQ ID NO: 2310082 - RNA, 19 nt, Homo sapiens
  misc_RNA (1)...(19): siRNA sense strand
ggagaagaaaauugaggaa

SEQ ID NO: 2310083 - RNA, 19 nt, Homo sapiens
  misc_RNA (1)...(19): siRNA sense strand
gaggaauacaaaagagaga

SEQ ID NO: 2310084 - RNA, 19 nt, Homo sapiens
  misc_RNA (1)...(19): siRNA sense strand
guaaauucgggaaagguga

SEQ ID NO: 2310085 - RNA, 19 nt, Homo sapiens
  misc_RNA (1)...(19): siRNA sense strand
ggcauguucagcugggaaa

SEQ ID NO: 2310086 - RNA, 19 nt, Homo sapiens
  misc_RNA (1)...(19): siRNA sense strand
uggagaggaaggaggcaga

SEQ ID NO: 2310087 - RNA, 19 nt, Homo sapiens
  misc_RNA (1)...(19): siRNA sense strand
gggcauguucagcugggaa

SEQ ID NO: 2310088 - RNA, 19 nt, Homo sapiens
  misc_RNA (1)...(19): siRNA sense strand
ccgcauccugagaaguaaa

SEQ ID NO: 2310089 - RNA, 19 nt, Homo sapiens
  misc_RNA (1)...(19): siRNA sense strand
cugggaaauccgagacaaa

SEQ ID NO: 2310090 - RNA, 19 nt, Homo sapiens
  misc_RNA (1)...(19): siRNA sense strand
aggccgacuuggagaggaa

SEQ ID NO: 2310091 - RNA, 19 nt, Homo sapiens
  misc_RNA (1)...(19): siRNA sense strand
gugaagaggaggaggccga

SEQ ID NO: 2310092 - RNA, 19 nt, Homo sapiens
  misc_RNA (1)...(19): siRNA sense strand
ggaaaggugaagaggagga

SEQ ID NO: 2310093 - RNA, 19 nt, Homo sapiens
  misc_RNA (1)...(19): siRNA sense strand
cgggaaaggugaagaggag

SEQ ID NO: 2310094 - RNA, 19 nt, Homo sapiens
  misc_RNA (1)...(19): siRNA sense strand
gggcagaacuacccgcgua

SEQ ID NO: 2310095 - RNA, 19 nt, Homo sapiens
  misc_RNA (1)...(19): siRNA sense strand
ggagaagaaaauugaggaa

SEQ ID NO: 2310096 - RNA, 19 nt, Homo sapiens
  misc_RNA (1)...(19): siRNA sense strand
gaggaauacaaaagagaga

SEQ ID NO: 2310097 - RNA, 19 nt, Homo sapiens
  misc_RNA (1)...(19): siRNA sense strand
guaaauucgggaaagguga

SEQ ID NO: 2310098 - RNA, 19 nt, Homo sapiens
  misc_RNA (1)...(19): siRNA sense strand
ggcauguucagcugggaaa

SEQ ID NO: 2310099 - RNA, 19 nt, Homo sapiens
  misc_RNA (1)...(19): siRNA sense strand
uggagaggaaggaggcaga

SEQ ID NO: 2310100 - RNA, 19 nt, Homo sapiens
  misc_RNA (1)...(19): siRNA sense strand
gggcauguucagcugggaa

SEQ ID NO: 2310101 - RNA, 19 nt, Homo sapiens
  misc_RNA (1)...(19): siRNA sense strand
ccgcauccugagaaguaaa

SEQ ID NO: 2310102 - RNA, 19 nt, Homo sapiens
  misc_RNA (1)...(19): siRNA sense strand
cugggaaauccgagacaaa

SEQ ID NO: 2310103 - RNA, 19 nt, Homo sapiens
  misc_RNA (1)...(19): siRNA sense strand
aggccgacuuggagaggaa

SEQ ID NO: 2310104 - RNA, 19 nt, Homo sapiens
  misc_RNA (1)...(19): siRNA sense strand
gugaagaggaggaggccga

SEQ ID NO: 2310105 - RNA, 19 nt, Homo sapiens
  misc_RNA (1)...(19): siRNA sense strand
ggaaaggugaagaggagga

SEQ ID NO: 2310106 - RNA, 19 nt, Homo sapiens
  misc_RNA (1)...(19): siRNA sense strand
cgggaaaggugaagaggag

SEQ ID NO: 2310107 - RNA, 19 nt, Homo sapiens
  misc_RNA (1)...(19): siRNA sense strand
gggcagaacuacccgcgua

SEQ ID NO: 2310108 - RNA, 19 nt, Homo sapiens
  misc_RNA (1)...(19): siRNA sense strand
ggagaagaaaauugaggaa

SEQ ID NO: 2310109 - RNA, 19 nt, Homo sapiens
  misc_RNA (1)...(19): siRNA sense strand
gaggaauacaaaagagaga

SEQ ID NO: 2310110 - RNA, 19 nt, Homo sapiens
  misc_RNA (1)...(19): siRNA sense strand
guaaauucgggaaagguga

SEQ ID NO: 2310111 - RNA, 19 nt, Homo sapiens
  misc_RNA (1)...(19): siRNA sense strand
ggcauguucagcugggaaa

SEQ ID NO: 2310112 - RNA, 19 nt, Homo sapiens
  misc_RNA (1)...(19): siRNA sense strand
uggagaggaaggaggcaga

SEQ ID NO: 2310113 - RNA, 19 nt, Homo sapiens
  misc_RNA (1)...(19): siRNA sense strand
gggcauguucagcugggaa

SEQ ID NO: 2310114 - RNA, 19 nt, Homo sapiens
  misc_RNA (1)...(19): siRNA sense strand
ccgcauccugagaaguaaa

SEQ ID NO: 2310115 - RNA, 19 nt, Homo sapiens
  misc_RNA (1)...(19): siRNA sense strand
uggcauuauuagagaguua

SEQ ID NO: 2310116 - RNA, 19 nt, Homo sapiens
  misc_RNA (1)...(19): siRNA sense strand
cagaaaggaaacuggaaua

SEQ ID NO: 2310117 - RNA, 19 nt, Homo sapiens
  misc_RNA (1)...(19): siRNA sense strand
ccuacaaacaagagaucaa

SEQ ID NO: 2310118 - RNA, 19 nt, Homo sapiens
  misc_RNA (1)...(19): siRNA sense strand
ggaaaguugcuguggaaaa

SEQ ID NO: 2310119 - RNA, 19 nt, Homo sapiens
  misc_RNA (1)...(19): siRNA sense strand
ggaaacuggaauauggaaa

SEQ ID NO: 2310120 - RNA, 19 nt, Homo sapiens
  misc_RNA (1)...(19): siRNA sense strand
gauacuaacaauugaggaa

SEQ ID NO: 2310121 - RNA, 19 nt, Homo sapiens
  misc_RNA (1)...(19): siRNA sense strand
aguucaaugcagagaauua

SEQ ID NO: 2310122 - RNA, 19 nt, Homo sapiens
  misc_RNA (1)...(19): siRNA sense strand
guacaaggaaauugaucaa

SEQ ID NO: 2310123 - RNA, 19 nt, Homo sapiens
  misc_RNA (1)...(19): siRNA sense strand
gcugauaaacagucgcaaa

SEQ ID NO: 2310124 - RNA, 19 nt, Homo sapiens
  misc_RNA (1)...(19): siRNA sense strand
gcguguugguggagcguuu

SEQ ID NO: 2310125 - RNA, 19 nt, Homo sapiens
  misc_RNA (1)...(19): siRNA sense strand
agacaugaacugggagaaa

SEQ ID NO: 2310126 - RNA, 19 nt, Homo sapiens
  misc_RNA (1)...(19): siRNA sense strand
gugggaaaguggaguucaa

SEQ ID NO: 2310127 - RNA, 19 nt, Homo sapiens
  misc_RNA (1)...(19): siRNA sense strand
cuucaagccagaaaggaaa

SEQ ID NO: 2310128 - RNA, 19 nt, Homo sapiens
  misc_RNA (1)...(19): siRNA sense strand
acgaacagaugcuggauau

SEQ ID NO: 2310129 - RNA, 19 nt, Homo sapiens
  misc_RNA (1)...(19): siRNA sense strand
cauuuaaagugguugauca

SEQ ID NO: 2310130 - RNA, 19 nt, Homo sapiens
  misc_RNA (1)...(19): siRNA sense strand
ugauaauggcugauaaaca

SEQ ID NO: 2310131 - RNA, 19 nt, Homo sapiens
  misc_RNA (1)...(19): siRNA sense strand
gaggaaggaaguaagacaa

SEQ ID NO: 2310132 - RNA, 19 nt, Homo sapiens
  misc_RNA (1)...(19): siRNA sense strand
aggagaagacacagaugua

SEQ ID NO: 2310133 - RNA, 19 nt, Homo sapiens
  misc_RNA (1)...(19): siRNA sense strand
guucaagagcucaugcuaa

SEQ ID NO: 2310134 - RNA, 19 nt, Homo sapiens
  misc_RNA (1)...(19): siRNA sense strand
caucuaagggucugggaga

SEQ ID NO: 2310135 - RNA, 19 nt, Homo sapiens
  misc_RNA (1)...(19): siRNA sense strand
ucgcaaaggaccagggugu

SEQ ID NO: 2310136 - RNA, 19 nt, Homo sapiens
  misc_RNA (1)...(19): siRNA sense strand
caucaugacagcagaacau

SEQ ID NO: 2310137 - RNA, 19 nt, Homo sapiens
  misc_RNA (1)...(19): siRNA sense strand
aggcaaagcgagcugcuaa

SEQ ID NO: 2310138 - RNA, 19 nt, Homo sapiens
  misc_RNA (1)...(19): siRNA sense strand
gggagaaaggcgaaggcca

SEQ ID NO: 2310139 - RNA, 19 nt, Homo sapiens
  misc_RNA (1)...(19): siRNA sense strand
gguguuuggcagugagaga

SEQ ID NO: 2310140 - RNA, 19 nt, Homo sapiens
  misc_RNA (1)...(19): siRNA sense strand
augcaagacuuucuguaaa

SEQ ID NO: 2310141 - RNA, 19 nt, Homo sapiens
  misc_RNA (1)...(19): siRNA sense strand
agggagaggaucaagaaau

SEQ ID NO: 2310142 - RNA, 19 nt, Homo sapiens
  misc_RNA (1)...(19): siRNA sense strand
gaggagaagacauguuaau

SEQ ID NO: 2310143 - RNA, 19 nt, Homo sapiens
  misc_RNA (1)...(19): siRNA sense strand
ccauccuggcuguggguaa

SEQ ID NO: 2310144 - RNA, 19 nt, Homo sapiens
  misc_RNA (1)...(19): siRNA sense strand
ggauguuggcugcaguaua

SEQ ID NO: 2310145 - RNA, 19 nt, Homo sapiens
  misc_RNA (1)...(19): siRNA sense strand
acauaugggaggucaagaa

SEQ ID NO: 2310146 - RNA, 19 nt, Homo sapiens
  misc_RNA (1)...(19): siRNA sense strand
cuaacaaggucaugugcca

SEQ ID NO: 2310147 - RNA, 19 nt, Homo sapiens
  misc_RNA (1)...(19): siRNA sense strand
ccagauugaaggugcauuu

SEQ ID NO: 2310148 - RNA, 19 nt, Homo sapiens
  misc_RNA (1)...(19): siRNA sense strand
ugauagaauugaagaaccu

SEQ ID NO: 2310149 - RNA, 19 nt, Homo sapiens
  misc_RNA (1)...(19): siRNA sense strand
aggaaaguauacaacacaa

SEQ ID NO: 2310150 - RNA, 19 nt, Homo sapiens
  misc_RNA (1)...(19): siRNA sense strand
cccuggacauggagcauua

SEQ ID NO: 2310151 - RNA, 19 nt, Homo sapiens
  misc_RNA (1)...(19): siRNA sense strand
acauggagcauuacagcaa

SEQ ID NO: 2310152 - RNA, 19 nt, Homo sapiens
  misc_RNA (1)...(19): siRNA sense strand
cguggaacaagcacagaaa

SEQ ID NO: 2310153 - RNA, 19 nt, Homo sapiens
  misc_RNA (1)...(19): siRNA sense strand
guaaaggaugccugucaaa

SEQ ID NO: 2310154 - RNA, 19 nt, Homo sapiens
  misc_RNA (1)...(19): siRNA sense strand
cugcuaagcgagugaagau

SEQ ID NO: 2310155 - RNA, 19 nt, Homo sapiens
  misc_RNA (1)...(19): siRNA sense strand
auauggaaauguugacgaa

SEQ ID NO: 2310156 - RNA, 19 nt, Homo sapiens
  misc_RNA (1)...(19): siRNA sense strand
ggucacucacgguggaauu

SEQ ID NO: 2310157 - RNA, 19 nt, Homo sapiens
  misc_RNA (1)...(19): siRNA sense strand
gccaagaauuccugccaga

SEQ ID NO: 2310158 - RNA, 19 nt, Homo sapiens
  misc_RNA (1)...(19): siRNA sense strand
ggacaucaugacagcagaa

SEQ ID NO: 2310159 - RNA, 19 nt, Homo sapiens
  misc_RNA (1)...(19): siRNA sense strand
gggccugaagugaaauuua

SEQ ID NO: 2310160 - RNA, 19 nt, Homo sapiens
  misc_RNA (1)...(19): siRNA sense strand
gcuaucaaaagaaggaaaa

SEQ ID NO: 2310161 - RNA, 19 nt, Homo sapiens
  misc_RNA (1)...(19): siRNA sense strand
ccuccugagcuaaugauaa

SEQ ID NO: 2310162 - RNA, 19 nt, Homo sapiens
  misc_RNA (1)...(19): siRNA sense strand
ccugagaaggugcgaauca

SEQ ID NO: 2310163 - RNA, 19 nt, Homo sapiens
  misc_RNA (1)...(19): siRNA sense strand
ugaggaaggaaguaagaca

SEQ ID NO: 2310164 - RNA, 19 nt, Homo sapiens
  misc_RNA (1)...(19): siRNA sense strand
ccuaaaggaacuuggaaag

SEQ ID NO: 2310165 - RNA, 19 nt, Homo sapiens
  misc_RNA (1)...(19): siRNA sense strand
ggagagaauguauggccau

SEQ ID NO: 2310166 - RNA, 19 nt, Homo sapiens
  misc_RNA (1)...(19): siRNA sense strand
guuaugagucagacaugaa

SEQ ID NO: 2310167 - RNA, 19 nt, Homo sapiens
  misc_RNA (1)...(19): siRNA sense strand
cacggaaguugcagccaaa

SEQ ID NO: 2310168 - RNA, 19 nt, Homo sapiens
  misc_RNA (1)...(19): siRNA sense strand
cccaucaccaagaggauaa

SEQ ID NO: 2310169 - RNA, 19 nt, Homo sapiens
  misc_RNA (1)...(19): siRNA sense strand
caccacaguagaaggcaua

SEQ ID NO: 2310170 - RNA, 19 nt, Homo sapiens
  misc_RNA (1)...(19): siRNA sense strand
uugccuuauuugaggaaga

SEQ ID NO: 2310171 - RNA, 19 nt, Homo sapiens
  misc_RNA (1)...(19): siRNA sense strand
ggagaaaggcgaaggccag

SEQ ID NO: 2310172 - RNA, 19 nt, Homo sapiens
  misc_RNA (1)...(19): siRNA sense strand
aaauccagccauugacaua

SEQ ID NO: 2310173 - RNA, 19 nt, Homo sapiens
  misc_RNA (1)...(19): siRNA sense strand
acacaguuucccaaauaua

SEQ ID NO: 2310174 - RNA, 19 nt, Homo sapiens
  misc_RNA (1)...(19): siRNA sense strand
caguaaaggaugccuguca

SEQ ID NO: 2310175 - RNA, 19 nt, Homo sapiens
  misc_RNA (1)...(19): siRNA sense strand
gcacaauguagcagcacaa

SEQ ID NO: 2310176 - RNA, 19 nt, Homo sapiens
  misc_RNA (1)...(19): siRNA sense strand
aguuugacuuugaggaaau

SEQ ID NO: 2310177 - RNA, 19 nt, Homo sapiens
  misc_RNA (1)...(19): siRNA sense strand
ccaaggauuugcaaggcua

SEQ ID NO: 2310178 - RNA, 19 nt, Homo sapiens
  misc_RNA (1)...(19): siRNA sense strand
agguauaaugucagugaau

SEQ ID NO: 2310179 - RNA, 19 nt, Homo sapiens
  misc_RNA (1)...(19): siRNA sense strand
gcgagauguguauaagaaa

SEQ ID NO: 2310180 - RNA, 19 nt, Homo sapiens
  misc_RNA (1)...(19): siRNA sense strand
cuauaacaccauuggaaga

SEQ ID NO: 2310181 - RNA, 19 nt, Homo sapiens
  misc_RNA (1)...(19): siRNA sense strand
guguaaaaucugaaggaga

SEQ ID NO: 2310182 - RNA, 19 nt, Homo sapiens
  misc_RNA (1)...(19): siRNA sense strand
uugaggaaaugaagcgcaa

SEQ ID NO: 2310183 - RNA, 19 nt, Homo sapiens
  misc_RNA (1)...(19): siRNA sense strand
cguaaaagaucggguagaa

SEQ ID NO: 2310184 - RNA, 19 nt, Homo sapiens
  misc_RNA (1)...(19): siRNA sense strand
acucuauggccuuggagaa

SEQ ID NO: 2310185 - RNA, 19 nt, Homo sapiens
  misc_RNA (1)...(19): siRNA sense strand
uggaaaaguaauuggugua

SEQ ID NO: 2310186 - RNA, 19 nt, Homo sapiens
  misc_RNA (1)...(19): siRNA sense strand
auacagagguaacucgcua

SEQ ID NO: 2310187 - RNA, 19 nt, Homo sapiens
  misc_RNA (1)...(19): siRNA sense strand
gcaucuagccuaaugggau

SEQ ID NO: 2310188 - RNA, 19 nt, Homo sapiens
  misc_RNA (1)...(19): siRNA sense strand
agaguuugacuuugaggaa

SEQ ID NO: 2310189 - RNA, 19 nt, Homo sapiens
  misc_RNA (1)...(19): siRNA sense strand
ggagguaccuauaugcuga

SEQ ID NO: 2310190 - RNA, 19 nt, Homo sapiens
  misc_RNA (1)...(19): siRNA sense strand
agggaaguacauugcuaua

SEQ ID NO: 2310191 - RNA, 19 nt, Homo sapiens
  misc_RNA (1)...(19): siRNA sense strand
gagucaauggggagaggaa

SEQ ID NO: 2310192 - RNA, 19 nt, Homo sapiens
  misc_RNA (1)...(19): siRNA sense strand
ugacaggaucagaguuuga

SEQ ID NO: 2310193 - RNA, 19 nt, Homo sapiens
  misc_RNA (1)...(19): siRNA sense strand
gagaggaagagacuggaau

SEQ ID NO: 2310194 - RNA, 19 nt, Homo sapiens
  misc_RNA (1)...(19): siRNA sense strand
caaugcgagauguguauaa

SEQ ID NO: 2310195 - RNA, 19 nt, Homo sapiens
  misc_RNA (1)...(19): siRNA sense strand
acuuagaucaaccguguua

SEQ ID NO: 2310196 - RNA, 19 nt, Homo sapiens
  misc_RNA (1)...(19): siRNA sense strand
cagaaauuuguuagcauca

SEQ ID NO: 2310197 - RNA, 19 nt, Homo sapiens
  misc_RNA (1)...(19): siRNA sense strand
ggagaggaagagacuggaa

SEQ ID NO: 2310198 - RNA, 19 nt, Homo sapiens
  misc_RNA (1)...(19): siRNA sense strand
gcugcuuuauacagaggua

SEQ ID NO: 2310199 - RNA, 19 nt, Homo sapiens
  misc_RNA (1)...(19): siRNA sense strand
gaucagaguuauuugcauc

SEQ ID NO: 2310200 - RNA, 19 nt, Homo sapiens
  misc_RNA (1)...(19): siRNA sense strand
gucaaucgaaagucagaua

SEQ ID NO: 2310201 - RNA, 19 nt, Homo sapiens
  misc_RNA (1)...(19): siRNA sense strand
guaaaagaucggguagaaa

SEQ ID NO: 2310202 - RNA, 19 nt, Homo sapiens
  misc_RNA (1)...(19): siRNA sense strand
ugucuauaaggguggaaaa

SEQ ID NO: 2310203 - RNA, 19 nt, Homo sapiens
  misc_RNA (1)...(19): siRNA sense strand
caccauuggaagauuuaua

SEQ ID NO: 2310204 - RNA, 19 nt, Homo sapiens
  misc_RNA (1)...(19): siRNA sense strand
cagcacaagggaaguacau

SEQ ID NO: 2310205 - RNA, 19 nt, Homo sapiens
  misc_RNA (1)...(19): siRNA sense strand
gguuucuccuugagcaaca

SEQ ID NO: 2310206 - RNA, 19 nt, Homo sapiens
  misc_RNA (1)...(19): siRNA sense strand
cggaugagaacgugggcga

SEQ ID NO: 2310207 - RNA, 19 nt, Homo sapiens
  misc_RNA (1)...(19): siRNA sense strand
uuucagaaccgaagagcca

SEQ ID NO: 2310208 - RNA, 19 nt, Homo sapiens
  misc_RNA (1)...(19): siRNA sense strand
aagagaaagcagcgaagga

SEQ ID NO: 2310209 - RNA, 19 nt, Homo sapiens
  misc_RNA (1)...(19): siRNA sense strand
aggaauaggacaaccuuca

SEQ ID NO: 2310210 - RNA, 19 nt, Homo sapiens
  misc_RNA (1)...(19): siRNA sense strand
aagaagagaaagcagcgaa

SEQ ID NO: 2310211 - RNA, 19 nt, Homo sapiens
  misc_RNA (1)...(19): siRNA sense strand
aggacaaugaccagcugaa

SEQ ID NO: 2310212 - RNA, 19 nt, Homo sapiens
  misc_RNA (1)...(19): siRNA sense strand
cggaugagaacgugggcga

SEQ ID NO: 2310213 - RNA, 19 nt, Homo sapiens
  misc_RNA (1)...(19): siRNA sense strand
gaauauaguuuacagagga

SEQ ID NO: 2310214 - RNA, 19 nt, Homo sapiens
  misc_RNA (1)...(19): siRNA sense strand
aggccaaggaauauaguuu

SEQ ID NO: 2310215 - RNA, 19 nt, Homo sapiens
  misc_RNA (1)...(19): siRNA sense strand
agacugaaggccaaggaau

SEQ ID NO: 2310216 - RNA, 19 nt, Homo sapiens
  misc_RNA (1)...(19): siRNA sense strand
uuucagaaccgaagagcca

SEQ ID NO: 2310217 - RNA, 19 nt, Homo sapiens
  misc_RNA (1)...(19): siRNA sense strand
aagagaaagcagcgaagga

SEQ ID NO: 2310218 - RNA, 19 nt, Homo sapiens
  misc_RNA (1)...(19): siRNA sense strand
aggaauaggacaaccuuca

SEQ ID NO: 2310219 - RNA, 19 nt, Homo sapiens
  misc_RNA (1)...(19): siRNA sense strand
aagaagagaaagcagcgaa

SEQ ID NO: 2310220 - RNA, 19 nt, Homo sapiens
  misc_RNA (1)...(19): siRNA sense strand
aggacaaugaccagcugaa

SEQ ID NO: 2310221 - RNA, 19 nt, Homo sapiens
  misc_RNA (1)...(19): siRNA sense strand
caauacuggcaaagggaaa

SEQ ID NO: 2310222 - RNA, 19 nt, Homo sapiens
  misc_RNA (1)...(19): siRNA sense strand
ggaaaugcauagaggguuc

SEQ ID NO: 2310223 - RNA, 19 nt, Homo sapiens
  misc_RNA (1)...(19): siRNA sense strand
accaaugaguugagaguuu

SEQ ID NO: 2310224 - RNA, 19 nt, Homo sapiens
  misc_RNA (1)...(19): siRNA sense strand
gcuuauaauuugacuggau

SEQ ID NO: 2310225 - RNA, 19 nt, Homo sapiens
  misc_RNA (1)...(19): siRNA sense strand
uggcaaagggaaaugcaua

SEQ ID NO: 2310226 - RNA, 19 nt, Homo sapiens
  misc_RNA (1)...(19): siRNA sense strand
gagaauugccccaaggaua

SEQ ID NO: 2310227 - RNA, 19 nt, Homo sapiens
  misc_RNA (1)...(19): siRNA sense strand
uuacauguauggaggaaaa

SEQ ID NO: 2310228 - RNA, 19 nt, Homo sapiens
  misc_RNA (1)...(19): siRNA sense strand
aagcuguggucaauggaaa

SEQ ID NO: 2310229 - RNA, 19 nt, Homo sapiens
  misc_RNA (1)...(19): siRNA sense strand
cgaaaauaucuguggcauu

SEQ ID NO: 2310230 - RNA, 19 nt, Homo sapiens
  misc_RNA (1)...(19): siRNA sense strand
cuucagauuucauggccua

SEQ ID NO: 2310231 - RNA, 19 nt, Homo sapiens
  misc_RNA (1)...(19): siRNA sense strand
cuggaaaggugaagcaugu

SEQ ID NO: 2310232 - RNA, 19 nt, Homo sapiens
  misc_RNA (1)...(19): siRNA sense strand
guggguuguuggaggauau

SEQ ID NO: 2310233 - RNA, 19 nt, Homo sapiens
  misc_RNA (1)...(19): siRNA sense strand
gaggcaaggcugaggagga

SEQ ID NO: 2310234 - RNA, 19 nt, Homo sapiens
  misc_RNA (1)...(19): siRNA sense strand
acauuaaggaguacaaaga

SEQ ID NO: 2310235 - RNA, 19 nt, Homo sapiens
  misc_RNA (1)...(19): siRNA sense strand
cugaugaacaagaagaaaa

SEQ ID NO: 2310236 - RNA, 19 nt, Homo sapiens
  misc_RNA (1)...(19): siRNA sense strand
caggaauaugauuuggaua

SEQ ID NO: 2310237 - RNA, 19 nt, Homo sapiens
  misc_RNA (1)...(19): siRNA sense strand
auaaaggaccagugaagau

SEQ ID NO: 2310238 - RNA, 19 nt, Homo sapiens
  misc_RNA (1)...(19): siRNA sense strand
cucauaaagcuguggucaa

SEQ ID NO: 2310239 - RNA, 19 nt, Homo sapiens
  misc_RNA (1)...(19): siRNA sense strand
ggaacagugugaugcgcau

SEQ ID NO: 2310240 - RNA, 19 nt, Homo sapiens
  misc_RNA (1)...(19): siRNA sense strand
caucaaugccuccaagaau

SEQ ID NO: 2310241 - RNA, 19 nt, Homo sapiens
  misc_RNA (1)...(19): siRNA sense strand
ccugcaaaccacagugcua

SEQ ID NO: 2310242 - RNA, 19 nt, Homo sapiens
  misc_RNA (1)...(19): siRNA sense strand
cuauaaaggaccagugaag

SEQ ID NO: 2310243 - RNA, 19 nt, Homo sapiens
  misc_RNA (1)...(19): siRNA sense strand
ggauaagaacacauggagu

SEQ ID NO: 2310244 - RNA, 19 nt, Homo sapiens
  misc_RNA (1)...(19): siRNA sense strand
caguguauggaaugguaua

SEQ ID NO: 2310245 - RNA, 19 nt, Homo sapiens
  misc_RNA (1)...(19): siRNA sense strand
gaggacagcauguggagau

SEQ ID NO: 2310246 - RNA, 19 nt, Homo sapiens
  misc_RNA (1)...(19): siRNA sense strand
ccaacauuaaggaguacaa

SEQ ID NO: 2310247 - RNA, 19 nt, Homo sapiens
  misc_RNA (1)...(19): siRNA sense strand
caacugggaaugugaccaa

SEQ ID NO: 2310248 - RNA, 19 nt, Homo sapiens
  misc_RNA (1)...(19): siRNA sense strand
gagagauggcaaugagacu

SEQ ID NO: 2310249 - RNA, 19 nt, Homo sapiens
  misc_RNA (1)...(19): siRNA sense strand
ggagaguguaagaucagua

SEQ ID NO: 2310250 - RNA, 19 nt, Homo sapiens
  misc_RNA (1)...(19): siRNA sense strand
uguacugaucccagcaaua

SEQ ID NO: 2310251 - RNA, 19 nt, Homo sapiens
  misc_RNA (1)...(19): siRNA sense strand
ggauauauguucaaccacu

SEQ ID NO: 2310252 - RNA, 19 nt, Homo sapiens
  misc_RNA (1)...(19): siRNA sense strand
acgaagugcacguggcuca

SEQ ID NO: 2310253 - RNA, 19 nt, Homo sapiens
  misc_RNA (1)...(19): siRNA sense strand
gagaauuaugacaaugcua

SEQ ID NO: 2310254 - RNA, 19 nt, Homo sapiens
  misc_RNA (1)...(19): siRNA sense strand
gcucauugaaggacagcca

SEQ ID NO: 2310255 - RNA, 19 nt, Homo sapiens
  misc_RNA (1)...(19): siRNA sense strand
ucauugaaggacagccaaa

SEQ ID NO: 2310256 - RNA, 19 nt, Homo sapiens
  misc_RNA (1)...(19): siRNA sense strand
agaauugccccaaggauaa

SEQ ID NO: 2310257 - RNA, 19 nt, Homo sapiens
  misc_RNA (1)...(19): siRNA sense strand
gcuggcauuugguuggaaa

SEQ ID NO: 2310258 - RNA, 19 nt, Homo sapiens
  misc_RNA (1)...(19): siRNA sense strand
cccagaagaagguagaauu

SEQ ID NO: 2310259 - RNA, 19 nt, Homo sapiens
  misc_RNA (1)...(19): siRNA sense strand
auggaaugguauacgauga

SEQ ID NO: 2310260 - RNA, 19 nt, Homo sapiens
  misc_RNA (1)...(19): siRNA sense strand
aggaguacaaagauaguuu

SEQ ID NO: 2310261 - RNA, 19 nt, Homo sapiens
  misc_RNA (1)...(19): siRNA sense strand
gccaaauagaauaaugaga

SEQ ID NO: 2310262 - RNA, 19 nt, Homo sapiens
  misc_RNA (1)...(19): siRNA sense strand
ggagauugcaccagcggca

SEQ ID NO: 2310263 - RNA, 19 nt, Homo sapiens
  misc_RNA (1)...(19): siRNA sense strand
gugccagcuaugugaggua

SEQ ID NO: 2310264 - RNA, 19 nt, Homo sapiens
  misc_RNA (1)...(19): siRNA sense strand
ggaaacacacacaaugaca

SEQ ID NO: 2310265 - RNA, 19 nt, Homo sapiens
  misc_RNA (1)...(19): siRNA sense strand
cgauacuguugaaugugaa

SEQ ID NO: 2310266 - RNA, 19 nt, Homo sapiens
  misc_RNA (1)...(19): siRNA sense strand
caucgaggcaucugcaauu

SEQ ID NO: 2310267 - RNA, 19 nt, Homo sapiens
  misc_RNA (1)...(19): siRNA sense strand
cagccaaauagaauaauga

SEQ ID NO: 2310268 - RNA, 19 nt, Homo sapiens
  misc_RNA (1)...(19): siRNA sense strand
aggacagccaaauagaaua

SEQ ID NO: 2310269 - RNA, 19 nt, Homo sapiens
  misc_RNA (1)...(19): siRNA sense strand
cuaaauuguucuguaggaa

SEQ ID NO: 2310270 - RNA, 19 nt, Homo sapiens
  misc_RNA (1)...(19): siRNA sense strand
caacugaugaacaagaaga

SEQ ID NO: 2310271 - RNA, 19 nt, Homo sapiens
  misc_RNA (1)...(19): siRNA sense strand
gugaaaggccugcaaacca

SEQ ID NO: 2310272 - RNA, 19 nt, Homo sapiens
  misc_RNA (1)...(19): siRNA sense strand
ucauuguuccugagagaga

SEQ ID NO: 2310273 - RNA, 19 nt, Homo sapiens
  misc_RNA (1)...(19): siRNA sense strand
gcaacugaggcaaggcuga

SEQ ID NO: 2310274 - RNA, 19 nt, Homo sapiens
  misc_RNA (1)...(19): siRNA sense strand
cagcaugugucuagaggac

SEQ ID NO: 2310275 - RNA, 19 nt, Homo sapiens
  misc_RNA (1)...(19): siRNA sense strand
cuagaggacagcagauaca

SEQ ID NO: 2310276 - RNA, 19 nt, Homo sapiens
  misc_RNA (1)...(19): siRNA sense strand
acucaaugguagugucugu

SEQ ID NO: 2310277 - RNA, 19 nt, Homo sapiens
  misc_RNA (1)...(19): siRNA sense strand
ucucagaggaacauguuau

SEQ ID NO: 2310278 - RNA, 19 nt, Homo sapiens
  misc_RNA (1)...(19): siRNA sense strand
ugaccaaugaguugagagu

SEQ ID NO: 2310279 - RNA, 19 nt, Homo sapiens
  misc_RNA (1)...(19): siRNA sense strand
caggaaauuucuauccaca

SEQ ID NO: 2310280 - RNA, 19 nt, Homo sapiens
  misc_RNA (1)...(19): siRNA sense strand
gugagaagugugagaaccu

SEQ ID NO: 2310281 - RNA, 19 nt, Homo sapiens
  misc_RNA (1)...(19): siRNA sense strand
gaauaaugagacuucguuu

SEQ ID NO: 2310282 - RNA, 19 nt, Homo sapiens
  misc_RNA (1)...(19): siRNA sense strand
auugaaggacagccaaaua

SEQ ID NO: 2310283 - RNA, 19 nt, Homo sapiens
  misc_RNA (1)...(19): siRNA sense strand
aucaguaauagcagcgaua

SEQ ID NO: 2310284 - RNA, 19 nt, Homo sapiens
  misc_RNA (1)...(19): siRNA sense strand
guucaaccacucagauuau

SEQ ID NO: 2310285 - RNA, 19 nt, Homo sapiens
  misc_RNA (1)...(19): siRNA sense strand
caauacuggcaaagggaaa

SEQ ID NO: 2310286 - RNA, 19 nt, Homo sapiens
  misc_RNA (1)...(19): siRNA sense strand
ggaaaugcauagaggguuc

SEQ ID NO: 2310287 - RNA, 19 nt, Homo sapiens
  misc_RNA (1)...(19): siRNA sense strand
accaaugaguugagaguuu

SEQ ID NO: 2310288 - RNA, 19 nt, Homo sapiens
  misc_RNA (1)...(19): siRNA sense strand
gcuuauaauuugacuggau

SEQ ID NO: 2310289 - RNA, 19 nt, Homo sapiens
  misc_RNA (1)...(19): siRNA sense strand
uggcaaagggaaaugcaua

SEQ ID NO: 2310290 - RNA, 19 nt, Homo sapiens
  misc_RNA (1)...(19): siRNA sense strand
gagaauugccccaaggaua

SEQ ID NO: 2310291 - RNA, 19 nt, Homo sapiens
  misc_RNA (1)...(19): siRNA sense strand
uuacauguauggaggaaaa

SEQ ID NO: 2310292 - RNA, 19 nt, Homo sapiens
  misc_RNA (1)...(19): siRNA sense strand
aagcuguggucaauggaaa

SEQ ID NO: 2310293 - RNA, 19 nt, Homo sapiens
  misc_RNA (1)...(19): siRNA sense strand
cgaaaauaucuguggcauu

SEQ ID NO: 2310294 - RNA, 19 nt, Homo sapiens
  misc_RNA (1)...(19): siRNA sense strand
cuucagauuucauggccua

SEQ ID NO: 2310295 - RNA, 19 nt, Homo sapiens
  misc_RNA (1)...(19): siRNA sense strand
cuggaaaggugaagcaugu

SEQ ID NO: 2310296 - RNA, 19 nt, Homo sapiens
  misc_RNA (1)...(19): siRNA sense strand
guggguuguuggaggauau

SEQ ID NO: 2310297 - RNA, 19 nt, Homo sapiens
  misc_RNA (1)...(19): siRNA sense strand
gaggcaaggcugaggagga

SEQ ID NO: 2310298 - RNA, 19 nt, Homo sapiens
  misc_RNA (1)...(19): siRNA sense strand
acauuaaggaguacaaaga

SEQ ID NO: 2310299 - RNA, 19 nt, Homo sapiens
  misc_RNA (1)...(19): siRNA sense strand
cugaugaacaagaagaaaa

SEQ ID NO: 2310300 - RNA, 19 nt, Homo sapiens
  misc_RNA (1)...(19): siRNA sense strand
caggaauaugauuuggaua

SEQ ID NO: 2310301 - RNA, 19 nt, Homo sapiens
  misc_RNA (1)...(19): siRNA sense strand
auaaaggaccagugaagau

SEQ ID NO: 2310302 - RNA, 19 nt, Homo sapiens
  misc_RNA (1)...(19): siRNA sense strand
cucauaaagcuguggucaa

SEQ ID NO: 2310303 - RNA, 19 nt, Homo sapiens
  misc_RNA (1)...(19): siRNA sense strand
ggaacagugugaugcgcau

SEQ ID NO: 2310304 - RNA, 19 nt, Homo sapiens
  misc_RNA (1)...(19): siRNA sense strand
caucaaugccuccaagaau

SEQ ID NO: 2310305 - RNA, 19 nt, Homo sapiens
  misc_RNA (1)...(19): siRNA sense strand
ccugcaaaccacagugcua

SEQ ID NO: 2310306 - RNA, 19 nt, Homo sapiens
  misc_RNA (1)...(19): siRNA sense strand
cuauaaaggaccagugaag

SEQ ID NO: 2310307 - RNA, 19 nt, Homo sapiens
  misc_RNA (1)...(19): siRNA sense strand
ggauaagaacacauggagu

SEQ ID NO: 2310308 - RNA, 19 nt, Homo sapiens
  misc_RNA (1)...(19): siRNA sense strand
caguguauggaaugguaua

SEQ ID NO: 2310309 - RNA, 19 nt, Homo sapiens
  misc_RNA (1)...(19): siRNA sense strand
gaggacagcauguggagau

SEQ ID NO: 2310310 - RNA, 19 nt, Homo sapiens
  misc_RNA (1)...(19): siRNA sense strand
ccaacauuaaggaguacaa

SEQ ID NO: 2310311 - RNA, 19 nt, Homo sapiens
  misc_RNA (1)...(19): siRNA sense strand
caacugggaaugugaccaa

SEQ ID NO: 2310312 - RNA, 19 nt, Homo sapiens
  misc_RNA (1)...(19): siRNA sense strand
gagagauggcaaugagacu

SEQ ID NO: 2310313 - RNA, 19 nt, Homo sapiens
  misc_RNA (1)...(19): siRNA sense strand
ggagaguguaagaucagua

SEQ ID NO: 2310314 - RNA, 19 nt, Homo sapiens
  misc_RNA (1)...(19): siRNA sense strand
uguacugaucccagcaaua

SEQ ID NO: 2310315 - RNA, 19 nt, Homo sapiens
  misc_RNA (1)...(19): siRNA sense strand
ggauauauguucaaccacu

SEQ ID NO: 2310316 - RNA, 19 nt, Homo sapiens
  misc_RNA (1)...(19): siRNA sense strand
acgaagugcacguggcuca

SEQ ID NO: 2310317 - RNA, 19 nt, Homo sapiens
  misc_RNA (1)...(19): siRNA sense strand
gagaauuaugacaaugcua

SEQ ID NO: 2310318 - RNA, 19 nt, Homo sapiens
  misc_RNA (1)...(19): siRNA sense strand
gcucauugaaggacagcca

SEQ ID NO: 2310319 - RNA, 19 nt, Homo sapiens
  misc_RNA (1)...(19): siRNA sense strand
ucauugaaggacagccaaa

SEQ ID NO: 2310320 - RNA, 19 nt, Homo sapiens
  misc_RNA (1)...(19): siRNA sense strand
agaauugccccaaggauaa

SEQ ID NO: 2310321 - RNA, 19 nt, Homo sapiens
  misc_RNA (1)...(19): siRNA sense strand
gcuggcauuugguuggaaa

SEQ ID NO: 2310322 - RNA, 19 nt, Homo sapiens
  misc_RNA (1)...(19): siRNA sense strand
cccagaagaagguagaauu

SEQ ID NO: 2310323 - RNA, 19 nt, Homo sapiens
  misc_RNA (1)...(19): siRNA sense strand
auggaaugguauacgauga

SEQ ID NO: 2310324 - RNA, 19 nt, Homo sapiens
  misc_RNA (1)...(19): siRNA sense strand
aggaguacaaagauaguuu

SEQ ID NO: 2310325 - RNA, 19 nt, Homo sapiens
  misc_RNA (1)...(19): siRNA sense strand
gccaaauagaauaaugaga

SEQ ID NO: 2310326 - RNA, 19 nt, Homo sapiens
  misc_RNA (1)...(19): siRNA sense strand
ggagauugcaccagcggca

SEQ ID NO: 2310327 - RNA, 19 nt, Homo sapiens
  misc_RNA (1)...(19): siRNA sense strand
gugccagcuaugugaggua

SEQ ID NO: 2310328 - RNA, 19 nt, Homo sapiens
  misc_RNA (1)...(19): siRNA sense strand
ggaaacacacacaaugaca

SEQ ID NO: 2310329 - RNA, 19 nt, Homo sapiens
  misc_RNA (1)...(19): siRNA sense strand
cgauacuguugaaugugaa

SEQ ID NO: 2310330 - RNA, 19 nt, Homo sapiens
  misc_RNA (1)...(19): siRNA sense strand
caucgaggcaucugcaauu

SEQ ID NO: 2310331 - RNA, 19 nt, Homo sapiens
  misc_RNA (1)...(19): siRNA sense strand
cagccaaauagaauaauga

SEQ ID NO: 2310332 - RNA, 19 nt, Homo sapiens
  misc_RNA (1)...(19): siRNA sense strand
aggacagccaaauagaaua

SEQ ID NO: 2310333 - RNA, 19 nt, Homo sapiens
  misc_RNA (1)...(19): siRNA sense strand
cuaaauuguucuguaggaa

SEQ ID NO: 2310334 - RNA, 19 nt, Homo sapiens
  misc_RNA (1)...(19): siRNA sense strand
caacugaugaacaagaaga

SEQ ID NO: 2310335 - RNA, 19 nt, Homo sapiens
  misc_RNA (1)...(19): siRNA sense strand
gugaaaggccugcaaacca

SEQ ID NO: 2310336 - RNA, 19 nt, Homo sapiens
  misc_RNA (1)...(19): siRNA sense strand
ucauuguuccugagagaga

SEQ ID NO: 2310337 - RNA, 19 nt, Homo sapiens
  misc_RNA (1)...(19): siRNA sense strand
gcaacugaggcaaggcuga

SEQ ID NO: 2310338 - RNA, 19 nt, Homo sapiens
  misc_RNA (1)...(19): siRNA sense strand
cagcaugugucuagaggac

SEQ ID NO: 2310339 - RNA, 19 nt, Homo sapiens
  misc_RNA (1)...(19): siRNA sense strand
cuagaggacagcagauaca

SEQ ID NO: 2310340 - RNA, 19 nt, Homo sapiens
  misc_RNA (1)...(19): siRNA sense strand
acucaaugguagugucugu

SEQ ID NO: 2310341 - RNA, 19 nt, Homo sapiens
  misc_RNA (1)...(19): siRNA sense strand
ucucagaggaacauguuau

SEQ ID NO: 2310342 - RNA, 19 nt, Homo sapiens
  misc_RNA (1)...(19): siRNA sense strand
ugaccaaugaguugagagu

SEQ ID NO: 2310343 - RNA, 19 nt, Homo sapiens
  misc_RNA (1)...(19): siRNA sense strand
caggaaauuucuauccaca

SEQ ID NO: 2310344 - RNA, 19 nt, Homo sapiens
  misc_RNA (1)...(19): siRNA sense strand
gugagaagugugagaaccu

SEQ ID NO: 2310345 - RNA, 19 nt, Homo sapiens
  misc_RNA (1)...(19): siRNA sense strand
gaauaaugagacuucguuu

SEQ ID NO: 2310346 - RNA, 19 nt, Homo sapiens
  misc_RNA (1)...(19): siRNA sense strand
auugaaggacagccaaaua

SEQ ID NO: 2310347 - RNA, 19 nt, Homo sapiens
  misc_RNA (1)...(19): siRNA sense strand
aucaguaauagcagcgaua

SEQ ID NO: 2310348 - RNA, 19 nt, Homo sapiens
  misc_RNA (1)...(19): siRNA sense strand
guucaaccacucagauuau

SEQ ID NO: 2310349 - RNA, 19 nt, Homo sapiens
  misc_RNA (1)...(19): siRNA sense strand
caauacuggcaaagggaaa

SEQ ID NO: 2310350 - RNA, 19 nt, Homo sapiens
  misc_RNA (1)...(19): siRNA sense strand
ggaaaugcauagaggguuc

SEQ ID NO: 2310351 - RNA, 19 nt, Homo sapiens
  misc_RNA (1)...(19): siRNA sense strand
accaaugaguugagaguuu

SEQ ID NO: 2310352 - RNA, 19 nt, Homo sapiens
  misc_RNA (1)...(19): siRNA sense strand
gcuuauaauuugacuggau

SEQ ID NO: 2310353 - RNA, 19 nt, Homo sapiens
  misc_RNA (1)...(19): siRNA sense strand
uggcaaagggaaaugcaua

SEQ ID NO: 2310354 - RNA, 19 nt, Homo sapiens
  misc_RNA (1)...(19): siRNA sense strand
gagaauugccccaaggaua

SEQ ID NO: 2310355 - RNA, 19 nt, Homo sapiens
  misc_RNA (1)...(19): siRNA sense strand
uuacauguauggaggaaaa

SEQ ID NO: 2310356 - RNA, 19 nt, Homo sapiens
  misc_RNA (1)...(19): siRNA sense strand
aagcuguggucaauggaaa

SEQ ID NO: 2310357 - RNA, 19 nt, Homo sapiens
  misc_RNA (1)...(19): siRNA sense strand
cgaaaauaucuguggcauu

SEQ ID NO: 2310358 - RNA, 19 nt, Homo sapiens
  misc_RNA (1)...(19): siRNA sense strand
cuucagauuucauggccua

SEQ ID NO: 2310359 - RNA, 19 nt, Homo sapiens
  misc_RNA (1)...(19): siRNA sense strand
cuggaaaggugaagcaugu

SEQ ID NO: 2310360 - RNA, 19 nt, Homo sapiens
  misc_RNA (1)...(19): siRNA sense strand
guggguuguuggaggauau

SEQ ID NO: 2310361 - RNA, 19 nt, Homo sapiens
  misc_RNA (1)...(19): siRNA sense strand
gaggcaaggcugaggagga

SEQ ID NO: 2310362 - RNA, 19 nt, Homo sapiens
  misc_RNA (1)...(19): siRNA sense strand
acauuaaggaguacaaaga

SEQ ID NO: 2310363 - RNA, 19 nt, Homo sapiens
  misc_RNA (1)...(19): siRNA sense strand
cugaugaacaagaagaaaa

SEQ ID NO: 2310364 - RNA, 19 nt, Homo sapiens
  misc_RNA (1)...(19): siRNA sense strand
caggaauaugauuuggaua

SEQ ID NO: 2310365 - RNA, 19 nt, Homo sapiens
  misc_RNA (1)...(19): siRNA sense strand
auaaaggaccagugaagau

SEQ ID NO: 2310366 - RNA, 19 nt, Homo sapiens
  misc_RNA (1)...(19): siRNA sense strand
cucauaaagcuguggucaa

SEQ ID NO: 2310367 - RNA, 19 nt, Homo sapiens
  misc_RNA (1)...(19): siRNA sense strand
ggaacagugugaugcgcau

SEQ ID NO: 2310368 - RNA, 19 nt, Homo sapiens
  misc_RNA (1)...(19): siRNA sense strand
caucaaugccuccaagaau

SEQ ID NO: 2310369 - RNA, 19 nt, Homo sapiens
  misc_RNA (1)...(19): siRNA sense strand
ccugcaaaccacagugcua

SEQ ID NO: 2310370 - RNA, 19 nt, Homo sapiens
  misc_RNA (1)...(19): siRNA sense strand
cuauaaaggaccagugaag

SEQ ID NO: 2310371 - RNA, 19 nt, Homo sapiens
  misc_RNA (1)...(19): siRNA sense strand
ggauaagaacacauggagu

SEQ ID NO: 2310372 - RNA, 19 nt, Homo sapiens
  misc_RNA (1)...(19): siRNA sense strand
caguguauggaaugguaua

SEQ ID NO: 2310373 - RNA, 19 nt, Homo sapiens
  misc_RNA (1)...(19): siRNA sense strand
gaggacagcauguggagau

SEQ ID NO: 2310374 - RNA, 19 nt, Homo sapiens
  misc_RNA (1)...(19): siRNA sense strand
ccaacauuaaggaguacaa

SEQ ID NO: 2310375 - RNA, 19 nt, Homo sapiens
  misc_RNA (1)...(19): siRNA sense strand
caacugggaaugugaccaa

SEQ ID NO: 2310376 - RNA, 19 nt, Homo sapiens
  misc_RNA (1)...(19): siRNA sense strand
gagagauggcaaugagacu

SEQ ID NO: 2310377 - RNA, 19 nt, Homo sapiens
  misc_RNA (1)...(19): siRNA sense strand
ggagaguguaagaucagua

SEQ ID NO: 2310378 - RNA, 19 nt, Homo sapiens
  misc_RNA (1)...(19): siRNA sense strand
uguacugaucccagcaaua

SEQ ID NO: 2310379 - RNA, 19 nt, Homo sapiens
  misc_RNA (1)...(19): siRNA sense strand
ggauauauguucaaccacu

SEQ ID NO: 2310380 - RNA, 19 nt, Homo sapiens
  misc_RNA (1)...(19): siRNA sense strand
acgaagugcacguggcuca

SEQ ID NO: 2310381 - RNA, 19 nt, Homo sapiens
  misc_RNA (1)...(19): siRNA sense strand
gagaauuaugacaaugcua

SEQ ID NO: 2310382 - RNA, 19 nt, Homo sapiens
  misc_RNA (1)...(19): siRNA sense strand
gcucauugaaggacagcca

SEQ ID NO: 2310383 - RNA, 19 nt, Homo sapiens
  misc_RNA (1)...(19): siRNA sense strand
ucauugaaggacagccaaa

SEQ ID NO: 2310384 - RNA, 19 nt, Homo sapiens
  misc_RNA (1)...(19): siRNA sense strand
agaauugccccaaggauaa

SEQ ID NO: 2310385 - RNA, 19 nt, Homo sapiens
  misc_RNA (1)...(19): siRNA sense strand
gcuggcauuugguuggaaa

SEQ ID NO: 2310386 - RNA, 19 nt, Homo sapiens
  misc_RNA (1)...(19): siRNA sense strand
cccagaagaagguagaauu

SEQ ID NO: 2310387 - RNA, 19 nt, Homo sapiens
  misc_RNA (1)...(19): siRNA sense strand
auggaaugguauacgauga

SEQ ID NO: 2310388 - RNA, 19 nt, Homo sapiens
  misc_RNA (1)...(19): siRNA sense strand
aggaguacaaagauaguuu

SEQ ID NO: 2310389 - RNA, 19 nt, Homo sapiens
  misc_RNA (1)...(19): siRNA sense strand
gccaaauagaauaaugaga

SEQ ID NO: 2310390 - RNA, 19 nt, Homo sapiens
  misc_RNA (1)...(19): siRNA sense strand
ggagauugcaccagcggca

SEQ ID NO: 2310391 - RNA, 19 nt, Homo sapiens
  misc_RNA (1)...(19): siRNA sense strand
gugccagcuaugugaggua

SEQ ID NO: 2310392 - RNA, 19 nt, Homo sapiens
  misc_RNA (1)...(19): siRNA sense strand
ggaaacacacacaaugaca

SEQ ID NO: 2310393 - RNA, 19 nt, Homo sapiens
  misc_RNA (1)...(19): siRNA sense strand
cgauacuguugaaugugaa

SEQ ID NO: 2310394 - RNA, 19 nt, Homo sapiens
  misc_RNA (1)...(19): siRNA sense strand
caucgaggcaucugcaauu

SEQ ID NO: 2310395 - RNA, 19 nt, Homo sapiens
  misc_RNA (1)...(19): siRNA sense strand
cagccaaauagaauaauga

SEQ ID NO: 2310396 - RNA, 19 nt, Homo sapiens
  misc_RNA (1)...(19): siRNA sense strand
aggacagccaaauagaaua

SEQ ID NO: 2310397 - RNA, 19 nt, Homo sapiens
  misc_RNA (1)...(19): siRNA sense strand
cuaaauuguucuguaggaa

SEQ ID NO: 2310398 - RNA, 19 nt, Homo sapiens
  misc_RNA (1)...(19): siRNA sense strand
caacugaugaacaagaaga

SEQ ID NO: 2310399 - RNA, 19 nt, Homo sapiens
  misc_RNA (1)...(19): siRNA sense strand
gugaaaggccugcaaacca

SEQ ID NO: 2310400 - RNA, 19 nt, Homo sapiens
  misc_RNA (1)...(19): siRNA sense strand
ucauuguuccugagagaga

SEQ ID NO: 2310401 - RNA, 19 nt, Homo sapiens
  misc_RNA (1)...(19): siRNA sense strand
gcaacugaggcaaggcuga

SEQ ID NO: 2310402 - RNA, 19 nt, Homo sapiens
  misc_RNA (1)...(19): siRNA sense strand
cagcaugugucuagaggac

SEQ ID NO: 2310403 - RNA, 19 nt, Homo sapiens
  misc_RNA (1)...(19): siRNA sense strand
cuagaggacagcagauaca

SEQ ID NO: 2310404 - RNA, 19 nt, Homo sapiens
  misc_RNA (1)...(19): siRNA sense strand
acucaaugguagugucugu

SEQ ID NO: 2310405 - RNA, 19 nt, Homo sapiens
  misc_RNA (1)...(19): siRNA sense strand
ucucagaggaacauguuau

SEQ ID NO: 2310406 - RNA, 19 nt, Homo sapiens
  misc_RNA (1)...(19): siRNA sense strand
ugaccaaugaguugagagu

SEQ ID NO: 2310407 - RNA, 19 nt, Homo sapiens
  misc_RNA (1)...(19): siRNA sense strand
caggaaauuucuauccaca

SEQ ID NO: 2310408 - RNA, 19 nt, Homo sapiens
  misc_RNA (1)...(19): siRNA sense strand
gugagaagugugagaaccu

SEQ ID NO: 2310409 - RNA, 19 nt, Homo sapiens
  misc_RNA (1)...(19): siRNA sense strand
gaauaaugagacuucguuu

SEQ ID NO: 2310410 - RNA, 19 nt, Homo sapiens
  misc_RNA (1)...(19): siRNA sense strand
auugaaggacagccaaaua

SEQ ID NO: 2310411 - RNA, 19 nt, Homo sapiens
  misc_RNA (1)...(19): siRNA sense strand
aucaguaauagcagcgaua

SEQ ID NO: 2310412 - RNA, 19 nt, Homo sapiens
  misc_RNA (1)...(19): siRNA sense strand
guucaaccacucagauuau

SEQ ID NO: 2310413 - RNA, 19 nt, Homo sapiens
  misc_RNA (1)...(19): siRNA sense strand
gaaguaacauugagggcuu

SEQ ID NO: 2310414 - RNA, 19 nt, Homo sapiens
  misc_RNA (1)...(19): siRNA sense strand
aggacaaaggagagaaaga

SEQ ID NO: 2310415 - RNA, 19 nt, Homo sapiens
  misc_RNA (1)...(19): siRNA sense strand
ggauugggcuccagcgaga

SEQ ID NO: 2310416 - RNA, 19 nt, Homo sapiens
  misc_RNA (1)...(19): siRNA sense strand
gugacaaggacgagacuca

SEQ ID NO: 2310417 - RNA, 19 nt, Homo sapiens
  misc_RNA (1)...(19): siRNA sense strand
caauguagccuguggggaa

SEQ ID NO: 2310418 - RNA, 19 nt, Homo sapiens
  misc_RNA (1)...(19): siRNA sense strand
gggaaggugacaaggacga

SEQ ID NO: 2310419 - RNA, 19 nt, Homo sapiens
  misc_RNA (1)...(19): siRNA sense strand
gcgaaugcuggguuggcua

SEQ ID NO: 2310420 - RNA, 19 nt, Homo sapiens
  misc_RNA (1)...(19): siRNA sense strand
cgauggcacugacgggcaa

SEQ ID NO: 2310421 - RNA, 19 nt, Homo sapiens
  misc_RNA (1)...(19): siRNA sense strand
agggaggagaagaaggaga

SEQ ID NO: 2310422 - RNA, 19 nt, Homo sapiens
  misc_RNA (1)...(19): siRNA sense strand
agagcagggccauggagaa

SEQ ID NO: 2310423 - RNA, 19 nt, Homo sapiens
  misc_RNA (1)...(19): siRNA sense strand
uggccacugugaagagcaa

SEQ ID NO: 2310424 - RNA, 19 nt, Homo sapiens
  misc_RNA (1)...(19): siRNA sense strand
augaggaggacaaaggaga

SEQ ID NO: 2310425 - RNA, 19 nt, Homo sapiens
  misc_RNA (1)...(19): siRNA sense strand
agagcaaggaggaggccca

SEQ ID NO: 2310426 - RNA, 19 nt, Homo sapiens
  misc_RNA (1)...(19): siRNA sense strand
gggccauggagaaccagua

SEQ ID NO: 2310427 - RNA, 19 nt, Homo sapiens
  misc_RNA (1)...(19): siRNA sense strand
uggaagauucugugagaua

SEQ ID NO: 2310428 - RNA, 19 nt, Homo sapiens
  misc_RNA (1)...(19): siRNA sense strand
ggcaaauggaaguggacaa

SEQ ID NO: 2310429 - RNA, 19 nt, Homo sapiens
  misc_RNA (1)...(19): siRNA sense strand
ccucaaugaaauaggaaga

SEQ ID NO: 2310430 - RNA, 19 nt, Homo sapiens
  misc_RNA (1)...(19): siRNA sense strand
uggacaaagcggucaaaua

SEQ ID NO: 2310431 - RNA, 19 nt, Homo sapiens
  misc_RNA (1)...(19): siRNA sense strand
ccaugaagccucagguuau

SEQ ID NO: 2310432 - RNA, 19 nt, Homo sapiens
  misc_RNA (1)...(19): siRNA sense strand
aggauggaauugaugguua

SEQ ID NO: 2310433 - RNA, 19 nt, Homo sapiens
  misc_RNA (1)...(19): siRNA sense strand
aggcaggcugugugagaaa

SEQ ID NO: 2310434 - RNA, 19 nt, Homo sapiens
  misc_RNA (1)...(19): siRNA sense strand
cugccaacauggagguauu

SEQ ID NO: 2310435 - RNA, 19 nt, Homo sapiens
  misc_RNA (1)...(19): siRNA sense strand
acauuugguuucagaacaa

SEQ ID NO: 2310436 - RNA, 19 nt, Homo sapiens
  misc_RNA (1)...(19): siRNA sense strand
ggaaaaucgaaaagggaga

SEQ ID NO: 2310437 - RNA, 19 nt, Homo sapiens
  misc_RNA (1)...(19): siRNA sense strand
aauagaaaucggaggcauu

SEQ ID NO: 2310438 - RNA, 19 nt, Homo sapiens
  misc_RNA (1)...(19): siRNA sense strand
gcuucaaccaucaggcuua

SEQ ID NO: 2310439 - RNA, 19 nt, Homo sapiens
  misc_RNA (1)...(19): siRNA sense strand
gggaauauuaccagagaac

SEQ ID NO: 2310440 - RNA, 19 nt, Homo sapiens
  misc_RNA (1)...(19): siRNA sense strand
acuggagaauggugugaaa

SEQ ID NO: 2310441 - RNA, 19 nt, Homo sapiens
  misc_RNA (1)...(19): siRNA sense strand
gcuacaugccucaaugaaa

SEQ ID NO: 2310442 - RNA, 19 nt, Homo sapiens
  misc_RNA (1)...(19): siRNA sense strand
gggaauuauacuugccauu

SEQ ID NO: 2310443 - RNA, 19 nt, Homo sapiens
  misc_RNA (1)...(19): siRNA sense strand
gguaauauuugcagaggcu

SEQ ID NO: 2310444 - RNA, 19 nt, Homo sapiens
  misc_RNA (1)...(19): siRNA sense strand
cugacaagcaagagacuga

SEQ ID NO: 2310445 - RNA, 19 nt, Homo sapiens
  misc_RNA (1)...(19): siRNA sense strand
cuucaaaggcuguauccaa

SEQ ID NO: 2310446 - RNA, 19 nt, Homo sapiens
  misc_RNA (1)...(19): siRNA sense strand
gugggaaugagaagacaaa

SEQ ID NO: 2310447 - RNA, 19 nt, Homo sapiens
  misc_RNA (1)...(19): siRNA sense strand
ggaaaauuuugcagacaga

SEQ ID NO: 2310448 - RNA, 19 nt, Homo sapiens
  misc_RNA (1)...(19): siRNA sense strand
gugaaguggauauagacaa

SEQ ID NO: 2310449 - RNA, 19 nt, Homo sapiens
  misc_RNA (1)...(19): siRNA sense strand
ggcauuucguggagguaau

SEQ ID NO: 2310450 - RNA, 19 nt, Homo sapiens
  misc_RNA (1)...(19): siRNA sense strand
ucuucaaacccuugccaaa

SEQ ID NO: 2310451 - RNA, 19 nt, Homo sapiens
  misc_RNA (1)...(19): siRNA sense strand
cuguaucagucuucacaaa

SEQ ID NO: 2310452 - RNA, 19 nt, Homo sapiens
  misc_RNA (1)...(19): siRNA sense strand
cucccaaauuaguaguaaa

SEQ ID NO: 2310453 - RNA, 19 nt, Homo sapiens
  misc_RNA (1)...(19): siRNA sense strand
gaauauuaccagagaacuc

SEQ ID NO: 2310454 - RNA, 19 nt, Homo sapiens
  misc_RNA (1)...(19): siRNA sense strand
cagaacaagggaugcaaau

SEQ ID NO: 2310455 - RNA, 19 nt, Homo sapiens
  misc_RNA (1)...(19): siRNA sense strand
gggaaugagaagacaaauc

SEQ ID NO: 2310456 - RNA, 19 nt, Homo sapiens
  misc_RNA (1)...(19): siRNA sense strand
agcaagagacugaacuuaa

SEQ ID NO: 2310457 - RNA, 19 nt, Homo sapiens
  misc_RNA (1)...(19): siRNA sense strand
agauauagcuguaacugca

SEQ ID NO: 2310458 - RNA, 19 nt, Homo sapiens
  misc_RNA (1)...(19): siRNA sense strand
aggacuuacucaacaaauu

SEQ ID NO: 2310459 - RNA, 19 nt, Homo sapiens
  misc_RNA (1)...(19): siRNA sense strand
acuuaucaauucaggucaa

SEQ ID NO: 2310460 - RNA, 19 nt, Homo sapiens
  misc_RNA (1)...(19): siRNA sense strand
cagauauuuaugugggaga

SEQ ID NO: 2310461 - RNA, 19 nt, Homo sapiens
  misc_RNA (1)...(19): siRNA sense strand
caauagaaaucggaggcau

SEQ ID NO: 2310462 - RNA, 19 nt, Homo sapiens
  misc_RNA (1)...(19): siRNA sense strand
gaagauucugugagauaga

SEQ ID NO: 2310463 - RNA, 19 nt, Homo sapiens
  misc_RNA (1)...(19): siRNA sense strand
agaacuugccugggaauua

SEQ ID NO: 2310464 - RNA, 19 nt, Homo sapiens
  misc_RNA (1)...(19): siRNA sense strand
aggaagagcaauuucucaa

SEQ ID NO: 2310465 - RNA, 19 nt, Homo sapiens
  misc_RNA (1)...(19): siRNA sense strand
gaggaaacugugaagacau

SEQ ID NO: 2310466 - RNA, 19 nt, Homo sapiens
  misc_RNA (1)...(19): siRNA sense strand
caucuacauugguggccua

SEQ ID NO: 2310467 - RNA, 19 nt, Homo sapiens
  misc_RNA (1)...(19): siRNA sense strand
aaauggaaguggacaacga

SEQ ID NO: 2310468 - RNA, 19 nt, Homo sapiens
  misc_RNA (1)...(19): siRNA sense strand
gagacagagcuauugacaa

SEQ ID NO: 2310469 - RNA, 19 nt, Homo sapiens
  misc_RNA (1)...(19): siRNA sense strand
cauuaauaaaccucaggaa

SEQ ID NO: 2310470 - RNA, 19 nt, Homo sapiens
  misc_RNA (1)...(19): siRNA sense strand
caauauaaagggccugcaa

SEQ ID NO: 2310471 - RNA, 19 nt, Homo sapiens
  misc_RNA (1)...(19): siRNA sense strand
gcagauuuggccaggauga

SEQ ID NO: 2310472 - RNA, 19 nt, Homo sapiens
  misc_RNA (1)...(19): siRNA sense strand
cucucaaauucuugccaaa

SEQ ID NO: 2310473 - RNA, 19 nt, Homo sapiens
  misc_RNA (1)...(19): siRNA sense strand
ggauggaauugaugguuac

SEQ ID NO: 2310474 - RNA, 19 nt, Homo sapiens
  misc_RNA (1)...(19): siRNA sense strand
cuugggauggucagggaaa

SEQ ID NO: 2310475 - RNA, 19 nt, Homo sapiens
  misc_RNA (1)...(19): siRNA sense strand
gcuuccagcccuugccaaa

SEQ ID NO: 2310476 - RNA, 19 nt, Homo sapiens
  misc_RNA (1)...(19): siRNA sense strand
guaaacugugaauuggaaa

SEQ ID NO: 2310477 - RNA, 19 nt, Homo sapiens
  misc_RNA (1)...(19): siRNA sense strand
caacugucugagagaguau

SEQ ID NO: 2310478 - RNA, 19 nt, Homo sapiens
  misc_RNA (1)...(19): siRNA sense strand
ggaaacacugugaacucaa

SEQ ID NO: 2310479 - RNA, 19 nt, Homo sapiens
  misc_RNA (1)...(19): siRNA sense strand
gugaaaaggacauugauga

SEQ ID NO: 2310480 - RNA, 19 nt, Homo sapiens
  misc_RNA (1)...(19): siRNA sense strand
gcaucugcccugcuggaua

SEQ ID NO: 2310481 - RNA, 19 nt, Homo sapiens
  misc_RNA (1)...(19): siRNA sense strand
acauuacccuggagaacau

SEQ ID NO: 2310482 - RNA, 19 nt, Homo sapiens
  misc_RNA (1)...(19): siRNA sense strand
acaaagacugugacaacau

SEQ ID NO: 2310483 - RNA, 19 nt, Homo sapiens
  misc_RNA (1)...(19): siRNA sense strand
gcaaauguccuccugggua

SEQ ID NO: 2310484 - RNA, 19 nt, Homo sapiens
  misc_RNA (1)...(19): siRNA sense strand
cagagucaccagugugcaa

SEQ ID NO: 2310485 - RNA, 19 nt, Homo sapiens
  misc_RNA (1)...(19): siRNA sense strand
cacaauuauucugguguaa

SEQ ID NO: 2310486 - RNA, 19 nt, Homo sapiens
  misc_RNA (1)...(19): siRNA sense strand
agucaaaggugcuucuguu

SEQ ID NO: 2310487 - RNA, 19 nt, Homo sapiens
  misc_RNA (1)...(19): siRNA sense strand
ugaacugugaaguggauau

SEQ ID NO: 2310488 - RNA, 19 nt, Homo sapiens
  misc_RNA (1)...(19): siRNA sense strand
gcuucugugucccaggaua

SEQ ID NO: 2310489 - RNA, 19 nt, Homo sapiens
  misc_RNA (1)...(19): siRNA sense strand
uggaagauucugugagaua

SEQ ID NO: 2310490 - RNA, 19 nt, Homo sapiens
  misc_RNA (1)...(19): siRNA sense strand
ggcaaauggaaguggacaa

SEQ ID NO: 2310491 - RNA, 19 nt, Homo sapiens
  misc_RNA (1)...(19): siRNA sense strand
ccucaaugaaauaggaaga

SEQ ID NO: 2310492 - RNA, 19 nt, Homo sapiens
  misc_RNA (1)...(19): siRNA sense strand
uggacaaagcggucaaaua

SEQ ID NO: 2310493 - RNA, 19 nt, Homo sapiens
  misc_RNA (1)...(19): siRNA sense strand
ccaugaagccucagguuau

SEQ ID NO: 2310494 - RNA, 19 nt, Homo sapiens
  misc_RNA (1)...(19): siRNA sense strand
aggauggaauugaugguua

SEQ ID NO: 2310495 - RNA, 19 nt, Homo sapiens
  misc_RNA (1)...(19): siRNA sense strand
aggcaggcugugugagaaa

SEQ ID NO: 2310496 - RNA, 19 nt, Homo sapiens
  misc_RNA (1)...(19): siRNA sense strand
cugccaacauggagguauu

SEQ ID NO: 2310497 - RNA, 19 nt, Homo sapiens
  misc_RNA (1)...(19): siRNA sense strand
acauuugguuucagaacaa

SEQ ID NO: 2310498 - RNA, 19 nt, Homo sapiens
  misc_RNA (1)...(19): siRNA sense strand
ggaaaaucgaaaagggaga

SEQ ID NO: 2310499 - RNA, 19 nt, Homo sapiens
  misc_RNA (1)...(19): siRNA sense strand
aauagaaaucggaggcauu

SEQ ID NO: 2310500 - RNA, 19 nt, Homo sapiens
  misc_RNA (1)...(19): siRNA sense strand
gcuucaaccaucaggcuua

SEQ ID NO: 2310501 - RNA, 19 nt, Homo sapiens
  misc_RNA (1)...(19): siRNA sense strand
gggaauauuaccagagaac

SEQ ID NO: 2310502 - RNA, 19 nt, Homo sapiens
  misc_RNA (1)...(19): siRNA sense strand
acuggagaauggugugaaa

SEQ ID NO: 2310503 - RNA, 19 nt, Homo sapiens
  misc_RNA (1)...(19): siRNA sense strand
gcuacaugccucaaugaaa

SEQ ID NO: 2310504 - RNA, 19 nt, Homo sapiens
  misc_RNA (1)...(19): siRNA sense strand
gggaauuauacuugccauu

SEQ ID NO: 2310505 - RNA, 19 nt, Homo sapiens
  misc_RNA (1)...(19): siRNA sense strand
gguaauauuugcagaggcu

SEQ ID NO: 2310506 - RNA, 19 nt, Homo sapiens
  misc_RNA (1)...(19): siRNA sense strand
cugacaagcaagagacuga

SEQ ID NO: 2310507 - RNA, 19 nt, Homo sapiens
  misc_RNA (1)...(19): siRNA sense strand
cuucaaaggcuguauccaa

SEQ ID NO: 2310508 - RNA, 19 nt, Homo sapiens
  misc_RNA (1)...(19): siRNA sense strand
gugggaaugagaagacaaa

SEQ ID NO: 2310509 - RNA, 19 nt, Homo sapiens
  misc_RNA (1)...(19): siRNA sense strand
ggaaaauuuugcagacaga

SEQ ID NO: 2310510 - RNA, 19 nt, Homo sapiens
  misc_RNA (1)...(19): siRNA sense strand
gugaaguggauauagacaa

SEQ ID NO: 2310511 - RNA, 19 nt, Homo sapiens
  misc_RNA (1)...(19): siRNA sense strand
caauggagagacugauuua

SEQ ID NO: 2310512 - RNA, 19 nt, Homo sapiens
  misc_RNA (1)...(19): siRNA sense strand
ggcauuucguggagguaau

SEQ ID NO: 2310513 - RNA, 19 nt, Homo sapiens
  misc_RNA (1)...(19): siRNA sense strand
ucuucaaacccuugccaaa

SEQ ID NO: 2310514 - RNA, 19 nt, Homo sapiens
  misc_RNA (1)...(19): siRNA sense strand
cuguaucagucuucacaaa

SEQ ID NO: 2310515 - RNA, 19 nt, Homo sapiens
  misc_RNA (1)...(19): siRNA sense strand
guggaaauguggaacuuga

SEQ ID NO: 2310516 - RNA, 19 nt, Homo sapiens
  misc_RNA (1)...(19): siRNA sense strand
cucccaaauuaguaguaaa

SEQ ID NO: 2310517 - RNA, 19 nt, Homo sapiens
  misc_RNA (1)...(19): siRNA sense strand
gaauauuaccagagaacuc

SEQ ID NO: 2310518 - RNA, 19 nt, Homo sapiens
  misc_RNA (1)...(19): siRNA sense strand
cagaacaagggaugcaaau

SEQ ID NO: 2310519 - RNA, 19 nt, Homo sapiens
  misc_RNA (1)...(19): siRNA sense strand
gggaaugagaagacaaauc

SEQ ID NO: 2310520 - RNA, 19 nt, Homo sapiens
  misc_RNA (1)...(19): siRNA sense strand
agcaagagacugaacuuaa

SEQ ID NO: 2310521 - RNA, 19 nt, Homo sapiens
  misc_RNA (1)...(19): siRNA sense strand
agauauagcuguaacugca

SEQ ID NO: 2310522 - RNA, 19 nt, Homo sapiens
  misc_RNA (1)...(19): siRNA sense strand
aggacuuacucaacaaauu

SEQ ID NO: 2310523 - RNA, 19 nt, Homo sapiens
  misc_RNA (1)...(19): siRNA sense strand
acuuaucaauucaggucaa

SEQ ID NO: 2310524 - RNA, 19 nt, Homo sapiens
  misc_RNA (1)...(19): siRNA sense strand
cagauauuuaugugggaga

SEQ ID NO: 2310525 - RNA, 19 nt, Homo sapiens
  misc_RNA (1)...(19): siRNA sense strand
caauagaaaucggaggcau

SEQ ID NO: 2310526 - RNA, 19 nt, Homo sapiens
  misc_RNA (1)...(19): siRNA sense strand
gaagauucugugagauaga

SEQ ID NO: 2310527 - RNA, 19 nt, Homo sapiens
  misc_RNA (1)...(19): siRNA sense strand
agaacuugccugggaauua

SEQ ID NO: 2310528 - RNA, 19 nt, Homo sapiens
  misc_RNA (1)...(19): siRNA sense strand
aggaagagcaauuucucaa

SEQ ID NO: 2310529 - RNA, 19 nt, Homo sapiens
  misc_RNA (1)...(19): siRNA sense strand
gaggaaacugugaagacau

SEQ ID NO: 2310530 - RNA, 19 nt, Homo sapiens
  misc_RNA (1)...(19): siRNA sense strand
caucuacauugguggccua

SEQ ID NO: 2310531 - RNA, 19 nt, Homo sapiens
  misc_RNA (1)...(19): siRNA sense strand
aaauggaaguggacaacga

SEQ ID NO: 2310532 - RNA, 19 nt, Homo sapiens
  misc_RNA (1)...(19): siRNA sense strand
gagacagagcuauugacaa

SEQ ID NO: 2310533 - RNA, 19 nt, Homo sapiens
  misc_RNA (1)...(19): siRNA sense strand
cauuaauaaaccucaggaa

SEQ ID NO: 2310534 - RNA, 19 nt, Homo sapiens
  misc_RNA (1)...(19): siRNA sense strand
caauauaaagggccugcaa

SEQ ID NO: 2310535 - RNA, 19 nt, Homo sapiens
  misc_RNA (1)...(19): siRNA sense strand
cucucaaauucuugccaaa

SEQ ID NO: 2310536 - RNA, 19 nt, Homo sapiens
  misc_RNA (1)...(19): siRNA sense strand
gcagauuuggccaggauga

SEQ ID NO: 2310537 - RNA, 19 nt, Homo sapiens
  misc_RNA (1)...(19): siRNA sense strand
ggauggaauugaugguuac

SEQ ID NO: 2310538 - RNA, 19 nt, Homo sapiens
  misc_RNA (1)...(19): siRNA sense strand
cuugggauggucagggaaa

SEQ ID NO: 2310539 - RNA, 19 nt, Homo sapiens
  misc_RNA (1)...(19): siRNA sense strand
gcuuccagcccuugccaaa

SEQ ID NO: 2310540 - RNA, 19 nt, Homo sapiens
  misc_RNA (1)...(19): siRNA sense strand
guaaacugugaauuggaaa

SEQ ID NO: 2310541 - RNA, 19 nt, Homo sapiens
  misc_RNA (1)...(19): siRNA sense strand
caacugucugagagaguau

SEQ ID NO: 2310542 - RNA, 19 nt, Homo sapiens
  misc_RNA (1)...(19): siRNA sense strand
ggaaacacugugaacucaa

SEQ ID NO: 2310543 - RNA, 19 nt, Homo sapiens
  misc_RNA (1)...(19): siRNA sense strand
gugaaaaggacauugauga

SEQ ID NO: 2310544 - RNA, 19 nt, Homo sapiens
  misc_RNA (1)...(19): siRNA sense strand
gcaucugcccugcuggaua

SEQ ID NO: 2310545 - RNA, 19 nt, Homo sapiens
  misc_RNA (1)...(19): siRNA sense strand
acauuacccuggagaacau

SEQ ID NO: 2310546 - RNA, 19 nt, Homo sapiens
  misc_RNA (1)...(19): siRNA sense strand
acaaagacugugacaacau

SEQ ID NO: 2310547 - RNA, 19 nt, Homo sapiens
  misc_RNA (1)...(19): siRNA sense strand
gcaaauguccuccugggua

SEQ ID NO: 2310548 - RNA, 19 nt, Homo sapiens
  misc_RNA (1)...(19): siRNA sense strand
cagagucaccagugugcaa

SEQ ID NO: 2310549 - RNA, 19 nt, Homo sapiens
  misc_RNA (1)...(19): siRNA sense strand
cacaauuauucugguguaa

SEQ ID NO: 2310550 - RNA, 19 nt, Homo sapiens
  misc_RNA (1)...(19): siRNA sense strand
agucaaaggugcuucuguu

SEQ ID NO: 2310551 - RNA, 19 nt, Homo sapiens
  misc_RNA (1)...(19): siRNA sense strand
cggaagaagaggugcggga

SEQ ID NO: 2310552 - RNA, 19 nt, Homo sapiens
  misc_RNA (1)...(19): siRNA sense strand
acgaguaccuggugagcgu

SEQ ID NO: 2310553 - RNA, 19 nt, Homo sapiens
  misc_RNA (1)...(19): siRNA sense strand
cugcauuccagguugagaa

SEQ ID NO: 2310554 - RNA, 19 nt, Homo sapiens
  misc_RNA (1)...(19): siRNA sense strand
cggcuuucuuccacgagua

SEQ ID NO: 2310555 - RNA, 19 nt, Homo sapiens
  misc_RNA (1)...(19): siRNA sense strand
ccauugaagaugaggaaga

SEQ ID NO: 2310556 - RNA, 19 nt, Homo sapiens
  misc_RNA (1)...(19): siRNA sense strand
gcugcgaagaaguggaaua

SEQ ID NO: 2310557 - RNA, 19 nt, Homo sapiens
  misc_RNA (1)...(19): siRNA sense strand
agugaaugguggacugaaa

SEQ ID NO: 2310558 - RNA, 19 nt, Homo sapiens
  misc_RNA (1)...(19): siRNA sense strand
ggcaaggaguggaagacaa

SEQ ID NO: 2310559 - RNA, 19 nt, Homo sapiens
  misc_RNA (1)...(19): siRNA sense strand
gagcaauaaagaaagcaaa

SEQ ID NO: 2310560 - RNA, 19 nt, Homo sapiens
  misc_RNA (1)...(19): siRNA sense strand
gggaaauauugccggcuau

SEQ ID NO: 2310561 - RNA, 19 nt, Homo sapiens
  misc_RNA (1)...(19): siRNA sense strand
cggcaaacuucccagagaa

SEQ ID NO: 2310562 - RNA, 19 nt, Homo sapiens
  misc_RNA (1)...(19): siRNA sense strand
gagaaagugacauggaaca

SEQ ID NO: 2310563 - RNA, 19 nt, Homo sapiens
  misc_RNA (1)...(19): siRNA sense strand
aagcagaaaugcagaaaau

SEQ ID NO: 2310564 - RNA, 19 nt, Homo sapiens
  misc_RNA (1)...(19): siRNA sense strand
aggaaugguaauagugaau

SEQ ID NO: 2310565 - RNA, 19 nt, Homo sapiens
  misc_RNA (1)...(19): siRNA sense strand
cggcaaaguguuuccgaau

SEQ ID NO: 2310566 - RNA, 19 nt, Homo sapiens
  misc_RNA (1)...(19): siRNA sense strand
gagugaaaauggaagaauu

SEQ ID NO: 2310567 - RNA, 19 nt, Homo sapiens
  misc_RNA (1)...(19): siRNA sense strand
ggcaaacuucccagagaaa

SEQ ID NO: 2310568 - RNA, 19 nt, Homo sapiens
  misc_RNA (1)...(19): siRNA sense strand
ccacagaagggcuaggaga

SEQ ID NO: 2310569 - RNA, 19 nt, Homo sapiens
  misc_RNA (1)...(19): siRNA sense strand
ggagcaauaaagaaagcaa

SEQ ID NO: 2310570 - RNA, 19 nt, Homo sapiens
  misc_RNA (1)...(19): siRNA sense strand
gcucauugcuacaaaagaa

SEQ ID NO: 2310571 - RNA, 19 nt, Homo sapiens
  misc_RNA (1)...(19): siRNA sense strand
ggcuccaaccagugggaaa

SEQ ID NO: 2310572 - RNA, 19 nt, Homo sapiens
  misc_RNA (1)...(19): siRNA sense strand
aauucagagucgacagcaa

SEQ ID NO: 2310573 - RNA, 19 nt, Homo sapiens
  misc_RNA (1)...(19): siRNA sense strand
cccuggagcaauaaagaaa

SEQ ID NO: 2310574 - RNA, 19 nt, Homo sapiens
  misc_RNA (1)...(19): siRNA sense strand
agaaagauggggaacgaaa

SEQ ID NO: 2310575 - RNA, 19 nt, Homo sapiens
  misc_RNA (1)...(19): siRNA sense strand
gguaauagugaauggugga

SEQ ID NO: 2310576 - RNA, 19 nt, Homo sapiens
  misc_RNA (1)...(19): siRNA sense strand
gugaagagcuaauugccuu

SEQ ID NO: 2310577 - RNA, 19 nt, Homo sapiens
  misc_RNA (1)...(19): siRNA sense strand
gcuggacaagugugagaaa

SEQ ID NO: 2310578 - RNA, 19 nt, Homo sapiens
  misc_RNA (1)...(19): siRNA sense strand
acugaaacaagaugagaga

SEQ ID NO: 2310579 - RNA, 19 nt, Homo sapiens
  misc_RNA (1)...(19): siRNA sense strand
ccaguaacaaugaugacaa

SEQ ID NO: 2310580 - RNA, 19 nt, Homo sapiens
  misc_RNA (1)...(19): siRNA sense strand
ugaagaugaggaagaagaa

SEQ ID NO: 2310581 - RNA, 19 nt, Homo sapiens
  misc_RNA (1)...(19): siRNA sense strand
gcagaaaugcagaaaauga

SEQ ID NO: 2310582 - RNA, 19 nt, Homo sapiens
  misc_RNA (1)...(19): siRNA sense strand
caaaagaagaaaacagaca

SEQ ID NO: 2310583 - RNA, 19 nt, Homo sapiens
  misc_RNA (1)...(19): siRNA sense strand
ugggaaauauugccggcua

SEQ ID NO: 2310584 - RNA, 19 nt, Homo sapiens
  misc_RNA (1)...(19): siRNA sense strand
gagauacagccuacaacaa

SEQ ID NO: 2310585 - RNA, 19 nt, Homo sapiens
  misc_RNA (1)...(19): siRNA sense strand
cauacaugguccacaaaca

SEQ ID NO: 2310586 - RNA, 19 nt, Homo sapiens
  misc_RNA (1)...(19): siRNA sense strand
uucaaaugcucgagcucua

SEQ ID NO: 2310587 - RNA, 19 nt, Homo sapiens
  misc_RNA (1)...(19): siRNA sense strand
ccacagaauuugggccuga

SEQ ID NO: 2310588 - RNA, 19 nt, Homo sapiens
  misc_RNA (1)...(19): siRNA sense strand
cggcgaaagcaaagcaaac

SEQ ID NO: 2310589 - RNA, 19 nt, Homo sapiens
  misc_RNA (1)...(19): siRNA sense strand
agaauguccaucagaggaa

SEQ ID NO: 2310590 - RNA, 19 nt, Homo sapiens
  misc_RNA (1)...(19): siRNA sense strand
ugaagaugccauugaagau

SEQ ID NO: 2310591 - RNA, 19 nt, Homo sapiens
  misc_RNA (1)...(19): siRNA sense strand
uugaagaugaggaagaaga

SEQ ID NO: 2310592 - RNA, 19 nt, Homo sapiens
  misc_RNA (1)...(19): siRNA sense strand
aggaacaguugucuaguau

SEQ ID NO: 2310593 - RNA, 19 nt, Homo sapiens
  misc_RNA (1)...(19): siRNA sense strand
cgauguaaucacugccauu

SEQ ID NO: 2310594 - RNA, 19 nt, Homo sapiens
  misc_RNA (1)...(19): siRNA sense strand
gagcuggacaagugugaga

SEQ ID NO: 2310595 - RNA, 19 nt, Homo sapiens
  misc_RNA (1)...(19): siRNA sense strand
gaaagauggggaacgaaaa

SEQ ID NO: 2310596 - RNA, 19 nt, Homo sapiens
  misc_RNA (1)...(19): siRNA sense strand
ccaugucccuagcggcaaa

SEQ ID NO: 2310597 - RNA, 19 nt, Homo sapiens
  misc_RNA (1)...(19): siRNA sense strand
ccaggagacagcagaauca

SEQ ID NO: 2310598 - RNA, 19 nt, Homo sapiens
  misc_RNA (1)...(19): siRNA sense strand
gggaguuauugcagcacca

SEQ ID NO: 2310599 - RNA, 19 nt, Homo sapiens
  misc_RNA (1)...(19): siRNA sense strand
acacgcaagcgcagaaaga

SEQ ID NO: 2310600 - RNA, 19 nt, Homo sapiens
  misc_RNA (1)...(19): siRNA sense strand
gggucaacuggacggcaaa

SEQ ID NO: 2310601 - RNA, 19 nt, Homo sapiens
  misc_RNA (1)...(19): siRNA sense strand
gcagaggaacaguugucua

SEQ ID NO: 2310602 - RNA, 19 nt, Homo sapiens
  misc_RNA (1)...(19): siRNA sense strand
cuacuuguuuugaguguaa

SEQ ID NO: 2310603 - RNA, 19 nt, Homo sapiens
  misc_RNA (1)...(19): siRNA sense strand
aaggaguggaagacaacaa

SEQ ID NO: 2310604 - RNA, 19 nt, Homo sapiens
  misc_RNA (1)...(19): siRNA sense strand
ccaguuuccaaaugugaua

SEQ ID NO: 2310605 - RNA, 19 nt, Homo sapiens
  misc_RNA (1)...(19): siRNA sense strand
auccagaaagcgaacgaaa

SEQ ID NO: 2310606 - RNA, 19 nt, Homo sapiens
  misc_RNA (1)...(19): siRNA sense strand
cagcuacgaaagaagcaua

SEQ ID NO: 2310607 - RNA, 19 nt, Homo sapiens
  misc_RNA (1)...(19): siRNA sense strand
aggccaucucugaggguga

SEQ ID NO: 2310608 - RNA, 19 nt, Homo sapiens
  misc_RNA (1)...(19): siRNA sense strand
ugggucaacuggacggcaa

SEQ ID NO: 2310609 - RNA, 19 nt, Homo sapiens
  misc_RNA (1)...(19): siRNA sense strand
cugccaacccacagcaaga

SEQ ID NO: 2310610 - RNA, 19 nt, Homo sapiens
  misc_RNA (1)...(19): siRNA sense strand
guggaauacuuuuguaaca

SEQ ID NO: 2310611 - RNA, 19 nt, Homo sapiens
  misc_RNA (1)...(19): siRNA sense strand
aaaucugagcugcgaagaa

SEQ ID NO: 2310612 - RNA, 19 nt, Homo sapiens
  misc_RNA (1)...(19): siRNA sense strand
gggaggaagaggaggacga

SEQ ID NO: 2310613 - RNA, 19 nt, Homo sapiens
  misc_RNA (1)...(19): siRNA sense strand
ggagggaggaggaagagga

SEQ ID NO: 2310614 - RNA, 19 nt, Homo sapiens
  misc_RNA (1)...(19): siRNA sense strand
gggaggaggaagaggaagc

SEQ ID NO: 2310615 - RNA, 19 nt, Homo sapiens
  misc_RNA (1)...(19): siRNA sense strand
aagaggaggacgacagcuu

SEQ ID NO: 2310616 - RNA, 19 nt, Homo sapiens
  misc_RNA (1)...(19): siRNA sense strand
agcucgugcucucgggaaa

SEQ ID NO: 2310617 - RNA, 19 nt, Homo sapiens
  misc_RNA (1)...(19): siRNA sense strand
uguucgagcuuuugggaaa

SEQ ID NO: 2310618 - RNA, 19 nt, Homo sapiens
  misc_RNA (1)...(19): siRNA sense strand
cugaggaaauccagagagu

SEQ ID NO: 2310619 - RNA, 19 nt, Homo sapiens
  misc_RNA (1)...(19): siRNA sense strand
aguuuaagaacgugcauuu

SEQ ID NO: 2310620 - RNA, 19 nt, Homo sapiens
  misc_RNA (1)...(19): siRNA sense strand
gcucuauugcugagaacau

SEQ ID NO: 2310621 - RNA, 19 nt, Homo sapiens
  misc_RNA (1)...(19): siRNA sense strand
cugaggaacguauuggaaa

SEQ ID NO: 2310622 - RNA, 19 nt, Homo sapiens
  misc_RNA (1)...(19): siRNA sense strand
uggaauaagcauuggaggu

SEQ ID NO: 2310623 - RNA, 19 nt, Homo sapiens
  misc_RNA (1)...(19): siRNA sense strand
uggcaaaucaacagugcuu

SEQ ID NO: 2310624 - RNA, 19 nt, Homo sapiens
  misc_RNA (1)...(19): siRNA sense strand
ugggcgauaucuacggaaa

SEQ ID NO: 2310625 - RNA, 19 nt, Homo sapiens
  misc_RNA (1)...(19): siRNA sense strand
gaacauugcuuauggugcu

SEQ ID NO: 2310626 - RNA, 19 nt, Homo sapiens
  misc_RNA (1)...(19): siRNA sense strand
cauguaaugcaguuagcaa

SEQ ID NO: 2310627 - RNA, 19 nt, Homo sapiens
  misc_RNA (1)...(19): siRNA sense strand
gguguuaguuauugcccau

SEQ ID NO: 2310628 - RNA, 19 nt, Homo sapiens
  misc_RNA (1)...(19): siRNA sense strand
gggauauacagaaaacuaa

SEQ ID NO: 2310629 - RNA, 19 nt, Homo sapiens
  misc_RNA (1)...(19): siRNA sense strand
acguauuggaaauguaaga

SEQ ID NO: 2310630 - RNA, 19 nt, Homo sapiens
  misc_RNA (1)...(19): siRNA sense strand
ucgagaaauaugccagcaa

SEQ ID NO: 2310631 - RNA, 19 nt, Homo sapiens
  misc_RNA (1)...(19): siRNA sense strand
aagaaaugacugaaaucga

SEQ ID NO: 2310632 - RNA, 19 nt, Homo sapiens
  misc_RNA (1)...(19): siRNA sense strand
gguugcuguucuugaccaa

SEQ ID NO: 2310633 - RNA, 19 nt, Homo sapiens
  misc_RNA (1)...(19): siRNA sense strand
aaauugggacagugaguca

SEQ ID NO: 2310634 - RNA, 19 nt, Homo sapiens
  misc_RNA (1)...(19): siRNA sense strand
cugugaccgcugaggaaau

SEQ ID NO: 2310635 - RNA, 19 nt, Homo sapiens
  misc_RNA (1)...(19): siRNA sense strand
ugacaagacucgcacagga

SEQ ID NO: 2310636 - RNA, 19 nt, Homo sapiens
  misc_RNA (1)...(19): siRNA sense strand
uagcaaggaaagaggcagu

SEQ ID NO: 2310637 - RNA, 19 nt, Homo sapiens
  misc_RNA (1)...(19): siRNA sense strand
uucaaaaccaaaugggaua

SEQ ID NO: 2310638 - RNA, 19 nt, Homo sapiens
  misc_RNA (1)...(19): siRNA sense strand
caagacucgcacaggagaa

SEQ ID NO: 2310639 - RNA, 19 nt, Homo sapiens
  misc_RNA (1)...(19): siRNA sense strand
gagaaauaugccagcaaag

SEQ ID NO: 2310640 - RNA, 19 nt, Homo sapiens
  misc_RNA (1)...(19): siRNA sense strand
gugcuuuggaguuuaagaa

SEQ ID NO: 2310641 - RNA, 19 nt, Homo sapiens
  misc_RNA (1)...(19): siRNA sense strand
gaggaaauccagagagugg

SEQ ID NO: 2310642 - RNA, 19 nt, Homo sapiens
  misc_RNA (1)...(19): siRNA sense strand
ggucauagccagaaggagu

SEQ ID NO: 2310643 - RNA, 19 nt, Homo sapiens
  misc_RNA (1)...(19): siRNA sense strand
ggaacaacaaagaaaacaa

SEQ ID NO: 2310644 - RNA, 19 nt, Homo sapiens
  misc_RNA (1)...(19): siRNA sense strand
gaacaaaaugcauaggaca

SEQ ID NO: 2310645 - RNA, 19 nt, Homo sapiens
  misc_RNA (1)...(19): siRNA sense strand
gcuaugaacacuaugggau

SEQ ID NO: 2310646 - RNA, 19 nt, Homo sapiens
  misc_RNA (1)...(19): siRNA sense strand
gucaaugggaacaggaaca

SEQ ID NO: 2310647 - RNA, 19 nt, Homo sapiens
  misc_RNA (1)...(19): siRNA sense strand
auaccuaccaggaguacaa

SEQ ID NO: 2310648 - RNA, 19 nt, Homo sapiens
  misc_RNA (1)...(19): siRNA sense strand
cagcuguggucauugggaa

SEQ ID NO: 2310649 - RNA, 19 nt, Homo sapiens
  misc_RNA (1)...(19): siRNA sense strand
aggggaagccugagccaaa

SEQ ID NO: 2310650 - RNA, 19 nt, Homo sapiens
  misc_RNA (1)...(19): siRNA sense strand
ggugcaagugacaaaggaa

SEQ ID NO: 2310651 - RNA, 19 nt, Homo sapiens
  misc_RNA (1)...(19): siRNA sense strand
ugguagugccaaagugaca

SEQ ID NO: 2310652 - RNA, 19 nt, Homo sapiens
  misc_RNA (1)...(19): siRNA sense strand
ugcaagugacaaaggaaau

SEQ ID NO: 2310653 - RNA, 19 nt, Homo sapiens
  misc_RNA (1)...(19): siRNA sense strand
gaucagaaacccaccggau

SEQ ID NO: 2310654 - RNA, 19 nt, Homo sapiens
  misc_RNA (1)...(19): siRNA sense strand
uuauagaacuggagccaag

SEQ ID NO: 2310655 - RNA, 19 nt, Homo sapiens
  misc_RNA (1)...(19): siRNA sense strand
gcagaauugcaagggacaa

SEQ ID NO: 2310656 - RNA, 19 nt, Homo sapiens
  misc_RNA (1)...(19): siRNA sense strand
ggaagcagguguuuggauc

SEQ ID NO: 2310657 - RNA, 19 nt, Homo sapiens
  misc_RNA (1)...(19): siRNA sense strand
gaaaacaauuggaagccuu

SEQ ID NO: 2310658 - RNA, 19 nt, Homo sapiens
  misc_RNA (1)...(19): siRNA sense strand
caagauggcccgauggaac

SEQ ID NO: 2310659 - RNA, 19 nt, Homo sapiens
  misc_RNA (1)...(19): siRNA sense strand
cugaaagaggauagcaucu

SEQ ID NO: 2310660 - RNA, 19 nt, Homo sapiens
  misc_RNA (1)...(19): siRNA sense strand
cagaauagccccugguagu

SEQ ID NO: 2310661 - RNA, 19 nt, Homo sapiens
  misc_RNA (1)...(19): siRNA sense strand
gggcaaauacucugcgauc

SEQ ID NO: 2310662 - RNA, 19 nt, Homo sapiens
  misc_RNA (1)...(19): siRNA sense strand
gccaauuaugagauguuua

SEQ ID NO: 2310663 - RNA, 19 nt, Homo sapiens
  misc_RNA (1)...(19): siRNA sense strand
caggagaaaucaaugguuc

SEQ ID NO: 2310664 - RNA, 19 nt, Homo sapiens
  misc_RNA (1)...(19): siRNA sense strand
gacaaaaggaaguggaaac

SEQ ID NO: 2310665 - RNA, 19 nt, Homo sapiens
  misc_RNA (1)...(19): siRNA sense strand
caagauaaaugcagaggga

SEQ ID NO: 2310666 - RNA, 19 nt, Homo sapiens
  misc_RNA (1)...(19): siRNA sense strand
agauaaaugcagagggaac

SEQ ID NO: 2310667 - RNA, 19 nt, Homo sapiens
  misc_RNA (1)...(19): siRNA sense strand
cggcagacaccaugaccaa

SEQ ID NO: 2310668 - RNA, 19 nt, Homo sapiens
  misc_RNA (1)...(19): siRNA sense strand
acuaaauggaggacaguca

SEQ ID NO: 2310669 - RNA, 19 nt, Homo sapiens
  misc_RNA (1)...(19): siRNA sense strand
ucgccuacuacgagacaaa

SEQ ID NO: 2310670 - RNA, 19 nt, Homo sapiens
  misc_RNA (1)...(19): siRNA sense strand
auggaagauuugagaaagu

SEQ ID NO: 2310671 - RNA, 19 nt, Homo sapiens
  misc_RNA (1)...(19): siRNA sense strand
ugaaaauugcagaacgaua

SEQ ID NO: 2310672 - RNA, 19 nt, Homo sapiens
  misc_RNA (1)...(19): siRNA sense strand
acgcaggauuggagaccca

SEQ ID NO: 2310673 - RNA, 19 nt, Homo sapiens
  misc_RNA (1)...(19): siRNA sense strand
uugcagaacgauauggauu

SEQ ID NO: 2310674 - RNA, 19 nt, Homo sapiens
  misc_RNA (1)...(19): siRNA sense strand
auuaugaagaucaggguga

SEQ ID NO: 2310675 - RNA, 19 nt, Homo sapiens
  misc_RNA (1)...(19): siRNA sense strand
ccaggaaguggaaagggua

SEQ ID NO: 2310676 - RNA, 19 nt, Homo sapiens
  misc_RNA (1)...(19): siRNA sense strand
ccacaguaccagcagcaau

SEQ ID NO: 2310677 - RNA, 19 nt, Homo sapiens
  misc_RNA (1)...(19): siRNA sense strand
uaagaaauguaaugccuga

SEQ ID NO: 2310678 - RNA, 19 nt, Homo sapiens
  misc_RNA (1)...(19): siRNA sense strand
uguuauaggugguccagga

SEQ ID NO: 2310679 - RNA, 19 nt, Homo sapiens
  misc_RNA (1)...(19): siRNA sense strand
gaugcaaauaccugaugaa

SEQ ID NO: 2310680 - RNA, 19 nt, Homo sapiens
  misc_RNA (1)...(19): siRNA sense strand
gugacaaggugaaauggga

SEQ ID NO: 2310681 - RNA, 19 nt, Homo sapiens
  misc_RNA (1)...(19): siRNA sense strand
ugcaaauaccugaugaaga

SEQ ID NO: 2310682 - RNA, 19 nt, Homo sapiens
  misc_RNA (1)...(19): siRNA sense strand
agcaaauugaucagagaca

SEQ ID NO: 2310683 - RNA, 19 nt, Homo sapiens
  misc_RNA (1)...(19): siRNA sense strand
cgaagauccaguagaauac

SEQ ID NO: 2310684 - RNA, 19 nt, Homo sapiens
  misc_RNA (1)...(19): siRNA sense strand
aaacaaagaggcugcagca

SEQ ID NO: 2310685 - RNA, 19 nt, Homo sapiens
  misc_RNA (1)...(19): siRNA sense strand
ugggagguuucauggaaga

SEQ ID NO: 2310686 - RNA, 19 nt, Homo sapiens
  misc_RNA (1)...(19): siRNA sense strand
cauagaaagugacacggau

SEQ ID NO: 2310687 - RNA, 19 nt, Homo sapiens
  misc_RNA (1)...(19): siRNA sense strand
caagauaauuacaacugga

SEQ ID NO: 2310688 - RNA, 19 nt, Homo sapiens
  misc_RNA (1)...(19): siRNA sense strand
agaaucugaaagaagcaaa

SEQ ID NO: 2310689 - RNA, 19 nt, Homo sapiens
  misc_RNA (1)...(19): siRNA sense strand
caagauaaaugcagaggga

SEQ ID NO: 2310690 - RNA, 19 nt, Homo sapiens
  misc_RNA (1)...(19): siRNA sense strand
agauaaaugcagagggaac

SEQ ID NO: 2310691 - RNA, 19 nt, Homo sapiens
  misc_RNA (1)...(19): siRNA sense strand
cggcagacaccaugaccaa

SEQ ID NO: 2310692 - RNA, 19 nt, Homo sapiens
  misc_RNA (1)...(19): siRNA sense strand
acuaaauggaggacaguca

SEQ ID NO: 2310693 - RNA, 19 nt, Homo sapiens
  misc_RNA (1)...(19): siRNA sense strand
ucgccuacuacgagacaaa

SEQ ID NO: 2310694 - RNA, 19 nt, Homo sapiens
  misc_RNA (1)...(19): siRNA sense strand
auggaagauuugagaaagu

SEQ ID NO: 2310695 - RNA, 19 nt, Homo sapiens
  misc_RNA (1)...(19): siRNA sense strand
ugaaaauugcagaacgaua

SEQ ID NO: 2310696 - RNA, 19 nt, Homo sapiens
  misc_RNA (1)...(19): siRNA sense strand
acgcaggauuggagaccca

SEQ ID NO: 2310697 - RNA, 19 nt, Homo sapiens
  misc_RNA (1)...(19): siRNA sense strand
uugcagaacgauauggauu

SEQ ID NO: 2310698 - RNA, 19 nt, Homo sapiens
  misc_RNA (1)...(19): siRNA sense strand
auuaugaagaucaggguga

SEQ ID NO: 2310699 - RNA, 19 nt, Homo sapiens
  misc_RNA (1)...(19): siRNA sense strand
ccaggaaguggaaagggua

SEQ ID NO: 2310700 - RNA, 19 nt, Homo sapiens
  misc_RNA (1)...(19): siRNA sense strand
ccacaguaccagcagcaau

SEQ ID NO: 2310701 - RNA, 19 nt, Homo sapiens
  misc_RNA (1)...(19): siRNA sense strand
uaagaaauguaaugccuga

SEQ ID NO: 2310702 - RNA, 19 nt, Homo sapiens
  misc_RNA (1)...(19): siRNA sense strand
uguuauaggugguccagga

SEQ ID NO: 2310703 - RNA, 19 nt, Homo sapiens
  misc_RNA (1)...(19): siRNA sense strand
gaugcaaauaccugaugaa

SEQ ID NO: 2310704 - RNA, 19 nt, Homo sapiens
  misc_RNA (1)...(19): siRNA sense strand
gugacaaggugaaauggga

SEQ ID NO: 2310705 - RNA, 19 nt, Homo sapiens
  misc_RNA (1)...(19): siRNA sense strand
ugcaaauaccugaugaaga

SEQ ID NO: 2310706 - RNA, 19 nt, Homo sapiens
  misc_RNA (1)...(19): siRNA sense strand
cgaagauccaguagaauac

SEQ ID NO: 2310707 - RNA, 19 nt, Homo sapiens
  misc_RNA (1)...(19): siRNA sense strand
agcaaauugaucagagaca

SEQ ID NO: 2310708 - RNA, 19 nt, Homo sapiens
  misc_RNA (1)...(19): siRNA sense strand
aaacaaagaggcugcagca

SEQ ID NO: 2310709 - RNA, 19 nt, Homo sapiens
  misc_RNA (1)...(19): siRNA sense strand
ugggagguuucauggaaga

SEQ ID NO: 2310710 - RNA, 19 nt, Homo sapiens
  misc_RNA (1)...(19): siRNA sense strand
cauagaaagugacacggau

SEQ ID NO: 2310711 - RNA, 19 nt, Homo sapiens
  misc_RNA (1)...(19): siRNA sense strand
caagauaauuacaacugga

SEQ ID NO: 2310712 - RNA, 19 nt, Homo sapiens
  misc_RNA (1)...(19): siRNA sense strand
agaaucugaaagaagcaaa

SEQ ID NO: 2310713 - RNA, 19 nt, Homo sapiens
  misc_RNA (1)...(19): siRNA sense strand
ggaggaaagaagagagaau

SEQ ID NO: 2310714 - RNA, 19 nt, Homo sapiens
  misc_RNA (1)...(19): siRNA sense strand
cagaauguucgcagggaaa

SEQ ID NO: 2310715 - RNA, 19 nt, Homo sapiens
  misc_RNA (1)...(19): siRNA sense strand
cgggagaagugaaaguaau

SEQ ID NO: 2310716 - RNA, 19 nt, Homo sapiens
  misc_RNA (1)...(19): siRNA sense strand
agagagaaucagaagcaua

SEQ ID NO: 2310717 - RNA, 19 nt, Homo sapiens
  misc_RNA (1)...(19): siRNA sense strand
caauagaggauuuggaagu

SEQ ID NO: 2310718 - RNA, 19 nt, Homo sapiens
  misc_RNA (1)...(19): siRNA sense strand
guggaaauuuaaugaguca

SEQ ID NO: 2310719 - RNA, 19 nt, Homo sapiens
  misc_RNA (1)...(19): siRNA sense strand
aggaaagaagagagaauca

SEQ ID NO: 2310720 - RNA, 19 nt, Homo sapiens
  misc_RNA (1)...(19): siRNA sense strand
aagagaagcaacagaaaga

SEQ ID NO: 2310721 - RNA, 19 nt, Homo sapiens
  misc_RNA (1)...(19): siRNA sense strand
aagaaagagaucugaaaga

SEQ ID NO: 2310722 - RNA, 19 nt, Homo sapiens
  misc_RNA (1)...(19): siRNA sense strand
agggaaauggacagugaua

SEQ ID NO: 2310723 - RNA, 19 nt, Homo sapiens
  misc_RNA (1)...(19): siRNA sense strand
gcaacagacaauagaggau

SEQ ID NO: 2310724 - RNA, 19 nt, Homo sapiens
  misc_RNA (1)...(19): siRNA sense strand
ccuuaaugcuaggaauaaa

SEQ ID NO: 2310725 - RNA, 19 nt, Homo sapiens
  misc_RNA (1)...(19): siRNA sense strand
gagaaaaugacaaggugaa

SEQ ID NO: 2310726 - RNA, 19 nt, Homo sapiens
  misc_RNA (1)...(19): siRNA sense strand
gggagaaggaggaaagaag

SEQ ID NO: 2310727 - RNA, 19 nt, Homo sapiens
  misc_RNA (1)...(19): siRNA sense strand
gaguaaaagagaagcaaca

SEQ ID NO: 2310728 - RNA, 19 nt, Homo sapiens
  misc_RNA (1)...(19): siRNA sense strand
ggggaaaagauaugugauu

SEQ ID NO: 2310729 - RNA, 19 nt, Homo sapiens
  misc_RNA (1)...(19): siRNA sense strand
gcgggagaagugaaaguaa

SEQ ID NO: 2310730 - RNA, 19 nt, Homo sapiens
  misc_RNA (1)...(19): siRNA sense strand
guaugaaguaacagaagau

SEQ ID NO: 2310731 - RNA, 19 nt, Homo sapiens
  misc_RNA (1)...(19): siRNA sense strand
ggacagugauauagagacc

SEQ ID NO: 2310732 - RNA, 19 nt, Homo sapiens
  misc_RNA (1)...(19): siRNA sense strand
aagugaaaauccagaggaa

SEQ ID NO: 2310733 - RNA, 19 nt, Homo sapiens
  misc_RNA (1)...(19): siRNA sense strand
gaacuggaucguagggcau

SEQ ID NO: 2310734 - RNA, 19 nt, Homo sapiens
  misc_RNA (1)...(19): siRNA sense strand
uugaaaaggacuuggaaga

SEQ ID NO: 2310735 - RNA, 19 nt, Homo sapiens
  misc_RNA (1)...(19): siRNA sense strand
gcugcgauuaauagauaua

SEQ ID NO: 2310736 - RNA, 19 nt, Homo sapiens
  misc_RNA (1)...(19): siRNA sense strand
ucagaauguucgcagggaa

SEQ ID NO: 2310737 - RNA, 19 nt, Homo sapiens
  misc_RNA (1)...(19): siRNA sense strand
guacaaaaucugaaacuga

SEQ ID NO: 2310738 - RNA, 19 nt, Homo sapiens
  misc_RNA (1)...(19): siRNA sense strand
ggugaaaucagaugaccau

SEQ ID NO: 2310739 - RNA, 19 nt, Homo sapiens
  misc_RNA (1)...(19): siRNA sense strand
ugaacaacuggaagaauuu

SEQ ID NO: 2310740 - RNA, 19 nt, Homo sapiens
  misc_RNA (1)...(19): siRNA sense strand
auauagagaccaugcaaca

SEQ ID NO: 2310741 - RNA, 19 nt, Homo sapiens
  misc_RNA (1)...(19): siRNA sense strand
agaaacaacaccagaccau

SEQ ID NO: 2310742 - RNA, 19 nt, Homo sapiens
  misc_RNA (1)...(19): siRNA sense strand
gugaaaauccagaggaaac

SEQ ID NO: 2310743 - RNA, 19 nt, Homo sapiens
  misc_RNA (1)...(19): siRNA sense strand
agaccaugcaacagacaau

SEQ ID NO: 2310744 - RNA, 19 nt, Homo sapiens
  misc_RNA (1)...(19): siRNA sense strand
uaccuuaaugcuaggaaua

SEQ ID NO: 2310745 - RNA, 19 nt, Homo sapiens
  misc_RNA (1)...(19): siRNA sense strand
agaagaugccacagcuauu

SEQ ID NO: 2310746 - RNA, 19 nt, Homo sapiens
  misc_RNA (1)...(19): siRNA sense strand
ugaucaugaugcugcgauu

SEQ ID NO: 2310747 - RNA, 19 nt, Homo sapiens
  misc_RNA (1)...(19): siRNA sense strand
uuaaugaacaacuggaaga

SEQ ID NO: 2310748 - RNA, 19 nt, Homo sapiens
  misc_RNA (1)...(19): siRNA sense strand
agguguauuugaagaagau

SEQ ID NO: 2310749 - RNA, 19 nt, Homo sapiens
  misc_RNA (1)...(19): siRNA sense strand
gaugaaguuaugagcucua

SEQ ID NO: 2310750 - RNA, 19 nt, Homo sapiens
  misc_RNA (1)...(19): siRNA sense strand
aguaugaaguaacagaaga

SEQ ID NO: 2310751 - RNA, 19 nt, Homo sapiens
  misc_RNA (1)...(19): siRNA sense strand
ggguggaaauuuaaugagu

SEQ ID NO: 2310752 - RNA, 19 nt, Homo sapiens
  misc_RNA (1)...(19): siRNA sense strand
agaggaaacugcugcacga

SEQ ID NO: 2310753 - RNA, 19 nt, Homo sapiens
  misc_RNA (1)...(19): siRNA sense strand
cuacacaccaggaaaauaa

SEQ ID NO: 2310754 - RNA, 19 nt, Homo sapiens
  misc_RNA (1)...(19): siRNA sense strand
aaggaggaaagaagagaga

SEQ ID NO: 2310755 - RNA, 19 nt, Homo sapiens
  misc_RNA (1)...(19): siRNA sense strand
cugcuauauauuugaguca

SEQ ID NO: 2310756 - RNA, 19 nt, Homo sapiens
  misc_RNA (1)...(19): siRNA sense strand
uaugaaacuaugcgccaaa

SEQ ID NO: 2310757 - RNA, 19 nt, Homo sapiens
  misc_RNA (1)...(19): siRNA sense strand
ggaaaagauaugugauucu

SEQ ID NO: 2310758 - RNA, 19 nt, Homo sapiens
  misc_RNA (1)...(19): siRNA sense strand
cagucagaagagagugauu

SEQ ID NO: 2310759 - RNA, 19 nt, Homo sapiens
  misc_RNA (1)...(19): siRNA sense strand
agagagugauuugggagaa

SEQ ID NO: 2310760 - RNA, 19 nt, Homo sapiens
  misc_RNA (1)...(19): siRNA sense strand
guuuaaagaaagagaucug

SEQ ID NO: 2310761 - RNA, 19 nt, Homo sapiens
  misc_RNA (1)...(19): siRNA sense strand
gggaaauggacagugauau

SEQ ID NO: 2310762 - RNA, 19 nt, Homo sapiens
  misc_RNA (1)...(19): siRNA sense strand
auugggaggugaugaugaa

SEQ ID NO: 2310763 - RNA, 19 nt, Homo sapiens
  misc_RNA (1)...(19): siRNA sense strand
gauugcaaguaaugaucau

SEQ ID NO: 2310764 - RNA, 19 nt, Homo sapiens
  misc_RNA (1)...(19): siRNA sense strand
acuagguguauuugaagaa

SEQ ID NO: 2310765 - RNA, 19 nt, Homo sapiens
  misc_RNA (1)...(19): siRNA sense strand
gaaucuggaggaaguacaa

SEQ ID NO: 2310766 - RNA, 19 nt, Homo sapiens
  misc_RNA (1)...(19): siRNA sense strand
ucaagcgggagaagugaaa

SEQ ID NO: 2310767 - RNA, 19 nt, Homo sapiens
  misc_RNA (1)...(19): siRNA sense strand
gggagaagugaaaguaauc

SEQ ID NO: 2310768 - RNA, 19 nt, Homo sapiens
  misc_RNA (1)...(19): siRNA sense strand
aagagagugauuugggaga

SEQ ID NO: 2310769 - RNA, 19 nt, Homo sapiens
  misc_RNA (1)...(19): siRNA sense strand
ccagaaagaaacaacacca

SEQ ID NO: 2310770 - RNA, 19 nt, Homo sapiens
  misc_RNA (1)...(19): siRNA sense strand
ccagauguuguuuaugaaa

SEQ ID NO: 2310771 - RNA, 19 nt, Homo sapiens
  misc_RNA (1)...(19): siRNA sense strand
cuauacuaacacagaguuu

SEQ ID NO: 2310772 - RNA, 19 nt, Homo sapiens
  misc_RNA (1)...(19): siRNA sense strand
guaauguagaagagauagu

SEQ ID NO: 2310773 - RNA, 19 nt, Homo sapiens
  misc_RNA (1)...(19): siRNA sense strand
cuauaaaauguuagcgcau

SEQ ID NO: 2310774 - RNA, 19 nt, Homo sapiens
  misc_RNA (1)...(19): siRNA sense strand
uguaauaguuguuguggac

SEQ ID NO: 2310775 - RNA, 19 nt, Homo sapiens
  misc_RNA (1)...(19): siRNA sense strand
aggaaguaauguagaagag

SEQ ID NO: 2310776 - RNA, 19 nt, Homo sapiens
  misc_RNA (1)...(19): siRNA sense strand
cuauacuaacacagaguuu

SEQ ID NO: 2310777 - RNA, 19 nt, Homo sapiens
  misc_RNA (1)...(19): siRNA sense strand
guaauguagaagagauagu

SEQ ID NO: 2310778 - RNA, 19 nt, Homo sapiens
  misc_RNA (1)...(19): siRNA sense strand
cuauaaaauguuagcgcau

SEQ ID NO: 2310779 - RNA, 19 nt, Homo sapiens
  misc_RNA (1)...(19): siRNA sense strand
uguaauaguuguuguggac

SEQ ID NO: 2310780 - RNA, 19 nt, Homo sapiens
  misc_RNA (1)...(19): siRNA sense strand
aggaaguaauguagaagag

SEQ ID NO: 2310781 - RNA, 19 nt, Homo sapiens
  misc_RNA (1)...(19): siRNA sense strand
gcaaagaggcggugcagac

SEQ ID NO: 2310782 - RNA, 19 nt, Homo sapiens
  misc_RNA (1)...(19): siRNA sense strand
aggacauaguggagaugga

SEQ ID NO: 2310783 - RNA, 19 nt, Homo sapiens
  misc_RNA (1)...(19): siRNA sense strand
gcaccugguuugaccguga

SEQ ID NO: 2310784 - RNA, 19 nt, Homo sapiens
  misc_RNA (1)...(19): siRNA sense strand
ccauaaucucuuaguggau

SEQ ID NO: 2310785 - RNA, 19 nt, Homo sapiens
  misc_RNA (1)...(19): siRNA sense strand
gcgaaauaucaacgagaac

SEQ ID NO: 2310786 - RNA, 19 nt, Homo sapiens
  misc_RNA (1)...(19): siRNA sense strand
cagcgaaauaucaacgaga

SEQ ID NO: 2310787 - RNA, 19 nt, Homo sapiens
  misc_RNA (1)...(19): siRNA sense strand
gaccuaugguggugggauc

SEQ ID NO: 2310788 - RNA, 19 nt, Homo sapiens
  misc_RNA (1)...(19): siRNA sense strand
ccacagccauccaggagga

SEQ ID NO: 2310789 - RNA, 19 nt, Homo sapiens
  misc_RNA (1)...(19): siRNA sense strand
aagucgguguggagaccua

SEQ ID NO: 2310790 - RNA, 19 nt, Homo sapiens
  misc_RNA (1)...(19): siRNA sense strand
gcaccaaggcugacggcaa

SEQ ID NO: 2310791 - RNA, 19 nt, Homo sapiens
  misc_RNA (1)...(19): siRNA sense strand
gagaaguggcagaaggaga

SEQ ID NO: 2310792 - RNA, 19 nt, Homo sapiens
  misc_RNA (1)...(19): siRNA sense strand
ugacaguggaggaggccaa

SEQ ID NO: 2310793 - RNA, 19 nt, Homo sapiens
  misc_RNA (1)...(19): siRNA sense strand
gcauguuccaggagcacaa

SEQ ID NO: 2310794 - RNA, 19 nt, Homo sapiens
  misc_RNA (1)...(19): siRNA sense strand
aggccauccuggagcagaa

SEQ ID NO: 2310795 - RNA, 19 nt, Homo sapiens
  misc_RNA (1)...(19): siRNA sense strand
gagaggaaccacauggaga

SEQ ID NO: 2310796 - RNA, 19 nt, Homo sapiens
  misc_RNA (1)...(19): siRNA sense strand
cugcauagcaucagcgacu

SEQ ID NO: 2310797 - RNA, 19 nt, Homo sapiens
  misc_RNA (1)...(19): siRNA sense strand
agauugaggaugaagcuga

SEQ ID NO: 2310798 - RNA, 19 nt, Homo sapiens
  misc_RNA (1)...(19): siRNA sense strand
ccaccaaugagaaggccau

SEQ ID NO: 2310799 - RNA, 19 nt, Homo sapiens
  misc_RNA (1)...(19): siRNA sense strand
acguugagaagaugugcaa

SEQ ID NO: 2310800 - RNA, 19 nt, Homo sapiens
  misc_RNA (1)...(19): siRNA sense strand
cgauggagcucuucugcca

SEQ ID NO: 2310801 - RNA, 19 nt, Homo sapiens
  misc_RNA (1)...(19): siRNA sense strand
gagcagaacuuccgggacc

SEQ ID NO: 2310802 - RNA, 19 nt, Homo sapiens
  misc_RNA (1)...(19): siRNA sense strand
gcaacaagcagaaggcggu

SEQ ID NO: 2310803 - RNA, 19 nt, Homo sapiens
  misc_RNA (1)...(19): siRNA sense strand
gaagcugagaaguggcaga

SEQ ID NO: 2310804 - RNA, 19 nt, Homo sapiens
  misc_RNA (1)...(19): siRNA sense strand
cugagaaguggcagaagga

SEQ ID NO: 2310805 - RNA, 19 nt, Homo sapiens
  misc_RNA (1)...(19): siRNA sense strand
aggugcugcaugaggacaa

SEQ ID NO: 2310806 - RNA, 19 nt, Homo sapiens
  misc_RNA (1)...(19): siRNA sense strand
gcaccgugacaguggagga

SEQ ID NO: 2310807 - RNA, 19 nt, Homo sapiens
  misc_RNA (1)...(19): siRNA sense strand
ggccauucuacgucaacaa

SEQ ID NO: 2310808 - RNA, 19 nt, Homo sapiens
  misc_RNA (1)...(19): siRNA sense strand
gcaccaaggcugacggcaa

SEQ ID NO: 2310809 - RNA, 19 nt, Homo sapiens
  misc_RNA (1)...(19): siRNA sense strand
gagaaguggcagaaggaga

SEQ ID NO: 2310810 - RNA, 19 nt, Homo sapiens
  misc_RNA (1)...(19): siRNA sense strand
ugacaguggaggaggccaa

SEQ ID NO: 2310811 - RNA, 19 nt, Homo sapiens
  misc_RNA (1)...(19): siRNA sense strand
gcauguuccaggagcacaa

SEQ ID NO: 2310812 - RNA, 19 nt, Homo sapiens
  misc_RNA (1)...(19): siRNA sense strand
aggccauccuggagcagaa

SEQ ID NO: 2310813 - RNA, 19 nt, Homo sapiens
  misc_RNA (1)...(19): siRNA sense strand
gagaggaaccacauggaga

SEQ ID NO: 2310814 - RNA, 19 nt, Homo sapiens
  misc_RNA (1)...(19): siRNA sense strand
cugcauagcaucagcgacu

SEQ ID NO: 2310815 - RNA, 19 nt, Homo sapiens
  misc_RNA (1)...(19): siRNA sense strand
agauugaggaugaagcuga

SEQ ID NO: 2310816 - RNA, 19 nt, Homo sapiens
  misc_RNA (1)...(19): siRNA sense strand
ccaccaaugagaaggccau

SEQ ID NO: 2310817 - RNA, 19 nt, Homo sapiens
  misc_RNA (1)...(19): siRNA sense strand
acguugagaagaugugcaa

SEQ ID NO: 2310818 - RNA, 19 nt, Homo sapiens
  misc_RNA (1)...(19): siRNA sense strand
cgauggagcucuucugcca

SEQ ID NO: 2310819 - RNA, 19 nt, Homo sapiens
  misc_RNA (1)...(19): siRNA sense strand
gagcagaacuuccgggacc

SEQ ID NO: 2310820 - RNA, 19 nt, Homo sapiens
  misc_RNA (1)...(19): siRNA sense strand
gcaacaagcagaaggcggu

SEQ ID NO: 2310821 - RNA, 19 nt, Homo sapiens
  misc_RNA (1)...(19): siRNA sense strand
gaagcugagaaguggcaga

SEQ ID NO: 2310822 - RNA, 19 nt, Homo sapiens
  misc_RNA (1)...(19): siRNA sense strand
cugagaaguggcagaagga

SEQ ID NO: 2310823 - RNA, 19 nt, Homo sapiens
  misc_RNA (1)...(19): siRNA sense strand
aggugcugcaugaggacaa

SEQ ID NO: 2310824 - RNA, 19 nt, Homo sapiens
  misc_RNA (1)...(19): siRNA sense strand
gcaccgugacaguggagga

SEQ ID NO: 2310825 - RNA, 19 nt, Homo sapiens
  misc_RNA (1)...(19): siRNA sense strand
cugacaaagcagagcacau

SEQ ID NO: 2310826 - RNA, 19 nt, Homo sapiens
  misc_RNA (1)...(19): siRNA sense strand
uacaacagcugguggccaa

SEQ ID NO: 2310827 - RNA, 19 nt, Homo sapiens
  misc_RNA (1)...(19): siRNA sense strand
aaggagauucacagagaga

SEQ ID NO: 2310828 - RNA, 19 nt, Homo sapiens
  misc_RNA (1)...(19): siRNA sense strand
acaugaagcgacaaagaca

SEQ ID NO: 2310829 - RNA, 19 nt, Homo sapiens
  misc_RNA (1)...(19): siRNA sense strand
gaagacaucaccaagggaa

SEQ ID NO: 2310830 - RNA, 19 nt, Homo sapiens
  misc_RNA (1)...(19): siRNA sense strand
ccaacuaggggaagcgaau

SEQ ID NO: 2310831 - RNA, 19 nt, Homo sapiens
  misc_RNA (1)...(19): siRNA sense strand
ugaauacgcaagaaggaga

SEQ ID NO: 2310832 - RNA, 19 nt, Homo sapiens
  misc_RNA (1)...(19): siRNA sense strand
cagagcacaugaagcgaca

SEQ ID NO: 2310833 - RNA, 19 nt, Homo sapiens
  misc_RNA (1)...(19): siRNA sense strand
gcacuauaugaauacgcaa

SEQ ID NO: 2310834 - RNA, 19 nt, Homo sapiens
  misc_RNA (1)...(19): siRNA sense strand
gcucagagagucaaggaag

SEQ ID NO: 2310835 - RNA, 19 nt, Homo sapiens
  misc_RNA (1)...(19): siRNA sense strand
cugacaaagcagagcacau

SEQ ID NO: 2310836 - RNA, 19 nt, Homo sapiens
  misc_RNA (1)...(19): siRNA sense strand
uacaacagcugguggccaa

SEQ ID NO: 2310837 - RNA, 19 nt, Homo sapiens
  misc_RNA (1)...(19): siRNA sense strand
aaggagauucacagagaga

SEQ ID NO: 2310838 - RNA, 19 nt, Homo sapiens
  misc_RNA (1)...(19): siRNA sense strand
acaugaagcgacaaagaca

SEQ ID NO: 2310839 - RNA, 19 nt, Homo sapiens
  misc_RNA (1)...(19): siRNA sense strand
gaagacaucaccaagggaa

SEQ ID NO: 2310840 - RNA, 19 nt, Homo sapiens
  misc_RNA (1)...(19): siRNA sense strand
ccaacuaggggaagcgaau

SEQ ID NO: 2310841 - RNA, 19 nt, Homo sapiens
  misc_RNA (1)...(19): siRNA sense strand
ugaauacgcaagaaggaga

SEQ ID NO: 2310842 - RNA, 19 nt, Homo sapiens
  misc_RNA (1)...(19): siRNA sense strand
cagagcacaugaagcgaca

SEQ ID NO: 2310843 - RNA, 19 nt, Homo sapiens
  misc_RNA (1)...(19): siRNA sense strand
gcacuauaugaauacgcaa

SEQ ID NO: 2310844 - RNA, 19 nt, Homo sapiens
  misc_RNA (1)...(19): siRNA sense strand
gcucagagagucaaggaag

SEQ ID NO: 2310845 - RNA, 19 nt, Homo sapiens
  misc_RNA (1)...(19): siRNA sense strand
cugacaaagcagagcacau

SEQ ID NO: 2310846 - RNA, 19 nt, Homo sapiens
  misc_RNA (1)...(19): siRNA sense strand
uacaacagcugguggccaa

SEQ ID NO: 2310847 - RNA, 19 nt, Homo sapiens
  misc_RNA (1)...(19): siRNA sense strand
acaugaagcgacaaagaca

SEQ ID NO: 2310848 - RNA, 19 nt, Homo sapiens
  misc_RNA (1)...(19): siRNA sense strand
gaagacaucaccaagggaa

SEQ ID NO: 2310849 - RNA, 19 nt, Homo sapiens
  misc_RNA (1)...(19): siRNA sense strand
ccaacuaggggaagcgaau

SEQ ID NO: 2310850 - RNA, 19 nt, Homo sapiens
  misc_RNA (1)...(19): siRNA sense strand
cagagcacaugaagcgaca

SEQ ID NO: 2310851 - RNA, 19 nt, Homo sapiens
  misc_RNA (1)...(19): siRNA sense strand
gcucagagagucaaggaag

SEQ ID NO: 2310852 - RNA, 19 nt, Homo sapiens
  misc_RNA (1)...(19): siRNA sense strand
ggguggagaucaauggaca

SEQ ID NO: 2310853 - RNA, 19 nt, Homo sapiens
  misc_RNA (1)...(19): siRNA sense strand
ccgaaaacgaauuggcuuu

SEQ ID NO: 2310854 - RNA, 19 nt, Homo sapiens
  misc_RNA (1)...(19): siRNA sense strand
acaacuaugacaagagcau

SEQ ID NO: 2310855 - RNA, 19 nt, Homo sapiens
  misc_RNA (1)...(19): siRNA sense strand
cuguuaucauggagggcuu

SEQ ID NO: 2310856 - RNA, 19 nt, Homo sapiens
  misc_RNA (1)...(19): siRNA sense strand
aggaguacaacuaugacaa

SEQ ID NO: 2310857 - RNA, 19 nt, Homo sapiens
  misc_RNA (1)...(19): siRNA sense strand
acugcaaggaguacaacua

SEQ ID NO: 2310858 - RNA, 19 nt, Homo sapiens
  misc_RNA (1)...(19): siRNA sense strand
gagcaugaucauuggaggu

SEQ ID NO: 2310859 - RNA, 19 nt, Homo sapiens
  misc_RNA (1)...(19): siRNA sense strand
ucaccuuggacauggaaga

SEQ ID NO: 2310860 - RNA, 19 nt, Homo sapiens
  misc_RNA (1)...(19): siRNA sense strand
ggguggagaucaauggaca

SEQ ID NO: 2310861 - RNA, 19 nt, Homo sapiens
  misc_RNA (1)...(19): siRNA sense strand
ccgaaaacgaauuggcuuu

SEQ ID NO: 2310862 - RNA, 19 nt, Homo sapiens
  misc_RNA (1)...(19): siRNA sense strand
acaacuaugacaagagcau

SEQ ID NO: 2310863 - RNA, 19 nt, Homo sapiens
  misc_RNA (1)...(19): siRNA sense strand
cuguuaucauggagggcuu

SEQ ID NO: 2310864 - RNA, 19 nt, Homo sapiens
  misc_RNA (1)...(19): siRNA sense strand
aggaguacaacuaugacaa

SEQ ID NO: 2310865 - RNA, 19 nt, Homo sapiens
  misc_RNA (1)...(19): siRNA sense strand
acugcaaggaguacaacua

SEQ ID NO: 2310866 - RNA, 19 nt, Homo sapiens
  misc_RNA (1)...(19): siRNA sense strand
gagcaugaucauuggaggu

SEQ ID NO: 2310867 - RNA, 19 nt, Homo sapiens
  misc_RNA (1)...(19): siRNA sense strand
ucaccuuggacauggaaga

SEQ ID NO: 2310868 - RNA, 19 nt, Homo sapiens
  misc_RNA (1)...(19): siRNA sense strand
ggguggagaucaauggaca

SEQ ID NO: 2310869 - RNA, 19 nt, Homo sapiens
  misc_RNA (1)...(19): siRNA sense strand
ccgaaaacgaauuggcuuu

SEQ ID NO: 2310870 - RNA, 19 nt, Homo sapiens
  misc_RNA (1)...(19): siRNA sense strand
acaacuaugacaagagcau

SEQ ID NO: 2310871 - RNA, 19 nt, Homo sapiens
  misc_RNA (1)...(19): siRNA sense strand
cuguuaucauggagggcuu

SEQ ID NO: 2310872 - RNA, 19 nt, Homo sapiens
  misc_RNA (1)...(19): siRNA sense strand
aggaguacaacuaugacaa

SEQ ID NO: 2310873 - RNA, 19 nt, Homo sapiens
  misc_RNA (1)...(19): siRNA sense strand
acugcaaggaguacaacua

SEQ ID NO: 2310874 - RNA, 19 nt, Homo sapiens
  misc_RNA (1)...(19): siRNA sense strand
gagcaugaucauuggaggu

SEQ ID NO: 2310875 - RNA, 19 nt, Homo sapiens
  misc_RNA (1)...(19): siRNA sense strand
ucaccuuggacauggaaga

SEQ ID NO: 2310876 - RNA, 19 nt, Homo sapiens
  misc_RNA (1)...(19): siRNA sense strand
ggguggagaucaauggaca

SEQ ID NO: 2310877 - RNA, 19 nt, Homo sapiens
  misc_RNA (1)...(19): siRNA sense strand
ccgaaaacgaauuggcuuu

SEQ ID NO: 2310878 - RNA, 19 nt, Homo sapiens
  misc_RNA (1)...(19): siRNA sense strand
acaacuaugacaagagcau

SEQ ID NO: 2310879 - RNA, 19 nt, Homo sapiens
  misc_RNA (1)...(19): siRNA sense strand
cuguuaucauggagggcuu

SEQ ID NO: 2310880 - RNA, 19 nt, Homo sapiens
  misc_RNA (1)...(19): siRNA sense strand
aggaguacaacuaugacaa

SEQ ID NO: 2310881 - RNA, 19 nt, Homo sapiens
  misc_RNA (1)...(19): siRNA sense strand
acugcaaggaguacaacua

SEQ ID NO: 2310882 - RNA, 19 nt, Homo sapiens
  misc_RNA (1)...(19): siRNA sense strand
gagcaugaucauuggaggu

SEQ ID NO: 2310883 - RNA, 19 nt, Homo sapiens
  misc_RNA (1)...(19): siRNA sense strand
ucaccuuggacauggaaga

SEQ ID NO: 2310884 - RNA, 19 nt, Homo sapiens
  misc_RNA (1)...(19): siRNA sense strand
ugaaaagaacugugcgaaa

SEQ ID NO: 2310885 - RNA, 19 nt, Homo sapiens
  misc_RNA (1)...(19): siRNA sense strand
augaaguccuagagagaga

SEQ ID NO: 2310886 - RNA, 19 nt, Homo sapiens
  misc_RNA (1)...(19): siRNA sense strand
agugaugagcguaggacaa

SEQ ID NO: 2310887 - RNA, 19 nt, Homo sapiens
  misc_RNA (1)...(19): siRNA sense strand
gugaaggagacucgaggaa

SEQ ID NO: 2310888 - RNA, 19 nt, Homo sapiens
  misc_RNA (1)...(19): siRNA sense strand
auggaagggagaagugaaa

SEQ ID NO: 2310889 - RNA, 19 nt, Homo sapiens
  misc_RNA (1)...(19): siRNA sense strand
gaacacagaaaguggggaa

SEQ ID NO: 2310890 - RNA, 19 nt, Homo sapiens
  misc_RNA (1)...(19): siRNA sense strand
aagacagagaacacagaaa

SEQ ID NO: 2310891 - RNA, 19 nt, Homo sapiens
  misc_RNA (1)...(19): siRNA sense strand
aggaaagguuaaagauuac

SEQ ID NO: 2310892 - RNA, 19 nt, Homo sapiens
  misc_RNA (1)...(19): siRNA sense strand
gaaaaggaggauugagaca

SEQ ID NO: 2310893 - RNA, 19 nt, Homo sapiens
  misc_RNA (1)...(19): siRNA sense strand
cggaaagaggcaacugaga

SEQ ID NO: 2310894 - RNA, 19 nt, Homo sapiens
  misc_RNA (1)...(19): siRNA sense strand
ccuagagagagaaaagaaa

SEQ ID NO: 2310895 - RNA, 19 nt, Homo sapiens
  misc_RNA (1)...(19): siRNA sense strand
cugaagauuauguggaugu

SEQ ID NO: 2310896 - RNA, 19 nt, Homo sapiens
  misc_RNA (1)...(19): siRNA sense strand
acuacaaagugaugagcgu

SEQ ID NO: 2310897 - RNA, 19 nt, Homo sapiens
  misc_RNA (1)...(19): siRNA sense strand
cuagagagagaaaagaaaa

SEQ ID NO: 2310898 - RNA, 19 nt, Homo sapiens
  misc_RNA (1)...(19): siRNA sense strand
aagaaaaggaggauugaga

SEQ ID NO: 2310899 - RNA, 19 nt, Homo sapiens
  misc_RNA (1)...(19): siRNA sense strand
ggacagaguugagaggaac

SEQ ID NO: 2310900 - RNA, 19 nt, Homo sapiens
  misc_RNA (1)...(19): siRNA sense strand
agagaaaagaaaaggagga

SEQ ID NO: 2310901 - RNA, 19 nt, Homo sapiens
  misc_RNA (1)...(19): siRNA sense strand
gguuaaagauuacugcucu

SEQ ID NO: 2310902 - RNA, 19 nt, Homo sapiens
  misc_RNA (1)...(19): siRNA sense strand
ucgaggaaauuuaagacca

SEQ ID NO: 2310903 - RNA, 19 nt, Homo sapiens
  misc_RNA (1)...(19): siRNA sense strand
ggggaagaauggagaggcu

SEQ ID NO: 2310904 - RNA, 19 nt, Homo sapiens
  misc_RNA (1)...(19): siRNA sense strand
gcguggaagccuaugugaa

SEQ ID NO: 2310905 - RNA, 19 nt, Homo sapiens
  misc_RNA (1)...(19): siRNA sense strand
gagccggagcagaagagaa

SEQ ID NO: 2310906 - RNA, 19 nt, Homo sapiens
  misc_RNA (1)...(19): siRNA sense strand
gcagcaaggccaaggugga

SEQ ID NO: 2310907 - RNA, 19 nt, Homo sapiens
  misc_RNA (1)...(19): siRNA sense strand
ugaaggaggcagagcagca

SEQ ID NO: 2310908 - RNA, 19 nt, Homo sapiens
  misc_RNA (1)...(19): siRNA sense strand
ccagaagcuccaagcccaa

SEQ ID NO: 2310909 - RNA, 19 nt, Homo sapiens
  misc_RNA (1)...(19): siRNA sense strand
ccuaugugaaggaggcaga

SEQ ID NO: 2310910 - RNA, 19 nt, Homo sapiens
  misc_RNA (1)...(19): siRNA sense strand
agccugagccggagcagaa

SEQ ID NO: 2310911 - RNA, 19 nt, Homo sapiens
  misc_RNA (1)...(19): siRNA sense strand
gguggagucugaagagcca

SEQ ID NO: 2310912 - RNA, 19 nt, Homo sapiens
  misc_RNA (1)...(19): siRNA sense strand
augggaaaguggugguguu

SEQ ID NO: 2310913 - RNA, 19 nt, Homo sapiens
  misc_RNA (1)...(19): siRNA sense strand
cagccugcguggaagccua

SEQ ID NO: 2310914 - RNA, 19 nt, Homo sapiens
  misc_RNA (1)...(19): siRNA sense strand
ucaacucagcccagggauu

SEQ ID NO: 2310915 - RNA, 19 nt, Homo sapiens
  misc_RNA (1)...(19): siRNA sense strand
caauggaacagcuggaaaa

SEQ ID NO: 2310916 - RNA, 19 nt, Homo sapiens
  misc_RNA (1)...(19): siRNA sense strand
gaucaacagugaagccaca

SEQ ID NO: 2310917 - RNA, 19 nt, Homo sapiens
  misc_RNA (1)...(19): siRNA sense strand
uugcaugaagucaggcaua

SEQ ID NO: 2310918 - RNA, 19 nt, Homo sapiens
  misc_RNA (1)...(19): siRNA sense strand
aggcauaaagaucagaaga

SEQ ID NO: 2310919 - RNA, 19 nt, Homo sapiens
  misc_RNA (1)...(19): siRNA sense strand
uugaggugggugagacuaa

SEQ ID NO: 2310920 - RNA, 19 nt, Homo sapiens
  misc_RNA (1)...(19): siRNA sense strand
uggaaaagcuucaggggac

SEQ ID NO: 2310921 - RNA, 19 nt, Homo sapiens
  misc_RNA (1)...(19): siRNA sense strand
ucguauaccacaggugaaa

SEQ ID NO: 2310922 - RNA, 19 nt, Homo sapiens
  misc_RNA (1)...(19): siRNA sense strand
gcaccgagccuuuggaccu

SEQ ID NO: 2310923 - RNA, 19 nt, Homo sapiens
  misc_RNA (1)...(19): siRNA sense strand
ccacauuugcagagcucca

SEQ ID NO: 2310924 - RNA, 19 nt, Homo sapiens
  misc_RNA (1)...(19): siRNA sense strand
ggaaaagcuucaggggaca

SEQ ID NO: 2310925 - RNA, 19 nt, Homo sapiens
  misc_RNA (1)...(19): siRNA sense strand
auuccacgguagagggaua

SEQ ID NO: 2310926 - RNA, 19 nt, Homo sapiens
  misc_RNA (1)...(19): siRNA sense strand
cggugaaacaguaggugga

SEQ ID NO: 2310927 - RNA, 19 nt, Homo sapiens
  misc_RNA (1)...(19): siRNA sense strand
gggagauggucaagcugga

SEQ ID NO: 2310928 - RNA, 19 nt, Homo sapiens
  misc_RNA (1)...(19): siRNA sense strand
agaaggaaaagcaaggaaa

SEQ ID NO: 2310929 - RNA, 19 nt, Homo sapiens
  misc_RNA (1)...(19): siRNA sense strand
aguagguggagaugagauu

SEQ ID NO: 2310930 - RNA, 19 nt, Homo sapiens
  misc_RNA (1)...(19): siRNA sense strand
caacauacacagaugccuu

SEQ ID NO: 2310931 - RNA, 19 nt, Homo sapiens
  misc_RNA (1)...(19): siRNA sense strand
ucuucgaggcccugaacaa

SEQ ID NO: 2310932 - RNA, 19 nt, Homo sapiens
  misc_RNA (1)...(19): siRNA sense strand
ggccugucgaggagaacaa

SEQ ID NO: 2310933 - RNA, 19 nt, Homo sapiens
  misc_RNA (1)...(19): siRNA sense strand
ucacgaagaggaaaggaca

SEQ ID NO: 2310934 - RNA, 19 nt, Homo sapiens
  misc_RNA (1)...(19): siRNA sense strand
cgacaugaucagaaaggcu

SEQ ID NO: 2310935 - RNA, 19 nt, Homo sapiens
  misc_RNA (1)...(19): siRNA sense strand
ggaaaagcaaggaaaacga

SEQ ID NO: 2310936 - RNA, 19 nt, Homo sapiens
  misc_RNA (1)...(19): siRNA sense strand
aagaagaccuggaugcucu

SEQ ID NO: 2310937 - RNA, 19 nt, Homo sapiens
  misc_RNA (1)...(19): siRNA sense strand
gugaaacaguagguggaga

SEQ ID NO: 2310938 - RNA, 19 nt, Homo sapiens
  misc_RNA (1)...(19): siRNA sense strand
agauaaagacaguaggaaa

SEQ ID NO: 2310939 - RNA, 19 nt, Homo sapiens
  misc_RNA (1)...(19): siRNA sense strand
ugaugaaggaccagagaaa

SEQ ID NO: 2310940 - RNA, 19 nt, Homo sapiens
  misc_RNA (1)...(19): siRNA sense strand
cuagaaagacaaagugaaa

SEQ ID NO: 2310941 - RNA, 19 nt, Homo sapiens
  misc_RNA (1)...(19): siRNA sense strand
ggauaguagaagaggaaga

SEQ ID NO: 2310942 - RNA, 19 nt, Homo sapiens
  misc_RNA (1)...(19): siRNA sense strand
uggaagagauagugaugaa

SEQ ID NO: 2310943 - RNA, 19 nt, Homo sapiens
  misc_RNA (1)...(19): siRNA sense strand
gauaaagacaguaggaaaa

SEQ ID NO: 2310944 - RNA, 19 nt, Homo sapiens
  misc_RNA (1)...(19): siRNA sense strand
agauagugaugaaggcaaa

SEQ ID NO: 2310945 - RNA, 19 nt, Homo sapiens
  misc_RNA (1)...(19): siRNA sense strand
gaaauaugguaaaggugaa

SEQ ID NO: 2310946 - RNA, 19 nt, Homo sapiens
  misc_RNA (1)...(19): siRNA sense strand
cagaagacuaauaaggaaa

SEQ ID NO: 2310947 - RNA, 19 nt, Homo sapiens
  misc_RNA (1)...(19): siRNA sense strand
cuguaaagcaugacauuaa

SEQ ID NO: 2310948 - RNA, 19 nt, Homo sapiens
  misc_RNA (1)...(19): siRNA sense strand
gaggauaguagaagaggaa

SEQ ID NO: 2310949 - RNA, 19 nt, Homo sapiens
  misc_RNA (1)...(19): siRNA sense strand
acaagaaagcaaagaagaa

SEQ ID NO: 2310950 - RNA, 19 nt, Homo sapiens
  misc_RNA (1)...(19): siRNA sense strand
ugacaauggugauggaaca

SEQ ID NO: 2310951 - RNA, 19 nt, Homo sapiens
  misc_RNA (1)...(19): siRNA sense strand
gggagaaguccuugauaau

SEQ ID NO: 2310952 - RNA, 19 nt, Homo sapiens
  misc_RNA (1)...(19): siRNA sense strand
ucacagaauuauugaguca

SEQ ID NO: 2310953 - RNA, 19 nt, Homo sapiens
  misc_RNA (1)...(19): siRNA sense strand
gaacaaugaugaaggcuca

SEQ ID NO: 2310954 - RNA, 19 nt, Homo sapiens
  misc_RNA (1)...(19): siRNA sense strand
agaaagacaaagugaaaga

SEQ ID NO: 2310955 - RNA, 19 nt, Homo sapiens
  misc_RNA (1)...(19): siRNA sense strand
agagaauugcugaaagaaa

SEQ ID NO: 2310956 - RNA, 19 nt, Homo sapiens
  misc_RNA (1)...(19): siRNA sense strand
cugaaggagcagauaauaa

SEQ ID NO: 2310957 - RNA, 19 nt, Homo sapiens
  misc_RNA (1)...(19): siRNA sense strand
cuacagaacauuugcagaa

SEQ ID NO: 2310958 - RNA, 19 nt, Homo sapiens
  misc_RNA (1)...(19): siRNA sense strand
agggagaaguccuugauaa

SEQ ID NO: 2310959 - RNA, 19 nt, Homo sapiens
  misc_RNA (1)...(19): siRNA sense strand
gcaaguagaauauggaaaa

SEQ ID NO: 2310960 - RNA, 19 nt, Homo sapiens
  misc_RNA (1)...(19): siRNA sense strand
cugaaagcauugaagaauu

SEQ ID NO: 2310961 - RNA, 19 nt, Homo sapiens
  misc_RNA (1)...(19): siRNA sense strand
cugcaaaggaggcaacaua

SEQ ID NO: 2310962 - RNA, 19 nt, Homo sapiens
  misc_RNA (1)...(19): siRNA sense strand
aaagagaacaagaaagcaa

SEQ ID NO: 2310963 - RNA, 19 nt, Homo sapiens
  misc_RNA (1)...(19): siRNA sense strand
gaacauuugcagaagacua

SEQ ID NO: 2310964 - RNA, 19 nt, Homo sapiens
  misc_RNA (1)...(19): siRNA sense strand
acagagaauugcugaaaga

SEQ ID NO: 2310965 - RNA, 19 nt, Homo sapiens
  misc_RNA (1)...(19): siRNA sense strand
ugacaaauguacagaagca

SEQ ID NO: 2310966 - RNA, 19 nt, Homo sapiens
  misc_RNA (1)...(19): siRNA sense strand
cugccagaguggaaauaaa

SEQ ID NO: 2310967 - RNA, 19 nt, Homo sapiens
  misc_RNA (1)...(19): siRNA sense strand
ugaauuagaagaaggagaa

SEQ ID NO: 2310968 - RNA, 19 nt, Homo sapiens
  misc_RNA (1)...(19): siRNA sense strand
uagaagugauagugaaaca

SEQ ID NO: 2310969 - RNA, 19 nt, Homo sapiens
  misc_RNA (1)...(19): siRNA sense strand
cugcauuagcuguggaaga

SEQ ID NO: 2310970 - RNA, 19 nt, Homo sapiens
  misc_RNA (1)...(19): siRNA sense strand
aagaaaggaaacagacuua

SEQ ID NO: 2310971 - RNA, 19 nt, Homo sapiens
  misc_RNA (1)...(19): siRNA sense strand
uaacagaggaacugaaaga

SEQ ID NO: 2310972 - RNA, 19 nt, Homo sapiens
  misc_RNA (1)...(19): siRNA sense strand
ccaacaaggaagacgaaaa

SEQ ID NO: 2310973 - RNA, 19 nt, Homo sapiens
  misc_RNA (1)...(19): siRNA sense strand
gagaagaaagauaaaguga

SEQ ID NO: 2310974 - RNA, 19 nt, Homo sapiens
  misc_RNA (1)...(19): siRNA sense strand
guuaaagacuccagagaag

SEQ ID NO: 2310975 - RNA, 19 nt, Homo sapiens
  misc_RNA (1)...(19): siRNA sense strand
ggaaaauuaucaagaccaa

SEQ ID NO: 2310976 - RNA, 19 nt, Homo sapiens
  misc_RNA (1)...(19): siRNA sense strand
gcccagacauggaaaggaa

SEQ ID NO: 2310977 - RNA, 19 nt, Homo sapiens
  misc_RNA (1)...(19): siRNA sense strand
gaacugaaagaguacgaaa

SEQ ID NO: 2310978 - RNA, 19 nt, Homo sapiens
  misc_RNA (1)...(19): siRNA sense strand
agagagaagaggaugggaa

SEQ ID NO: 2310979 - RNA, 19 nt, Homo sapiens
  misc_RNA (1)...(19): siRNA sense strand
gggauguucuggaggcaau

SEQ ID NO: 2310980 - RNA, 19 nt, Homo sapiens
  misc_RNA (1)...(19): siRNA sense strand
agaaaugaugaccgggaaa

SEQ ID NO: 2310981 - RNA, 19 nt, Homo sapiens
  misc_RNA (1)...(19): siRNA sense strand
agaaagacauagaacugaa

SEQ ID NO: 2310982 - RNA, 19 nt, Homo sapiens
  misc_RNA (1)...(19): siRNA sense strand
ggcuaaaagugaagguaau

SEQ ID NO: 2310983 - RNA, 19 nt, Homo sapiens
  misc_RNA (1)...(19): siRNA sense strand
cugaagguauggagaugaa

SEQ ID NO: 2310984 - RNA, 19 nt, Homo sapiens
  misc_RNA (1)...(19): siRNA sense strand
ucaacaacagugagugaaa

SEQ ID NO: 2310985 - RNA, 19 nt, Homo sapiens
  misc_RNA (1)...(19): siRNA sense strand
augaaggaccagagaaaga

SEQ ID NO: 2310986 - RNA, 19 nt, Homo sapiens
  misc_RNA (1)...(19): siRNA sense strand
aaauaaaccgcaaggauga

SEQ ID NO: 2310987 - RNA, 19 nt, Homo sapiens
  misc_RNA (1)...(19): siRNA sense strand
ccaaagauugucugaguuu

SEQ ID NO: 2310988 - RNA, 19 nt, Homo sapiens
  misc_RNA (1)...(19): siRNA sense strand
ugauacagguagaugaaga

SEQ ID NO: 2310989 - RNA, 19 nt, Homo sapiens
  misc_RNA (1)...(19): siRNA sense strand
aaccaaagacugaaagcaa

SEQ ID NO: 2310990 - RNA, 19 nt, Homo sapiens
  misc_RNA (1)...(19): siRNA sense strand
agacauagaacugaagaua

SEQ ID NO: 2310991 - RNA, 19 nt, Homo sapiens
  misc_RNA (1)...(19): siRNA sense strand
caagaaagcaaagaagaaa

SEQ ID NO: 2310992 - RNA, 19 nt, Homo sapiens
  misc_RNA (1)...(19): siRNA sense strand
aguguuaacuguacugaaa

SEQ ID NO: 2310993 - RNA, 19 nt, Homo sapiens
  misc_RNA (1)...(19): siRNA sense strand
ucugauaauucaagcagua

SEQ ID NO: 2310994 - RNA, 19 nt, Homo sapiens
  misc_RNA (1)...(19): siRNA sense strand
cuuaaagaugcuucagaua

SEQ ID NO: 2310995 - RNA, 19 nt, Homo sapiens
  misc_RNA (1)...(19): siRNA sense strand
gaagauaauuguaaggaag

SEQ ID NO: 2310996 - RNA, 19 nt, Homo sapiens
  misc_RNA (1)...(19): siRNA sense strand
gaggaugggaagauuguaa

SEQ ID NO: 2310997 - RNA, 19 nt, Homo sapiens
  misc_RNA (1)...(19): siRNA sense strand
gaagaaucucugugauauu

SEQ ID NO: 2310998 - RNA, 19 nt, Homo sapiens
  misc_RNA (1)...(19): siRNA sense strand
acagguagaugaagauaau

SEQ ID NO: 2310999 - RNA, 19 nt, Homo sapiens
  misc_RNA (1)...(19): siRNA sense strand
ggaccaagaucacuggaga

SEQ ID NO: 2311000 - RNA, 19 nt, Homo sapiens
  misc_RNA (1)...(19): siRNA sense strand
agugagaccuguagcaaaa

SEQ ID NO: 2311001 - RNA, 19 nt, Homo sapiens
  misc_RNA (1)...(19): siRNA sense strand
agacauagccaguuuaaca

SEQ ID NO: 2311002 - RNA, 19 nt, Homo sapiens
  misc_RNA (1)...(19): siRNA sense strand
accaaagacugaaagcaaa

SEQ ID NO: 2311003 - RNA, 19 nt, Homo sapiens
  misc_RNA (1)...(19): siRNA sense strand
agaaacagaaugaaccaaa

SEQ ID NO: 2311004 - RNA, 19 nt, Homo sapiens
  misc_RNA (1)...(19): siRNA sense strand
cagaauggcaacuggugaa

SEQ ID NO: 2311005 - RNA, 19 nt, Homo sapiens
  misc_RNA (1)...(19): siRNA sense strand
ggugauacagguagaugaa

SEQ ID NO: 2311006 - RNA, 19 nt, Homo sapiens
  misc_RNA (1)...(19): siRNA sense strand
gccugaaagcauugaagaa

SEQ ID NO: 2311007 - RNA, 19 nt, Homo sapiens
  misc_RNA (1)...(19): siRNA sense strand
uaguagaagaggaagaaaa

SEQ ID NO: 2311008 - RNA, 19 nt, Homo sapiens
  misc_RNA (1)...(19): siRNA sense strand
uggaagaaauccuggccua

SEQ ID NO: 2311009 - RNA, 19 nt, Homo sapiens
  misc_RNA (1)...(19): siRNA sense strand
ccucaguagacuaggcuau

SEQ ID NO: 2311010 - RNA, 19 nt, Homo sapiens
  misc_RNA (1)...(19): siRNA sense strand
cauugauccuaaagagcuu

SEQ ID NO: 2311011 - RNA, 19 nt, Homo sapiens
  misc_RNA (1)...(19): siRNA sense strand
ggacuucaaugcagagcca

SEQ ID NO: 2311012 - RNA, 19 nt, Homo sapiens
  misc_RNA (1)...(19): siRNA sense strand
ccauacacuaccuggaaga

SEQ ID NO: 2311013 - RNA, 19 nt, Homo sapiens
  misc_RNA (1)...(19): siRNA sense strand
cuggauuacaucugguauu

SEQ ID NO: 2311014 - RNA, 19 nt, Homo sapiens
  misc_RNA (1)...(19): siRNA sense strand
agccaacagaagaggucua

SEQ ID NO: 2311015 - RNA, 19 nt, Homo sapiens
  misc_RNA (1)...(19): siRNA sense strand
cgaucugcucacugaagaa

SEQ ID NO: 2311016 - RNA, 19 nt, Homo sapiens
  misc_RNA (1)...(19): siRNA sense strand
uggagaaggcaaagacaac

SEQ ID NO: 2311017 - RNA, 19 nt, Homo sapiens
  misc_RNA (1)...(19): siRNA sense strand
uuggagaaggcaaagacaa

SEQ ID NO: 2311018 - RNA, 19 nt, Homo sapiens
  misc_RNA (1)...(19): siRNA sense strand
cgguacaagcagacucuau

SEQ ID NO: 2311019 - RNA, 19 nt, Homo sapiens
  misc_RNA (1)...(19): siRNA sense strand
aaaccaaccagguggccau

SEQ ID NO: 2311020 - RNA, 19 nt, Homo sapiens
  misc_RNA (1)...(19): siRNA sense strand
cauuggaucugcuggguca

SEQ ID NO: 2311021 - RNA, 19 nt, Homo sapiens
  misc_RNA (1)...(19): siRNA sense strand
gcaucgucuucaaggccaa

SEQ ID NO: 2311022 - RNA, 19 nt, Homo sapiens
  misc_RNA (1)...(19): siRNA sense strand
aggagauggaggacaauca

SEQ ID NO: 2311023 - RNA, 19 nt, Homo sapiens
  misc_RNA (1)...(19): siRNA sense strand
agauuaaggcucugcagga

SEQ ID NO: 2311024 - RNA, 19 nt, Homo sapiens
  misc_RNA (1)...(19): siRNA sense strand
uggaggaggugcugccuga

SEQ ID NO: 2311025 - RNA, 19 nt, Homo sapiens
  misc_RNA (1)...(19): siRNA sense strand
ugguacaacugaaggcugu

SEQ ID NO: 2311026 - RNA, 19 nt, Homo sapiens
  misc_RNA (1)...(19): siRNA sense strand
cgggcaagaacgauauuga

SEQ ID NO: 2311027 - RNA, 19 nt, Homo sapiens
  misc_RNA (1)...(19): siRNA sense strand
cauuggaucugcuggguca

SEQ ID NO: 2311028 - RNA, 19 nt, Homo sapiens
  misc_RNA (1)...(19): siRNA sense strand
gcaucgucuucaaggccaa

SEQ ID NO: 2311029 - RNA, 19 nt, Homo sapiens
  misc_RNA (1)...(19): siRNA sense strand
aggagauggaggacaauca

SEQ ID NO: 2311030 - RNA, 19 nt, Homo sapiens
  misc_RNA (1)...(19): siRNA sense strand
agauuaaggcucugcagga

SEQ ID NO: 2311031 - RNA, 19 nt, Homo sapiens
  misc_RNA (1)...(19): siRNA sense strand
uggaggaggugcugccuga

SEQ ID NO: 2311032 - RNA, 19 nt, Homo sapiens
  misc_RNA (1)...(19): siRNA sense strand
ugguacaacugaaggcugu

SEQ ID NO: 2311033 - RNA, 19 nt, Homo sapiens
  misc_RNA (1)...(19): siRNA sense strand
cgggcaagaacgauauuga

SEQ ID NO: 2311034 - RNA, 19 nt, Homo sapiens
  misc_RNA (1)...(19): siRNA sense strand
cugaagagacugaggaaac

SEQ ID NO: 2311035 - RNA, 19 nt, Homo sapiens
  misc_RNA (1)...(19): siRNA sense strand
gguaaaagcugacgggaac

SEQ ID NO: 2311036 - RNA, 19 nt, Homo sapiens
  misc_RNA (1)...(19): siRNA sense strand
gaaccaaggaccuggcuga

SEQ ID NO: 2311037 - RNA, 19 nt, Homo sapiens
  misc_RNA (1)...(19): siRNA sense strand
ugguaaaagcugacgggaa

SEQ ID NO: 2311038 - RNA, 19 nt, Homo sapiens
  misc_RNA (1)...(19): siRNA sense strand
cgaaaggccucaaucccaa

SEQ ID NO: 2311039 - RNA, 19 nt, Homo sapiens
  misc_RNA (1)...(19): siRNA sense strand
gcugaagagacugaggaaa

SEQ ID NO: 2311040 - RNA, 19 nt, Homo sapiens
  misc_RNA (1)...(19): siRNA sense strand
ggcaguacuugguugggaa

SEQ ID NO: 2311041 - RNA, 19 nt, Homo sapiens
  misc_RNA (1)...(19): siRNA sense strand
cgggaaacagagaagcgaa

SEQ ID NO: 2311042 - RNA, 19 nt, Homo sapiens
  misc_RNA (1)...(19): siRNA sense strand
gugaaagcugaaacugaaa

SEQ ID NO: 2311043 - RNA, 19 nt, Homo sapiens
  misc_RNA (1)...(19): siRNA sense strand
ccuucaaagucaacagcca

SEQ ID NO: 2311044 - RNA, 19 nt, Homo sapiens
  misc_RNA (1)...(19): siRNA sense strand
guucugacucugugaccaa

SEQ ID NO: 2311045 - RNA, 19 nt, Homo sapiens
  misc_RNA (1)...(19): siRNA sense strand
acgggaaccaggagaccaa

SEQ ID NO: 2311046 - RNA, 19 nt, Homo sapiens
  misc_RNA (1)...(19): siRNA sense strand
ugaccaaacgaaagagagu

SEQ ID NO: 2311047 - RNA, 19 nt, Homo sapiens
  misc_RNA (1)...(19): siRNA sense strand
uggacuacguggccagcaa

SEQ ID NO: 2311048 - RNA, 19 nt, Homo sapiens
  misc_RNA (1)...(19): siRNA sense strand
ugaucaccauugugggcaa

SEQ ID NO: 2311049 - RNA, 19 nt, Homo sapiens
  misc_RNA (1)...(19): siRNA sense strand
gggaaacagagaagcgaac

SEQ ID NO: 2311050 - RNA, 19 nt, Homo sapiens
  misc_RNA (1)...(19): siRNA sense strand
gaaacagagaagcgaacca

SEQ ID NO: 2311051 - RNA, 19 nt, Homo sapiens
  misc_RNA (1)...(19): siRNA sense strand
aguuccgauuggugguaaa

SEQ ID NO: 2311052 - RNA, 19 nt, Homo sapiens
  misc_RNA (1)...(19): siRNA sense strand
aucaaaugaccaaacgaaa

SEQ ID NO: 2311053 - RNA, 19 nt, Homo sapiens
  misc_RNA (1)...(19): siRNA sense strand
gcuucucugccgauggaaa

SEQ ID NO: 2311054 - RNA, 19 nt, Homo sapiens
  misc_RNA (1)...(19): siRNA sense strand
aagagucaggguaaggaaa

SEQ ID NO: 2311055 - RNA, 19 nt, Homo sapiens
  misc_RNA (1)...(19): siRNA sense strand
gucagaaauguguggccua

SEQ ID NO: 2311056 - RNA, 19 nt, Homo sapiens
  misc_RNA (1)...(19): siRNA sense strand
uaaggaaagcccaggggaa

SEQ ID NO: 2311057 - RNA, 19 nt, Homo sapiens
  misc_RNA (1)...(19): siRNA sense strand
ugaccaaagcugagaagag

SEQ ID NO: 2311058 - RNA, 19 nt, Homo sapiens
  misc_RNA (1)...(19): siRNA sense strand
caguaauagagaugagcaa

SEQ ID NO: 2311059 - RNA, 19 nt, Homo sapiens
  misc_RNA (1)...(19): siRNA sense strand
ccgccuaaaucgaaugaau

SEQ ID NO: 2311060 - RNA, 19 nt, Homo sapiens
  misc_RNA (1)...(19): siRNA sense strand
auacaaucuucaagccaaa

SEQ ID NO: 2311061 - RNA, 19 nt, Homo sapiens
  misc_RNA (1)...(19): siRNA sense strand
ucaagaagcuccaagccua

SEQ ID NO: 2311062 - RNA, 19 nt, Homo sapiens
  misc_RNA (1)...(19): siRNA sense strand
ucaggugauuggagagcua

SEQ ID NO: 2311063 - RNA, 19 nt, Homo sapiens
  misc_RNA (1)...(19): siRNA sense strand
cugauaaaguacaaacaga

SEQ ID NO: 2311064 - RNA, 19 nt, Homo sapiens
  misc_RNA (1)...(19): siRNA sense strand
guauugaugaagugaaaca

SEQ ID NO: 2311065 - RNA, 19 nt, Homo sapiens
  misc_RNA (1)...(19): siRNA sense strand
cauaagaauaagugcaagu

SEQ ID NO: 2311066 - RNA, 19 nt, Homo sapiens
  misc_RNA (1)...(19): siRNA sense strand
gagcaagauaacaggagga

SEQ ID NO: 2311067 - RNA, 19 nt, Homo sapiens
  misc_RNA (1)...(19): siRNA sense strand
uugauaguacagugggaaa

SEQ ID NO: 2311068 - RNA, 19 nt, Homo sapiens
  misc_RNA (1)...(19): siRNA sense strand
aagcaaauccugaugacau

SEQ ID NO: 2311069 - RNA, 19 nt, Homo sapiens
  misc_RNA (1)...(19): siRNA sense strand
cauacaaucuucaagccaa

SEQ ID NO: 2311070 - RNA, 19 nt, Homo sapiens
  misc_RNA (1)...(19): siRNA sense strand
acagaaaauggcagauaua

SEQ ID NO: 2311071 - RNA, 19 nt, Homo sapiens
  misc_RNA (1)...(19): siRNA sense strand
gcugaagauccgucaaaga

SEQ ID NO: 2311072 - RNA, 19 nt, Homo sapiens
  misc_RNA (1)...(19): siRNA sense strand
guggaacaauaauggaaaa

SEQ ID NO: 2311073 - RNA, 19 nt, Homo sapiens
  misc_RNA (1)...(19): siRNA sense strand
ggauaauggugcaggcgcu

SEQ ID NO: 2311074 - RNA, 19 nt, Homo sapiens
  misc_RNA (1)...(19): siRNA sense strand
acucccagguagagaugaa

SEQ ID NO: 2311075 - RNA, 19 nt, Homo sapiens
  misc_RNA (1)...(19): siRNA sense strand
gaagauccgucaaagaauu

SEQ ID NO: 2311076 - RNA, 19 nt, Homo sapiens
  misc_RNA (1)...(19): siRNA sense strand
ugaugaugcucuucaagua

SEQ ID NO: 2311077 - RNA, 19 nt, Homo sapiens
  misc_RNA (1)...(19): siRNA sense strand
auagagaugagcaagauaa

SEQ ID NO: 2311078 - RNA, 19 nt, Homo sapiens
  misc_RNA (1)...(19): siRNA sense strand
gagagaaaggcgaauacau

SEQ ID NO: 2311079 - RNA, 19 nt, Homo sapiens
  misc_RNA (1)...(19): siRNA sense strand
uggaaaaguucaacguuau

SEQ ID NO: 2311080 - RNA, 19 nt, Homo sapiens
  misc_RNA (1)...(19): siRNA sense strand
gauaacaggaggaagucau

SEQ ID NO: 2311081 - RNA, 19 nt, Homo sapiens
  misc_RNA (1)...(19): siRNA sense strand
gauuauucuuacauggaca

SEQ ID NO: 2311082 - RNA, 19 nt, Homo sapiens
  misc_RNA (1)...(19): siRNA sense strand
uaguagagcaugcagaauu

SEQ ID NO: 2311083 - RNA, 19 nt, Homo sapiens
  misc_RNA (1)...(19): siRNA sense strand
ggguaaggaccgccuaaau

SEQ ID NO: 2311084 - RNA, 19 nt, Homo sapiens
  misc_RNA (1)...(19): siRNA sense strand
agaccaccuuggaggauuu

SEQ ID NO: 2311085 - RNA, 19 nt, Homo sapiens
  misc_RNA (1)...(19): siRNA sense strand
auauggaccaccaggcaaa

SEQ ID NO: 2311086 - RNA, 19 nt, Homo sapiens
  misc_RNA (1)...(19): siRNA sense strand
agguaucucugguagaaau

SEQ ID NO: 2311087 - RNA, 19 nt, Homo sapiens
  misc_RNA (1)...(19): siRNA sense strand
gguaucucugguagaaaua

SEQ ID NO: 2311088 - RNA, 19 nt, Homo sapiens
  misc_RNA (1)...(19): siRNA sense strand
cugaagauccgucaaagaa

SEQ ID NO: 2311089 - RNA, 19 nt, Homo sapiens
  misc_RNA (1)...(19): siRNA sense strand
aaagcagugaugaaagaaa

SEQ ID NO: 2311090 - RNA, 19 nt, Homo sapiens
  misc_RNA (1)...(19): siRNA sense strand
ugacugauggggaggauaa

SEQ ID NO: 2311091 - RNA, 19 nt, Homo sapiens
  misc_RNA (1)...(19): siRNA sense strand
cggaggugcauuuguggua

SEQ ID NO: 2311092 - RNA, 19 nt, Homo sapiens
  misc_RNA (1)...(19): siRNA sense strand
agcaaauccugaugacauu

SEQ ID NO: 2311093 - RNA, 19 nt, Homo sapiens
  misc_RNA (1)...(19): siRNA sense strand
gaguguuugaugaguacaa

SEQ ID NO: 2311094 - RNA, 19 nt, Homo sapiens
  misc_RNA (1)...(19): siRNA sense strand
aguggaacaauaauggaaa

SEQ ID NO: 2311095 - RNA, 19 nt, Homo sapiens
  misc_RNA (1)...(19): siRNA sense strand
uuggaaaaguucaacguua

SEQ ID NO: 2311096 - RNA, 19 nt, Homo sapiens
  misc_RNA (1)...(19): siRNA sense strand
ucugguagaaauagaguuu

SEQ ID NO: 2311097 - RNA, 19 nt, Homo sapiens
  misc_RNA (1)...(19): siRNA sense strand
cugaugaagcaguaauaga

SEQ ID NO: 2311098 - RNA, 19 nt, Homo sapiens
  misc_RNA (1)...(19): siRNA sense strand
cgaaaguaagggauuaaca

SEQ ID NO: 2311099 - RNA, 19 nt, Homo sapiens
  misc_RNA (1)...(19): siRNA sense strand
cgccaagaccugaaauuga

SEQ ID NO: 2311100 - RNA, 19 nt, Homo sapiens
  misc_RNA (1)...(19): siRNA sense strand
caaauagaggauaugguga

SEQ ID NO: 2311101 - RNA, 19 nt, Homo sapiens
  misc_RNA (1)...(19): siRNA sense strand
cugagaauuggaaggaaaa

SEQ ID NO: 2311102 - RNA, 19 nt, Homo sapiens
  misc_RNA (1)...(19): siRNA sense strand
ggggaguguuugaugagua

SEQ ID NO: 2311103 - RNA, 19 nt, Homo sapiens
  misc_RNA (1)...(19): siRNA sense strand
gccuaaaucgaaugaauca

SEQ ID NO: 2311104 - RNA, 19 nt, Homo sapiens
  misc_RNA (1)...(19): siRNA sense strand
gcugcagacuguugaaaau

SEQ ID NO: 2311105 - RNA, 19 nt, Homo sapiens
  misc_RNA (1)...(19): siRNA sense strand
cugaaauugaugaggauac

SEQ ID NO: 2311106 - RNA, 19 nt, Homo sapiens
  misc_RNA (1)...(19): siRNA sense strand
guacaaaaggccaaaacau

SEQ ID NO: 2311107 - RNA, 19 nt, Homo sapiens
  misc_RNA (1)...(19): siRNA sense strand
caguggaacaauaauggaa

SEQ ID NO: 2311108 - RNA, 19 nt, Homo sapiens
  misc_RNA (1)...(19): siRNA sense strand
aagcgaacccagaaacauu

SEQ ID NO: 2311109 - RNA, 19 nt, Homo sapiens
  misc_RNA (1)...(19): siRNA sense strand
gaugaugcucuucaaguaa

SEQ ID NO: 2311110 - RNA, 19 nt, Homo sapiens
  misc_RNA (1)...(19): siRNA sense strand
acaaugaagaucagccuuu

SEQ ID NO: 2311111 - RNA, 19 nt, Homo sapiens
  misc_RNA (1)...(19): siRNA sense strand
ucgaaugaaucaagcagca

SEQ ID NO: 2311112 - RNA, 19 nt, Homo sapiens
  misc_RNA (1)...(19): siRNA sense strand
caucaaaaguauccaacau

SEQ ID NO: 2311113 - RNA, 19 nt, Homo sapiens
  misc_RNA (1)...(19): siRNA sense strand
guggagagaaaggcgaaua

SEQ ID NO: 2311114 - RNA, 19 nt, Homo sapiens
  misc_RNA (1)...(19): siRNA sense strand
gauuguuuacgcagaaauu

SEQ ID NO: 2311115 - RNA, 19 nt, Homo sapiens
  misc_RNA (1)...(19): siRNA sense strand
cagagaaaccagacggaga

SEQ ID NO: 2311116 - RNA, 19 nt, Homo sapiens
  misc_RNA (1)...(19): siRNA sense strand
agaugaaggagguggccaa

SEQ ID NO: 2311117 - RNA, 19 nt, Homo sapiens
  misc_RNA (1)...(19): siRNA sense strand
gcgagaagcccaaggagga

SEQ ID NO: 2311118 - RNA, 19 nt, Homo sapiens
  misc_RNA (1)...(19): siRNA sense strand
ccaucaugcucaaggccaa

SEQ ID NO: 2311119 - RNA, 19 nt, Homo sapiens
  misc_RNA (1)...(19): siRNA sense strand
gaggaugaugagaagguaa

SEQ ID NO: 2311120 - RNA, 19 nt, Homo sapiens
  misc_RNA (1)...(19): siRNA sense strand
aagccaagggagagaagaa

SEQ ID NO: 2311121 - RNA, 19 nt, Homo sapiens
  misc_RNA (1)...(19): siRNA sense strand
aaacuuaugcagagggaga

SEQ ID NO: 2311122 - RNA, 19 nt, Homo sapiens
  misc_RNA (1)...(19): siRNA sense strand
aggaugaugagaagguaaa

SEQ ID NO: 2311123 - RNA, 19 nt, Homo sapiens
  misc_RNA (1)...(19): siRNA sense strand
aggaggaugagaagguaaa

SEQ ID NO: 2311124 - RNA, 19 nt, Homo sapiens
  misc_RNA (1)...(19): siRNA sense strand
ccgagaugacugaggugaa

SEQ ID NO: 2311125 - RNA, 19 nt, Homo sapiens
  misc_RNA (1)...(19): siRNA sense strand
uggccaagaaagaggauga

SEQ ID NO: 2311126 - RNA, 19 nt, Homo sapiens
  misc_RNA (1)...(19): siRNA sense strand
aagccaaggaugacagcaa

SEQ ID NO: 2311127 - RNA, 19 nt, Homo sapiens
  misc_RNA (1)...(19): siRNA sense strand
ccaaaacacccgagaaaca

SEQ ID NO: 2311128 - RNA, 19 nt, Homo sapiens
  misc_RNA (1)...(19): siRNA sense strand
aguucaacacugugguuaa

SEQ ID NO: 2311129 - RNA, 19 nt, Homo sapiens
  misc_RNA (1)...(19): siRNA sense strand
auggacaagcagagacaaa

SEQ ID NO: 2311130 - RNA, 19 nt, Homo sapiens
  misc_RNA (1)...(19): siRNA sense strand
ccagcuacccagaggaaga

SEQ ID NO: 2311131 - RNA, 19 nt, Homo sapiens
  misc_RNA (1)...(19): siRNA sense strand
ugagcagggacaaggauaa

SEQ ID NO: 2311132 - RNA, 19 nt, Homo sapiens
  misc_RNA (1)...(19): siRNA sense strand
gaaaagagcaggugggaac

SEQ ID NO: 2311133 - RNA, 19 nt, Homo sapiens
  misc_RNA (1)...(19): siRNA sense strand
gcaaaggcauccuggccau

SEQ ID NO: 2311134 - RNA, 19 nt, Homo sapiens
  misc_RNA (1)...(19): siRNA sense strand
agaccaagacagaugccaa

SEQ ID NO: 2311135 - RNA, 19 nt, Homo sapiens
  misc_RNA (1)...(19): siRNA sense strand
agaugaagcugguggcaag

SEQ ID NO: 2311136 - RNA, 19 nt, Homo sapiens
  misc_RNA (1)...(19): siRNA sense strand
uggcaagaguggcgagaag

SEQ ID NO: 2311137 - RNA, 19 nt, Homo sapiens
  misc_RNA (1)...(19): siRNA sense strand
aggagguggccaagaaaga

SEQ ID NO: 2311138 - RNA, 19 nt, Homo sapiens
  misc_RNA (1)...(19): siRNA sense strand
cacaggaagccaagggaga

SEQ ID NO: 2311139 - RNA, 19 nt, Homo sapiens
  misc_RNA (1)...(19): siRNA sense strand
auaagaaggaggcagggaa

SEQ ID NO: 2311140 - RNA, 19 nt, Homo sapiens
  misc_RNA (1)...(19): siRNA sense strand
caaccacaucacaggcaaa

SEQ ID NO: 2311141 - RNA, 19 nt, Homo sapiens
  misc_RNA (1)...(19): siRNA sense strand
uguccauggaugaaagcaa

SEQ ID NO: 2311142 - RNA, 19 nt, Homo sapiens
  misc_RNA (1)...(19): siRNA sense strand
gagaggagaugaaggaggu

SEQ ID NO: 2311143 - RNA, 19 nt, Homo sapiens
  misc_RNA (1)...(19): siRNA sense strand
cagcauauuugaugagccu

SEQ ID NO: 2311144 - RNA, 19 nt, Homo sapiens
  misc_RNA (1)...(19): siRNA sense strand
ggcaagacggagauggaga

SEQ ID NO: 2311145 - RNA, 19 nt, Homo sapiens
  misc_RNA (1)...(19): siRNA sense strand
ccaccaagaaggaagagga

SEQ ID NO: 2311146 - RNA, 19 nt, Homo sapiens
  misc_RNA (1)...(19): siRNA sense strand
aaggaggaugagaagguaa

SEQ ID NO: 2311147 - RNA, 19 nt, Homo sapiens
  misc_RNA (1)...(19): siRNA sense strand
ggaacugggaacacagaca

SEQ ID NO: 2311148 - RNA, 19 nt, Homo sapiens
  misc_RNA (1)...(19): siRNA sense strand
gggcccuccuccagaacaa

SEQ ID NO: 2311149 - RNA, 19 nt, Homo sapiens
  misc_RNA (1)...(19): siRNA sense strand
gccaaagaggggugguuua

SEQ ID NO: 2311150 - RNA, 19 nt, Homo sapiens
  misc_RNA (1)...(19): siRNA sense strand
cuggagagagugaagaaca

SEQ ID NO: 2311151 - RNA, 19 nt, Homo sapiens
  misc_RNA (1)...(19): siRNA sense strand
gagaauaccucccugcuca

SEQ ID NO: 2311152 - RNA, 19 nt, Homo sapiens
  misc_RNA (1)...(19): siRNA sense strand
cugcaguggauaagaagga

SEQ ID NO: 2311153 - RNA, 19 nt, Homo sapiens
  misc_RNA (1)...(19): siRNA sense strand
cagaaaagagggugagaag

SEQ ID NO: 2311154 - RNA, 19 nt, Homo sapiens
  misc_RNA (1)...(19): siRNA sense strand
cagaggaagaugggagaca

SEQ ID NO: 2311155 - RNA, 19 nt, Homo sapiens
  misc_RNA (1)...(19): siRNA sense strand
ccaagaaacuuaugcagag

SEQ ID NO: 2311156 - RNA, 19 nt, Homo sapiens
  misc_RNA (1)...(19): siRNA sense strand
gagaugaagcugguggcaa

SEQ ID NO: 2311157 - RNA, 19 nt, Homo sapiens
  misc_RNA (1)...(19): siRNA sense strand
gugaaaaggagaccaagaa

SEQ ID NO: 2311158 - RNA, 19 nt, Homo sapiens
  misc_RNA (1)...(19): siRNA sense strand
agacagagaugaagcuggu

SEQ ID NO: 2311159 - RNA, 19 nt, Homo sapiens
  misc_RNA (1)...(19): siRNA sense strand
agcccaaggaggagaagau

SEQ ID NO: 2311160 - RNA, 19 nt, Homo sapiens
  misc_RNA (1)...(19): siRNA sense strand
acauggacaagcagagaca

SEQ ID NO: 2311161 - RNA, 19 nt, Homo sapiens
  misc_RNA (1)...(19): siRNA sense strand
aaaaggaagccaaggauga

SEQ ID NO: 2311162 - RNA, 19 nt, Homo sapiens
  misc_RNA (1)...(19): siRNA sense strand
agaagguggaagugcccaa

SEQ ID NO: 2311163 - RNA, 19 nt, Homo sapiens
  misc_RNA (1)...(19): siRNA sense strand
aaaagagagaggagaugaa

SEQ ID NO: 2311164 - RNA, 19 nt, Homo sapiens
  misc_RNA (1)...(19): siRNA sense strand
ccgaugaccacguggccuu

SEQ ID NO: 2311165 - RNA, 19 nt, Homo sapiens
  misc_RNA (1)...(19): siRNA sense strand
agggagagaagaaggaucu

SEQ ID NO: 2311166 - RNA, 19 nt, Homo sapiens
  misc_RNA (1)...(19): siRNA sense strand
aaguggagaccaagacaga

SEQ ID NO: 2311167 - RNA, 19 nt, Homo sapiens
  misc_RNA (1)...(19): siRNA sense strand
aggaugacagcaagaccaa

SEQ ID NO: 2311168 - RNA, 19 nt, Homo sapiens
  misc_RNA (1)...(19): siRNA sense strand
ccaagaauggacaggaaag

SEQ ID NO: 2311169 - RNA, 19 nt, Homo sapiens
  misc_RNA (1)...(19): siRNA sense strand
gagaaaccagacggagaaa

SEQ ID NO: 2311170 - RNA, 19 nt, Homo sapiens
  misc_RNA (1)...(19): siRNA sense strand
gcaauugggucuagugaau

SEQ ID NO: 2311171 - RNA, 19 nt, Homo sapiens
  misc_RNA (1)...(19): siRNA sense strand
gggccuaaccugaucgcaa

SEQ ID NO: 2311172 - RNA, 19 nt, Homo sapiens
  misc_RNA (1)...(19): siRNA sense strand
augagaaacugaaggacca

SEQ ID NO: 2311173 - RNA, 19 nt, Homo sapiens
  misc_RNA (1)...(19): siRNA sense strand
gugcugaaaucuuggcuga

SEQ ID NO: 2311174 - RNA, 19 nt, Homo sapiens
  misc_RNA (1)...(19): siRNA sense strand
gcucaauauaguagagaug

SEQ ID NO: 2311175 - RNA, 19 nt, Homo sapiens
  misc_RNA (1)...(19): siRNA sense strand
aaaucaacgaggugcugaa

SEQ ID NO: 2311176 - RNA, 19 nt, Homo sapiens
  misc_RNA (1)...(19): siRNA sense strand
aguagagaugaaagaugaa

SEQ ID NO: 2311177 - RNA, 19 nt, Homo sapiens
  misc_RNA (1)...(19): siRNA sense strand
uugaagaguuucugcagca

SEQ ID NO: 2311178 - RNA, 19 nt, Homo sapiens
  misc_RNA (1)...(19): siRNA sense strand
ggccuaaccugaucgcaau

SEQ ID NO: 2311179 - RNA, 19 nt, Homo sapiens
  misc_RNA (1)...(19): siRNA sense strand
cgacaaacucacugugccu

SEQ ID NO: 2311180 - RNA, 19 nt, Homo sapiens
  misc_RNA (1)...(19): siRNA sense strand
ugacaugaugaaagaagca

SEQ ID NO: 2311181 - RNA, 19 nt, Homo sapiens
  misc_RNA (1)...(19): siRNA sense strand
agauagaaacagugaggau

SEQ ID NO: 2311182 - RNA, 19 nt, Homo sapiens
  misc_RNA (1)...(19): siRNA sense strand
gcaaagaggaagcuggaga

SEQ ID NO: 2311183 - RNA, 19 nt, Homo sapiens
  misc_RNA (1)...(19): siRNA sense strand
gagauuacuucgaaggaca

SEQ ID NO: 2311184 - RNA, 19 nt, Homo sapiens
  misc_RNA (1)...(19): siRNA sense strand
agaaauuuaccaagggaau

SEQ ID NO: 2311185 - RNA, 19 nt, Homo sapiens
  misc_RNA (1)...(19): siRNA sense strand
aggaauaugaugaggacga

SEQ ID NO: 2311186 - RNA, 19 nt, Homo sapiens
  misc_RNA (1)...(19): siRNA sense strand
gcuucaguguccagaguau

SEQ ID NO: 2311187 - RNA, 19 nt, Homo sapiens
  misc_RNA (1)...(19): siRNA sense strand
ccagaaguuacgaagcaaa

SEQ ID NO: 2311188 - RNA, 19 nt, Homo sapiens
  misc_RNA (1)...(19): siRNA sense strand
agcuggagauggaggacua

SEQ ID NO: 2311189 - RNA, 19 nt, Homo sapiens
  misc_RNA (1)...(19): siRNA sense strand
ugauggacaaagagagauu

SEQ ID NO: 2311190 - RNA, 19 nt, Homo sapiens
  misc_RNA (1)...(19): siRNA sense strand
gagagcaagaagagcagaa

SEQ ID NO: 2311191 - RNA, 19 nt, Homo sapiens
  misc_RNA (1)...(19): siRNA sense strand
gagaaauuuaccaagggaa

SEQ ID NO: 2311192 - RNA, 19 nt, Homo sapiens
  misc_RNA (1)...(19): siRNA sense strand
auagaaacagugaggauga

SEQ ID NO: 2311193 - RNA, 19 nt, Homo sapiens
  misc_RNA (1)...(19): siRNA sense strand
aggaggaggaagacgaaga

SEQ ID NO: 2311194 - RNA, 19 nt, Homo sapiens
  misc_RNA (1)...(19): siRNA sense strand
gaggaaguggagaaaggaa

SEQ ID NO: 2311195 - RNA, 19 nt, Homo sapiens
  misc_RNA (1)...(19): siRNA sense strand
ccagaguaucagugacuuu

SEQ ID NO: 2311196 - RNA, 19 nt, Homo sapiens
  misc_RNA (1)...(19): siRNA sense strand
ugguagaagagaagaagca

SEQ ID NO: 2311197 - RNA, 19 nt, Homo sapiens
  misc_RNA (1)...(19): siRNA sense strand
aggacuuggaugaagaaau

SEQ ID NO: 2311198 - RNA, 19 nt, Homo sapiens
  misc_RNA (1)...(19): siRNA sense strand
gagaacucauagaacggaa

SEQ ID NO: 2311199 - RNA, 19 nt, Homo sapiens
  misc_RNA (1)...(19): siRNA sense strand
cggaagacucccaaggcga

SEQ ID NO: 2311200 - RNA, 19 nt, Homo sapiens
  misc_RNA (1)...(19): siRNA sense strand
gggaagauggggaagguga

SEQ ID NO: 2311201 - RNA, 19 nt, Homo sapiens
  misc_RNA (1)...(19): siRNA sense strand
gugaucacagggagagcaa

SEQ ID NO: 2311202 - RNA, 19 nt, Homo sapiens
  misc_RNA (1)...(19): siRNA sense strand
ucugauggacaaagagaga

SEQ ID NO: 2311203 - RNA, 19 nt, Homo sapiens
  misc_RNA (1)...(19): siRNA sense strand
aggaaauaucugaugagga

SEQ ID NO: 2311204 - RNA, 19 nt, Homo sapiens
  misc_RNA (1)...(19): siRNA sense strand
gugaggaggaggaagacga

SEQ ID NO: 2311205 - RNA, 19 nt, Homo sapiens
  misc_RNA (1)...(19): siRNA sense strand
cagaaguuacgaagcaaaa

SEQ ID NO: 2311206 - RNA, 19 nt, Homo sapiens
  misc_RNA (1)...(19): siRNA sense strand
ggaacaggaguguggugau

SEQ ID NO: 2311207 - RNA, 19 nt, Homo sapiens
  misc_RNA (1)...(19): siRNA sense strand
gacaaaagguauugcggca

SEQ ID NO: 2311208 - RNA, 19 nt, Homo sapiens
  misc_RNA (1)...(19): siRNA sense strand
ccaaggcgagagugaggaa

SEQ ID NO: 2311209 - RNA, 19 nt, Homo sapiens
  misc_RNA (1)...(19): siRNA sense strand
ucaaaguuucugaggaagu

SEQ ID NO: 2311210 - RNA, 19 nt, Homo sapiens
  misc_RNA (1)...(19): siRNA sense strand
auugguaggucuucaggaa

SEQ ID NO: 2311211 - RNA, 19 nt, Homo sapiens
  misc_RNA (1)...(19): siRNA sense strand
gaaugaugaugccaggaca

SEQ ID NO: 2311212 - RNA, 19 nt, Homo sapiens
  misc_RNA (1)...(19): siRNA sense strand
cuuugaugaugaugacuuu

SEQ ID NO: 2311213 - RNA, 19 nt, Homo sapiens
  misc_RNA (1)...(19): siRNA sense strand
ccuaguaguggguagcauu

SEQ ID NO: 2311214 - RNA, 19 nt, Homo sapiens
  misc_RNA (1)...(19): siRNA sense strand
agggagagcaagaagagca

SEQ ID NO: 2311215 - RNA, 19 nt, Homo sapiens
  misc_RNA (1)...(19): siRNA sense strand
uuaccaagggaauggauga

SEQ ID NO: 2311216 - RNA, 19 nt, Homo sapiens
  misc_RNA (1)...(19): siRNA sense strand
aggaaggaucaaacuacaa

SEQ ID NO: 2311217 - RNA, 19 nt, Homo sapiens
  misc_RNA (1)...(19): siRNA sense strand
acuuuacagucuacaggaa

SEQ ID NO: 2311218 - RNA, 19 nt, Homo sapiens
  misc_RNA (1)...(19): siRNA sense strand
ccaacgaucagguggccau

SEQ ID NO: 2311219 - RNA, 19 nt, Homo sapiens
  misc_RNA (1)...(19): siRNA sense strand
ccuauugaccauacuacaa

SEQ ID NO: 2311220 - RNA, 19 nt, Homo sapiens
  misc_RNA (1)...(19): siRNA sense strand
cugaggaaguggagaaagg

SEQ ID NO: 2311221 - RNA, 19 nt, Homo sapiens
  misc_RNA (1)...(19): siRNA sense strand
ggagaaaggaagagccgug

SEQ ID NO: 2311222 - RNA, 19 nt, Homo sapiens
  misc_RNA (1)...(19): siRNA sense strand
uagaagagaagaagcagca

SEQ ID NO: 2311223 - RNA, 19 nt, Homo sapiens
  misc_RNA (1)...(19): siRNA sense strand
ugacauaccaagacgaaau

SEQ ID NO: 2311224 - RNA, 19 nt, Homo sapiens
  misc_RNA (1)...(19): siRNA sense strand
uaauagaacaacuggagaa

SEQ ID NO: 2311225 - RNA, 19 nt, Homo sapiens
  misc_RNA (1)...(19): siRNA sense strand
gaagaaagcuguuaggaug

SEQ ID NO: 2311226 - RNA, 19 nt, Homo sapiens
  misc_RNA (1)...(19): siRNA sense strand
acucaacaaaggaaagaaa

SEQ ID NO: 2311227 - RNA, 19 nt, Homo sapiens
  misc_RNA (1)...(19): siRNA sense strand
ggguaugaugauagaugaa

SEQ ID NO: 2311228 - RNA, 19 nt, Homo sapiens
  misc_RNA (1)...(19): siRNA sense strand
ccgaaagccaggaagaaaa

SEQ ID NO: 2311229 - RNA, 19 nt, Homo sapiens
  misc_RNA (1)...(19): siRNA sense strand
acaccaaaugcuauggaua

SEQ ID NO: 2311230 - RNA, 19 nt, Homo sapiens
  misc_RNA (1)...(19): siRNA sense strand
ccucacuguugguggauuu

SEQ ID NO: 2311231 - RNA, 19 nt, Homo sapiens
  misc_RNA (1)...(19): siRNA sense strand
acgaaugcuaauagaacaa

SEQ ID NO: 2311232 - RNA, 19 nt, Homo sapiens
  misc_RNA (1)...(19): siRNA sense strand
acauaaacgacccggagaa

SEQ ID NO: 2311233 - RNA, 19 nt, Homo sapiens
  misc_RNA (1)...(19): siRNA sense strand
cgguagagaccuucaugaa

SEQ ID NO: 2311234 - RNA, 19 nt, Homo sapiens
  misc_RNA (1)...(19): siRNA sense strand
ccagauauaucaaggccuu

SEQ ID NO: 2311235 - RNA, 19 nt, Homo sapiens
  misc_RNA (1)...(19): siRNA sense strand
aaggcuggauggaaagaaa

SEQ ID NO: 2311236 - RNA, 19 nt, Homo sapiens
  misc_RNA (1)...(19): siRNA sense strand
ccagggaauuucagaggau

SEQ ID NO: 2311237 - RNA, 19 nt, Homo sapiens
  misc_RNA (1)...(19): siRNA sense strand
ugaaaggacaggacgaaga

SEQ ID NO: 2311238 - RNA, 19 nt, Homo sapiens
  misc_RNA (1)...(19): siRNA sense strand
ggaucucagccuuggcaua

SEQ ID NO: 2311239 - RNA, 19 nt, Homo sapiens
  misc_RNA (1)...(19): siRNA sense strand
acauugaaguggagacagu

SEQ ID NO: 2311240 - RNA, 19 nt, Homo sapiens
  misc_RNA (1)...(19): siRNA sense strand
uaucaauggcauauaggaa

SEQ ID NO: 2311241 - RNA, 19 nt, Homo sapiens
  misc_RNA (1)...(19): siRNA sense strand
uagauuaguaacuggcaua

SEQ ID NO: 2311242 - RNA, 19 nt, Homo sapiens
  misc_RNA (1)...(19): siRNA sense strand
ugaggagccaagagauaaa

SEQ ID NO: 2311243 - RNA, 19 nt, Homo sapiens
  misc_RNA (1)...(19): siRNA sense strand
cagcagaggagacagguau

SEQ ID NO: 2311244 - RNA, 19 nt, Homo sapiens
  misc_RNA (1)...(19): siRNA sense strand
ccacuaaugauucgauaau

SEQ ID NO: 2311245 - RNA, 19 nt, Homo sapiens
  misc_RNA (1)...(19): siRNA sense strand
ggacgaagaucaagugcac

SEQ ID NO: 2311246 - RNA, 19 nt, Homo sapiens
  misc_RNA (1)...(19): siRNA sense strand
caguguuccuauagcacaa

SEQ ID NO: 2311247 - RNA, 19 nt, Homo sapiens
  misc_RNA (1)...(19): siRNA sense strand
gauagaugaagcagaugaa

SEQ ID NO: 2311248 - RNA, 19 nt, Homo sapiens
  misc_RNA (1)...(19): siRNA sense strand
ugaagaaagcuguuaggau

SEQ ID NO: 2311249 - RNA, 19 nt, Homo sapiens
  misc_RNA (1)...(19): siRNA sense strand
uaaugaaagagauccgaaa

SEQ ID NO: 2311250 - RNA, 19 nt, Homo sapiens
  misc_RNA (1)...(19): siRNA sense strand
aguacaggagacuggaaua

SEQ ID NO: 2311251 - RNA, 19 nt, Homo sapiens
  misc_RNA (1)...(19): siRNA sense strand
uagaugaagcagaugaauu

SEQ ID NO: 2311252 - RNA, 19 nt, Homo sapiens
  misc_RNA (1)...(19): siRNA sense strand
aaaucauguugcagaccaa

SEQ ID NO: 2311253 - RNA, 19 nt, Homo sapiens
  misc_RNA (1)...(19): siRNA sense strand
cagguguacgugagcaaua

SEQ ID NO: 2311254 - RNA, 19 nt, Homo sapiens
  misc_RNA (1)...(19): siRNA sense strand
acuuauuugugaugccuua

SEQ ID NO: 2311255 - RNA, 19 nt, Homo sapiens
  misc_RNA (1)...(19): siRNA sense strand
gaaagagauccgaaagcca

SEQ ID NO: 2311256 - RNA, 19 nt, Homo sapiens
  misc_RNA (1)...(19): siRNA sense strand
gauccgaaagccaggaaga

SEQ ID NO: 2311257 - RNA, 19 nt, Homo sapiens
  misc_RNA (1)...(19): siRNA sense strand
aggacaggacgaagaucaa

SEQ ID NO: 2311258 - RNA, 19 nt, Homo sapiens
  misc_RNA (1)...(19): siRNA sense strand
ccuaaaagacgucggugua

SEQ ID NO: 2311259 - RNA, 19 nt, Homo sapiens
  misc_RNA (1)...(19): siRNA sense strand
aagaaagcuguuaggauga

SEQ ID NO: 2311260 - RNA, 19 nt, Homo sapiens
  misc_RNA (1)...(19): siRNA sense strand
cggagaaccaaauaugcaa

SEQ ID NO: 2311261 - RNA, 19 nt, Homo sapiens
  misc_RNA (1)...(19): siRNA sense strand
ggcagguguacgugagcaa

SEQ ID NO: 2311262 - RNA, 19 nt, Homo sapiens
  misc_RNA (1)...(19): siRNA sense strand
gcauaaagcaaaaccaaca

SEQ ID NO: 2311263 - RNA, 19 nt, Homo sapiens
  misc_RNA (1)...(19): siRNA sense strand
caguauggaauauggacuu

SEQ ID NO: 2311264 - RNA, 19 nt, Homo sapiens
  misc_RNA (1)...(19): siRNA sense strand
ucacuuaacaagaaugaga

SEQ ID NO: 2311265 - RNA, 19 nt, Homo sapiens
  misc_RNA (1)...(19): siRNA sense strand
caguagaaucagaacaguu

SEQ ID NO: 2311266 - RNA, 19 nt, Homo sapiens
  misc_RNA (1)...(19): siRNA sense strand
acaaugugcugaagagaac

SEQ ID NO: 2311267 - RNA, 19 nt, Homo sapiens
  misc_RNA (1)...(19): siRNA sense strand
cgugagcaauagugcaaaa

SEQ ID NO: 2311268 - RNA, 19 nt, Homo sapiens
  misc_RNA (1)...(19): siRNA sense strand
auuugaagccacagacauu

SEQ ID NO: 2311269 - RNA, 19 nt, Homo sapiens
  misc_RNA (1)...(19): siRNA sense strand
acuuacgacucuuggccaa

SEQ ID NO: 2311270 - RNA, 19 nt, Homo sapiens
  misc_RNA (1)...(19): siRNA sense strand
aggucaauacugaacuaaa

SEQ ID NO: 2311271 - RNA, 19 nt, Homo sapiens
  misc_RNA (1)...(19): siRNA sense strand
cauauaugucagaccaaau

SEQ ID NO: 2311272 - RNA, 19 nt, Homo sapiens
  misc_RNA (1)...(19): siRNA sense strand
uaagagaacuugauccuga

SEQ ID NO: 2311273 - RNA, 19 nt, Homo sapiens
  misc_RNA (1)...(19): siRNA sense strand
caacauugaaguggagaca

SEQ ID NO: 2311274 - RNA, 19 nt, Homo sapiens
  misc_RNA (1)...(19): siRNA sense strand
uaaagaacaaugugcugaa

SEQ ID NO: 2311275 - RNA, 19 nt, Homo sapiens
  misc_RNA (1)...(19): siRNA sense strand
uugcauuaguguugcgguu

SEQ ID NO: 2311276 - RNA, 19 nt, Homo sapiens
  misc_RNA (1)...(19): siRNA sense strand
uggagacagucauuugaaa

SEQ ID NO: 2311277 - RNA, 19 nt, Homo sapiens
  misc_RNA (1)...(19): siRNA sense strand
aucaauggcauauaggaaa

SEQ ID NO: 2311278 - RNA, 19 nt, Homo sapiens
  misc_RNA (1)...(19): siRNA sense strand
agccacagacauuuagaaa

SEQ ID NO: 2311279 - RNA, 19 nt, Homo sapiens
  misc_RNA (1)...(19): siRNA sense strand
uggcauauaggaaagauuu

SEQ ID NO: 2311280 - RNA, 19 nt, Homo sapiens
  misc_RNA (1)...(19): siRNA sense strand
uggccaaucccuaaggaca

SEQ ID NO: 2311281 - RNA, 19 nt, Homo sapiens
  misc_RNA (1)...(19): siRNA sense strand
ugucagaccaaauccuaaa

SEQ ID NO: 2311282 - RNA, 19 nt, Homo sapiens
  misc_RNA (1)...(19): siRNA sense strand
accuaauagcagacaguau

SEQ ID NO: 2311283 - RNA, 19 nt, Homo sapiens
  misc_RNA (1)...(19): siRNA sense strand
acaggagacuggaauaaaa

SEQ ID NO: 2311284 - RNA, 19 nt, Homo sapiens
  misc_RNA (1)...(19): siRNA sense strand
gaagauaguuggaucccuu

SEQ ID NO: 2311285 - RNA, 19 nt, Homo sapiens
  misc_RNA (1)...(19): siRNA sense strand
gagaaugggaagaaggauc

SEQ ID NO: 2311286 - RNA, 19 nt, Homo sapiens
  misc_RNA (1)...(19): siRNA sense strand
uggagcaggcuguggaaga

SEQ ID NO: 2311287 - RNA, 19 nt, Homo sapiens
  misc_RNA (1)...(19): siRNA sense strand
gcucauaaucccaugccuu

SEQ ID NO: 2311288 - RNA, 19 nt, Homo sapiens
  misc_RNA (1)...(19): siRNA sense strand
agaaggaucagguggcaca

SEQ ID NO: 2311289 - RNA, 19 nt, Homo sapiens
  misc_RNA (1)...(19): siRNA sense strand
cauuuauugcaguguacua

SEQ ID NO: 2311290 - RNA, 19 nt, Homo sapiens
  misc_RNA (1)...(19): siRNA sense strand
uguauuggucagaggacga

SEQ ID NO: 2311291 - RNA, 19 nt, Homo sapiens
  misc_RNA (1)...(19): siRNA sense strand
gaagauaguuggaucccuu

SEQ ID NO: 2311292 - RNA, 19 nt, Homo sapiens
  misc_RNA (1)...(19): siRNA sense strand
gagaaugggaagaaggauc

SEQ ID NO: 2311293 - RNA, 19 nt, Homo sapiens
  misc_RNA (1)...(19): siRNA sense strand
uggagcaggcuguggaaga

SEQ ID NO: 2311294 - RNA, 19 nt, Homo sapiens
  misc_RNA (1)...(19): siRNA sense strand
gcucauaaucccaugccuu

SEQ ID NO: 2311295 - RNA, 19 nt, Homo sapiens
  misc_RNA (1)...(19): siRNA sense strand
agaaggaucagguggcaca

SEQ ID NO: 2311296 - RNA, 19 nt, Homo sapiens
  misc_RNA (1)...(19): siRNA sense strand
uguauuggucagaggacga

SEQ ID NO: 2311297 - RNA, 19 nt, Homo sapiens
  misc_RNA (1)...(19): siRNA sense strand
ccucauaagcagagcauca

SEQ ID NO: 2311298 - RNA, 19 nt, Homo sapiens
  misc_RNA (1)...(19): siRNA sense strand
aagagaaggagaaggcaaa

SEQ ID NO: 2311299 - RNA, 19 nt, Homo sapiens
  misc_RNA (1)...(19): siRNA sense strand
agaccaaagagaaggagaa

SEQ ID NO: 2311300 - RNA, 19 nt, Homo sapiens
  misc_RNA (1)...(19): siRNA sense strand
cgcaagaugccaaaggaaa

SEQ ID NO: 2311301 - RNA, 19 nt, Homo sapiens
  misc_RNA (1)...(19): siRNA sense strand
aaagagaaggagaaggcaa

SEQ ID NO: 2311302 - RNA, 19 nt, Homo sapiens
  misc_RNA (1)...(19): siRNA sense strand
gcgcaagaugccaaaggaa

SEQ ID NO: 2311303 - RNA, 19 nt, Homo sapiens
  misc_RNA (1)...(19): siRNA sense strand
aagaagacgaagagcccaa

SEQ ID NO: 2311304 - RNA, 19 nt, Homo sapiens
  misc_RNA (1)...(19): siRNA sense strand
aggaaaagaccaaagagaa

SEQ ID NO: 2311305 - RNA, 19 nt, Homo sapiens
  misc_RNA (1)...(19): siRNA sense strand
gagcaucagcauaggcaga

SEQ ID NO: 2311306 - RNA, 19 nt, Homo sapiens
  misc_RNA (1)...(19): siRNA sense strand
ggaaaagaccaaagagaag

SEQ ID NO: 2311307 - RNA, 19 nt, Homo sapiens
  misc_RNA (1)...(19): siRNA sense strand
cagcauaggcagaggaacc

SEQ ID NO: 2311308 - RNA, 19 nt, Homo sapiens
  misc_RNA (1)...(19): siRNA sense strand
gagcccaaggaguuagaaa

SEQ ID NO: 2311309 - RNA, 19 nt, Homo sapiens
  misc_RNA (1)...(19): siRNA sense strand
ugggcacagaggagggaaa

SEQ ID NO: 2311310 - RNA, 19 nt, Homo sapiens
  misc_RNA (1)...(19): siRNA sense strand
cggaguuaaaggaggaguu

SEQ ID NO: 2311311 - RNA, 19 nt, Homo sapiens
  misc_RNA (1)...(19): siRNA sense strand
ucaacaaguaugaggccau

SEQ ID NO: 2311312 - RNA, 19 nt, Homo sapiens
  misc_RNA (1)...(19): siRNA sense strand
caggaagagagaugaagau

SEQ ID NO: 2311313 - RNA, 19 nt, Homo sapiens
  misc_RNA (1)...(19): siRNA sense strand
cuaagaucauggagcggau

SEQ ID NO: 2311314 - RNA, 19 nt, Homo sapiens
  misc_RNA (1)...(19): siRNA sense strand
ucaucaagcugaaggugga

SEQ ID NO: 2311315 - RNA, 19 nt, Homo sapiens
  misc_RNA (1)...(19): siRNA sense strand
ccaucaucauugugggcga

SEQ ID NO: 2311316 - RNA, 19 nt, Homo sapiens
  misc_RNA (1)...(19): siRNA sense strand
caggaaaagaccaaagaga

SEQ ID NO: 2311317 - RNA, 19 nt, Homo sapiens
  misc_RNA (1)...(19): siRNA sense strand
ccuggugagggaagugaaa

SEQ ID NO: 2311318 - RNA, 19 nt, Homo sapiens
  misc_RNA (1)...(19): siRNA sense strand
ccuaagcagcccaaggaga

SEQ ID NO: 2311319 - RNA, 19 nt, Homo sapiens
  misc_RNA (1)...(19): siRNA sense strand
ggcagaggaaccaggaaga

SEQ ID NO: 2311320 - RNA, 19 nt, Homo sapiens
  misc_RNA (1)...(19): siRNA sense strand
aggaugacauggaccaaaa

SEQ ID NO: 2311321 - RNA, 19 nt, Homo sapiens
  misc_RNA (1)...(19): siRNA sense strand
augaggaagcugacaucua

SEQ ID NO: 2311322 - RNA, 19 nt, Homo sapiens
  misc_RNA (1)...(19): siRNA sense strand
ccccaaagacucagaugaa

SEQ ID NO: 2311323 - RNA, 19 nt, Homo sapiens
  misc_RNA (1)...(19): siRNA sense strand
augccuauguagaggaacu

SEQ ID NO: 2311324 - RNA, 19 nt, Homo sapiens
  misc_RNA (1)...(19): siRNA sense strand
auguagaggaacuugagaa

SEQ ID NO: 2311325 - RNA, 19 nt, Homo sapiens
  misc_RNA (1)...(19): siRNA sense strand
uggacaaacugcugaaccu

SEQ ID NO: 2311326 - RNA, 19 nt, Homo sapiens
  misc_RNA (1)...(19): siRNA sense strand
gaagaagaauugaugacuc

SEQ ID NO: 2311327 - RNA, 19 nt, Homo sapiens
  misc_RNA (1)...(19): siRNA sense strand
ucauggagcggauggucaa

SEQ ID NO: 2311328 - RNA, 19 nt, Homo sapiens
  misc_RNA (1)...(19): siRNA sense strand
ugaagugggagaaggcaca

SEQ ID NO: 2311329 - RNA, 19 nt, Homo sapiens
  misc_RNA (1)...(19): siRNA sense strand
augcggaguuaaaggagga

SEQ ID NO: 2311330 - RNA, 19 nt, Homo sapiens
  misc_RNA (1)...(19): siRNA sense strand
gggagaucuaugaugccua

SEQ ID NO: 2311331 - RNA, 19 nt, Homo sapiens
  misc_RNA (1)...(19): siRNA sense strand
gggaagauggccaugagga

SEQ ID NO: 2311332 - RNA, 19 nt, Homo sapiens
  misc_RNA (1)...(19): siRNA sense strand
gaguacauguucagcagca

SEQ ID NO: 2311333 - RNA, 19 nt, Homo sapiens
  misc_RNA (1)...(19): siRNA sense strand
ugaacucagccguggguga

SEQ ID NO: 2311334 - RNA, 19 nt, Homo sapiens
  misc_RNA (1)...(19): siRNA sense strand
aguaugaggccaucugcaa

SEQ ID NO: 2311335 - RNA, 19 nt, Homo sapiens
  misc_RNA (1)...(19): siRNA sense strand
cuguggagauugcgaaacu

SEQ ID NO: 2311336 - RNA, 19 nt, Homo sapiens
  misc_RNA (1)...(19): siRNA sense strand
acucagacccuguguggca

SEQ ID NO: 2311337 - RNA, 19 nt, Homo sapiens
  misc_RNA (1)...(19): siRNA sense strand
ccuacaaggacgaggacau

SEQ ID NO: 2311338 - RNA, 19 nt, Homo sapiens
  misc_RNA (1)...(19): siRNA sense strand
guggagaggcacaugucaa

SEQ ID NO: 2311339 - RNA, 19 nt, Homo sapiens
  misc_RNA (1)...(19): siRNA sense strand
aguacauagaggauaguau

SEQ ID NO: 2311340 - RNA, 19 nt, Homo sapiens
  misc_RNA (1)...(19): siRNA sense strand
augacaagcacauggacuu

SEQ ID NO: 2311341 - RNA, 19 nt, Homo sapiens
  misc_RNA (1)...(19): siRNA sense strand
agaggauaguauuagccaa

SEQ ID NO: 2311342 - RNA, 19 nt, Homo sapiens
  misc_RNA (1)...(19): siRNA sense strand
aagcuaaugaagacgguga

SEQ ID NO: 2311343 - RNA, 19 nt, Homo sapiens
  misc_RNA (1)...(19): siRNA sense strand
guguacgucaagaggaaaa

SEQ ID NO: 2311344 - RNA, 19 nt, Homo sapiens
  misc_RNA (1)...(19): siRNA sense strand
ccgauuucuucgcuggaau

SEQ ID NO: 2311345 - RNA, 19 nt, Homo sapiens
  misc_RNA (1)...(19): siRNA sense strand
gagaaauacuggagcgugu

SEQ ID NO: 2311346 - RNA, 19 nt, Homo sapiens
  misc_RNA (1)...(19): siRNA sense strand
aaucagaggcaguggcuca

SEQ ID NO: 2311347 - RNA, 19 nt, Homo sapiens
  misc_RNA (1)...(19): siRNA sense strand
gggaagaaugcccgaggau

SEQ ID NO: 2311348 - RNA, 19 nt, Homo sapiens
  misc_RNA (1)...(19): siRNA sense strand
ccaaccagcuggaugccaa

SEQ ID NO: 2311349 - RNA, 19 nt, Homo sapiens
  misc_RNA (1)...(19): siRNA sense strand
aagcacaacccgagaggga

SEQ ID NO: 2311350 - RNA, 19 nt, Homo sapiens
  misc_RNA (1)...(19): siRNA sense strand
gcacaacccgagagggacu

SEQ ID NO: 2311351 - RNA, 19 nt, Homo sapiens
  misc_RNA (1)...(19): siRNA sense strand
uggaaagacgagaacuauu

SEQ ID NO: 2311352 - RNA, 19 nt, Homo sapiens
  misc_RNA (1)...(19): siRNA sense strand
cagccuggacagacagcua

SEQ ID NO: 2311353 - RNA, 19 nt, Homo sapiens
  misc_RNA (1)...(19): siRNA sense strand
ucuggaaggagguggugua

SEQ ID NO: 2311354 - RNA, 19 nt, Homo sapiens
  misc_RNA (1)...(19): siRNA sense strand
aagaagaacaacagcagca

SEQ ID NO: 2311355 - RNA, 19 nt, Homo sapiens
  misc_RNA (1)...(19): siRNA sense strand
ccaaguaccagguguggga

SEQ ID NO: 2311356 - RNA, 19 nt, Homo sapiens
  misc_RNA (1)...(19): siRNA sense strand
gguauauaaauuugggaag

SEQ ID NO: 2311357 - RNA, 19 nt, Homo sapiens
  misc_RNA (1)...(19): siRNA sense strand
ccgaggauggagagaaaau

SEQ ID NO: 2311358 - RNA, 19 nt, Homo sapiens
  misc_RNA (1)...(19): siRNA sense strand
ggauggagagaaaaugaaa

SEQ ID NO: 2311359 - RNA, 19 nt, Homo sapiens
  misc_RNA (1)...(19): siRNA sense strand
gcaacaaccuccuucacca

SEQ ID NO: 2311360 - RNA, 19 nt, Homo sapiens
  misc_RNA (1)...(19): siRNA sense strand
gcagcaugaccuaugaaaa

SEQ ID NO: 2311361 - RNA, 19 nt, Homo sapiens
  misc_RNA (1)...(19): siRNA sense strand
gaagaaugcccgaggaugg

SEQ ID NO: 2311362 - RNA, 19 nt, Homo sapiens
  misc_RNA (1)...(19): siRNA sense strand
gagaaauacuggagcgugu

SEQ ID NO: 2311363 - RNA, 19 nt, Homo sapiens
  misc_RNA (1)...(19): siRNA sense strand
aaucagaggcaguggcuca

SEQ ID NO: 2311364 - RNA, 19 nt, Homo sapiens
  misc_RNA (1)...(19): siRNA sense strand
gggaagaaugcccgaggau

SEQ ID NO: 2311365 - RNA, 19 nt, Homo sapiens
  misc_RNA (1)...(19): siRNA sense strand
ccaaccagcuggaugccaa

SEQ ID NO: 2311366 - RNA, 19 nt, Homo sapiens
  misc_RNA (1)...(19): siRNA sense strand
aagcacaacccgagaggga

SEQ ID NO: 2311367 - RNA, 19 nt, Homo sapiens
  misc_RNA (1)...(19): siRNA sense strand
gcacaacccgagagggacu

SEQ ID NO: 2311368 - RNA, 19 nt, Homo sapiens
  misc_RNA (1)...(19): siRNA sense strand
uggaaagacgagaacuauu

SEQ ID NO: 2311369 - RNA, 19 nt, Homo sapiens
  misc_RNA (1)...(19): siRNA sense strand
cagccuggacagacagcua

SEQ ID NO: 2311370 - RNA, 19 nt, Homo sapiens
  misc_RNA (1)...(19): siRNA sense strand
ucuggaaggagguggugua

SEQ ID NO: 2311371 - RNA, 19 nt, Homo sapiens
  misc_RNA (1)...(19): siRNA sense strand
aagaagaacaacagcagca

SEQ ID NO: 2311372 - RNA, 19 nt, Homo sapiens
  misc_RNA (1)...(19): siRNA sense strand
ccaaguaccagguguggga

SEQ ID NO: 2311373 - RNA, 19 nt, Homo sapiens
  misc_RNA (1)...(19): siRNA sense strand
gguauauaaauuugggaag

SEQ ID NO: 2311374 - RNA, 19 nt, Homo sapiens
  misc_RNA (1)...(19): siRNA sense strand
ccgaggauggagagaaaau

SEQ ID NO: 2311375 - RNA, 19 nt, Homo sapiens
  misc_RNA (1)...(19): siRNA sense strand
ggauggagagaaaaugaaa

SEQ ID NO: 2311376 - RNA, 19 nt, Homo sapiens
  misc_RNA (1)...(19): siRNA sense strand
gcaacaaccuccuucacca

SEQ ID NO: 2311377 - RNA, 19 nt, Homo sapiens
  misc_RNA (1)...(19): siRNA sense strand
gcagcaugaccuaugaaaa

SEQ ID NO: 2311378 - RNA, 19 nt, Homo sapiens
  misc_RNA (1)...(19): siRNA sense strand
gaagaaugcccgaggaugg

SEQ ID NO: 2311379 - RNA, 19 nt, Homo sapiens
  misc_RNA (1)...(19): siRNA sense strand
caaucaaauuacaggccaa

SEQ ID NO: 2311380 - RNA, 19 nt, Homo sapiens
  misc_RNA (1)...(19): siRNA sense strand
gggcagaugaagaggaagu

SEQ ID NO: 2311381 - RNA, 19 nt, Homo sapiens
  misc_RNA (1)...(19): siRNA sense strand
ccaaagaaauuaaaggucu

SEQ ID NO: 2311382 - RNA, 19 nt, Homo sapiens
  misc_RNA (1)...(19): siRNA sense strand
gggacaagguggagcugga

SEQ ID NO: 2311383 - RNA, 19 nt, Homo sapiens
  misc_RNA (1)...(19): siRNA sense strand
acagauucccaaaggguaa

SEQ ID NO: 2311384 - RNA, 19 nt, Homo sapiens
  misc_RNA (1)...(19): siRNA sense strand
ccguguacgccgaggucaa

SEQ ID NO: 2311385 - RNA, 19 nt, Homo sapiens
  misc_RNA (1)...(19): siRNA sense strand
gaggagaguuaacagggaa

SEQ ID NO: 2311386 - RNA, 19 nt, Homo sapiens
  misc_RNA (1)...(19): siRNA sense strand
aggagaguuaacagggaaa

SEQ ID NO: 2311387 - RNA, 19 nt, Homo sapiens
  misc_RNA (1)...(19): siRNA sense strand
aggucaagcgcgugggaga

SEQ ID NO: 2311388 - RNA, 19 nt, Homo sapiens
  misc_RNA (1)...(19): siRNA sense strand
acaaguugguucugcgcua

SEQ ID NO: 2311389 - RNA, 19 nt, Homo sapiens
  misc_RNA (1)...(19): siRNA sense strand
ggaacaugacagugcugaa

SEQ ID NO: 2311390 - RNA, 19 nt, Homo sapiens
  misc_RNA (1)...(19): siRNA sense strand
ugggaaaaguggaaacauu

SEQ ID NO: 2311391 - RNA, 19 nt, Homo sapiens
  misc_RNA (1)...(19): siRNA sense strand
ccuucaucguggugcagaa

SEQ ID NO: 2311392 - RNA, 19 nt, Homo sapiens
  misc_RNA (1)...(19): siRNA sense strand
agaacgagcggguugggaa

SEQ ID NO: 2311393 - RNA, 19 nt, Homo sapiens
  misc_RNA (1)...(19): siRNA sense strand
uggaaaaugaugcugaaua

SEQ ID NO: 2311394 - RNA, 19 nt, Homo sapiens
  misc_RNA (1)...(19): siRNA sense strand
gcccaguauuucaaggaca

SEQ ID NO: 2311395 - RNA, 19 nt, Homo sapiens
  misc_RNA (1)...(19): siRNA sense strand
gagaagugcccgaggagag

SEQ ID NO: 2311396 - RNA, 19 nt, Homo sapiens
  misc_RNA (1)...(19): siRNA sense strand
aauuaaaggucuaaaggug

SEQ ID NO: 2311397 - RNA, 19 nt, Homo sapiens
  misc_RNA (1)...(19): siRNA sense strand
cgaucggcaagaagagauu

SEQ ID NO: 2311398 - RNA, 19 nt, Homo sapiens
  misc_RNA (1)...(19): siRNA sense strand
gcgucugggacaugcggaa

SEQ ID NO: 2311399 - RNA, 19 nt, Homo sapiens
  misc_RNA (1)...(19): siRNA sense strand
guaacauuguggcaggaca

SEQ ID NO: 2311400 - RNA, 19 nt, Homo sapiens
  misc_RNA (1)...(19): siRNA sense strand
ugaagaacgugcagaggac

SEQ ID NO: 2311401 - RNA, 19 nt, Homo sapiens
  misc_RNA (1)...(19): siRNA sense strand
guguuugacggcaggaaga

SEQ ID NO: 2311402 - RNA, 19 nt, Homo sapiens
  misc_RNA (1)...(19): siRNA sense strand
cgaggagaguuaacaggga

SEQ ID NO: 2311403 - RNA, 19 nt, Homo sapiens
  misc_RNA (1)...(19): siRNA sense strand
aggucuaaagguggagaua

SEQ ID NO: 2311404 - RNA, 19 nt, Homo sapiens
  misc_RNA (1)...(19): siRNA sense strand
ucggacaggagcagaaaca

SEQ ID NO: 2311405 - RNA, 19 nt, Homo sapiens
  misc_RNA (1)...(19): siRNA sense strand
guuucaacacagauccaua

SEQ ID NO: 2311406 - RNA, 19 nt, Homo sapiens
  misc_RNA (1)...(19): siRNA sense strand
aauuuggaaucauggucaa

SEQ ID NO: 2311407 - RNA, 19 nt, Homo sapiens
  misc_RNA (1)...(19): siRNA sense strand
gagaucaaggugugggcca

SEQ ID NO: 2311408 - RNA, 19 nt, Homo sapiens
  misc_RNA (1)...(19): siRNA sense strand
ggucacgcugccaggagaa

SEQ ID NO: 2311409 - RNA, 19 nt, Homo sapiens
  misc_RNA (1)...(19): siRNA sense strand
ucaaaguacuaguggccaa

SEQ ID NO: 2311410 - RNA, 19 nt, Homo sapiens
  misc_RNA (1)...(19): siRNA sense strand
ugauguagucagugagaau

SEQ ID NO: 2311411 - RNA, 19 nt, Homo sapiens
  misc_RNA (1)...(19): siRNA sense strand
ccguaauucaucagaagaa

SEQ ID NO: 2311412 - RNA, 19 nt, Homo sapiens
  misc_RNA (1)...(19): siRNA sense strand
uccaagaaacugaggacua

SEQ ID NO: 2311413 - RNA, 19 nt, Homo sapiens
  misc_RNA (1)...(19): siRNA sense strand
gauuagaacauuugcgcau

SEQ ID NO: 2311414 - RNA, 19 nt, Homo sapiens
  misc_RNA (1)...(19): siRNA sense strand
aguacuaauuccugaccaa

SEQ ID NO: 2311415 - RNA, 19 nt, Homo sapiens
  misc_RNA (1)...(19): siRNA sense strand
cagagaaauccaagaaacu

SEQ ID NO: 2311416 - RNA, 19 nt, Homo sapiens
  misc_RNA (1)...(19): siRNA sense strand
guuaauucgcauugcagaa

SEQ ID NO: 2311417 - RNA, 19 nt, Homo sapiens
  misc_RNA (1)...(19): siRNA sense strand
aggaagagauagugaccgu

SEQ ID NO: 2311418 - RNA, 19 nt, Homo sapiens
  misc_RNA (1)...(19): siRNA sense strand
ugggagaucaguaagcaaa

SEQ ID NO: 2311419 - RNA, 19 nt, Homo sapiens
  misc_RNA (1)...(19): siRNA sense strand
cagaagaguagcugggaug

SEQ ID NO: 2311420 - RNA, 19 nt, Homo sapiens
  misc_RNA (1)...(19): siRNA sense strand
gcuuuauggauuuaccaaa

SEQ ID NO: 2311421 - RNA, 19 nt, Homo sapiens
  misc_RNA (1)...(19): siRNA sense strand
gggaaguguccaagcaucu

SEQ ID NO: 2311422 - RNA, 19 nt, Homo sapiens
  misc_RNA (1)...(19): siRNA sense strand
uuguugaguuugugaagau

SEQ ID NO: 2311423 - RNA, 19 nt, Homo sapiens
  misc_RNA (1)...(19): siRNA sense strand
cugcagagaaauccaagaa

SEQ ID NO: 2311424 - RNA, 19 nt, Homo sapiens
  misc_RNA (1)...(19): siRNA sense strand
guggacagcagcaaggaau

SEQ ID NO: 2311425 - RNA, 19 nt, Homo sapiens
  misc_RNA (1)...(19): siRNA sense strand
guggccaacaauagugaua

SEQ ID NO: 2311426 - RNA, 19 nt, Homo sapiens
  misc_RNA (1)...(19): siRNA sense strand
acgaggaggaagagauagu

SEQ ID NO: 2311427 - RNA, 19 nt, Homo sapiens
  misc_RNA (1)...(19): siRNA sense strand
agugugugcaaauggauua

SEQ ID NO: 2311428 - RNA, 19 nt, Homo sapiens
  misc_RNA (1)...(19): siRNA sense strand
gagcagauucacugggaag

SEQ ID NO: 2311429 - RNA, 19 nt, Homo sapiens
  misc_RNA (1)...(19): siRNA sense strand
gcuuaagauagaugauacu

SEQ ID NO: 2311430 - RNA, 19 nt, Homo sapiens
  misc_RNA (1)...(19): siRNA sense strand
cccuagacugguugaacua

SEQ ID NO: 2311431 - RNA, 19 nt, Homo sapiens
  misc_RNA (1)...(19): siRNA sense strand
aagaaggaacugcagagaa

SEQ ID NO: 2311432 - RNA, 19 nt, Homo sapiens
  misc_RNA (1)...(19): siRNA sense strand
aguauaguuuggagcagau

SEQ ID NO: 2311433 - RNA, 19 nt, Homo sapiens
  misc_RNA (1)...(19): siRNA sense strand
gcuucaagguggacagcag

SEQ ID NO: 2311434 - RNA, 19 nt, Homo sapiens
  misc_RNA (1)...(19): siRNA sense strand
augccugacuuguggagau

SEQ ID NO: 2311435 - RNA, 19 nt, Homo sapiens
  misc_RNA (1)...(19): siRNA sense strand
agauagugaccguaauuca

SEQ ID NO: 2311436 - RNA, 19 nt, Homo sapiens
  misc_RNA (1)...(19): siRNA sense strand
augaagaguuaauucgcau

SEQ ID NO: 2311437 - RNA, 19 nt, Homo sapiens
  misc_RNA (1)...(19): siRNA sense strand
ccaucuguacuuugggaga

SEQ ID NO: 2311438 - RNA, 19 nt, Homo sapiens
  misc_RNA (1)...(19): siRNA sense strand
ggagcagauucacugggaa

SEQ ID NO: 2311439 - RNA, 19 nt, Homo sapiens
  misc_RNA (1)...(19): siRNA sense strand
uguaagacugugugagaga

SEQ ID NO: 2311440 - RNA, 19 nt, Homo sapiens
  misc_RNA (1)...(19): siRNA sense strand
cuuucuauaugaagaggaa

SEQ ID NO: 2311441 - RNA, 19 nt, Homo sapiens
  misc_RNA (1)...(19): siRNA sense strand
cugugugagagaagguuaa

SEQ ID NO: 2311442 - RNA, 19 nt, Homo sapiens
  misc_RNA (1)...(19): siRNA sense strand
guacaaaccuaacagccuu

SEQ ID NO: 2311443 - RNA, 19 nt, Homo sapiens
  misc_RNA (1)...(19): siRNA sense strand
auugauguugugagugaaa

SEQ ID NO: 2311444 - RNA, 19 nt, Homo sapiens
  misc_RNA (1)...(19): siRNA sense strand
ucuucagccucuugauaau

SEQ ID NO: 2311445 - RNA, 19 nt, Homo sapiens
  misc_RNA (1)...(19): siRNA sense strand
gaaguuagcugcagugccu

SEQ ID NO: 2311446 - RNA, 19 nt, Homo sapiens
  misc_RNA (1)...(19): siRNA sense strand
uugucaaggccuuagagaa

SEQ ID NO: 2311447 - RNA, 19 nt, Homo sapiens
  misc_RNA (1)...(19): siRNA sense strand
ucucuguaauggaggaagu

SEQ ID NO: 2311448 - RNA, 19 nt, Homo sapiens
  misc_RNA (1)...(19): siRNA sense strand
ugaugaggauuauagccua

SEQ ID NO: 2311449 - RNA, 19 nt, Homo sapiens
  misc_RNA (1)...(19): siRNA sense strand
ccuuagaggucuuagccua

SEQ ID NO: 2311450 - RNA, 19 nt, Homo sapiens
  misc_RNA (1)...(19): siRNA sense strand
gaaucaugcugaagagcga

SEQ ID NO: 2311451 - RNA, 19 nt, Homo sapiens
  misc_RNA (1)...(19): siRNA sense strand
ggaugaaaagucagauaaa

SEQ ID NO: 2311452 - RNA, 19 nt, Homo sapiens
  misc_RNA (1)...(19): siRNA sense strand
aaagaaagugauugcacaa

SEQ ID NO: 2311453 - RNA, 19 nt, Homo sapiens
  misc_RNA (1)...(19): siRNA sense strand
augcaugagcagauugaaa

SEQ ID NO: 2311454 - RNA, 19 nt, Homo sapiens
  misc_RNA (1)...(19): siRNA sense strand
uggaauggagacauagaaa

SEQ ID NO: 2311455 - RNA, 19 nt, Homo sapiens
  misc_RNA (1)...(19): siRNA sense strand
aagagagauuggaggcuuu

SEQ ID NO: 2311456 - RNA, 19 nt, Homo sapiens
  misc_RNA (1)...(19): siRNA sense strand
ugaaagaggaagaggaggu

SEQ ID NO: 2311457 - RNA, 19 nt, Homo sapiens
  misc_RNA (1)...(19): siRNA sense strand
uguuagaugcugaagauuu

SEQ ID NO: 2311458 - RNA, 19 nt, Homo sapiens
  misc_RNA (1)...(19): siRNA sense strand
gagaagauuuccagagcuc

SEQ ID NO: 2311459 - RNA, 19 nt, Homo sapiens
  misc_RNA (1)...(19): siRNA sense strand
gcaaaacaacugaaagaga

SEQ ID NO: 2311460 - RNA, 19 nt, Homo sapiens
  misc_RNA (1)...(19): siRNA sense strand
ucugucugguugugagaaa

SEQ ID NO: 2311461 - RNA, 19 nt, Homo sapiens
  misc_RNA (1)...(19): siRNA sense strand
cagucaaguaagcaugaaa

SEQ ID NO: 2311462 - RNA, 19 nt, Homo sapiens
  misc_RNA (1)...(19): siRNA sense strand
cugaagagucugcggagga

SEQ ID NO: 2311463 - RNA, 19 nt, Homo sapiens
  misc_RNA (1)...(19): siRNA sense strand
augcaaaacaacugaaaga

SEQ ID NO: 2311464 - RNA, 19 nt, Homo sapiens
  misc_RNA (1)...(19): siRNA sense strand
uuaccuaugaagagcuuaa

SEQ ID NO: 2311465 - RNA, 19 nt, Homo sapiens
  misc_RNA (1)...(19): siRNA sense strand
gcauuggagaagaaauaga

SEQ ID NO: 2311466 - RNA, 19 nt, Homo sapiens
  misc_RNA (1)...(19): siRNA sense strand
cugcagucuuuguaugcua

SEQ ID NO: 2311467 - RNA, 19 nt, Homo sapiens
  misc_RNA (1)...(19): siRNA sense strand
uugaaaagggacugaagaa

SEQ ID NO: 2311468 - RNA, 19 nt, Homo sapiens
  misc_RNA (1)...(19): siRNA sense strand
acaugaaagaggaagagga

SEQ ID NO: 2311469 - RNA, 19 nt, Homo sapiens
  misc_RNA (1)...(19): siRNA sense strand
acguuuacuccauggcuua

SEQ ID NO: 2311470 - RNA, 19 nt, Homo sapiens
  misc_RNA (1)...(19): siRNA sense strand
cuaacaagggcauuggaga

SEQ ID NO: 2311471 - RNA, 19 nt, Homo sapiens
  misc_RNA (1)...(19): siRNA sense strand
cagaauuugcagugugguu

SEQ ID NO: 2311472 - RNA, 19 nt, Homo sapiens
  misc_RNA (1)...(19): siRNA sense strand
agaacacuccacagguaua

SEQ ID NO: 2311473 - RNA, 19 nt, Homo sapiens
  misc_RNA (1)...(19): siRNA sense strand
augcuuagccucuuugaaa

SEQ ID NO: 2311474 - RNA, 19 nt, Homo sapiens
  misc_RNA (1)...(19): siRNA sense strand
ccuauggaaucaugcugaa

SEQ ID NO: 2311475 - RNA, 19 nt, Homo sapiens
  misc_RNA (1)...(19): siRNA sense strand
gggaugaagaugcugacau

SEQ ID NO: 2311476 - RNA, 19 nt, Homo sapiens
  misc_RNA (1)...(19): siRNA sense strand
agaaaagcagcaaggacua

SEQ ID NO: 2311477 - RNA, 19 nt, Homo sapiens
  misc_RNA (1)...(19): siRNA sense strand
agucagauaaagaagcaga

SEQ ID NO: 2311478 - RNA, 19 nt, Homo sapiens
  misc_RNA (1)...(19): siRNA sense strand
agauaaagaagcagaagug

SEQ ID NO: 2311479 - RNA, 19 nt, Homo sapiens
  misc_RNA (1)...(19): siRNA sense strand
ugucgaugcagucaaguaa

SEQ ID NO: 2311480 - RNA, 19 nt, Homo sapiens
  misc_RNA (1)...(19): siRNA sense strand
gcauuugacaguuggucuu

SEQ ID NO: 2311481 - RNA, 19 nt, Homo sapiens
  misc_RNA (1)...(19): siRNA sense strand
agucuuuguguaauggaaa

SEQ ID NO: 2311482 - RNA, 19 nt, Homo sapiens
  misc_RNA (1)...(19): siRNA sense strand
guaaggacauuguuggacu

SEQ ID NO: 2311483 - RNA, 19 nt, Homo sapiens
  misc_RNA (1)...(19): siRNA sense strand
cagauaaagaagcagaagu

SEQ ID NO: 2311484 - RNA, 19 nt, Homo sapiens
  misc_RNA (1)...(19): siRNA sense strand
augaagaugcugacauuga

SEQ ID NO: 2311485 - RNA, 19 nt, Homo sapiens
  misc_RNA (1)...(19): siRNA sense strand
gcuuuaagaacuaugucau

SEQ ID NO: 2311486 - RNA, 19 nt, Homo sapiens
  misc_RNA (1)...(19): siRNA sense strand
guggaugaaaagucagaua

SEQ ID NO: 2311487 - RNA, 19 nt, Homo sapiens
  misc_RNA (1)...(19): siRNA sense strand
agucaaguaagcaugaaau

SEQ ID NO: 2311488 - RNA, 19 nt, Homo sapiens
  misc_RNA (1)...(19): siRNA sense strand
ccugaugaugaauggguga

SEQ ID NO: 2311489 - RNA, 19 nt, Homo sapiens
  misc_RNA (1)...(19): siRNA sense strand
gcugauaccgccaguggau

SEQ ID NO: 2311490 - RNA, 19 nt, Homo sapiens
  misc_RNA (1)...(19): siRNA sense strand
ucaaaaugcaugagcagau

SEQ ID NO: 2311491 - RNA, 19 nt, Homo sapiens
  misc_RNA (1)...(19): siRNA sense strand
cagauguggcccuagagaa

SEQ ID NO: 2311492 - RNA, 19 nt, Homo sapiens
  misc_RNA (1)...(19): siRNA sense strand
ggauguuagaugcugaaga

SEQ ID NO: 2311493 - RNA, 19 nt, Homo sapiens
  misc_RNA (1)...(19): siRNA sense strand
uuguacaggaacagcuuua

SEQ ID NO: 2311494 - RNA, 19 nt, Homo sapiens
  misc_RNA (1)...(19): siRNA sense strand
ccuuagaggucuuagccua

SEQ ID NO: 2311495 - RNA, 19 nt, Homo sapiens
  misc_RNA (1)...(19): siRNA sense strand
gaaucaugcugaagagcga

SEQ ID NO: 2311496 - RNA, 19 nt, Homo sapiens
  misc_RNA (1)...(19): siRNA sense strand
ggaugaaaagucagauaaa

SEQ ID NO: 2311497 - RNA, 19 nt, Homo sapiens
  misc_RNA (1)...(19): siRNA sense strand
aaagaaagugauugcacaa

SEQ ID NO: 2311498 - RNA, 19 nt, Homo sapiens
  misc_RNA (1)...(19): siRNA sense strand
uggaauggagacauagaaa

SEQ ID NO: 2311499 - RNA, 19 nt, Homo sapiens
  misc_RNA (1)...(19): siRNA sense strand
uguuagaugcugaagauuu

SEQ ID NO: 2311500 - RNA, 19 nt, Homo sapiens
  misc_RNA (1)...(19): siRNA sense strand
gagaagauuuccagagcuc

SEQ ID NO: 2311501 - RNA, 19 nt, Homo sapiens
  misc_RNA (1)...(19): siRNA sense strand
ucugucugguugugagaaa

SEQ ID NO: 2311502 - RNA, 19 nt, Homo sapiens
  misc_RNA (1)...(19): siRNA sense strand
cagucaaguaagcaugaaa

SEQ ID NO: 2311503 - RNA, 19 nt, Homo sapiens
  misc_RNA (1)...(19): siRNA sense strand
cugaagagucugcggagga

SEQ ID NO: 2311504 - RNA, 19 nt, Homo sapiens
  misc_RNA (1)...(19): siRNA sense strand
uuaccuaugaagagcuuaa

SEQ ID NO: 2311505 - RNA, 19 nt, Homo sapiens
  misc_RNA (1)...(19): siRNA sense strand
gcauuggagaagaaauaga

SEQ ID NO: 2311506 - RNA, 19 nt, Homo sapiens
  misc_RNA (1)...(19): siRNA sense strand
acguuuacuccauggcuua

SEQ ID NO: 2311507 - RNA, 19 nt, Homo sapiens
  misc_RNA (1)...(19): siRNA sense strand
cuaacaagggcauuggaga

SEQ ID NO: 2311508 - RNA, 19 nt, Homo sapiens
  misc_RNA (1)...(19): siRNA sense strand
cagaauuugcagugugguu

SEQ ID NO: 2311509 - RNA, 19 nt, Homo sapiens
  misc_RNA (1)...(19): siRNA sense strand
agaacacuccacagguaua

SEQ ID NO: 2311510 - RNA, 19 nt, Homo sapiens
  misc_RNA (1)...(19): siRNA sense strand
ccuauggaaucaugcugaa

SEQ ID NO: 2311511 - RNA, 19 nt, Homo sapiens
  misc_RNA (1)...(19): siRNA sense strand
gggaugaagaugcugacau

SEQ ID NO: 2311512 - RNA, 19 nt, Homo sapiens
  misc_RNA (1)...(19): siRNA sense strand
agaaaagcagcaaggacua

SEQ ID NO: 2311513 - RNA, 19 nt, Homo sapiens
  misc_RNA (1)...(19): siRNA sense strand
agucagauaaagaagcaga

SEQ ID NO: 2311514 - RNA, 19 nt, Homo sapiens
  misc_RNA (1)...(19): siRNA sense strand
agauaaagaagcagaagug

SEQ ID NO: 2311515 - RNA, 19 nt, Homo sapiens
  misc_RNA (1)...(19): siRNA sense strand
ugucgaugcagucaaguaa

SEQ ID NO: 2311516 - RNA, 19 nt, Homo sapiens
  misc_RNA (1)...(19): siRNA sense strand
gcauuugacaguuggucuu

SEQ ID NO: 2311517 - RNA, 19 nt, Homo sapiens
  misc_RNA (1)...(19): siRNA sense strand
agucuuuguguaauggaaa

SEQ ID NO: 2311518 - RNA, 19 nt, Homo sapiens
  misc_RNA (1)...(19): siRNA sense strand
guaaggacauuguuggacu

SEQ ID NO: 2311519 - RNA, 19 nt, Homo sapiens
  misc_RNA (1)...(19): siRNA sense strand
cagauaaagaagcagaagu

SEQ ID NO: 2311520 - RNA, 19 nt, Homo sapiens
  misc_RNA (1)...(19): siRNA sense strand
augaagaugcugacauuga

SEQ ID NO: 2311521 - RNA, 19 nt, Homo sapiens
  misc_RNA (1)...(19): siRNA sense strand
gcuuuaagaacuaugucau

SEQ ID NO: 2311522 - RNA, 19 nt, Homo sapiens
  misc_RNA (1)...(19): siRNA sense strand
guggaugaaaagucagaua

SEQ ID NO: 2311523 - RNA, 19 nt, Homo sapiens
  misc_RNA (1)...(19): siRNA sense strand
agucaaguaagcaugaaau

SEQ ID NO: 2311524 - RNA, 19 nt, Homo sapiens
  misc_RNA (1)...(19): siRNA sense strand
ccugaugaugaauggguga

SEQ ID NO: 2311525 - RNA, 19 nt, Homo sapiens
  misc_RNA (1)...(19): siRNA sense strand
gcugauaccgccaguggau

SEQ ID NO: 2311526 - RNA, 19 nt, Homo sapiens
  misc_RNA (1)...(19): siRNA sense strand
cagauguggcccuagagaa

SEQ ID NO: 2311527 - RNA, 19 nt, Homo sapiens
  misc_RNA (1)...(19): siRNA sense strand
ggauguuagaugcugaaga

SEQ ID NO: 2311528 - RNA, 19 nt, Homo sapiens
  misc_RNA (1)...(19): siRNA sense strand
uuguacaggaacagcuuua

SEQ ID NO: 2311529 - RNA, 19 nt, Homo sapiens
  misc_RNA (1)...(19): siRNA sense strand
ccugcaacuuugugagcaa

SEQ ID NO: 2311530 - RNA, 19 nt, Homo sapiens
  misc_RNA (1)...(19): siRNA sense strand
gugagaaggaccuggagca

SEQ ID NO: 2311531 - RNA, 19 nt, Homo sapiens
  misc_RNA (1)...(19): siRNA sense strand
uggaguggcuuaugcccaa

SEQ ID NO: 2311532 - RNA, 19 nt, Homo sapiens
  misc_RNA (1)...(19): siRNA sense strand
cugucgaggcucugcagaa

SEQ ID NO: 2311533 - RNA, 19 nt, Homo sapiens
  misc_RNA (1)...(19): siRNA sense strand
ccugcaacuuugugagcaa

SEQ ID NO: 2311534 - RNA, 19 nt, Homo sapiens
  misc_RNA (1)...(19): siRNA sense strand
gugagaaggaccuggagca

SEQ ID NO: 2311535 - RNA, 19 nt, Homo sapiens
  misc_RNA (1)...(19): siRNA sense strand
uggaguggcuuaugcccaa

SEQ ID NO: 2311536 - RNA, 19 nt, Homo sapiens
  misc_RNA (1)...(19): siRNA sense strand
cugucgaggcucugcagaa

SEQ ID NO: 2311537 - RNA, 19 nt, Homo sapiens
  misc_RNA (1)...(19): siRNA sense strand
gagauuaagauuuggccaa

SEQ ID NO: 2311538 - RNA, 19 nt, Homo sapiens
  misc_RNA (1)...(19): siRNA sense strand
uggccaauugggagagaaa

SEQ ID NO: 2311539 - RNA, 19 nt, Homo sapiens
  misc_RNA (1)...(19): siRNA sense strand
cugccagaguacaggaaau

SEQ ID NO: 2311540 - RNA, 19 nt, Homo sapiens
  misc_RNA (1)...(19): siRNA sense strand
ucuuaagugcagacaaaua

SEQ ID NO: 2311541 - RNA, 19 nt, Homo sapiens
  misc_RNA (1)...(19): siRNA sense strand
gucucuaaacaguggaaua

SEQ ID NO: 2311542 - RNA, 19 nt, Homo sapiens
  misc_RNA (1)...(19): siRNA sense strand
cgguauuuagcguggacua

SEQ ID NO: 2311543 - RNA, 19 nt, Homo sapiens
  misc_RNA (1)...(19): siRNA sense strand
gaaugaagcaacuggagga

SEQ ID NO: 2311544 - RNA, 19 nt, Homo sapiens
  misc_RNA (1)...(19): siRNA sense strand
ccagaguacaggaaaucaa

SEQ ID NO: 2311545 - RNA, 19 nt, Homo sapiens
  misc_RNA (1)...(19): siRNA sense strand
ugaagcaacuggaggacca

SEQ ID NO: 2311546 - RNA, 19 nt, Homo sapiens
  misc_RNA (1)...(19): siRNA sense strand
aaacaguggaauaagguga

SEQ ID NO: 2311547 - RNA, 19 nt, Homo sapiens
  misc_RNA (1)...(19): siRNA sense strand
agguuuauuugaaggcuau

SEQ ID NO: 2311548 - RNA, 19 nt, Homo sapiens
  misc_RNA (1)...(19): siRNA sense strand
ggcuuuaucugcugggaca

SEQ ID NO: 2311549 - RNA, 19 nt, Homo sapiens
  misc_RNA (1)...(19): siRNA sense strand
gggcacacggaauggguca

SEQ ID NO: 2311550 - RNA, 19 nt, Homo sapiens
  misc_RNA (1)...(19): siRNA sense strand
ggaauaaggugauaagugc

SEQ ID NO: 2311551 - RNA, 19 nt, Homo sapiens
  misc_RNA (1)...(19): siRNA sense strand
aggcgaacauccuggcuga

SEQ ID NO: 2311552 - RNA, 19 nt, Homo sapiens
  misc_RNA (1)...(19): siRNA sense strand
aagguuuauuugaaggcua

SEQ ID NO: 2311553 - RNA, 19 nt, Homo sapiens
  misc_RNA (1)...(19): siRNA sense strand
ccaagguaguuuugcagaa

SEQ ID NO: 2311554 - RNA, 19 nt, Homo sapiens
  misc_RNA (1)...(19): siRNA sense strand
gaaaucaaagagaggcuca

SEQ ID NO: 2311555 - RNA, 19 nt, Homo sapiens
  misc_RNA (1)...(19): siRNA sense strand
cggacagagagccugauua

SEQ ID NO: 2311556 - RNA, 19 nt, Homo sapiens
  misc_RNA (1)...(19): siRNA sense strand
gccaauugggagagaaauc

SEQ ID NO: 2311557 - RNA, 19 nt, Homo sapiens
  misc_RNA (1)...(19): siRNA sense strand
uaugauauucucaggguca

SEQ ID NO: 2311558 - RNA, 19 nt, Homo sapiens
  misc_RNA (1)...(19): siRNA sense strand
gugcagacaaauaugagau

SEQ ID NO: 2311559 - RNA, 19 nt, Homo sapiens
  misc_RNA (1)...(19): siRNA sense strand
gauuuggccaauugggaga

SEQ ID NO: 2311560 - RNA, 19 nt, Homo sapiens
  misc_RNA (1)...(19): siRNA sense strand
ugacaggcuccuuugacaa

SEQ ID NO: 2311561 - RNA, 19 nt, Homo sapiens
  misc_RNA (1)...(19): siRNA sense strand
gaguaauagaagagaauga

SEQ ID NO: 2311562 - RNA, 19 nt, Homo sapiens
  misc_RNA (1)...(19): siRNA sense strand
agggaauauaugaggauaa

SEQ ID NO: 2311563 - RNA, 19 nt, Homo sapiens
  misc_RNA (1)...(19): siRNA sense strand
ugggcagacuggaggaaua

SEQ ID NO: 2311564 - RNA, 19 nt, Homo sapiens
  misc_RNA (1)...(19): siRNA sense strand
gauuaauccagaagaguau

SEQ ID NO: 2311565 - RNA, 19 nt, Homo sapiens
  misc_RNA (1)...(19): siRNA sense strand
aggaguaauagaagagaau

SEQ ID NO: 2311566 - RNA, 19 nt, Homo sapiens
  misc_RNA (1)...(19): siRNA sense strand
ugggaaaguggcagacaaa

SEQ ID NO: 2311567 - RNA, 19 nt, Homo sapiens
  misc_RNA (1)...(19): siRNA sense strand
ccugcaagauauaaaggaa

SEQ ID NO: 2311568 - RNA, 19 nt, Homo sapiens
  misc_RNA (1)...(19): siRNA sense strand
cccaauuauuagacggaau

SEQ ID NO: 2311569 - RNA, 19 nt, Homo sapiens
  misc_RNA (1)...(19): siRNA sense strand
agauuaauccagaagagua

SEQ ID NO: 2311570 - RNA, 19 nt, Homo sapiens
  misc_RNA (1)...(19): siRNA sense strand
acaguaaauuguagcccua

SEQ ID NO: 2311571 - RNA, 19 nt, Homo sapiens
  misc_RNA (1)...(19): siRNA sense strand
ugaaaagggacaaggagua

SEQ ID NO: 2311572 - RNA, 19 nt, Homo sapiens
  misc_RNA (1)...(19): siRNA sense strand
aguauguguuaguggucaa

SEQ ID NO: 2311573 - RNA, 19 nt, Homo sapiens
  misc_RNA (1)...(19): siRNA sense strand
auggagugcuagaagacaa

SEQ ID NO: 2311574 - RNA, 19 nt, Homo sapiens
  misc_RNA (1)...(19): siRNA sense strand
ugcaagauauaaaggaaga

SEQ ID NO: 2311575 - RNA, 19 nt, Homo sapiens
  misc_RNA (1)...(19): siRNA sense strand
cugugaaaauguuggacua

SEQ ID NO: 2311576 - RNA, 19 nt, Homo sapiens
  misc_RNA (1)...(19): siRNA sense strand
aaggaguaauagaagagaa

SEQ ID NO: 2311577 - RNA, 19 nt, Homo sapiens
  misc_RNA (1)...(19): siRNA sense strand
cugggaaaguggcagacaa

SEQ ID NO: 2311578 - RNA, 19 nt, Homo sapiens
  misc_RNA (1)...(19): siRNA sense strand
uggccagcauggugggauu

SEQ ID NO: 2311579 - RNA, 19 nt, Homo sapiens
  misc_RNA (1)...(19): siRNA sense strand
gaaauaggauagcaggcuu

SEQ ID NO: 2311580 - RNA, 19 nt, Homo sapiens
  misc_RNA (1)...(19): siRNA sense strand
aaguaaaagccuaugcuaa

SEQ ID NO: 2311581 - RNA, 19 nt, Homo sapiens
  misc_RNA (1)...(19): siRNA sense strand
uggaaaaucacaagaucua

SEQ ID NO: 2311582 - RNA, 19 nt, Homo sapiens
  misc_RNA (1)...(19): siRNA sense strand
uggaaaucaaggaggaguu

SEQ ID NO: 2311583 - RNA, 19 nt, Homo sapiens
  misc_RNA (1)...(19): siRNA sense strand
acauguaaagccaggauuu

SEQ ID NO: 2311584 - RNA, 19 nt, Homo sapiens
  misc_RNA (1)...(19): siRNA sense strand
gaguuuacaucuuugguga

SEQ ID NO: 2311585 - RNA, 19 nt, Homo sapiens
  misc_RNA (1)...(19): siRNA sense strand
gaacaguaucuucaggaga

SEQ ID NO: 2311586 - RNA, 19 nt, Homo sapiens
  misc_RNA (1)...(19): siRNA sense strand
uguuaguggucaaggagca

SEQ ID NO: 2311587 - RNA, 19 nt, Homo sapiens
  misc_RNA (1)...(19): siRNA sense strand
auaccaacuucguagaaaa

SEQ ID NO: 2311588 - RNA, 19 nt, Homo sapiens
  misc_RNA (1)...(19): siRNA sense strand
cagaucaugcacagggaau

SEQ ID NO: 2311589 - RNA, 19 nt, Homo sapiens
  misc_RNA (1)...(19): siRNA sense strand
acugagaagaaaccggaua

SEQ ID NO: 2311590 - RNA, 19 nt, Homo sapiens
  misc_RNA (1)...(19): siRNA sense strand
cuacaguaacccugcaaga

SEQ ID NO: 2311591 - RNA, 19 nt, Homo sapiens
  misc_RNA (1)...(19): siRNA sense strand
acaaaauaguccauaccaa

SEQ ID NO: 2311592 - RNA, 19 nt, Homo sapiens
  misc_RNA (1)...(19): siRNA sense strand
uaauggaaaucaaggagga

SEQ ID NO: 2311593 - RNA, 19 nt, Homo sapiens
  misc_RNA (1)...(19): siRNA sense strand
ucucuuacuugcuggaaca

SEQ ID NO: 2311594 - RNA, 19 nt, Homo sapiens
  misc_RNA (1)...(19): siRNA sense strand
gggauuuaugugcaugaaa

SEQ ID NO: 2311595 - RNA, 19 nt, Homo sapiens
  misc_RNA (1)...(19): siRNA sense strand
uggcaaugcauuagcagga

SEQ ID NO: 2311596 - RNA, 19 nt, Homo sapiens
  misc_RNA (1)...(19): siRNA sense strand
acuccaguacugagaagaa

SEQ ID NO: 2311597 - RNA, 19 nt, Homo sapiens
  misc_RNA (1)...(19): siRNA sense strand
auaaaggugcacauguaaa

SEQ ID NO: 2311598 - RNA, 19 nt, Homo sapiens
  misc_RNA (1)...(19): siRNA sense strand
ucaaauagugacccaacaa

SEQ ID NO: 2311599 - RNA, 19 nt, Homo sapiens
  misc_RNA (1)...(19): siRNA sense strand
guuuccagcaguuguauaa

SEQ ID NO: 2311600 - RNA, 19 nt, Homo sapiens
  misc_RNA (1)...(19): siRNA sense strand
uggcagacaaaguuauaau

SEQ ID NO: 2311601 - RNA, 19 nt, Homo sapiens
  misc_RNA (1)...(19): siRNA sense strand
cuuugcagguguauggauu

SEQ ID NO: 2311602 - RNA, 19 nt, Homo sapiens
  misc_RNA (1)...(19): siRNA sense strand
ucaacuucaacuacagaaa

SEQ ID NO: 2311603 - RNA, 19 nt, Homo sapiens
  misc_RNA (1)...(19): siRNA sense strand
aaauaggauagcaggcuuu

SEQ ID NO: 2311604 - RNA, 19 nt, Homo sapiens
  misc_RNA (1)...(19): siRNA sense strand
gaucaugcacagggaauau

SEQ ID NO: 2311605 - RNA, 19 nt, Homo sapiens
  misc_RNA (1)...(19): siRNA sense strand
uuagcugggauuuggguua

SEQ ID NO: 2311606 - RNA, 19 nt, Homo sapiens
  misc_RNA (1)...(19): siRNA sense strand
gugcuagaagacaaugaua

SEQ ID NO: 2311607 - RNA, 19 nt, Homo sapiens
  misc_RNA (1)...(19): siRNA sense strand
agaucaugcacagggaaua

SEQ ID NO: 2311608 - RNA, 19 nt, Homo sapiens
  misc_RNA (1)...(19): siRNA sense strand
gggcagacuggaggaauau

SEQ ID NO: 2311609 - RNA, 19 nt, Homo sapiens
  misc_RNA (1)...(19): siRNA sense strand
acaccacugcuuagagauu

SEQ ID NO: 2311610 - RNA, 19 nt, Homo sapiens
  misc_RNA (1)...(19): siRNA sense strand
gugaaaauguuggacuaua

SEQ ID NO: 2311611 - RNA, 19 nt, Homo sapiens
  misc_RNA (1)...(19): siRNA sense strand
gaguaauagaagagaauga

SEQ ID NO: 2311612 - RNA, 19 nt, Homo sapiens
  misc_RNA (1)...(19): siRNA sense strand
agggaauauaugaggauaa

SEQ ID NO: 2311613 - RNA, 19 nt, Homo sapiens
  misc_RNA (1)...(19): siRNA sense strand
ugggcagacuggaggaaua

SEQ ID NO: 2311614 - RNA, 19 nt, Homo sapiens
  misc_RNA (1)...(19): siRNA sense strand
gauuaauccagaagaguau

SEQ ID NO: 2311615 - RNA, 19 nt, Homo sapiens
  misc_RNA (1)...(19): siRNA sense strand
aggaguaauagaagagaau

SEQ ID NO: 2311616 - RNA, 19 nt, Homo sapiens
  misc_RNA (1)...(19): siRNA sense strand
ugggaaaguggcagacaaa

SEQ ID NO: 2311617 - RNA, 19 nt, Homo sapiens
  misc_RNA (1)...(19): siRNA sense strand
ccugcaagauauaaaggaa

SEQ ID NO: 2311618 - RNA, 19 nt, Homo sapiens
  misc_RNA (1)...(19): siRNA sense strand
cccaauuauuagacggaau

SEQ ID NO: 2311619 - RNA, 19 nt, Homo sapiens
  misc_RNA (1)...(19): siRNA sense strand
agauuaauccagaagagua

SEQ ID NO: 2311620 - RNA, 19 nt, Homo sapiens
  misc_RNA (1)...(19): siRNA sense strand
acaguaaauuguagcccua

SEQ ID NO: 2311621 - RNA, 19 nt, Homo sapiens
  misc_RNA (1)...(19): siRNA sense strand
ugaaaagggacaaggagua

SEQ ID NO: 2311622 - RNA, 19 nt, Homo sapiens
  misc_RNA (1)...(19): siRNA sense strand
aguauguguuaguggucaa

SEQ ID NO: 2311623 - RNA, 19 nt, Homo sapiens
  misc_RNA (1)...(19): siRNA sense strand
auggagugcuagaagacaa

SEQ ID NO: 2311624 - RNA, 19 nt, Homo sapiens
  misc_RNA (1)...(19): siRNA sense strand
ugcaagauauaaaggaaga

SEQ ID NO: 2311625 - RNA, 19 nt, Homo sapiens
  misc_RNA (1)...(19): siRNA sense strand
cugugaaaauguuggacua

SEQ ID NO: 2311626 - RNA, 19 nt, Homo sapiens
  misc_RNA (1)...(19): siRNA sense strand
aaggaguaauagaagagaa

SEQ ID NO: 2311627 - RNA, 19 nt, Homo sapiens
  misc_RNA (1)...(19): siRNA sense strand
cugggaaaguggcagacaa

SEQ ID NO: 2311628 - RNA, 19 nt, Homo sapiens
  misc_RNA (1)...(19): siRNA sense strand
uggccagcauggugggauu

SEQ ID NO: 2311629 - RNA, 19 nt, Homo sapiens
  misc_RNA (1)...(19): siRNA sense strand
gaaauaggauagcaggcuu

SEQ ID NO: 2311630 - RNA, 19 nt, Homo sapiens
  misc_RNA (1)...(19): siRNA sense strand
aaguaaaagccuaugcuaa

SEQ ID NO: 2311631 - RNA, 19 nt, Homo sapiens
  misc_RNA (1)...(19): siRNA sense strand
uggaaaaucacaagaucua

SEQ ID NO: 2311632 - RNA, 19 nt, Homo sapiens
  misc_RNA (1)...(19): siRNA sense strand
uggaaaucaaggaggaguu

SEQ ID NO: 2311633 - RNA, 19 nt, Homo sapiens
  misc_RNA (1)...(19): siRNA sense strand
acauguaaagccaggauuu

SEQ ID NO: 2311634 - RNA, 19 nt, Homo sapiens
  misc_RNA (1)...(19): siRNA sense strand
gaguuuacaucuuugguga

SEQ ID NO: 2311635 - RNA, 19 nt, Homo sapiens
  misc_RNA (1)...(19): siRNA sense strand
gaacaguaucuucaggaga

SEQ ID NO: 2311636 - RNA, 19 nt, Homo sapiens
  misc_RNA (1)...(19): siRNA sense strand
uguuaguggucaaggagca

SEQ ID NO: 2311637 - RNA, 19 nt, Homo sapiens
  misc_RNA (1)...(19): siRNA sense strand
auaccaacuucguagaaaa

SEQ ID NO: 2311638 - RNA, 19 nt, Homo sapiens
  misc_RNA (1)...(19): siRNA sense strand
cagaucaugcacagggaau

SEQ ID NO: 2311639 - RNA, 19 nt, Homo sapiens
  misc_RNA (1)...(19): siRNA sense strand
acugagaagaaaccggaua

SEQ ID NO: 2311640 - RNA, 19 nt, Homo sapiens
  misc_RNA (1)...(19): siRNA sense strand
cuacaguaacccugcaaga

SEQ ID NO: 2311641 - RNA, 19 nt, Homo sapiens
  misc_RNA (1)...(19): siRNA sense strand
acaaaauaguccauaccaa

SEQ ID NO: 2311642 - RNA, 19 nt, Homo sapiens
  misc_RNA (1)...(19): siRNA sense strand
uaauggaaaucaaggagga

SEQ ID NO: 2311643 - RNA, 19 nt, Homo sapiens
  misc_RNA (1)...(19): siRNA sense strand
ucucuuacuugcuggaaca

SEQ ID NO: 2311644 - RNA, 19 nt, Homo sapiens
  misc_RNA (1)...(19): siRNA sense strand
gggauuuaugugcaugaaa

SEQ ID NO: 2311645 - RNA, 19 nt, Homo sapiens
  misc_RNA (1)...(19): siRNA sense strand
uggcaaugcauuagcagga

SEQ ID NO: 2311646 - RNA, 19 nt, Homo sapiens
  misc_RNA (1)...(19): siRNA sense strand
acuccaguacugagaagaa

SEQ ID NO: 2311647 - RNA, 19 nt, Homo sapiens
  misc_RNA (1)...(19): siRNA sense strand
auaaaggugcacauguaaa

SEQ ID NO: 2311648 - RNA, 19 nt, Homo sapiens
  misc_RNA (1)...(19): siRNA sense strand
ucaaauagugacccaacaa

SEQ ID NO: 2311649 - RNA, 19 nt, Homo sapiens
  misc_RNA (1)...(19): siRNA sense strand
guuuccagcaguuguauaa

SEQ ID NO: 2311650 - RNA, 19 nt, Homo sapiens
  misc_RNA (1)...(19): siRNA sense strand
uggcagacaaaguuauaau

SEQ ID NO: 2311651 - RNA, 19 nt, Homo sapiens
  misc_RNA (1)...(19): siRNA sense strand
cuuugcagguguauggauu

SEQ ID NO: 2311652 - RNA, 19 nt, Homo sapiens
  misc_RNA (1)...(19): siRNA sense strand
ucaacuucaacuacagaaa

SEQ ID NO: 2311653 - RNA, 19 nt, Homo sapiens
  misc_RNA (1)...(19): siRNA sense strand
aaauaggauagcaggcuuu

SEQ ID NO: 2311654 - RNA, 19 nt, Homo sapiens
  misc_RNA (1)...(19): siRNA sense strand
gaucaugcacagggaauau

SEQ ID NO: 2311655 - RNA, 19 nt, Homo sapiens
  misc_RNA (1)...(19): siRNA sense strand
uuagcugggauuuggguua

SEQ ID NO: 2311656 - RNA, 19 nt, Homo sapiens
  misc_RNA (1)...(19): siRNA sense strand
gugcuagaagacaaugaua

SEQ ID NO: 2311657 - RNA, 19 nt, Homo sapiens
  misc_RNA (1)...(19): siRNA sense strand
agaucaugcacagggaaua

SEQ ID NO: 2311658 - RNA, 19 nt, Homo sapiens
  misc_RNA (1)...(19): siRNA sense strand
gggcagacuggaggaauau

SEQ ID NO: 2311659 - RNA, 19 nt, Homo sapiens
  misc_RNA (1)...(19): siRNA sense strand
acaccacugcuuagagauu

SEQ ID NO: 2311660 - RNA, 19 nt, Homo sapiens
  misc_RNA (1)...(19): siRNA sense strand
gugaaaauguuggacuaua

SEQ ID NO: 2311661 - RNA, 19 nt, Homo sapiens
  misc_RNA (1)...(19): siRNA sense strand
gaguaauagaagagaauga

SEQ ID NO: 2311662 - RNA, 19 nt, Homo sapiens
  misc_RNA (1)...(19): siRNA sense strand
agggaauauaugaggauaa

SEQ ID NO: 2311663 - RNA, 19 nt, Homo sapiens
  misc_RNA (1)...(19): siRNA sense strand
ugggcagacuggaggaaua

SEQ ID NO: 2311664 - RNA, 19 nt, Homo sapiens
  misc_RNA (1)...(19): siRNA sense strand
gauuaauccagaagaguau

SEQ ID NO: 2311665 - RNA, 19 nt, Homo sapiens
  misc_RNA (1)...(19): siRNA sense strand
aggaguaauagaagagaau

SEQ ID NO: 2311666 - RNA, 19 nt, Homo sapiens
  misc_RNA (1)...(19): siRNA sense strand
ugggaaaguggcagacaaa

SEQ ID NO: 2311667 - RNA, 19 nt, Homo sapiens
  misc_RNA (1)...(19): siRNA sense strand
ccugcaagauauaaaggaa

SEQ ID NO: 2311668 - RNA, 19 nt, Homo sapiens
  misc_RNA (1)...(19): siRNA sense strand
cccaauuauuagacggaau

SEQ ID NO: 2311669 - RNA, 19 nt, Homo sapiens
  misc_RNA (1)...(19): siRNA sense strand
agauuaauccagaagagua

SEQ ID NO: 2311670 - RNA, 19 nt, Homo sapiens
  misc_RNA (1)...(19): siRNA sense strand
acaguaaauuguagcccua

SEQ ID NO: 2311671 - RNA, 19 nt, Homo sapiens
  misc_RNA (1)...(19): siRNA sense strand
ugaaaagggacaaggagua

SEQ ID NO: 2311672 - RNA, 19 nt, Homo sapiens
  misc_RNA (1)...(19): siRNA sense strand
aguauguguuaguggucaa

SEQ ID NO: 2311673 - RNA, 19 nt, Homo sapiens
  misc_RNA (1)...(19): siRNA sense strand
auggagugcuagaagacaa

SEQ ID NO: 2311674 - RNA, 19 nt, Homo sapiens
  misc_RNA (1)...(19): siRNA sense strand
ugcaagauauaaaggaaga

SEQ ID NO: 2311675 - RNA, 19 nt, Homo sapiens
  misc_RNA (1)...(19): siRNA sense strand
cugugaaaauguuggacua

SEQ ID NO: 2311676 - RNA, 19 nt, Homo sapiens
  misc_RNA (1)...(19): siRNA sense strand
aaggaguaauagaagagaa

SEQ ID NO: 2311677 - RNA, 19 nt, Homo sapiens
  misc_RNA (1)...(19): siRNA sense strand
cugggaaaguggcagacaa

SEQ ID NO: 2311678 - RNA, 19 nt, Homo sapiens
  misc_RNA (1)...(19): siRNA sense strand
uggccagcauggugggauu

SEQ ID NO: 2311679 - RNA, 19 nt, Homo sapiens
  misc_RNA (1)...(19): siRNA sense strand
gaaauaggauagcaggcuu

SEQ ID NO: 2311680 - RNA, 19 nt, Homo sapiens
  misc_RNA (1)...(19): siRNA sense strand
aaguaaaagccuaugcuaa

SEQ ID NO: 2311681 - RNA, 19 nt, Homo sapiens
  misc_RNA (1)...(19): siRNA sense strand
uggaaaaucacaagaucua

SEQ ID NO: 2311682 - RNA, 19 nt, Homo sapiens
  misc_RNA (1)...(19): siRNA sense strand
uggaaaucaaggaggaguu

SEQ ID NO: 2311683 - RNA, 19 nt, Homo sapiens
  misc_RNA (1)...(19): siRNA sense strand
acauguaaagccaggauuu

SEQ ID NO: 2311684 - RNA, 19 nt, Homo sapiens
  misc_RNA (1)...(19): siRNA sense strand
gaguuuacaucuuugguga

SEQ ID NO: 2311685 - RNA, 19 nt, Homo sapiens
  misc_RNA (1)...(19): siRNA sense strand
gaacaguaucuucaggaga

SEQ ID NO: 2311686 - RNA, 19 nt, Homo sapiens
  misc_RNA (1)...(19): siRNA sense strand
uguuaguggucaaggagca

SEQ ID NO: 2311687 - RNA, 19 nt, Homo sapiens
  misc_RNA (1)...(19): siRNA sense strand
auaccaacuucguagaaaa

SEQ ID NO: 2311688 - RNA, 19 nt, Homo sapiens
  misc_RNA (1)...(19): siRNA sense strand
cagaucaugcacagggaau

SEQ ID NO: 2311689 - RNA, 19 nt, Homo sapiens
  misc_RNA (1)...(19): siRNA sense strand
acugagaagaaaccggaua

SEQ ID NO: 2311690 - RNA, 19 nt, Homo sapiens
  misc_RNA (1)...(19): siRNA sense strand
cuacaguaacccugcaaga

SEQ ID NO: 2311691 - RNA, 19 nt, Homo sapiens
  misc_RNA (1)...(19): siRNA sense strand
acaaaauaguccauaccaa

SEQ ID NO: 2311692 - RNA, 19 nt, Homo sapiens
  misc_RNA (1)...(19): siRNA sense strand
uaauggaaaucaaggagga

SEQ ID NO: 2311693 - RNA, 19 nt, Homo sapiens
  misc_RNA (1)...(19): siRNA sense strand
ucucuuacuugcuggaaca

SEQ ID NO: 2311694 - RNA, 19 nt, Homo sapiens
  misc_RNA (1)...(19): siRNA sense strand
gggauuuaugugcaugaaa

SEQ ID NO: 2311695 - RNA, 19 nt, Homo sapiens
  misc_RNA (1)...(19): siRNA sense strand
uggcaaugcauuagcagga

SEQ ID NO: 2311696 - RNA, 19 nt, Homo sapiens
  misc_RNA (1)...(19): siRNA sense strand
acuccaguacugagaagaa

SEQ ID NO: 2311697 - RNA, 19 nt, Homo sapiens
  misc_RNA (1)...(19): siRNA sense strand
auaaaggugcacauguaaa

SEQ ID NO: 2311698 - RNA, 19 nt, Homo sapiens
  misc_RNA (1)...(19): siRNA sense strand
ucaaauagugacccaacaa

SEQ ID NO: 2311699 - RNA, 19 nt, Homo sapiens
  misc_RNA (1)...(19): siRNA sense strand
guuuccagcaguuguauaa

SEQ ID NO: 2311700 - RNA, 19 nt, Homo sapiens
  misc_RNA (1)...(19): siRNA sense strand
uggcagacaaaguuauaau

SEQ ID NO: 2311701 - RNA, 19 nt, Homo sapiens
  misc_RNA (1)...(19): siRNA sense strand
cuuugcagguguauggauu

SEQ ID NO: 2311702 - RNA, 19 nt, Homo sapiens
  misc_RNA (1)...(19): siRNA sense strand
ucaacuucaacuacagaaa

SEQ ID NO: 2311703 - RNA, 19 nt, Homo sapiens
  misc_RNA (1)...(19): siRNA sense strand
aaauaggauagcaggcuuu

SEQ ID NO: 2311704 - RNA, 19 nt, Homo sapiens
  misc_RNA (1)...(19): siRNA sense strand
gaucaugcacagggaauau

SEQ ID NO: 2311705 - RNA, 19 nt, Homo sapiens
  misc_RNA (1)...(19): siRNA sense strand
uuagcugggauuuggguua

SEQ ID NO: 2311706 - RNA, 19 nt, Homo sapiens
  misc_RNA (1)...(19): siRNA sense strand
gugcuagaagacaaugaua

SEQ ID NO: 2311707 - RNA, 19 nt, Homo sapiens
  misc_RNA (1)...(19): siRNA sense strand
agaucaugcacagggaaua

SEQ ID NO: 2311708 - RNA, 19 nt, Homo sapiens
  misc_RNA (1)...(19): siRNA sense strand
gggcagacuggaggaauau

SEQ ID NO: 2311709 - RNA, 19 nt, Homo sapiens
  misc_RNA (1)...(19): siRNA sense strand
acaccacugcuuagagauu

SEQ ID NO: 2311710 - RNA, 19 nt, Homo sapiens
  misc_RNA (1)...(19): siRNA sense strand
gugaaaauguuggacuaua

SEQ ID NO: 2311711 - RNA, 19 nt, Homo sapiens
  misc_RNA (1)...(19): siRNA sense strand
acgagaacgugcuggcuga

SEQ ID NO: 2311712 - RNA, 19 nt, Homo sapiens
  misc_RNA (1)...(19): siRNA sense strand
gggaagaggacuuggaagg

SEQ ID NO: 2311713 - RNA, 19 nt, Homo sapiens
  misc_RNA (1)...(19): siRNA sense strand
cggccaucguggugaagga

SEQ ID NO: 2311714 - RNA, 19 nt, Homo sapiens
  misc_RNA (1)...(19): siRNA sense strand
ucauugaccugcaggcuga

SEQ ID NO: 2311715 - RNA, 19 nt, Homo sapiens
  misc_RNA (1)...(19): siRNA sense strand
ccguuaagcuacuguccga

SEQ ID NO: 2311716 - RNA, 19 nt, Homo sapiens
  misc_RNA (1)...(19): siRNA sense strand
uggaggagcugccuggaga

SEQ ID NO: 2311717 - RNA, 19 nt, Homo sapiens
  misc_RNA (1)...(19): siRNA sense strand
ggaagagugucguggccau

SEQ ID NO: 2311718 - RNA, 19 nt, Homo sapiens
  misc_RNA (1)...(19): siRNA sense strand
aggaaauagaaauuggaga

SEQ ID NO: 2311719 - RNA, 19 nt, Homo sapiens
  misc_RNA (1)...(19): siRNA sense strand
ggaaacagcacuugcccuu

SEQ ID NO: 2311720 - RNA, 19 nt, Homo sapiens
  misc_RNA (1)...(19): siRNA sense strand
acaucaacucacugaagua

SEQ ID NO: 2311721 - RNA, 19 nt, Homo sapiens
  misc_RNA (1)...(19): siRNA sense strand
gguccuugucuuugguuau

SEQ ID NO: 2311722 - RNA, 19 nt, Homo sapiens
  misc_RNA (1)...(19): siRNA sense strand
cgaccucaggaaauagaaa

SEQ ID NO: 2311723 - RNA, 19 nt, Homo sapiens
  misc_RNA (1)...(19): siRNA sense strand
agagcaaggaaaagaacua

SEQ ID NO: 2311724 - RNA, 19 nt, Homo sapiens
  misc_RNA (1)...(19): siRNA sense strand
gcuuauggagggagugugu

SEQ ID NO: 2311725 - RNA, 19 nt, Homo sapiens
  misc_RNA (1)...(19): siRNA sense strand
ggaagagugucguggccau

SEQ ID NO: 2311726 - RNA, 19 nt, Homo sapiens
  misc_RNA (1)...(19): siRNA sense strand
aggaaauagaaauuggaga

SEQ ID NO: 2311727 - RNA, 19 nt, Homo sapiens
  misc_RNA (1)...(19): siRNA sense strand
ggaaacagcacuugcccuu

SEQ ID NO: 2311728 - RNA, 19 nt, Homo sapiens
  misc_RNA (1)...(19): siRNA sense strand
acaucaacucacugaagua

SEQ ID NO: 2311729 - RNA, 19 nt, Homo sapiens
  misc_RNA (1)...(19): siRNA sense strand
gguccuugucuuugguuau

SEQ ID NO: 2311730 - RNA, 19 nt, Homo sapiens
  misc_RNA (1)...(19): siRNA sense strand
cgaccucaggaaauagaaa

SEQ ID NO: 2311731 - RNA, 19 nt, Homo sapiens
  misc_RNA (1)...(19): siRNA sense strand
agagcaaggaaaagaacua

SEQ ID NO: 2311732 - RNA, 19 nt, Homo sapiens
  misc_RNA (1)...(19): siRNA sense strand
gcuuauggagggagugugu

SEQ ID NO: 2311733 - RNA, 19 nt, Homo sapiens
  misc_RNA (1)...(19): siRNA sense strand
cuaaggaggaggcggguga

SEQ ID NO: 2311734 - RNA, 19 nt, Homo sapiens
  misc_RNA (1)...(19): siRNA sense strand
cgcaggaagugguggguac

SEQ ID NO: 2311735 - RNA, 19 nt, Homo sapiens
  misc_RNA (1)...(19): siRNA sense strand
gugaagagaagcugcccuu

SEQ ID NO: 2311736 - RNA, 19 nt, Homo sapiens
  misc_RNA (1)...(19): siRNA sense strand
ucaaugaccuucaagcaga

SEQ ID NO: 2311737 - RNA, 19 nt, Homo sapiens
  misc_RNA (1)...(19): siRNA sense strand
agaucgugcugguugguca

SEQ ID NO: 2311738 - RNA, 19 nt, Homo sapiens
  misc_RNA (1)...(19): siRNA sense strand
caaaauggaccgaggggaa

SEQ ID NO: 2311739 - RNA, 19 nt, Homo sapiens
  misc_RNA (1)...(19): siRNA sense strand
cuaaggaggaggcggguga

SEQ ID NO: 2311740 - RNA, 19 nt, Homo sapiens
  misc_RNA (1)...(19): siRNA sense strand
cgcaggaagugguggguac

SEQ ID NO: 2311741 - RNA, 19 nt, Homo sapiens
  misc_RNA (1)...(19): siRNA sense strand
gugaagagaagcugcccuu

SEQ ID NO: 2311742 - RNA, 19 nt, Homo sapiens
  misc_RNA (1)...(19): siRNA sense strand
ucaaugaccuucaagcaga

SEQ ID NO: 2311743 - RNA, 19 nt, Homo sapiens
  misc_RNA (1)...(19): siRNA sense strand
agaucgugcugguugguca

SEQ ID NO: 2311744 - RNA, 19 nt, Homo sapiens
  misc_RNA (1)...(19): siRNA sense strand
cgucaguggaggcgaggaa

SEQ ID NO: 2311745 - RNA, 19 nt, Homo sapiens
  misc_RNA (1)...(19): siRNA sense strand
gcaaaggugccgugagcga

SEQ ID NO: 2311746 - RNA, 19 nt, Homo sapiens
  misc_RNA (1)...(19): siRNA sense strand
aaucagaggacgaggagga

SEQ ID NO: 2311747 - RNA, 19 nt, Homo sapiens
  misc_RNA (1)...(19): siRNA sense strand
agcaagacguggaagguga

SEQ ID NO: 2311748 - RNA, 19 nt, Homo sapiens
  misc_RNA (1)...(19): siRNA sense strand
gaugugagagugugggaca

SEQ ID NO: 2311749 - RNA, 19 nt, Homo sapiens
  misc_RNA (1)...(19): siRNA sense strand
cguggaaggugauugcaga

SEQ ID NO: 2311750 - RNA, 19 nt, Homo sapiens
  misc_RNA (1)...(19): siRNA sense strand
aggugauugcagaggauga

SEQ ID NO: 2311751 - RNA, 19 nt, Homo sapiens
  misc_RNA (1)...(19): siRNA sense strand
gggauuuaaggaccggaaa

SEQ ID NO: 2311752 - RNA, 19 nt, Homo sapiens
  misc_RNA (1)...(19): siRNA sense strand
gucuagacgucucggccaa

SEQ ID NO: 2311753 - RNA, 19 nt, Homo sapiens
  misc_RNA (1)...(19): siRNA sense strand
ccuaugaguuugcggugga

SEQ ID NO: 2311754 - RNA, 19 nt, Homo sapiens
  misc_RNA (1)...(19): siRNA sense strand
gcucaaagccgaagacucc

SEQ ID NO: 2311755 - RNA, 19 nt, Homo sapiens
  misc_RNA (1)...(19): siRNA sense strand
augcaagaauacaggcacu

SEQ ID NO: 2311756 - RNA, 19 nt, Homo sapiens
  misc_RNA (1)...(19): siRNA sense strand
ccuugaaauaguuccagaa

SEQ ID NO: 2311757 - RNA, 19 nt, Homo sapiens
  misc_RNA (1)...(19): siRNA sense strand
cggaugaaccagaagcugu

SEQ ID NO: 2311758 - RNA, 19 nt, Homo sapiens
  misc_RNA (1)...(19): siRNA sense strand
ggaaggugauugcagagga

SEQ ID NO: 2311759 - RNA, 19 nt, Homo sapiens
  misc_RNA (1)...(19): siRNA sense strand
gggauauacaucaggggau

SEQ ID NO: 2311760 - RNA, 19 nt, Homo sapiens
  misc_RNA (1)...(19): siRNA sense strand
gccucuugaagcuggguaa

SEQ ID NO: 2311761 - RNA, 19 nt, Homo sapiens
  misc_RNA (1)...(19): siRNA sense strand
cgucaguggaggcgaggaa

SEQ ID NO: 2311762 - RNA, 19 nt, Homo sapiens
  misc_RNA (1)...(19): siRNA sense strand
gcaaaggugccgugagcga

SEQ ID NO: 2311763 - RNA, 19 nt, Homo sapiens
  misc_RNA (1)...(19): siRNA sense strand
aaucagaggacgaggagga

SEQ ID NO: 2311764 - RNA, 19 nt, Homo sapiens
  misc_RNA (1)...(19): siRNA sense strand
agcaagacguggaagguga

SEQ ID NO: 2311765 - RNA, 19 nt, Homo sapiens
  misc_RNA (1)...(19): siRNA sense strand
gaugugagagugugggaca

SEQ ID NO: 2311766 - RNA, 19 nt, Homo sapiens
  misc_RNA (1)...(19): siRNA sense strand
cguggaaggugauugcaga

SEQ ID NO: 2311767 - RNA, 19 nt, Homo sapiens
  misc_RNA (1)...(19): siRNA sense strand
aggugauugcagaggauga

SEQ ID NO: 2311768 - RNA, 19 nt, Homo sapiens
  misc_RNA (1)...(19): siRNA sense strand
gggauuuaaggaccggaaa

SEQ ID NO: 2311769 - RNA, 19 nt, Homo sapiens
  misc_RNA (1)...(19): siRNA sense strand
gucuagacgucucggccaa

SEQ ID NO: 2311770 - RNA, 19 nt, Homo sapiens
  misc_RNA (1)...(19): siRNA sense strand
ccuaugaguuugcggugga

SEQ ID NO: 2311771 - RNA, 19 nt, Homo sapiens
  misc_RNA (1)...(19): siRNA sense strand
gcucaaagccgaagacucc

SEQ ID NO: 2311772 - RNA, 19 nt, Homo sapiens
  misc_RNA (1)...(19): siRNA sense strand
augcaagaauacaggcacu

SEQ ID NO: 2311773 - RNA, 19 nt, Homo sapiens
  misc_RNA (1)...(19): siRNA sense strand
ccuugaaauaguuccagaa

SEQ ID NO: 2311774 - RNA, 19 nt, Homo sapiens
  misc_RNA (1)...(19): siRNA sense strand
cggaugaaccagaagcugu

SEQ ID NO: 2311775 - RNA, 19 nt, Homo sapiens
  misc_RNA (1)...(19): siRNA sense strand
ggaaggugauugcagagga

SEQ ID NO: 2311776 - RNA, 19 nt, Homo sapiens
  misc_RNA (1)...(19): siRNA sense strand
gggauauacaucaggggau

SEQ ID NO: 2311777 - RNA, 19 nt, Homo sapiens
  misc_RNA (1)...(19): siRNA sense strand
gccucuugaagcuggguaa

SEQ ID NO: 2311778 - RNA, 19 nt, Homo sapiens
  misc_RNA (1)...(19): siRNA sense strand
uaacaaaugcuaaggguga

SEQ ID NO: 2311779 - RNA, 19 nt, Homo sapiens
  misc_RNA (1)...(19): siRNA sense strand
ggaagaaguucaaggaccu

SEQ ID NO: 2311780 - RNA, 19 nt, Homo sapiens
  misc_RNA (1)...(19): siRNA sense strand
aguucaaggaccuggagua

SEQ ID NO: 2311781 - RNA, 19 nt, Homo sapiens
  misc_RNA (1)...(19): siRNA sense strand
uggagaagacauugcaaaa

SEQ ID NO: 2311782 - RNA, 19 nt, Homo sapiens
  misc_RNA (1)...(19): siRNA sense strand
gaggauuccagcagagaca

SEQ ID NO: 2311783 - RNA, 19 nt, Homo sapiens
  misc_RNA (1)...(19): siRNA sense strand
ggacagucgcuauuggaga

SEQ ID NO: 2311784 - RNA, 19 nt, Homo sapiens
  misc_RNA (1)...(19): siRNA sense strand
cgauacagcugccggagga

SEQ ID NO: 2311785 - RNA, 19 nt, Homo sapiens
  misc_RNA (1)...(19): siRNA sense strand
ggcugauaucugaggaaga

SEQ ID NO: 2311786 - RNA, 19 nt, Homo sapiens
  misc_RNA (1)...(19): siRNA sense strand
cugggaugaucucaagaaa

SEQ ID NO: 2311787 - RNA, 19 nt, Homo sapiens
  misc_RNA (1)...(19): siRNA sense strand
cagaagaaucaguguugga

SEQ ID NO: 2311788 - RNA, 19 nt, Homo sapiens
  misc_RNA (1)...(19): siRNA sense strand
aagagaaaacacagaagaa

SEQ ID NO: 2311789 - RNA, 19 nt, Homo sapiens
  misc_RNA (1)...(19): siRNA sense strand
aggaagauacauugaccau

SEQ ID NO: 2311790 - RNA, 19 nt, Homo sapiens
  misc_RNA (1)...(19): siRNA sense strand
aggaagaccucgaugcugu

SEQ ID NO: 2311791 - RNA, 19 nt, Homo sapiens
  misc_RNA (1)...(19): siRNA sense strand
ccgcuguggagaagacauu

SEQ ID NO: 2311792 - RNA, 19 nt, Homo sapiens
  misc_RNA (1)...(19): siRNA sense strand
caugauccgcuguggagaa

SEQ ID NO: 2311793 - RNA, 19 nt, Homo sapiens
  misc_RNA (1)...(19): siRNA sense strand
ugaaagagggugcucgaga

SEQ ID NO: 2311794 - RNA, 19 nt, Homo sapiens
  misc_RNA (1)...(19): siRNA sense strand
cuaagggugacguggaaga

SEQ ID NO: 2311795 - RNA, 19 nt, Homo sapiens
  misc_RNA (1)...(19): siRNA sense strand
ugcagagggccgaaacaaa

SEQ ID NO: 2311796 - RNA, 19 nt, Homo sapiens
  misc_RNA (1)...(19): siRNA sense strand
agaaaacacagaagaauca

SEQ ID NO: 2311797 - RNA, 19 nt, Homo sapiens
  misc_RNA (1)...(19): siRNA sense strand
uguccaacauucagggugu

SEQ ID NO: 2311798 - RNA, 19 nt, Homo sapiens
  misc_RNA (1)...(19): siRNA sense strand
ugggaugaucucaagaaau

SEQ ID NO: 2311799 - RNA, 19 nt, Homo sapiens
  misc_RNA (1)...(19): siRNA sense strand
cugcaagcuuccugacgau

SEQ ID NO: 2311800 - RNA, 19 nt, Homo sapiens
  misc_RNA (1)...(19): siRNA sense strand
agaccaaauggcucgaaau

SEQ ID NO: 2311801 - RNA, 19 nt, Homo sapiens
  misc_RNA (1)...(19): siRNA sense strand
uccagaauguguagcaaca

SEQ ID NO: 2311802 - RNA, 19 nt, Homo sapiens
  misc_RNA (1)...(19): siRNA sense strand
ugauaucugaggaagagaa

SEQ ID NO: 2311803 - RNA, 19 nt, Homo sapiens
  misc_RNA (1)...(19): siRNA sense strand
gagaaaacacagaagaauc

SEQ ID NO: 2311804 - RNA, 19 nt, Homo sapiens
  misc_RNA (1)...(19): siRNA sense strand
ggacagaaguuagugguuc

SEQ ID NO: 2311805 - RNA, 19 nt, Homo sapiens
  misc_RNA (1)...(19): siRNA sense strand
uaacaaaugcuaaggguga

SEQ ID NO: 2311806 - RNA, 19 nt, Homo sapiens
  misc_RNA (1)...(19): siRNA sense strand
ggaagaaguucaaggaccu

SEQ ID NO: 2311807 - RNA, 19 nt, Homo sapiens
  misc_RNA (1)...(19): siRNA sense strand
aguucaaggaccuggagua

SEQ ID NO: 2311808 - RNA, 19 nt, Homo sapiens
  misc_RNA (1)...(19): siRNA sense strand
uggagaagacauugcaaaa

SEQ ID NO: 2311809 - RNA, 19 nt, Homo sapiens
  misc_RNA (1)...(19): siRNA sense strand
gaggauuccagcagagaca

SEQ ID NO: 2311810 - RNA, 19 nt, Homo sapiens
  misc_RNA (1)...(19): siRNA sense strand
ggacagucgcuauuggaga

SEQ ID NO: 2311811 - RNA, 19 nt, Homo sapiens
  misc_RNA (1)...(19): siRNA sense strand
cgauacagcugccggagga

SEQ ID NO: 2311812 - RNA, 19 nt, Homo sapiens
  misc_RNA (1)...(19): siRNA sense strand
ggcugauaucugaggaaga

SEQ ID NO: 2311813 - RNA, 19 nt, Homo sapiens
  misc_RNA (1)...(19): siRNA sense strand
cugggaugaucucaagaaa

SEQ ID NO: 2311814 - RNA, 19 nt, Homo sapiens
  misc_RNA (1)...(19): siRNA sense strand
cagaagaaucaguguugga

SEQ ID NO: 2311815 - RNA, 19 nt, Homo sapiens
  misc_RNA (1)...(19): siRNA sense strand
aagagaaaacacagaagaa

SEQ ID NO: 2311816 - RNA, 19 nt, Homo sapiens
  misc_RNA (1)...(19): siRNA sense strand
aggaagauacauugaccau

SEQ ID NO: 2311817 - RNA, 19 nt, Homo sapiens
  misc_RNA (1)...(19): siRNA sense strand
aggaagaccucgaugcugu

SEQ ID NO: 2311818 - RNA, 19 nt, Homo sapiens
  misc_RNA (1)...(19): siRNA sense strand
ccgcuguggagaagacauu

SEQ ID NO: 2311819 - RNA, 19 nt, Homo sapiens
  misc_RNA (1)...(19): siRNA sense strand
caugauccgcuguggagaa

SEQ ID NO: 2311820 - RNA, 19 nt, Homo sapiens
  misc_RNA (1)...(19): siRNA sense strand
ugaaagagggugcucgaga

SEQ ID NO: 2311821 - RNA, 19 nt, Homo sapiens
  misc_RNA (1)...(19): siRNA sense strand
cuaagggugacguggaaga

SEQ ID NO: 2311822 - RNA, 19 nt, Homo sapiens
  misc_RNA (1)...(19): siRNA sense strand
ugcagagggccgaaacaaa

SEQ ID NO: 2311823 - RNA, 19 nt, Homo sapiens
  misc_RNA (1)...(19): siRNA sense strand
agaaaacacagaagaauca

SEQ ID NO: 2311824 - RNA, 19 nt, Homo sapiens
  misc_RNA (1)...(19): siRNA sense strand
uguccaacauucagggugu

SEQ ID NO: 2311825 - RNA, 19 nt, Homo sapiens
  misc_RNA (1)...(19): siRNA sense strand
ugggaugaucucaagaaau

SEQ ID NO: 2311826 - RNA, 19 nt, Homo sapiens
  misc_RNA (1)...(19): siRNA sense strand
cugcaagcuuccugacgau

SEQ ID NO: 2311827 - RNA, 19 nt, Homo sapiens
  misc_RNA (1)...(19): siRNA sense strand
agaccaaauggcucgaaau

SEQ ID NO: 2311828 - RNA, 19 nt, Homo sapiens
  misc_RNA (1)...(19): siRNA sense strand
uccagaauguguagcaaca

SEQ ID NO: 2311829 - RNA, 19 nt, Homo sapiens
  misc_RNA (1)...(19): siRNA sense strand
ugauaucugaggaagagaa

SEQ ID NO: 2311830 - RNA, 19 nt, Homo sapiens
  misc_RNA (1)...(19): siRNA sense strand
gagaaaacacagaagaauc

SEQ ID NO: 2311831 - RNA, 19 nt, Homo sapiens
  misc_RNA (1)...(19): siRNA sense strand
ggacagaaguuagugguuc

SEQ ID NO: 2311832 - RNA, 19 nt, Homo sapiens
  misc_RNA (1)...(19): siRNA sense strand
aaggaaagagauagagcaa

SEQ ID NO: 2311833 - RNA, 19 nt, Homo sapiens
  misc_RNA (1)...(19): siRNA sense strand
ggaaagagauagagcaagg

SEQ ID NO: 2311834 - RNA, 19 nt, Homo sapiens
  misc_RNA (1)...(19): siRNA sense strand
accagaaaggaaagagaua

SEQ ID NO: 2311835 - RNA, 19 nt, Homo sapiens
  misc_RNA (1)...(19): siRNA sense strand
acacaaugaaggugaugau

SEQ ID NO: 2311836 - RNA, 19 nt, Homo sapiens
  misc_RNA (1)...(19): siRNA sense strand
gugaaguuguagauggguu

SEQ ID NO: 2311837 - RNA, 19 nt, Homo sapiens
  misc_RNA (1)...(19): siRNA sense strand
ccauacacaagaagagcuu

SEQ ID NO: 2311838 - RNA, 19 nt, Homo sapiens
  misc_RNA (1)...(19): siRNA sense strand
cuaccagaaaggaaagaga

SEQ ID NO: 2311839 - RNA, 19 nt, Homo sapiens
  misc_RNA (1)...(19): siRNA sense strand
agagauagagcaagggaag

SEQ ID NO: 2311840 - RNA, 19 nt, Homo sapiens
  misc_RNA (1)...(19): siRNA sense strand
aagagauagagcaagggaa

SEQ ID NO: 2311841 - RNA, 19 nt, Homo sapiens
  misc_RNA (1)...(19): siRNA sense strand
gaucugugucaguugggaa

SEQ ID NO: 2311842 - RNA, 19 nt, Homo sapiens
  misc_RNA (1)...(19): siRNA sense strand
uugcaaaugcugaagcuca

SEQ ID NO: 2311843 - RNA, 19 nt, Homo sapiens
  misc_RNA (1)...(19): siRNA sense strand
uugaauaccucuuuggugu

SEQ ID NO: 2311844 - RNA, 19 nt, Homo sapiens
  misc_RNA (1)...(19): siRNA sense strand
gguucaucuauguugcaaa

SEQ ID NO: 2311845 - RNA, 19 nt, Homo sapiens
  misc_RNA (1)...(19): siRNA sense strand
ugcaaaugcugaagcucau

SEQ ID NO: 2311846 - RNA, 19 nt, Homo sapiens
  misc_RNA (1)...(19): siRNA sense strand
aaggaaagagauagagcaa

SEQ ID NO: 2311847 - RNA, 19 nt, Homo sapiens
  misc_RNA (1)...(19): siRNA sense strand
ggaaagagauagagcaagg

SEQ ID NO: 2311848 - RNA, 19 nt, Homo sapiens
  misc_RNA (1)...(19): siRNA sense strand
accagaaaggaaagagaua

SEQ ID NO: 2311849 - RNA, 19 nt, Homo sapiens
  misc_RNA (1)...(19): siRNA sense strand
acacaaugaaggugaugau

SEQ ID NO: 2311850 - RNA, 19 nt, Homo sapiens
  misc_RNA (1)...(19): siRNA sense strand
gugaaguuguagauggguu

SEQ ID NO: 2311851 - RNA, 19 nt, Homo sapiens
  misc_RNA (1)...(19): siRNA sense strand
ccauacacaagaagagcuu

SEQ ID NO: 2311852 - RNA, 19 nt, Homo sapiens
  misc_RNA (1)...(19): siRNA sense strand
cuaccagaaaggaaagaga

SEQ ID NO: 2311853 - RNA, 19 nt, Homo sapiens
  misc_RNA (1)...(19): siRNA sense strand
agagauagagcaagggaag

SEQ ID NO: 2311854 - RNA, 19 nt, Homo sapiens
  misc_RNA (1)...(19): siRNA sense strand
aagagauagagcaagggaa

SEQ ID NO: 2311855 - RNA, 19 nt, Homo sapiens
  misc_RNA (1)...(19): siRNA sense strand
gaucugugucaguugggaa

SEQ ID NO: 2311856 - RNA, 19 nt, Homo sapiens
  misc_RNA (1)...(19): siRNA sense strand
uugcaaaugcugaagcuca

SEQ ID NO: 2311857 - RNA, 19 nt, Homo sapiens
  misc_RNA (1)...(19): siRNA sense strand
uugaauaccucuuuggugu

SEQ ID NO: 2311858 - RNA, 19 nt, Homo sapiens
  misc_RNA (1)...(19): siRNA sense strand
gguucaucuauguugcaaa

SEQ ID NO: 2311859 - RNA, 19 nt, Homo sapiens
  misc_RNA (1)...(19): siRNA sense strand
ugcaaaugcugaagcucau

SEQ ID NO: 2311860 - RNA, 19 nt, Homo sapiens
  misc_RNA (1)...(19): siRNA sense strand
aauuauagccagaggaaau

SEQ ID NO: 2311861 - RNA, 19 nt, Homo sapiens
  misc_RNA (1)...(19): siRNA sense strand
cgggagaugcugaaggaaa

SEQ ID NO: 2311862 - RNA, 19 nt, Homo sapiens
  misc_RNA (1)...(19): siRNA sense strand
gguacaaagaaaagcaaaa

SEQ ID NO: 2311863 - RNA, 19 nt, Homo sapiens
  misc_RNA (1)...(19): siRNA sense strand
gaaggaaauuauagccaga

SEQ ID NO: 2311864 - RNA, 19 nt, Homo sapiens
  misc_RNA (1)...(19): siRNA sense strand
ccucagugaacaugaagaa

SEQ ID NO: 2311865 - RNA, 19 nt, Homo sapiens
  misc_RNA (1)...(19): siRNA sense strand
aauacaaagcccagaccaa

SEQ ID NO: 2311866 - RNA, 19 nt, Homo sapiens
  misc_RNA (1)...(19): siRNA sense strand
gcagaauauaauuggcaga

SEQ ID NO: 2311867 - RNA, 19 nt, Homo sapiens
  misc_RNA (1)...(19): siRNA sense strand
gugucuaaagugagcacaa

SEQ ID NO: 2311868 - RNA, 19 nt, Homo sapiens
  misc_RNA (1)...(19): siRNA sense strand
acgaaauccuaaaguagau

SEQ ID NO: 2311869 - RNA, 19 nt, Homo sapiens
  misc_RNA (1)...(19): siRNA sense strand
ggaaaaucaacaugugcaa

SEQ ID NO: 2311870 - RNA, 19 nt, Homo sapiens
  misc_RNA (1)...(19): siRNA sense strand
caaaugaaauagaagcacu

SEQ ID NO: 2311871 - RNA, 19 nt, Homo sapiens
  misc_RNA (1)...(19): siRNA sense strand
gggccuagaauguguagau

SEQ ID NO: 2311872 - RNA, 19 nt, Homo sapiens
  misc_RNA (1)...(19): siRNA sense strand
cugcauauuuggaagguuc

SEQ ID NO: 2311873 - RNA, 19 nt, Homo sapiens
  misc_RNA (1)...(19): siRNA sense strand
uuaugaagacaguggcuau

SEQ ID NO: 2311874 - RNA, 19 nt, Homo sapiens
  misc_RNA (1)...(19): siRNA sense strand
caguuguacaguaaagcaa

SEQ ID NO: 2311875 - RNA, 19 nt, Homo sapiens
  misc_RNA (1)...(19): siRNA sense strand
gcucaaaccaaguuaucca

SEQ ID NO: 2311876 - RNA, 19 nt, Homo sapiens
  misc_RNA (1)...(19): siRNA sense strand
acgaagugucucuguaauu

SEQ ID NO: 2311877 - RNA, 19 nt, Homo sapiens
  misc_RNA (1)...(19): siRNA sense strand
gccuagaauguguagauau

SEQ ID NO: 2311878 - RNA, 19 nt, Homo sapiens
  misc_RNA (1)...(19): siRNA sense strand
ccuaaaguagaucgggaga

SEQ ID NO: 2311879 - RNA, 19 nt, Homo sapiens
  misc_RNA (1)...(19): siRNA sense strand
gaauuuacgaagauuguga

SEQ ID NO: 2311880 - RNA, 19 nt, Homo sapiens
  misc_RNA (1)...(19): siRNA sense strand
cugcaaacgagaaggcugu

SEQ ID NO: 2311881 - RNA, 19 nt, Homo sapiens
  misc_RNA (1)...(19): siRNA sense strand
ugguaaaaccugaugacau

SEQ ID NO: 2311882 - RNA, 19 nt, Homo sapiens
  misc_RNA (1)...(19): siRNA sense strand
ggagaauuucggugacagu

SEQ ID NO: 2311883 - RNA, 19 nt, Homo sapiens
  misc_RNA (1)...(19): siRNA sense strand
agcacaacuuggaagaaga

SEQ ID NO: 2311884 - RNA, 19 nt, Homo sapiens
  misc_RNA (1)...(19): siRNA sense strand
gauugugagcccuaggauu

SEQ ID NO: 2311885 - RNA, 19 nt, Homo sapiens
  misc_RNA (1)...(19): siRNA sense strand
gugacauggacuuaaucaa

SEQ ID NO: 2311886 - RNA, 19 nt, Homo sapiens
  misc_RNA (1)...(19): siRNA sense strand
guguagauauucucagcga

SEQ ID NO: 2311887 - RNA, 19 nt, Homo sapiens
  misc_RNA (1)...(19): siRNA sense strand
ccugccugguacaaagaaa

SEQ ID NO: 2311888 - RNA, 19 nt, Homo sapiens
  misc_RNA (1)...(19): siRNA sense strand
gcugucauguauuggguca

SEQ ID NO: 2311889 - RNA, 19 nt, Homo sapiens
  misc_RNA (1)...(19): siRNA sense strand
acaaaguggccucagugaa

SEQ ID NO: 2311890 - RNA, 19 nt, Homo sapiens
  misc_RNA (1)...(19): siRNA sense strand
caaccagagaauauguuau

SEQ ID NO: 2311891 - RNA, 19 nt, Homo sapiens
  misc_RNA (1)...(19): siRNA sense strand
aggcuguggauuugauuau

SEQ ID NO: 2311892 - RNA, 19 nt, Homo sapiens
  misc_RNA (1)...(19): siRNA sense strand
cagugaacaugaagaaggu

SEQ ID NO: 2311893 - RNA, 19 nt, Homo sapiens
  misc_RNA (1)...(19): siRNA sense strand
cgccaaaggaaauagcaaa

SEQ ID NO: 2311894 - RNA, 19 nt, Homo sapiens
  misc_RNA (1)...(19): siRNA sense strand
ggucaaggguuguggagag

SEQ ID NO: 2311895 - RNA, 19 nt, Homo sapiens
  misc_RNA (1)...(19): siRNA sense strand
aggcaaggaaaucgaaaga

SEQ ID NO: 2311896 - RNA, 19 nt, Homo sapiens
  misc_RNA (1)...(19): siRNA sense strand
ugauuuaaugcgagaacuu

SEQ ID NO: 2311897 - RNA, 19 nt, Homo sapiens
  misc_RNA (1)...(19): siRNA sense strand
ugccaaaugcacugagaga

SEQ ID NO: 2311898 - RNA, 19 nt, Homo sapiens
  misc_RNA (1)...(19): siRNA sense strand
acuuuauguccaaggguau

SEQ ID NO: 2311899 - RNA, 19 nt, Homo sapiens
  misc_RNA (1)...(19): siRNA sense strand
cugucuauguacugugcua

SEQ ID NO: 2311900 - RNA, 19 nt, Homo sapiens
  misc_RNA (1)...(19): siRNA sense strand
ugaugaacuucucuggcaa

SEQ ID NO: 2311901 - RNA, 19 nt, Homo sapiens
  misc_RNA (1)...(19): siRNA sense strand
gguccauauacaauaagaa

SEQ ID NO: 2311902 - RNA, 19 nt, Homo sapiens
  misc_RNA (1)...(19): siRNA sense strand
agagagcagagcaggagaa

SEQ ID NO: 2311903 - RNA, 19 nt, Homo sapiens
  misc_RNA (1)...(19): siRNA sense strand
ggaugauucgccaaaggaa

SEQ ID NO: 2311904 - RNA, 19 nt, Homo sapiens
  misc_RNA (1)...(19): siRNA sense strand
cuaucuugaugaaaggaga

SEQ ID NO: 2311905 - RNA, 19 nt, Homo sapiens
  misc_RNA (1)...(19): siRNA sense strand
ucgccaaaggaaauagcaa

SEQ ID NO: 2311906 - RNA, 19 nt, Homo sapiens
  misc_RNA (1)...(19): siRNA sense strand
uguauaugcagcuggauga

SEQ ID NO: 2311907 - RNA, 19 nt, Homo sapiens
  misc_RNA (1)...(19): siRNA sense strand
gcuacagugagcaaggcua

SEQ ID NO: 2311908 - RNA, 19 nt, Homo sapiens
  misc_RNA (1)...(19): siRNA sense strand
ccucaugugaagaauaaaa

SEQ ID NO: 2311909 - RNA, 19 nt, Homo sapiens
  misc_RNA (1)...(19): siRNA sense strand
gcucaaaauauuagugaag

SEQ ID NO: 2311910 - RNA, 19 nt, Homo sapiens
  misc_RNA (1)...(19): siRNA sense strand
ggaaaucgaaagaacagga

SEQ ID NO: 2311911 - RNA, 19 nt, Homo sapiens
  misc_RNA (1)...(19): siRNA sense strand
cagaagaguggcuggacau

SEQ ID NO: 2311912 - RNA, 19 nt, Homo sapiens
  misc_RNA (1)...(19): siRNA sense strand
cugcagacgucgcuggaga

SEQ ID NO: 2311913 - RNA, 19 nt, Homo sapiens
  misc_RNA (1)...(19): siRNA sense strand
aggugaagugucugaacaa

SEQ ID NO: 2311914 - RNA, 19 nt, Homo sapiens
  misc_RNA (1)...(19): siRNA sense strand
cguucgaggaggaggcaca

SEQ ID NO: 2311915 - RNA, 19 nt, Homo sapiens
  misc_RNA (1)...(19): siRNA sense strand
aguugaaggugaagugucu

SEQ ID NO: 2311916 - RNA, 19 nt, Homo sapiens
  misc_RNA (1)...(19): siRNA sense strand
gggaguacagugaggccau

SEQ ID NO: 2311917 - RNA, 19 nt, Homo sapiens
  misc_RNA (1)...(19): siRNA sense strand
gggcuguugaggaagaaga

SEQ ID NO: 2311918 - RNA, 19 nt, Homo sapiens
  misc_RNA (1)...(19): siRNA sense strand
cagacaacaucaaggcucu

SEQ ID NO: 2311919 - RNA, 19 nt, Homo sapiens
  misc_RNA (1)...(19): siRNA sense strand
acaugacguucgaggagga

SEQ ID NO: 2311920 - RNA, 19 nt, Homo sapiens
  misc_RNA (1)...(19): siRNA sense strand
cagaagaagcugacccuga

SEQ ID NO: 2311921 - RNA, 19 nt, Homo sapiens
  misc_RNA (1)...(19): siRNA sense strand
uggaagagaaggacagcga

SEQ ID NO: 2311922 - RNA, 19 nt, Homo sapiens
  misc_RNA (1)...(19): siRNA sense strand
gggcuggaagagaaggaca

SEQ ID NO: 2311923 - RNA, 19 nt, Homo sapiens
  misc_RNA (1)...(19): siRNA sense strand
ccuacuacagggagaaguu

SEQ ID NO: 2311924 - RNA, 19 nt, Homo sapiens
  misc_RNA (1)...(19): siRNA sense strand
ccuucuacaacaagagcaa

SEQ ID NO: 2311925 - RNA, 19 nt, Homo sapiens
  misc_RNA (1)...(19): siRNA sense strand
cgcaggaggagcugaugaa

SEQ ID NO: 2311926 - RNA, 19 nt, Homo sapiens
  misc_RNA (1)...(19): siRNA sense strand
gggcagaacucacugaccu

SEQ ID NO: 2311927 - RNA, 19 nt, Homo sapiens
  misc_RNA (1)...(19): siRNA sense strand
ccuucuacaacaagagcaa

SEQ ID NO: 2311928 - RNA, 19 nt, Homo sapiens
  misc_RNA (1)...(19): siRNA sense strand
cgcaggaggagcugaugaa

SEQ ID NO: 2311929 - RNA, 19 nt, Homo sapiens
  misc_RNA (1)...(19): siRNA sense strand
gggcagaacucacugaccu

SEQ ID NO: 2311930 - RNA, 19 nt, Homo sapiens
  misc_RNA (1)...(19): siRNA sense strand
cagacacagacgaggacaa

SEQ ID NO: 2311931 - RNA, 19 nt, Homo sapiens
  misc_RNA (1)...(19): siRNA sense strand
guuuaaaagaaccaggaaa

SEQ ID NO: 2311932 - RNA, 19 nt, Homo sapiens
  misc_RNA (1)...(19): siRNA sense strand
cuacagacacagacgagga

SEQ ID NO: 2311933 - RNA, 19 nt, Homo sapiens
  misc_RNA (1)...(19): siRNA sense strand
cagacacagacgaggacaa

SEQ ID NO: 2311934 - RNA, 19 nt, Homo sapiens
  misc_RNA (1)...(19): siRNA sense strand
cgguauugcuggggaggua

SEQ ID NO: 2311935 - RNA, 19 nt, Homo sapiens
  misc_RNA (1)...(19): siRNA sense strand
cuacagacacagacgagga

SEQ ID NO: 2311936 - RNA, 19 nt, Homo sapiens
  misc_RNA (1)...(19): siRNA sense strand
caaacgucgcaaagcagaa

SEQ ID NO: 2311937 - RNA, 19 nt, Homo sapiens
  misc_RNA (1)...(19): siRNA sense strand
cagacacagacgaggacaa

SEQ ID NO: 2311938 - RNA, 19 nt, Homo sapiens
  misc_RNA (1)...(19): siRNA sense strand
guuuaaaagaaccaggaaa

SEQ ID NO: 2311939 - RNA, 19 nt, Homo sapiens
  misc_RNA (1)...(19): siRNA sense strand
cgguauugcuggggaggua

SEQ ID NO: 2311940 - RNA, 19 nt, Homo sapiens
  misc_RNA (1)...(19): siRNA sense strand
cuacagacacagacgagga

SEQ ID NO: 2311941 - RNA, 19 nt, Homo sapiens
  misc_RNA (1)...(19): siRNA sense strand
caaacgucgcaaagcagaa

SEQ ID NO: 2311942 - RNA, 19 nt, Homo sapiens
  misc_RNA (1)...(19): siRNA sense strand
cagacacagacgaggacaa

SEQ ID NO: 2311943 - RNA, 19 nt, Homo sapiens
  misc_RNA (1)...(19): siRNA sense strand
guuuaaaagaaccaggaaa

SEQ ID NO: 2311944 - RNA, 19 nt, Homo sapiens
  misc_RNA (1)...(19): siRNA sense strand
cuacagacacagacgagga

SEQ ID NO: 2311945 - RNA, 19 nt, Homo sapiens
  misc_RNA (1)...(19): siRNA sense strand
cagacacagacgaggacaa

SEQ ID NO: 2311946 - RNA, 19 nt, Homo sapiens
  misc_RNA (1)...(19): siRNA sense strand
guuuaaaagaaccaggaaa

SEQ ID NO: 2311947 - RNA, 19 nt, Homo sapiens
  misc_RNA (1)...(19): siRNA sense strand
cgguauugcuggggaggua

SEQ ID NO: 2311948 - RNA, 19 nt, Homo sapiens
  misc_RNA (1)...(19): siRNA sense strand
cuacagacacagacgagga

SEQ ID NO: 2311949 - RNA, 19 nt, Homo sapiens
  misc_RNA (1)...(19): siRNA sense strand
caaacgucgcaaagcagaa

SEQ ID NO: 2311950 - RNA, 19 nt, Homo sapiens
  misc_RNA (1)...(19): siRNA sense strand
cagacacagacgaggacaa

SEQ ID NO: 2311951 - RNA, 19 nt, Homo sapiens
  misc_RNA (1)...(19): siRNA sense strand
guuuaaaagaaccaggaaa

SEQ ID NO: 2311952 - RNA, 19 nt, Homo sapiens
  misc_RNA (1)...(19): siRNA sense strand
cgguauugcuggggaggua

SEQ ID NO: 2311953 - RNA, 19 nt, Homo sapiens
  misc_RNA (1)...(19): siRNA sense strand
cuacagacacagacgagga

SEQ ID NO: 2311954 - RNA, 19 nt, Homo sapiens
  misc_RNA (1)...(19): siRNA sense strand
caaacgucgcaaagcagaa

SEQ ID NO: 2311955 - RNA, 19 nt, Homo sapiens
  misc_RNA (1)...(19): siRNA sense strand
uggaaauggcagugaacaa

SEQ ID NO: 2311956 - RNA, 19 nt, Homo sapiens
  misc_RNA (1)...(19): siRNA sense strand
ggaagaugaaggugggcaa

SEQ ID NO: 2311957 - RNA, 19 nt, Homo sapiens
  misc_RNA (1)...(19): siRNA sense strand
ugguagaagaggugcggaa

SEQ ID NO: 2311958 - RNA, 19 nt, Homo sapiens
  misc_RNA (1)...(19): siRNA sense strand
cuucaacaaaggagagaau

SEQ ID NO: 2311959 - RNA, 19 nt, Homo sapiens
  misc_RNA (1)...(19): siRNA sense strand
uggcaaagaucuaggagag

SEQ ID NO: 2311960 - RNA, 19 nt, Homo sapiens
  misc_RNA (1)...(19): siRNA sense strand
cagaagaaggagacagcca

SEQ ID NO: 2311961 - RNA, 19 nt, Homo sapiens
  misc_RNA (1)...(19): siRNA sense strand
ggcugaucgcugagggcaa

SEQ ID NO: 2311962 - RNA, 19 nt, Homo sapiens
  misc_RNA (1)...(19): siRNA sense strand
gggauucagaagaaggaga

SEQ ID NO: 2311963 - RNA, 19 nt, Homo sapiens
  misc_RNA (1)...(19): siRNA sense strand
ggagagugguagaagaggu

SEQ ID NO: 2311964 - RNA, 19 nt, Homo sapiens
  misc_RNA (1)...(19): siRNA sense strand
gugugauggccuggaguua

SEQ ID NO: 2311965 - RNA, 19 nt, Homo sapiens
  misc_RNA (1)...(19): siRNA sense strand
aggagacagccaagaucaa

SEQ ID NO: 2311966 - RNA, 19 nt, Homo sapiens
  misc_RNA (1)...(19): siRNA sense strand
uggcaaaauaccaggcuuu

SEQ ID NO: 2311967 - RNA, 19 nt, Homo sapiens
  misc_RNA (1)...(19): siRNA sense strand
agaagaaggagacagccaa

SEQ ID NO: 2311968 - RNA, 19 nt, Homo sapiens
  misc_RNA (1)...(19): siRNA sense strand
cauucacggagauaagaaa

SEQ ID NO: 2311969 - RNA, 19 nt, Homo sapiens
  misc_RNA (1)...(19): siRNA sense strand
cugaaggcaucaaagggau

SEQ ID NO: 2311970 - RNA, 19 nt, Homo sapiens
  misc_RNA (1)...(19): siRNA sense strand
acucauccucuuugggaau

SEQ ID NO: 2311971 - RNA, 19 nt, Homo sapiens
  misc_RNA (1)...(19): siRNA sense strand
aagugaaggagcuguguga

SEQ ID NO: 2311972 - RNA, 19 nt, Homo sapiens
  misc_RNA (1)...(19): siRNA sense strand
ugguggaggaagugaagga

SEQ ID NO: 2311973 - RNA, 19 nt, Homo sapiens
  misc_RNA (1)...(19): siRNA sense strand
ugacagaggcagagcuggu

SEQ ID NO: 2311974 - RNA, 19 nt, Homo sapiens
  misc_RNA (1)...(19): siRNA sense strand
uggaggaagugaaggagcu

SEQ ID NO: 2311975 - RNA, 19 nt, Homo sapiens
  misc_RNA (1)...(19): siRNA sense strand
uggaaauggcagugaacaa

SEQ ID NO: 2311976 - RNA, 19 nt, Homo sapiens
  misc_RNA (1)...(19): siRNA sense strand
cagaagaaggagacagcca

SEQ ID NO: 2311977 - RNA, 19 nt, Homo sapiens
  misc_RNA (1)...(19): siRNA sense strand
ggcugaucgcugagggcaa

SEQ ID NO: 2311978 - RNA, 19 nt, Homo sapiens
  misc_RNA (1)...(19): siRNA sense strand
gggauucagaagaaggaga

SEQ ID NO: 2311979 - RNA, 19 nt, Homo sapiens
  misc_RNA (1)...(19): siRNA sense strand
gugugauggccuggaguua

SEQ ID NO: 2311980 - RNA, 19 nt, Homo sapiens
  misc_RNA (1)...(19): siRNA sense strand
aggagacagccaagaucaa

SEQ ID NO: 2311981 - RNA, 19 nt, Homo sapiens
  misc_RNA (1)...(19): siRNA sense strand
uggcaaaauaccaggcuuu

SEQ ID NO: 2311982 - RNA, 19 nt, Homo sapiens
  misc_RNA (1)...(19): siRNA sense strand
agaagaaggagacagccaa

SEQ ID NO: 2311983 - RNA, 19 nt, Homo sapiens
  misc_RNA (1)...(19): siRNA sense strand
cauucacggagauaagaaa

SEQ ID NO: 2311984 - RNA, 19 nt, Homo sapiens
  misc_RNA (1)...(19): siRNA sense strand
cugaaggcaucaaagggau

SEQ ID NO: 2311985 - RNA, 19 nt, Homo sapiens
  misc_RNA (1)...(19): siRNA sense strand
acucauccucuuugggaau

SEQ ID NO: 2311986 - RNA, 19 nt, Homo sapiens
  misc_RNA (1)...(19): siRNA sense strand
aagugaaggagcuguguga

SEQ ID NO: 2311987 - RNA, 19 nt, Homo sapiens
  misc_RNA (1)...(19): siRNA sense strand
ugguggaggaagugaagga

SEQ ID NO: 2311988 - RNA, 19 nt, Homo sapiens
  misc_RNA (1)...(19): siRNA sense strand
ugacagaggcagagcuggu

SEQ ID NO: 2311989 - RNA, 19 nt, Homo sapiens
  misc_RNA (1)...(19): siRNA sense strand
uggaggaagugaaggagcu

SEQ ID NO: 2311990 - RNA, 19 nt, Homo sapiens
  misc_RNA (1)...(19): siRNA sense strand
aagagagagaagagaggaa

SEQ ID NO: 2311991 - RNA, 19 nt, Homo sapiens
  misc_RNA (1)...(19): siRNA sense strand
cagacaaguuagaaagacu

SEQ ID NO: 2311992 - RNA, 19 nt, Homo sapiens
  misc_RNA (1)...(19): siRNA sense strand
gaucaguacaucuggguga

SEQ ID NO: 2311993 - RNA, 19 nt, Homo sapiens
  misc_RNA (1)...(19): siRNA sense strand
aagacagacaaguuagaaa

SEQ ID NO: 2311994 - RNA, 19 nt, Homo sapiens
  misc_RNA (1)...(19): siRNA sense strand
gugaauucuggaaagguaa

SEQ ID NO: 2311995 - RNA, 19 nt, Homo sapiens
  misc_RNA (1)...(19): siRNA sense strand
uggaaaaggcagugagacu

SEQ ID NO: 2311996 - RNA, 19 nt, Homo sapiens
  misc_RNA (1)...(19): siRNA sense strand
uuagaaagacugaugguca

SEQ ID NO: 2311997 - RNA, 19 nt, Homo sapiens
  misc_RNA (1)...(19): siRNA sense strand
ugucuuuguuggugggcau

SEQ ID NO: 2311998 - RNA, 19 nt, Homo sapiens
  misc_RNA (1)...(19): siRNA sense strand
ccaucauauuucucaguau

SEQ ID NO: 2311999 - RNA, 19 nt, Homo sapiens
  misc_RNA (1)...(19): siRNA sense strand
agaggaaaugguuggguga

SEQ ID NO: 2312000 - RNA, 19 nt, Homo sapiens
  misc_RNA (1)...(19): siRNA sense strand
gcuugugcuauguuggaaa

SEQ ID NO: 2312001 - RNA, 19 nt, Homo sapiens
  misc_RNA (1)...(19): siRNA sense strand
acuucaggcauguggauuu

SEQ ID NO: 2312002 - RNA, 19 nt, Homo sapiens
  misc_RNA (1)...(19): siRNA sense strand
gggcaucacuucaggcaug

SEQ ID NO: 2312003 - RNA, 19 nt, Homo sapiens
  misc_RNA (1)...(19): siRNA sense strand
agguaaagagagagaagag

SEQ ID NO: 2312004 - RNA, 19 nt, Homo sapiens
  misc_RNA (1)...(19): siRNA sense strand
caaugugcacagagaagau

SEQ ID NO: 2312005 - RNA, 19 nt, Homo sapiens
  misc_RNA (1)...(19): siRNA sense strand
acuuaagaacacaggaugu

SEQ ID NO: 2312006 - RNA, 19 nt, Homo sapiens
  misc_RNA (1)...(19): siRNA sense strand
cagaugaacugacuggcuu

SEQ ID NO: 2312007 - RNA, 19 nt, Homo sapiens
  misc_RNA (1)...(19): siRNA sense strand
agucaagagacgcugugaa

SEQ ID NO: 2312008 - RNA, 19 nt, Homo sapiens
  misc_RNA (1)...(19): siRNA sense strand
gugaugaagaggugcccuu

SEQ ID NO: 2312009 - RNA, 19 nt, Homo sapiens
  misc_RNA (1)...(19): siRNA sense strand
cugcagguuugguggccuu

SEQ ID NO: 2312010 - RNA, 19 nt, Homo sapiens
  misc_RNA (1)...(19): siRNA sense strand
ggccgaagccugaagcuga

SEQ ID NO: 2312011 - RNA, 19 nt, Homo sapiens
  misc_RNA (1)...(19): siRNA sense strand
agaucgaccuaucggccua

SEQ ID NO: 2312012 - RNA, 19 nt, Homo sapiens
  misc_RNA (1)...(19): siRNA sense strand
cugaaaugauugggccuau

SEQ ID NO: 2312013 - RNA, 19 nt, Homo sapiens
  misc_RNA (1)...(19): siRNA sense strand
cgccaaauccagaggaggu

SEQ ID NO: 2312014 - RNA, 19 nt, Homo sapiens
  misc_RNA (1)...(19): siRNA sense strand
aggagauggacccgccaaa

SEQ ID NO: 2312015 - RNA, 19 nt, Homo sapiens
  misc_RNA (1)...(19): siRNA sense strand
caggaaugcagaugggaca

SEQ ID NO: 2312016 - RNA, 19 nt, Homo sapiens
  misc_RNA (1)...(19): siRNA sense strand
gguuauagguugaguccuc

SEQ ID NO: 2312017 - RNA, 19 nt, Homo sapiens
  misc_RNA (1)...(19): siRNA sense strand
uggaaguggcacaguagaa

SEQ ID NO: 2312018 - RNA, 19 nt, Homo sapiens
  misc_RNA (1)...(19): siRNA sense strand
gcgucaagccauuggucuu

SEQ ID NO: 2312019 - RNA, 19 nt, Homo sapiens
  misc_RNA (1)...(19): siRNA sense strand
cguuauagcaagaauggca

SEQ ID NO: 2312020 - RNA, 19 nt, Homo sapiens
  misc_RNA (1)...(19): siRNA sense strand
ggauagagaucacacagga

SEQ ID NO: 2312021 - RNA, 19 nt, Homo sapiens
  misc_RNA (1)...(19): siRNA sense strand
ucaagauggaaguggcaca

SEQ ID NO: 2312022 - RNA, 19 nt, Homo sapiens
  misc_RNA (1)...(19): siRNA sense strand
acggaggaggguuuggaaa

SEQ ID NO: 2312023 - RNA, 19 nt, Homo sapiens
  misc_RNA (1)...(19): siRNA sense strand
augauugccauguuggaua

SEQ ID NO: 2312024 - RNA, 19 nt, Homo sapiens
  misc_RNA (1)...(19): siRNA sense strand
gaucaagauggaaguggca

SEQ ID NO: 2312025 - RNA, 19 nt, Homo sapiens
  misc_RNA (1)...(19): siRNA sense strand
caaucaagcuccuggccaa

SEQ ID NO: 2312026 - RNA, 19 nt, Homo sapiens
  misc_RNA (1)...(19): siRNA sense strand
cugacaagaaugagcgaau

SEQ ID NO: 2312027 - RNA, 19 nt, Homo sapiens
  misc_RNA (1)...(19): siRNA sense strand
ccucaagaucaaugucaaa

SEQ ID NO: 2312028 - RNA, 19 nt, Homo sapiens
  misc_RNA (1)...(19): siRNA sense strand
gggaagggaaggaucgaau

SEQ ID NO: 2312029 - RNA, 19 nt, Homo sapiens
  misc_RNA (1)...(19): siRNA sense strand
cgguguaugcugaggugaa

SEQ ID NO: 2312030 - RNA, 19 nt, Homo sapiens
  misc_RNA (1)...(19): siRNA sense strand
aggugaagaacguggucaa

SEQ ID NO: 2312031 - RNA, 19 nt, Homo sapiens
  misc_RNA (1)...(19): siRNA sense strand
ccaauuacuuugaggugga

SEQ ID NO: 2312032 - RNA, 19 nt, Homo sapiens
  misc_RNA (1)...(19): siRNA sense strand
accgggaagugguggaaua

SEQ ID NO: 2312033 - RNA, 19 nt, Homo sapiens
  misc_RNA (1)...(19): siRNA sense strand
gcacaguauuucaagcaga

SEQ ID NO: 2312034 - RNA, 19 nt, Homo sapiens
  misc_RNA (1)...(19): siRNA sense strand
ggagauacacucuugggaa

SEQ ID NO: 2312035 - RNA, 19 nt, Homo sapiens
  misc_RNA (1)...(19): siRNA sense strand
aggcacagccagugauuga

SEQ ID NO: 2312036 - RNA, 19 nt, Homo sapiens
  misc_RNA (1)...(19): siRNA sense strand
gaaacgugucggagauaca

SEQ ID NO: 2312037 - RNA, 19 nt, Homo sapiens
  misc_RNA (1)...(19): siRNA sense strand
cuuauauuguggugcagaa

SEQ ID NO: 2312038 - RNA, 19 nt, Homo sapiens
  misc_RNA (1)...(19): siRNA sense strand
ccaaggagaucaagggccu

SEQ ID NO: 2312039 - RNA, 19 nt, Homo sapiens
  misc_RNA (1)...(19): siRNA sense strand
cagacagacaggaggagau

SEQ ID NO: 2312040 - RNA, 19 nt, Homo sapiens
  misc_RNA (1)...(19): siRNA sense strand
ucacagaccagcugcggaa

SEQ ID NO: 2312041 - RNA, 19 nt, Homo sapiens
  misc_RNA (1)...(19): siRNA sense strand
gaucgaaucuuuaaggucu

SEQ ID NO: 2312042 - RNA, 19 nt, Homo sapiens
  misc_RNA (1)...(19): siRNA sense strand
gcuacaacuuagaucccua

SEQ ID NO: 2312043 - RNA, 19 nt, Homo sapiens
  misc_RNA (1)...(19): siRNA sense strand
cagacagcguggagccuau

SEQ ID NO: 2312044 - RNA, 19 nt, Homo sapiens
  misc_RNA (1)...(19): siRNA sense strand
acauagaugagcagcccaa

SEQ ID NO: 2312045 - RNA, 19 nt, Homo sapiens
  misc_RNA (1)...(19): siRNA sense strand
ccguagagucaaccgggaa

SEQ ID NO: 2312046 - RNA, 19 nt, Homo sapiens
  misc_RNA (1)...(19): siRNA sense strand
aggugaaacgugucggaga

SEQ ID NO: 2312047 - RNA, 19 nt, Homo sapiens
  misc_RNA (1)...(19): siRNA sense strand
uguaugauggaaagaagaa

SEQ ID NO: 2312048 - RNA, 19 nt, Homo sapiens
  misc_RNA (1)...(19): siRNA sense strand
uguggaagaugaugcucaa

SEQ ID NO: 2312049 - RNA, 19 nt, Homo sapiens
  misc_RNA (1)...(19): siRNA sense strand
ugaugaagaaugccagcua

SEQ ID NO: 2312050 - RNA, 19 nt, Homo sapiens
  misc_RNA (1)...(19): siRNA sense strand
uguccuacauggugcguga

SEQ ID NO: 2312051 - RNA, 19 nt, Homo sapiens
  misc_RNA (1)...(19): siRNA sense strand
acuaugagcuacuggccau

SEQ ID NO: 2312052 - RNA, 19 nt, Homo sapiens
  misc_RNA (1)...(19): siRNA sense strand
agaaugagcgaauugggaa

SEQ ID NO: 2312053 - RNA, 19 nt, Homo sapiens
  misc_RNA (1)...(19): siRNA sense strand
augauaaaggccacagcua

SEQ ID NO: 2312054 - RNA, 19 nt, Homo sapiens
  misc_RNA (1)...(19): siRNA sense strand
agaucgacguguaccacua

SEQ ID NO: 2312055 - RNA, 19 nt, Homo sapiens
  misc_RNA (1)...(19): siRNA sense strand
gugcuggacaucaggaaca

SEQ ID NO: 2312056 - RNA, 19 nt, Homo sapiens
  misc_RNA (1)...(19): siRNA sense strand
cagcagugguaggcaguau

SEQ ID NO: 2312057 - RNA, 19 nt, Homo sapiens
  misc_RNA (1)...(19): siRNA sense strand
gguacagcgaccacggcaa

SEQ ID NO: 2312058 - RNA, 19 nt, Homo sapiens
  misc_RNA (1)...(19): siRNA sense strand
agaccucgaccaugauaaa

SEQ ID NO: 2312059 - RNA, 19 nt, Homo sapiens
  misc_RNA (1)...(19): siRNA sense strand
ugugugaggugcuggacau

SEQ ID NO: 2312060 - RNA, 19 nt, Homo sapiens
  misc_RNA (1)...(19): siRNA sense strand
gccucaagaucaaugucaa

SEQ ID NO: 2312061 - RNA, 19 nt, Homo sapiens
  misc_RNA (1)...(19): siRNA sense strand
ucuuuaaggucuccaucaa

SEQ ID NO: 2312062 - RNA, 19 nt, Homo sapiens
  misc_RNA (1)...(19): siRNA sense strand
ccuagaggucuguaacauu

SEQ ID NO: 2312063 - RNA, 19 nt, Homo sapiens
  misc_RNA (1)...(19): siRNA sense strand
acucagggcugcagcucau

SEQ ID NO: 2312064 - RNA, 19 nt, Homo sapiens
  misc_RNA (1)...(19): siRNA sense strand
guguaugauggaaagaaga

SEQ ID NO: 2312065 - RNA, 19 nt, Homo sapiens
  misc_RNA (1)...(19): siRNA sense strand
gcuggagaguggacagacu

SEQ ID NO: 2312066 - RNA, 19 nt, Homo sapiens
  misc_RNA (1)...(19): siRNA sense strand
ucaaagugaaggaugacau

SEQ ID NO: 2312067 - RNA, 19 nt, Homo sapiens
  misc_RNA (1)...(19): siRNA sense strand
gugaaacgugucggagaua

SEQ ID NO: 2312068 - RNA, 19 nt, Homo sapiens
  misc_RNA (1)...(19): siRNA sense strand
agugugugcaggugaagaa

SEQ ID NO: 2312069 - RNA, 19 nt, Homo sapiens
  misc_RNA (1)...(19): siRNA sense strand
gcaucaucuucuaccgaga

SEQ ID NO: 2312070 - RNA, 19 nt, Homo sapiens
  misc_RNA (1)...(19): siRNA sense strand
gucgagaagaggugcucaa

SEQ ID NO: 2312071 - RNA, 19 nt, Homo sapiens
  misc_RNA (1)...(19): siRNA sense strand
ccuuacagcuggagagugg

SEQ ID NO: 2312072 - RNA, 19 nt, Homo sapiens
  misc_RNA (1)...(19): siRNA sense strand
aaauauaaccuucagcuca

SEQ ID NO: 2312073 - RNA, 19 nt, Homo sapiens
  misc_RNA (1)...(19): siRNA sense strand
gugcagguucaccaggaua

SEQ ID NO: 2312074 - RNA, 19 nt, Homo sapiens
  misc_RNA (1)...(19): siRNA sense strand
agaugaagcaggaggagca

SEQ ID NO: 2312075 - RNA, 19 nt, Homo sapiens
  misc_RNA (1)...(19): siRNA sense strand
uggcauacucggacagaga

SEQ ID NO: 2312076 - RNA, 19 nt, Homo sapiens
  misc_RNA (1)...(19): siRNA sense strand
aggcagagcugguacgacu

SEQ ID NO: 2312077 - RNA, 19 nt, Homo sapiens
  misc_RNA (1)...(19): siRNA sense strand
gggagcuguuugaggagau

SEQ ID NO: 2312078 - RNA, 19 nt, Homo sapiens
  misc_RNA (1)...(19): siRNA sense strand
agauaagcccaaugcccaa

SEQ ID NO: 2312079 - RNA, 19 nt, Homo sapiens
  misc_RNA (1)...(19): siRNA sense strand
ggaacaaggcccuggacug

SEQ ID NO: 2312080 - RNA, 19 nt, Homo sapiens
  misc_RNA (1)...(19): siRNA sense strand
ccaagaugaagcaggagga

SEQ ID NO: 2312081 - RNA, 19 nt, Homo sapiens
  misc_RNA (1)...(19): siRNA sense strand
ccaucgaggaagugaagaa

SEQ ID NO: 2312082 - RNA, 19 nt, Homo sapiens
  misc_RNA (1)...(19): siRNA sense strand
gcaccaugucugugggcau

SEQ ID NO: 2312083 - RNA, 19 nt, Homo sapiens
  misc_RNA (1)...(19): siRNA sense strand
cggcagacugugaggugga

SEQ ID NO: 2312084 - RNA, 19 nt, Homo sapiens
  misc_RNA (1)...(19): siRNA sense strand
ucuccgaccacguggacaa

SEQ ID NO: 2312085 - RNA, 19 nt, Homo sapiens
  misc_RNA (1)...(19): siRNA sense strand
ccaaggagcuagagcgagg

SEQ ID NO: 2312086 - RNA, 19 nt, Homo sapiens
  misc_RNA (1)...(19): siRNA sense strand
uggcuuuggaugaaaucaa

SEQ ID NO: 2312087 - RNA, 19 nt, Homo sapiens
  misc_RNA (1)...(19): siRNA sense strand
gcaacaagcucaugcacca

SEQ ID NO: 2312088 - RNA, 19 nt, Homo sapiens
  misc_RNA (1)...(19): siRNA sense strand
ggugaucgccuaugggcaa

SEQ ID NO: 2312089 - RNA, 19 nt, Homo sapiens
  misc_RNA (1)...(19): siRNA sense strand
aguccuggagcaagggaaa

SEQ ID NO: 2312090 - RNA, 19 nt, Homo sapiens
  misc_RNA (1)...(19): siRNA sense strand
uuuaccagcuggagggaga

SEQ ID NO: 2312091 - RNA, 19 nt, Homo sapiens
  misc_RNA (1)...(19): siRNA sense strand
cauucggcagggagagaua

SEQ ID NO: 2312092 - RNA, 19 nt, Homo sapiens
  misc_RNA (1)...(19): siRNA sense strand
gcagcgaaggccugagaca

SEQ ID NO: 2312093 - RNA, 19 nt, Homo sapiens
  misc_RNA (1)...(19): siRNA sense strand
ccuaugagacccaggugau

SEQ ID NO: 2312094 - RNA, 19 nt, Homo sapiens
  misc_RNA (1)...(19): siRNA sense strand
agcgaaggccugagacaga

SEQ ID NO: 2312095 - RNA, 19 nt, Homo sapiens
  misc_RNA (1)...(19): siRNA sense strand
caagaagauugcugggaca

SEQ ID NO: 2312096 - RNA, 19 nt, Homo sapiens
  misc_RNA (1)...(19): siRNA sense strand
cggcaugaguggaggugga

SEQ ID NO: 2312097 - RNA, 19 nt, Homo sapiens
  misc_RNA (1)...(19): siRNA sense strand
agaaaaugcucuggggaaa

SEQ ID NO: 2312098 - RNA, 19 nt, Homo sapiens
  misc_RNA (1)...(19): siRNA sense strand
ggauaaucagggaggcuau

SEQ ID NO: 2312099 - RNA, 19 nt, Homo sapiens
  misc_RNA (1)...(19): siRNA sense strand
aggaaauaguucaguucuu

SEQ ID NO: 2312100 - RNA, 19 nt, Homo sapiens
  misc_RNA (1)...(19): siRNA sense strand
gaacaauuacaguggagga

SEQ ID NO: 2312101 - RNA, 19 nt, Homo sapiens
  misc_RNA (1)...(19): siRNA sense strand
ggaccauaugauagaccaa

SEQ ID NO: 2312102 - RNA, 19 nt, Homo sapiens
  misc_RNA (1)...(19): siRNA sense strand
caggagaagcagauguaga

SEQ ID NO: 2312103 - RNA, 19 nt, Homo sapiens
  misc_RNA (1)...(19): siRNA sense strand
cuucaaaggagauagcaga

SEQ ID NO: 2312104 - RNA, 19 nt, Homo sapiens
  misc_RNA (1)...(19): siRNA sense strand
ugauagaccaauaggagga

SEQ ID NO: 2312105 - RNA, 19 nt, Homo sapiens
  misc_RNA (1)...(19): siRNA sense strand
ugacagaaugagagaugga

SEQ ID NO: 2312106 - RNA, 19 nt, Homo sapiens
  misc_RNA (1)...(19): siRNA sense strand
cugccaugucuaaagauaa

SEQ ID NO: 2312107 - RNA, 19 nt, Homo sapiens
  misc_RNA (1)...(19): siRNA sense strand
aaucgugccaaaugggaua

SEQ ID NO: 2312108 - RNA, 19 nt, Homo sapiens
  misc_RNA (1)...(19): siRNA sense strand
gaagaaugggaauggggaa

SEQ ID NO: 2312109 - RNA, 19 nt, Homo sapiens
  misc_RNA (1)...(19): siRNA sense strand
uggaagagguaugggagga

SEQ ID NO: 2312110 - RNA, 19 nt, Homo sapiens
  misc_RNA (1)...(19): siRNA sense strand
uauuggagcugauggcaga

SEQ ID NO: 2312111 - RNA, 19 nt, Homo sapiens
  misc_RNA (1)...(19): siRNA sense strand
ugguggagcuggugaugca

SEQ ID NO: 2312112 - RNA, 19 nt, Homo sapiens
  misc_RNA (1)...(19): siRNA sense strand
agauguagaguuugugaca

SEQ ID NO: 2312113 - RNA, 19 nt, Homo sapiens
  misc_RNA (1)...(19): siRNA sense strand
gaguggagguggauggcgu

SEQ ID NO: 2312114 - RNA, 19 nt, Homo sapiens
  misc_RNA (1)...(19): siRNA sense strand
gagagauggaagagguaug

SEQ ID NO: 2312115 - RNA, 19 nt, Homo sapiens
  misc_RNA (1)...(19): siRNA sense strand
auaacaugcaacaucgaua

SEQ ID NO: 2312116 - RNA, 19 nt, Homo sapiens
  misc_RNA (1)...(19): siRNA sense strand
gugccaaaugggauaacau

SEQ ID NO: 2312117 - RNA, 19 nt, Homo sapiens
  misc_RNA (1)...(19): siRNA sense strand
augagagauggaagaggua

SEQ ID NO: 2312118 - RNA, 19 nt, Homo sapiens
  misc_RNA (1)...(19): siRNA sense strand
gcuacggaagagauggaau

SEQ ID NO: 2312119 - RNA, 19 nt, Homo sapiens
  misc_RNA (1)...(19): siRNA sense strand
uggaauggauaaucaggga

SEQ ID NO: 2312120 - RNA, 19 nt, Homo sapiens
  misc_RNA (1)...(19): siRNA sense strand
aggcaguggagguuacuau

SEQ ID NO: 2312121 - RNA, 19 nt, Homo sapiens
  misc_RNA (1)...(19): siRNA sense strand
ugacgcuagugaugggaca

SEQ ID NO: 2312122 - RNA, 19 nt, Homo sapiens
  misc_RNA (1)...(19): siRNA sense strand
caagaagauugcugggaca

SEQ ID NO: 2312123 - RNA, 19 nt, Homo sapiens
  misc_RNA (1)...(19): siRNA sense strand
cggcaugaguggaggugga

SEQ ID NO: 2312124 - RNA, 19 nt, Homo sapiens
  misc_RNA (1)...(19): siRNA sense strand
agaaaaugcucuggggaaa

SEQ ID NO: 2312125 - RNA, 19 nt, Homo sapiens
  misc_RNA (1)...(19): siRNA sense strand
ggauaaucagggaggcuau

SEQ ID NO: 2312126 - RNA, 19 nt, Homo sapiens
  misc_RNA (1)...(19): siRNA sense strand
aggaaauaguucaguucuu

SEQ ID NO: 2312127 - RNA, 19 nt, Homo sapiens
  misc_RNA (1)...(19): siRNA sense strand
gaacaauuacaguggagga

SEQ ID NO: 2312128 - RNA, 19 nt, Homo sapiens
  misc_RNA (1)...(19): siRNA sense strand
ggaccauaugauagaccaa

SEQ ID NO: 2312129 - RNA, 19 nt, Homo sapiens
  misc_RNA (1)...(19): siRNA sense strand
caggagaagcagauguaga

SEQ ID NO: 2312130 - RNA, 19 nt, Homo sapiens
  misc_RNA (1)...(19): siRNA sense strand
cuucaaaggagauagcaga

SEQ ID NO: 2312131 - RNA, 19 nt, Homo sapiens
  misc_RNA (1)...(19): siRNA sense strand
ugauagaccaauaggagga

SEQ ID NO: 2312132 - RNA, 19 nt, Homo sapiens
  misc_RNA (1)...(19): siRNA sense strand
ugacagaaugagagaugga

SEQ ID NO: 2312133 - RNA, 19 nt, Homo sapiens
  misc_RNA (1)...(19): siRNA sense strand
cugccaugucuaaagauaa

SEQ ID NO: 2312134 - RNA, 19 nt, Homo sapiens
  misc_RNA (1)...(19): siRNA sense strand
aaucgugccaaaugggaua

SEQ ID NO: 2312135 - RNA, 19 nt, Homo sapiens
  misc_RNA (1)...(19): siRNA sense strand
gaagaaugggaauggggaa

SEQ ID NO: 2312136 - RNA, 19 nt, Homo sapiens
  misc_RNA (1)...(19): siRNA sense strand
uggaagagguaugggagga

SEQ ID NO: 2312137 - RNA, 19 nt, Homo sapiens
  misc_RNA (1)...(19): siRNA sense strand
uauuggagcugauggcaga

SEQ ID NO: 2312138 - RNA, 19 nt, Homo sapiens
  misc_RNA (1)...(19): siRNA sense strand
ugguggagcuggugaugca

SEQ ID NO: 2312139 - RNA, 19 nt, Homo sapiens
  misc_RNA (1)...(19): siRNA sense strand
agauguagaguuugugaca

SEQ ID NO: 2312140 - RNA, 19 nt, Homo sapiens
  misc_RNA (1)...(19): siRNA sense strand
gaguggagguggauggcgu

SEQ ID NO: 2312141 - RNA, 19 nt, Homo sapiens
  misc_RNA (1)...(19): siRNA sense strand
gagagauggaagagguaug

SEQ ID NO: 2312142 - RNA, 19 nt, Homo sapiens
  misc_RNA (1)...(19): siRNA sense strand
auaacaugcaacaucgaua

SEQ ID NO: 2312143 - RNA, 19 nt, Homo sapiens
  misc_RNA (1)...(19): siRNA sense strand
gugccaaaugggauaacau

SEQ ID NO: 2312144 - RNA, 19 nt, Homo sapiens
  misc_RNA (1)...(19): siRNA sense strand
augagagauggaagaggua

SEQ ID NO: 2312145 - RNA, 19 nt, Homo sapiens
  misc_RNA (1)...(19): siRNA sense strand
gcuacggaagagauggaau

SEQ ID NO: 2312146 - RNA, 19 nt, Homo sapiens
  misc_RNA (1)...(19): siRNA sense strand
uggaauggauaaucaggga

SEQ ID NO: 2312147 - RNA, 19 nt, Homo sapiens
  misc_RNA (1)...(19): siRNA sense strand
aggcaguggagguuacuau

SEQ ID NO: 2312148 - RNA, 19 nt, Homo sapiens
  misc_RNA (1)...(19): siRNA sense strand
ugacgcuagugaugggaca

SEQ ID NO: 2312149 - RNA, 19 nt, Homo sapiens
  misc_RNA (1)...(19): siRNA sense strand
gugacuacuuccuggccaa

SEQ ID NO: 2312150 - RNA, 19 nt, Homo sapiens
  misc_RNA (1)...(19): siRNA sense strand
gugaaguacuagucgcuga

SEQ ID NO: 2312151 - RNA, 19 nt, Homo sapiens
  misc_RNA (1)...(19): siRNA sense strand
ggucaaauacagcugccua

SEQ ID NO: 2312152 - RNA, 19 nt, Homo sapiens
  misc_RNA (1)...(19): siRNA sense strand
agacaaucugacagugcua

SEQ ID NO: 2312153 - RNA, 19 nt, Homo sapiens
  misc_RNA (1)...(19): siRNA sense strand
cugaugaggaggagccaga

SEQ ID NO: 2312154 - RNA, 19 nt, Homo sapiens
  misc_RNA (1)...(19): siRNA sense strand
uguccuuauucgagaggga

SEQ ID NO: 2312155 - RNA, 19 nt, Homo sapiens
  misc_RNA (1)...(19): siRNA sense strand
ccaagaucaagcaggcaga

SEQ ID NO: 2312156 - RNA, 19 nt, Homo sapiens
  misc_RNA (1)...(19): siRNA sense strand
acaaucugacagugcuaaa

SEQ ID NO: 2312157 - RNA, 19 nt, Homo sapiens
  misc_RNA (1)...(19): siRNA sense strand
gguauaaagcaguucucca

SEQ ID NO: 2312158 - RNA, 19 nt, Homo sapiens
  misc_RNA (1)...(19): siRNA sense strand
agaaagaguaagauggaga

SEQ ID NO: 2312159 - RNA, 19 nt, Homo sapiens
  misc_RNA (1)...(19): siRNA sense strand
cggaagaacaggaguuuca

SEQ ID NO: 2312160 - RNA, 19 nt, Homo sapiens
  misc_RNA (1)...(19): siRNA sense strand
guguaggagcagaaacaaa

SEQ ID NO: 2312161 - RNA, 19 nt, Homo sapiens
  misc_RNA (1)...(19): siRNA sense strand
acauugugauagacagaaa

SEQ ID NO: 2312162 - RNA, 19 nt, Homo sapiens
  misc_RNA (1)...(19): siRNA sense strand
uggcaaaaugggaaagaaa

SEQ ID NO: 2312163 - RNA, 19 nt, Homo sapiens
  misc_RNA (1)...(19): siRNA sense strand
gcguguaggagcagaaaca

SEQ ID NO: 2312164 - RNA, 19 nt, Homo sapiens
  misc_RNA (1)...(19): siRNA sense strand
ugugauagacagaaagcaa

SEQ ID NO: 2312165 - RNA, 19 nt, Homo sapiens
  misc_RNA (1)...(19): siRNA sense strand
gaggauuucuucugggcua

SEQ ID NO: 2312166 - RNA, 19 nt, Homo sapiens
  misc_RNA (1)...(19): siRNA sense strand
ugguauacuacauggcaaa

SEQ ID NO: 2312167 - RNA, 19 nt, Homo sapiens
  misc_RNA (1)...(19): siRNA sense strand
cagugaagagagaaguuaa

SEQ ID NO: 2312168 - RNA, 19 nt, Homo sapiens
  misc_RNA (1)...(19): siRNA sense strand
auggaugauucuagaguuu

SEQ ID NO: 2312169 - RNA, 19 nt, Homo sapiens
  misc_RNA (1)...(19): siRNA sense strand
guucaagcguguaggagca

SEQ ID NO: 2312170 - RNA, 19 nt, Homo sapiens
  misc_RNA (1)...(19): siRNA sense strand
agugaagagagaaguuaaa

SEQ ID NO: 2312171 - RNA, 19 nt, Homo sapiens
  misc_RNA (1)...(19): siRNA sense strand
aguaaggaugcguugaaua

SEQ ID NO: 2312172 - RNA, 19 nt, Homo sapiens
  misc_RNA (1)...(19): siRNA sense strand
uuucaauagucaugggcau

SEQ ID NO: 2312173 - RNA, 19 nt, Homo sapiens
  misc_RNA (1)...(19): siRNA sense strand
cuuacuuugucuugguaua

SEQ ID NO: 2312174 - RNA, 19 nt, Homo sapiens
  misc_RNA (1)...(19): siRNA sense strand
gugauagacagaaagcaaa

SEQ ID NO: 2312175 - RNA, 19 nt, Homo sapiens
  misc_RNA (1)...(19): siRNA sense strand
cuccaaagaaagaguaaga

SEQ ID NO: 2312176 - RNA, 19 nt, Homo sapiens
  misc_RNA (1)...(19): siRNA sense strand
ugacaaaccuaaaggagac

SEQ ID NO: 2312177 - RNA, 19 nt, Homo sapiens
  misc_RNA (1)...(19): siRNA sense strand
agauggagaacaaagcaaa

SEQ ID NO: 2312178 - RNA, 19 nt, Homo sapiens
  misc_RNA (1)...(19): siRNA sense strand
caacggaagaacaggaguu

SEQ ID NO: 2312179 - RNA, 19 nt, Homo sapiens
  misc_RNA (1)...(19): siRNA sense strand
agagugaagguuuggaaau

SEQ ID NO: 2312180 - RNA, 19 nt, Homo sapiens
  misc_RNA (1)...(19): siRNA sense strand
ggcaaaaugggaaagaaaa

SEQ ID NO: 2312181 - RNA, 19 nt, Homo sapiens
  misc_RNA (1)...(19): siRNA sense strand
ugauagacagaaagcaaau

SEQ ID NO: 2312182 - RNA, 19 nt, Homo sapiens
  misc_RNA (1)...(19): siRNA sense strand
cuuacaugggagaggauuu

SEQ ID NO: 2312183 - RNA, 19 nt, Homo sapiens
  misc_RNA (1)...(19): siRNA sense strand
gggcauacgcuggagaaaa

SEQ ID NO: 2312184 - RNA, 19 nt, Homo sapiens
  misc_RNA (1)...(19): siRNA sense strand
aaaccaaagacaaacgauu

SEQ ID NO: 2312185 - RNA, 19 nt, Homo sapiens
  misc_RNA (1)...(19): siRNA sense strand
ccauauucucugggugaaa

SEQ ID NO: 2312186 - RNA, 19 nt, Homo sapiens
  misc_RNA (1)...(19): siRNA sense strand
aaacauugugauagacaga

SEQ ID NO: 2312187 - RNA, 19 nt, Homo sapiens
  misc_RNA (1)...(19): siRNA sense strand
gaccauauucucuggguga

SEQ ID NO: 2312188 - RNA, 19 nt, Homo sapiens
  misc_RNA (1)...(19): siRNA sense strand
gaugcaaaacauugugaua

SEQ ID NO: 2312189 - RNA, 19 nt, Homo sapiens
  misc_RNA (1)...(19): siRNA sense strand
caauggaacuguagccacu

SEQ ID NO: 2312190 - RNA, 19 nt, Homo sapiens
  misc_RNA (1)...(19): siRNA sense strand
acgauuagaagauggcuau

SEQ ID NO: 2312191 - RNA, 19 nt, Homo sapiens
  misc_RNA (1)...(19): siRNA sense strand
gagcagaaacaaauggaag

SEQ ID NO: 2312192 - RNA, 19 nt, Homo sapiens
  misc_RNA (1)...(19): siRNA sense strand
cagaaacaaauggaaguaa

SEQ ID NO: 2312193 - RNA, 19 nt, Homo sapiens
  misc_RNA (1)...(19): siRNA sense strand
uugacaaaccuaaaggaga

SEQ ID NO: 2312194 - RNA, 19 nt, Homo sapiens
  misc_RNA (1)...(19): siRNA sense strand
agaaagcaaaucugcgaau

SEQ ID NO: 2312195 - RNA, 19 nt, Homo sapiens
  misc_RNA (1)...(19): siRNA sense strand
guacagauuggcaacggaa

SEQ ID NO: 2312196 - RNA, 19 nt, Homo sapiens
  misc_RNA (1)...(19): siRNA sense strand
acagauuggcaacggaaga

SEQ ID NO: 2312197 - RNA, 19 nt, Homo sapiens
  misc_RNA (1)...(19): siRNA sense strand
aagacaaacgauuagaaga

SEQ ID NO: 2312198 - RNA, 19 nt, Homo sapiens
  misc_RNA (1)...(19): siRNA sense strand
gauaauacccuaaagcugu

SEQ ID NO: 2312199 - RNA, 19 nt, Homo sapiens
  misc_RNA (1)...(19): siRNA sense strand
cgauugugcaacaguucaa

SEQ ID NO: 2312200 - RNA, 19 nt, Homo sapiens
  misc_RNA (1)...(19): siRNA sense strand
uguaggagcagaaacaaau

SEQ ID NO: 2312201 - RNA, 19 nt, Homo sapiens
  misc_RNA (1)...(19): siRNA sense strand
uaaaggagacauuuggaga

SEQ ID NO: 2312202 - RNA, 19 nt, Homo sapiens
  misc_RNA (1)...(19): siRNA sense strand
ugcaaaacauugugauaga

SEQ ID NO: 2312203 - RNA, 19 nt, Homo sapiens
  misc_RNA (1)...(19): siRNA sense strand
aagagugaagguuuggaaa

SEQ ID NO: 2312204 - RNA, 19 nt, Homo sapiens
  misc_RNA (1)...(19): siRNA sense strand
gaaguuaaaucuuaccuca

SEQ ID NO: 2312205 - RNA, 19 nt, Homo sapiens
  misc_RNA (1)...(19): siRNA sense strand
aagauggagaacaaagcaa

SEQ ID NO: 2312206 - RNA, 19 nt, Homo sapiens
  misc_RNA (1)...(19): siRNA sense strand
cguuaaagccauaaaccaa

SEQ ID NO: 2312207 - RNA, 19 nt, Homo sapiens
  misc_RNA (1)...(19): siRNA sense strand
ggaccaugagaaugagaaa

SEQ ID NO: 2312208 - RNA, 19 nt, Homo sapiens
  misc_RNA (1)...(19): siRNA sense strand
aggcaaaacuuauggaaga

SEQ ID NO: 2312209 - RNA, 19 nt, Homo sapiens
  misc_RNA (1)...(19): siRNA sense strand
agacacaacaacaaggaaa

SEQ ID NO: 2312210 - RNA, 19 nt, Homo sapiens
  misc_RNA (1)...(19): siRNA sense strand
cugcuaugcaugaggcaaa

SEQ ID NO: 2312211 - RNA, 19 nt, Homo sapiens
  misc_RNA (1)...(19): siRNA sense strand
ccagagagguuuaguggca

SEQ ID NO: 2312212 - RNA, 19 nt, Homo sapiens
  misc_RNA (1)...(19): siRNA sense strand
guaacuucguggugagaca

SEQ ID NO: 2312213 - RNA, 19 nt, Homo sapiens
  misc_RNA (1)...(19): siRNA sense strand
agguuaugaaacugagaaa

SEQ ID NO: 2312214 - RNA, 19 nt, Homo sapiens
  misc_RNA (1)...(19): siRNA sense strand
agaaugagaaagugaacau

SEQ ID NO: 2312215 - RNA, 19 nt, Homo sapiens
  misc_RNA (1)...(19): siRNA sense strand
acgaguugguagagaucau

SEQ ID NO: 2312216 - RNA, 19 nt, Homo sapiens
  misc_RNA (1)...(19): siRNA sense strand
cuguguaucugaugaccaa

SEQ ID NO: 2312217 - RNA, 19 nt, Homo sapiens
  misc_RNA (1)...(19): siRNA sense strand
caugagaaugagaaaguga

SEQ ID NO: 2312218 - RNA, 19 nt, Homo sapiens
  misc_RNA (1)...(19): siRNA sense strand
cgccaagggaugcaguaaa

SEQ ID NO: 2312219 - RNA, 19 nt, Homo sapiens
  misc_RNA (1)...(19): siRNA sense strand
gugacgaguugguagagau

SEQ ID NO: 2312220 - RNA, 19 nt, Homo sapiens
  misc_RNA (1)...(19): siRNA sense strand
gacacaacaacaaggaaau

SEQ ID NO: 2312221 - RNA, 19 nt, Homo sapiens
  misc_RNA (1)...(19): siRNA sense strand
aucaaagagacaaagguua

SEQ ID NO: 2312222 - RNA, 19 nt, Homo sapiens
  misc_RNA (1)...(19): siRNA sense strand
gagaaaagaaacugcuaga

SEQ ID NO: 2312223 - RNA, 19 nt, Homo sapiens
  misc_RNA (1)...(19): siRNA sense strand
ccaaaaugacucacaagaa

SEQ ID NO: 2312224 - RNA, 19 nt, Homo sapiens
  misc_RNA (1)...(19): siRNA sense strand
gggagguggucauggguuc

SEQ ID NO: 2312225 - RNA, 19 nt, Homo sapiens
  misc_RNA (1)...(19): siRNA sense strand
gaaaggacuuacaggccca

SEQ ID NO: 2312226 - RNA, 19 nt, Homo sapiens
  misc_RNA (1)...(19): siRNA sense strand
agaucauccagcagaggaa

SEQ ID NO: 2312227 - RNA, 19 nt, Homo sapiens
  misc_RNA (1)...(19): siRNA sense strand
ucaaccaagcugagcauau

SEQ ID NO: 2312228 - RNA, 19 nt, Homo sapiens
  misc_RNA (1)...(19): siRNA sense strand
cugccuggaccaugagaau

SEQ ID NO: 2312229 - RNA, 19 nt, Homo sapiens
  misc_RNA (1)...(19): siRNA sense strand
aaucaaagagacaaagguu

SEQ ID NO: 2312230 - RNA, 19 nt, Homo sapiens
  misc_RNA (1)...(19): siRNA sense strand
agaaacugcuagagggguu

SEQ ID NO: 2312231 - RNA, 19 nt, Homo sapiens
  misc_RNA (1)...(19): siRNA sense strand
ggagaaggaugaaagcucu

SEQ ID NO: 2312232 - RNA, 19 nt, Homo sapiens
  misc_RNA (1)...(19): siRNA sense strand
caacagcgaacuagaaaau

SEQ ID NO: 2312233 - RNA, 19 nt, Homo sapiens
  misc_RNA (1)...(19): siRNA sense strand
uggaagaaugugacgaguu

SEQ ID NO: 2312234 - RNA, 19 nt, Homo sapiens
  misc_RNA (1)...(19): siRNA sense strand
agagagguuuaguggcaca

SEQ ID NO: 2312235 - RNA, 19 nt, Homo sapiens
  misc_RNA (1)...(19): siRNA sense strand
agaaugaauggauuggcaa

SEQ ID NO: 2312236 - RNA, 19 nt, Homo sapiens
  misc_RNA (1)...(19): siRNA sense strand
auggauugcagauggagaa

SEQ ID NO: 2312237 - RNA, 19 nt, Homo sapiens
  misc_RNA (1)...(19): siRNA sense strand
ccuacaaaucagcuccaaa

SEQ ID NO: 2312238 - RNA, 19 nt, Homo sapiens
  misc_RNA (1)...(19): siRNA sense strand
gccuggaccaugagaauga

SEQ ID NO: 2312239 - RNA, 19 nt, Homo sapiens
  misc_RNA (1)...(19): siRNA sense strand
agagacaaagguuaugaaa

SEQ ID NO: 2312240 - RNA, 19 nt, Homo sapiens
  misc_RNA (1)...(19): siRNA sense strand
acucacaagaaguugaaga

SEQ ID NO: 2312241 - RNA, 19 nt, Homo sapiens
  misc_RNA (1)...(19): siRNA sense strand
acaaggaaaugcuggugga

SEQ ID NO: 2312242 - RNA, 19 nt, Homo sapiens
  misc_RNA (1)...(19): siRNA sense strand
acauuuacaaucuggaaca

SEQ ID NO: 2312243 - RNA, 19 nt, Homo sapiens
  misc_RNA (1)...(19): siRNA sense strand
cgagcgaauugcuugccaa

SEQ ID NO: 2312244 - RNA, 19 nt, Homo sapiens
  misc_RNA (1)...(19): siRNA sense strand
uagaaaaucaaauggccaa

SEQ ID NO: 2312245 - RNA, 19 nt, Homo sapiens
  misc_RNA (1)...(19): siRNA sense strand
gcuauggggcagcaggaaa

SEQ ID NO: 2312246 - RNA, 19 nt, Homo sapiens
  misc_RNA (1)...(19): siRNA sense strand
cguuaaagccauaaaccaa

SEQ ID NO: 2312247 - RNA, 19 nt, Homo sapiens
  misc_RNA (1)...(19): siRNA sense strand
ggaccaugagaaugagaaa

SEQ ID NO: 2312248 - RNA, 19 nt, Homo sapiens
  misc_RNA (1)...(19): siRNA sense strand
aggcaaaacuuauggaaga

SEQ ID NO: 2312249 - RNA, 19 nt, Homo sapiens
  misc_RNA (1)...(19): siRNA sense strand
agacacaacaacaaggaaa

SEQ ID NO: 2312250 - RNA, 19 nt, Homo sapiens
  misc_RNA (1)...(19): siRNA sense strand
cugcuaugcaugaggcaaa

SEQ ID NO: 2312251 - RNA, 19 nt, Homo sapiens
  misc_RNA (1)...(19): siRNA sense strand
ccagagagguuuaguggca

SEQ ID NO: 2312252 - RNA, 19 nt, Homo sapiens
  misc_RNA (1)...(19): siRNA sense strand
guaacuucguggugagaca

SEQ ID NO: 2312253 - RNA, 19 nt, Homo sapiens
  misc_RNA (1)...(19): siRNA sense strand
agguuaugaaacugagaaa

SEQ ID NO: 2312254 - RNA, 19 nt, Homo sapiens
  misc_RNA (1)...(19): siRNA sense strand
agaaugagaaagugaacau

SEQ ID NO: 2312255 - RNA, 19 nt, Homo sapiens
  misc_RNA (1)...(19): siRNA sense strand
acgaguugguagagaucau

SEQ ID NO: 2312256 - RNA, 19 nt, Homo sapiens
  misc_RNA (1)...(19): siRNA sense strand
cuguguaucugaugaccaa

SEQ ID NO: 2312257 - RNA, 19 nt, Homo sapiens
  misc_RNA (1)...(19): siRNA sense strand
caugagaaugagaaaguga

SEQ ID NO: 2312258 - RNA, 19 nt, Homo sapiens
  misc_RNA (1)...(19): siRNA sense strand
cgccaagggaugcaguaaa

SEQ ID NO: 2312259 - RNA, 19 nt, Homo sapiens
  misc_RNA (1)...(19): siRNA sense strand
gugacgaguugguagagau

SEQ ID NO: 2312260 - RNA, 19 nt, Homo sapiens
  misc_RNA (1)...(19): siRNA sense strand
gacacaacaacaaggaaau

SEQ ID NO: 2312261 - RNA, 19 nt, Homo sapiens
  misc_RNA (1)...(19): siRNA sense strand
aucaaagagacaaagguua

SEQ ID NO: 2312262 - RNA, 19 nt, Homo sapiens
  misc_RNA (1)...(19): siRNA sense strand
gagaaaagaaacugcuaga

SEQ ID NO: 2312263 - RNA, 19 nt, Homo sapiens
  misc_RNA (1)...(19): siRNA sense strand
ccaaaaugacucacaagaa

SEQ ID NO: 2312264 - RNA, 19 nt, Homo sapiens
  misc_RNA (1)...(19): siRNA sense strand
gggagguggucauggguuc

SEQ ID NO: 2312265 - RNA, 19 nt, Homo sapiens
  misc_RNA (1)...(19): siRNA sense strand
gaaaggacuuacaggccca

SEQ ID NO: 2312266 - RNA, 19 nt, Homo sapiens
  misc_RNA (1)...(19): siRNA sense strand
agaucauccagcagaggaa

SEQ ID NO: 2312267 - RNA, 19 nt, Homo sapiens
  misc_RNA (1)...(19): siRNA sense strand
ucaaccaagcugagcauau

SEQ ID NO: 2312268 - RNA, 19 nt, Homo sapiens
  misc_RNA (1)...(19): siRNA sense strand
cugccuggaccaugagaau

SEQ ID NO: 2312269 - RNA, 19 nt, Homo sapiens
  misc_RNA (1)...(19): siRNA sense strand
aaucaaagagacaaagguu

SEQ ID NO: 2312270 - RNA, 19 nt, Homo sapiens
  misc_RNA (1)...(19): siRNA sense strand
agaaacugcuagagggguu

SEQ ID NO: 2312271 - RNA, 19 nt, Homo sapiens
  misc_RNA (1)...(19): siRNA sense strand
ggagaaggaugaaagcucu

SEQ ID NO: 2312272 - RNA, 19 nt, Homo sapiens
  misc_RNA (1)...(19): siRNA sense strand
caacagcgaacuagaaaau

SEQ ID NO: 2312273 - RNA, 19 nt, Homo sapiens
  misc_RNA (1)...(19): siRNA sense strand
uggaagaaugugacgaguu

SEQ ID NO: 2312274 - RNA, 19 nt, Homo sapiens
  misc_RNA (1)...(19): siRNA sense strand
agagagguuuaguggcaca

SEQ ID NO: 2312275 - RNA, 19 nt, Homo sapiens
  misc_RNA (1)...(19): siRNA sense strand
agaaugaauggauuggcaa

SEQ ID NO: 2312276 - RNA, 19 nt, Homo sapiens
  misc_RNA (1)...(19): siRNA sense strand
auggauugcagauggagaa

SEQ ID NO: 2312277 - RNA, 19 nt, Homo sapiens
  misc_RNA (1)...(19): siRNA sense strand
ccuacaaaucagcuccaaa

SEQ ID NO: 2312278 - RNA, 19 nt, Homo sapiens
  misc_RNA (1)...(19): siRNA sense strand
gccuggaccaugagaauga

SEQ ID NO: 2312279 - RNA, 19 nt, Homo sapiens
  misc_RNA (1)...(19): siRNA sense strand
agagacaaagguuaugaaa

SEQ ID NO: 2312280 - RNA, 19 nt, Homo sapiens
  misc_RNA (1)...(19): siRNA sense strand
acucacaagaaguugaaga

SEQ ID NO: 2312281 - RNA, 19 nt, Homo sapiens
  misc_RNA (1)...(19): siRNA sense strand
acaaggaaaugcuggugga

SEQ ID NO: 2312282 - RNA, 19 nt, Homo sapiens
  misc_RNA (1)...(19): siRNA sense strand
acauuuacaaucuggaaca

SEQ ID NO: 2312283 - RNA, 19 nt, Homo sapiens
  misc_RNA (1)...(19): siRNA sense strand
cgagcgaauugcuugccaa

SEQ ID NO: 2312284 - RNA, 19 nt, Homo sapiens
  misc_RNA (1)...(19): siRNA sense strand
uagaaaaucaaauggccaa

SEQ ID NO: 2312285 - RNA, 19 nt, Homo sapiens
  misc_RNA (1)...(19): siRNA sense strand
gcuauggggcagcaggaaa

SEQ ID NO: 2312286 - RNA, 19 nt, Homo sapiens
  misc_RNA (1)...(19): siRNA sense strand
agaaagaggagaaggcaga

SEQ ID NO: 2312287 - RNA, 19 nt, Homo sapiens
  misc_RNA (1)...(19): siRNA sense strand
cuguggagguugauggcaa

SEQ ID NO: 2312288 - RNA, 19 nt, Homo sapiens
  misc_RNA (1)...(19): siRNA sense strand
auuuaugacccuugugaaa

SEQ ID NO: 2312289 - RNA, 19 nt, Homo sapiens
  misc_RNA (1)...(19): siRNA sense strand
ccauaaaguccuaggcaug

SEQ ID NO: 2312290 - RNA, 19 nt, Homo sapiens
  misc_RNA (1)...(19): siRNA sense strand
ggagaaaguauuagcugga

SEQ ID NO: 2312291 - RNA, 19 nt, Homo sapiens
  misc_RNA (1)...(19): siRNA sense strand
cugaggagaccgaggcgaa

SEQ ID NO: 2312292 - RNA, 19 nt, Homo sapiens
  misc_RNA (1)...(19): siRNA sense strand
aggcagaguccgauaacau

SEQ ID NO: 2312293 - RNA, 19 nt, Homo sapiens
  misc_RNA (1)...(19): siRNA sense strand
augaaaacccaguggacua

SEQ ID NO: 2312294 - RNA, 19 nt, Homo sapiens
  misc_RNA (1)...(19): siRNA sense strand
aggucgaaguggauggaca

SEQ ID NO: 2312295 - RNA, 19 nt, Homo sapiens
  misc_RNA (1)...(19): siRNA sense strand
agaaaguauuagcuggaga

SEQ ID NO: 2312296 - RNA, 19 nt, Homo sapiens
  misc_RNA (1)...(19): siRNA sense strand
aagaggagcuggaggcagu

SEQ ID NO: 2312297 - RNA, 19 nt, Homo sapiens
  misc_RNA (1)...(19): siRNA sense strand
ccccagaggacgacaguaa

SEQ ID NO: 2312298 - RNA, 19 nt, Homo sapiens
  misc_RNA (1)...(19): siRNA sense strand
ggagagugcuggagugccu

SEQ ID NO: 2312299 - RNA, 19 nt, Homo sapiens
  misc_RNA (1)...(19): siRNA sense strand
agacagacagcaacgggaa

SEQ ID NO: 2312300 - RNA, 19 nt, Homo sapiens
  misc_RNA (1)...(19): siRNA sense strand
gaaauuugcugcuaagcca

SEQ ID NO: 2312301 - RNA, 19 nt, Homo sapiens
  misc_RNA (1)...(19): siRNA sense strand
gagaagaggcgugggcuca

SEQ ID NO: 2312302 - RNA, 19 nt, Homo sapiens
  misc_RNA (1)...(19): siRNA sense strand
aguacaagcugguguccca

SEQ ID NO: 2312303 - RNA, 19 nt, Homo sapiens
  misc_RNA (1)...(19): siRNA sense strand
ccguuaagguguuacagga

SEQ ID NO: 2312304 - RNA, 19 nt, Homo sapiens
  misc_RNA (1)...(19): siRNA sense strand
uucagaagaaagaggagaa

SEQ ID NO: 2312305 - RNA, 19 nt, Homo sapiens
  misc_RNA (1)...(19): siRNA sense strand
caacacaagaggagcugga

SEQ ID NO: 2312306 - RNA, 19 nt, Homo sapiens
  misc_RNA (1)...(19): siRNA sense strand
gaacagaagacggagcaca

SEQ ID NO: 2312307 - RNA, 19 nt, Homo sapiens
  misc_RNA (1)...(19): siRNA sense strand
cgaugcugcgauugugaua

SEQ ID NO: 2312308 - RNA, 19 nt, Homo sapiens
  misc_RNA (1)...(19): siRNA sense strand
ggaagauaucacacagagu

SEQ ID NO: 2312309 - RNA, 19 nt, Homo sapiens
  misc_RNA (1)...(19): siRNA sense strand
ggacagaaguuccaaggug

SEQ ID NO: 2312310 - RNA, 19 nt, Homo sapiens
  misc_RNA (1)...(19): siRNA sense strand
gguauggaagcuaugggua

SEQ ID NO: 2312311 - RNA, 19 nt, Homo sapiens
  misc_RNA (1)...(19): siRNA sense strand
cccuguugucagagaagaa

SEQ ID NO: 2312312 - RNA, 19 nt, Homo sapiens
  misc_RNA (1)...(19): siRNA sense strand
cgagcuccugugugagaaa

SEQ ID NO: 2312313 - RNA, 19 nt, Homo sapiens
  misc_RNA (1)...(19): siRNA sense strand
guuaagguguuacaggaca

SEQ ID NO: 2312314 - RNA, 19 nt, Homo sapiens
  misc_RNA (1)...(19): siRNA sense strand
uguuacaggacaugggcuu

SEQ ID NO: 2312315 - RNA, 19 nt, Homo sapiens
  misc_RNA (1)...(19): siRNA sense strand
guauggaagcuauggguac

SEQ ID NO: 2312316 - RNA, 19 nt, Homo sapiens
  misc_RNA (1)...(19): siRNA sense strand
uaaagaaggggcuggggaa

SEQ ID NO: 2312317 - RNA, 19 nt, Homo sapiens
  misc_RNA (1)...(19): siRNA sense strand
ucauggaggucgaagugga

SEQ ID NO: 2312318 - RNA, 19 nt, Homo sapiens
  misc_RNA (1)...(19): siRNA sense strand
agaaagaggagaaggcaga

SEQ ID NO: 2312319 - RNA, 19 nt, Homo sapiens
  misc_RNA (1)...(19): siRNA sense strand
cuguggagguugauggcaa

SEQ ID NO: 2312320 - RNA, 19 nt, Homo sapiens
  misc_RNA (1)...(19): siRNA sense strand
auuuaugacccuugugaaa

SEQ ID NO: 2312321 - RNA, 19 nt, Homo sapiens
  misc_RNA (1)...(19): siRNA sense strand
ccauaaaguccuaggcaug

SEQ ID NO: 2312322 - RNA, 19 nt, Homo sapiens
  misc_RNA (1)...(19): siRNA sense strand
ggagaaaguauuagcugga

SEQ ID NO: 2312323 - RNA, 19 nt, Homo sapiens
  misc_RNA (1)...(19): siRNA sense strand
cugaggagaccgaggcgaa

SEQ ID NO: 2312324 - RNA, 19 nt, Homo sapiens
  misc_RNA (1)...(19): siRNA sense strand
aggcagaguccgauaacau

SEQ ID NO: 2312325 - RNA, 19 nt, Homo sapiens
  misc_RNA (1)...(19): siRNA sense strand
augaaaacccaguggacua

SEQ ID NO: 2312326 - RNA, 19 nt, Homo sapiens
  misc_RNA (1)...(19): siRNA sense strand
aggucgaaguggauggaca

SEQ ID NO: 2312327 - RNA, 19 nt, Homo sapiens
  misc_RNA (1)...(19): siRNA sense strand
agaaaguauuagcuggaga

SEQ ID NO: 2312328 - RNA, 19 nt, Homo sapiens
  misc_RNA (1)...(19): siRNA sense strand
aagaggagcuggaggcagu

SEQ ID NO: 2312329 - RNA, 19 nt, Homo sapiens
  misc_RNA (1)...(19): siRNA sense strand
ccccagaggacgacaguaa

SEQ ID NO: 2312330 - RNA, 19 nt, Homo sapiens
  misc_RNA (1)...(19): siRNA sense strand
ggagagugcuggagugccu

SEQ ID NO: 2312331 - RNA, 19 nt, Homo sapiens
  misc_RNA (1)...(19): siRNA sense strand
agacagacagcaacgggaa

SEQ ID NO: 2312332 - RNA, 19 nt, Homo sapiens
  misc_RNA (1)...(19): siRNA sense strand
gaaauuugcugcuaagcca

SEQ ID NO: 2312333 - RNA, 19 nt, Homo sapiens
  misc_RNA (1)...(19): siRNA sense strand
gagaagaggcgugggcuca

SEQ ID NO: 2312334 - RNA, 19 nt, Homo sapiens
  misc_RNA (1)...(19): siRNA sense strand
aguacaagcugguguccca

SEQ ID NO: 2312335 - RNA, 19 nt, Homo sapiens
  misc_RNA (1)...(19): siRNA sense strand
ccguuaagguguuacagga

SEQ ID NO: 2312336 - RNA, 19 nt, Homo sapiens
  misc_RNA (1)...(19): siRNA sense strand
uucagaagaaagaggagaa

SEQ ID NO: 2312337 - RNA, 19 nt, Homo sapiens
  misc_RNA (1)...(19): siRNA sense strand
caacacaagaggagcugga

SEQ ID NO: 2312338 - RNA, 19 nt, Homo sapiens
  misc_RNA (1)...(19): siRNA sense strand
gaacagaagacggagcaca

SEQ ID NO: 2312339 - RNA, 19 nt, Homo sapiens
  misc_RNA (1)...(19): siRNA sense strand
cgaugcugcgauugugaua

SEQ ID NO: 2312340 - RNA, 19 nt, Homo sapiens
  misc_RNA (1)...(19): siRNA sense strand
ggaagauaucacacagagu

SEQ ID NO: 2312341 - RNA, 19 nt, Homo sapiens
  misc_RNA (1)...(19): siRNA sense strand
ggacagaaguuccaaggug

SEQ ID NO: 2312342 - RNA, 19 nt, Homo sapiens
  misc_RNA (1)...(19): siRNA sense strand
gguauggaagcuaugggua

SEQ ID NO: 2312343 - RNA, 19 nt, Homo sapiens
  misc_RNA (1)...(19): siRNA sense strand
cccuguugucagagaagaa

SEQ ID NO: 2312344 - RNA, 19 nt, Homo sapiens
  misc_RNA (1)...(19): siRNA sense strand
cgagcuccugugugagaaa

SEQ ID NO: 2312345 - RNA, 19 nt, Homo sapiens
  misc_RNA (1)...(19): siRNA sense strand
guuaagguguuacaggaca

SEQ ID NO: 2312346 - RNA, 19 nt, Homo sapiens
  misc_RNA (1)...(19): siRNA sense strand
uguuacaggacaugggcuu

SEQ ID NO: 2312347 - RNA, 19 nt, Homo sapiens
  misc_RNA (1)...(19): siRNA sense strand
guauggaagcuauggguac

SEQ ID NO: 2312348 - RNA, 19 nt, Homo sapiens
  misc_RNA (1)...(19): siRNA sense strand
uaaagaaggggcuggggaa

SEQ ID NO: 2312349 - RNA, 19 nt, Homo sapiens
  misc_RNA (1)...(19): siRNA sense strand
ucauggaggucgaagugga

SEQ ID NO: 2312350 - RNA, 19 nt, Homo sapiens
  misc_RNA (1)...(19): siRNA sense strand
agaaagaggagaaggcaga

SEQ ID NO: 2312351 - RNA, 19 nt, Homo sapiens
  misc_RNA (1)...(19): siRNA sense strand
cuguggagguugauggcaa

SEQ ID NO: 2312352 - RNA, 19 nt, Homo sapiens
  misc_RNA (1)...(19): siRNA sense strand
auuuaugacccuugugaaa

SEQ ID NO: 2312353 - RNA, 19 nt, Homo sapiens
  misc_RNA (1)...(19): siRNA sense strand
ccauaaaguccuaggcaug

SEQ ID NO: 2312354 - RNA, 19 nt, Homo sapiens
  misc_RNA (1)...(19): siRNA sense strand
ggagaaaguauuagcugga

SEQ ID NO: 2312355 - RNA, 19 nt, Homo sapiens
  misc_RNA (1)...(19): siRNA sense strand
cugaggagaccgaggcgaa

SEQ ID NO: 2312356 - RNA, 19 nt, Homo sapiens
  misc_RNA (1)...(19): siRNA sense strand
aggcagaguccgauaacau

SEQ ID NO: 2312357 - RNA, 19 nt, Homo sapiens
  misc_RNA (1)...(19): siRNA sense strand
augaaaacccaguggacua

SEQ ID NO: 2312358 - RNA, 19 nt, Homo sapiens
  misc_RNA (1)...(19): siRNA sense strand
aggucgaaguggauggaca

SEQ ID NO: 2312359 - RNA, 19 nt, Homo sapiens
  misc_RNA (1)...(19): siRNA sense strand
agaaaguauuagcuggaga

SEQ ID NO: 2312360 - RNA, 19 nt, Homo sapiens
  misc_RNA (1)...(19): siRNA sense strand
aagaggagcuggaggcagu

SEQ ID NO: 2312361 - RNA, 19 nt, Homo sapiens
  misc_RNA (1)...(19): siRNA sense strand
ccccagaggacgacaguaa

SEQ ID NO: 2312362 - RNA, 19 nt, Homo sapiens
  misc_RNA (1)...(19): siRNA sense strand
ggagagugcuggagugccu

SEQ ID NO: 2312363 - RNA, 19 nt, Homo sapiens
  misc_RNA (1)...(19): siRNA sense strand
agacagacagcaacgggaa

SEQ ID NO: 2312364 - RNA, 19 nt, Homo sapiens
  misc_RNA (1)...(19): siRNA sense strand
gaaauuugcugcuaagcca

SEQ ID NO: 2312365 - RNA, 19 nt, Homo sapiens
  misc_RNA (1)...(19): siRNA sense strand
gagaagaggcgugggcuca

SEQ ID NO: 2312366 - RNA, 19 nt, Homo sapiens
  misc_RNA (1)...(19): siRNA sense strand
aguacaagcugguguccca

SEQ ID NO: 2312367 - RNA, 19 nt, Homo sapiens
  misc_RNA (1)...(19): siRNA sense strand
ccguuaagguguuacagga

SEQ ID NO: 2312368 - RNA, 19 nt, Homo sapiens
  misc_RNA (1)...(19): siRNA sense strand
uucagaagaaagaggagaa

SEQ ID NO: 2312369 - RNA, 19 nt, Homo sapiens
  misc_RNA (1)...(19): siRNA sense strand
caacacaagaggagcugga

SEQ ID NO: 2312370 - RNA, 19 nt, Homo sapiens
  misc_RNA (1)...(19): siRNA sense strand
gaacagaagacggagcaca

SEQ ID NO: 2312371 - RNA, 19 nt, Homo sapiens
  misc_RNA (1)...(19): siRNA sense strand
cgaugcugcgauugugaua

SEQ ID NO: 2312372 - RNA, 19 nt, Homo sapiens
  misc_RNA (1)...(19): siRNA sense strand
ggaagauaucacacagagu

SEQ ID NO: 2312373 - RNA, 19 nt, Homo sapiens
  misc_RNA (1)...(19): siRNA sense strand
ggacagaaguuccaaggug

SEQ ID NO: 2312374 - RNA, 19 nt, Homo sapiens
  misc_RNA (1)...(19): siRNA sense strand
gguauggaagcuaugggua

SEQ ID NO: 2312375 - RNA, 19 nt, Homo sapiens
  misc_RNA (1)...(19): siRNA sense strand
cccuguugucagagaagaa

SEQ ID NO: 2312376 - RNA, 19 nt, Homo sapiens
  misc_RNA (1)...(19): siRNA sense strand
cgagcuccugugugagaaa

SEQ ID NO: 2312377 - RNA, 19 nt, Homo sapiens
  misc_RNA (1)...(19): siRNA sense strand
guuaagguguuacaggaca

SEQ ID NO: 2312378 - RNA, 19 nt, Homo sapiens
  misc_RNA (1)...(19): siRNA sense strand
uguuacaggacaugggcuu

SEQ ID NO: 2312379 - RNA, 19 nt, Homo sapiens
  misc_RNA (1)...(19): siRNA sense strand
guauggaagcuauggguac

SEQ ID NO: 2312380 - RNA, 19 nt, Homo sapiens
  misc_RNA (1)...(19): siRNA sense strand
uaaagaaggggcuggggaa

SEQ ID NO: 2312381 - RNA, 19 nt, Homo sapiens
  misc_RNA (1)...(19): siRNA sense strand
ucauggaggucgaagugga

SEQ ID NO: 2312382 - RNA, 19 nt, Homo sapiens
  misc_RNA (1)...(19): siRNA sense strand
cccucaaagagaagaagaa

SEQ ID NO: 2312383 - RNA, 19 nt, Homo sapiens
  misc_RNA (1)...(19): siRNA sense strand
cucaaagagaagaagaaga

SEQ ID NO: 2312384 - RNA, 19 nt, Homo sapiens
  misc_RNA (1)...(19): siRNA sense strand
gagaagaagaagaaaagga

SEQ ID NO: 2312385 - RNA, 19 nt, Homo sapiens
  misc_RNA (1)...(19): siRNA sense strand
uggaggaagaagaccaaau

SEQ ID NO: 2312386 - RNA, 19 nt, Homo sapiens
  misc_RNA (1)...(19): siRNA sense strand
aaauauuccuugauggcca

SEQ ID NO: 2312387 - RNA, 19 nt, Homo sapiens
  misc_RNA (1)...(19): siRNA sense strand
agaaaaggacaguggagga

SEQ ID NO: 2312388 - RNA, 19 nt, Homo sapiens
  misc_RNA (1)...(19): siRNA sense strand
cgauaccagagcagauaau

SEQ ID NO: 2312389 - RNA, 19 nt, Homo sapiens
  misc_RNA (1)...(19): siRNA sense strand
caguggaggaagaagacca

SEQ ID NO: 2312390 - RNA, 19 nt, Homo sapiens
  misc_RNA (1)...(19): siRNA sense strand
cccucaaagagaagaagaa

SEQ ID NO: 2312391 - RNA, 19 nt, Homo sapiens
  misc_RNA (1)...(19): siRNA sense strand
cucaaagagaagaagaaga

SEQ ID NO: 2312392 - RNA, 19 nt, Homo sapiens
  misc_RNA (1)...(19): siRNA sense strand
gagaagaagaagaaaagga

SEQ ID NO: 2312393 - RNA, 19 nt, Homo sapiens
  misc_RNA (1)...(19): siRNA sense strand
uggaggaagaagaccaaau

SEQ ID NO: 2312394 - RNA, 19 nt, Homo sapiens
  misc_RNA (1)...(19): siRNA sense strand
aaauauuccuugauggcca

SEQ ID NO: 2312395 - RNA, 19 nt, Homo sapiens
  misc_RNA (1)...(19): siRNA sense strand
agaaaaggacaguggagga

SEQ ID NO: 2312396 - RNA, 19 nt, Homo sapiens
  misc_RNA (1)...(19): siRNA sense strand
cgauaccagagcagauaau

SEQ ID NO: 2312397 - RNA, 19 nt, Homo sapiens
  misc_RNA (1)...(19): siRNA sense strand
caguggaggaagaagacca

SEQ ID NO: 2312398 - RNA, 19 nt, Homo sapiens
  misc_RNA (1)...(19): siRNA sense strand
gggagagaugagagagaaa

SEQ ID NO: 2312399 - RNA, 19 nt, Homo sapiens
  misc_RNA (1)...(19): siRNA sense strand
gaacuaaagaagaggccaa

SEQ ID NO: 2312400 - RNA, 19 nt, Homo sapiens
  misc_RNA (1)...(19): siRNA sense strand
aagaagaagaggaguuaaa

SEQ ID NO: 2312401 - RNA, 19 nt, Homo sapiens
  misc_RNA (1)...(19): siRNA sense strand
gggaagaggaggaggagga

SEQ ID NO: 2312402 - RNA, 19 nt, Homo sapiens
  misc_RNA (1)...(19): siRNA sense strand
aggaagaggaggaggauga

SEQ ID NO: 2312403 - RNA, 19 nt, Homo sapiens
  misc_RNA (1)...(19): siRNA sense strand
cuaaagaagacgaagagaa

SEQ ID NO: 2312404 - RNA, 19 nt, Homo sapiens
  misc_RNA (1)...(19): siRNA sense strand
gcacaaauagugaggccaa

SEQ ID NO: 2312405 - RNA, 19 nt, Homo sapiens
  misc_RNA (1)...(19): siRNA sense strand
uggcaaagcaucuggagaa

SEQ ID NO: 2312406 - RNA, 19 nt, Homo sapiens
  misc_RNA (1)...(19): siRNA sense strand
ucuaaagaguggacagcua

SEQ ID NO: 2312407 - RNA, 19 nt, Homo sapiens
  misc_RNA (1)...(19): siRNA sense strand
cuaaagaagaagaggaguu

SEQ ID NO: 2312408 - RNA, 19 nt, Homo sapiens
  misc_RNA (1)...(19): siRNA sense strand
aggaggaauuagagaauga

SEQ ID NO: 2312409 - RNA, 19 nt, Homo sapiens
  misc_RNA (1)...(19): siRNA sense strand
ccagaagauccuuuagaaa

SEQ ID NO: 2312410 - RNA, 19 nt, Homo sapiens
  misc_RNA (1)...(19): siRNA sense strand
cggcagauuuguaugguau

SEQ ID NO: 2312411 - RNA, 19 nt, Homo sapiens
  misc_RNA (1)...(19): siRNA sense strand
augcaaguacugugggaaa

SEQ ID NO: 2312412 - RNA, 19 nt, Homo sapiens
  misc_RNA (1)...(19): siRNA sense strand
gcaaaaugucgucgaauaa

SEQ ID NO: 2312413 - RNA, 19 nt, Homo sapiens
  misc_RNA (1)...(19): siRNA sense strand
gcgccaugaagcaggguua

SEQ ID NO: 2312414 - RNA, 19 nt, Homo sapiens
  misc_RNA (1)...(19): siRNA sense strand
cuuucaaacaggaggaauu

SEQ ID NO: 2312415 - RNA, 19 nt, Homo sapiens
  misc_RNA (1)...(19): siRNA sense strand
gcgccaagcaggagcugaa

SEQ ID NO: 2312416 - RNA, 19 nt, Homo sapiens
  misc_RNA (1)...(19): siRNA sense strand
aagaagaagaagaagauga

SEQ ID NO: 2312417 - RNA, 19 nt, Homo sapiens
  misc_RNA (1)...(19): siRNA sense strand
augaagaagaagaagaaga

SEQ ID NO: 2312418 - RNA, 19 nt, Homo sapiens
  misc_RNA (1)...(19): siRNA sense strand
ggcaaagcaucuggagaaa

SEQ ID NO: 2312419 - RNA, 19 nt, Homo sapiens
  misc_RNA (1)...(19): siRNA sense strand
aagaagagguacacgccua

SEQ ID NO: 2312420 - RNA, 19 nt, Homo sapiens
  misc_RNA (1)...(19): siRNA sense strand
ggaggaugaagaagaagaa

SEQ ID NO: 2312421 - RNA, 19 nt, Homo sapiens
  misc_RNA (1)...(19): siRNA sense strand
gggaagaagaagccagcau

SEQ ID NO: 2312422 - RNA, 19 nt, Homo sapiens
  misc_RNA (1)...(19): siRNA sense strand
aagcaggguuaaagcggaa

SEQ ID NO: 2312423 - RNA, 19 nt, Homo sapiens
  misc_RNA (1)...(19): siRNA sense strand
cuucuggaauaaagacaaa

SEQ ID NO: 2312424 - RNA, 19 nt, Homo sapiens
  misc_RNA (1)...(19): siRNA sense strand
aaagccaagugaugggaaa

SEQ ID NO: 2312425 - RNA, 19 nt, Homo sapiens
  misc_RNA (1)...(19): siRNA sense strand
ggauguuguuguucaggaa

SEQ ID NO: 2312426 - RNA, 19 nt, Homo sapiens
  misc_RNA (1)...(19): siRNA sense strand
uggaaaaggugucgacaau

SEQ ID NO: 2312427 - RNA, 19 nt, Homo sapiens
  misc_RNA (1)...(19): siRNA sense strand
gcuucauggaguugggaau

SEQ ID NO: 2312428 - RNA, 19 nt, Homo sapiens
  misc_RNA (1)...(19): siRNA sense strand
ugaagaagaagaagaagau

SEQ ID NO: 2312429 - RNA, 19 nt, Homo sapiens
  misc_RNA (1)...(19): siRNA sense strand
aagaagaggccaaugguga

SEQ ID NO: 2312430 - RNA, 19 nt, Homo sapiens
  misc_RNA (1)...(19): siRNA sense strand
aggaugaagaagaagaaga

SEQ ID NO: 2312431 - RNA, 19 nt, Homo sapiens
  misc_RNA (1)...(19): siRNA sense strand
augagaagccagaagauuu

SEQ ID NO: 2312432 - RNA, 19 nt, Homo sapiens
  misc_RNA (1)...(19): siRNA sense strand
agagaaugaaggucugaaa

SEQ ID NO: 2312433 - RNA, 19 nt, Homo sapiens
  misc_RNA (1)...(19): siRNA sense strand
agggaaacuggcugcgaua

SEQ ID NO: 2312434 - RNA, 19 nt, Homo sapiens
  misc_RNA (1)...(19): siRNA sense strand
aggaggaggaugaagaaga

SEQ ID NO: 2312435 - RNA, 19 nt, Homo sapiens
  misc_RNA (1)...(19): siRNA sense strand
ccaaagguguacggcgaaa

SEQ ID NO: 2312436 - RNA, 19 nt, Homo sapiens
  misc_RNA (1)...(19): siRNA sense strand
gguccaagcagaacgucaa

SEQ ID NO: 2312437 - RNA, 19 nt, Homo sapiens
  misc_RNA (1)...(19): siRNA sense strand
agcaaaaugucgucgaaua

SEQ ID NO: 2312438 - RNA, 19 nt, Homo sapiens
  misc_RNA (1)...(19): siRNA sense strand
cgauaugugaauugggcuu

SEQ ID NO: 2312439 - RNA, 19 nt, Homo sapiens
  misc_RNA (1)...(19): siRNA sense strand
ucugcaaauaugagagauu

SEQ ID NO: 2312440 - RNA, 19 nt, Homo sapiens
  misc_RNA (1)...(19): siRNA sense strand
aaauuaaggccgaaacaga

SEQ ID NO: 2312441 - RNA, 19 nt, Homo sapiens
  misc_RNA (1)...(19): siRNA sense strand
gcugcugacuugagugaga

SEQ ID NO: 2312442 - RNA, 19 nt, Homo sapiens
  misc_RNA (1)...(19): siRNA sense strand
acaugugggagguguauua

SEQ ID NO: 2312443 - RNA, 19 nt, Homo sapiens
  misc_RNA (1)...(19): siRNA sense strand
gguauuaacuguugccacu

SEQ ID NO: 2312444 - RNA, 19 nt, Homo sapiens
  misc_RNA (1)...(19): siRNA sense strand
caggaaacauucaacaaaa

SEQ ID NO: 2312445 - RNA, 19 nt, Homo sapiens
  misc_RNA (1)...(19): siRNA sense strand
agaagauccuuuagaaacu

SEQ ID NO: 2312446 - RNA, 19 nt, Homo sapiens
  misc_RNA (1)...(19): siRNA sense strand
agaagaagaagaagaugau

SEQ ID NO: 2312447 - RNA, 19 nt, Homo sapiens
  misc_RNA (1)...(19): siRNA sense strand
ccucuuagcauaucaacaa

SEQ ID NO: 2312448 - RNA, 19 nt, Homo sapiens
  misc_RNA (1)...(19): siRNA sense strand
guaaagaaaaggaaaccaa

SEQ ID NO: 2312449 - RNA, 19 nt, Homo sapiens
  misc_RNA (1)...(19): siRNA sense strand
ccauuaaagaucuaaccaa

SEQ ID NO: 2312450 - RNA, 19 nt, Homo sapiens
  misc_RNA (1)...(19): siRNA sense strand
uuuagauaacucugggaaa

SEQ ID NO: 2312451 - RNA, 19 nt, Homo sapiens
  misc_RNA (1)...(19): siRNA sense strand
cuccaugcuuugaugaaua

SEQ ID NO: 2312452 - RNA, 19 nt, Homo sapiens
  misc_RNA (1)...(19): siRNA sense strand
acucugaaggcaaggaauu

SEQ ID NO: 2312453 - RNA, 19 nt, Homo sapiens
  misc_RNA (1)...(19): siRNA sense strand
aggaggaggaagaggagga

SEQ ID NO: 2312454 - RNA, 19 nt, Homo sapiens
  misc_RNA (1)...(19): siRNA sense strand
aggaggaagaggaggagga

SEQ ID NO: 2312455 - RNA, 19 nt, Homo sapiens
  misc_RNA (1)...(19): siRNA sense strand
acaggaggaauuagagaau

SEQ ID NO: 2312456 - RNA, 19 nt, Homo sapiens
  misc_RNA (1)...(19): siRNA sense strand
cgucaaucaugcuuucaaa

SEQ ID NO: 2312457 - RNA, 19 nt, Homo sapiens
  misc_RNA (1)...(19): siRNA sense strand
acuaacuccugcagggauu

SEQ ID NO: 2312458 - RNA, 19 nt, Homo sapiens
  misc_RNA (1)...(19): siRNA sense strand
cgauaagaauggccaaaau

SEQ ID NO: 2312459 - RNA, 19 nt, Homo sapiens
  misc_RNA (1)...(19): siRNA sense strand
ugugaaaggaaguuuacaa

SEQ ID NO: 2312460 - RNA, 19 nt, Homo sapiens
  misc_RNA (1)...(19): siRNA sense strand
gggagagaugagagagaaa

SEQ ID NO: 2312461 - RNA, 19 nt, Homo sapiens
  misc_RNA (1)...(19): siRNA sense strand
gaacuaaagaagaggccaa

SEQ ID NO: 2312462 - RNA, 19 nt, Homo sapiens
  misc_RNA (1)...(19): siRNA sense strand
aagaagaagaggaguuaaa

SEQ ID NO: 2312463 - RNA, 19 nt, Homo sapiens
  misc_RNA (1)...(19): siRNA sense strand
gggaagaggaggaggagga

SEQ ID NO: 2312464 - RNA, 19 nt, Homo sapiens
  misc_RNA (1)...(19): siRNA sense strand
aggaagaggaggaggauga

SEQ ID NO: 2312465 - RNA, 19 nt, Homo sapiens
  misc_RNA (1)...(19): siRNA sense strand
cuaaagaagacgaagagaa

SEQ ID NO: 2312466 - RNA, 19 nt, Homo sapiens
  misc_RNA (1)...(19): siRNA sense strand
gcacaaauagugaggccaa

SEQ ID NO: 2312467 - RNA, 19 nt, Homo sapiens
  misc_RNA (1)...(19): siRNA sense strand
uggcaaagcaucuggagaa

SEQ ID NO: 2312468 - RNA, 19 nt, Homo sapiens
  misc_RNA (1)...(19): siRNA sense strand
ucuaaagaguggacagcua

SEQ ID NO: 2312469 - RNA, 19 nt, Homo sapiens
  misc_RNA (1)...(19): siRNA sense strand
cuaaagaagaagaggaguu

SEQ ID NO: 2312470 - RNA, 19 nt, Homo sapiens
  misc_RNA (1)...(19): siRNA sense strand
aggaggaauuagagaauga

SEQ ID NO: 2312471 - RNA, 19 nt, Homo sapiens
  misc_RNA (1)...(19): siRNA sense strand
ccagaagauccuuuagaaa

SEQ ID NO: 2312472 - RNA, 19 nt, Homo sapiens
  misc_RNA (1)...(19): siRNA sense strand
cggcagauuuguaugguau

SEQ ID NO: 2312473 - RNA, 19 nt, Homo sapiens
  misc_RNA (1)...(19): siRNA sense strand
augcaaguacugugggaaa

SEQ ID NO: 2312474 - RNA, 19 nt, Homo sapiens
  misc_RNA (1)...(19): siRNA sense strand
gcaaaaugucgucgaauaa

SEQ ID NO: 2312475 - RNA, 19 nt, Homo sapiens
  misc_RNA (1)...(19): siRNA sense strand
gcgccaugaagcaggguua

SEQ ID NO: 2312476 - RNA, 19 nt, Homo sapiens
  misc_RNA (1)...(19): siRNA sense strand
cuuucaaacaggaggaauu

SEQ ID NO: 2312477 - RNA, 19 nt, Homo sapiens
  misc_RNA (1)...(19): siRNA sense strand
gcgccaagcaggagcugaa

SEQ ID NO: 2312478 - RNA, 19 nt, Homo sapiens
  misc_RNA (1)...(19): siRNA sense strand
aagaagaagaagaagauga

SEQ ID NO: 2312479 - RNA, 19 nt, Homo sapiens
  misc_RNA (1)...(19): siRNA sense strand
augaagaagaagaagaaga

SEQ ID NO: 2312480 - RNA, 19 nt, Homo sapiens
  misc_RNA (1)...(19): siRNA sense strand
ggcaaagcaucuggagaaa

SEQ ID NO: 2312481 - RNA, 19 nt, Homo sapiens
  misc_RNA (1)...(19): siRNA sense strand
aagaagagguacacgccua

SEQ ID NO: 2312482 - RNA, 19 nt, Homo sapiens
  misc_RNA (1)...(19): siRNA sense strand
ggaggaugaagaagaagaa

SEQ ID NO: 2312483 - RNA, 19 nt, Homo sapiens
  misc_RNA (1)...(19): siRNA sense strand
gggaagaagaagccagcau

SEQ ID NO: 2312484 - RNA, 19 nt, Homo sapiens
  misc_RNA (1)...(19): siRNA sense strand
aagcaggguuaaagcggaa

SEQ ID NO: 2312485 - RNA, 19 nt, Homo sapiens
  misc_RNA (1)...(19): siRNA sense strand
cuucuggaauaaagacaaa

SEQ ID NO: 2312486 - RNA, 19 nt, Homo sapiens
  misc_RNA (1)...(19): siRNA sense strand
aaagccaagugaugggaaa

SEQ ID NO: 2312487 - RNA, 19 nt, Homo sapiens
  misc_RNA (1)...(19): siRNA sense strand
ggauguuguuguucaggaa

SEQ ID NO: 2312488 - RNA, 19 nt, Homo sapiens
  misc_RNA (1)...(19): siRNA sense strand
uggaaaaggugucgacaau

SEQ ID NO: 2312489 - RNA, 19 nt, Homo sapiens
  misc_RNA (1)...(19): siRNA sense strand
gcuucauggaguugggaau

SEQ ID NO: 2312490 - RNA, 19 nt, Homo sapiens
  misc_RNA (1)...(19): siRNA sense strand
ugaagaagaagaagaagau

SEQ ID NO: 2312491 - RNA, 19 nt, Homo sapiens
  misc_RNA (1)...(19): siRNA sense strand
aagaagaggccaaugguga

SEQ ID NO: 2312492 - RNA, 19 nt, Homo sapiens
  misc_RNA (1)...(19): siRNA sense strand
aggaugaagaagaagaaga

SEQ ID NO: 2312493 - RNA, 19 nt, Homo sapiens
  misc_RNA (1)...(19): siRNA sense strand
augagaagccagaagauuu

SEQ ID NO: 2312494 - RNA, 19 nt, Homo sapiens
  misc_RNA (1)...(19): siRNA sense strand
agagaaugaaggucugaaa

SEQ ID NO: 2312495 - RNA, 19 nt, Homo sapiens
  misc_RNA (1)...(19): siRNA sense strand
agggaaacuggcugcgaua

SEQ ID NO: 2312496 - RNA, 19 nt, Homo sapiens
  misc_RNA (1)...(19): siRNA sense strand
aggaggaggaugaagaaga

SEQ ID NO: 2312497 - RNA, 19 nt, Homo sapiens
  misc_RNA (1)...(19): siRNA sense strand
ccaaagguguacggcgaaa

SEQ ID NO: 2312498 - RNA, 19 nt, Homo sapiens
  misc_RNA (1)...(19): siRNA sense strand
gguccaagcagaacgucaa

SEQ ID NO: 2312499 - RNA, 19 nt, Homo sapiens
  misc_RNA (1)...(19): siRNA sense strand
agcaaaaugucgucgaaua

SEQ ID NO: 2312500 - RNA, 19 nt, Homo sapiens
  misc_RNA (1)...(19): siRNA sense strand
cgauaugugaauugggcuu

SEQ ID NO: 2312501 - RNA, 19 nt, Homo sapiens
  misc_RNA (1)...(19): siRNA sense strand
ucugcaaauaugagagauu

SEQ ID NO: 2312502 - RNA, 19 nt, Homo sapiens
  misc_RNA (1)...(19): siRNA sense strand
aaauuaaggccgaaacaga

SEQ ID NO: 2312503 - RNA, 19 nt, Homo sapiens
  misc_RNA (1)...(19): siRNA sense strand
gcugcugacuugagugaga

SEQ ID NO: 2312504 - RNA, 19 nt, Homo sapiens
  misc_RNA (1)...(19): siRNA sense strand
acaugugggagguguauua

SEQ ID NO: 2312505 - RNA, 19 nt, Homo sapiens
  misc_RNA (1)...(19): siRNA sense strand
gguauuaacuguugccacu

SEQ ID NO: 2312506 - RNA, 19 nt, Homo sapiens
  misc_RNA (1)...(19): siRNA sense strand
caggaaacauucaacaaaa

SEQ ID NO: 2312507 - RNA, 19 nt, Homo sapiens
  misc_RNA (1)...(19): siRNA sense strand
agaagauccuuuagaaacu

SEQ ID NO: 2312508 - RNA, 19 nt, Homo sapiens
  misc_RNA (1)...(19): siRNA sense strand
agaagaagaagaagaugau

SEQ ID NO: 2312509 - RNA, 19 nt, Homo sapiens
  misc_RNA (1)...(19): siRNA sense strand
ccucuuagcauaucaacaa

SEQ ID NO: 2312510 - RNA, 19 nt, Homo sapiens
  misc_RNA (1)...(19): siRNA sense strand
guaaagaaaaggaaaccaa

SEQ ID NO: 2312511 - RNA, 19 nt, Homo sapiens
  misc_RNA (1)...(19): siRNA sense strand
ccauuaaagaucuaaccaa

SEQ ID NO: 2312512 - RNA, 19 nt, Homo sapiens
  misc_RNA (1)...(19): siRNA sense strand
uuuagauaacucugggaaa

SEQ ID NO: 2312513 - RNA, 19 nt, Homo sapiens
  misc_RNA (1)...(19): siRNA sense strand
cuccaugcuuugaugaaua

SEQ ID NO: 2312514 - RNA, 19 nt, Homo sapiens
  misc_RNA (1)...(19): siRNA sense strand
acucugaaggcaaggaauu

SEQ ID NO: 2312515 - RNA, 19 nt, Homo sapiens
  misc_RNA (1)...(19): siRNA sense strand
aggaggaggaagaggagga

SEQ ID NO: 2312516 - RNA, 19 nt, Homo sapiens
  misc_RNA (1)...(19): siRNA sense strand
aggaggaagaggaggagga

SEQ ID NO: 2312517 - RNA, 19 nt, Homo sapiens
  misc_RNA (1)...(19): siRNA sense strand
acaggaggaauuagagaau

SEQ ID NO: 2312518 - RNA, 19 nt, Homo sapiens
  misc_RNA (1)...(19): siRNA sense strand
cgucaaucaugcuuucaaa

SEQ ID NO: 2312519 - RNA, 19 nt, Homo sapiens
  misc_RNA (1)...(19): siRNA sense strand
acuaacuccugcagggauu

SEQ ID NO: 2312520 - RNA, 19 nt, Homo sapiens
  misc_RNA (1)...(19): siRNA sense strand
cgauaagaauggccaaaau

SEQ ID NO: 2312521 - RNA, 19 nt, Homo sapiens
  misc_RNA (1)...(19): siRNA sense strand
ugugaaaggaaguuuacaa

SEQ ID NO: 2312522 - RNA, 19 nt, Homo sapiens
  misc_RNA (1)...(19): siRNA sense strand
ggaagaaggagcuggagga

SEQ ID NO: 2312523 - RNA, 19 nt, Homo sapiens
  misc_RNA (1)...(19): siRNA sense strand
agaaggagcuggaggaccu

SEQ ID NO: 2312524 - RNA, 19 nt, Homo sapiens
  misc_RNA (1)...(19): siRNA sense strand
ccaagaaggccuacaggga

SEQ ID NO: 2312525 - RNA, 19 nt, Homo sapiens
  misc_RNA (1)...(19): siRNA sense strand
aggacaacagagagggaga

SEQ ID NO: 2312526 - RNA, 19 nt, Homo sapiens
  misc_RNA (1)...(19): siRNA sense strand
ggcuggaacaggaggacuu

SEQ ID NO: 2312527 - RNA, 19 nt, Homo sapiens
  misc_RNA (1)...(19): siRNA sense strand
gcuggaugaaagagaagau

SEQ ID NO: 2312528 - RNA, 19 nt, Homo sapiens
  misc_RNA (1)...(19): siRNA sense strand
aggacuugguggaggcgca

SEQ ID NO: 2312529 - RNA, 19 nt, Homo sapiens
  misc_RNA (1)...(19): siRNA sense strand
ggaagaaggagcuggagga

SEQ ID NO: 2312530 - RNA, 19 nt, Homo sapiens
  misc_RNA (1)...(19): siRNA sense strand
agaaggagcuggaggaccu

SEQ ID NO: 2312531 - RNA, 19 nt, Homo sapiens
  misc_RNA (1)...(19): siRNA sense strand
ccaagaaggccuacaggga

SEQ ID NO: 2312532 - RNA, 19 nt, Homo sapiens
  misc_RNA (1)...(19): siRNA sense strand
aggacaacagagagggaga

SEQ ID NO: 2312533 - RNA, 19 nt, Homo sapiens
  misc_RNA (1)...(19): siRNA sense strand
ggcuggaacaggaggacuu

SEQ ID NO: 2312534 - RNA, 19 nt, Homo sapiens
  misc_RNA (1)...(19): siRNA sense strand
gcuggaugaaagagaagau

SEQ ID NO: 2312535 - RNA, 19 nt, Homo sapiens
  misc_RNA (1)...(19): siRNA sense strand
aggacuugguggaggcgca

SEQ ID NO: 2312536 - RNA, 19 nt, Homo sapiens
  misc_RNA (1)...(19): siRNA sense strand
uggaacagguugcgggaau

SEQ ID NO: 2312537 - RNA, 19 nt, Homo sapiens
  misc_RNA (1)...(19): siRNA sense strand
ugucagauaaggaaggaaa

SEQ ID NO: 2312538 - RNA, 19 nt, Homo sapiens
  misc_RNA (1)...(19): siRNA sense strand
uaacagugauagugggaca

SEQ ID NO: 2312539 - RNA, 19 nt, Homo sapiens
  misc_RNA (1)...(19): siRNA sense strand
cuacaauggcuuagaagau

SEQ ID NO: 2312540 - RNA, 19 nt, Homo sapiens
  misc_RNA (1)...(19): siRNA sense strand
aguacaaacuucuaggaau

SEQ ID NO: 2312541 - RNA, 19 nt, Homo sapiens
  misc_RNA (1)...(19): siRNA sense strand
ccucaaaguaagaccagua

SEQ ID NO: 2312542 - RNA, 19 nt, Homo sapiens
  misc_RNA (1)...(19): siRNA sense strand
aguaagaccaguagcacua

SEQ ID NO: 2312543 - RNA, 19 nt, Homo sapiens
  misc_RNA (1)...(19): siRNA sense strand
gcuuagaagaugagccuga

SEQ ID NO: 2312544 - RNA, 19 nt, Homo sapiens
  misc_RNA (1)...(19): siRNA sense strand
uggcuggaacagugagaaa

SEQ ID NO: 2312545 - RNA, 19 nt, Homo sapiens
  misc_RNA (1)...(19): siRNA sense strand
ccaugaaguaugacaaaga

SEQ ID NO: 2312546 - RNA, 19 nt, Homo sapiens
  misc_RNA (1)...(19): siRNA sense strand
gagaugaucaagaggcaau

SEQ ID NO: 2312547 - RNA, 19 nt, Homo sapiens
  misc_RNA (1)...(19): siRNA sense strand
ccaugaagugccucagaua

SEQ ID NO: 2312548 - RNA, 19 nt, Homo sapiens
  misc_RNA (1)...(19): siRNA sense strand
ccauggaggaugaaaguga

SEQ ID NO: 2312549 - RNA, 19 nt, Homo sapiens
  misc_RNA (1)...(19): siRNA sense strand
uguugaaaguauugcugaa

SEQ ID NO: 2312550 - RNA, 19 nt, Homo sapiens
  misc_RNA (1)...(19): siRNA sense strand
uaucaugaaaccagagauu

SEQ ID NO: 2312551 - RNA, 19 nt, Homo sapiens
  misc_RNA (1)...(19): siRNA sense strand
ccucauuguuauugggucu

SEQ ID NO: 2312552 - RNA, 19 nt, Homo sapiens
  misc_RNA (1)...(19): siRNA sense strand
gugaaagugaugaggagga

SEQ ID NO: 2312553 - RNA, 19 nt, Homo sapiens
  misc_RNA (1)...(19): siRNA sense strand
cuucaaguuugcaaaggaa

SEQ ID NO: 2312554 - RNA, 19 nt, Homo sapiens
  misc_RNA (1)...(19): siRNA sense strand
cugugaaauuacugcaaga

SEQ ID NO: 2312555 - RNA, 19 nt, Homo sapiens
  misc_RNA (1)...(19): siRNA sense strand
agaaagaacuucaccacca

SEQ ID NO: 2312556 - RNA, 19 nt, Homo sapiens
  misc_RNA (1)...(19): siRNA sense strand
auguagagcuucuuggaga

SEQ ID NO: 2312557 - RNA, 19 nt, Homo sapiens
  misc_RNA (1)...(19): siRNA sense strand
acauagacacgcuggaaca

SEQ ID NO: 2312558 - RNA, 19 nt, Homo sapiens
  misc_RNA (1)...(19): siRNA sense strand
gggucuucccucaaaguaa

SEQ ID NO: 2312559 - RNA, 19 nt, Homo sapiens
  misc_RNA (1)...(19): siRNA sense strand
ggccuaauagaguggcaaa

SEQ ID NO: 2312560 - RNA, 19 nt, Homo sapiens
  misc_RNA (1)...(19): siRNA sense strand
uagaagaacccauggagga

SEQ ID NO: 2312561 - RNA, 19 nt, Homo sapiens
  misc_RNA (1)...(19): siRNA sense strand
gaacaguuucauagagcca

SEQ ID NO: 2312562 - RNA, 19 nt, Homo sapiens
  misc_RNA (1)...(19): siRNA sense strand
augaagugccucagauauu

SEQ ID NO: 2312563 - RNA, 19 nt, Homo sapiens
  misc_RNA (1)...(19): siRNA sense strand
agggcgaggaggaggaaga

SEQ ID NO: 2312564 - RNA, 19 nt, Homo sapiens
  misc_RNA (1)...(19): siRNA sense strand
aaguaacagacaugaacua

SEQ ID NO: 2312565 - RNA, 19 nt, Homo sapiens
  misc_RNA (1)...(19): siRNA sense strand
gauaugacacuguggcaga

SEQ ID NO: 2312566 - RNA, 19 nt, Homo sapiens
  misc_RNA (1)...(19): siRNA sense strand
cagaaaagauccaagacca

SEQ ID NO: 2312567 - RNA, 19 nt, Homo sapiens
  misc_RNA (1)...(19): siRNA sense strand
accaagcagcuaagaguaa

SEQ ID NO: 2312568 - RNA, 19 nt, Homo sapiens
  misc_RNA (1)...(19): siRNA sense strand
gccugauguuccagagaga

SEQ ID NO: 2312569 - RNA, 19 nt, Homo sapiens
  misc_RNA (1)...(19): siRNA sense strand
aagcuauaucugugaaaca

SEQ ID NO: 2312570 - RNA, 19 nt, Homo sapiens
  misc_RNA (1)...(19): siRNA sense strand
aggaaguaacagacaugaa

SEQ ID NO: 2312571 - RNA, 19 nt, Homo sapiens
  misc_RNA (1)...(19): siRNA sense strand
agauaaggaaggaaaacua

SEQ ID NO: 2312572 - RNA, 19 nt, Homo sapiens
  misc_RNA (1)...(19): siRNA sense strand
gugagaaaaugcuggccua

SEQ ID NO: 2312573 - RNA, 19 nt, Homo sapiens
  misc_RNA (1)...(19): siRNA sense strand
caugcaagcucuagugacu

SEQ ID NO: 2312574 - RNA, 19 nt, Homo sapiens
  misc_RNA (1)...(19): siRNA sense strand
ucaugaaaccagagauugu

SEQ ID NO: 2312575 - RNA, 19 nt, Homo sapiens
  misc_RNA (1)...(19): siRNA sense strand
gagccaugaaguaugacaa

SEQ ID NO: 2312576 - RNA, 19 nt, Homo sapiens
  misc_RNA (1)...(19): siRNA sense strand
gcauuuugauguagagcuu

SEQ ID NO: 2312577 - RNA, 19 nt, Homo sapiens
  misc_RNA (1)...(19): siRNA sense strand
uggagaugaucaagaggca

SEQ ID NO: 2312578 - RNA, 19 nt, Homo sapiens
  misc_RNA (1)...(19): siRNA sense strand
acacuguggcagauuguua

SEQ ID NO: 2312579 - RNA, 19 nt, Homo sapiens
  misc_RNA (1)...(19): siRNA sense strand
ucaaguuugcaaaggaaau

SEQ ID NO: 2312580 - RNA, 19 nt, Homo sapiens
  misc_RNA (1)...(19): siRNA sense strand
cugugaagcuguacgagga

SEQ ID NO: 2312581 - RNA, 19 nt, Homo sapiens
  misc_RNA (1)...(19): siRNA sense strand
uggcaaaggagcagauuag

SEQ ID NO: 2312582 - RNA, 19 nt, Homo sapiens
  misc_RNA (1)...(19): siRNA sense strand
ugaaacaggaaguaacaga

SEQ ID NO: 2312583 - RNA, 19 nt, Homo sapiens
  misc_RNA (1)...(19): siRNA sense strand
augccagaguccaaguuua

SEQ ID NO: 2312584 - RNA, 19 nt, Homo sapiens
  misc_RNA (1)...(19): siRNA sense strand
guggcaaaggagcagauua

SEQ ID NO: 2312585 - RNA, 19 nt, Homo sapiens
  misc_RNA (1)...(19): siRNA sense strand
ugucaugguuccuuugcaa

SEQ ID NO: 2312586 - RNA, 19 nt, Homo sapiens
  misc_RNA (1)...(19): siRNA sense strand
acgaagacgacgacgacga

SEQ ID NO: 2312587 - RNA, 19 nt, Homo sapiens
  misc_RNA (1)...(19): siRNA sense strand
uggcacagauccucgaaca

SEQ ID NO: 2312588 - RNA, 19 nt, Homo sapiens
  misc_RNA (1)...(19): siRNA sense strand
agccaugaaguaugacaaa

SEQ ID NO: 2312589 - RNA, 19 nt, Homo sapiens
  misc_RNA (1)...(19): siRNA sense strand
acaauggcuuagaagauga

SEQ ID NO: 2312590 - RNA, 19 nt, Homo sapiens
  misc_RNA (1)...(19): siRNA sense strand
aggcaauuaaugaagcuau

SEQ ID NO: 2312591 - RNA, 19 nt, Homo sapiens
  misc_RNA (1)...(19): siRNA sense strand
augacaaagaugaaguuga

SEQ ID NO: 2312592 - RNA, 19 nt, Homo sapiens
  misc_RNA (1)...(19): siRNA sense strand
gauuugggacugauggaga

SEQ ID NO: 2312593 - RNA, 19 nt, Homo sapiens
  misc_RNA (1)...(19): siRNA sense strand
cuguaacccuguaaagcuu

SEQ ID NO: 2312594 - RNA, 19 nt, Homo sapiens
  misc_RNA (1)...(19): siRNA sense strand
uugcugaacagauggaaaa

SEQ ID NO: 2312595 - RNA, 19 nt, Homo sapiens
  misc_RNA (1)...(19): siRNA sense strand
auggaggaugaaagugaaa

SEQ ID NO: 2312596 - RNA, 19 nt, Homo sapiens
  misc_RNA (1)...(19): siRNA sense strand
ggcacagauccucgaacaa

SEQ ID NO: 2312597 - RNA, 19 nt, Homo sapiens
  misc_RNA (1)...(19): siRNA sense strand
gucuguuucauguggaaua

SEQ ID NO: 2312598 - RNA, 19 nt, Homo sapiens
  misc_RNA (1)...(19): siRNA sense strand
gcuggaacagugagaaaau

SEQ ID NO: 2312599 - RNA, 19 nt, Homo sapiens
  misc_RNA (1)...(19): siRNA sense strand
gaaagugaugaggaggaua

SEQ ID NO: 2312600 - RNA, 19 nt, Homo sapiens
  misc_RNA (1)...(19): siRNA sense strand
aagcgauguuugauauuga

SEQ ID NO: 2312601 - RNA, 19 nt, Homo sapiens
  misc_RNA (1)...(19): siRNA sense strand
gaaauauauccuggacaau

SEQ ID NO: 2312602 - RNA, 19 nt, Homo sapiens
  misc_RNA (1)...(19): siRNA sense strand
gaguauuaaagguggaaga

SEQ ID NO: 2312603 - RNA, 19 nt, Homo sapiens
  misc_RNA (1)...(19): siRNA sense strand
gcuugauggaccagacaaa

SEQ ID NO: 2312604 - RNA, 19 nt, Homo sapiens
  misc_RNA (1)...(19): siRNA sense strand
ggacagaagagaugcggga

SEQ ID NO: 2312605 - RNA, 19 nt, Homo sapiens
  misc_RNA (1)...(19): siRNA sense strand
gggcugacgugauggcaga

SEQ ID NO: 2312606 - RNA, 19 nt, Homo sapiens
  misc_RNA (1)...(19): siRNA sense strand
caucgaugggcuugagaga

SEQ ID NO: 2312607 - RNA, 19 nt, Homo sapiens
  misc_RNA (1)...(19): siRNA sense strand
gccagagggugguggucau

SEQ ID NO: 2312608 - RNA, 19 nt, Homo sapiens
  misc_RNA (1)...(19): siRNA sense strand
gcagaacaucgaugggcuu

SEQ ID NO: 2312609 - RNA, 19 nt, Homo sapiens
  misc_RNA (1)...(19): siRNA sense strand
cuggaaacuacaagcccaa

SEQ ID NO: 2312610 - RNA, 19 nt, Homo sapiens
  misc_RNA (1)...(19): siRNA sense strand
uggaaagccuaguggagcu

SEQ ID NO: 2312611 - RNA, 19 nt, Homo sapiens
  misc_RNA (1)...(19): siRNA sense strand
gaccuugugcagcgggaaa

SEQ ID NO: 2312612 - RNA, 19 nt, Homo sapiens
  misc_RNA (1)...(19): siRNA sense strand
uauuaaagguggaagaagg

SEQ ID NO: 2312613 - RNA, 19 nt, Homo sapiens
  misc_RNA (1)...(19): siRNA sense strand
cggcagggacgaugugagu

SEQ ID NO: 2312614 - RNA, 19 nt, Homo sapiens
  misc_RNA (1)...(19): siRNA sense strand
ucaaagaguuacagcgcuu

SEQ ID NO: 2312615 - RNA, 19 nt, Homo sapiens
  misc_RNA (1)...(19): siRNA sense strand
gcuuugagcaccugggaga

SEQ ID NO: 2312616 - RNA, 19 nt, Homo sapiens
  misc_RNA (1)...(19): siRNA sense strand
cguucaauguggaggccau

SEQ ID NO: 2312617 - RNA, 19 nt, Homo sapiens
  misc_RNA (1)...(19): siRNA sense strand
ugacagagcuccacggaug

SEQ ID NO: 2312618 - RNA, 19 nt, Homo sapiens
  misc_RNA (1)...(19): siRNA sense strand
gugcuuggauuguggggaa

SEQ ID NO: 2312619 - RNA, 19 nt, Homo sapiens
  misc_RNA (1)...(19): siRNA sense strand
ccugggagaaacucggaaa

SEQ ID NO: 2312620 - RNA, 19 nt, Homo sapiens
  misc_RNA (1)...(19): siRNA sense strand
gguuacagguuuauccuca

SEQ ID NO: 2312621 - RNA, 19 nt, Homo sapiens
  misc_RNA (1)...(19): siRNA sense strand
cgagaaacuucguaggcug

SEQ ID NO: 2312622 - RNA, 19 nt, Homo sapiens
  misc_RNA (1)...(19): siRNA sense strand
ggagaaacucggaaagcug

SEQ ID NO: 2312623 - RNA, 19 nt, Homo sapiens
  misc_RNA (1)...(19): siRNA sense strand
gggugcugcaagagcguuu

SEQ ID NO: 2312624 - RNA, 19 nt, Homo sapiens
  misc_RNA (1)...(19): siRNA sense strand
aagcuguacugguugguga

SEQ ID NO: 2312625 - RNA, 19 nt, Homo sapiens
  misc_RNA (1)...(19): siRNA sense strand
gugcccaaguagagagaaa

SEQ ID NO: 2312626 - RNA, 19 nt, Homo sapiens
  misc_RNA (1)...(19): siRNA sense strand
aagaagaggaggaaggaau

SEQ ID NO: 2312627 - RNA, 19 nt, Homo sapiens
  misc_RNA (1)...(19): siRNA sense strand
aggaacaacaagaguggaa

SEQ ID NO: 2312628 - RNA, 19 nt, Homo sapiens
  misc_RNA (1)...(19): siRNA sense strand
uggaagaggacuacagaca

SEQ ID NO: 2312629 - RNA, 19 nt, Homo sapiens
  misc_RNA (1)...(19): siRNA sense strand
gcucagaaagaaaaggaaa

SEQ ID NO: 2312630 - RNA, 19 nt, Homo sapiens
  misc_RNA (1)...(19): siRNA sense strand
cagugcaguuugaggaaga

SEQ ID NO: 2312631 - RNA, 19 nt, Homo sapiens
  misc_RNA (1)...(19): siRNA sense strand
agguggauucugaaggaaa

SEQ ID NO: 2312632 - RNA, 19 nt, Homo sapiens
  misc_RNA (1)...(19): siRNA sense strand
aagauauggcccagaguau

SEQ ID NO: 2312633 - RNA, 19 nt, Homo sapiens
  misc_RNA (1)...(19): siRNA sense strand
ggagagaagagcugggauc

SEQ ID NO: 2312634 - RNA, 19 nt, Homo sapiens
  misc_RNA (1)...(19): siRNA sense strand
agaaaugaaaaucgggaua

SEQ ID NO: 2312635 - RNA, 19 nt, Homo sapiens
  misc_RNA (1)...(19): siRNA sense strand
gguggauucugaaggaaaa

SEQ ID NO: 2312636 - RNA, 19 nt, Homo sapiens
  misc_RNA (1)...(19): siRNA sense strand
cuguaaaggaacaacaaga

SEQ ID NO: 2312637 - RNA, 19 nt, Homo sapiens
  misc_RNA (1)...(19): siRNA sense strand
gcccagaaagccagggaga

SEQ ID NO: 2312638 - RNA, 19 nt, Homo sapiens
  misc_RNA (1)...(19): siRNA sense strand
uggauuugcagguggagaa

SEQ ID NO: 2312639 - RNA, 19 nt, Homo sapiens
  misc_RNA (1)...(19): siRNA sense strand
ucuaaaagacccucagaua

SEQ ID NO: 2312640 - RNA, 19 nt, Homo sapiens
  misc_RNA (1)...(19): siRNA sense strand
aguucgagcagcugacaaa

SEQ ID NO: 2312641 - RNA, 19 nt, Homo sapiens
  misc_RNA (1)...(19): siRNA sense strand
uggagaggugguaaagaua

SEQ ID NO: 2312642 - RNA, 19 nt, Homo sapiens
  misc_RNA (1)...(19): siRNA sense strand
gguucagaccguagacaga

SEQ ID NO: 2312643 - RNA, 19 nt, Homo sapiens
  misc_RNA (1)...(19): siRNA sense strand
ccgaugaagaagcuauuaa

SEQ ID NO: 2312644 - RNA, 19 nt, Homo sapiens
  misc_RNA (1)...(19): siRNA sense strand
ggguuauacaauuccauua

SEQ ID NO: 2312645 - RNA, 19 nt, Homo sapiens
  misc_RNA (1)...(19): siRNA sense strand
gcgaaaagagagacagcau

SEQ ID NO: 2312646 - RNA, 19 nt, Homo sapiens
  misc_RNA (1)...(19): siRNA sense strand
agguggagaagaugaaauu

SEQ ID NO: 2312647 - RNA, 19 nt, Homo sapiens
  misc_RNA (1)...(19): siRNA sense strand
gaucaagccuggagaggug

SEQ ID NO: 2312648 - RNA, 19 nt, Homo sapiens
  misc_RNA (1)...(19): siRNA sense strand
augcaaaggguuauacaau

SEQ ID NO: 2312649 - RNA, 19 nt, Homo sapiens
  misc_RNA (1)...(19): siRNA sense strand
aagccagaauaaagaccaa

SEQ ID NO: 2312650 - RNA, 19 nt, Homo sapiens
  misc_RNA (1)...(19): siRNA sense strand
ucaaaacucauguggaaaa

SEQ ID NO: 2312651 - RNA, 19 nt, Homo sapiens
  misc_RNA (1)...(19): siRNA sense strand
ggaugguagaaaugcagaa

SEQ ID NO: 2312652 - RNA, 19 nt, Homo sapiens
  misc_RNA (1)...(19): siRNA sense strand
caagaguagccuuagaaaa

SEQ ID NO: 2312653 - RNA, 19 nt, Homo sapiens
  misc_RNA (1)...(19): siRNA sense strand
cucagaaagaaaaggaaaa

SEQ ID NO: 2312654 - RNA, 19 nt, Homo sapiens
  misc_RNA (1)...(19): siRNA sense strand
acaaggacauguaugguga

SEQ ID NO: 2312655 - RNA, 19 nt, Homo sapiens
  misc_RNA (1)...(19): siRNA sense strand
agccgaaagaugacuguaa

SEQ ID NO: 2312656 - RNA, 19 nt, Homo sapiens
  misc_RNA (1)...(19): siRNA sense strand
agucaaaagacaaggucau

SEQ ID NO: 2312657 - RNA, 19 nt, Homo sapiens
  misc_RNA (1)...(19): siRNA sense strand
gagaaauggcccagaaagc

SEQ ID NO: 2312658 - RNA, 19 nt, Homo sapiens
  misc_RNA (1)...(19): siRNA sense strand
ugcaaaggcccgaugaaga

SEQ ID NO: 2312659 - RNA, 19 nt, Homo sapiens
  misc_RNA (1)...(19): siRNA sense strand
ugaagagaaacuuagagaa

SEQ ID NO: 2312660 - RNA, 19 nt, Homo sapiens
  misc_RNA (1)...(19): siRNA sense strand
agagaagagcugggaucaa

SEQ ID NO: 2312661 - RNA, 19 nt, Homo sapiens
  misc_RNA (1)...(19): siRNA sense strand
cagaguauuuauaggccca

SEQ ID NO: 2312662 - RNA, 19 nt, Homo sapiens
  misc_RNA (1)...(19): siRNA sense strand
acuacagacaguacacaua

SEQ ID NO: 2312663 - RNA, 19 nt, Homo sapiens
  misc_RNA (1)...(19): siRNA sense strand
augaagagaaacuuagaga

SEQ ID NO: 2312664 - RNA, 19 nt, Homo sapiens
  misc_RNA (1)...(19): siRNA sense strand
agaauaaagaccaacagau

SEQ ID NO: 2312665 - RNA, 19 nt, Homo sapiens
  misc_RNA (1)...(19): siRNA sense strand
agaugacuguaaaggaaca

SEQ ID NO: 2312666 - RNA, 19 nt, Homo sapiens
  misc_RNA (1)...(19): siRNA sense strand
agagacagcaugaccggaa

SEQ ID NO: 2312667 - RNA, 19 nt, Homo sapiens
  misc_RNA (1)...(19): siRNA sense strand
ucaaccaauccaaggguau

SEQ ID NO: 2312668 - RNA, 19 nt, Homo sapiens
  misc_RNA (1)...(19): siRNA sense strand
agagauaacagaaaagaca

SEQ ID NO: 2312669 - RNA, 19 nt, Homo sapiens
  misc_RNA (1)...(19): siRNA sense strand
aguuauugcucucgguguu

SEQ ID NO: 2312670 - RNA, 19 nt, Homo sapiens
  misc_RNA (1)...(19): siRNA sense strand
gcgcauagcuugugccaac

SEQ ID NO: 2312671 - RNA, 19 nt, Homo sapiens
  misc_RNA (1)...(19): siRNA sense strand
ccaaguacggagaggguca

SEQ ID NO: 2312672 - RNA, 19 nt, Homo sapiens
  misc_RNA (1)...(19): siRNA sense strand
gcauuguggaaaagggaaa

SEQ ID NO: 2312673 - RNA, 19 nt, Homo sapiens
  misc_RNA (1)...(19): siRNA sense strand
gggauggacuccugcguca

SEQ ID NO: 2312674 - RNA, 19 nt, Homo sapiens
  misc_RNA (1)...(19): siRNA sense strand
gggauuacugagugugaca

SEQ ID NO: 2312675 - RNA, 19 nt, Homo sapiens
  misc_RNA (1)...(19): siRNA sense strand
auugacaagccgcgaguua

SEQ ID NO: 2312676 - RNA, 19 nt, Homo sapiens
  misc_RNA (1)...(19): siRNA sense strand
ccacagauaucacaggcuu

SEQ ID NO: 2312677 - RNA, 19 nt, Homo sapiens
  misc_RNA (1)...(19): siRNA sense strand
aaguaaagaugguggucuc

SEQ ID NO: 2312678 - RNA, 19 nt, Homo sapiens
  misc_RNA (1)...(19): siRNA sense strand
ccagagaagagguggagcu

SEQ ID NO: 2312679 - RNA, 19 nt, Homo sapiens
  misc_RNA (1)...(19): siRNA sense strand
agugaggaggaacgcgaaa

SEQ ID NO: 2312680 - RNA, 19 nt, Homo sapiens
  misc_RNA (1)...(19): siRNA sense strand
ggguacugcagaugagcaa

SEQ ID NO: 2312681 - RNA, 19 nt, Homo sapiens
  misc_RNA (1)...(19): siRNA sense strand
gggagaaguuguaccagca

SEQ ID NO: 2312682 - RNA, 19 nt, Homo sapiens
  misc_RNA (1)...(19): siRNA sense strand
aacggaagcuggugcgcaa

SEQ ID NO: 2312683 - RNA, 19 nt, Homo sapiens
  misc_RNA (1)...(19): siRNA sense strand
gcaacaugggcuuagucaa

SEQ ID NO: 2312684 - RNA, 19 nt, Homo sapiens
  misc_RNA (1)...(19): siRNA sense strand
gguuggugcgugagggcuu

SEQ ID NO: 2312685 - RNA, 19 nt, Homo sapiens
  misc_RNA (1)...(19): siRNA sense strand
gagggaaccuggaggcucu

SEQ ID NO: 2312686 - RNA, 19 nt, Homo sapiens
  misc_RNA (1)...(19): siRNA sense strand
agguggacuucuugcaaca

SEQ ID NO: 2312687 - RNA, 19 nt, Homo sapiens
  misc_RNA (1)...(19): siRNA sense strand
acuucuugcaacagguuaa

SEQ ID NO: 2312688 - RNA, 19 nt, Homo sapiens
  misc_RNA (1)...(19): siRNA sense strand
cagaaggcaacaugggcuu

SEQ ID NO: 2312689 - RNA, 19 nt, Homo sapiens
  misc_RNA (1)...(19): siRNA sense strand
ugccagguugugaggguaa

SEQ ID NO: 2312690 - RNA, 19 nt, Homo sapiens
  misc_RNA (1)...(19): siRNA sense strand
cagaaauguaccaggcugu

SEQ ID NO: 2312691 - RNA, 19 nt, Homo sapiens
  misc_RNA (1)...(19): siRNA sense strand
gggcaauggacuacgggcu

SEQ ID NO: 2312692 - RNA, 19 nt, Homo sapiens
  misc_RNA (1)...(19): siRNA sense strand
ugauuauagaccaggguua

SEQ ID NO: 2312693 - RNA, 19 nt, Homo sapiens
  misc_RNA (1)...(19): siRNA sense strand
ccacuuuagaugaggaaga

SEQ ID NO: 2312694 - RNA, 19 nt, Homo sapiens
  misc_RNA (1)...(19): siRNA sense strand
acgaaaacaaggagacaaa

SEQ ID NO: 2312695 - RNA, 19 nt, Homo sapiens
  misc_RNA (1)...(19): siRNA sense strand
gagaaauugagcagcgaca

SEQ ID NO: 2312696 - RNA, 19 nt, Homo sapiens
  misc_RNA (1)...(19): siRNA sense strand
aggaagaggacauggugau

SEQ ID NO: 2312697 - RNA, 19 nt, Homo sapiens
  misc_RNA (1)...(19): siRNA sense strand
gccuaugaccugugugcaa

SEQ ID NO: 2312698 - RNA, 19 nt, Homo sapiens
  misc_RNA (1)...(19): siRNA sense strand
uagaugaggaagaggacau

SEQ ID NO: 2312699 - RNA, 19 nt, Homo sapiens
  misc_RNA (1)...(19): siRNA sense strand
ggugugaagaagaaaccaa

SEQ ID NO: 2312700 - RNA, 19 nt, Homo sapiens
  misc_RNA (1)...(19): siRNA sense strand
cauuaaugucauaagggau

SEQ ID NO: 2312701 - RNA, 19 nt, Homo sapiens
  misc_RNA (1)...(19): siRNA sense strand
agacacgaaguccgagaaa

SEQ ID NO: 2312702 - RNA, 19 nt, Homo sapiens
  misc_RNA (1)...(19): siRNA sense strand
guucuaugaauuugcacua

SEQ ID NO: 2312703 - RNA, 19 nt, Homo sapiens
  misc_RNA (1)...(19): siRNA sense strand
cuaucgcacaggaaagaaa

SEQ ID NO: 2312704 - RNA, 19 nt, Homo sapiens
  misc_RNA (1)...(19): siRNA sense strand
ucugagauuuggagaugau

SEQ ID NO: 2312705 - RNA, 19 nt, Homo sapiens
  misc_RNA (1)...(19): siRNA sense strand
caucagagcccaugccguu

SEQ ID NO: 2312706 - RNA, 19 nt, Homo sapiens
  misc_RNA (1)...(19): siRNA sense strand
ggaaaauggagaaugaguu

SEQ ID NO: 2312707 - RNA, 19 nt, Homo sapiens
  misc_RNA (1)...(19): siRNA sense strand
gaggaagaggacaugguga

SEQ ID NO: 2312708 - RNA, 19 nt, Homo sapiens
  misc_RNA (1)...(19): siRNA sense strand
ggcuauugcaagacacgaa

SEQ ID NO: 2312709 - RNA, 19 nt, Homo sapiens
  misc_RNA (1)...(19): siRNA sense strand
cagugaugucauugcaaga

SEQ ID NO: 2312710 - RNA, 19 nt, Homo sapiens
  misc_RNA (1)...(19): siRNA sense strand
ggagaugauuauagaccag

SEQ ID NO: 2312711 - RNA, 19 nt, Homo sapiens
  misc_RNA (1)...(19): siRNA sense strand
aauuaagagccgacccaaa

SEQ ID NO: 2312712 - RNA, 19 nt, Homo sapiens
  misc_RNA (1)...(19): siRNA sense strand
agucagcaccauaggagaa

SEQ ID NO: 2312713 - RNA, 19 nt, Homo sapiens
  misc_RNA (1)...(19): siRNA sense strand
aggaaaagcaucugauaca

SEQ ID NO: 2312714 - RNA, 19 nt, Homo sapiens
  misc_RNA (1)...(19): siRNA sense strand
gaguuuacugugaaaggaa

SEQ ID NO: 2312715 - RNA, 19 nt, Homo sapiens
  misc_RNA (1)...(19): siRNA sense strand
ggucaugcccagaagacga

SEQ ID NO: 2312716 - RNA, 19 nt, Homo sapiens
  misc_RNA (1)...(19): siRNA sense strand
aaguauuaucugaaggaca

SEQ ID NO: 2312717 - RNA, 19 nt, Homo sapiens
  misc_RNA (1)...(19): siRNA sense strand
guuuacagacagaagucaa

SEQ ID NO: 2312718 - RNA, 19 nt, Homo sapiens
  misc_RNA (1)...(19): siRNA sense strand
augucaacagauugggaua

SEQ ID NO: 2312719 - RNA, 19 nt, Homo sapiens
  misc_RNA (1)...(19): siRNA sense strand
agcugauugcagagaaaua

SEQ ID NO: 2312720 - RNA, 19 nt, Homo sapiens
  misc_RNA (1)...(19): siRNA sense strand
aguuuacugugaaaggaaa

SEQ ID NO: 2312721 - RNA, 19 nt, Homo sapiens
  misc_RNA (1)...(19): siRNA sense strand
gugcaaaagcuuucaugaa

SEQ ID NO: 2312722 - RNA, 19 nt, Homo sapiens
  misc_RNA (1)...(19): siRNA sense strand
gagaaauaaagacggcuga

SEQ ID NO: 2312723 - RNA, 19 nt, Homo sapiens
  misc_RNA (1)...(19): siRNA sense strand
gcuaggguacagagaugaa

SEQ ID NO: 2312724 - RNA, 19 nt, Homo sapiens
  misc_RNA (1)...(19): siRNA sense strand
gcuguuauagauugggaau

SEQ ID NO: 2312725 - RNA, 19 nt, Homo sapiens
  misc_RNA (1)...(19): siRNA sense strand
gggauaugaaggagcugau

SEQ ID NO: 2312726 - RNA, 19 nt, Homo sapiens
  misc_RNA (1)...(19): siRNA sense strand
aggcuaggguacagagaug

SEQ ID NO: 2312727 - RNA, 19 nt, Homo sapiens
  misc_RNA (1)...(19): siRNA sense strand
ugaaggagcugauugcaga

SEQ ID NO: 2312728 - RNA, 19 nt, Homo sapiens
  misc_RNA (1)...(19): siRNA sense strand
uaucugaaggacaguuaaa

SEQ ID NO: 2312729 - RNA, 19 nt, Homo sapiens
  misc_RNA (1)...(19): siRNA sense strand
guucugauuuagggagcua

SEQ ID NO: 2312730 - RNA, 19 nt, Homo sapiens
  misc_RNA (1)...(19): siRNA sense strand
aaaccaucaaauugggaau

SEQ ID NO: 2312731 - RNA, 19 nt, Homo sapiens
  misc_RNA (1)...(19): siRNA sense strand
ggaauuaagagccgaccca

SEQ ID NO: 2312732 - RNA, 19 nt, Homo sapiens
  misc_RNA (1)...(19): siRNA sense strand
cuguuauagauugggaaua

SEQ ID NO: 2312733 - RNA, 19 nt, Homo sapiens
  misc_RNA (1)...(19): siRNA sense strand
ggcaggugcauaaggaaga

SEQ ID NO: 2312734 - RNA, 19 nt, Homo sapiens
  misc_RNA (1)...(19): siRNA sense strand
cagugauggcagauacauu

SEQ ID NO: 2312735 - RNA, 19 nt, Homo sapiens
  misc_RNA (1)...(19): siRNA sense strand
ccaauuuaucaaaggaaac

SEQ ID NO: 2312736 - RNA, 19 nt, Homo sapiens
  misc_RNA (1)...(19): siRNA sense strand
uuacaaguacaucuggaaa

SEQ ID NO: 2312737 - RNA, 19 nt, Homo sapiens
  misc_RNA (1)...(19): siRNA sense strand
gggaaagaauguaucagcu

SEQ ID NO: 2312738 - RNA, 19 nt, Homo sapiens
  misc_RNA (1)...(19): siRNA sense strand
gguacagagaugaaccuuu

SEQ ID NO: 2312739 - RNA, 19 nt, Homo sapiens
  misc_RNA (1)...(19): siRNA sense strand
cuacacaaggcuaggguac

SEQ ID NO: 2312740 - RNA, 19 nt, Homo sapiens
  misc_RNA (1)...(19): siRNA sense strand
ccaacuguacaaaggugaa

SEQ ID NO: 2312741 - RNA, 19 nt, Homo sapiens
  misc_RNA (1)...(19): siRNA sense strand
gggcaaaaugucacuauau

SEQ ID NO: 2312742 - RNA, 19 nt, Homo sapiens
  misc_RNA (1)...(19): siRNA sense strand
ccgauaugggaaagaaugu

SEQ ID NO: 2312743 - RNA, 19 nt, Homo sapiens
  misc_RNA (1)...(19): siRNA sense strand
acagaagucaagaaagcuu

SEQ ID NO: 2312744 - RNA, 19 nt, Homo sapiens
  misc_RNA (1)...(19): siRNA sense strand
cugauugcagagaaauaaa

SEQ ID NO: 2312745 - RNA, 19 nt, Homo sapiens
  misc_RNA (1)...(19): siRNA sense strand
cugcauaagaagucagaaa

SEQ ID NO: 2312746 - RNA, 19 nt, Homo sapiens
  misc_RNA (1)...(19): siRNA sense strand
augcagugcuaaagaguaa

SEQ ID NO: 2312747 - RNA, 19 nt, Homo sapiens
  misc_RNA (1)...(19): siRNA sense strand
cagagcagcaggagggaaa

SEQ ID NO: 2312748 - RNA, 19 nt, Homo sapiens
  misc_RNA (1)...(19): siRNA sense strand
agaauauuguggagaggua

SEQ ID NO: 2312749 - RNA, 19 nt, Homo sapiens
  misc_RNA (1)...(19): siRNA sense strand
cuguagaggaagaggaaga

SEQ ID NO: 2312750 - RNA, 19 nt, Homo sapiens
  misc_RNA (1)...(19): siRNA sense strand
uuuaaagcaugcagggaaa

SEQ ID NO: 2312751 - RNA, 19 nt, Homo sapiens
  misc_RNA (1)...(19): siRNA sense strand
caucagaagagcucagaaa

SEQ ID NO: 2312752 - RNA, 19 nt, Homo sapiens
  misc_RNA (1)...(19): siRNA sense strand
auuaguaggugcaaagaaa

SEQ ID NO: 2312753 - RNA, 19 nt, Homo sapiens
  misc_RNA (1)...(19): siRNA sense strand
ccagugagcuagaaggcaa

SEQ ID NO: 2312754 - RNA, 19 nt, Homo sapiens
  misc_RNA (1)...(19): siRNA sense strand
ugaucgaacucaaggacaa

SEQ ID NO: 2312755 - RNA, 19 nt, Homo sapiens
  misc_RNA (1)...(19): siRNA sense strand
ugaaauagcauguggggaa

SEQ ID NO: 2312756 - RNA, 19 nt, Homo sapiens
  misc_RNA (1)...(19): siRNA sense strand
ccaagaacagccagauaaa

SEQ ID NO: 2312757 - RNA, 19 nt, Homo sapiens
  misc_RNA (1)...(19): siRNA sense strand
cuucaaaacuagaaagaga

SEQ ID NO: 2312758 - RNA, 19 nt, Homo sapiens
  misc_RNA (1)...(19): siRNA sense strand
ggcaggaaauagagaguga

SEQ ID NO: 2312759 - RNA, 19 nt, Homo sapiens
  misc_RNA (1)...(19): siRNA sense strand
ugaaagugauggugagcuu

SEQ ID NO: 2312760 - RNA, 19 nt, Homo sapiens
  misc_RNA (1)...(19): siRNA sense strand
gagugaaggagauggguau

SEQ ID NO: 2312761 - RNA, 19 nt, Homo sapiens
  misc_RNA (1)...(19): siRNA sense strand
gcuucaggacagaaagaaa

SEQ ID NO: 2312762 - RNA, 19 nt, Homo sapiens
  misc_RNA (1)...(19): siRNA sense strand
auaaaggaacagagaagaa

SEQ ID NO: 2312763 - RNA, 19 nt, Homo sapiens
  misc_RNA (1)...(19): siRNA sense strand
agucaaaguuauagacacu

SEQ ID NO: 2312764 - RNA, 19 nt, Homo sapiens
  misc_RNA (1)...(19): siRNA sense strand
ccaugauaguauuaaggaa

SEQ ID NO: 2312765 - RNA, 19 nt, Homo sapiens
  misc_RNA (1)...(19): siRNA sense strand
agggagaacaggcguaaua

SEQ ID NO: 2312766 - RNA, 19 nt, Homo sapiens
  misc_RNA (1)...(19): siRNA sense strand
ggauuugcuuccagggaga

SEQ ID NO: 2312767 - RNA, 19 nt, Homo sapiens
  misc_RNA (1)...(19): siRNA sense strand
ugaaagaggagaaggagga

SEQ ID NO: 2312768 - RNA, 19 nt, Homo sapiens
  misc_RNA (1)...(19): siRNA sense strand
ucuaaaaggacuucagaaa

SEQ ID NO: 2312769 - RNA, 19 nt, Homo sapiens
  misc_RNA (1)...(19): siRNA sense strand
ugucugauguggagaguga

SEQ ID NO: 2312770 - RNA, 19 nt, Homo sapiens
  misc_RNA (1)...(19): siRNA sense strand
guugauaguacaagucaua

SEQ ID NO: 2312771 - RNA, 19 nt, Homo sapiens
  misc_RNA (1)...(19): siRNA sense strand
gugaagaagaggagaauug

SEQ ID NO: 2312772 - RNA, 19 nt, Homo sapiens
  misc_RNA (1)...(19): siRNA sense strand
cuagaagcucugauggaaa

SEQ ID NO: 2312773 - RNA, 19 nt, Homo sapiens
  misc_RNA (1)...(19): siRNA sense strand
caggacagaaagaaaguua

SEQ ID NO: 2312774 - RNA, 19 nt, Homo sapiens
  misc_RNA (1)...(19): siRNA sense strand
gccugaaagaagaggaaga

SEQ ID NO: 2312775 - RNA, 19 nt, Homo sapiens
  misc_RNA (1)...(19): siRNA sense strand
agaugaaagaggagaagga

SEQ ID NO: 2312776 - RNA, 19 nt, Homo sapiens
  misc_RNA (1)...(19): siRNA sense strand
aggaagaauugcagucaca

SEQ ID NO: 2312777 - RNA, 19 nt, Homo sapiens
  misc_RNA (1)...(19): siRNA sense strand
ggaagagauuauaaagacu

SEQ ID NO: 2312778 - RNA, 19 nt, Homo sapiens
  misc_RNA (1)...(19): siRNA sense strand
augcaaaguugauagugaa

SEQ ID NO: 2312779 - RNA, 19 nt, Homo sapiens
  misc_RNA (1)...(19): siRNA sense strand
gaauauuaguaggugcaaa

SEQ ID NO: 2312780 - RNA, 19 nt, Homo sapiens
  misc_RNA (1)...(19): siRNA sense strand
ugaaagaagaggaagacca

SEQ ID NO: 2312781 - RNA, 19 nt, Homo sapiens
  misc_RNA (1)...(19): siRNA sense strand
aagaagaggaagaccagaa

SEQ ID NO: 2312782 - RNA, 19 nt, Homo sapiens
  misc_RNA (1)...(19): siRNA sense strand
aaguuagaguggagguaga

SEQ ID NO: 2312783 - RNA, 19 nt, Homo sapiens
  misc_RNA (1)...(19): siRNA sense strand
acagagaagaauccggaaa

SEQ ID NO: 2312784 - RNA, 19 nt, Homo sapiens
  misc_RNA (1)...(19): siRNA sense strand
caggaaauagagagugauu

SEQ ID NO: 2312785 - RNA, 19 nt, Homo sapiens
  misc_RNA (1)...(19): siRNA sense strand
acgcugaaauagagcccaa

SEQ ID NO: 2312786 - RNA, 19 nt, Homo sapiens
  misc_RNA (1)...(19): siRNA sense strand
aagcaugcagggaaagaaa

SEQ ID NO: 2312787 - RNA, 19 nt, Homo sapiens
  misc_RNA (1)...(19): siRNA sense strand
ucauaaaggaacagagaag

SEQ ID NO: 2312788 - RNA, 19 nt, Homo sapiens
  misc_RNA (1)...(19): siRNA sense strand
cagagaagaauccggaaau

SEQ ID NO: 2312789 - RNA, 19 nt, Homo sapiens
  misc_RNA (1)...(19): siRNA sense strand
agaacaguauggugggaca

SEQ ID NO: 2312790 - RNA, 19 nt, Homo sapiens
  misc_RNA (1)...(19): siRNA sense strand
cagauaaaacaguggauau

SEQ ID NO: 2312791 - RNA, 19 nt, Homo sapiens
  misc_RNA (1)...(19): siRNA sense strand
ggcucaagaagaagggaau

SEQ ID NO: 2312792 - RNA, 19 nt, Homo sapiens
  misc_RNA (1)...(19): siRNA sense strand
cuguugugguugugccaaa

SEQ ID NO: 2312793 - RNA, 19 nt, Homo sapiens
  misc_RNA (1)...(19): siRNA sense strand
ggaggaaagcaaaguacuu

SEQ ID NO: 2312794 - RNA, 19 nt, Homo sapiens
  misc_RNA (1)...(19): siRNA sense strand
ccaacauagaagcuaguaa

SEQ ID NO: 2312795 - RNA, 19 nt, Homo sapiens
  misc_RNA (1)...(19): siRNA sense strand
ggacaguuggaaagaccua

SEQ ID NO: 2312796 - RNA, 19 nt, Homo sapiens
  misc_RNA (1)...(19): siRNA sense strand
cagucuaacucucuugaaa

SEQ ID NO: 2312797 - RNA, 19 nt, Homo sapiens
  misc_RNA (1)...(19): siRNA sense strand
aagaauauaagcagagcau

SEQ ID NO: 2312798 - RNA, 19 nt, Homo sapiens
  misc_RNA (1)...(19): siRNA sense strand
gcaaaaugcagaacaguau

SEQ ID NO: 2312799 - RNA, 19 nt, Homo sapiens
  misc_RNA (1)...(19): siRNA sense strand
gguagagcagggagagaca

SEQ ID NO: 2312800 - RNA, 19 nt, Homo sapiens
  misc_RNA (1)...(19): siRNA sense strand
caggcguaauaauggguua

SEQ ID NO: 2312801 - RNA, 19 nt, Homo sapiens
  misc_RNA (1)...(19): siRNA sense strand
agacauuuguaugaggaaa

SEQ ID NO: 2312802 - RNA, 19 nt, Homo sapiens
  misc_RNA (1)...(19): siRNA sense strand
aaguaaagccuguccucaa

SEQ ID NO: 2312803 - RNA, 19 nt, Homo sapiens
  misc_RNA (1)...(19): siRNA sense strand
ccugaaauaagcagcaauu

SEQ ID NO: 2312804 - RNA, 19 nt, Homo sapiens
  misc_RNA (1)...(19): siRNA sense strand
gggcuugagagcugccaaa

SEQ ID NO: 2312805 - RNA, 19 nt, Homo sapiens
  misc_RNA (1)...(19): siRNA sense strand
cagaaagcccauuuagaga

SEQ ID NO: 2312806 - RNA, 19 nt, Homo sapiens
  misc_RNA (1)...(19): siRNA sense strand
ccaguugauacgaggguuu

SEQ ID NO: 2312807 - RNA, 19 nt, Homo sapiens
  misc_RNA (1)...(19): siRNA sense strand
cagauaguagacugggaaa

SEQ ID NO: 2312808 - RNA, 19 nt, Homo sapiens
  misc_RNA (1)...(19): siRNA sense strand
acacuuuagcugugaauga

SEQ ID NO: 2312809 - RNA, 19 nt, Homo sapiens
  misc_RNA (1)...(19): siRNA sense strand
ugaugcaaccagugagcua

SEQ ID NO: 2312810 - RNA, 19 nt, Homo sapiens
  misc_RNA (1)...(19): siRNA sense strand
guacuuugaacgauagcaa

SEQ ID NO: 2312811 - RNA, 19 nt, Homo sapiens
  misc_RNA (1)...(19): siRNA sense strand
cugcauaagaagucagaaa

SEQ ID NO: 2312812 - RNA, 19 nt, Homo sapiens
  misc_RNA (1)...(19): siRNA sense strand
augcagugcuaaagaguaa

SEQ ID NO: 2312813 - RNA, 19 nt, Homo sapiens
  misc_RNA (1)...(19): siRNA sense strand
cagagcagcaggagggaaa

SEQ ID NO: 2312814 - RNA, 19 nt, Homo sapiens
  misc_RNA (1)...(19): siRNA sense strand
agaauauuguggagaggua

SEQ ID NO: 2312815 - RNA, 19 nt, Homo sapiens
  misc_RNA (1)...(19): siRNA sense strand
cuguagaggaagaggaaga

SEQ ID NO: 2312816 - RNA, 19 nt, Homo sapiens
  misc_RNA (1)...(19): siRNA sense strand
uuuaaagcaugcagggaaa

SEQ ID NO: 2312817 - RNA, 19 nt, Homo sapiens
  misc_RNA (1)...(19): siRNA sense strand
caucagaagagcucagaaa

SEQ ID NO: 2312818 - RNA, 19 nt, Homo sapiens
  misc_RNA (1)...(19): siRNA sense strand
auuaguaggugcaaagaaa

SEQ ID NO: 2312819 - RNA, 19 nt, Homo sapiens
  misc_RNA (1)...(19): siRNA sense strand
ccagugagcuagaaggcaa

SEQ ID NO: 2312820 - RNA, 19 nt, Homo sapiens
  misc_RNA (1)...(19): siRNA sense strand
ugaucgaacucaaggacaa

SEQ ID NO: 2312821 - RNA, 19 nt, Homo sapiens
  misc_RNA (1)...(19): siRNA sense strand
caccaauuguacagaguua

SEQ ID NO: 2312822 - RNA, 19 nt, Homo sapiens
  misc_RNA (1)...(19): siRNA sense strand
ugaaauagcauguggggaa

SEQ ID NO: 2312823 - RNA, 19 nt, Homo sapiens
  misc_RNA (1)...(19): siRNA sense strand
ccaagaacagccagauaaa

SEQ ID NO: 2312824 - RNA, 19 nt, Homo sapiens
  misc_RNA (1)...(19): siRNA sense strand
ggcaggaaauagagaguga

SEQ ID NO: 2312825 - RNA, 19 nt, Homo sapiens
  misc_RNA (1)...(19): siRNA sense strand
ugaaagugauggugagcuu

SEQ ID NO: 2312826 - RNA, 19 nt, Homo sapiens
  misc_RNA (1)...(19): siRNA sense strand
gagugaaggagauggguau

SEQ ID NO: 2312827 - RNA, 19 nt, Homo sapiens
  misc_RNA (1)...(19): siRNA sense strand
cuucaaaacuagaaagaga

SEQ ID NO: 2312828 - RNA, 19 nt, Homo sapiens
  misc_RNA (1)...(19): siRNA sense strand
gcuucaggacagaaagaaa

SEQ ID NO: 2312829 - RNA, 19 nt, Homo sapiens
  misc_RNA (1)...(19): siRNA sense strand
cugcaaagugggaagaauu

SEQ ID NO: 2312830 - RNA, 19 nt, Homo sapiens
  misc_RNA (1)...(19): siRNA sense strand
auaaaggaacagagaagaa

SEQ ID NO: 2312831 - RNA, 19 nt, Homo sapiens
  misc_RNA (1)...(19): siRNA sense strand
agucaaaguuauagacacu

SEQ ID NO: 2312832 - RNA, 19 nt, Homo sapiens
  misc_RNA (1)...(19): siRNA sense strand
cugaggaccuggagugcaa

SEQ ID NO: 2312833 - RNA, 19 nt, Homo sapiens
  misc_RNA (1)...(19): siRNA sense strand
gugcaaugagaaugugaaa

SEQ ID NO: 2312834 - RNA, 19 nt, Homo sapiens
  misc_RNA (1)...(19): siRNA sense strand
ccaugauaguauuaaggaa

SEQ ID NO: 2312835 - RNA, 19 nt, Homo sapiens
  misc_RNA (1)...(19): siRNA sense strand
agggagaacaggcguaaua

SEQ ID NO: 2312836 - RNA, 19 nt, Homo sapiens
  misc_RNA (1)...(19): siRNA sense strand
gagaaaaggaaacgaagaa

SEQ ID NO: 2312837 - RNA, 19 nt, Homo sapiens
  misc_RNA (1)...(19): siRNA sense strand
ggauuugcuuccagggaga

SEQ ID NO: 2312838 - RNA, 19 nt, Homo sapiens
  misc_RNA (1)...(19): siRNA sense strand
ugaaagaggagaaggagga

SEQ ID NO: 2312839 - RNA, 19 nt, Homo sapiens
  misc_RNA (1)...(19): siRNA sense strand
ucuaaaaggacuucagaaa

SEQ ID NO: 2312840 - RNA, 19 nt, Homo sapiens
  misc_RNA (1)...(19): siRNA sense strand
ugucugauguggagaguga

SEQ ID NO: 2312841 - RNA, 19 nt, Homo sapiens
  misc_RNA (1)...(19): siRNA sense strand
guugauaguacaagucaua

SEQ ID NO: 2312842 - RNA, 19 nt, Homo sapiens
  misc_RNA (1)...(19): siRNA sense strand
gugaagaagaggagaauug

SEQ ID NO: 2312843 - RNA, 19 nt, Homo sapiens
  misc_RNA (1)...(19): siRNA sense strand
cuagaagcucugauggaaa

SEQ ID NO: 2312844 - RNA, 19 nt, Homo sapiens
  misc_RNA (1)...(19): siRNA sense strand
caggacagaaagaaaguua

SEQ ID NO: 2312845 - RNA, 19 nt, Homo sapiens
  misc_RNA (1)...(19): siRNA sense strand
gccugaaagaagaggaaga

SEQ ID NO: 2312846 - RNA, 19 nt, Homo sapiens
  misc_RNA (1)...(19): siRNA sense strand
agaugaaagaggagaagga

SEQ ID NO: 2312847 - RNA, 19 nt, Homo sapiens
  misc_RNA (1)...(19): siRNA sense strand
aggaagaauugcagucaca

SEQ ID NO: 2312848 - RNA, 19 nt, Homo sapiens
  misc_RNA (1)...(19): siRNA sense strand
cgaauuaaagaccgcaaua

SEQ ID NO: 2312849 - RNA, 19 nt, Homo sapiens
  misc_RNA (1)...(19): siRNA sense strand
cagugaacuagcaaagaaa

SEQ ID NO: 2312850 - RNA, 19 nt, Homo sapiens
  misc_RNA (1)...(19): siRNA sense strand
aaaccaaggaguacauuaa

SEQ ID NO: 2312851 - RNA, 19 nt, Homo sapiens
  misc_RNA (1)...(19): siRNA sense strand
ggaagagauuauaaagacu

SEQ ID NO: 2312852 - RNA, 19 nt, Homo sapiens
  misc_RNA (1)...(19): siRNA sense strand
augcaaaguugauagugaa

SEQ ID NO: 2312853 - RNA, 19 nt, Homo sapiens
  misc_RNA (1)...(19): siRNA sense strand
gaauauuaguaggugcaaa

SEQ ID NO: 2312854 - RNA, 19 nt, Homo sapiens
  misc_RNA (1)...(19): siRNA sense strand
ugaaagaagaggaagacca

SEQ ID NO: 2312855 - RNA, 19 nt, Homo sapiens
  misc_RNA (1)...(19): siRNA sense strand
aagaagaggaagaccagaa

SEQ ID NO: 2312856 - RNA, 19 nt, Homo sapiens
  misc_RNA (1)...(19): siRNA sense strand
aaguuagaguggagguaga

SEQ ID NO: 2312857 - RNA, 19 nt, Homo sapiens
  misc_RNA (1)...(19): siRNA sense strand
acagagaagaauccggaaa

SEQ ID NO: 2312858 - RNA, 19 nt, Homo sapiens
  misc_RNA (1)...(19): siRNA sense strand
caggaaauagagagugauu

SEQ ID NO: 2312859 - RNA, 19 nt, Homo sapiens
  misc_RNA (1)...(19): siRNA sense strand
acgcugaaauagagcccaa

SEQ ID NO: 2312860 - RNA, 19 nt, Homo sapiens
  misc_RNA (1)...(19): siRNA sense strand
ccggaaaccugacugcaaa

SEQ ID NO: 2312861 - RNA, 19 nt, Homo sapiens
  misc_RNA (1)...(19): siRNA sense strand
aagcaugcagggaaagaaa

SEQ ID NO: 2312862 - RNA, 19 nt, Homo sapiens
  misc_RNA (1)...(19): siRNA sense strand
ucauaaaggaacagagaag

SEQ ID NO: 2312863 - RNA, 19 nt, Homo sapiens
  misc_RNA (1)...(19): siRNA sense strand
cagagaagaauccggaaau

SEQ ID NO: 2312864 - RNA, 19 nt, Homo sapiens
  misc_RNA (1)...(19): siRNA sense strand
agaacaguauggugggaca

SEQ ID NO: 2312865 - RNA, 19 nt, Homo sapiens
  misc_RNA (1)...(19): siRNA sense strand
cagauaaaacaguggauau

SEQ ID NO: 2312866 - RNA, 19 nt, Homo sapiens
  misc_RNA (1)...(19): siRNA sense strand
ggcucaagaagaagggaau

SEQ ID NO: 2312867 - RNA, 19 nt, Homo sapiens
  misc_RNA (1)...(19): siRNA sense strand
cuguugugguugugccaaa

SEQ ID NO: 2312868 - RNA, 19 nt, Homo sapiens
  misc_RNA (1)...(19): siRNA sense strand
ggaggaaagcaaaguacuu

SEQ ID NO: 2312869 - RNA, 19 nt, Homo sapiens
  misc_RNA (1)...(19): siRNA sense strand
ggaaggucauuaaagguga

SEQ ID NO: 2312870 - RNA, 19 nt, Homo sapiens
  misc_RNA (1)...(19): siRNA sense strand
gcuucuagcuggagggcug

SEQ ID NO: 2312871 - RNA, 19 nt, Homo sapiens
  misc_RNA (1)...(19): siRNA sense strand
ucauuaaaggugaagagau

SEQ ID NO: 2312872 - RNA, 19 nt, Homo sapiens
  misc_RNA (1)...(19): siRNA sense strand
augcagggaaggucauuaa

SEQ ID NO: 2312873 - RNA, 19 nt, Homo sapiens
  misc_RNA (1)...(19): siRNA sense strand
cgaaugaaggacucggcau

SEQ ID NO: 2312874 - RNA, 19 nt, Homo sapiens
  misc_RNA (1)...(19): siRNA sense strand
ggaaggucauuaaagguga

SEQ ID NO: 2312875 - RNA, 19 nt, Homo sapiens
  misc_RNA (1)...(19): siRNA sense strand
gcuucuagcuggagggcug

SEQ ID NO: 2312876 - RNA, 19 nt, Homo sapiens
  misc_RNA (1)...(19): siRNA sense strand
ucauuaaaggugaagagau

SEQ ID NO: 2312877 - RNA, 19 nt, Homo sapiens
  misc_RNA (1)...(19): siRNA sense strand
augcagggaaggucauuaa

SEQ ID NO: 2312878 - RNA, 19 nt, Homo sapiens
  misc_RNA (1)...(19): siRNA sense strand
cgaaugaaggacucggcau

SEQ ID NO: 2312879 - RNA, 19 nt, Homo sapiens
  misc_RNA (1)...(19): siRNA sense strand
gcaaacagcagaaaggaca

SEQ ID NO: 2312880 - RNA, 19 nt, Homo sapiens
  misc_RNA (1)...(19): siRNA sense strand
aggauuacacaguggagaa

SEQ ID NO: 2312881 - RNA, 19 nt, Homo sapiens
  misc_RNA (1)...(19): siRNA sense strand
ggugcagccaggaggcaaa

SEQ ID NO: 2312882 - RNA, 19 nt, Homo sapiens
  misc_RNA (1)...(19): siRNA sense strand
gucuggauaaagagggaaa

SEQ ID NO: 2312883 - RNA, 19 nt, Homo sapiens
  misc_RNA (1)...(19): siRNA sense strand
caaacagcagaaaggacaa

SEQ ID NO: 2312884 - RNA, 19 nt, Homo sapiens
  misc_RNA (1)...(19): siRNA sense strand
gugggaacaugcagggcga

SEQ ID NO: 2312885 - RNA, 19 nt, Homo sapiens
  misc_RNA (1)...(19): siRNA sense strand
ccgucuggauaaagaggga

SEQ ID NO: 2312886 - RNA, 19 nt, Homo sapiens
  misc_RNA (1)...(19): siRNA sense strand
gagggaaacucaaugucga

SEQ ID NO: 2312887 - RNA, 19 nt, Homo sapiens
  misc_RNA (1)...(19): siRNA sense strand
ccguugcgucugagaucaa

SEQ ID NO: 2312888 - RNA, 19 nt, Homo sapiens
  misc_RNA (1)...(19): siRNA sense strand
gcaaagaacuuaaagcuga

SEQ ID NO: 2312889 - RNA, 19 nt, Homo sapiens
  misc_RNA (1)...(19): siRNA sense strand
acagaaaacaggagaccaa

SEQ ID NO: 2312890 - RNA, 19 nt, Homo sapiens
  misc_RNA (1)...(19): siRNA sense strand
guagagaggaaguggagca

SEQ ID NO: 2312891 - RNA, 19 nt, Homo sapiens
  misc_RNA (1)...(19): siRNA sense strand
gcuucaaacacaagaacca

SEQ ID NO: 2312892 - RNA, 19 nt, Homo sapiens
  misc_RNA (1)...(19): siRNA sense strand
gggcaagaaacacagaaaa

SEQ ID NO: 2312893 - RNA, 19 nt, Homo sapiens
  misc_RNA (1)...(19): siRNA sense strand
ugggcaagaaacacagaaa

SEQ ID NO: 2312894 - RNA, 19 nt, Homo sapiens
  misc_RNA (1)...(19): siRNA sense strand
uggcacauuaccagagcaa

SEQ ID NO: 2312895 - RNA, 19 nt, Homo sapiens
  misc_RNA (1)...(19): siRNA sense strand
agcacaugauccagaagaa

SEQ ID NO: 2312896 - RNA, 19 nt, Homo sapiens
  misc_RNA (1)...(19): siRNA sense strand
aaggcaacccauucagaaa

SEQ ID NO: 2312897 - RNA, 19 nt, Homo sapiens
  misc_RNA (1)...(19): siRNA sense strand
gagagaugauagacccaga

SEQ ID NO: 2312898 - RNA, 19 nt, Homo sapiens
  misc_RNA (1)...(19): siRNA sense strand
acucaaccaccuuggaaga

SEQ ID NO: 2312899 - RNA, 19 nt, Homo sapiens
  misc_RNA (1)...(19): siRNA sense strand
cgucaaaggacaagcggga

SEQ ID NO: 2312900 - RNA, 19 nt, Homo sapiens
  misc_RNA (1)...(19): siRNA sense strand
agauggaagacaaugaaau

SEQ ID NO: 2312901 - RNA, 19 nt, Homo sapiens
  misc_RNA (1)...(19): siRNA sense strand
ccugcacguugaagaggaa

SEQ ID NO: 2312902 - RNA, 19 nt, Homo sapiens
  misc_RNA (1)...(19): siRNA sense strand
cugagauggaagacaauga

SEQ ID NO: 2312903 - RNA, 19 nt, Homo sapiens
  misc_RNA (1)...(19): siRNA sense strand
cuacaacuggauaaggaau

SEQ ID NO: 2312904 - RNA, 19 nt, Homo sapiens
  misc_RNA (1)...(19): siRNA sense strand
cggaccuagugguguguga

SEQ ID NO: 2312905 - RNA, 19 nt, Homo sapiens
  misc_RNA (1)...(19): siRNA sense strand
gagaauggcuggcgugcuc

SEQ ID NO: 2312906 - RNA, 19 nt, Homo sapiens
  misc_RNA (1)...(19): siRNA sense strand
cgucaaaggacaagcggga

SEQ ID NO: 2312907 - RNA, 19 nt, Homo sapiens
  misc_RNA (1)...(19): siRNA sense strand
agauggaagacaaugaaau

SEQ ID NO: 2312908 - RNA, 19 nt, Homo sapiens
  misc_RNA (1)...(19): siRNA sense strand
ccugcacguugaagaggaa

SEQ ID NO: 2312909 - RNA, 19 nt, Homo sapiens
  misc_RNA (1)...(19): siRNA sense strand
cugagauggaagacaauga

SEQ ID NO: 2312910 - RNA, 19 nt, Homo sapiens
  misc_RNA (1)...(19): siRNA sense strand
cuacaacuggauaaggaau

SEQ ID NO: 2312911 - RNA, 19 nt, Homo sapiens
  misc_RNA (1)...(19): siRNA sense strand
cggaccuagugguguguga

SEQ ID NO: 2312912 - RNA, 19 nt, Homo sapiens
  misc_RNA (1)...(19): siRNA sense strand
gagaauggcuggcgugcuc

SEQ ID NO: 2312913 - RNA, 19 nt, Homo sapiens
  misc_RNA (1)...(19): siRNA sense strand
cgucaaaggacaagcggga

SEQ ID NO: 2312914 - RNA, 19 nt, Homo sapiens
  misc_RNA (1)...(19): siRNA sense strand
agauggaagacaaugaaau

SEQ ID NO: 2312915 - RNA, 19 nt, Homo sapiens
  misc_RNA (1)...(19): siRNA sense strand
ccugcacguugaagaggaa

SEQ ID NO: 2312916 - RNA, 19 nt, Homo sapiens
  misc_RNA (1)...(19): siRNA sense strand
cugagauggaagacaauga

SEQ ID NO: 2312917 - RNA, 19 nt, Homo sapiens
  misc_RNA (1)...(19): siRNA sense strand
cuacaacuggauaaggaau

SEQ ID NO: 2312918 - RNA, 19 nt, Homo sapiens
  misc_RNA (1)...(19): siRNA sense strand
cggaccuagugguguguga

SEQ ID NO: 2312919 - RNA, 19 nt, Homo sapiens
  misc_RNA (1)...(19): siRNA sense strand
gagaauggcuggcgugcuc

SEQ ID NO: 2312920 - RNA, 19 nt, Homo sapiens
  misc_RNA (1)...(19): siRNA sense strand
gaagaaagcugcauggaag

SEQ ID NO: 2312921 - RNA, 19 nt, Homo sapiens
  misc_RNA (1)...(19): siRNA sense strand
agacaaacgaagggcacaa

SEQ ID NO: 2312922 - RNA, 19 nt, Homo sapiens
  misc_RNA (1)...(19): siRNA sense strand
gcaaaugcuuacaugcaga

SEQ ID NO: 2312923 - RNA, 19 nt, Homo sapiens
  misc_RNA (1)...(19): siRNA sense strand
acgaagggcacaaaagaaa

SEQ ID NO: 2312924 - RNA, 19 nt, Homo sapiens
  misc_RNA (1)...(19): siRNA sense strand
ccuuaugugacuacagcaa

SEQ ID NO: 2312925 - RNA, 19 nt, Homo sapiens
  misc_RNA (1)...(19): siRNA sense strand
gccaaaagcggaagcgcaa

SEQ ID NO: 2312926 - RNA, 19 nt, Homo sapiens
  misc_RNA (1)...(19): siRNA sense strand
ucgcgaaugugguggaaac

SEQ ID NO: 2312927 - RNA, 19 nt, Homo sapiens
  misc_RNA (1)...(19): siRNA sense strand
acugaagaguugugccuca

SEQ ID NO: 2312928 - RNA, 19 nt, Homo sapiens
  misc_RNA (1)...(19): siRNA sense strand
cuucaggaucuuuaaguuu

SEQ ID NO: 2312929 - RNA, 19 nt, Homo sapiens
  misc_RNA (1)...(19): siRNA sense strand
aggaaauauugucagaguu

SEQ ID NO: 2312930 - RNA, 19 nt, Homo sapiens
  misc_RNA (1)...(19): siRNA sense strand
ggucuuggucauugcucua

SEQ ID NO: 2312931 - RNA, 19 nt, Homo sapiens
  misc_RNA (1)...(19): siRNA sense strand
ugacagacaaugaggacgu

SEQ ID NO: 2312932 - RNA, 19 nt, Homo sapiens
  misc_RNA (1)...(19): siRNA sense strand
ccaaaauggaagagugugu

SEQ ID NO: 2312933 - RNA, 19 nt, Homo sapiens
  misc_RNA (1)...(19): siRNA sense strand
gaaacagugccgugcggau

SEQ ID NO: 2312934 - RNA, 19 nt, Homo sapiens
  misc_RNA (1)...(19): siRNA sense strand
acccagaaacucagcagua

SEQ ID NO: 2312935 - RNA, 19 nt, Homo sapiens
  misc_RNA (1)...(19): siRNA sense strand
ggguacacacugaagaguu

SEQ ID NO: 2312936 - RNA, 19 nt, Homo sapiens
  misc_RNA (1)...(19): siRNA sense strand
auggugacauggugccaaa

SEQ ID NO: 2312937 - RNA, 19 nt, Homo sapiens
  misc_RNA (1)...(19): siRNA sense strand
caguuauguucuacgcaga

SEQ ID NO: 2312938 - RNA, 19 nt, Homo sapiens
  misc_RNA (1)...(19): siRNA sense strand
uugcaagggcagcggcuau

SEQ ID NO: 2312939 - RNA, 19 nt, Homo sapiens
  misc_RNA (1)...(19): siRNA sense strand
cccaaaugccaauguauca

SEQ ID NO: 2312940 - RNA, 19 nt, Homo sapiens
  misc_RNA (1)...(19): siRNA sense strand
cguagugucaugaguauca

SEQ ID NO: 2312941 - RNA, 19 nt, Homo sapiens
  misc_RNA (1)...(19): siRNA sense strand
gggcuggugaugacagaca

SEQ ID NO: 2312942 - RNA, 19 nt, Homo sapiens
  misc_RNA (1)...(19): siRNA sense strand
acgaguuuguggacgaaca

SEQ ID NO: 2312943 - RNA, 19 nt, Homo sapiens
  misc_RNA (1)...(19): siRNA sense strand
ccgaggcaggagaggaaaa

SEQ ID NO: 2312944 - RNA, 19 nt, Homo sapiens
  misc_RNA (1)...(19): siRNA sense strand
gcaauaauaagcaucccaa

SEQ ID NO: 2312945 - RNA, 19 nt, Homo sapiens
  misc_RNA (1)...(19): siRNA sense strand
aauaauaagcaucccaaca

SEQ ID NO: 2312946 - RNA, 19 nt, Homo sapiens
  misc_RNA (1)...(19): siRNA sense strand
auacaagaacucagcacga

SEQ ID NO: 2312947 - RNA, 19 nt, Homo sapiens
  misc_RNA (1)...(19): siRNA sense strand
ugcagaagcuggagcggua

SEQ ID NO: 2312948 - RNA, 19 nt, Homo sapiens
  misc_RNA (1)...(19): siRNA sense strand
ccaacgaguuacugcguga

SEQ ID NO: 2312949 - RNA, 19 nt, Homo sapiens
  misc_RNA (1)...(19): siRNA sense strand
gcaacuuccugcuggccaa

SEQ ID NO: 2312950 - RNA, 19 nt, Homo sapiens
  misc_RNA (1)...(19): siRNA sense strand
ccggauaguggauggcauu

SEQ ID NO: 2312951 - RNA, 19 nt, Homo sapiens
  misc_RNA (1)...(19): siRNA sense strand
acaccgacgcggagaagau

SEQ ID NO: 2312952 - RNA, 19 nt, Homo sapiens
  misc_RNA (1)...(19): siRNA sense strand
aggcugaggaggugaagga

SEQ ID NO: 2312953 - RNA, 19 nt, Homo sapiens
  misc_RNA (1)...(19): siRNA sense strand
agggaggcaugaaggccaa

SEQ ID NO: 2312954 - RNA, 19 nt, Homo sapiens
  misc_RNA (1)...(19): siRNA sense strand
augugaaagcucugaccua

SEQ ID NO: 2312955 - RNA, 19 nt, Homo sapiens
  misc_RNA (1)...(19): siRNA sense strand
acgcugugguguucgggaa

SEQ ID NO: 2312956 - RNA, 19 nt, Homo sapiens
  misc_RNA (1)...(19): siRNA sense strand
ucacagaggccgagagugg

SEQ ID NO: 2312957 - RNA, 19 nt, Homo sapiens
  misc_RNA (1)...(19): siRNA sense strand
ggauacuacgcuugcugaa

SEQ ID NO: 2312958 - RNA, 19 nt, Homo sapiens
  misc_RNA (1)...(19): siRNA sense strand
ccagugaggcugaggaggu

SEQ ID NO: 2312959 - RNA, 19 nt, Homo sapiens
  misc_RNA (1)...(19): siRNA sense strand
gguaugagccagagcggga

SEQ ID NO: 2312960 - RNA, 19 nt, Homo sapiens
  misc_RNA (1)...(19): siRNA sense strand
gagaggaacgaguggcgaa

SEQ ID NO: 2312961 - RNA, 19 nt, Homo sapiens
  misc_RNA (1)...(19): siRNA sense strand
uggccaagcaagaggaguu

SEQ ID NO: 2312962 - RNA, 19 nt, Homo sapiens
  misc_RNA (1)...(19): siRNA sense strand
gcgucugcguccugcacaa

SEQ ID NO: 2312963 - RNA, 19 nt, Homo sapiens
  misc_RNA (1)...(19): siRNA sense strand
uggcgaaugaucacagcaa

SEQ ID NO: 2312964 - RNA, 19 nt, Homo sapiens
  misc_RNA (1)...(19): siRNA sense strand
gcaaugaacaccauccgaa

SEQ ID NO: 2312965 - RNA, 19 nt, Homo sapiens
  misc_RNA (1)...(19): siRNA sense strand
cagccagaucccaggccua

SEQ ID NO: 2312966 - RNA, 19 nt, Homo sapiens
  misc_RNA (1)...(19): siRNA sense strand
ggucacacguuccuggaca

SEQ ID NO: 2312967 - RNA, 19 nt, Homo sapiens
  misc_RNA (1)...(19): siRNA sense strand
ugguguccauugaggguau

SEQ ID NO: 2312968 - RNA, 19 nt, Homo sapiens
  misc_RNA (1)...(19): siRNA sense strand
gcugcgaguccgaggucuu

SEQ ID NO: 2312969 - RNA, 19 nt, Homo sapiens
  misc_RNA (1)...(19): siRNA sense strand
acgucacacugcaggucaa

SEQ ID NO: 2312970 - RNA, 19 nt, Homo sapiens
  misc_RNA (1)...(19): siRNA sense strand
ccaacuucgcugagcagau

SEQ ID NO: 2312971 - RNA, 19 nt, Homo sapiens
  misc_RNA (1)...(19): siRNA sense strand
ggaagcagauugaccagca

SEQ ID NO: 2312972 - RNA, 19 nt, Homo sapiens
  misc_RNA (1)...(19): siRNA sense strand
gguaugagccagagcggga

SEQ ID NO: 2312973 - RNA, 19 nt, Homo sapiens
  misc_RNA (1)...(19): siRNA sense strand
gagaggaacgaguggcgaa

SEQ ID NO: 2312974 - RNA, 19 nt, Homo sapiens
  misc_RNA (1)...(19): siRNA sense strand
uggccaagcaagaggaguu

SEQ ID NO: 2312975 - RNA, 19 nt, Homo sapiens
  misc_RNA (1)...(19): siRNA sense strand
gcgucugcguccugcacaa

SEQ ID NO: 2312976 - RNA, 19 nt, Homo sapiens
  misc_RNA (1)...(19): siRNA sense strand
uggcgaaugaucacagcaa

SEQ ID NO: 2312977 - RNA, 19 nt, Homo sapiens
  misc_RNA (1)...(19): siRNA sense strand
gcaaugaacaccauccgaa

SEQ ID NO: 2312978 - RNA, 19 nt, Homo sapiens
  misc_RNA (1)...(19): siRNA sense strand
cagccagaucccaggccua

SEQ ID NO: 2312979 - RNA, 19 nt, Homo sapiens
  misc_RNA (1)...(19): siRNA sense strand
ggucacacguuccuggaca

SEQ ID NO: 2312980 - RNA, 19 nt, Homo sapiens
  misc_RNA (1)...(19): siRNA sense strand
ugguguccauugaggguau

SEQ ID NO: 2312981 - RNA, 19 nt, Homo sapiens
  misc_RNA (1)...(19): siRNA sense strand
gcugcgaguccgaggucuu

SEQ ID NO: 2312982 - RNA, 19 nt, Homo sapiens
  misc_RNA (1)...(19): siRNA sense strand
acgucacacugcaggucaa

SEQ ID NO: 2312983 - RNA, 19 nt, Homo sapiens
  misc_RNA (1)...(19): siRNA sense strand
ccaacuucgcugagcagau

SEQ ID NO: 2312984 - RNA, 19 nt, Homo sapiens
  misc_RNA (1)...(19): siRNA sense strand
ggaagcagauugaccagca

SEQ ID NO: 2312985 - RNA, 19 nt, Homo sapiens
  misc_RNA (1)...(19): siRNA sense strand
gcaagaaguaucugcgaga

SEQ ID NO: 2312986 - RNA, 19 nt, Homo sapiens
  misc_RNA (1)...(19): siRNA sense strand
ggaucaugucggagaccua

SEQ ID NO: 2312987 - RNA, 19 nt, Homo sapiens
  misc_RNA (1)...(19): siRNA sense strand
ccacagaagaaagaggaaa

SEQ ID NO: 2312988 - RNA, 19 nt, Homo sapiens
  misc_RNA (1)...(19): siRNA sense strand
cggaggagaccaagcagaa

SEQ ID NO: 2312989 - RNA, 19 nt, Homo sapiens
  misc_RNA (1)...(19): siRNA sense strand
cgaaacaccaagugcaaaa

SEQ ID NO: 2312990 - RNA, 19 nt, Homo sapiens
  misc_RNA (1)...(19): siRNA sense strand
ccaaccuacugaagagaau

SEQ ID NO: 2312991 - RNA, 19 nt, Homo sapiens
  misc_RNA (1)...(19): siRNA sense strand
aagcaggagcgacggguaa

SEQ ID NO: 2312992 - RNA, 19 nt, Homo sapiens
  misc_RNA (1)...(19): siRNA sense strand
ggagagagcuugcuggcca

SEQ ID NO: 2312993 - RNA, 19 nt, Homo sapiens
  misc_RNA (1)...(19): siRNA sense strand
gcgagaggaacaagaccaa

SEQ ID NO: 2312994 - RNA, 19 nt, Homo sapiens
  misc_RNA (1)...(19): siRNA sense strand
cagacgaggacgacgacua

SEQ ID NO: 2312995 - RNA, 19 nt, Homo sapiens
  misc_RNA (1)...(19): siRNA sense strand
gggagauaaauccaagaaa

SEQ ID NO: 2312996 - RNA, 19 nt, Homo sapiens
  misc_RNA (1)...(19): siRNA sense strand
ggguaaaacggaagaagau

SEQ ID NO: 2312997 - RNA, 19 nt, Homo sapiens
  misc_RNA (1)...(19): siRNA sense strand
gggccaaacaccuggaguu

SEQ ID NO: 2312998 - RNA, 19 nt, Homo sapiens
  misc_RNA (1)...(19): siRNA sense strand
gaggaagggaugucagaga

SEQ ID NO: 2312999 - RNA, 19 nt, Homo sapiens
  misc_RNA (1)...(19): siRNA sense strand
cacagaagaaagaggaaaa

SEQ ID NO: 2313000 - RNA, 19 nt, Homo sapiens
  misc_RNA (1)...(19): siRNA sense strand
cuuccgggcugcagagcaa

SEQ ID NO: 2313001 - RNA, 19 nt, Homo sapiens
  misc_RNA (1)...(19): siRNA sense strand
ggugagugcagcugagaca

SEQ ID NO: 2313002 - RNA, 19 nt, Homo sapiens
  misc_RNA (1)...(19): siRNA sense strand
agaaagagggguugaaaca

SEQ ID NO: 2313003 - RNA, 19 nt, Homo sapiens
  misc_RNA (1)...(19): siRNA sense strand
cgacagcaugcuagagaca

SEQ ID NO: 2313004 - RNA, 19 nt, Homo sapiens
  misc_RNA (1)...(19): siRNA sense strand
gcaagguggcugagaagca

SEQ ID NO: 2313005 - RNA, 19 nt, Homo sapiens
  misc_RNA (1)...(19): siRNA sense strand
agaccaagcagaagcugaa

SEQ ID NO: 2313006 - RNA, 19 nt, Homo sapiens
  misc_RNA (1)...(19): siRNA sense strand
gagcggaaggauaaagaga

SEQ ID NO: 2313007 - RNA, 19 nt, Homo sapiens
  misc_RNA (1)...(19): siRNA sense strand
ucagaagagaguggagaaa

SEQ ID NO: 2313008 - RNA, 19 nt, Homo sapiens
  misc_RNA (1)...(19): siRNA sense strand
ccguuuacuugcugcacua

SEQ ID NO: 2313009 - RNA, 19 nt, Homo sapiens
  misc_RNA (1)...(19): siRNA sense strand
uaagaaagcuggacccuga

SEQ ID NO: 2313010 - RNA, 19 nt, Homo sapiens
  misc_RNA (1)...(19): siRNA sense strand
cugugaaggugcucgaaga

SEQ ID NO: 2313011 - RNA, 19 nt, Homo sapiens
  misc_RNA (1)...(19): siRNA sense strand
ggacaaagucucugccuac

SEQ ID NO: 2313012 - RNA, 19 nt, Homo sapiens
  misc_RNA (1)...(19): siRNA sense strand
aggagacagugcagaccaa

SEQ ID NO: 2313013 - RNA, 19 nt, Homo sapiens
  misc_RNA (1)...(19): siRNA sense strand
cggaagaagauuucagaag

SEQ ID NO: 2313014 - RNA, 19 nt, Homo sapiens
  misc_RNA (1)...(19): siRNA sense strand
acuaugaaguccagucaga

SEQ ID NO: 2313015 - RNA, 19 nt, Homo sapiens
  misc_RNA (1)...(19): siRNA sense strand
gggaacuucaacugaggua

SEQ ID NO: 2313016 - RNA, 19 nt, Homo sapiens
  misc_RNA (1)...(19): siRNA sense strand
aggacaagcugaacuccaa

SEQ ID NO: 2313017 - RNA, 19 nt, Homo sapiens
  misc_RNA (1)...(19): siRNA sense strand
agacagacgaggacgacga

SEQ ID NO: 2313018 - RNA, 19 nt, Homo sapiens
  misc_RNA (1)...(19): siRNA sense strand
ccauaaugacucugugguu

SEQ ID NO: 2313019 - RNA, 19 nt, Homo sapiens
  misc_RNA (1)...(19): siRNA sense strand
ucaucuggcaggaggaaga

SEQ ID NO: 2313020 - RNA, 19 nt, Homo sapiens
  misc_RNA (1)...(19): siRNA sense strand
gagaggaucaugucggaga

SEQ ID NO: 2313021 - RNA, 19 nt, Homo sapiens
  misc_RNA (1)...(19): siRNA sense strand
gugaggaaggagagccuau

SEQ ID NO: 2313022 - RNA, 19 nt, Homo sapiens
  misc_RNA (1)...(19): siRNA sense strand
cugccuacauugagggaac

SEQ ID NO: 2313023 - RNA, 19 nt, Homo sapiens
  misc_RNA (1)...(19): siRNA sense strand
caguggugaacgagcuuua

SEQ ID NO: 2313024 - RNA, 19 nt, Homo sapiens
  misc_RNA (1)...(19): siRNA sense strand
gcggggagcggaaggauaa

SEQ ID NO: 2313025 - RNA, 19 nt, Homo sapiens
  misc_RNA (1)...(19): siRNA sense strand
gcgagacagacgaggacga

SEQ ID NO: 2313026 - RNA, 19 nt, Homo sapiens
  misc_RNA (1)...(19): siRNA sense strand
agaaagggguaaaacggaa

SEQ ID NO: 2313027 - RNA, 19 nt, Homo sapiens
  misc_RNA (1)...(19): siRNA sense strand
ccauugaggaugaucauga

SEQ ID NO: 2313028 - RNA, 19 nt, Homo sapiens
  misc_RNA (1)...(19): siRNA sense strand
caaagacagccgagagaac

SEQ ID NO: 2313029 - RNA, 19 nt, Homo sapiens
  misc_RNA (1)...(19): siRNA sense strand
cugagggacugcagcaaca

SEQ ID NO: 2313030 - RNA, 19 nt, Homo sapiens
  misc_RNA (1)...(19): siRNA sense strand
gggcaagguggcugagaag

SEQ ID NO: 2313031 - RNA, 19 nt, Homo sapiens
  misc_RNA (1)...(19): siRNA sense strand
cagaccagggcaagaagua

SEQ ID NO: 2313032 - RNA, 19 nt, Homo sapiens
  misc_RNA (1)...(19): siRNA sense strand
cuggaggagcugagcauca

SEQ ID NO: 2313033 - RNA, 19 nt, Homo sapiens
  misc_RNA (1)...(19): siRNA sense strand
cgauuguagaugaggccuu

SEQ ID NO: 2313034 - RNA, 19 nt, Homo sapiens
  misc_RNA (1)...(19): siRNA sense strand
gggguaaaacggaagaaga

SEQ ID NO: 2313035 - RNA, 19 nt, Homo sapiens
  misc_RNA (1)...(19): siRNA sense strand
guaaaacggaagaagauuu

SEQ ID NO: 2313036 - RNA, 19 nt, Homo sapiens
  misc_RNA (1)...(19): siRNA sense strand
ccaucgugcugcugcucaa

SEQ ID NO: 2313037 - RNA, 19 nt, Homo sapiens
  misc_RNA (1)...(19): siRNA sense strand
cccaaagacagccgagaga

SEQ ID NO: 2313038 - RNA, 19 nt, Homo sapiens
  misc_RNA (1)...(19): siRNA sense strand
aggaagggcugcggugcaa

SEQ ID NO: 2313039 - RNA, 19 nt, Homo sapiens
  misc_RNA (1)...(19): siRNA sense strand
uggacaaagucucugccua

SEQ ID NO: 2313040 - RNA, 19 nt, Homo sapiens
  misc_RNA (1)...(19): siRNA sense strand
ggagaaggauugccgguac

SEQ ID NO: 2313041 - RNA, 19 nt, Homo sapiens
  misc_RNA (1)...(19): siRNA sense strand
gagaguggagaaacagcaa

SEQ ID NO: 2313042 - RNA, 19 nt, Homo sapiens
  misc_RNA (1)...(19): siRNA sense strand
cccuugaucugcagaaaca

SEQ ID NO: 2313043 - RNA, 19 nt, Homo sapiens
  misc_RNA (1)...(19): siRNA sense strand
ccaucaaguucuacaugca

SEQ ID NO: 2313044 - RNA, 19 nt, Homo sapiens
  misc_RNA (1)...(19): siRNA sense strand
ugggcaagguggcugagaa

SEQ ID NO: 2313045 - RNA, 19 nt, Homo sapiens
  misc_RNA (1)...(19): siRNA sense strand
gcggaaggauaaagagagc

SEQ ID NO: 2313046 - RNA, 19 nt, Homo sapiens
  misc_RNA (1)...(19): siRNA sense strand
cuguacacccucagugauu

SEQ ID NO: 2313047 - RNA, 19 nt, Homo sapiens
  misc_RNA (1)...(19): siRNA sense strand
augaguuccugcuggagaa

SEQ ID NO: 2313048 - RNA, 19 nt, Homo sapiens
  misc_RNA (1)...(19): siRNA sense strand
cugaagacacgcacccuua

SEQ ID NO: 2313049 - RNA, 19 nt, Homo sapiens
  misc_RNA (1)...(19): siRNA sense strand
ccacacaggccugaagcua

SEQ ID NO: 2313050 - RNA, 19 nt, Homo sapiens
  misc_RNA (1)...(19): siRNA sense strand
gagacagcgaagagaacua

SEQ ID NO: 2313051 - RNA, 19 nt, Homo sapiens
  misc_RNA (1)...(19): siRNA sense strand
cugaugagaagguggacua

SEQ ID NO: 2313052 - RNA, 19 nt, Homo sapiens
  misc_RNA (1)...(19): siRNA sense strand
gugcauaagccgaagagca

SEQ ID NO: 2313053 - RNA, 19 nt, Homo sapiens
  misc_RNA (1)...(19): siRNA sense strand
ccaagaagccucugcggau

SEQ ID NO: 2313054 - RNA, 19 nt, Homo sapiens
  misc_RNA (1)...(19): siRNA sense strand
aauacagaauucagagaca

SEQ ID NO: 2313055 - RNA, 19 nt, Homo sapiens
  misc_RNA (1)...(19): siRNA sense strand
uggaauacuacaagaacga

SEQ ID NO: 2313056 - RNA, 19 nt, Homo sapiens
  misc_RNA (1)...(19): siRNA sense strand
caacgggaucaguggucaa

SEQ ID NO: 2313057 - RNA, 19 nt, Homo sapiens
  misc_RNA (1)...(19): siRNA sense strand
cugcugaauccaugaguga

SEQ ID NO: 2313058 - RNA, 19 nt, Homo sapiens
  misc_RNA (1)...(19): siRNA sense strand
ccucacaggcuccgagaca

SEQ ID NO: 2313059 - RNA, 19 nt, Homo sapiens
  misc_RNA (1)...(19): siRNA sense strand
gauaauucccagagcgucu

SEQ ID NO: 2313060 - RNA, 19 nt, Homo sapiens
  misc_RNA (1)...(19): siRNA sense strand
aaaccugaucggaaagcaa

SEQ ID NO: 2313061 - RNA, 19 nt, Homo sapiens
  misc_RNA (1)...(19): siRNA sense strand
cauaagccgaagagcagaa

SEQ ID NO: 2313062 - RNA, 19 nt, Homo sapiens
  misc_RNA (1)...(19): siRNA sense strand
ucacaggcuccgagacaga

SEQ ID NO: 2313063 - RNA, 19 nt, Homo sapiens
  misc_RNA (1)...(19): siRNA sense strand
gggaccuccugguagacaa

SEQ ID NO: 2313064 - RNA, 19 nt, Homo sapiens
  misc_RNA (1)...(19): siRNA sense strand
ucucaugaggagugacaca

SEQ ID NO: 2313065 - RNA, 19 nt, Homo sapiens
  misc_RNA (1)...(19): siRNA sense strand
acagcgugguggagagagu

SEQ ID NO: 2313066 - RNA, 19 nt, Homo sapiens
  misc_RNA (1)...(19): siRNA sense strand
aagucuuggucuagggcca

SEQ ID NO: 2313067 - RNA, 19 nt, Homo sapiens
  misc_RNA (1)...(19): siRNA sense strand
acaagaaggagcugcagga

SEQ ID NO: 2313068 - RNA, 19 nt, Homo sapiens
  misc_RNA (1)...(19): siRNA sense strand
cugagacagaagaggacau

SEQ ID NO: 2313069 - RNA, 19 nt, Homo sapiens
  misc_RNA (1)...(19): siRNA sense strand
aagccaagucaggcagaaa

SEQ ID NO: 2313070 - RNA, 19 nt, Homo sapiens
  misc_RNA (1)...(19): siRNA sense strand
gaucggaaagcaaagccaa

SEQ ID NO: 2313071 - RNA, 19 nt, Homo sapiens
  misc_RNA (1)...(19): siRNA sense strand
gagacagcgaagagaacua

SEQ ID NO: 2313072 - RNA, 19 nt, Homo sapiens
  misc_RNA (1)...(19): siRNA sense strand
cugaugagaagguggacua

SEQ ID NO: 2313073 - RNA, 19 nt, Homo sapiens
  misc_RNA (1)...(19): siRNA sense strand
gugcauaagccgaagagca

SEQ ID NO: 2313074 - RNA, 19 nt, Homo sapiens
  misc_RNA (1)...(19): siRNA sense strand
ccaagaagccucugcggau

SEQ ID NO: 2313075 - RNA, 19 nt, Homo sapiens
  misc_RNA (1)...(19): siRNA sense strand
aauacagaauucagagaca

SEQ ID NO: 2313076 - RNA, 19 nt, Homo sapiens
  misc_RNA (1)...(19): siRNA sense strand
uggaauacuacaagaacga

SEQ ID NO: 2313077 - RNA, 19 nt, Homo sapiens
  misc_RNA (1)...(19): siRNA sense strand
caacgggaucaguggucaa

SEQ ID NO: 2313078 - RNA, 19 nt, Homo sapiens
  misc_RNA (1)...(19): siRNA sense strand
cugcugaauccaugaguga

SEQ ID NO: 2313079 - RNA, 19 nt, Homo sapiens
  misc_RNA (1)...(19): siRNA sense strand
ccucacaggcuccgagaca

SEQ ID NO: 2313080 - RNA, 19 nt, Homo sapiens
  misc_RNA (1)...(19): siRNA sense strand
gauaauucccagagcgucu

SEQ ID NO: 2313081 - RNA, 19 nt, Homo sapiens
  misc_RNA (1)...(19): siRNA sense strand
aaaccugaucggaaagcaa

SEQ ID NO: 2313082 - RNA, 19 nt, Homo sapiens
  misc_RNA (1)...(19): siRNA sense strand
cauaagccgaagagcagaa

SEQ ID NO: 2313083 - RNA, 19 nt, Homo sapiens
  misc_RNA (1)...(19): siRNA sense strand
ucacaggcuccgagacaga

SEQ ID NO: 2313084 - RNA, 19 nt, Homo sapiens
  misc_RNA (1)...(19): siRNA sense strand
gggaccuccugguagacaa

SEQ ID NO: 2313085 - RNA, 19 nt, Homo sapiens
  misc_RNA (1)...(19): siRNA sense strand
ucucaugaggagugacaca

SEQ ID NO: 2313086 - RNA, 19 nt, Homo sapiens
  misc_RNA (1)...(19): siRNA sense strand
acagcgugguggagagagu

SEQ ID NO: 2313087 - RNA, 19 nt, Homo sapiens
  misc_RNA (1)...(19): siRNA sense strand
aagucuuggucuagggcca

SEQ ID NO: 2313088 - RNA, 19 nt, Homo sapiens
  misc_RNA (1)...(19): siRNA sense strand
acaagaaggagcugcagga

SEQ ID NO: 2313089 - RNA, 19 nt, Homo sapiens
  misc_RNA (1)...(19): siRNA sense strand
cugagacagaagaggacau

SEQ ID NO: 2313090 - RNA, 19 nt, Homo sapiens
  misc_RNA (1)...(19): siRNA sense strand
aagccaagucaggcagaaa

SEQ ID NO: 2313091 - RNA, 19 nt, Homo sapiens
  misc_RNA (1)...(19): siRNA sense strand
gaucggaaagcaaagccaa

SEQ ID NO: 2313092 - RNA, 19 nt, Homo sapiens
  misc_RNA (1)...(19): siRNA sense strand
cgucaauguaguagacuuu

SEQ ID NO: 2313093 - RNA, 19 nt, Homo sapiens
  misc_RNA (1)...(19): siRNA sense strand
acucggugauugaggacaa

SEQ ID NO: 2313094 - RNA, 19 nt, Homo sapiens
  misc_RNA (1)...(19): siRNA sense strand
aaguggaauuuguggaaca

SEQ ID NO: 2313095 - RNA, 19 nt, Homo sapiens
  misc_RNA (1)...(19): siRNA sense strand
accauuaggcucugggaua

SEQ ID NO: 2313096 - RNA, 19 nt, Homo sapiens
  misc_RNA (1)...(19): siRNA sense strand
ccuagagggacaugaagaa

SEQ ID NO: 2313097 - RNA, 19 nt, Homo sapiens
  misc_RNA (1)...(19): siRNA sense strand
aaagaauggcagcgaguga

SEQ ID NO: 2313098 - RNA, 19 nt, Homo sapiens
  misc_RNA (1)...(19): siRNA sense strand
guaaagaauggcagcgagu

SEQ ID NO: 2313099 - RNA, 19 nt, Homo sapiens
  misc_RNA (1)...(19): siRNA sense strand
cgacacaacuugcagagga

SEQ ID NO: 2313100 - RNA, 19 nt, Homo sapiens
  misc_RNA (1)...(19): siRNA sense strand
uuuaagaguccuagaggga

SEQ ID NO: 2313101 - RNA, 19 nt, Homo sapiens
  misc_RNA (1)...(19): siRNA sense strand
ccgucaauguaguagacuu

SEQ ID NO: 2313102 - RNA, 19 nt, Homo sapiens
  misc_RNA (1)...(19): siRNA sense strand
gagugaucucagaaggaau

SEQ ID NO: 2313103 - RNA, 19 nt, Homo sapiens
  misc_RNA (1)...(19): siRNA sense strand
cagaaagaggccaucagaa

SEQ ID NO: 2313104 - RNA, 19 nt, Homo sapiens
  misc_RNA (1)...(19): siRNA sense strand
cauauuaacucuuaccuga

SEQ ID NO: 2313105 - RNA, 19 nt, Homo sapiens
  misc_RNA (1)...(19): siRNA sense strand
cuggaauguuugaaagugu

SEQ ID NO: 2313106 - RNA, 19 nt, Homo sapiens
  misc_RNA (1)...(19): siRNA sense strand
ccugguuguuaguggauca

SEQ ID NO: 2313107 - RNA, 19 nt, Homo sapiens
  misc_RNA (1)...(19): siRNA sense strand
gguuguuaguggaucauca

SEQ ID NO: 2313108 - RNA, 19 nt, Homo sapiens
  misc_RNA (1)...(19): siRNA sense strand
ggacaagaccaucgagcuc

SEQ ID NO: 2313109 - RNA, 19 nt, Homo sapiens
  misc_RNA (1)...(19): siRNA sense strand
ugaaaguguuaacaggaca

SEQ ID NO: 2313110 - RNA, 19 nt, Homo sapiens
  misc_RNA (1)...(19): siRNA sense strand
cugugaucgucuccagaaa

SEQ ID NO: 2313111 - RNA, 19 nt, Homo sapiens
  misc_RNA (1)...(19): siRNA sense strand
gguuugauaacaagaggau

SEQ ID NO: 2313112 - RNA, 19 nt, Homo sapiens
  misc_RNA (1)...(19): siRNA sense strand
ccuccagaacauacacuua

SEQ ID NO: 2313113 - RNA, 19 nt, Homo sapiens
  misc_RNA (1)...(19): siRNA sense strand
cagaaggaaacuaucaaaa

SEQ ID NO: 2313114 - RNA, 19 nt, Homo sapiens
  misc_RNA (1)...(19): siRNA sense strand
gcuuagaucacauagcaga

SEQ ID NO: 2313115 - RNA, 19 nt, Homo sapiens
  misc_RNA (1)...(19): siRNA sense strand
guuuacaguacgaugauga

SEQ ID NO: 2313116 - RNA, 19 nt, Homo sapiens
  misc_RNA (1)...(19): siRNA sense strand
cagccuggaauguuugaaa

SEQ ID NO: 2313117 - RNA, 19 nt, Homo sapiens
  misc_RNA (1)...(19): siRNA sense strand
ggacauggcuucugcgacc

SEQ ID NO: 2313118 - RNA, 19 nt, Homo sapiens
  misc_RNA (1)...(19): siRNA sense strand
gcgagugaucucagaagga

SEQ ID NO: 2313119 - RNA, 19 nt, Homo sapiens
  misc_RNA (1)...(19): siRNA sense strand
ugauugaggacaagaccau

SEQ ID NO: 2313120 - RNA, 19 nt, Homo sapiens
  misc_RNA (1)...(19): siRNA sense strand
uggaagaagcugauugaac

SEQ ID NO: 2313121 - RNA, 19 nt, Homo sapiens
  misc_RNA (1)...(19): siRNA sense strand
agaagcugauugaacgaau

SEQ ID NO: 2313122 - RNA, 19 nt, Homo sapiens
  misc_RNA (1)...(19): siRNA sense strand
gauucuacggugagagugu

SEQ ID NO: 2313123 - RNA, 19 nt, Homo sapiens
  misc_RNA (1)...(19): siRNA sense strand
gggaugugaacacggguga

SEQ ID NO: 2313124 - RNA, 19 nt, Homo sapiens
  misc_RNA (1)...(19): siRNA sense strand
cuuagaucacauagcagaa

SEQ ID NO: 2313125 - RNA, 19 nt, Homo sapiens
  misc_RNA (1)...(19): siRNA sense strand
cgucaauguaguagacuuu

SEQ ID NO: 2313126 - RNA, 19 nt, Homo sapiens
  misc_RNA (1)...(19): siRNA sense strand
acucggugauugaggacaa

SEQ ID NO: 2313127 - RNA, 19 nt, Homo sapiens
  misc_RNA (1)...(19): siRNA sense strand
aaguggaauuuguggaaca

SEQ ID NO: 2313128 - RNA, 19 nt, Homo sapiens
  misc_RNA (1)...(19): siRNA sense strand
accauuaggcucugggaua

SEQ ID NO: 2313129 - RNA, 19 nt, Homo sapiens
  misc_RNA (1)...(19): siRNA sense strand
ccuagagggacaugaagaa

SEQ ID NO: 2313130 - RNA, 19 nt, Homo sapiens
  misc_RNA (1)...(19): siRNA sense strand
aaagaauggcagcgaguga

SEQ ID NO: 2313131 - RNA, 19 nt, Homo sapiens
  misc_RNA (1)...(19): siRNA sense strand
guaaagaauggcagcgagu

SEQ ID NO: 2313132 - RNA, 19 nt, Homo sapiens
  misc_RNA (1)...(19): siRNA sense strand
cgacacaacuugcagagga

SEQ ID NO: 2313133 - RNA, 19 nt, Homo sapiens
  misc_RNA (1)...(19): siRNA sense strand
uuuaagaguccuagaggga

SEQ ID NO: 2313134 - RNA, 19 nt, Homo sapiens
  misc_RNA (1)...(19): siRNA sense strand
ccgucaauguaguagacuu

SEQ ID NO: 2313135 - RNA, 19 nt, Homo sapiens
  misc_RNA (1)...(19): siRNA sense strand
gagugaucucagaaggaau

SEQ ID NO: 2313136 - RNA, 19 nt, Homo sapiens
  misc_RNA (1)...(19): siRNA sense strand
cagaaagaggccaucagaa

SEQ ID NO: 2313137 - RNA, 19 nt, Homo sapiens
  misc_RNA (1)...(19): siRNA sense strand
cauauuaacucuuaccuga

SEQ ID NO: 2313138 - RNA, 19 nt, Homo sapiens
  misc_RNA (1)...(19): siRNA sense strand
cuggaauguuugaaagugu

SEQ ID NO: 2313139 - RNA, 19 nt, Homo sapiens
  misc_RNA (1)...(19): siRNA sense strand
ccugguuguuaguggauca

SEQ ID NO: 2313140 - RNA, 19 nt, Homo sapiens
  misc_RNA (1)...(19): siRNA sense strand
gguuguuaguggaucauca

SEQ ID NO: 2313141 - RNA, 19 nt, Homo sapiens
  misc_RNA (1)...(19): siRNA sense strand
ggacaagaccaucgagcuc

SEQ ID NO: 2313142 - RNA, 19 nt, Homo sapiens
  misc_RNA (1)...(19): siRNA sense strand
ugaaaguguuaacaggaca

SEQ ID NO: 2313143 - RNA, 19 nt, Homo sapiens
  misc_RNA (1)...(19): siRNA sense strand
cugugaucgucuccagaaa

SEQ ID NO: 2313144 - RNA, 19 nt, Homo sapiens
  misc_RNA (1)...(19): siRNA sense strand
gguuugauaacaagaggau

SEQ ID NO: 2313145 - RNA, 19 nt, Homo sapiens
  misc_RNA (1)...(19): siRNA sense strand
ccuccagaacauacacuua

SEQ ID NO: 2313146 - RNA, 19 nt, Homo sapiens
  misc_RNA (1)...(19): siRNA sense strand
cagaaggaaacuaucaaaa

SEQ ID NO: 2313147 - RNA, 19 nt, Homo sapiens
  misc_RNA (1)...(19): siRNA sense strand
gcuuagaucacauagcaga

SEQ ID NO: 2313148 - RNA, 19 nt, Homo sapiens
  misc_RNA (1)...(19): siRNA sense strand
guuuacaguacgaugauga

SEQ ID NO: 2313149 - RNA, 19 nt, Homo sapiens
  misc_RNA (1)...(19): siRNA sense strand
cagccuggaauguuugaaa

SEQ ID NO: 2313150 - RNA, 19 nt, Homo sapiens
  misc_RNA (1)...(19): siRNA sense strand
ggacauggcuucugcgacc

SEQ ID NO: 2313151 - RNA, 19 nt, Homo sapiens
  misc_RNA (1)...(19): siRNA sense strand
gcgagugaucucagaagga

SEQ ID NO: 2313152 - RNA, 19 nt, Homo sapiens
  misc_RNA (1)...(19): siRNA sense strand
ugauugaggacaagaccau

SEQ ID NO: 2313153 - RNA, 19 nt, Homo sapiens
  misc_RNA (1)...(19): siRNA sense strand
uggaagaagcugauugaac

SEQ ID NO: 2313154 - RNA, 19 nt, Homo sapiens
  misc_RNA (1)...(19): siRNA sense strand
agaagcugauugaacgaau

SEQ ID NO: 2313155 - RNA, 19 nt, Homo sapiens
  misc_RNA (1)...(19): siRNA sense strand
gauucuacggugagagugu

SEQ ID NO: 2313156 - RNA, 19 nt, Homo sapiens
  misc_RNA (1)...(19): siRNA sense strand
gggaugugaacacggguga

SEQ ID NO: 2313157 - RNA, 19 nt, Homo sapiens
  misc_RNA (1)...(19): siRNA sense strand
cuuagaucacauagcagaa

SEQ ID NO: 2313158 - RNA, 19 nt, Homo sapiens
  misc_RNA (1)...(19): siRNA sense strand
cgucaauguaguagacuuu

SEQ ID NO: 2313159 - RNA, 19 nt, Homo sapiens
  misc_RNA (1)...(19): siRNA sense strand
acucggugauugaggacaa

SEQ ID NO: 2313160 - RNA, 19 nt, Homo sapiens
  misc_RNA (1)...(19): siRNA sense strand
aaguggaauuuguggaaca

SEQ ID NO: 2313161 - RNA, 19 nt, Homo sapiens
  misc_RNA (1)...(19): siRNA sense strand
accauuaggcucugggaua

SEQ ID NO: 2313162 - RNA, 19 nt, Homo sapiens
  misc_RNA (1)...(19): siRNA sense strand
ccuagagggacaugaagaa

SEQ ID NO: 2313163 - RNA, 19 nt, Homo sapiens
  misc_RNA (1)...(19): siRNA sense strand
aaagaauggcagcgaguga

SEQ ID NO: 2313164 - RNA, 19 nt, Homo sapiens
  misc_RNA (1)...(19): siRNA sense strand
guaaagaauggcagcgagu

SEQ ID NO: 2313165 - RNA, 19 nt, Homo sapiens
  misc_RNA (1)...(19): siRNA sense strand
cgacacaacuugcagagga

SEQ ID NO: 2313166 - RNA, 19 nt, Homo sapiens
  misc_RNA (1)...(19): siRNA sense strand
uuuaagaguccuagaggga

SEQ ID NO: 2313167 - RNA, 19 nt, Homo sapiens
  misc_RNA (1)...(19): siRNA sense strand
ccgucaauguaguagacuu

SEQ ID NO: 2313168 - RNA, 19 nt, Homo sapiens
  misc_RNA (1)...(19): siRNA sense strand
gagugaucucagaaggaau

SEQ ID NO: 2313169 - RNA, 19 nt, Homo sapiens
  misc_RNA (1)...(19): siRNA sense strand
cagaaagaggccaucagaa

SEQ ID NO: 2313170 - RNA, 19 nt, Homo sapiens
  misc_RNA (1)...(19): siRNA sense strand
cauauuaacucuuaccuga

SEQ ID NO: 2313171 - RNA, 19 nt, Homo sapiens
  misc_RNA (1)...(19): siRNA sense strand
cuggaauguuugaaagugu

SEQ ID NO: 2313172 - RNA, 19 nt, Homo sapiens
  misc_RNA (1)...(19): siRNA sense strand
ccugguuguuaguggauca

SEQ ID NO: 2313173 - RNA, 19 nt, Homo sapiens
  misc_RNA (1)...(19): siRNA sense strand
gguuguuaguggaucauca

SEQ ID NO: 2313174 - RNA, 19 nt, Homo sapiens
  misc_RNA (1)...(19): siRNA sense strand
ggacaagaccaucgagcuc

SEQ ID NO: 2313175 - RNA, 19 nt, Homo sapiens
  misc_RNA (1)...(19): siRNA sense strand
ugaaaguguuaacaggaca

SEQ ID NO: 2313176 - RNA, 19 nt, Homo sapiens
  misc_RNA (1)...(19): siRNA sense strand
cugugaucgucuccagaaa

SEQ ID NO: 2313177 - RNA, 19 nt, Homo sapiens
  misc_RNA (1)...(19): siRNA sense strand
gguuugauaacaagaggau

SEQ ID NO: 2313178 - RNA, 19 nt, Homo sapiens
  misc_RNA (1)...(19): siRNA sense strand
ccuccagaacauacacuua

SEQ ID NO: 2313179 - RNA, 19 nt, Homo sapiens
  misc_RNA (1)...(19): siRNA sense strand
cagaaggaaacuaucaaaa

SEQ ID NO: 2313180 - RNA, 19 nt, Homo sapiens
  misc_RNA (1)...(19): siRNA sense strand
gcuuagaucacauagcaga

SEQ ID NO: 2313181 - RNA, 19 nt, Homo sapiens
  misc_RNA (1)...(19): siRNA sense strand
guuuacaguacgaugauga

SEQ ID NO: 2313182 - RNA, 19 nt, Homo sapiens
  misc_RNA (1)...(19): siRNA sense strand
cagccuggaauguuugaaa

SEQ ID NO: 2313183 - RNA, 19 nt, Homo sapiens
  misc_RNA (1)...(19): siRNA sense strand
ggacauggcuucugcgacc

SEQ ID NO: 2313184 - RNA, 19 nt, Homo sapiens
  misc_RNA (1)...(19): siRNA sense strand
gcgagugaucucagaagga

SEQ ID NO: 2313185 - RNA, 19 nt, Homo sapiens
  misc_RNA (1)...(19): siRNA sense strand
ugauugaggacaagaccau

SEQ ID NO: 2313186 - RNA, 19 nt, Homo sapiens
  misc_RNA (1)...(19): siRNA sense strand
uggaagaagcugauugaac

SEQ ID NO: 2313187 - RNA, 19 nt, Homo sapiens
  misc_RNA (1)...(19): siRNA sense strand
agaagcugauugaacgaau

SEQ ID NO: 2313188 - RNA, 19 nt, Homo sapiens
  misc_RNA (1)...(19): siRNA sense strand
gauucuacggugagagugu

SEQ ID NO: 2313189 - RNA, 19 nt, Homo sapiens
  misc_RNA (1)...(19): siRNA sense strand
gggaugugaacacggguga

SEQ ID NO: 2313190 - RNA, 19 nt, Homo sapiens
  misc_RNA (1)...(19): siRNA sense strand
cuuagaucacauagcagaa

SEQ ID NO: 2313191 - RNA, 19 nt, Homo sapiens
  misc_RNA (1)...(19): siRNA sense strand
ggaauaaaucagugagcaa

SEQ ID NO: 2313192 - RNA, 19 nt, Homo sapiens
  misc_RNA (1)...(19): siRNA sense strand
ggaaaacggaagaggaaua

SEQ ID NO: 2313193 - RNA, 19 nt, Homo sapiens
  misc_RNA (1)...(19): siRNA sense strand
aggaggaauuguugauaaa

SEQ ID NO: 2313194 - RNA, 19 nt, Homo sapiens
  misc_RNA (1)...(19): siRNA sense strand
ggucaauggaaauggagua

SEQ ID NO: 2313195 - RNA, 19 nt, Homo sapiens
  misc_RNA (1)...(19): siRNA sense strand
agaagauggaccagcaaua

SEQ ID NO: 2313196 - RNA, 19 nt, Homo sapiens
  misc_RNA (1)...(19): siRNA sense strand
gcaaauuggugucggagga

SEQ ID NO: 2313197 - RNA, 19 nt, Homo sapiens
  misc_RNA (1)...(19): siRNA sense strand
gguccagauuauaaggaau

SEQ ID NO: 2313198 - RNA, 19 nt, Homo sapiens
  misc_RNA (1)...(19): siRNA sense strand
cugaggaggaagaggaaga

SEQ ID NO: 2313199 - RNA, 19 nt, Homo sapiens
  misc_RNA (1)...(19): siRNA sense strand
gggaaauggccuauacaga

SEQ ID NO: 2313200 - RNA, 19 nt, Homo sapiens
  misc_RNA (1)...(19): siRNA sense strand
ggggaaagcacaagggaca

SEQ ID NO: 2313201 - RNA, 19 nt, Homo sapiens
  misc_RNA (1)...(19): siRNA sense strand
agaaaggagccaaaggauu

SEQ ID NO: 2313202 - RNA, 19 nt, Homo sapiens
  misc_RNA (1)...(19): siRNA sense strand
uggaaauggaguaguagua

SEQ ID NO: 2313203 - RNA, 19 nt, Homo sapiens
  misc_RNA (1)...(19): siRNA sense strand
ccacacagaacuuggaaca

SEQ ID NO: 2313204 - RNA, 19 nt, Homo sapiens
  misc_RNA (1)...(19): siRNA sense strand
ugucaagcaaggaggaauu

SEQ ID NO: 2313205 - RNA, 19 nt, Homo sapiens
  misc_RNA (1)...(19): siRNA sense strand
aagaaaagccacuggacua

SEQ ID NO: 2313206 - RNA, 19 nt, Homo sapiens
  misc_RNA (1)...(19): siRNA sense strand
ccagugaacaugaagacaa

SEQ ID NO: 2313207 - RNA, 19 nt, Homo sapiens
  misc_RNA (1)...(19): siRNA sense strand
agaagaacacaguuugaaa

SEQ ID NO: 2313208 - RNA, 19 nt, Homo sapiens
  misc_RNA (1)...(19): siRNA sense strand
gacacaugccagagcaaua

SEQ ID NO: 2313209 - RNA, 19 nt, Homo sapiens
  misc_RNA (1)...(19): siRNA sense strand
cagagaagggcgaagucua

SEQ ID NO: 2313210 - RNA, 19 nt, Homo sapiens
  misc_RNA (1)...(19): siRNA sense strand
gaugaggguaggagaucaa

SEQ ID NO: 2313211 - RNA, 19 nt, Homo sapiens
  misc_RNA (1)...(19): siRNA sense strand
gggaacacgacguuaggaa

SEQ ID NO: 2313212 - RNA, 19 nt, Homo sapiens
  misc_RNA (1)...(19): siRNA sense strand
cagaagagugcaaagaaaa

SEQ ID NO: 2313213 - RNA, 19 nt, Homo sapiens
  misc_RNA (1)...(19): siRNA sense strand
ggaagugaaagcaaggcaa

SEQ ID NO: 2313214 - RNA, 19 nt, Homo sapiens
  misc_RNA (1)...(19): siRNA sense strand
ggccuguggucaauggaaa

SEQ ID NO: 2313215 - RNA, 19 nt, Homo sapiens
  misc_RNA (1)...(19): siRNA sense strand
aacuaaaccugaagacaau

SEQ ID NO: 2313216 - RNA, 19 nt, Homo sapiens
  misc_RNA (1)...(19): siRNA sense strand
cugcagcacaggauggaaa

SEQ ID NO: 2313217 - RNA, 19 nt, Homo sapiens
  misc_RNA (1)...(19): siRNA sense strand
uagcaaaguccaugagagu

SEQ ID NO: 2313218 - RNA, 19 nt, Homo sapiens
  misc_RNA (1)...(19): siRNA sense strand
ggauccacgacuugcgaaa

SEQ ID NO: 2313219 - RNA, 19 nt, Homo sapiens
  misc_RNA (1)...(19): siRNA sense strand
cuccaagugcugaaggaaa

SEQ ID NO: 2313220 - RNA, 19 nt, Homo sapiens
  misc_RNA (1)...(19): siRNA sense strand
aagagaggccuguggucaa

SEQ ID NO: 2313221 - RNA, 19 nt, Homo sapiens
  misc_RNA (1)...(19): siRNA sense strand
cagcaaaucauucgugaca

SEQ ID NO: 2313222 - RNA, 19 nt, Homo sapiens
  misc_RNA (1)...(19): siRNA sense strand
cugaggagcugaaggagca

SEQ ID NO: 2313223 - RNA, 19 nt, Homo sapiens
  misc_RNA (1)...(19): siRNA sense strand
cgggagaaguccaggcucu

SEQ ID NO: 2313224 - RNA, 19 nt, Homo sapiens
  misc_RNA (1)...(19): siRNA sense strand
gagcaauagaacucaucaa

SEQ ID NO: 2313225 - RNA, 19 nt, Homo sapiens
  misc_RNA (1)...(19): siRNA sense strand
ccagauaagcccaggccca

SEQ ID NO: 2313226 - RNA, 19 nt, Homo sapiens
  misc_RNA (1)...(19): siRNA sense strand
gaaucaaggcaguccucaa

SEQ ID NO: 2313227 - RNA, 19 nt, Homo sapiens
  misc_RNA (1)...(19): siRNA sense strand
aagcaaggcaagaugugaa

SEQ ID NO: 2313228 - RNA, 19 nt, Homo sapiens
  misc_RNA (1)...(19): siRNA sense strand
uccaagugcugaaggaaaa

SEQ ID NO: 2313229 - RNA, 19 nt, Homo sapiens
  misc_RNA (1)...(19): siRNA sense strand
gugcaaagaaaaugagcuu

SEQ ID NO: 2313230 - RNA, 19 nt, Homo sapiens
  misc_RNA (1)...(19): siRNA sense strand
gcaacaugggcuuuggauu

SEQ ID NO: 2313231 - RNA, 19 nt, Homo sapiens
  misc_RNA (1)...(19): siRNA sense strand
caggacagcgggugaaaca

SEQ ID NO: 2313232 - RNA, 19 nt, Homo sapiens
  misc_RNA (1)...(19): siRNA sense strand
caaccuacaccaacagcaa

SEQ ID NO: 2313233 - RNA, 19 nt, Homo sapiens
  misc_RNA (1)...(19): siRNA sense strand
gagaaaggagccaaaggau

SEQ ID NO: 2313234 - RNA, 19 nt, Homo sapiens
  misc_RNA (1)...(19): siRNA sense strand
auaaggaaugggaggauga

SEQ ID NO: 2313235 - RNA, 19 nt, Homo sapiens
  misc_RNA (1)...(19): siRNA sense strand
gaggaugaggguaggagau

SEQ ID NO: 2313236 - RNA, 19 nt, Homo sapiens
  misc_RNA (1)...(19): siRNA sense strand
ggaccaugagcuucagcaa

SEQ ID NO: 2313237 - RNA, 19 nt, Homo sapiens
  misc_RNA (1)...(19): siRNA sense strand
aaggaaaacggaagaggaa

SEQ ID NO: 2313238 - RNA, 19 nt, Homo sapiens
  misc_RNA (1)...(19): siRNA sense strand
gaagacaauuacuacggua

SEQ ID NO: 2313239 - RNA, 19 nt, Homo sapiens
  misc_RNA (1)...(19): siRNA sense strand
ccauaugagcucuacgaga

SEQ ID NO: 2313240 - RNA, 19 nt, Homo sapiens
  misc_RNA (1)...(19): siRNA sense strand
uguguauguugaugggauu

SEQ ID NO: 2313241 - RNA, 19 nt, Homo sapiens
  misc_RNA (1)...(19): siRNA sense strand
cauggagaaaggagccaaa

SEQ ID NO: 2313242 - RNA, 19 nt, Homo sapiens
  misc_RNA (1)...(19): siRNA sense strand
cauuuaugaaaguaggcaa

SEQ ID NO: 2313243 - RNA, 19 nt, Homo sapiens
  misc_RNA (1)...(19): siRNA sense strand
guccagauuauaaggaauu

SEQ ID NO: 2313244 - RNA, 19 nt, Homo sapiens
  misc_RNA (1)...(19): siRNA sense strand
ccauacagaaguaguggau

SEQ ID NO: 2313245 - RNA, 19 nt, Homo sapiens
  misc_RNA (1)...(19): siRNA sense strand
ccuauuggucagaguguca

SEQ ID NO: 2313246 - RNA, 19 nt, Homo sapiens
  misc_RNA (1)...(19): siRNA sense strand
uuacaggucggaagugaaa

SEQ ID NO: 2313247 - RNA, 19 nt, Homo sapiens
  misc_RNA (1)...(19): siRNA sense strand
cgaacugaggcgacuggaa

SEQ ID NO: 2313248 - RNA, 19 nt, Homo sapiens
  misc_RNA (1)...(19): siRNA sense strand
acuccauggugcagaucuu

SEQ ID NO: 2313249 - RNA, 19 nt, Homo sapiens
  misc_RNA (1)...(19): siRNA sense strand
ccaucaaggagcugagcgu

SEQ ID NO: 2313250 - RNA, 19 nt, Homo sapiens
  misc_RNA (1)...(19): siRNA sense strand
acucaaaccuagaaguaaa

SEQ ID NO: 2313251 - RNA, 19 nt, Homo sapiens
  misc_RNA (1)...(19): siRNA sense strand
aagagaagccagagacaaa

SEQ ID NO: 2313252 - RNA, 19 nt, Homo sapiens
  misc_RNA (1)...(19): siRNA sense strand
gcuuagaauuccugggaga

SEQ ID NO: 2313253 - RNA, 19 nt, Homo sapiens
  misc_RNA (1)...(19): siRNA sense strand
ggaugaagaaauugaagaa

SEQ ID NO: 2313254 - RNA, 19 nt, Homo sapiens
  misc_RNA (1)...(19): siRNA sense strand
aggaaagccaaaugggaaa

SEQ ID NO: 2313255 - RNA, 19 nt, Homo sapiens
  misc_RNA (1)...(19): siRNA sense strand
gauaaaggaagcuggcaaa

SEQ ID NO: 2313256 - RNA, 19 nt, Homo sapiens
  misc_RNA (1)...(19): siRNA sense strand
cuguggaaguaguaggaaa

SEQ ID NO: 2313257 - RNA, 19 nt, Homo sapiens
  misc_RNA (1)...(19): siRNA sense strand
ggaagagguacuuaggaaa

SEQ ID NO: 2313258 - RNA, 19 nt, Homo sapiens
  misc_RNA (1)...(19): siRNA sense strand
gauucagaaacuagagaaa

SEQ ID NO: 2313259 - RNA, 19 nt, Homo sapiens
  misc_RNA (1)...(19): siRNA sense strand
aagagaaagaagaggauau

SEQ ID NO: 2313260 - RNA, 19 nt, Homo sapiens
  misc_RNA (1)...(19): siRNA sense strand
aggaagagguacuuaggaa

SEQ ID NO: 2313261 - RNA, 19 nt, Homo sapiens
  misc_RNA (1)...(19): siRNA sense strand
gaggaaagccaaaugggaa

SEQ ID NO: 2313262 - RNA, 19 nt, Homo sapiens
  misc_RNA (1)...(19): siRNA sense strand
gcuuauaucaguagcaauu

SEQ ID NO: 2313263 - RNA, 19 nt, Homo sapiens
  misc_RNA (1)...(19): siRNA sense strand
cagauaaaguagcuggaau

SEQ ID NO: 2313264 - RNA, 19 nt, Homo sapiens
  misc_RNA (1)...(19): siRNA sense strand
ggucagagucacuguggaa

SEQ ID NO: 2313265 - RNA, 19 nt, Homo sapiens
  misc_RNA (1)...(19): siRNA sense strand
agaaugaaaugcaaggaau

SEQ ID NO: 2313266 - RNA, 19 nt, Homo sapiens
  misc_RNA (1)...(19): siRNA sense strand
cagaggaauuggaagaaaa

SEQ ID NO: 2313267 - RNA, 19 nt, Homo sapiens
  misc_RNA (1)...(19): siRNA sense strand
gcucgaaaucuuacgcaaa

SEQ ID NO: 2313268 - RNA, 19 nt, Homo sapiens
  misc_RNA (1)...(19): siRNA sense strand
ggacgguguucuuggucaa

SEQ ID NO: 2313269 - RNA, 19 nt, Homo sapiens
  misc_RNA (1)...(19): siRNA sense strand
gcugauggaauuagaagaa

SEQ ID NO: 2313270 - RNA, 19 nt, Homo sapiens
  misc_RNA (1)...(19): siRNA sense strand
caacacagauaaaugggaa

SEQ ID NO: 2313271 - RNA, 19 nt, Homo sapiens
  misc_RNA (1)...(19): siRNA sense strand
aguuucagcuugagaagaa

SEQ ID NO: 2313272 - RNA, 19 nt, Homo sapiens
  misc_RNA (1)...(19): siRNA sense strand
ugauaaaggaagcuggcaa

SEQ ID NO: 2313273 - RNA, 19 nt, Homo sapiens
  misc_RNA (1)...(19): siRNA sense strand
ugggaaagucugcagaaua

SEQ ID NO: 2313274 - RNA, 19 nt, Homo sapiens
  misc_RNA (1)...(19): siRNA sense strand
uugaaagcguugaguggua

SEQ ID NO: 2313275 - RNA, 19 nt, Homo sapiens
  misc_RNA (1)...(19): siRNA sense strand
agaaagaagaggauauuga

SEQ ID NO: 2313276 - RNA, 19 nt, Homo sapiens
  misc_RNA (1)...(19): siRNA sense strand
caaucuaaaggaagagcaa

SEQ ID NO: 2313277 - RNA, 19 nt, Homo sapiens
  misc_RNA (1)...(19): siRNA sense strand
gguugauacuggugagacu

SEQ ID NO: 2313278 - RNA, 19 nt, Homo sapiens
  misc_RNA (1)...(19): siRNA sense strand
caucagauuuugaggauuu

SEQ ID NO: 2313279 - RNA, 19 nt, Homo sapiens
  misc_RNA (1)...(19): siRNA sense strand
ggaagaaaagauucagaaa

SEQ ID NO: 2313280 - RNA, 19 nt, Homo sapiens
  misc_RNA (1)...(19): siRNA sense strand
acaucaaacaugagcaaga

SEQ ID NO: 2313281 - RNA, 19 nt, Homo sapiens
  misc_RNA (1)...(19): siRNA sense strand
gcaguguauugcugacaaa

SEQ ID NO: 2313282 - RNA, 19 nt, Homo sapiens
  misc_RNA (1)...(19): siRNA sense strand
cuuaaaaccuacaaagcua

SEQ ID NO: 2313283 - RNA, 19 nt, Homo sapiens
  misc_RNA (1)...(19): siRNA sense strand
cuggaaugaugguaagaga

SEQ ID NO: 2313284 - RNA, 19 nt, Homo sapiens
  misc_RNA (1)...(19): siRNA sense strand
gcguugagugguauaauaa

SEQ ID NO: 2313285 - RNA, 19 nt, Homo sapiens
  misc_RNA (1)...(19): siRNA sense strand
auuuaaagguguuggucga

SEQ ID NO: 2313286 - RNA, 19 nt, Homo sapiens
  misc_RNA (1)...(19): siRNA sense strand
acaaacagauggaagcaga

SEQ ID NO: 2313287 - RNA, 19 nt, Homo sapiens
  misc_RNA (1)...(19): siRNA sense strand
guaugaaacuuuugcagaa

SEQ ID NO: 2313288 - RNA, 19 nt, Homo sapiens
  misc_RNA (1)...(19): siRNA sense strand
gacaaaagcaacacagaua

SEQ ID NO: 2313289 - RNA, 19 nt, Homo sapiens
  misc_RNA (1)...(19): siRNA sense strand
cagcuugagaagaaugaaa

SEQ ID NO: 2313290 - RNA, 19 nt, Homo sapiens
  misc_RNA (1)...(19): siRNA sense strand
aggaggaugaagagaaaga

SEQ ID NO: 2313291 - RNA, 19 nt, Homo sapiens
  misc_RNA (1)...(19): siRNA sense strand
ccagaggaauuggaagaaa

SEQ ID NO: 2313292 - RNA, 19 nt, Homo sapiens
  misc_RNA (1)...(19): siRNA sense strand
ggagugauucugaggauga

SEQ ID NO: 2313293 - RNA, 19 nt, Homo sapiens
  misc_RNA (1)...(19): siRNA sense strand
uguucaaucuaaaggaaga

SEQ ID NO: 2313294 - RNA, 19 nt, Homo sapiens
  misc_RNA (1)...(19): siRNA sense strand
cuacaaagcuauugaaaag

SEQ ID NO: 2313295 - RNA, 19 nt, Homo sapiens
  misc_RNA (1)...(19): siRNA sense strand
ccacaagaugcuuuggaau

SEQ ID NO: 2313296 - RNA, 19 nt, Homo sapiens
  misc_RNA (1)...(19): siRNA sense strand
aggaagaggcugacuauga

SEQ ID NO: 2313297 - RNA, 19 nt, Homo sapiens
  misc_RNA (1)...(19): siRNA sense strand
cugaggaggaugaagagaa

SEQ ID NO: 2313298 - RNA, 19 nt, Homo sapiens
  misc_RNA (1)...(19): siRNA sense strand
auuaugaagcucugugaaa

SEQ ID NO: 2313299 - RNA, 19 nt, Homo sapiens
  misc_RNA (1)...(19): siRNA sense strand
aaugaugguaagagaacua

SEQ ID NO: 2313300 - RNA, 19 nt, Homo sapiens
  misc_RNA (1)...(19): siRNA sense strand
gaucugaggaggaugaaga

SEQ ID NO: 2313301 - RNA, 19 nt, Homo sapiens
  misc_RNA (1)...(19): siRNA sense strand
agaagugggcuuuaugaaa

SEQ ID NO: 2313302 - RNA, 19 nt, Homo sapiens
  misc_RNA (1)...(19): siRNA sense strand
aggaugaugaugaggauga

SEQ ID NO: 2313303 - RNA, 19 nt, Homo sapiens
  misc_RNA (1)...(19): siRNA sense strand
cagaaaacaggaagaggua

SEQ ID NO: 2313304 - RNA, 19 nt, Homo sapiens
  misc_RNA (1)...(19): siRNA sense strand
aagcaauuccagaguguuu

SEQ ID NO: 2313305 - RNA, 19 nt, Homo sapiens
  misc_RNA (1)...(19): siRNA sense strand
ggaaaugcuaacaaaucua

SEQ ID NO: 2313306 - RNA, 19 nt, Homo sapiens
  misc_RNA (1)...(19): siRNA sense strand
ugagaagaaugaaaugcaa

SEQ ID NO: 2313307 - RNA, 19 nt, Homo sapiens
  misc_RNA (1)...(19): siRNA sense strand
uaggaaauuucgagcacau

SEQ ID NO: 2313308 - RNA, 19 nt, Homo sapiens
  misc_RNA (1)...(19): siRNA sense strand
caauagauacugugcuaga

SEQ ID NO: 2313309 - RNA, 19 nt, Homo sapiens
  misc_RNA (1)...(19): siRNA sense strand
gcugagaagaggaaagcca

SEQ ID NO: 2313310 - RNA, 19 nt, Homo sapiens
  misc_RNA (1)...(19): siRNA sense strand
ugagaagaggaaagccaaa

SEQ ID NO: 2313311 - RNA, 19 nt, Homo sapiens
  misc_RNA (1)...(19): siRNA sense strand
cgaaggaagaggcugacua

SEQ ID NO: 2313312 - RNA, 19 nt, Homo sapiens
  misc_RNA (1)...(19): siRNA sense strand
uaaucaaacugcucgaaau

SEQ ID NO: 2313313 - RNA, 19 nt, Homo sapiens
  misc_RNA (1)...(19): siRNA sense strand
gugagaaacugcacaaaau

SEQ ID NO: 2313314 - RNA, 19 nt, Homo sapiens
  misc_RNA (1)...(19): siRNA sense strand
ugggaaagagacuguuaaa

SEQ ID NO: 2313315 - RNA, 19 nt, Homo sapiens
  misc_RNA (1)...(19): siRNA sense strand
ucuuaagaguaaugcugaa

SEQ ID NO: 2313316 - RNA, 19 nt, Homo sapiens
  misc_RNA (1)...(19): siRNA sense strand
augaugaggaugaagaaau

SEQ ID NO: 2313317 - RNA, 19 nt, Homo sapiens
  misc_RNA (1)...(19): siRNA sense strand
acucaaaccuagaaguaaa

SEQ ID NO: 2313318 - RNA, 19 nt, Homo sapiens
  misc_RNA (1)...(19): siRNA sense strand
aagagaagccagagacaaa

SEQ ID NO: 2313319 - RNA, 19 nt, Homo sapiens
  misc_RNA (1)...(19): siRNA sense strand
gcuuagaauuccugggaga

SEQ ID NO: 2313320 - RNA, 19 nt, Homo sapiens
  misc_RNA (1)...(19): siRNA sense strand
ggaugaagaaauugaagaa

SEQ ID NO: 2313321 - RNA, 19 nt, Homo sapiens
  misc_RNA (1)...(19): siRNA sense strand
aggaaagccaaaugggaaa

SEQ ID NO: 2313322 - RNA, 19 nt, Homo sapiens
  misc_RNA (1)...(19): siRNA sense strand
gauaaaggaagcuggcaaa

SEQ ID NO: 2313323 - RNA, 19 nt, Homo sapiens
  misc_RNA (1)...(19): siRNA sense strand
cuguggaaguaguaggaaa

SEQ ID NO: 2313324 - RNA, 19 nt, Homo sapiens
  misc_RNA (1)...(19): siRNA sense strand
ggaagagguacuuaggaaa

SEQ ID NO: 2313325 - RNA, 19 nt, Homo sapiens
  misc_RNA (1)...(19): siRNA sense strand
gauucagaaacuagagaaa

SEQ ID NO: 2313326 - RNA, 19 nt, Homo sapiens
  misc_RNA (1)...(19): siRNA sense strand
aagagaaagaagaggauau

SEQ ID NO: 2313327 - RNA, 19 nt, Homo sapiens
  misc_RNA (1)...(19): siRNA sense strand
aggaagagguacuuaggaa

SEQ ID NO: 2313328 - RNA, 19 nt, Homo sapiens
  misc_RNA (1)...(19): siRNA sense strand
gaggaaagccaaaugggaa

SEQ ID NO: 2313329 - RNA, 19 nt, Homo sapiens
  misc_RNA (1)...(19): siRNA sense strand
gcuuauaucaguagcaauu

SEQ ID NO: 2313330 - RNA, 19 nt, Homo sapiens
  misc_RNA (1)...(19): siRNA sense strand
cagauaaaguagcuggaau

SEQ ID NO: 2313331 - RNA, 19 nt, Homo sapiens
  misc_RNA (1)...(19): siRNA sense strand
ggucagagucacuguggaa

SEQ ID NO: 2313332 - RNA, 19 nt, Homo sapiens
  misc_RNA (1)...(19): siRNA sense strand
agaaugaaaugcaaggaau

SEQ ID NO: 2313333 - RNA, 19 nt, Homo sapiens
  misc_RNA (1)...(19): siRNA sense strand
cagaggaauuggaagaaaa

SEQ ID NO: 2313334 - RNA, 19 nt, Homo sapiens
  misc_RNA (1)...(19): siRNA sense strand
gcucgaaaucuuacgcaaa

SEQ ID NO: 2313335 - RNA, 19 nt, Homo sapiens
  misc_RNA (1)...(19): siRNA sense strand
ggacgguguucuuggucaa

SEQ ID NO: 2313336 - RNA, 19 nt, Homo sapiens
  misc_RNA (1)...(19): siRNA sense strand
gcugauggaauuagaagaa

SEQ ID NO: 2313337 - RNA, 19 nt, Homo sapiens
  misc_RNA (1)...(19): siRNA sense strand
caacacagauaaaugggaa

SEQ ID NO: 2313338 - RNA, 19 nt, Homo sapiens
  misc_RNA (1)...(19): siRNA sense strand
aguuucagcuugagaagaa

SEQ ID NO: 2313339 - RNA, 19 nt, Homo sapiens
  misc_RNA (1)...(19): siRNA sense strand
ugauaaaggaagcuggcaa

SEQ ID NO: 2313340 - RNA, 19 nt, Homo sapiens
  misc_RNA (1)...(19): siRNA sense strand
ugggaaagucugcagaaua

SEQ ID NO: 2313341 - RNA, 19 nt, Homo sapiens
  misc_RNA (1)...(19): siRNA sense strand
uugaaagcguugaguggua

SEQ ID NO: 2313342 - RNA, 19 nt, Homo sapiens
  misc_RNA (1)...(19): siRNA sense strand
agaaagaagaggauauuga

SEQ ID NO: 2313343 - RNA, 19 nt, Homo sapiens
  misc_RNA (1)...(19): siRNA sense strand
caaucuaaaggaagagcaa

SEQ ID NO: 2313344 - RNA, 19 nt, Homo sapiens
  misc_RNA (1)...(19): siRNA sense strand
gguugauacuggugagacu

SEQ ID NO: 2313345 - RNA, 19 nt, Homo sapiens
  misc_RNA (1)...(19): siRNA sense strand
caucagauuuugaggauuu

SEQ ID NO: 2313346 - RNA, 19 nt, Homo sapiens
  misc_RNA (1)...(19): siRNA sense strand
ggaagaaaagauucagaaa

SEQ ID NO: 2313347 - RNA, 19 nt, Homo sapiens
  misc_RNA (1)...(19): siRNA sense strand
acaucaaacaugagcaaga

SEQ ID NO: 2313348 - RNA, 19 nt, Homo sapiens
  misc_RNA (1)...(19): siRNA sense strand
gcaguguauugcugacaaa

SEQ ID NO: 2313349 - RNA, 19 nt, Homo sapiens
  misc_RNA (1)...(19): siRNA sense strand
cuuaaaaccuacaaagcua

SEQ ID NO: 2313350 - RNA, 19 nt, Homo sapiens
  misc_RNA (1)...(19): siRNA sense strand
cuggaaugaugguaagaga

SEQ ID NO: 2313351 - RNA, 19 nt, Homo sapiens
  misc_RNA (1)...(19): siRNA sense strand
gcguugagugguauaauaa

SEQ ID NO: 2313352 - RNA, 19 nt, Homo sapiens
  misc_RNA (1)...(19): siRNA sense strand
auuuaaagguguuggucga

SEQ ID NO: 2313353 - RNA, 19 nt, Homo sapiens
  misc_RNA (1)...(19): siRNA sense strand
acaaacagauggaagcaga

SEQ ID NO: 2313354 - RNA, 19 nt, Homo sapiens
  misc_RNA (1)...(19): siRNA sense strand
guaugaaacuuuugcagaa

SEQ ID NO: 2313355 - RNA, 19 nt, Homo sapiens
  misc_RNA (1)...(19): siRNA sense strand
gacaaaagcaacacagaua

SEQ ID NO: 2313356 - RNA, 19 nt, Homo sapiens
  misc_RNA (1)...(19): siRNA sense strand
cagcuugagaagaaugaaa

SEQ ID NO: 2313357 - RNA, 19 nt, Homo sapiens
  misc_RNA (1)...(19): siRNA sense strand
aggaggaugaagagaaaga

SEQ ID NO: 2313358 - RNA, 19 nt, Homo sapiens
  misc_RNA (1)...(19): siRNA sense strand
ccagaggaauuggaagaaa

SEQ ID NO: 2313359 - RNA, 19 nt, Homo sapiens
  misc_RNA (1)...(19): siRNA sense strand
ggagugauucugaggauga

SEQ ID NO: 2313360 - RNA, 19 nt, Homo sapiens
  misc_RNA (1)...(19): siRNA sense strand
uguucaaucuaaaggaaga

SEQ ID NO: 2313361 - RNA, 19 nt, Homo sapiens
  misc_RNA (1)...(19): siRNA sense strand
cuacaaagcuauugaaaag

SEQ ID NO: 2313362 - RNA, 19 nt, Homo sapiens
  misc_RNA (1)...(19): siRNA sense strand
ccacaagaugcuuuggaau

SEQ ID NO: 2313363 - RNA, 19 nt, Homo sapiens
  misc_RNA (1)...(19): siRNA sense strand
aggaagaggcugacuauga

SEQ ID NO: 2313364 - RNA, 19 nt, Homo sapiens
  misc_RNA (1)...(19): siRNA sense strand
cugaggaggaugaagagaa

SEQ ID NO: 2313365 - RNA, 19 nt, Homo sapiens
  misc_RNA (1)...(19): siRNA sense strand
auuaugaagcucugugaaa

SEQ ID NO: 2313366 - RNA, 19 nt, Homo sapiens
  misc_RNA (1)...(19): siRNA sense strand
aaugaugguaagagaacua

SEQ ID NO: 2313367 - RNA, 19 nt, Homo sapiens
  misc_RNA (1)...(19): siRNA sense strand
gaucugaggaggaugaaga

SEQ ID NO: 2313368 - RNA, 19 nt, Homo sapiens
  misc_RNA (1)...(19): siRNA sense strand
agaagugggcuuuaugaaa

SEQ ID NO: 2313369 - RNA, 19 nt, Homo sapiens
  misc_RNA (1)...(19): siRNA sense strand
aggaugaugaugaggauga

SEQ ID NO: 2313370 - RNA, 19 nt, Homo sapiens
  misc_RNA (1)...(19): siRNA sense strand
cagaaaacaggaagaggua

SEQ ID NO: 2313371 - RNA, 19 nt, Homo sapiens
  misc_RNA (1)...(19): siRNA sense strand
aagcaauuccagaguguuu

SEQ ID NO: 2313372 - RNA, 19 nt, Homo sapiens
  misc_RNA (1)...(19): siRNA sense strand
ggaaaugcuaacaaaucua

SEQ ID NO: 2313373 - RNA, 19 nt, Homo sapiens
  misc_RNA (1)...(19): siRNA sense strand
ugagaagaaugaaaugcaa

SEQ ID NO: 2313374 - RNA, 19 nt, Homo sapiens
  misc_RNA (1)...(19): siRNA sense strand
uaggaaauuucgagcacau

SEQ ID NO: 2313375 - RNA, 19 nt, Homo sapiens
  misc_RNA (1)...(19): siRNA sense strand
caauagauacugugcuaga

SEQ ID NO: 2313376 - RNA, 19 nt, Homo sapiens
  misc_RNA (1)...(19): siRNA sense strand
gcugagaagaggaaagcca

SEQ ID NO: 2313377 - RNA, 19 nt, Homo sapiens
  misc_RNA (1)...(19): siRNA sense strand
ugagaagaggaaagccaaa

SEQ ID NO: 2313378 - RNA, 19 nt, Homo sapiens
  misc_RNA (1)...(19): siRNA sense strand
cgaaggaagaggcugacua

SEQ ID NO: 2313379 - RNA, 19 nt, Homo sapiens
  misc_RNA (1)...(19): siRNA sense strand
uaaucaaacugcucgaaau

SEQ ID NO: 2313380 - RNA, 19 nt, Homo sapiens
  misc_RNA (1)...(19): siRNA sense strand
gugagaaacugcacaaaau

SEQ ID NO: 2313381 - RNA, 19 nt, Homo sapiens
  misc_RNA (1)...(19): siRNA sense strand
ugggaaagagacuguuaaa

SEQ ID NO: 2313382 - RNA, 19 nt, Homo sapiens
  misc_RNA (1)...(19): siRNA sense strand
ucuuaagaguaaugcugaa

SEQ ID NO: 2313383 - RNA, 19 nt, Homo sapiens
  misc_RNA (1)...(19): siRNA sense strand
augaugaggaugaagaaau

SEQ ID NO: 2313384 - RNA, 19 nt, Homo sapiens
  misc_RNA (1)...(19): siRNA sense strand
ggaaaauggaagagaguga

SEQ ID NO: 2313385 - RNA, 19 nt, Homo sapiens
  misc_RNA (1)...(19): siRNA sense strand
ggaucagaaugaagagaca

SEQ ID NO: 2313386 - RNA, 19 nt, Homo sapiens
  misc_RNA (1)...(19): siRNA sense strand
gguauguguuggagcgcua

SEQ ID NO: 2313387 - RNA, 19 nt, Homo sapiens
  misc_RNA (1)...(19): siRNA sense strand
aggaagaggaggaggagga

SEQ ID NO: 2313388 - RNA, 19 nt, Homo sapiens
  misc_RNA (1)...(19): siRNA sense strand
aggaggaggaggaggaaga

SEQ ID NO: 2313389 - RNA, 19 nt, Homo sapiens
  misc_RNA (1)...(19): siRNA sense strand
agaggaggagcgagagaaa

SEQ ID NO: 2313390 - RNA, 19 nt, Homo sapiens
  misc_RNA (1)...(19): siRNA sense strand
cgacaagagacuuuggaca

SEQ ID NO: 2313391 - RNA, 19 nt, Homo sapiens
  misc_RNA (1)...(19): siRNA sense strand
ggggagaggaggaggaaga

SEQ ID NO: 2313392 - RNA, 19 nt, Homo sapiens
  misc_RNA (1)...(19): siRNA sense strand
ggaaaggucuucuggcuca

SEQ ID NO: 2313393 - RNA, 19 nt, Homo sapiens
  misc_RNA (1)...(19): siRNA sense strand
uauaaauggugcugcgaca

SEQ ID NO: 2313394 - RNA, 19 nt, Homo sapiens
  misc_RNA (1)...(19): siRNA sense strand
ggacauccauugugcccaa

SEQ ID NO: 2313395 - RNA, 19 nt, Homo sapiens
  misc_RNA (1)...(19): siRNA sense strand
aaggaaagccagacugaau

SEQ ID NO: 2313396 - RNA, 19 nt, Homo sapiens
  misc_RNA (1)...(19): siRNA sense strand
uugccaaauugcugggaau

SEQ ID NO: 2313397 - RNA, 19 nt, Homo sapiens
  misc_RNA (1)...(19): siRNA sense strand
guagacaacauguggccaa

SEQ ID NO: 2313398 - RNA, 19 nt, Homo sapiens
  misc_RNA (1)...(19): siRNA sense strand
uggaagagagugacgaaga

SEQ ID NO: 2313399 - RNA, 19 nt, Homo sapiens
  misc_RNA (1)...(19): siRNA sense strand
gugugcaagacgugguaua

SEQ ID NO: 2313400 - RNA, 19 nt, Homo sapiens
  misc_RNA (1)...(19): siRNA sense strand
gcuaugaagaugauggcau

SEQ ID NO: 2313401 - RNA, 19 nt, Homo sapiens
  misc_RNA (1)...(19): siRNA sense strand
ugacgaagaagcugugcaa

SEQ ID NO: 2313402 - RNA, 19 nt, Homo sapiens
  misc_RNA (1)...(19): siRNA sense strand
ccgcagagaacuuugugaa

SEQ ID NO: 2313403 - RNA, 19 nt, Homo sapiens
  misc_RNA (1)...(19): siRNA sense strand
agaaagagucccucagcau

SEQ ID NO: 2313404 - RNA, 19 nt, Homo sapiens
  misc_RNA (1)...(19): siRNA sense strand
gagacaucuuucuggguga

SEQ ID NO: 2313405 - RNA, 19 nt, Homo sapiens
  misc_RNA (1)...(19): siRNA sense strand
aggaggaggaagaggagga

SEQ ID NO: 2313406 - RNA, 19 nt, Homo sapiens
  misc_RNA (1)...(19): siRNA sense strand
aggaggaagaggaggagga

SEQ ID NO: 2313407 - RNA, 19 nt, Homo sapiens
  misc_RNA (1)...(19): siRNA sense strand
aggaggaggaggaggagga

SEQ ID NO: 2313408 - RNA, 19 nt, Homo sapiens
  misc_RNA (1)...(19): siRNA sense strand
caauauggcagguugcaau

SEQ ID NO: 2313409 - RNA, 19 nt, Homo sapiens
  misc_RNA (1)...(19): siRNA sense strand
ccaacaaauauaaugccaa

SEQ ID NO: 2313410 - RNA, 19 nt, Homo sapiens
  misc_RNA (1)...(19): siRNA sense strand
agacacaagacuuugagaa

SEQ ID NO: 2313411 - RNA, 19 nt, Homo sapiens
  misc_RNA (1)...(19): siRNA sense strand
ugucagggaaacagggaga

SEQ ID NO: 2313412 - RNA, 19 nt, Homo sapiens
  misc_RNA (1)...(19): siRNA sense strand
ggcucaggauggagacgaa

SEQ ID NO: 2313413 - RNA, 19 nt, Homo sapiens
  misc_RNA (1)...(19): siRNA sense strand
agggauagaagaugaagau

SEQ ID NO: 2313414 - RNA, 19 nt, Homo sapiens
  misc_RNA (1)...(19): siRNA sense strand
ccaaagagcuccacgggac

SEQ ID NO: 2313415 - RNA, 19 nt, Homo sapiens
  misc_RNA (1)...(19): siRNA sense strand
ccagaggaggagcgagaga

SEQ ID NO: 2313416 - RNA, 19 nt, Homo sapiens
  misc_RNA (1)...(19): siRNA sense strand
cccacaaccuggagcugua

SEQ ID NO: 2313417 - RNA, 19 nt, Homo sapiens
  misc_RNA (1)...(19): siRNA sense strand
gagaggaggaggaagagga

SEQ ID NO: 2313418 - RNA, 19 nt, Homo sapiens
  misc_RNA (1)...(19): siRNA sense strand
caacauugaagaucggaca

SEQ ID NO: 2313419 - RNA, 19 nt, Homo sapiens
  misc_RNA (1)...(19): siRNA sense strand
aggaagcaguggaucgaga

SEQ ID NO: 2313420 - RNA, 19 nt, Homo sapiens
  misc_RNA (1)...(19): siRNA sense strand
uuaacgaagaauugccaaa

SEQ ID NO: 2313421 - RNA, 19 nt, Homo sapiens
  misc_RNA (1)...(19): siRNA sense strand
aagaggaggaggaggagga

SEQ ID NO: 2313422 - RNA, 19 nt, Homo sapiens
  misc_RNA (1)...(19): siRNA sense strand
aggaggagcgagagaaacu

SEQ ID NO: 2313423 - RNA, 19 nt, Homo sapiens
  misc_RNA (1)...(19): siRNA sense strand
gcgacgacgcuaugaagau

SEQ ID NO: 2313424 - RNA, 19 nt, Homo sapiens
  misc_RNA (1)...(19): siRNA sense strand
cugcacaccaacaaauaua

SEQ ID NO: 2313425 - RNA, 19 nt, Homo sapiens
  misc_RNA (1)...(19): siRNA sense strand
ccuauaguacaguggccaa

SEQ ID NO: 2313426 - RNA, 19 nt, Homo sapiens
  misc_RNA (1)...(19): siRNA sense strand
gcaccaugguacgggaaaa

SEQ ID NO: 2313427 - RNA, 19 nt, Homo sapiens
  misc_RNA (1)...(19): siRNA sense strand
gcugucugaaguugagaaa

SEQ ID NO: 2313428 - RNA, 19 nt, Homo sapiens
  misc_RNA (1)...(19): siRNA sense strand
ggauagaagaugaagaugc

SEQ ID NO: 2313429 - RNA, 19 nt, Homo sapiens
  misc_RNA (1)...(19): siRNA sense strand
agaaagcccagaagcggaa

SEQ ID NO: 2313430 - RNA, 19 nt, Homo sapiens
  misc_RNA (1)...(19): siRNA sense strand
ccucagccgcagagaacuu

SEQ ID NO: 2313431 - RNA, 19 nt, Homo sapiens
  misc_RNA (1)...(19): siRNA sense strand
ggaugaggaagcaguggau

SEQ ID NO: 2313432 - RNA, 19 nt, Homo sapiens
  misc_RNA (1)...(19): siRNA sense strand
augaagagacacaagacuu

SEQ ID NO: 2313433 - RNA, 19 nt, Homo sapiens
  misc_RNA (1)...(19): siRNA sense strand
gagaaagcccagaagcgga

SEQ ID NO: 2313434 - RNA, 19 nt, Homo sapiens
  misc_RNA (1)...(19): siRNA sense strand
gagaacaaucccagcggca

SEQ ID NO: 2313435 - RNA, 19 nt, Homo sapiens
  misc_RNA (1)...(19): siRNA sense strand
uugaguagguguaaggcca

SEQ ID NO: 2313436 - RNA, 19 nt, Homo sapiens
  misc_RNA (1)...(19): siRNA sense strand
guauacuccuacagacaca

SEQ ID NO: 2313437 - RNA, 19 nt, Homo sapiens
  misc_RNA (1)...(19): siRNA sense strand
ugucaucagccucgaguuu

SEQ ID NO: 2313438 - RNA, 19 nt, Homo sapiens
  misc_RNA (1)...(19): siRNA sense strand
ggaggacagcucggagaaa

SEQ ID NO: 2313439 - RNA, 19 nt, Homo sapiens
  misc_RNA (1)...(19): siRNA sense strand
gugcaagacgugguauaaa

SEQ ID NO: 2313440 - RNA, 19 nt, Homo sapiens
  misc_RNA (1)...(19): siRNA sense strand
gggcuauaccuucgucauu

SEQ ID NO: 2313441 - RNA, 19 nt, Homo sapiens
  misc_RNA (1)...(19): siRNA sense strand
gcggaaaauggaagagagu

SEQ ID NO: 2313442 - RNA, 19 nt, Homo sapiens
  misc_RNA (1)...(19): siRNA sense strand
acuucuugauugagguuaa

SEQ ID NO: 2313443 - RNA, 19 nt, Homo sapiens
  misc_RNA (1)...(19): siRNA sense strand
cggugaugaugacgggcua

SEQ ID NO: 2313444 - RNA, 19 nt, Homo sapiens
  misc_RNA (1)...(19): siRNA sense strand
augcgaaggcagaaaucaa

SEQ ID NO: 2313445 - RNA, 19 nt, Homo sapiens
  misc_RNA (1)...(19): siRNA sense strand
gguacgaugcgaaggcaga

SEQ ID NO: 2313446 - RNA, 19 nt, Homo sapiens
  misc_RNA (1)...(19): siRNA sense strand
acugcauuauugaggagaa

SEQ ID NO: 2313447 - RNA, 19 nt, Homo sapiens
  misc_RNA (1)...(19): siRNA sense strand
agguuaacaaugagaaugu

SEQ ID NO: 2313448 - RNA, 19 nt, Homo sapiens
  misc_RNA (1)...(19): siRNA sense strand
gauccggcagggagggaau

SEQ ID NO: 2313449 - RNA, 19 nt, Homo sapiens
  misc_RNA (1)...(19): siRNA sense strand
ugagguuaacaaugagaau

SEQ ID NO: 2313450 - RNA, 19 nt, Homo sapiens
  misc_RNA (1)...(19): siRNA sense strand
cuacaauaauggucgcugu

SEQ ID NO: 2313451 - RNA, 19 nt, Homo sapiens
  misc_RNA (1)...(19): siRNA sense strand
uguacgaacgccaaggaau

SEQ ID NO: 2313452 - RNA, 19 nt, Homo sapiens
  misc_RNA (1)...(19): siRNA sense strand
acuucuugauugagguuaa

SEQ ID NO: 2313453 - RNA, 19 nt, Homo sapiens
  misc_RNA (1)...(19): siRNA sense strand
cggugaugaugacgggcua

SEQ ID NO: 2313454 - RNA, 19 nt, Homo sapiens
  misc_RNA (1)...(19): siRNA sense strand
augcgaaggcagaaaucaa

SEQ ID NO: 2313455 - RNA, 19 nt, Homo sapiens
  misc_RNA (1)...(19): siRNA sense strand
gguacgaugcgaaggcaga

SEQ ID NO: 2313456 - RNA, 19 nt, Homo sapiens
  misc_RNA (1)...(19): siRNA sense strand
acugcauuauugaggagaa

SEQ ID NO: 2313457 - RNA, 19 nt, Homo sapiens
  misc_RNA (1)...(19): siRNA sense strand
agguuaacaaugagaaugu

SEQ ID NO: 2313458 - RNA, 19 nt, Homo sapiens
  misc_RNA (1)...(19): siRNA sense strand
gauccggcagggagggaau

SEQ ID NO: 2313459 - RNA, 19 nt, Homo sapiens
  misc_RNA (1)...(19): siRNA sense strand
ugagguuaacaaugagaau

SEQ ID NO: 2313460 - RNA, 19 nt, Homo sapiens
  misc_RNA (1)...(19): siRNA sense strand
cuacaauaauggucgcugu

SEQ ID NO: 2313461 - RNA, 19 nt, Homo sapiens
  misc_RNA (1)...(19): siRNA sense strand
uguacgaacgccaaggaau

SEQ ID NO: 2313462 - RNA, 19 nt, Homo sapiens
  misc_RNA (1)...(19): siRNA sense strand
agaaacugggagagaaaua

SEQ ID NO: 2313463 - RNA, 19 nt, Homo sapiens
  misc_RNA (1)...(19): siRNA sense strand
acggaauuaagcagagaaa

SEQ ID NO: 2313464 - RNA, 19 nt, Homo sapiens
  misc_RNA (1)...(19): siRNA sense strand
gugcaaaguggacgagaca

SEQ ID NO: 2313465 - RNA, 19 nt, Homo sapiens
  misc_RNA (1)...(19): siRNA sense strand
ccaaauuuauugaagagca

SEQ ID NO: 2313466 - RNA, 19 nt, Homo sapiens
  misc_RNA (1)...(19): siRNA sense strand
uaaccaagaaacugggaga

SEQ ID NO: 2313467 - RNA, 19 nt, Homo sapiens
  misc_RNA (1)...(19): siRNA sense strand
gcaacaucuuccaagucaa

SEQ ID NO: 2313468 - RNA, 19 nt, Homo sapiens
  misc_RNA (1)...(19): siRNA sense strand
gauugaagaggaaaagaaa

SEQ ID NO: 2313469 - RNA, 19 nt, Homo sapiens
  misc_RNA (1)...(19): siRNA sense strand
ccaucaaugagaagacuuu

SEQ ID NO: 2313470 - RNA, 19 nt, Homo sapiens
  misc_RNA (1)...(19): siRNA sense strand
ccagacucauuuagagaca

SEQ ID NO: 2313471 - RNA, 19 nt, Homo sapiens
  misc_RNA (1)...(19): siRNA sense strand
cugccaaauuuauugaaga

SEQ ID NO: 2313472 - RNA, 19 nt, Homo sapiens
  misc_RNA (1)...(19): siRNA sense strand
acucauuuagagacaguaa

SEQ ID NO: 2313473 - RNA, 19 nt, Homo sapiens
  misc_RNA (1)...(19): siRNA sense strand
uugaagagcaagugagaag

SEQ ID NO: 2313474 - RNA, 19 nt, Homo sapiens
  misc_RNA (1)...(19): siRNA sense strand
uggagauugaagaggaaaa

SEQ ID NO: 2313475 - RNA, 19 nt, Homo sapiens
  misc_RNA (1)...(19): siRNA sense strand
agacagggacccagaaacu

SEQ ID NO: 2313476 - RNA, 19 nt, Homo sapiens
  misc_RNA (1)...(19): siRNA sense strand
gcagagaaaaugaugaaga

SEQ ID NO: 2313477 - RNA, 19 nt, Homo sapiens
  misc_RNA (1)...(19): siRNA sense strand
ugggaaacucugacugauu

SEQ ID NO: 2313478 - RNA, 19 nt, Homo sapiens
  misc_RNA (1)...(19): siRNA sense strand
gaaucuucccagagcucaa

SEQ ID NO: 2313479 - RNA, 19 nt, Homo sapiens
  misc_RNA (1)...(19): siRNA sense strand
gacgcagaguugaaggaau

SEQ ID NO: 2313480 - RNA, 19 nt, Homo sapiens
  misc_RNA (1)...(19): siRNA sense strand
cuacagaggaaaugaaggu

SEQ ID NO: 2313481 - RNA, 19 nt, Homo sapiens
  misc_RNA (1)...(19): siRNA sense strand
aggaaaugaagguacccua

SEQ ID NO: 2313482 - RNA, 19 nt, Homo sapiens
  misc_RNA (1)...(19): siRNA sense strand
ucauggagauugaagagga

SEQ ID NO: 2313483 - RNA, 19 nt, Homo sapiens
  misc_RNA (1)...(19): siRNA sense strand
aggcuauuguuaaggaagu

SEQ ID NO: 2313484 - RNA, 19 nt, Homo sapiens
  misc_RNA (1)...(19): siRNA sense strand
agauugaagaggaaaagaa

SEQ ID NO: 2313485 - RNA, 19 nt, Homo sapiens
  misc_RNA (1)...(19): siRNA sense strand
ccgaacagacuacuggcua

SEQ ID NO: 2313486 - RNA, 19 nt, Homo sapiens
  misc_RNA (1)...(19): siRNA sense strand
ugucauuguauguccgaau

SEQ ID NO: 2313487 - RNA, 19 nt, Homo sapiens
  misc_RNA (1)...(19): siRNA sense strand
gaagaggaaaagaaaagaa

SEQ ID NO: 2313488 - RNA, 19 nt, Homo sapiens
  misc_RNA (1)...(19): siRNA sense strand
gcagaagcuacgcugguau

SEQ ID NO: 2313489 - RNA, 19 nt, Homo sapiens
  misc_RNA (1)...(19): siRNA sense strand
cagaaaauccucagcaguu

SEQ ID NO: 2313490 - RNA, 19 nt, Homo sapiens
  misc_RNA (1)...(19): siRNA sense strand
ggcaacuggaacuggagaa

SEQ ID NO: 2313491 - RNA, 19 nt, Homo sapiens
  misc_RNA (1)...(19): siRNA sense strand
uaauuugaguaaaggagca

SEQ ID NO: 2313492 - RNA, 19 nt, Homo sapiens
  misc_RNA (1)...(19): siRNA sense strand
cgaacagacuacuggcuac

SEQ ID NO: 2313493 - RNA, 19 nt, Homo sapiens
  misc_RNA (1)...(19): siRNA sense strand
aggaguggguggugcccua

SEQ ID NO: 2313494 - RNA, 19 nt, Homo sapiens
  misc_RNA (1)...(19): siRNA sense strand
gggaugacgacgaagacga

SEQ ID NO: 2313495 - RNA, 19 nt, Homo sapiens
  misc_RNA (1)...(19): siRNA sense strand
ccgaaacguuuaauggcga

SEQ ID NO: 2313496 - RNA, 19 nt, Homo sapiens
  misc_RNA (1)...(19): siRNA sense strand
acgacgaagaagaggagga

SEQ ID NO: 2313497 - RNA, 19 nt, Homo sapiens
  misc_RNA (1)...(19): siRNA sense strand
acgaagacgacgacgacga

SEQ ID NO: 2313498 - RNA, 19 nt, Homo sapiens
  misc_RNA (1)...(19): siRNA sense strand
acgacgacgacgaagaaga

SEQ ID NO: 2313499 - RNA, 19 nt, Homo sapiens
  misc_RNA (1)...(19): siRNA sense strand
cucuaaagaucaagcgaga

SEQ ID NO: 2313500 - RNA, 19 nt, Homo sapiens
  misc_RNA (1)...(19): siRNA sense strand
aagcgagagcugagcgaga

SEQ ID NO: 2313501 - RNA, 19 nt, Homo sapiens
  misc_RNA (1)...(19): siRNA sense strand
cucuaaagaucaagcgaga

SEQ ID NO: 2313502 - RNA, 19 nt, Homo sapiens
  misc_RNA (1)...(19): siRNA sense strand
aagcgagagcugagcgaga

SEQ ID NO: 2313503 - RNA, 19 nt, Homo sapiens
  misc_RNA (1)...(19): siRNA sense strand
acaaugaagaggaggacga

SEQ ID NO: 2313504 - RNA, 19 nt, Homo sapiens
  misc_RNA (1)...(19): siRNA sense strand
aagaggacgacgaggaaga

SEQ ID NO: 2313505 - RNA, 19 nt, Homo sapiens
  misc_RNA (1)...(19): siRNA sense strand
acgaagaggacgacgagga

SEQ ID NO: 2313506 - RNA, 19 nt, Homo sapiens
  misc_RNA (1)...(19): siRNA sense strand
uugagaugaucgaugacaa

SEQ ID NO: 2313507 - RNA, 19 nt, Homo sapiens
  misc_RNA (1)...(19): siRNA sense strand
aggaggacgaagaggacga

SEQ ID NO: 2313508 - RNA, 19 nt, Homo sapiens
  misc_RNA (1)...(19): siRNA sense strand
acgacgaggaagaggagga

SEQ ID NO: 2313509 - RNA, 19 nt, Homo sapiens
  misc_RNA (1)...(19): siRNA sense strand
aggaagaggaggaugccga

SEQ ID NO: 2313510 - RNA, 19 nt, Homo sapiens
  misc_RNA (1)...(19): siRNA sense strand
accaagagcaccuggcgua

SEQ ID NO: 2313511 - RNA, 19 nt, Homo sapiens
  misc_RNA (1)...(19): siRNA sense strand
cuguguugguggaggccga

SEQ ID NO: 2313512 - RNA, 19 nt, Homo sapiens
  misc_RNA (1)...(19): siRNA sense strand
acaaugaagaggaggacga

SEQ ID NO: 2313513 - RNA, 19 nt, Homo sapiens
  misc_RNA (1)...(19): siRNA sense strand
aagaggacgacgaggaaga

SEQ ID NO: 2313514 - RNA, 19 nt, Homo sapiens
  misc_RNA (1)...(19): siRNA sense strand
acgaagaggacgacgagga

SEQ ID NO: 2313515 - RNA, 19 nt, Homo sapiens
  misc_RNA (1)...(19): siRNA sense strand
uugagaugaucgaugacaa

SEQ ID NO: 2313516 - RNA, 19 nt, Homo sapiens
  misc_RNA (1)...(19): siRNA sense strand
aggaggacgaagaggacga

SEQ ID NO: 2313517 - RNA, 19 nt, Homo sapiens
  misc_RNA (1)...(19): siRNA sense strand
acgacgaggaagaggagga

SEQ ID NO: 2313518 - RNA, 19 nt, Homo sapiens
  misc_RNA (1)...(19): siRNA sense strand
aggaagaggaggaugccga

SEQ ID NO: 2313519 - RNA, 19 nt, Homo sapiens
  misc_RNA (1)...(19): siRNA sense strand
accaagagcaccuggcgua

SEQ ID NO: 2313520 - RNA, 19 nt, Homo sapiens
  misc_RNA (1)...(19): siRNA sense strand
cuguguugguggaggccga

SEQ ID NO: 2313521 - RNA, 19 nt, Homo sapiens
  misc_RNA (1)...(19): siRNA sense strand
acaaugaagaggaggacga

SEQ ID NO: 2313522 - RNA, 19 nt, Homo sapiens
  misc_RNA (1)...(19): siRNA sense strand
aagaggacgacgaggaaga

SEQ ID NO: 2313523 - RNA, 19 nt, Homo sapiens
  misc_RNA (1)...(19): siRNA sense strand
acgaagaggacgacgagga

SEQ ID NO: 2313524 - RNA, 19 nt, Homo sapiens
  misc_RNA (1)...(19): siRNA sense strand
uugagaugaucgaugacaa

SEQ ID NO: 2313525 - RNA, 19 nt, Homo sapiens
  misc_RNA (1)...(19): siRNA sense strand
aggaggacgaagaggacga

SEQ ID NO: 2313526 - RNA, 19 nt, Homo sapiens
  misc_RNA (1)...(19): siRNA sense strand
acgacgaggaagaggagga

SEQ ID NO: 2313527 - RNA, 19 nt, Homo sapiens
  misc_RNA (1)...(19): siRNA sense strand
aggaagaggaggaugccga

SEQ ID NO: 2313528 - RNA, 19 nt, Homo sapiens
  misc_RNA (1)...(19): siRNA sense strand
accaagagcaccuggcgua

SEQ ID NO: 2313529 - RNA, 19 nt, Homo sapiens
  misc_RNA (1)...(19): siRNA sense strand
cuguguugguggaggccga

SEQ ID NO: 2313530 - RNA, 19 nt, Homo sapiens
  misc_RNA (1)...(19): siRNA sense strand
cuguugaagacuuggagaa

SEQ ID NO: 2313531 - RNA, 19 nt, Homo sapiens
  misc_RNA (1)...(19): siRNA sense strand
cugaauaaaccgaagaaac

SEQ ID NO: 2313532 - RNA, 19 nt, Homo sapiens
  misc_RNA (1)...(19): siRNA sense strand
uguugaagacuuggagaaa

SEQ ID NO: 2313533 - RNA, 19 nt, Homo sapiens
  misc_RNA (1)...(19): siRNA sense strand
uuggagaaagagagggauu

SEQ ID NO: 2313534 - RNA, 19 nt, Homo sapiens
  misc_RNA (1)...(19): siRNA sense strand
gcuccauugccuugaagaa

SEQ ID NO: 2313535 - RNA, 19 nt, Homo sapiens
  misc_RNA (1)...(19): siRNA sense strand
agagaauggguguugacaa

SEQ ID NO: 2313536 - RNA, 19 nt, Homo sapiens
  misc_RNA (1)...(19): siRNA sense strand
agcuagaacacgaguacau

SEQ ID NO: 2313537 - RNA, 19 nt, Homo sapiens
  misc_RNA (1)...(19): siRNA sense strand
aagcagguuuuaagagaau

SEQ ID NO: 2313538 - RNA, 19 nt, Homo sapiens
  misc_RNA (1)...(19): siRNA sense strand
acuuggagaaagagaggga

SEQ ID NO: 2313539 - RNA, 19 nt, Homo sapiens
  misc_RNA (1)...(19): siRNA sense strand
gaauugauuugccaggaga

SEQ ID NO: 2313540 - RNA, 19 nt, Homo sapiens
  misc_RNA (1)...(19): siRNA sense strand
ucaagaaacugcaguggcu

SEQ ID NO: 2313541 - RNA, 19 nt, Homo sapiens
  misc_RNA (1)...(19): siRNA sense strand
cuauggaaaugaugggaaa

SEQ ID NO: 2313542 - RNA, 19 nt, Homo sapiens
  misc_RNA (1)...(19): siRNA sense strand
aggaagagcuauugguaca

SEQ ID NO: 2313543 - RNA, 19 nt, Homo sapiens
  misc_RNA (1)...(19): siRNA sense strand
cuggauaaacauagaacaa

SEQ ID NO: 2313544 - RNA, 19 nt, Homo sapiens
  misc_RNA (1)...(19): siRNA sense strand
acucagacuauguggcaaa

SEQ ID NO: 2313545 - RNA, 19 nt, Homo sapiens
  misc_RNA (1)...(19): siRNA sense strand
gguuguaggucgaaagcca

SEQ ID NO: 2313546 - RNA, 19 nt, Homo sapiens
  misc_RNA (1)...(19): siRNA sense strand
aguugaugauggaguuaaa

SEQ ID NO: 2313547 - RNA, 19 nt, Homo sapiens
  misc_RNA (1)...(19): siRNA sense strand
acgaagaaacucagacuau

SEQ ID NO: 2313548 - RNA, 19 nt, Homo sapiens
  misc_RNA (1)...(19): siRNA sense strand
ccaaaggauggaaggaaaa

SEQ ID NO: 2313549 - RNA, 19 nt, Homo sapiens
  misc_RNA (1)...(19): siRNA sense strand
acacagaaaguuugaugaa

SEQ ID NO: 2313550 - RNA, 19 nt, Homo sapiens
  misc_RNA (1)...(19): siRNA sense strand
cgagagacuacaagcacaa

SEQ ID NO: 2313551 - RNA, 19 nt, Homo sapiens
  misc_RNA (1)...(19): siRNA sense strand
cgaccauccucgagagacu

SEQ ID NO: 2313552 - RNA, 19 nt, Homo sapiens
  misc_RNA (1)...(19): siRNA sense strand
caaauuauuagcugggcaa

SEQ ID NO: 2313553 - RNA, 19 nt, Homo sapiens
  misc_RNA (1)...(19): siRNA sense strand
ggaaaugaugggaaaacaa

SEQ ID NO: 2313554 - RNA, 19 nt, Homo sapiens
  misc_RNA (1)...(19): siRNA sense strand
gaauagauacaaacggaca

SEQ ID NO: 2313555 - RNA, 19 nt, Homo sapiens
  misc_RNA (1)...(19): siRNA sense strand
ucuucaaagcagagagcau

SEQ ID NO: 2313556 - RNA, 19 nt, Homo sapiens
  misc_RNA (1)...(19): siRNA sense strand
ugaaaaugacucagaagaa

SEQ ID NO: 2313557 - RNA, 19 nt, Homo sapiens
  misc_RNA (1)...(19): siRNA sense strand
ugucagugcaguugccaaa

SEQ ID NO: 2313558 - RNA, 19 nt, Homo sapiens
  misc_RNA (1)...(19): siRNA sense strand
acuucuaagcacaggguau

SEQ ID NO: 2313559 - RNA, 19 nt, Homo sapiens
  misc_RNA (1)...(19): siRNA sense strand
cgagaagauuaguguuguu

SEQ ID NO: 2313560 - RNA, 19 nt, Homo sapiens
  misc_RNA (1)...(19): siRNA sense strand
gaguaucagcucagcaauu

SEQ ID NO: 2313561 - RNA, 19 nt, Homo sapiens
  misc_RNA (1)...(19): siRNA sense strand
ccuccaucuuugacauuua

SEQ ID NO: 2313562 - RNA, 19 nt, Homo sapiens
  misc_RNA (1)...(19): siRNA sense strand
aggaauagauacaaacgga

SEQ ID NO: 2313563 - RNA, 19 nt, Homo sapiens
  misc_RNA (1)...(19): siRNA sense strand
ggagauuggagaauuggaa

SEQ ID NO: 2313564 - RNA, 19 nt, Homo sapiens
  misc_RNA (1)...(19): siRNA sense strand
cggcuguggacucgagcaa

SEQ ID NO: 2313565 - RNA, 19 nt, Homo sapiens
  misc_RNA (1)...(19): siRNA sense strand
gagaauuggaagaggcuag

SEQ ID NO: 2313566 - RNA, 19 nt, Homo sapiens
  misc_RNA (1)...(19): siRNA sense strand
ugauggaguuaaagaaauc

SEQ ID NO: 2313567 - RNA, 19 nt, Homo sapiens
  misc_RNA (1)...(19): siRNA sense strand
agauuggagaauuggaaga

SEQ ID NO: 2313568 - RNA, 19 nt, Homo sapiens
  misc_RNA (1)...(19): siRNA sense strand
caguacagauucuugaaca

SEQ ID NO: 2313569 - RNA, 19 nt, Homo sapiens
  misc_RNA (1)...(19): siRNA sense strand
acauuauggcuuugcauuu

SEQ ID NO: 2313570 - RNA, 19 nt, Homo sapiens
  misc_RNA (1)...(19): siRNA sense strand
gauauugggacaagcauca

SEQ ID NO: 2313571 - RNA, 19 nt, Homo sapiens
  misc_RNA (1)...(19): siRNA sense strand
acucagaagaaagaaguua

SEQ ID NO: 2313572 - RNA, 19 nt, Homo sapiens
  misc_RNA (1)...(19): siRNA sense strand
gcagaugcacuuuacgaau

SEQ ID NO: 2313573 - RNA, 19 nt, Homo sapiens
  misc_RNA (1)...(19): siRNA sense strand
ugaugauggaguuaaagaa

SEQ ID NO: 2313574 - RNA, 19 nt, Homo sapiens
  misc_RNA (1)...(19): siRNA sense strand
uuaaccacuucuauggaaa

SEQ ID NO: 2313575 - RNA, 19 nt, Homo sapiens
  misc_RNA (1)...(19): siRNA sense strand
uuguaucaguguugaccua

SEQ ID NO: 2313576 - RNA, 19 nt, Homo sapiens
  misc_RNA (1)...(19): siRNA sense strand
agcuauaucuggaugacau

SEQ ID NO: 2313577 - RNA, 19 nt, Homo sapiens
  misc_RNA (1)...(19): siRNA sense strand
aaacaaaagcucaccagua

SEQ ID NO: 2313578 - RNA, 19 nt, Homo sapiens
  misc_RNA (1)...(19): siRNA sense strand
ggaacuggaaauauagcuu

SEQ ID NO: 2313579 - RNA, 19 nt, Homo sapiens
  misc_RNA (1)...(19): siRNA sense strand
gcccugaugauguggaaga

SEQ ID NO: 2313580 - RNA, 19 nt, Homo sapiens
  misc_RNA (1)...(19): siRNA sense strand
gggacaagcaucagccacu

SEQ ID NO: 2313581 - RNA, 19 nt, Homo sapiens
  misc_RNA (1)...(19): siRNA sense strand
gggcauaucucauacacgu

SEQ ID NO: 2313582 - RNA, 19 nt, Homo sapiens
  misc_RNA (1)...(19): siRNA sense strand
cucuuaacucagugggaau

SEQ ID NO: 2313583 - RNA, 19 nt, Homo sapiens
  misc_RNA (1)...(19): siRNA sense strand
aaagaagugaagaaaccaa

SEQ ID NO: 2313584 - RNA, 19 nt, Homo sapiens
  misc_RNA (1)...(19): siRNA sense strand
gggaauugaaguauuaguu

SEQ ID NO: 2313585 - RNA, 19 nt, Homo sapiens
  misc_RNA (1)...(19): siRNA sense strand
ggacaugcucaucgaccau

SEQ ID NO: 2313586 - RNA, 19 nt, Homo sapiens
  misc_RNA (1)...(19): siRNA sense strand
agaacaagaaacucuacaa

SEQ ID NO: 2313587 - RNA, 19 nt, Homo sapiens
  misc_RNA (1)...(19): siRNA sense strand
uacaaaugcaguacagauu

SEQ ID NO: 2313588 - RNA, 19 nt, Homo sapiens
  misc_RNA (1)...(19): siRNA sense strand
cuaccuacuucuaagcaca

SEQ ID NO: 2313589 - RNA, 19 nt, Homo sapiens
  misc_RNA (1)...(19): siRNA sense strand
acauagaacaagaaacucu

SEQ ID NO: 2313590 - RNA, 19 nt, Homo sapiens
  misc_RNA (1)...(19): siRNA sense strand
ccucuuaacucagugggaa

SEQ ID NO: 2313591 - RNA, 19 nt, Homo sapiens
  misc_RNA (1)...(19): siRNA sense strand
caucuugcauugaaaggau

SEQ ID NO: 2313592 - RNA, 19 nt, Homo sapiens
  misc_RNA (1)...(19): siRNA sense strand
gugaagaaaccaagccauc

SEQ ID NO: 2313593 - RNA, 19 nt, Homo sapiens
  misc_RNA (1)...(19): siRNA sense strand
cuggcuugauauugggaca

SEQ ID NO: 2313594 - RNA, 19 nt, Homo sapiens
  misc_RNA (1)...(19): siRNA sense strand
aauggaaacucuagagcac

SEQ ID NO: 2313595 - RNA, 19 nt, Homo sapiens
  misc_RNA (1)...(19): siRNA sense strand
aagaguggagauuggagaa

SEQ ID NO: 2313596 - RNA, 19 nt, Homo sapiens
  misc_RNA (1)...(19): siRNA sense strand
cuucuuagugacagcauuu

SEQ ID NO: 2313597 - RNA, 19 nt, Homo sapiens
  misc_RNA (1)...(19): siRNA sense strand
ggauuauggcagcuggcuu

SEQ ID NO: 2313598 - RNA, 19 nt, Homo sapiens
  misc_RNA (1)...(19): siRNA sense strand
cuauggaaaugaugggaaa

SEQ ID NO: 2313599 - RNA, 19 nt, Homo sapiens
  misc_RNA (1)...(19): siRNA sense strand
aggaagagcuauugguaca

SEQ ID NO: 2313600 - RNA, 19 nt, Homo sapiens
  misc_RNA (1)...(19): siRNA sense strand
cuggauaaacauagaacaa

SEQ ID NO: 2313601 - RNA, 19 nt, Homo sapiens
  misc_RNA (1)...(19): siRNA sense strand
acucagacuauguggcaaa

SEQ ID NO: 2313602 - RNA, 19 nt, Homo sapiens
  misc_RNA (1)...(19): siRNA sense strand
gguuguaggucgaaagcca

SEQ ID NO: 2313603 - RNA, 19 nt, Homo sapiens
  misc_RNA (1)...(19): siRNA sense strand
aguugaugauggaguuaaa

SEQ ID NO: 2313604 - RNA, 19 nt, Homo sapiens
  misc_RNA (1)...(19): siRNA sense strand
acgaagaaacucagacuau

SEQ ID NO: 2313605 - RNA, 19 nt, Homo sapiens
  misc_RNA (1)...(19): siRNA sense strand
ccaaaggauggaaggaaaa

SEQ ID NO: 2313606 - RNA, 19 nt, Homo sapiens
  misc_RNA (1)...(19): siRNA sense strand
acacagaaaguuugaugaa

SEQ ID NO: 2313607 - RNA, 19 nt, Homo sapiens
  misc_RNA (1)...(19): siRNA sense strand
cgagagacuacaagcacaa

SEQ ID NO: 2313608 - RNA, 19 nt, Homo sapiens
  misc_RNA (1)...(19): siRNA sense strand
cgaccauccucgagagacu

SEQ ID NO: 2313609 - RNA, 19 nt, Homo sapiens
  misc_RNA (1)...(19): siRNA sense strand
caaauuauuagcugggcaa

SEQ ID NO: 2313610 - RNA, 19 nt, Homo sapiens
  misc_RNA (1)...(19): siRNA sense strand
ggaaaugaugggaaaacaa

SEQ ID NO: 2313611 - RNA, 19 nt, Homo sapiens
  misc_RNA (1)...(19): siRNA sense strand
gaauagauacaaacggaca

SEQ ID NO: 2313612 - RNA, 19 nt, Homo sapiens
  misc_RNA (1)...(19): siRNA sense strand
ucuucaaagcagagagcau

SEQ ID NO: 2313613 - RNA, 19 nt, Homo sapiens
  misc_RNA (1)...(19): siRNA sense strand
ugaaaaugacucagaagaa

SEQ ID NO: 2313614 - RNA, 19 nt, Homo sapiens
  misc_RNA (1)...(19): siRNA sense strand
ugucagugcaguugccaaa

SEQ ID NO: 2313615 - RNA, 19 nt, Homo sapiens
  misc_RNA (1)...(19): siRNA sense strand
acuucuaagcacaggguau

SEQ ID NO: 2313616 - RNA, 19 nt, Homo sapiens
  misc_RNA (1)...(19): siRNA sense strand
cgagaagauuaguguuguu

SEQ ID NO: 2313617 - RNA, 19 nt, Homo sapiens
  misc_RNA (1)...(19): siRNA sense strand
gaguaucagcucagcaauu

SEQ ID NO: 2313618 - RNA, 19 nt, Homo sapiens
  misc_RNA (1)...(19): siRNA sense strand
ccuccaucuuugacauuua

SEQ ID NO: 2313619 - RNA, 19 nt, Homo sapiens
  misc_RNA (1)...(19): siRNA sense strand
aggaauagauacaaacgga

SEQ ID NO: 2313620 - RNA, 19 nt, Homo sapiens
  misc_RNA (1)...(19): siRNA sense strand
ggagauuggagaauuggaa

SEQ ID NO: 2313621 - RNA, 19 nt, Homo sapiens
  misc_RNA (1)...(19): siRNA sense strand
cggcuguggacucgagcaa

SEQ ID NO: 2313622 - RNA, 19 nt, Homo sapiens
  misc_RNA (1)...(19): siRNA sense strand
gagaauuggaagaggcuag

SEQ ID NO: 2313623 - RNA, 19 nt, Homo sapiens
  misc_RNA (1)...(19): siRNA sense strand
ugauggaguuaaagaaauc

SEQ ID NO: 2313624 - RNA, 19 nt, Homo sapiens
  misc_RNA (1)...(19): siRNA sense strand
agauuggagaauuggaaga

SEQ ID NO: 2313625 - RNA, 19 nt, Homo sapiens
  misc_RNA (1)...(19): siRNA sense strand
caguacagauucuugaaca

SEQ ID NO: 2313626 - RNA, 19 nt, Homo sapiens
  misc_RNA (1)...(19): siRNA sense strand
acauuauggcuuugcauuu

SEQ ID NO: 2313627 - RNA, 19 nt, Homo sapiens
  misc_RNA (1)...(19): siRNA sense strand
gauauugggacaagcauca

SEQ ID NO: 2313628 - RNA, 19 nt, Homo sapiens
  misc_RNA (1)...(19): siRNA sense strand
acucagaagaaagaaguua

SEQ ID NO: 2313629 - RNA, 19 nt, Homo sapiens
  misc_RNA (1)...(19): siRNA sense strand
gcagaugcacuuuacgaau

SEQ ID NO: 2313630 - RNA, 19 nt, Homo sapiens
  misc_RNA (1)...(19): siRNA sense strand
ugaugauggaguuaaagaa

SEQ ID NO: 2313631 - RNA, 19 nt, Homo sapiens
  misc_RNA (1)...(19): siRNA sense strand
uuaaccacuucuauggaaa

SEQ ID NO: 2313632 - RNA, 19 nt, Homo sapiens
  misc_RNA (1)...(19): siRNA sense strand
uuguaucaguguugaccua

SEQ ID NO: 2313633 - RNA, 19 nt, Homo sapiens
  misc_RNA (1)...(19): siRNA sense strand
agcuauaucuggaugacau

SEQ ID NO: 2313634 - RNA, 19 nt, Homo sapiens
  misc_RNA (1)...(19): siRNA sense strand
aaacaaaagcucaccagua

SEQ ID NO: 2313635 - RNA, 19 nt, Homo sapiens
  misc_RNA (1)...(19): siRNA sense strand
ggaacuggaaauauagcuu

SEQ ID NO: 2313636 - RNA, 19 nt, Homo sapiens
  misc_RNA (1)...(19): siRNA sense strand
gcccugaugauguggaaga

SEQ ID NO: 2313637 - RNA, 19 nt, Homo sapiens
  misc_RNA (1)...(19): siRNA sense strand
gggacaagcaucagccacu

SEQ ID NO: 2313638 - RNA, 19 nt, Homo sapiens
  misc_RNA (1)...(19): siRNA sense strand
gggcauaucucauacacgu

SEQ ID NO: 2313639 - RNA, 19 nt, Homo sapiens
  misc_RNA (1)...(19): siRNA sense strand
cucuuaacucagugggaau

SEQ ID NO: 2313640 - RNA, 19 nt, Homo sapiens
  misc_RNA (1)...(19): siRNA sense strand
aaagaagugaagaaaccaa

SEQ ID NO: 2313641 - RNA, 19 nt, Homo sapiens
  misc_RNA (1)...(19): siRNA sense strand
gggaauugaaguauuaguu

SEQ ID NO: 2313642 - RNA, 19 nt, Homo sapiens
  misc_RNA (1)...(19): siRNA sense strand
ggacaugcucaucgaccau

SEQ ID NO: 2313643 - RNA, 19 nt, Homo sapiens
  misc_RNA (1)...(19): siRNA sense strand
agaacaagaaacucuacaa

SEQ ID NO: 2313644 - RNA, 19 nt, Homo sapiens
  misc_RNA (1)...(19): siRNA sense strand
uacaaaugcaguacagauu

SEQ ID NO: 2313645 - RNA, 19 nt, Homo sapiens
  misc_RNA (1)...(19): siRNA sense strand
cuaccuacuucuaagcaca

SEQ ID NO: 2313646 - RNA, 19 nt, Homo sapiens
  misc_RNA (1)...(19): siRNA sense strand
acauagaacaagaaacucu

SEQ ID NO: 2313647 - RNA, 19 nt, Homo sapiens
  misc_RNA (1)...(19): siRNA sense strand
ccucuuaacucagugggaa

SEQ ID NO: 2313648 - RNA, 19 nt, Homo sapiens
  misc_RNA (1)...(19): siRNA sense strand
caucuugcauugaaaggau

SEQ ID NO: 2313649 - RNA, 19 nt, Homo sapiens
  misc_RNA (1)...(19): siRNA sense strand
gugaagaaaccaagccauc

SEQ ID NO: 2313650 - RNA, 19 nt, Homo sapiens
  misc_RNA (1)...(19): siRNA sense strand
cuggcuugauauugggaca

SEQ ID NO: 2313651 - RNA, 19 nt, Homo sapiens
  misc_RNA (1)...(19): siRNA sense strand
aauggaaacucuagagcac

SEQ ID NO: 2313652 - RNA, 19 nt, Homo sapiens
  misc_RNA (1)...(19): siRNA sense strand
aagaguggagauuggagaa

SEQ ID NO: 2313653 - RNA, 19 nt, Homo sapiens
  misc_RNA (1)...(19): siRNA sense strand
cuucuuagugacagcauuu

SEQ ID NO: 2313654 - RNA, 19 nt, Homo sapiens
  misc_RNA (1)...(19): siRNA sense strand
ggauuauggcagcuggcuu

SEQ ID NO: 2313655 - RNA, 19 nt, Homo sapiens
  misc_RNA (1)...(19): siRNA sense strand
ggaaauaccuuuaccgaag

SEQ ID NO: 2313656 - RNA, 19 nt, Homo sapiens
  misc_RNA (1)...(19): siRNA sense strand
gcucauggcagcuggagga

SEQ ID NO: 2313657 - RNA, 19 nt, Homo sapiens
  misc_RNA (1)...(19): siRNA sense strand
ucuuaugcuccaugguuaa

SEQ ID NO: 2313658 - RNA, 19 nt, Homo sapiens
  misc_RNA (1)...(19): siRNA sense strand
ggauuuauggaaugggacu

SEQ ID NO: 2313659 - RNA, 19 nt, Homo sapiens
  misc_RNA (1)...(19): siRNA sense strand
uggaaauaccuuuaccgaa

SEQ ID NO: 2313660 - RNA, 19 nt, Homo sapiens
  misc_RNA (1)...(19): siRNA sense strand
gaaaggaaauucugggucu

SEQ ID NO: 2313661 - RNA, 19 nt, Homo sapiens
  misc_RNA (1)...(19): siRNA sense strand
cuggggagcugaaaggaaa

SEQ ID NO: 2313662 - RNA, 19 nt, Homo sapiens
  misc_RNA (1)...(19): siRNA sense strand
gcaagaaccccaauggcua

SEQ ID NO: 2313663 - RNA, 19 nt, Homo sapiens
  misc_RNA (1)...(19): siRNA sense strand
aggaacugcucaaggucuu

SEQ ID NO: 2313664 - RNA, 19 nt, Homo sapiens
  misc_RNA (1)...(19): siRNA sense strand
ucuacuaugcggaagacua

SEQ ID NO: 2313665 - RNA, 19 nt, Homo sapiens
  misc_RNA (1)...(19): siRNA sense strand
augcagaagucguccgagu

SEQ ID NO: 2313666 - RNA, 19 nt, Homo sapiens
  misc_RNA (1)...(19): siRNA sense strand
cucaaggucuucugggaga

SEQ ID NO: 2313667 - RNA, 19 nt, Homo sapiens
  misc_RNA (1)...(19): siRNA sense strand
gagacuugaaggaggacaa

SEQ ID NO: 2313668 - RNA, 19 nt, Homo sapiens
  misc_RNA (1)...(19): siRNA sense strand
acaagaagcuggaggcucu

SEQ ID NO: 2313669 - RNA, 19 nt, Homo sapiens
  misc_RNA (1)...(19): siRNA sense strand
cggccaaggagcuguucaa

SEQ ID NO: 2313670 - RNA, 19 nt, Homo sapiens
  misc_RNA (1)...(19): siRNA sense strand
aaauaauggagcaagguga

SEQ ID NO: 2313671 - RNA, 19 nt, Homo sapiens
  misc_RNA (1)...(19): siRNA sense strand
aggucacccuugagaagaa

SEQ ID NO: 2313672 - RNA, 19 nt, Homo sapiens
  misc_RNA (1)...(19): siRNA sense strand
ccaggaaaauggagagaag

SEQ ID NO: 2313673 - RNA, 19 nt, Homo sapiens
  misc_RNA (1)...(19): siRNA sense strand
caagaaaugugauaccuca

SEQ ID NO: 2313674 - RNA, 19 nt, Homo sapiens
  misc_RNA (1)...(19): siRNA sense strand
ucaacgaggauguggagga

SEQ ID NO: 2313675 - RNA, 19 nt, Homo sapiens
  misc_RNA (1)...(19): siRNA sense strand
cuuaccgagcccugagaaa

SEQ ID NO: 2313676 - RNA, 19 nt, Homo sapiens
  misc_RNA (1)...(19): siRNA sense strand
cugaugaccaagagaaugu

SEQ ID NO: 2313677 - RNA, 19 nt, Homo sapiens
  misc_RNA (1)...(19): siRNA sense strand
aggaguggcuggaggggau

SEQ ID NO: 2313678 - RNA, 19 nt, Homo sapiens
  misc_RNA (1)...(19): siRNA sense strand
ccucaaaagucuuggggug

SEQ ID NO: 2313679 - RNA, 19 nt, Homo sapiens
  misc_RNA (1)...(19): siRNA sense strand
gagaggugguguuacgcuu

SEQ ID NO: 2313680 - RNA, 19 nt, Homo sapiens
  misc_RNA (1)...(19): siRNA sense strand
cugcauaccacguaccaga

SEQ ID NO: 2313681 - RNA, 19 nt, Homo sapiens
  misc_RNA (1)...(19): siRNA sense strand
gagacuugaaggaggacaa

SEQ ID NO: 2313682 - RNA, 19 nt, Homo sapiens
  misc_RNA (1)...(19): siRNA sense strand
acaagaagcuggaggcucu

SEQ ID NO: 2313683 - RNA, 19 nt, Homo sapiens
  misc_RNA (1)...(19): siRNA sense strand
cggccaaggagcuguucaa

SEQ ID NO: 2313684 - RNA, 19 nt, Homo sapiens
  misc_RNA (1)...(19): siRNA sense strand
aaauaauggagcaagguga

SEQ ID NO: 2313685 - RNA, 19 nt, Homo sapiens
  misc_RNA (1)...(19): siRNA sense strand
aggucacccuugagaagaa

SEQ ID NO: 2313686 - RNA, 19 nt, Homo sapiens
  misc_RNA (1)...(19): siRNA sense strand
ccaggaaaauggagagaag

SEQ ID NO: 2313687 - RNA, 19 nt, Homo sapiens
  misc_RNA (1)...(19): siRNA sense strand
caagaaaugugauaccuca

SEQ ID NO: 2313688 - RNA, 19 nt, Homo sapiens
  misc_RNA (1)...(19): siRNA sense strand
ucaacgaggauguggagga

SEQ ID NO: 2313689 - RNA, 19 nt, Homo sapiens
  misc_RNA (1)...(19): siRNA sense strand
cuuaccgagcccugagaaa

SEQ ID NO: 2313690 - RNA, 19 nt, Homo sapiens
  misc_RNA (1)...(19): siRNA sense strand
cugaugaccaagagaaugu

SEQ ID NO: 2313691 - RNA, 19 nt, Homo sapiens
  misc_RNA (1)...(19): siRNA sense strand
aggaguggcuggaggggau

SEQ ID NO: 2313692 - RNA, 19 nt, Homo sapiens
  misc_RNA (1)...(19): siRNA sense strand
ccucaaaagucuuggggug

SEQ ID NO: 2313693 - RNA, 19 nt, Homo sapiens
  misc_RNA (1)...(19): siRNA sense strand
gagaggugguguuacgcuu

SEQ ID NO: 2313694 - RNA, 19 nt, Homo sapiens
  misc_RNA (1)...(19): siRNA sense strand
cugcauaccacguaccaga

SEQ ID NO: 2313695 - RNA, 19 nt, Homo sapiens
  misc_RNA (1)...(19): siRNA sense strand
gaacacacauccauggcaa

SEQ ID NO: 2313696 - RNA, 19 nt, Homo sapiens
  misc_RNA (1)...(19): siRNA sense strand
ccuagauaucgguggcuua

SEQ ID NO: 2313697 - RNA, 19 nt, Homo sapiens
  misc_RNA (1)...(19): siRNA sense strand
acuuaugguuccaguacaa

SEQ ID NO: 2313698 - RNA, 19 nt, Homo sapiens
  misc_RNA (1)...(19): siRNA sense strand
agaaacgaggguagaggaa

SEQ ID NO: 2313699 - RNA, 19 nt, Homo sapiens
  misc_RNA (1)...(19): siRNA sense strand
agauauggucacuuugaaa

SEQ ID NO: 2313700 - RNA, 19 nt, Homo sapiens
  misc_RNA (1)...(19): siRNA sense strand
gugcugagguuucugggaa

SEQ ID NO: 2313701 - RNA, 19 nt, Homo sapiens
  misc_RNA (1)...(19): siRNA sense strand
aaaugauguccuugaagaa

SEQ ID NO: 2313702 - RNA, 19 nt, Homo sapiens
  misc_RNA (1)...(19): siRNA sense strand
uggaaaugacagagaugga

SEQ ID NO: 2313703 - RNA, 19 nt, Homo sapiens
  misc_RNA (1)...(19): siRNA sense strand
ggauauuguggaacgguga

SEQ ID NO: 2313704 - RNA, 19 nt, Homo sapiens
  misc_RNA (1)...(19): siRNA sense strand
ucaagaggguugugggaag

SEQ ID NO: 2313705 - RNA, 19 nt, Homo sapiens
  misc_RNA (1)...(19): siRNA sense strand
uugagauggaggaguuaua

SEQ ID NO: 2313706 - RNA, 19 nt, Homo sapiens
  misc_RNA (1)...(19): siRNA sense strand
ggguagaggaagcagucau

SEQ ID NO: 2313707 - RNA, 19 nt, Homo sapiens
  misc_RNA (1)...(19): siRNA sense strand
agaacuggcuuguggcguu

SEQ ID NO: 2313708 - RNA, 19 nt, Homo sapiens
  misc_RNA (1)...(19): siRNA sense strand
uugaaagccaggaugacaa

SEQ ID NO: 2313709 - RNA, 19 nt, Homo sapiens
  misc_RNA (1)...(19): siRNA sense strand
ugacacaaauccuggccau

SEQ ID NO: 2313710 - RNA, 19 nt, Homo sapiens
  misc_RNA (1)...(19): siRNA sense strand
ggaagaucucagugaccuu

SEQ ID NO: 2313711 - RNA, 19 nt, Homo sapiens
  misc_RNA (1)...(19): siRNA sense strand
ccaaacaacugcaggugcu

SEQ ID NO: 2313712 - RNA, 19 nt, Homo sapiens
  misc_RNA (1)...(19): siRNA sense strand
auguuaggauauuguggaa

SEQ ID NO: 2313713 - RNA, 19 nt, Homo sapiens
  misc_RNA (1)...(19): siRNA sense strand
ucacugacugguuggaaau

SEQ ID NO: 2313714 - RNA, 19 nt, Homo sapiens
  misc_RNA (1)...(19): siRNA sense strand
gguuaauguccaucagugu

SEQ ID NO: 2313715 - RNA, 19 nt, Homo sapiens
  misc_RNA (1)...(19): siRNA sense strand
uagaagggagccugggaca

SEQ ID NO: 2313716 - RNA, 19 nt, Homo sapiens
  misc_RNA (1)...(19): siRNA sense strand
gcguuuggacauaugaaca

SEQ ID NO: 2313717 - RNA, 19 nt, Homo sapiens
  misc_RNA (1)...(19): siRNA sense strand
augagaagauagugggcaa

SEQ ID NO: 2313718 - RNA, 19 nt, Homo sapiens
  misc_RNA (1)...(19): siRNA sense strand
agaaagaacacgcggguga

SEQ ID NO: 2313719 - RNA, 19 nt, Homo sapiens
  misc_RNA (1)...(19): siRNA sense strand
ggaucgaggugcagcccaa

SEQ ID NO: 2313720 - RNA, 19 nt, Homo sapiens
  misc_RNA (1)...(19): siRNA sense strand
cggaaaggcgagacggaca

SEQ ID NO: 2313721 - RNA, 19 nt, Homo sapiens
  misc_RNA (1)...(19): siRNA sense strand
gguugaaagacaagacaca

SEQ ID NO: 2313722 - RNA, 19 nt, Homo sapiens
  misc_RNA (1)...(19): siRNA sense strand
ucaucaaugggaagagaaa

SEQ ID NO: 2313723 - RNA, 19 nt, Homo sapiens
  misc_RNA (1)...(19): siRNA sense strand
cgaacgaagaagagccgaa

SEQ ID NO: 2313724 - RNA, 19 nt, Homo sapiens
  misc_RNA (1)...(19): siRNA sense strand
ggacagcaaauuugggaga

SEQ ID NO: 2313725 - RNA, 19 nt, Homo sapiens
  misc_RNA (1)...(19): siRNA sense strand
uggauaaggacaagagcca

SEQ ID NO: 2313726 - RNA, 19 nt, Homo sapiens
  misc_RNA (1)...(19): siRNA sense strand
aagaagagccgaaugcaca

SEQ ID NO: 2313727 - RNA, 19 nt, Homo sapiens
  misc_RNA (1)...(19): siRNA sense strand
cgacauugagcugcggaaa

SEQ ID NO: 2313728 - RNA, 19 nt, Homo sapiens
  misc_RNA (1)...(19): siRNA sense strand
agaacuuggaccagaccua

SEQ ID NO: 2313729 - RNA, 19 nt, Homo sapiens
  misc_RNA (1)...(19): siRNA sense strand
cccaagauguggaagacca

SEQ ID NO: 2313730 - RNA, 19 nt, Homo sapiens
  misc_RNA (1)...(19): siRNA sense strand
cagcggagcaagagccuga

SEQ ID NO: 2313731 - RNA, 19 nt, Homo sapiens
  misc_RNA (1)...(19): siRNA sense strand
ggacagcugaugagcggau

SEQ ID NO: 2313732 - RNA, 19 nt, Homo sapiens
  misc_RNA (1)...(19): siRNA sense strand
ccaccagcuaugagaagau

SEQ ID NO: 2313733 - RNA, 19 nt, Homo sapiens
  misc_RNA (1)...(19): siRNA sense strand
gagcagaacuuggaccaga

SEQ ID NO: 2313734 - RNA, 19 nt, Homo sapiens
  misc_RNA (1)...(19): siRNA sense strand
gaacaagcauauccgcaca

SEQ ID NO: 2313735 - RNA, 19 nt, Homo sapiens
  misc_RNA (1)...(19): siRNA sense strand
ccacagucauucagcagca

SEQ ID NO: 2313736 - RNA, 19 nt, Homo sapiens
  misc_RNA (1)...(19): siRNA sense strand
aggacaagagccagcccaa

SEQ ID NO: 2313737 - RNA, 19 nt, Homo sapiens
  misc_RNA (1)...(19): siRNA sense strand
uugaaagacaagacacaga

SEQ ID NO: 2313738 - RNA, 19 nt, Homo sapiens
  misc_RNA (1)...(19): siRNA sense strand
ugguucagcuccauggcua

SEQ ID NO: 2313739 - RNA, 19 nt, Homo sapiens
  misc_RNA (1)...(19): siRNA sense strand
uguugagaucccugaauau

SEQ ID NO: 2313740 - RNA, 19 nt, Homo sapiens
  misc_RNA (1)...(19): siRNA sense strand
augagaagauagugggcaa

SEQ ID NO: 2313741 - RNA, 19 nt, Homo sapiens
  misc_RNA (1)...(19): siRNA sense strand
agaaagaacacgcggguga

SEQ ID NO: 2313742 - RNA, 19 nt, Homo sapiens
  misc_RNA (1)...(19): siRNA sense strand
ggaucgaggugcagcccaa

SEQ ID NO: 2313743 - RNA, 19 nt, Homo sapiens
  misc_RNA (1)...(19): siRNA sense strand
cggaaaggcgagacggaca

SEQ ID NO: 2313744 - RNA, 19 nt, Homo sapiens
  misc_RNA (1)...(19): siRNA sense strand
gguugaaagacaagacaca

SEQ ID NO: 2313745 - RNA, 19 nt, Homo sapiens
  misc_RNA (1)...(19): siRNA sense strand
ucaucaaugggaagagaaa

SEQ ID NO: 2313746 - RNA, 19 nt, Homo sapiens
  misc_RNA (1)...(19): siRNA sense strand
cgaacgaagaagagccgaa

SEQ ID NO: 2313747 - RNA, 19 nt, Homo sapiens
  misc_RNA (1)...(19): siRNA sense strand
ggacagcaaauuugggaga

SEQ ID NO: 2313748 - RNA, 19 nt, Homo sapiens
  misc_RNA (1)...(19): siRNA sense strand
uggauaaggacaagagcca

SEQ ID NO: 2313749 - RNA, 19 nt, Homo sapiens
  misc_RNA (1)...(19): siRNA sense strand
aagaagagccgaaugcaca

SEQ ID NO: 2313750 - RNA, 19 nt, Homo sapiens
  misc_RNA (1)...(19): siRNA sense strand
cgacauugagcugcggaaa

SEQ ID NO: 2313751 - RNA, 19 nt, Homo sapiens
  misc_RNA (1)...(19): siRNA sense strand
agaacuuggaccagaccua

SEQ ID NO: 2313752 - RNA, 19 nt, Homo sapiens
  misc_RNA (1)...(19): siRNA sense strand
cccaagauguggaagacca

SEQ ID NO: 2313753 - RNA, 19 nt, Homo sapiens
  misc_RNA (1)...(19): siRNA sense strand
cagcggagcaagagccuga

SEQ ID NO: 2313754 - RNA, 19 nt, Homo sapiens
  misc_RNA (1)...(19): siRNA sense strand
ggacagcugaugagcggau

SEQ ID NO: 2313755 - RNA, 19 nt, Homo sapiens
  misc_RNA (1)...(19): siRNA sense strand
ccaccagcuaugagaagau

SEQ ID NO: 2313756 - RNA, 19 nt, Homo sapiens
  misc_RNA (1)...(19): siRNA sense strand
gagcagaacuuggaccaga

SEQ ID NO: 2313757 - RNA, 19 nt, Homo sapiens
  misc_RNA (1)...(19): siRNA sense strand
gaacaagcauauccgcaca

SEQ ID NO: 2313758 - RNA, 19 nt, Homo sapiens
  misc_RNA (1)...(19): siRNA sense strand
ccacagucauucagcagca

SEQ ID NO: 2313759 - RNA, 19 nt, Homo sapiens
  misc_RNA (1)...(19): siRNA sense strand
aggacaagagccagcccaa

SEQ ID NO: 2313760 - RNA, 19 nt, Homo sapiens
  misc_RNA (1)...(19): siRNA sense strand
uugaaagacaagacacaga

SEQ ID NO: 2313761 - RNA, 19 nt, Homo sapiens
  misc_RNA (1)...(19): siRNA sense strand
ugguucagcuccauggcua

SEQ ID NO: 2313762 - RNA, 19 nt, Homo sapiens
  misc_RNA (1)...(19): siRNA sense strand
uguugagaucccugaauau

SEQ ID NO: 2313763 - RNA, 19 nt, Homo sapiens
  misc_RNA (1)...(19): siRNA sense strand
aaaccaaaaugaagggaaa

SEQ ID NO: 2313764 - RNA, 19 nt, Homo sapiens
  misc_RNA (1)...(19): siRNA sense strand
gcacagugaucaagaggca

SEQ ID NO: 2313765 - RNA, 19 nt, Homo sapiens
  misc_RNA (1)...(19): siRNA sense strand
uggaaaugggagaugauua

SEQ ID NO: 2313766 - RNA, 19 nt, Homo sapiens
  misc_RNA (1)...(19): siRNA sense strand
augucaagauggugaagaa

SEQ ID NO: 2313767 - RNA, 19 nt, Homo sapiens
  misc_RNA (1)...(19): siRNA sense strand
ggaagaagagggaacgaga

SEQ ID NO: 2313768 - RNA, 19 nt, Homo sapiens
  misc_RNA (1)...(19): siRNA sense strand
cgcaggaagaggauggaaa

SEQ ID NO: 2313769 - RNA, 19 nt, Homo sapiens
  misc_RNA (1)...(19): siRNA sense strand
cgauaaagacgaugcccau

SEQ ID NO: 2313770 - RNA, 19 nt, Homo sapiens
  misc_RNA (1)...(19): siRNA sense strand
agggaaauaaagugaauga

SEQ ID NO: 2313771 - RNA, 19 nt, Homo sapiens
  misc_RNA (1)...(19): siRNA sense strand
gcaagaagaucccggagca

SEQ ID NO: 2313772 - RNA, 19 nt, Homo sapiens
  misc_RNA (1)...(19): siRNA sense strand
ugucgaagacucaacgaaa

SEQ ID NO: 2313773 - RNA, 19 nt, Homo sapiens
  misc_RNA (1)...(19): siRNA sense strand
acugaggaguccaggaaga

SEQ ID NO: 2313774 - RNA, 19 nt, Homo sapiens
  misc_RNA (1)...(19): siRNA sense strand
aagccaagacuaugaagaa

SEQ ID NO: 2313775 - RNA, 19 nt, Homo sapiens
  misc_RNA (1)...(19): siRNA sense strand
ucaugaagaaauuggaaga

SEQ ID NO: 2313776 - RNA, 19 nt, Homo sapiens
  misc_RNA (1)...(19): siRNA sense strand
ggaugugcacagugaucaa

SEQ ID NO: 2313777 - RNA, 19 nt, Homo sapiens
  misc_RNA (1)...(19): siRNA sense strand
gcucagaagaagaugaauc

SEQ ID NO: 2313778 - RNA, 19 nt, Homo sapiens
  misc_RNA (1)...(19): siRNA sense strand
ccaacaaaugugaugugaa

SEQ ID NO: 2313779 - RNA, 19 nt, Homo sapiens
  misc_RNA (1)...(19): siRNA sense strand
cuaagaagguucagaggac

SEQ ID NO: 2313780 - RNA, 19 nt, Homo sapiens
  misc_RNA (1)...(19): siRNA sense strand
gaaauaaagugaaugaggu

SEQ ID NO: 2313781 - RNA, 19 nt, Homo sapiens
  misc_RNA (1)...(19): siRNA sense strand
uggcaaagcaaauucgaga

SEQ ID NO: 2313782 - RNA, 19 nt, Homo sapiens
  misc_RNA (1)...(19): siRNA sense strand
ggaacgagaucuugagcug

SEQ ID NO: 2313783 - RNA, 19 nt, Homo sapiens
  misc_RNA (1)...(19): siRNA sense strand
aagaagaagagcugagaac

SEQ ID NO: 2313784 - RNA, 19 nt, Homo sapiens
  misc_RNA (1)...(19): siRNA sense strand
cugaggaagguguuauuaa

SEQ ID NO: 2313785 - RNA, 19 nt, Homo sapiens
  misc_RNA (1)...(19): siRNA sense strand
ggagaguaugacaguguau

SEQ ID NO: 2313786 - RNA, 19 nt, Homo sapiens
  misc_RNA (1)...(19): siRNA sense strand
ggacaguuuuggagaagga

SEQ ID NO: 2313787 - RNA, 19 nt, Homo sapiens
  misc_RNA (1)...(19): siRNA sense strand
agaagaagaugaaucgguu

SEQ ID NO: 2313788 - RNA, 19 nt, Homo sapiens
  misc_RNA (1)...(19): siRNA sense strand
agaagaucccggagcauca

SEQ ID NO: 2313789 - RNA, 19 nt, Homo sapiens
  misc_RNA (1)...(19): siRNA sense strand
cggagcaucacuaggaaaa

SEQ ID NO: 2313790 - RNA, 19 nt, Homo sapiens
  misc_RNA (1)...(19): siRNA sense strand
aagaaugcucagaagaaga

SEQ ID NO: 2313791 - RNA, 19 nt, Homo sapiens
  misc_RNA (1)...(19): siRNA sense strand
cggauagacacguguuuga

SEQ ID NO: 2313792 - RNA, 19 nt, Homo sapiens
  misc_RNA (1)...(19): siRNA sense strand
gacgaagagaugcuggaaa

SEQ ID NO: 2313793 - RNA, 19 nt, Homo sapiens
  misc_RNA (1)...(19): siRNA sense strand
cuaaagauuaugugcgacu

SEQ ID NO: 2313794 - RNA, 19 nt, Homo sapiens
  misc_RNA (1)...(19): siRNA sense strand
ucgaagacucaacgaaaga

SEQ ID NO: 2313795 - RNA, 19 nt, Homo sapiens
  misc_RNA (1)...(19): siRNA sense strand
gaggaguccaggaagaaga

SEQ ID NO: 2313796 - RNA, 19 nt, Homo sapiens
  misc_RNA (1)...(19): siRNA sense strand
uggaguauuuggagcaagu

SEQ ID NO: 2313797 - RNA, 19 nt, Homo sapiens
  misc_RNA (1)...(19): siRNA sense strand
agcuagaacucuuccagaa

SEQ ID NO: 2313798 - RNA, 19 nt, Homo sapiens
  misc_RNA (1)...(19): siRNA sense strand
ugugaagagaauagcugaa

SEQ ID NO: 2313799 - RNA, 19 nt, Homo sapiens
  misc_RNA (1)...(19): siRNA sense strand
ccgccaaggacuucauaga

SEQ ID NO: 2313800 - RNA, 19 nt, Homo sapiens
  misc_RNA (1)...(19): siRNA sense strand
gauaggaacaccaucgaga

SEQ ID NO: 2313801 - RNA, 19 nt, Homo sapiens
  misc_RNA (1)...(19): siRNA sense strand
gcuggaaaugggagaugau

SEQ ID NO: 2313802 - RNA, 19 nt, Homo sapiens
  misc_RNA (1)...(19): siRNA sense strand
ugauaagauaccagaaauc

SEQ ID NO: 2313803 - RNA, 19 nt, Homo sapiens
  misc_RNA (1)...(19): siRNA sense strand
auaugaagcccaagcacuu

SEQ ID NO: 2313804 - RNA, 19 nt, Homo sapiens
  misc_RNA (1)...(19): siRNA sense strand
gcgauaggcuuuuggcuca

SEQ ID NO: 2313805 - RNA, 19 nt, Homo sapiens
  misc_RNA (1)...(19): siRNA sense strand
ggauggaaacugaggaguc

SEQ ID NO: 2313806 - RNA, 19 nt, Homo sapiens
  misc_RNA (1)...(19): siRNA sense strand
gcaaacagcugaagcgugc

SEQ ID NO: 2313807 - RNA, 19 nt, Homo sapiens
  misc_RNA (1)...(19): siRNA sense strand
ggagcaagugcgucagcau

SEQ ID NO: 2313808 - RNA, 19 nt, Homo sapiens
  misc_RNA (1)...(19): siRNA sense strand
ggaagaaaggggaggcgga

SEQ ID NO: 2313809 - RNA, 19 nt, Homo sapiens
  misc_RNA (1)...(19): siRNA sense strand
acgacaaggaucauuacaa

SEQ ID NO: 2313810 - RNA, 19 nt, Homo sapiens
  misc_RNA (1)...(19): siRNA sense strand
ugcuaaagauuaugugcga

SEQ ID NO: 2313811 - RNA, 19 nt, Homo sapiens
  misc_RNA (1)...(19): siRNA sense strand
ccaaaaugaagggaaauaa

SEQ ID NO: 2313812 - RNA, 19 nt, Homo sapiens
  misc_RNA (1)...(19): siRNA sense strand
acaguguaucugagaguga

SEQ ID NO: 2313813 - RNA, 19 nt, Homo sapiens
  misc_RNA (1)...(19): siRNA sense strand
cgacagcuggcaaagcaaa

SEQ ID NO: 2313814 - RNA, 19 nt, Homo sapiens
  misc_RNA (1)...(19): siRNA sense strand
ccggagcaucacuaggaaa

SEQ ID NO: 2313815 - RNA, 19 nt, Homo sapiens
  misc_RNA (1)...(19): siRNA sense strand
agaauuaccaugauagacu

SEQ ID NO: 2313816 - RNA, 19 nt, Homo sapiens
  misc_RNA (1)...(19): siRNA sense strand
ccaugauagacuuucacaa

SEQ ID NO: 2313817 - RNA, 19 nt, Homo sapiens
  misc_RNA (1)...(19): siRNA sense strand
aggucagccuggugagaca

SEQ ID NO: 2313818 - RNA, 19 nt, Homo sapiens
  misc_RNA (1)...(19): siRNA sense strand
cagccuggugagacauaaa

SEQ ID NO: 2313819 - RNA, 19 nt, Homo sapiens
  misc_RNA (1)...(19): siRNA sense strand
agguggaggaggugaccaa

SEQ ID NO: 2313820 - RNA, 19 nt, Homo sapiens
  misc_RNA (1)...(19): siRNA sense strand
agaggaagguggaggaggu

SEQ ID NO: 2313821 - RNA, 19 nt, Homo sapiens
  misc_RNA (1)...(19): siRNA sense strand
gcgagguggagaaggugaa

SEQ ID NO: 2313822 - RNA, 19 nt, Homo sapiens
  misc_RNA (1)...(19): siRNA sense strand
gccuggagcuagaggacca

SEQ ID NO: 2313823 - RNA, 19 nt, Homo sapiens
  misc_RNA (1)...(19): siRNA sense strand
uggagaaggugaagcugga

SEQ ID NO: 2313824 - RNA, 19 nt, Homo sapiens
  misc_RNA (1)...(19): siRNA sense strand
aggaguuggucaaggagca

SEQ ID NO: 2313825 - RNA, 19 nt, Homo sapiens
  misc_RNA (1)...(19): siRNA sense strand
agaaggagcuggaagaccu

SEQ ID NO: 2313826 - RNA, 19 nt, Homo sapiens
  misc_RNA (1)...(19): siRNA sense strand
cuuaaaggcaccuggagca

SEQ ID NO: 2313827 - RNA, 19 nt, Homo sapiens
  misc_RNA (1)...(19): siRNA sense strand
agcagaaggagcuggaaga

SEQ ID NO: 2313828 - RNA, 19 nt, Homo sapiens
  misc_RNA (1)...(19): siRNA sense strand
agguggaggaggugaccaa

SEQ ID NO: 2313829 - RNA, 19 nt, Homo sapiens
  misc_RNA (1)...(19): siRNA sense strand
agaggaagguggaggaggu

SEQ ID NO: 2313830 - RNA, 19 nt, Homo sapiens
  misc_RNA (1)...(19): siRNA sense strand
gcgagguggagaaggugaa

SEQ ID NO: 2313831 - RNA, 19 nt, Homo sapiens
  misc_RNA (1)...(19): siRNA sense strand
gccuggagcuagaggacca

SEQ ID NO: 2313832 - RNA, 19 nt, Homo sapiens
  misc_RNA (1)...(19): siRNA sense strand
uggagaaggugaagcugga

SEQ ID NO: 2313833 - RNA, 19 nt, Homo sapiens
  misc_RNA (1)...(19): siRNA sense strand
aggaguuggucaaggagca

SEQ ID NO: 2313834 - RNA, 19 nt, Homo sapiens
  misc_RNA (1)...(19): siRNA sense strand
agaaggagcuggaagaccu

SEQ ID NO: 2313835 - RNA, 19 nt, Homo sapiens
  misc_RNA (1)...(19): siRNA sense strand
cuuaaaggcaccuggagca

SEQ ID NO: 2313836 - RNA, 19 nt, Homo sapiens
  misc_RNA (1)...(19): siRNA sense strand
agcagaaggagcuggaaga

SEQ ID NO: 2313837 - RNA, 19 nt, Homo sapiens
  misc_RNA (1)...(19): siRNA sense strand
agguggaggaggugaccaa

SEQ ID NO: 2313838 - RNA, 19 nt, Homo sapiens
  misc_RNA (1)...(19): siRNA sense strand
agaggaagguggaggaggu

SEQ ID NO: 2313839 - RNA, 19 nt, Homo sapiens
  misc_RNA (1)...(19): siRNA sense strand
gcgagguggagaaggugaa

SEQ ID NO: 2313840 - RNA, 19 nt, Homo sapiens
  misc_RNA (1)...(19): siRNA sense strand
gccuggagcuagaggacca

SEQ ID NO: 2313841 - RNA, 19 nt, Homo sapiens
  misc_RNA (1)...(19): siRNA sense strand
uggagaaggugaagcugga

SEQ ID NO: 2313842 - RNA, 19 nt, Homo sapiens
  misc_RNA (1)...(19): siRNA sense strand
aggaguuggucaaggagca

SEQ ID NO: 2313843 - RNA, 19 nt, Homo sapiens
  misc_RNA (1)...(19): siRNA sense strand
agaaggagcuggaagaccu

SEQ ID NO: 2313844 - RNA, 19 nt, Homo sapiens
  misc_RNA (1)...(19): siRNA sense strand
cuuaaaggcaccuggagca

SEQ ID NO: 2313845 - RNA, 19 nt, Homo sapiens
  misc_RNA (1)...(19): siRNA sense strand
agcagaaggagcuggaaga

SEQ ID NO: 2313846 - RNA, 19 nt, Homo sapiens
  misc_RNA (1)...(19): siRNA sense strand
agguggaggaggugaccaa

SEQ ID NO: 2313847 - RNA, 19 nt, Homo sapiens
  misc_RNA (1)...(19): siRNA sense strand
agaggaagguggaggaggu

SEQ ID NO: 2313848 - RNA, 19 nt, Homo sapiens
  misc_RNA (1)...(19): siRNA sense strand
gcgagguggagaaggugaa

SEQ ID NO: 2313849 - RNA, 19 nt, Homo sapiens
  misc_RNA (1)...(19): siRNA sense strand
gccuggagcuagaggacca

SEQ ID NO: 2313850 - RNA, 19 nt, Homo sapiens
  misc_RNA (1)...(19): siRNA sense strand
uggagaaggugaagcugga

SEQ ID NO: 2313851 - RNA, 19 nt, Homo sapiens
  misc_RNA (1)...(19): siRNA sense strand
aggaguuggucaaggagca

SEQ ID NO: 2313852 - RNA, 19 nt, Homo sapiens
  misc_RNA (1)...(19): siRNA sense strand
agaaggagcuggaagaccu

SEQ ID NO: 2313853 - RNA, 19 nt, Homo sapiens
  misc_RNA (1)...(19): siRNA sense strand
cuuaaaggcaccuggagca

SEQ ID NO: 2313854 - RNA, 19 nt, Homo sapiens
  misc_RNA (1)...(19): siRNA sense strand
agcagaaggagcuggaaga

SEQ ID NO: 2313855 - RNA, 19 nt, Homo sapiens
  misc_RNA (1)...(19): siRNA sense strand
aaacagaucugcaggcaca

SEQ ID NO: 2313856 - RNA, 19 nt, Homo sapiens
  misc_RNA (1)...(19): siRNA sense strand
gaaaacaagaacaggcaaa

SEQ ID NO: 2313857 - RNA, 19 nt, Homo sapiens
  misc_RNA (1)...(19): siRNA sense strand
caguagaagaagaacaaaa

SEQ ID NO: 2313858 - RNA, 19 nt, Homo sapiens
  misc_RNA (1)...(19): siRNA sense strand
guggaauauuacagguaca

SEQ ID NO: 2313859 - RNA, 19 nt, Homo sapiens
  misc_RNA (1)...(19): siRNA sense strand
guauuaaacuuguuccgua

SEQ ID NO: 2313860 - RNA, 19 nt, Homo sapiens
  misc_RNA (1)...(19): siRNA sense strand
gcuugagagcagucagauu

SEQ ID NO: 2313861 - RNA, 19 nt, Homo sapiens
  misc_RNA (1)...(19): siRNA sense strand
cagaugaugaugaagaaaa

SEQ ID NO: 2313862 - RNA, 19 nt, Homo sapiens
  misc_RNA (1)...(19): siRNA sense strand
ggcagauaccaaaggaaaa

SEQ ID NO: 2313863 - RNA, 19 nt, Homo sapiens
  misc_RNA (1)...(19): siRNA sense strand
augcaauucuacuggguca

SEQ ID NO: 2313864 - RNA, 19 nt, Homo sapiens
  misc_RNA (1)...(19): siRNA sense strand
aagcaguagaagaagaaca

SEQ ID NO: 2313865 - RNA, 19 nt, Homo sapiens
  misc_RNA (1)...(19): siRNA sense strand
agcaguagaagaagaacaa

SEQ ID NO: 2313866 - RNA, 19 nt, Homo sapiens
  misc_RNA (1)...(19): siRNA sense strand
auaaugaugaugacagcaa

SEQ ID NO: 2313867 - RNA, 19 nt, Homo sapiens
  misc_RNA (1)...(19): siRNA sense strand
ccuggcaccaaguggaaua

SEQ ID NO: 2313868 - RNA, 19 nt, Homo sapiens
  misc_RNA (1)...(19): siRNA sense strand
agaaaaggcucgagaacuc

SEQ ID NO: 2313869 - RNA, 19 nt, Homo sapiens
  misc_RNA (1)...(19): siRNA sense strand
auauauucgucaaggggaa

SEQ ID NO: 2313870 - RNA, 19 nt, Homo sapiens
  misc_RNA (1)...(19): siRNA sense strand
agcagaugaugaugaagaa

SEQ ID NO: 2313871 - RNA, 19 nt, Homo sapiens
  misc_RNA (1)...(19): siRNA sense strand
acguuuaagaacuaggaau

SEQ ID NO: 2313872 - RNA, 19 nt, Homo sapiens
  misc_RNA (1)...(19): siRNA sense strand
agaacaggcaaaagaagaa

SEQ ID NO: 2313873 - RNA, 19 nt, Homo sapiens
  misc_RNA (1)...(19): siRNA sense strand
gcagaugaugaugaagaaa

SEQ ID NO: 2313874 - RNA, 19 nt, Homo sapiens
  misc_RNA (1)...(19): siRNA sense strand
gucacaagacacagacaau

SEQ ID NO: 2313875 - RNA, 19 nt, Homo sapiens
  misc_RNA (1)...(19): siRNA sense strand
aaguggaauauuacaggua

SEQ ID NO: 2313876 - RNA, 19 nt, Homo sapiens
  misc_RNA (1)...(19): siRNA sense strand
aaacagaucugcaggcaca

SEQ ID NO: 2313877 - RNA, 19 nt, Homo sapiens
  misc_RNA (1)...(19): siRNA sense strand
gaaaacaagaacaggcaaa

SEQ ID NO: 2313878 - RNA, 19 nt, Homo sapiens
  misc_RNA (1)...(19): siRNA sense strand
caguagaagaagaacaaaa

SEQ ID NO: 2313879 - RNA, 19 nt, Homo sapiens
  misc_RNA (1)...(19): siRNA sense strand
guggaauauuacagguaca

SEQ ID NO: 2313880 - RNA, 19 nt, Homo sapiens
  misc_RNA (1)...(19): siRNA sense strand
guauuaaacuuguuccgua

SEQ ID NO: 2313881 - RNA, 19 nt, Homo sapiens
  misc_RNA (1)...(19): siRNA sense strand
gcuugagagcagucagauu

SEQ ID NO: 2313882 - RNA, 19 nt, Homo sapiens
  misc_RNA (1)...(19): siRNA sense strand
cagaugaugaugaagaaaa

SEQ ID NO: 2313883 - RNA, 19 nt, Homo sapiens
  misc_RNA (1)...(19): siRNA sense strand
ggcagauaccaaaggaaaa

SEQ ID NO: 2313884 - RNA, 19 nt, Homo sapiens
  misc_RNA (1)...(19): siRNA sense strand
augcaauucuacuggguca

SEQ ID NO: 2313885 - RNA, 19 nt, Homo sapiens
  misc_RNA (1)...(19): siRNA sense strand
aagcaguagaagaagaaca

SEQ ID NO: 2313886 - RNA, 19 nt, Homo sapiens
  misc_RNA (1)...(19): siRNA sense strand
agcaguagaagaagaacaa

SEQ ID NO: 2313887 - RNA, 19 nt, Homo sapiens
  misc_RNA (1)...(19): siRNA sense strand
auaaugaugaugacagcaa

SEQ ID NO: 2313888 - RNA, 19 nt, Homo sapiens
  misc_RNA (1)...(19): siRNA sense strand
ccuggcaccaaguggaaua

SEQ ID NO: 2313889 - RNA, 19 nt, Homo sapiens
  misc_RNA (1)...(19): siRNA sense strand
agaaaaggcucgagaacuc

SEQ ID NO: 2313890 - RNA, 19 nt, Homo sapiens
  misc_RNA (1)...(19): siRNA sense strand
auauauucgucaaggggaa

SEQ ID NO: 2313891 - RNA, 19 nt, Homo sapiens
  misc_RNA (1)...(19): siRNA sense strand
agcagaugaugaugaagaa

SEQ ID NO: 2313892 - RNA, 19 nt, Homo sapiens
  misc_RNA (1)...(19): siRNA sense strand
acguuuaagaacuaggaau

SEQ ID NO: 2313893 - RNA, 19 nt, Homo sapiens
  misc_RNA (1)...(19): siRNA sense strand
agaacaggcaaaagaagaa

SEQ ID NO: 2313894 - RNA, 19 nt, Homo sapiens
  misc_RNA (1)...(19): siRNA sense strand
gcagaugaugaugaagaaa

SEQ ID NO: 2313895 - RNA, 19 nt, Homo sapiens
  misc_RNA (1)...(19): siRNA sense strand
gucacaagacacagacaau

SEQ ID NO: 2313896 - RNA, 19 nt, Homo sapiens
  misc_RNA (1)...(19): siRNA sense strand
aaguggaauauuacaggua

SEQ ID NO: 2313897 - RNA, 19 nt, Homo sapiens
  misc_RNA (1)...(19): siRNA sense strand
guggaauauuacagguaca

SEQ ID NO: 2313898 - RNA, 19 nt, Homo sapiens
  misc_RNA (1)...(19): siRNA sense strand
guauuaaacuuguuccgua

SEQ ID NO: 2313899 - RNA, 19 nt, Homo sapiens
  misc_RNA (1)...(19): siRNA sense strand
gcuugagagcagucagauu

SEQ ID NO: 2313900 - RNA, 19 nt, Homo sapiens
  misc_RNA (1)...(19): siRNA sense strand
augcaauucuacuggguca

SEQ ID NO: 2313901 - RNA, 19 nt, Homo sapiens
  misc_RNA (1)...(19): siRNA sense strand
auaaugaugaugacagcaa

SEQ ID NO: 2313902 - RNA, 19 nt, Homo sapiens
  misc_RNA (1)...(19): siRNA sense strand
ccuggcaccaaguggaaua

SEQ ID NO: 2313903 - RNA, 19 nt, Homo sapiens
  misc_RNA (1)...(19): siRNA sense strand
auauauucgucaaggggaa

SEQ ID NO: 2313904 - RNA, 19 nt, Homo sapiens
  misc_RNA (1)...(19): siRNA sense strand
acguuuaagaacuaggaau

SEQ ID NO: 2313905 - RNA, 19 nt, Homo sapiens
  misc_RNA (1)...(19): siRNA sense strand
gucacaagacacagacaau

SEQ ID NO: 2313906 - RNA, 19 nt, Homo sapiens
  misc_RNA (1)...(19): siRNA sense strand
aaguggaauauuacaggua

SEQ ID NO: 2313907 - RNA, 19 nt, Homo sapiens
  misc_RNA (1)...(19): siRNA sense strand
agaagaaguaagaagcaaa

SEQ ID NO: 2313908 - RNA, 19 nt, Homo sapiens
  misc_RNA (1)...(19): siRNA sense strand
ggauguuggcaaaggauga

SEQ ID NO: 2313909 - RNA, 19 nt, Homo sapiens
  misc_RNA (1)...(19): siRNA sense strand
aaaccaaagaggaagaaga

SEQ ID NO: 2313910 - RNA, 19 nt, Homo sapiens
  misc_RNA (1)...(19): siRNA sense strand
aguaagaagcaaaccaaau

SEQ ID NO: 2313911 - RNA, 19 nt, Homo sapiens
  misc_RNA (1)...(19): siRNA sense strand
ugauauggcagcagaugaa

SEQ ID NO: 2313912 - RNA, 19 nt, Homo sapiens
  misc_RNA (1)...(19): siRNA sense strand
agagauauuugaaggagga

SEQ ID NO: 2313913 - RNA, 19 nt, Homo sapiens
  misc_RNA (1)...(19): siRNA sense strand
aagaagaaguaagaagcaa

SEQ ID NO: 2313914 - RNA, 19 nt, Homo sapiens
  misc_RNA (1)...(19): siRNA sense strand
agaaagaucucucugccaa

SEQ ID NO: 2313915 - RNA, 19 nt, Homo sapiens
  misc_RNA (1)...(19): siRNA sense strand
aggaugaacugaugaccau

SEQ ID NO: 2313916 - RNA, 19 nt, Homo sapiens
  misc_RNA (1)...(19): siRNA sense strand
uuugaaguacucagagaaa

SEQ ID NO: 2313917 - RNA, 19 nt, Homo sapiens
  misc_RNA (1)...(19): siRNA sense strand
cugcugaggauguuggcaa

SEQ ID NO: 2313918 - RNA, 19 nt, Homo sapiens
  misc_RNA (1)...(19): siRNA sense strand
gcagcacagcuaagagaau

SEQ ID NO: 2313919 - RNA, 19 nt, Homo sapiens
  misc_RNA (1)...(19): siRNA sense strand
aggacuacuucuagccaau

SEQ ID NO: 2313920 - RNA, 19 nt, Homo sapiens
  misc_RNA (1)...(19): siRNA sense strand
guuaagaagaaguaagaag

SEQ ID NO: 2313921 - RNA, 19 nt, Homo sapiens
  misc_RNA (1)...(19): siRNA sense strand
ugaaguacucagagaaaau

SEQ ID NO: 2313922 - RNA, 19 nt, Homo sapiens
  misc_RNA (1)...(19): siRNA sense strand
uggcaaaggaugaacugau

SEQ ID NO: 2313923 - RNA, 19 nt, Homo sapiens
  misc_RNA (1)...(19): siRNA sense strand
ucacuuuccaguugguaua

SEQ ID NO: 2313924 - RNA, 19 nt, Homo sapiens
  misc_RNA (1)...(19): siRNA sense strand
gaugaccauacuugagaaa

SEQ ID NO: 2313925 - RNA, 19 nt, Homo sapiens
  misc_RNA (1)...(19): siRNA sense strand
agaaguccuuauuggaaau

SEQ ID NO: 2313926 - RNA, 19 nt, Homo sapiens
  misc_RNA (1)...(19): siRNA sense strand
cauaauuaucagcagucaa

SEQ ID NO: 2313927 - RNA, 19 nt, Homo sapiens
  misc_RNA (1)...(19): siRNA sense strand
gcuacguccucgaugucua

SEQ ID NO: 2313928 - RNA, 19 nt, Homo sapiens
  misc_RNA (1)...(19): siRNA sense strand
cacagaagacggacccaaa

SEQ ID NO: 2313929 - RNA, 19 nt, Homo sapiens
  misc_RNA (1)...(19): siRNA sense strand
ccagaagccaaaagaagaa

SEQ ID NO: 2313930 - RNA, 19 nt, Homo sapiens
  misc_RNA (1)...(19): siRNA sense strand
ucuugaccaaugagagaua

SEQ ID NO: 2313931 - RNA, 19 nt, Homo sapiens
  misc_RNA (1)...(19): siRNA sense strand
gauauuugaaggaggaaac

SEQ ID NO: 2313932 - RNA, 19 nt, Homo sapiens
  misc_RNA (1)...(19): siRNA sense strand
ugcugaggauguuggcaaa

SEQ ID NO: 2313933 - RNA, 19 nt, Homo sapiens
  misc_RNA (1)...(19): siRNA sense strand
aauuugaaguacucagaga

SEQ ID NO: 2313934 - RNA, 19 nt, Homo sapiens
  misc_RNA (1)...(19): siRNA sense strand
gacuacaagaggaauuaaa

SEQ ID NO: 2313935 - RNA, 19 nt, Homo sapiens
  misc_RNA (1)...(19): siRNA sense strand
aauccaaagaggaggaaag

SEQ ID NO: 2313936 - RNA, 19 nt, Homo sapiens
  misc_RNA (1)...(19): siRNA sense strand
aguccuuauuggaaaugaa

SEQ ID NO: 2313937 - RNA, 19 nt, Homo sapiens
  misc_RNA (1)...(19): siRNA sense strand
ccuucugccuccugagaca

SEQ ID NO: 2313938 - RNA, 19 nt, Homo sapiens
  misc_RNA (1)...(19): siRNA sense strand
acccaaagaaagacacauu

SEQ ID NO: 2313939 - RNA, 19 nt, Homo sapiens
  misc_RNA (1)...(19): siRNA sense strand
agauauuugaaggaggaaa

SEQ ID NO: 2313940 - RNA, 19 nt, Homo sapiens
  misc_RNA (1)...(19): siRNA sense strand
cugcaaccucagaagaaau

SEQ ID NO: 2313941 - RNA, 19 nt, Homo sapiens
  misc_RNA (1)...(19): siRNA sense strand
uugacugucuagugagaga

SEQ ID NO: 2313942 - RNA, 19 nt, Homo sapiens
  misc_RNA (1)...(19): siRNA sense strand
ccaaagaggaagaagaugc

SEQ ID NO: 2313943 - RNA, 19 nt, Homo sapiens
  misc_RNA (1)...(19): siRNA sense strand
aaccaaagaggaagaagau

SEQ ID NO: 2313944 - RNA, 19 nt, Homo sapiens
  misc_RNA (1)...(19): siRNA sense strand
aaguaagaagcaaaccaaa

SEQ ID NO: 2313945 - RNA, 19 nt, Homo sapiens
  misc_RNA (1)...(19): siRNA sense strand
agcuaaagauuguccagau

SEQ ID NO: 2313946 - RNA, 19 nt, Homo sapiens
  misc_RNA (1)...(19): siRNA sense strand
ugagcgacuacaagaggaa

SEQ ID NO: 2313947 - RNA, 19 nt, Homo sapiens
  misc_RNA (1)...(19): siRNA sense strand
uggacuggucagaggcuuu

SEQ ID NO: 2313948 - RNA, 19 nt, Homo sapiens
  misc_RNA (1)...(19): siRNA sense strand
agaagaaguaagaagcaaa

SEQ ID NO: 2313949 - RNA, 19 nt, Homo sapiens
  misc_RNA (1)...(19): siRNA sense strand
ggauguuggcaaaggauga

SEQ ID NO: 2313950 - RNA, 19 nt, Homo sapiens
  misc_RNA (1)...(19): siRNA sense strand
aaaccaaagaggaagaaga

SEQ ID NO: 2313951 - RNA, 19 nt, Homo sapiens
  misc_RNA (1)...(19): siRNA sense strand
aguaagaagcaaaccaaau

SEQ ID NO: 2313952 - RNA, 19 nt, Homo sapiens
  misc_RNA (1)...(19): siRNA sense strand
ugauauggcagcagaugaa

SEQ ID NO: 2313953 - RNA, 19 nt, Homo sapiens
  misc_RNA (1)...(19): siRNA sense strand
agagauauuugaaggagga

SEQ ID NO: 2313954 - RNA, 19 nt, Homo sapiens
  misc_RNA (1)...(19): siRNA sense strand
aagaagaaguaagaagcaa

SEQ ID NO: 2313955 - RNA, 19 nt, Homo sapiens
  misc_RNA (1)...(19): siRNA sense strand
agaaagaucucucugccaa

SEQ ID NO: 2313956 - RNA, 19 nt, Homo sapiens
  misc_RNA (1)...(19): siRNA sense strand
aggaugaacugaugaccau

SEQ ID NO: 2313957 - RNA, 19 nt, Homo sapiens
  misc_RNA (1)...(19): siRNA sense strand
uuugaaguacucagagaaa

SEQ ID NO: 2313958 - RNA, 19 nt, Homo sapiens
  misc_RNA (1)...(19): siRNA sense strand
cugcugaggauguuggcaa

SEQ ID NO: 2313959 - RNA, 19 nt, Homo sapiens
  misc_RNA (1)...(19): siRNA sense strand
gcagcacagcuaagagaau

SEQ ID NO: 2313960 - RNA, 19 nt, Homo sapiens
  misc_RNA (1)...(19): siRNA sense strand
aggacuacuucuagccaau

SEQ ID NO: 2313961 - RNA, 19 nt, Homo sapiens
  misc_RNA (1)...(19): siRNA sense strand
guuaagaagaaguaagaag

SEQ ID NO: 2313962 - RNA, 19 nt, Homo sapiens
  misc_RNA (1)...(19): siRNA sense strand
ugaaguacucagagaaaau

SEQ ID NO: 2313963 - RNA, 19 nt, Homo sapiens
  misc_RNA (1)...(19): siRNA sense strand
uggcaaaggaugaacugau

SEQ ID NO: 2313964 - RNA, 19 nt, Homo sapiens
  misc_RNA (1)...(19): siRNA sense strand
ucacuuuccaguugguaua

SEQ ID NO: 2313965 - RNA, 19 nt, Homo sapiens
  misc_RNA (1)...(19): siRNA sense strand
gaugaccauacuugagaaa

SEQ ID NO: 2313966 - RNA, 19 nt, Homo sapiens
  misc_RNA (1)...(19): siRNA sense strand
agaaguccuuauuggaaau

SEQ ID NO: 2313967 - RNA, 19 nt, Homo sapiens
  misc_RNA (1)...(19): siRNA sense strand
cauaauuaucagcagucaa

SEQ ID NO: 2313968 - RNA, 19 nt, Homo sapiens
  misc_RNA (1)...(19): siRNA sense strand
gcuacguccucgaugucua

SEQ ID NO: 2313969 - RNA, 19 nt, Homo sapiens
  misc_RNA (1)...(19): siRNA sense strand
cacagaagacggacccaaa

SEQ ID NO: 2313970 - RNA, 19 nt, Homo sapiens
  misc_RNA (1)...(19): siRNA sense strand
ccagaagccaaaagaagaa

SEQ ID NO: 2313971 - RNA, 19 nt, Homo sapiens
  misc_RNA (1)...(19): siRNA sense strand
ucuugaccaaugagagaua

SEQ ID NO: 2313972 - RNA, 19 nt, Homo sapiens
  misc_RNA (1)...(19): siRNA sense strand
gauauuugaaggaggaaac

SEQ ID NO: 2313973 - RNA, 19 nt, Homo sapiens
  misc_RNA (1)...(19): siRNA sense strand
ugcugaggauguuggcaaa

SEQ ID NO: 2313974 - RNA, 19 nt, Homo sapiens
  misc_RNA (1)...(19): siRNA sense strand
aauuugaaguacucagaga

SEQ ID NO: 2313975 - RNA, 19 nt, Homo sapiens
  misc_RNA (1)...(19): siRNA sense strand
gacuacaagaggaauuaaa

SEQ ID NO: 2313976 - RNA, 19 nt, Homo sapiens
  misc_RNA (1)...(19): siRNA sense strand
aauccaaagaggaggaaag

SEQ ID NO: 2313977 - RNA, 19 nt, Homo sapiens
  misc_RNA (1)...(19): siRNA sense strand
aguccuuauuggaaaugaa

SEQ ID NO: 2313978 - RNA, 19 nt, Homo sapiens
  misc_RNA (1)...(19): siRNA sense strand
ccuucugccuccugagaca

SEQ ID NO: 2313979 - RNA, 19 nt, Homo sapiens
  misc_RNA (1)...(19): siRNA sense strand
acccaaagaaagacacauu

SEQ ID NO: 2313980 - RNA, 19 nt, Homo sapiens
  misc_RNA (1)...(19): siRNA sense strand
agauauuugaaggaggaaa

SEQ ID NO: 2313981 - RNA, 19 nt, Homo sapiens
  misc_RNA (1)...(19): siRNA sense strand
cugcaaccucagaagaaau

SEQ ID NO: 2313982 - RNA, 19 nt, Homo sapiens
  misc_RNA (1)...(19): siRNA sense strand
uugacugucuagugagaga

SEQ ID NO: 2313983 - RNA, 19 nt, Homo sapiens
  misc_RNA (1)...(19): siRNA sense strand
ccaaagaggaagaagaugc

SEQ ID NO: 2313984 - RNA, 19 nt, Homo sapiens
  misc_RNA (1)...(19): siRNA sense strand
aaccaaagaggaagaagau

SEQ ID NO: 2313985 - RNA, 19 nt, Homo sapiens
  misc_RNA (1)...(19): siRNA sense strand
aaguaagaagcaaaccaaa

SEQ ID NO: 2313986 - RNA, 19 nt, Homo sapiens
  misc_RNA (1)...(19): siRNA sense strand
agcuaaagauuguccagau

SEQ ID NO: 2313987 - RNA, 19 nt, Homo sapiens
  misc_RNA (1)...(19): siRNA sense strand
ugagcgacuacaagaggaa

SEQ ID NO: 2313988 - RNA, 19 nt, Homo sapiens
  misc_RNA (1)...(19): siRNA sense strand
uggacuggucagaggcuuu

SEQ ID NO: 2313989 - RNA, 19 nt, Homo sapiens
  misc_RNA (1)...(19): siRNA sense strand
ugacaacgaugaagggaac

SEQ ID NO: 2313990 - RNA, 19 nt, Homo sapiens
  misc_RNA (1)...(19): siRNA sense strand
ugccauuaaacguaggaaa

SEQ ID NO: 2313991 - RNA, 19 nt, Homo sapiens
  misc_RNA (1)...(19): siRNA sense strand
acuugguuuaggagagaua

SEQ ID NO: 2313992 - RNA, 19 nt, Homo sapiens
  misc_RNA (1)...(19): siRNA sense strand
cugaaauauggaaagaaga

SEQ ID NO: 2313993 - RNA, 19 nt, Homo sapiens
  misc_RNA (1)...(19): siRNA sense strand
aagugaagcaccagcugaa

SEQ ID NO: 2313994 - RNA, 19 nt, Homo sapiens
  misc_RNA (1)...(19): siRNA sense strand
uugacaacgaugaagggaa

SEQ ID NO: 2313995 - RNA, 19 nt, Homo sapiens
  misc_RNA (1)...(19): siRNA sense strand
agaagguagcacagaggau

SEQ ID NO: 2313996 - RNA, 19 nt, Homo sapiens
  misc_RNA (1)...(19): siRNA sense strand
cugagaaagagaagacagu

SEQ ID NO: 2313997 - RNA, 19 nt, Homo sapiens
  misc_RNA (1)...(19): siRNA sense strand
ggagagauaauccuggcaa

SEQ ID NO: 2313998 - RNA, 19 nt, Homo sapiens
  misc_RNA (1)...(19): siRNA sense strand
ucaugggagucuuggcaga

SEQ ID NO: 2313999 - RNA, 19 nt, Homo sapiens
  misc_RNA (1)...(19): siRNA sense strand
ccuuuggguggaagaggaa

SEQ ID NO: 2314000 - RNA, 19 nt, Homo sapiens
  misc_RNA (1)...(19): siRNA sense strand
cagcagaaauggccgucca

SEQ ID NO: 2314001 - RNA, 19 nt, Homo sapiens
  misc_RNA (1)...(19): siRNA sense strand
augagaaggauguaguuga

SEQ ID NO: 2314002 - RNA, 19 nt, Homo sapiens
  misc_RNA (1)...(19): siRNA sense strand
cagaaauggccguccagca

SEQ ID NO: 2314003 - RNA, 19 nt, Homo sapiens
  misc_RNA (1)...(19): siRNA sense strand
gggagaaccuggaagcuga

SEQ ID NO: 2314004 - RNA, 19 nt, Homo sapiens
  misc_RNA (1)...(19): siRNA sense strand
cagaggaccacgagcggaa

SEQ ID NO: 2314005 - RNA, 19 nt, Homo sapiens
  misc_RNA (1)...(19): siRNA sense strand
gugaagaccguguugguga

SEQ ID NO: 2314006 - RNA, 19 nt, Homo sapiens
  misc_RNA (1)...(19): siRNA sense strand
gcacaaagauugaccucuc

SEQ ID NO: 2314007 - RNA, 19 nt, Homo sapiens
  misc_RNA (1)...(19): siRNA sense strand
ggaagauaacauggagaca

SEQ ID NO: 2314008 - RNA, 19 nt, Homo sapiens
  misc_RNA (1)...(19): siRNA sense strand
gagcauguaaucagcccaa

SEQ ID NO: 2314009 - RNA, 19 nt, Homo sapiens
  misc_RNA (1)...(19): siRNA sense strand
ggccauuggagaugacaca

SEQ ID NO: 2314010 - RNA, 19 nt, Homo sapiens
  misc_RNA (1)...(19): siRNA sense strand
ggaagagagccauccgcau

SEQ ID NO: 2314011 - RNA, 19 nt, Homo sapiens
  misc_RNA (1)...(19): siRNA sense strand
gccaaggagcugaagcaca

SEQ ID NO: 2314012 - RNA, 19 nt, Homo sapiens
  misc_RNA (1)...(19): siRNA sense strand
ccauuggagaugacacauu

SEQ ID NO: 2314013 - RNA, 19 nt, Homo sapiens
  misc_RNA (1)...(19): siRNA sense strand
gugaaagaucagaggaccu

SEQ ID NO: 2314014 - RNA, 19 nt, Homo sapiens
  misc_RNA (1)...(19): siRNA sense strand
gcccugaggaggagaacau

SEQ ID NO: 2314015 - RNA, 19 nt, Homo sapiens
  misc_RNA (1)...(19): siRNA sense strand
augaagugcuugacagcga

SEQ ID NO: 2314016 - RNA, 19 nt, Homo sapiens
  misc_RNA (1)...(19): siRNA sense strand
augaaauggagaucggcua

SEQ ID NO: 2314017 - RNA, 19 nt, Homo sapiens
  misc_RNA (1)...(19): siRNA sense strand
gaucagaggaccuggaccu

SEQ ID NO: 2314018 - RNA, 19 nt, Homo sapiens
  misc_RNA (1)...(19): siRNA sense strand
aggagaacauggaugacca

SEQ ID NO: 2314019 - RNA, 19 nt, Homo sapiens
  misc_RNA (1)...(19): siRNA sense strand
gcuacaaacuguuccagga

SEQ ID NO: 2314020 - RNA, 19 nt, Homo sapiens
  misc_RNA (1)...(19): siRNA sense strand
gugccauccugcuggugaa

SEQ ID NO: 2314021 - RNA, 19 nt, Homo sapiens
  misc_RNA (1)...(19): siRNA sense strand
ccuccagccaagaagaaau

SEQ ID NO: 2314022 - RNA, 19 nt, Homo sapiens
  misc_RNA (1)...(19): siRNA sense strand
cagucaggggcaaggaaua

SEQ ID NO: 2314023 - RNA, 19 nt, Homo sapiens
  misc_RNA (1)...(19): siRNA sense strand
auucauuuguggagagaug

SEQ ID NO: 2314024 - RNA, 19 nt, Homo sapiens
  misc_RNA (1)...(19): siRNA sense strand
cagcagaaaauaaagaaca

SEQ ID NO: 2314025 - RNA, 19 nt, Homo sapiens
  misc_RNA (1)...(19): siRNA sense strand
acaaacuguuccaggagca

SEQ ID NO: 2314026 - RNA, 19 nt, Homo sapiens
  misc_RNA (1)...(19): siRNA sense strand
cugaugacccugagcacga

SEQ ID NO: 2314027 - RNA, 19 nt, Homo sapiens
  misc_RNA (1)...(19): siRNA sense strand
agugauggguccagauuuu

SEQ ID NO: 2314028 - RNA, 19 nt, Homo sapiens
  misc_RNA (1)...(19): siRNA sense strand
aagaagaguuggaaaggga

SEQ ID NO: 2314029 - RNA, 19 nt, Homo sapiens
  misc_RNA (1)...(19): siRNA sense strand
ugucauucuauguuggaua

SEQ ID NO: 2314030 - RNA, 19 nt, Homo sapiens
  misc_RNA (1)...(19): siRNA sense strand
aagacaaagcaguggagca

SEQ ID NO: 2314031 - RNA, 19 nt, Homo sapiens
  misc_RNA (1)...(19): siRNA sense strand
aaggaguuugaaagagaaa

SEQ ID NO: 2314032 - RNA, 19 nt, Homo sapiens
  misc_RNA (1)...(19): siRNA sense strand
cuuuguuugcugaggcuaa

SEQ ID NO: 2314033 - RNA, 19 nt, Homo sapiens
  misc_RNA (1)...(19): siRNA sense strand
aaggguuaauagaggacuu

SEQ ID NO: 2314034 - RNA, 19 nt, Homo sapiens
  misc_RNA (1)...(19): siRNA sense strand
acgccugguuuaagugaca

SEQ ID NO: 2314035 - RNA, 19 nt, Homo sapiens
  misc_RNA (1)...(19): siRNA sense strand
cuauagaagacaaagcagu

SEQ ID NO: 2314036 - RNA, 19 nt, Homo sapiens
  misc_RNA (1)...(19): siRNA sense strand
ggaggaaacugcaagggaa

SEQ ID NO: 2314037 - RNA, 19 nt, Homo sapiens
  misc_RNA (1)...(19): siRNA sense strand
ucgaaugggugcugggcaa

SEQ ID NO: 2314038 - RNA, 19 nt, Homo sapiens
  misc_RNA (1)...(19): siRNA sense strand
gaauagugcugguggacga

SEQ ID NO: 2314039 - RNA, 19 nt, Homo sapiens
  misc_RNA (1)...(19): siRNA sense strand
ggagaauagugcuggugga

SEQ ID NO: 2314040 - RNA, 19 nt, Homo sapiens
  misc_RNA (1)...(19): siRNA sense strand
ugugauaacagcagugcaa

SEQ ID NO: 2314041 - RNA, 19 nt, Homo sapiens
  misc_RNA (1)...(19): siRNA sense strand
cggcuauugcuuuggaaau

SEQ ID NO: 2314042 - RNA, 19 nt, Homo sapiens
  misc_RNA (1)...(19): siRNA sense strand
gggcugaugaugacgggaa

SEQ ID NO: 2314043 - RNA, 19 nt, Homo sapiens
  misc_RNA (1)...(19): siRNA sense strand
agauggaacagaagaugaa

SEQ ID NO: 2314044 - RNA, 19 nt, Homo sapiens
  misc_RNA (1)...(19): siRNA sense strand
agggaaaggaaguccgauu

SEQ ID NO: 2314045 - RNA, 19 nt, Homo sapiens
  misc_RNA (1)...(19): siRNA sense strand
gauuggaguuggaggugga

SEQ ID NO: 2314046 - RNA, 19 nt, Homo sapiens
  misc_RNA (1)...(19): siRNA sense strand
cuaucaauauacuggguga

SEQ ID NO: 2314047 - RNA, 19 nt, Homo sapiens
  misc_RNA (1)...(19): siRNA sense strand
caagcauccugaagggaga

SEQ ID NO: 2314048 - RNA, 19 nt, Homo sapiens
  misc_RNA (1)...(19): siRNA sense strand
cagcugagguggaagccau

SEQ ID NO: 2314049 - RNA, 19 nt, Homo sapiens
  misc_RNA (1)...(19): siRNA sense strand
cggagauggaacagaagau

SEQ ID NO: 2314050 - RNA, 19 nt, Homo sapiens
  misc_RNA (1)...(19): siRNA sense strand
ccucaaauucugugauaac

SEQ ID NO: 2314051 - RNA, 19 nt, Homo sapiens
  misc_RNA (1)...(19): siRNA sense strand
gaugugaaguguagcggga

SEQ ID NO: 2314052 - RNA, 19 nt, Homo sapiens
  misc_RNA (1)...(19): siRNA sense strand
gggcugugguucuggagga

SEQ ID NO: 2314053 - RNA, 19 nt, Homo sapiens
  misc_RNA (1)...(19): siRNA sense strand
gaacugugcuacaacguga

SEQ ID NO: 2314054 - RNA, 19 nt, Homo sapiens
  misc_RNA (1)...(19): siRNA sense strand
caaagaagcugauguggcu

SEQ ID NO: 2314055 - RNA, 19 nt, Homo sapiens
  misc_RNA (1)...(19): siRNA sense strand
uggcaauggcaauguccua

SEQ ID NO: 2314056 - RNA, 19 nt, Homo sapiens
  misc_RNA (1)...(19): siRNA sense strand
gggcugaguaccaggaauc

SEQ ID NO: 2314057 - RNA, 19 nt, Homo sapiens
  misc_RNA (1)...(19): siRNA sense strand
gggaagguuacguagcauu

SEQ ID NO: 2314058 - RNA, 19 nt, Homo sapiens
  misc_RNA (1)...(19): siRNA sense strand
ccaauaagguggaccgcuc

SEQ ID NO: 2314059 - RNA, 19 nt, Homo sapiens
  misc_RNA (1)...(19): siRNA sense strand
uccaggagcuacagcggaa

SEQ ID NO: 2314060 - RNA, 19 nt, Homo sapiens
  misc_RNA (1)...(19): siRNA sense strand
ccauggaagcugaccacau

SEQ ID NO: 2314061 - RNA, 19 nt, Homo sapiens
  misc_RNA (1)...(19): siRNA sense strand
gggagauggccgaugccuu

SEQ ID NO: 2314062 - RNA, 19 nt, Homo sapiens
  misc_RNA (1)...(19): siRNA sense strand
aggccuuggcagugggcau

SEQ ID NO: 2314063 - RNA, 19 nt, Homo sapiens
  misc_RNA (1)...(19): siRNA sense strand
ggaaacugccagagcugca

SEQ ID NO: 2314064 - RNA, 19 nt, Homo sapiens
  misc_RNA (1)...(19): siRNA sense strand
caucaugagcacccaggaa

SEQ ID NO: 2314065 - RNA, 19 nt, Homo sapiens
  misc_RNA (1)...(19): siRNA sense strand
gaggagacaaagaagcuga

SEQ ID NO: 2314066 - RNA, 19 nt, Homo sapiens
  misc_RNA (1)...(19): siRNA sense strand
ccucaauggcccuaucaau

SEQ ID NO: 2314067 - RNA, 19 nt, Homo sapiens
  misc_RNA (1)...(19): siRNA sense strand
caggcauggaaguuguaaa

SEQ ID NO: 2314068 - RNA, 19 nt, Homo sapiens
  misc_RNA (1)...(19): siRNA sense strand
ggagauggccuuugcugga

SEQ ID NO: 2314069 - RNA, 19 nt, Homo sapiens
  misc_RNA (1)...(19): siRNA sense strand
ugcuggaaauugcgggcua

SEQ ID NO: 2314070 - RNA, 19 nt, Homo sapiens
  misc_RNA (1)...(19): siRNA sense strand
cccugaaugcccuggaaau

SEQ ID NO: 2314071 - RNA, 19 nt, Homo sapiens
  misc_RNA (1)...(19): siRNA sense strand
uggcagauguagcgguugu

SEQ ID NO: 2314072 - RNA, 19 nt, Homo sapiens
  misc_RNA (1)...(19): siRNA sense strand
aguaauggagaccgggaga

SEQ ID NO: 2314073 - RNA, 19 nt, Homo sapiens
  misc_RNA (1)...(19): siRNA sense strand
gagacugaacugugcuaca

SEQ ID NO: 2314074 - RNA, 19 nt, Homo sapiens
  misc_RNA (1)...(19): siRNA sense strand
ccagugcugaggagacaaa

SEQ ID NO: 2314075 - RNA, 19 nt, Homo sapiens
  misc_RNA (1)...(19): siRNA sense strand
gcgucguggucaugaacaa

SEQ ID NO: 2314076 - RNA, 19 nt, Homo sapiens
  misc_RNA (1)...(19): siRNA sense strand
aggagaaggagaagagcuu

SEQ ID NO: 2314077 - RNA, 19 nt, Homo sapiens
  misc_RNA (1)...(19): siRNA sense strand
ccuacaaggaccuggacuu

SEQ ID NO: 2314078 - RNA, 19 nt, Homo sapiens
  misc_RNA (1)...(19): siRNA sense strand
cggaagaacuccucccuga

SEQ ID NO: 2314079 - RNA, 19 nt, Homo sapiens
  misc_RNA (1)...(19): siRNA sense strand
cggaagaggaucugcagca

SEQ ID NO: 2314080 - RNA, 19 nt, Homo sapiens
  misc_RNA (1)...(19): siRNA sense strand
ucuacgugguggagagcau

SEQ ID NO: 2314081 - RNA, 19 nt, Homo sapiens
  misc_RNA (1)...(19): siRNA sense strand
agcaagaaggagaaggaga

SEQ ID NO: 2314082 - RNA, 19 nt, Homo sapiens
  misc_RNA (1)...(19): siRNA sense strand
gaugagaggagcugggugu

SEQ ID NO: 2314083 - RNA, 19 nt, Homo sapiens
  misc_RNA (1)...(19): siRNA sense strand
gcgccagcaagaaggagaa

SEQ ID NO: 2314084 - RNA, 19 nt, Homo sapiens
  misc_RNA (1)...(19): siRNA sense strand
ucaagaaacuggagcacac

SEQ ID NO: 2314085 - RNA, 19 nt, Homo sapiens
  misc_RNA (1)...(19): siRNA sense strand
cugcaguccuacagguuca

SEQ ID NO: 2314086 - RNA, 19 nt, Homo sapiens
  misc_RNA (1)...(19): siRNA sense strand
gcaacacggucuuucggaa

SEQ ID NO: 2314087 - RNA, 19 nt, Homo sapiens
  misc_RNA (1)...(19): siRNA sense strand
gcuucuaugccgagcgcuu

SEQ ID NO: 2314088 - RNA, 19 nt, Homo sapiens
  misc_RNA (1)...(19): siRNA sense strand
gggaagaaguugggccauc

SEQ ID NO: 2314089 - RNA, 19 nt, Homo sapiens
  misc_RNA (1)...(19): siRNA sense strand
gcacacagucgucuggaca

SEQ ID NO: 2314090 - RNA, 19 nt, Homo sapiens
  misc_RNA (1)...(19): siRNA sense strand
uuuucaaguucaugagcaa

SEQ ID NO: 2314091 - RNA, 19 nt, Homo sapiens
  misc_RNA (1)...(19): siRNA sense strand
gccuagaaguauuggcaga

SEQ ID NO: 2314092 - RNA, 19 nt, Homo sapiens
  misc_RNA (1)...(19): siRNA sense strand
auuaaagaccucagcacaa

SEQ ID NO: 2314093 - RNA, 19 nt, Homo sapiens
  misc_RNA (1)...(19): siRNA sense strand
acuuaagaagcuugaacua

SEQ ID NO: 2314094 - RNA, 19 nt, Homo sapiens
  misc_RNA (1)...(19): siRNA sense strand
caucuaaauuuaaguggca

SEQ ID NO: 2314095 - RNA, 19 nt, Homo sapiens
  misc_RNA (1)...(19): siRNA sense strand
cauuuagagcugcggaaca

SEQ ID NO: 2314096 - RNA, 19 nt, Homo sapiens
  misc_RNA (1)...(19): siRNA sense strand
uagaaguauuggcagaaaa

SEQ ID NO: 2314097 - RNA, 19 nt, Homo sapiens
  misc_RNA (1)...(19): siRNA sense strand
caacauaggccucaccuca

SEQ ID NO: 2314098 - RNA, 19 nt, Homo sapiens
  misc_RNA (1)...(19): siRNA sense strand
uggacaacagucagucaaa

SEQ ID NO: 2314099 - RNA, 19 nt, Homo sapiens
  misc_RNA (1)...(19): siRNA sense strand
cagccuggccagaggagaa

SEQ ID NO: 2314100 - RNA, 19 nt, Homo sapiens
  misc_RNA (1)...(19): siRNA sense strand
ccucaaucccacugcuaaa

SEQ ID NO: 2314101 - RNA, 19 nt, Homo sapiens
  misc_RNA (1)...(19): siRNA sense strand
aagucuuuguguuggaaua

SEQ ID NO: 2314102 - RNA, 19 nt, Homo sapiens
  misc_RNA (1)...(19): siRNA sense strand
cauugcugauagagcgaua

SEQ ID NO: 2314103 - RNA, 19 nt, Homo sapiens
  misc_RNA (1)...(19): siRNA sense strand
caguuauggaggugugauu

SEQ ID NO: 2314104 - RNA, 19 nt, Homo sapiens
  misc_RNA (1)...(19): siRNA sense strand
cauggaugacaaugaagaa

SEQ ID NO: 2314105 - RNA, 19 nt, Homo sapiens
  misc_RNA (1)...(19): siRNA sense strand
acaccauggaugacaauga

SEQ ID NO: 2314106 - RNA, 19 nt, Homo sapiens
  misc_RNA (1)...(19): siRNA sense strand
uggaugacaaugaagaaaa

SEQ ID NO: 2314107 - RNA, 19 nt, Homo sapiens
  misc_RNA (1)...(19): siRNA sense strand
gcaaaaugacuuacagcca

SEQ ID NO: 2314108 - RNA, 19 nt, Homo sapiens
  misc_RNA (1)...(19): siRNA sense strand
augaauuggguuugcucaa

SEQ ID NO: 2314109 - RNA, 19 nt, Homo sapiens
  misc_RNA (1)...(19): siRNA sense strand
uggccagaggagaagaauu

SEQ ID NO: 2314110 - RNA, 19 nt, Homo sapiens
  misc_RNA (1)...(19): siRNA sense strand
aggcaaagacauuggaaga

SEQ ID NO: 2314111 - RNA, 19 nt, Homo sapiens
  misc_RNA (1)...(19): siRNA sense strand
cuggaagcuuggugaauaa

SEQ ID NO: 2314112 - RNA, 19 nt, Homo sapiens
  misc_RNA (1)...(19): siRNA sense strand
auggagagauggucagaaa

SEQ ID NO: 2314113 - RNA, 19 nt, Homo sapiens
  misc_RNA (1)...(19): siRNA sense strand
agacauuggaagaggcauu

SEQ ID NO: 2314114 - RNA, 19 nt, Homo sapiens
  misc_RNA (1)...(19): siRNA sense strand
ccaaggaacaagaagagaa

SEQ ID NO: 2314115 - RNA, 19 nt, Homo sapiens
  misc_RNA (1)...(19): siRNA sense strand
uggaagaggcauugguuau

SEQ ID NO: 2314116 - RNA, 19 nt, Homo sapiens
  misc_RNA (1)...(19): siRNA sense strand
uaaagaauuuggaaggcaa

SEQ ID NO: 2314117 - RNA, 19 nt, Homo sapiens
  misc_RNA (1)...(19): siRNA sense strand
ggugaauaauuggaagaaa

SEQ ID NO: 2314118 - RNA, 19 nt, Homo sapiens
  misc_RNA (1)...(19): siRNA sense strand
caggcaaugucuagaguau

SEQ ID NO: 2314119 - RNA, 19 nt, Homo sapiens
  misc_RNA (1)...(19): siRNA sense strand
agaaagaagagcagcugaa

SEQ ID NO: 2314120 - RNA, 19 nt, Homo sapiens
  misc_RNA (1)...(19): siRNA sense strand
ugaaauggguuuagggaag

SEQ ID NO: 2314121 - RNA, 19 nt, Homo sapiens
  misc_RNA (1)...(19): siRNA sense strand
aaauagaagucaugggugu

SEQ ID NO: 2314122 - RNA, 19 nt, Homo sapiens
  misc_RNA (1)...(19): siRNA sense strand
guguaaugggaaugagaau

SEQ ID NO: 2314123 - RNA, 19 nt, Homo sapiens
  misc_RNA (1)...(19): siRNA sense strand
agauaauugcaguggaaaa

SEQ ID NO: 2314124 - RNA, 19 nt, Homo sapiens
  misc_RNA (1)...(19): siRNA sense strand
augaauguguaaugggaau

SEQ ID NO: 2314125 - RNA, 19 nt, Homo sapiens
  misc_RNA (1)...(19): siRNA sense strand
ugaaaaggagucaggaaaa

SEQ ID NO: 2314126 - RNA, 19 nt, Homo sapiens
  misc_RNA (1)...(19): siRNA sense strand
acugaugauuuguggaaaa

SEQ ID NO: 2314127 - RNA, 19 nt, Homo sapiens
  misc_RNA (1)...(19): siRNA sense strand
agugaaaggaucaagauau

SEQ ID NO: 2314128 - RNA, 19 nt, Homo sapiens
  misc_RNA (1)...(19): siRNA sense strand
aagaaucaccaguggguau

SEQ ID NO: 2314129 - RNA, 19 nt, Homo sapiens
  misc_RNA (1)...(19): siRNA sense strand
agagaaaucugauagccua

SEQ ID NO: 2314130 - RNA, 19 nt, Homo sapiens
  misc_RNA (1)...(19): siRNA sense strand
auguaagcgucauggauau

SEQ ID NO: 2314131 - RNA, 19 nt, Homo sapiens
  misc_RNA (1)...(19): siRNA sense strand
aggucugaaugaagagauu

SEQ ID NO: 2314132 - RNA, 19 nt, Homo sapiens
  misc_RNA (1)...(19): siRNA sense strand
acaggugauucguuggaaa

SEQ ID NO: 2314133 - RNA, 19 nt, Homo sapiens
  misc_RNA (1)...(19): siRNA sense strand
cuuagaagaacccaagaaa

SEQ ID NO: 2314134 - RNA, 19 nt, Homo sapiens
  misc_RNA (1)...(19): siRNA sense strand
agaaaaggaguuaggagaa

SEQ ID NO: 2314135 - RNA, 19 nt, Homo sapiens
  misc_RNA (1)...(19): siRNA sense strand
acuccuaacuacagguaca

SEQ ID NO: 2314136 - RNA, 19 nt, Homo sapiens
  misc_RNA (1)...(19): siRNA sense strand
ccuaacuacagguacaaua

SEQ ID NO: 2314137 - RNA, 19 nt, Homo sapiens
  misc_RNA (1)...(19): siRNA sense strand
aggaacaagaagagaaauc

SEQ ID NO: 2314138 - RNA, 19 nt, Homo sapiens
  misc_RNA (1)...(19): siRNA sense strand
agacagaaugauuuccaaa

SEQ ID NO: 2314139 - RNA, 19 nt, Homo sapiens
  misc_RNA (1)...(19): siRNA sense strand
gcuaggaagugaaaggauc

SEQ ID NO: 2314140 - RNA, 19 nt, Homo sapiens
  misc_RNA (1)...(19): siRNA sense strand
aagugaaaggaucaagaua

SEQ ID NO: 2314141 - RNA, 19 nt, Homo sapiens
  misc_RNA (1)...(19): siRNA sense strand
aagaaaaggaguuaggaga

SEQ ID NO: 2314142 - RNA, 19 nt, Homo sapiens
  misc_RNA (1)...(19): siRNA sense strand
guacaggagaagaaguuca

SEQ ID NO: 2314143 - RNA, 19 nt, Homo sapiens
  misc_RNA (1)...(19): siRNA sense strand
aagaaguagcaguguccaa

SEQ ID NO: 2314144 - RNA, 19 nt, Homo sapiens
  misc_RNA (1)...(19): siRNA sense strand
uagcaguguccaaggaaca

SEQ ID NO: 2314145 - RNA, 19 nt, Homo sapiens
  misc_RNA (1)...(19): siRNA sense strand
guucaaaggaaaauagaca

SEQ ID NO: 2314146 - RNA, 19 nt, Homo sapiens
  misc_RNA (1)...(19): siRNA sense strand
ggaaaauaguccccaucua

SEQ ID NO: 2314147 - RNA, 19 nt, Homo sapiens
  misc_RNA (1)...(19): siRNA sense strand
ugaguguacaggagaagaa

SEQ ID NO: 2314148 - RNA, 19 nt, Homo sapiens
  misc_RNA (1)...(19): siRNA sense strand
guguacaggagaagaaguu

SEQ ID NO: 2314149 - RNA, 19 nt, Homo sapiens
  misc_RNA (1)...(19): siRNA sense strand
augaaauggguuuagggaa

SEQ ID NO: 2314150 - RNA, 19 nt, Homo sapiens
  misc_RNA (1)...(19): siRNA sense strand
caggaaaacuacagguguu

SEQ ID NO: 2314151 - RNA, 19 nt, Homo sapiens
  misc_RNA (1)...(19): siRNA sense strand
gguuauaaauucaaagagc

SEQ ID NO: 2314152 - RNA, 19 nt, Homo sapiens
  misc_RNA (1)...(19): siRNA sense strand
ucuaauauguauaggagcu

SEQ ID NO: 2314153 - RNA, 19 nt, Homo sapiens
  misc_RNA (1)...(19): siRNA sense strand
gaguauggagagaugguca

SEQ ID NO: 2314154 - RNA, 19 nt, Homo sapiens
  misc_RNA (1)...(19): siRNA sense strand
gaaugaucugcaagaauuu

SEQ ID NO: 2314155 - RNA, 19 nt, Homo sapiens
  misc_RNA (1)...(19): siRNA sense strand
ccuuagaagaacccaagaa

SEQ ID NO: 2314156 - RNA, 19 nt, Homo sapiens
  misc_RNA (1)...(19): siRNA sense strand
ggaaugagaaugaauggca

SEQ ID NO: 2314157 - RNA, 19 nt, Homo sapiens
  misc_RNA (1)...(19): siRNA sense strand
auacacaaaccuugaacau

SEQ ID NO: 2314158 - RNA, 19 nt, Homo sapiens
  misc_RNA (1)...(19): siRNA sense strand
auuugaggguguugcaauu

SEQ ID NO: 2314159 - RNA, 19 nt, Homo sapiens
  misc_RNA (1)...(19): siRNA sense strand
ucuuguggauguagugauu

SEQ ID NO: 2314160 - RNA, 19 nt, Homo sapiens
  misc_RNA (1)...(19): siRNA sense strand
uguccaaggaacaagaaga

SEQ ID NO: 2314161 - RNA, 19 nt, Homo sapiens
  misc_RNA (1)...(19): siRNA sense strand
agauaauugcaguggaaaa

SEQ ID NO: 2314162 - RNA, 19 nt, Homo sapiens
  misc_RNA (1)...(19): siRNA sense strand
aggucugaaugaagagauu

SEQ ID NO: 2314163 - RNA, 19 nt, Homo sapiens
  misc_RNA (1)...(19): siRNA sense strand
auuugaggguguugcaauu

SEQ ID NO: 2314164 - RNA, 19 nt, Homo sapiens
  misc_RNA (1)...(19): siRNA sense strand
cugaaugaagagauuacaa

SEQ ID NO: 2314165 - RNA, 19 nt, Homo sapiens
  misc_RNA (1)...(19): siRNA sense strand
gagacgaucugcagcacca

SEQ ID NO: 2314166 - RNA, 19 nt, Homo sapiens
  misc_RNA (1)...(19): siRNA sense strand
augaaauuccagagcgcua

SEQ ID NO: 2314167 - RNA, 19 nt, Homo sapiens
  misc_RNA (1)...(19): siRNA sense strand
gcuucagaccagaguggaa

SEQ ID NO: 2314168 - RNA, 19 nt, Homo sapiens
  misc_RNA (1)...(19): siRNA sense strand
cugaaagaguaccggaucu

SEQ ID NO: 2314169 - RNA, 19 nt, Homo sapiens
  misc_RNA (1)...(19): siRNA sense strand
acuuccagacccugagaaa

SEQ ID NO: 2314170 - RNA, 19 nt, Homo sapiens
  misc_RNA (1)...(19): siRNA sense strand
acagagaaggcuuggaacu

SEQ ID NO: 2314171 - RNA, 19 nt, Homo sapiens
  misc_RNA (1)...(19): siRNA sense strand
ucaccguagacgaguacaa

SEQ ID NO: 2314172 - RNA, 19 nt, Homo sapiens
  misc_RNA (1)...(19): siRNA sense strand
acaaagaaucugaggaucc

SEQ ID NO: 2314173 - RNA, 19 nt, Homo sapiens
  misc_RNA (1)...(19): siRNA sense strand
ccguagacgaguacaaaau

SEQ ID NO: 2314174 - RNA, 19 nt, Homo sapiens
  misc_RNA (1)...(19): siRNA sense strand
agagauagucaucagccua

SEQ ID NO: 2314175 - RNA, 19 nt, Homo sapiens
  misc_RNA (1)...(19): siRNA sense strand
agccaaagacguggagaga

SEQ ID NO: 2314176 - RNA, 19 nt, Homo sapiens
  misc_RNA (1)...(19): siRNA sense strand
augaaauuccagagcgcua

SEQ ID NO: 2314177 - RNA, 19 nt, Homo sapiens
  misc_RNA (1)...(19): siRNA sense strand
gcuucagaccagaguggaa

SEQ ID NO: 2314178 - RNA, 19 nt, Homo sapiens
  misc_RNA (1)...(19): siRNA sense strand
cugaaagaguaccggaucu

SEQ ID NO: 2314179 - RNA, 19 nt, Homo sapiens
  misc_RNA (1)...(19): siRNA sense strand
acagagaaggcuuggaacu

SEQ ID NO: 2314180 - RNA, 19 nt, Homo sapiens
  misc_RNA (1)...(19): siRNA sense strand
ucaccguagacgaguacaa

SEQ ID NO: 2314181 - RNA, 19 nt, Homo sapiens
  misc_RNA (1)...(19): siRNA sense strand
acaaagaaucugaggaucc

SEQ ID NO: 2314182 - RNA, 19 nt, Homo sapiens
  misc_RNA (1)...(19): siRNA sense strand
ccguagacgaguacaaaau

SEQ ID NO: 2314183 - RNA, 19 nt, Homo sapiens
  misc_RNA (1)...(19): siRNA sense strand
agagauagucaucagccua

SEQ ID NO: 2314184 - RNA, 19 nt, Homo sapiens
  misc_RNA (1)...(19): siRNA sense strand
agccaaagacguggagaga

SEQ ID NO: 2314185 - RNA, 19 nt, Homo sapiens
  misc_RNA (1)...(19): siRNA sense strand
guguaugagaagaggaaga

SEQ ID NO: 2314186 - RNA, 19 nt, Homo sapiens
  misc_RNA (1)...(19): siRNA sense strand
cguaagaaugccagcaaca

SEQ ID NO: 2314187 - RNA, 19 nt, Homo sapiens
  misc_RNA (1)...(19): siRNA sense strand
ccauaaacggagugagaac

SEQ ID NO: 2314188 - RNA, 19 nt, Homo sapiens
  misc_RNA (1)...(19): siRNA sense strand
gaacaagaaugaagggcag

SEQ ID NO: 2314189 - RNA, 19 nt, Homo sapiens
  misc_RNA (1)...(19): siRNA sense strand
gcaagaaggagaacgggau

SEQ ID NO: 2314190 - RNA, 19 nt, Homo sapiens
  misc_RNA (1)...(19): siRNA sense strand
auaaacggagugagaacaa

SEQ ID NO: 2314191 - RNA, 19 nt, Homo sapiens
  misc_RNA (1)...(19): siRNA sense strand
gagaagaggaagaggccag

SEQ ID NO: 2314192 - RNA, 19 nt, Homo sapiens
  misc_RNA (1)...(19): siRNA sense strand
agaacaagaaugaagggca

SEQ ID NO: 2314193 - RNA, 19 nt, Homo sapiens
  misc_RNA (1)...(19): siRNA sense strand
gaguaugaauguaaugcca

SEQ ID NO: 2314194 - RNA, 19 nt, Homo sapiens
  misc_RNA (1)...(19): siRNA sense strand
accaacaaucacaaagaua

SEQ ID NO: 2314195 - RNA, 19 nt, Homo sapiens
  misc_RNA (1)...(19): siRNA sense strand
aaaacuugcgccagagaaa

SEQ ID NO: 2314196 - RNA, 19 nt, Homo sapiens
  misc_RNA (1)...(19): siRNA sense strand
auggaguacaggaucaaua

SEQ ID NO: 2314197 - RNA, 19 nt, Homo sapiens
  misc_RNA (1)...(19): siRNA sense strand
cuggcgaguaugaauguaa

SEQ ID NO: 2314198 - RNA, 19 nt, Homo sapiens
  misc_RNA (1)...(19): siRNA sense strand
uuguguaugagaagaggaa

SEQ ID NO: 2314199 - RNA, 19 nt, Homo sapiens
  misc_RNA (1)...(19): siRNA sense strand
guguaugagaagaggaaga

SEQ ID NO: 2314200 - RNA, 19 nt, Homo sapiens
  misc_RNA (1)...(19): siRNA sense strand
cguaagaaugccagcaaca

SEQ ID NO: 2314201 - RNA, 19 nt, Homo sapiens
  misc_RNA (1)...(19): siRNA sense strand
ccauaaacggagugagaac

SEQ ID NO: 2314202 - RNA, 19 nt, Homo sapiens
  misc_RNA (1)...(19): siRNA sense strand
gaacaagaaugaagggcag

SEQ ID NO: 2314203 - RNA, 19 nt, Homo sapiens
  misc_RNA (1)...(19): siRNA sense strand
gcaagaaggagaacgggau

SEQ ID NO: 2314204 - RNA, 19 nt, Homo sapiens
  misc_RNA (1)...(19): siRNA sense strand
auaaacggagugagaacaa

SEQ ID NO: 2314205 - RNA, 19 nt, Homo sapiens
  misc_RNA (1)...(19): siRNA sense strand
gagaagaggaagaggccag

SEQ ID NO: 2314206 - RNA, 19 nt, Homo sapiens
  misc_RNA (1)...(19): siRNA sense strand
agaacaagaaugaagggca

SEQ ID NO: 2314207 - RNA, 19 nt, Homo sapiens
  misc_RNA (1)...(19): siRNA sense strand
gaguaugaauguaaugcca

SEQ ID NO: 2314208 - RNA, 19 nt, Homo sapiens
  misc_RNA (1)...(19): siRNA sense strand
accaacaaucacaaagaua

SEQ ID NO: 2314209 - RNA, 19 nt, Homo sapiens
  misc_RNA (1)...(19): siRNA sense strand
aaaacuugcgccagagaaa

SEQ ID NO: 2314210 - RNA, 19 nt, Homo sapiens
  misc_RNA (1)...(19): siRNA sense strand
auggaguacaggaucaaua

SEQ ID NO: 2314211 - RNA, 19 nt, Homo sapiens
  misc_RNA (1)...(19): siRNA sense strand
cuggcgaguaugaauguaa

SEQ ID NO: 2314212 - RNA, 19 nt, Homo sapiens
  misc_RNA (1)...(19): siRNA sense strand
uuguguaugagaagaggaa

SEQ ID NO: 2314213 - RNA, 19 nt, Homo sapiens
  misc_RNA (1)...(19): siRNA sense strand
ugacagaggugcugcccaa

SEQ ID NO: 2314214 - RNA, 19 nt, Homo sapiens
  misc_RNA (1)...(19): siRNA sense strand
ggaaguauuaugugcgaga

SEQ ID NO: 2314215 - RNA, 19 nt, Homo sapiens
  misc_RNA (1)...(19): siRNA sense strand
agaaggaggcauuggccaa

SEQ ID NO: 2314216 - RNA, 19 nt, Homo sapiens
  misc_RNA (1)...(19): siRNA sense strand
ccaagaugggagagaggca

SEQ ID NO: 2314217 - RNA, 19 nt, Homo sapiens
  misc_RNA (1)...(19): siRNA sense strand
ccgaaacacugaagcgucu

SEQ ID NO: 2314218 - RNA, 19 nt, Homo sapiens
  misc_RNA (1)...(19): siRNA sense strand
agugcaaauccaagaucaa

SEQ ID NO: 2314219 - RNA, 19 nt, Homo sapiens
  misc_RNA (1)...(19): siRNA sense strand
aggugaaacagcaguauga

SEQ ID NO: 2314220 - RNA, 19 nt, Homo sapiens
  misc_RNA (1)...(19): siRNA sense strand
gcaucuauguccugcgguu

SEQ ID NO: 2314221 - RNA, 19 nt, Homo sapiens
  misc_RNA (1)...(19): siRNA sense strand
ucugcauguuugaggaaaa

SEQ ID NO: 2314222 - RNA, 19 nt, Homo sapiens
  misc_RNA (1)...(19): siRNA sense strand
guaagaagaucaugguccu

SEQ ID NO: 2314223 - RNA, 19 nt, Homo sapiens
  misc_RNA (1)...(19): siRNA sense strand
ggauuuuccugaagaccaa

SEQ ID NO: 2314224 - RNA, 19 nt, Homo sapiens
  misc_RNA (1)...(19): siRNA sense strand
cuguggaggccuauggaga

SEQ ID NO: 2314225 - RNA, 19 nt, Homo sapiens
  misc_RNA (1)...(19): siRNA sense strand
uggccaaguuucgggagaa

SEQ ID NO: 2314226 - RNA, 19 nt, Homo sapiens
  misc_RNA (1)...(19): siRNA sense strand
gagcaaauuggaaggaggu

SEQ ID NO: 2314227 - RNA, 19 nt, Homo sapiens
  misc_RNA (1)...(19): siRNA sense strand
acaaagccucagaagagaa

SEQ ID NO: 2314228 - RNA, 19 nt, Homo sapiens
  misc_RNA (1)...(19): siRNA sense strand
cgacauaauuggaccucug

SEQ ID NO: 2314229 - RNA, 19 nt, Homo sapiens
  misc_RNA (1)...(19): siRNA sense strand
gggcaggggagaugacaga

SEQ ID NO: 2314230 - RNA, 19 nt, Homo sapiens
  misc_RNA (1)...(19): siRNA sense strand
cuguaaaggugcugguaag

SEQ ID NO: 2314231 - RNA, 19 nt, Homo sapiens
  misc_RNA (1)...(19): siRNA sense strand
aggaccaagcagcgauaua

SEQ ID NO: 2314232 - RNA, 19 nt, Homo sapiens
  misc_RNA (1)...(19): siRNA sense strand
ugucagagauggacugcca

SEQ ID NO: 2314233 - RNA, 19 nt, Homo sapiens
  misc_RNA (1)...(19): siRNA sense strand
gcacaggaaugcaggagug

SEQ ID NO: 2314234 - RNA, 19 nt, Homo sapiens
  misc_RNA (1)...(19): siRNA sense strand
acuguaaaggugcugguaa

SEQ ID NO: 2314235 - RNA, 19 nt, Homo sapiens
  misc_RNA (1)...(19): siRNA sense strand
guaaagaggugcaggcaga

SEQ ID NO: 2314236 - RNA, 19 nt, Homo sapiens
  misc_RNA (1)...(19): siRNA sense strand
caauauagcccaugggagu

SEQ ID NO: 2314237 - RNA, 19 nt, Homo sapiens
  misc_RNA (1)...(19): siRNA sense strand
ucagaaaccugguggcaga

SEQ ID NO: 2314238 - RNA, 19 nt, Homo sapiens
  misc_RNA (1)...(19): siRNA sense strand
gaaacaaccaccuugggaa

SEQ ID NO: 2314239 - RNA, 19 nt, Homo sapiens
  misc_RNA (1)...(19): siRNA sense strand
acauuaaagggaagcuuau

SEQ ID NO: 2314240 - RNA, 19 nt, Homo sapiens
  misc_RNA (1)...(19): siRNA sense strand
ucuacaacugggaggaaga

SEQ ID NO: 2314241 - RNA, 19 nt, Homo sapiens
  misc_RNA (1)...(19): siRNA sense strand
cguaccagccaccaggaaa

SEQ ID NO: 2314242 - RNA, 19 nt, Homo sapiens
  misc_RNA (1)...(19): siRNA sense strand
ugcccgaggacuauggaaa

SEQ ID NO: 2314243 - RNA, 19 nt, Homo sapiens
  misc_RNA (1)...(19): siRNA sense strand
cuguauuccuccaggguuc

SEQ ID NO: 2314244 - RNA, 19 nt, Homo sapiens
  misc_RNA (1)...(19): siRNA sense strand
aggaagagagagccaccaa

SEQ ID NO: 2314245 - RNA, 19 nt, Homo sapiens
  misc_RNA (1)...(19): siRNA sense strand
guaaagaggugcaggcaga

SEQ ID NO: 2314246 - RNA, 19 nt, Homo sapiens
  misc_RNA (1)...(19): siRNA sense strand
caauauagcccaugggagu

SEQ ID NO: 2314247 - RNA, 19 nt, Homo sapiens
  misc_RNA (1)...(19): siRNA sense strand
ucagaaaccugguggcaga

SEQ ID NO: 2314248 - RNA, 19 nt, Homo sapiens
  misc_RNA (1)...(19): siRNA sense strand
gaaacaaccaccuugggaa

SEQ ID NO: 2314249 - RNA, 19 nt, Homo sapiens
  misc_RNA (1)...(19): siRNA sense strand
ucaguaaacauuugcggaa

SEQ ID NO: 2314250 - RNA, 19 nt, Homo sapiens
  misc_RNA (1)...(19): siRNA sense strand
acauuaaagggaagcuuau

SEQ ID NO: 2314251 - RNA, 19 nt, Homo sapiens
  misc_RNA (1)...(19): siRNA sense strand
ucuacaacugggaggaaga

SEQ ID NO: 2314252 - RNA, 19 nt, Homo sapiens
  misc_RNA (1)...(19): siRNA sense strand
ggaagcaagaaaacgguaa

SEQ ID NO: 2314253 - RNA, 19 nt, Homo sapiens
  misc_RNA (1)...(19): siRNA sense strand
cguaccagccaccaggaaa

SEQ ID NO: 2314254 - RNA, 19 nt, Homo sapiens
  misc_RNA (1)...(19): siRNA sense strand
ugcccgaggacuauggaaa

SEQ ID NO: 2314255 - RNA, 19 nt, Homo sapiens
  misc_RNA (1)...(19): siRNA sense strand
cuguauuccuccaggguuc

SEQ ID NO: 2314256 - RNA, 19 nt, Homo sapiens
  misc_RNA (1)...(19): siRNA sense strand
aggaagagagagccaccaa

SEQ ID NO: 2314257 - RNA, 19 nt, Homo sapiens
  misc_RNA (1)...(19): siRNA sense strand
acaaauaggcucugccauc

SEQ ID NO: 2314258 - RNA, 19 nt, Homo sapiens
  misc_RNA (1)...(19): siRNA sense strand
aggaugaauacgugaagaa

SEQ ID NO: 2314259 - RNA, 19 nt, Homo sapiens
  misc_RNA (1)...(19): siRNA sense strand
gagcaauaccagaaggcca

SEQ ID NO: 2314260 - RNA, 19 nt, Homo sapiens
  misc_RNA (1)...(19): siRNA sense strand
gguuguugaagcagagauu

SEQ ID NO: 2314261 - RNA, 19 nt, Homo sapiens
  misc_RNA (1)...(19): siRNA sense strand
gaugaauacgugaagaaaa

SEQ ID NO: 2314262 - RNA, 19 nt, Homo sapiens
  misc_RNA (1)...(19): siRNA sense strand
ugaaacaugugguuggaca

SEQ ID NO: 2314263 - RNA, 19 nt, Homo sapiens
  misc_RNA (1)...(19): siRNA sense strand
cugcagaacgcggguguaa

SEQ ID NO: 2314264 - RNA, 19 nt, Homo sapiens
  misc_RNA (1)...(19): siRNA sense strand
ugucagaagaaccggaaga

SEQ ID NO: 2314265 - RNA, 19 nt, Homo sapiens
  misc_RNA (1)...(19): siRNA sense strand
gcugcaaguguucgagcaa

SEQ ID NO: 2314266 - RNA, 19 nt, Homo sapiens
  misc_RNA (1)...(19): siRNA sense strand
gggcuguugcagucacaaa

SEQ ID NO: 2314267 - RNA, 19 nt, Homo sapiens
  misc_RNA (1)...(19): siRNA sense strand
auucauuggcagaacagaa

SEQ ID NO: 2314268 - RNA, 19 nt, Homo sapiens
  misc_RNA (1)...(19): siRNA sense strand
gucugaaggacaaggauga

SEQ ID NO: 2314269 - RNA, 19 nt, Homo sapiens
  misc_RNA (1)...(19): siRNA sense strand
agaagaaccggaagaucau

SEQ ID NO: 2314270 - RNA, 19 nt, Homo sapiens
  misc_RNA (1)...(19): siRNA sense strand
uaaugaugaccuagcagaa

SEQ ID NO: 2314271 - RNA, 19 nt, Homo sapiens
  misc_RNA (1)...(19): siRNA sense strand
ccagaaauugcuuugaaaa

SEQ ID NO: 2314272 - RNA, 19 nt, Homo sapiens
  misc_RNA (1)...(19): siRNA sense strand
cagugauauugcaaagcau

SEQ ID NO: 2314273 - RNA, 19 nt, Homo sapiens
  misc_RNA (1)...(19): siRNA sense strand
gguguaaugucuuugcuga

SEQ ID NO: 2314274 - RNA, 19 nt, Homo sapiens
  misc_RNA (1)...(19): siRNA sense strand
ugguuggacaguucaguaa

SEQ ID NO: 2314275 - RNA, 19 nt, Homo sapiens
  misc_RNA (1)...(19): siRNA sense strand
acaucgagacgcugcagaa

SEQ ID NO: 2314276 - RNA, 19 nt, Homo sapiens
  misc_RNA (1)...(19): siRNA sense strand
cagaaaugguuguugaagc

SEQ ID NO: 2314277 - RNA, 19 nt, Homo sapiens
  misc_RNA (1)...(19): siRNA sense strand
aggaugaauacgugaagaa

SEQ ID NO: 2314278 - RNA, 19 nt, Homo sapiens
  misc_RNA (1)...(19): siRNA sense strand
gagcaauaccagaaggcca

SEQ ID NO: 2314279 - RNA, 19 nt, Homo sapiens
  misc_RNA (1)...(19): siRNA sense strand
gguuguugaagcagagauu

SEQ ID NO: 2314280 - RNA, 19 nt, Homo sapiens
  misc_RNA (1)...(19): siRNA sense strand
gaugaauacgugaagaaaa

SEQ ID NO: 2314281 - RNA, 19 nt, Homo sapiens
  misc_RNA (1)...(19): siRNA sense strand
ugaaacaugugguuggaca

SEQ ID NO: 2314282 - RNA, 19 nt, Homo sapiens
  misc_RNA (1)...(19): siRNA sense strand
cugcagaacgcggguguaa

SEQ ID NO: 2314283 - RNA, 19 nt, Homo sapiens
  misc_RNA (1)...(19): siRNA sense strand
ugucagaagaaccggaaga

SEQ ID NO: 2314284 - RNA, 19 nt, Homo sapiens
  misc_RNA (1)...(19): siRNA sense strand
gcugcaaguguucgagcaa

SEQ ID NO: 2314285 - RNA, 19 nt, Homo sapiens
  misc_RNA (1)...(19): siRNA sense strand
gggcuguugcagucacaaa

SEQ ID NO: 2314286 - RNA, 19 nt, Homo sapiens
  misc_RNA (1)...(19): siRNA sense strand
auucauuggcagaacagaa

SEQ ID NO: 2314287 - RNA, 19 nt, Homo sapiens
  misc_RNA (1)...(19): siRNA sense strand
gucugaaggacaaggauga

SEQ ID NO: 2314288 - RNA, 19 nt, Homo sapiens
  misc_RNA (1)...(19): siRNA sense strand
agaagaaccggaagaucau

SEQ ID NO: 2314289 - RNA, 19 nt, Homo sapiens
  misc_RNA (1)...(19): siRNA sense strand
uaaugaugaccuagcagaa

SEQ ID NO: 2314290 - RNA, 19 nt, Homo sapiens
  misc_RNA (1)...(19): siRNA sense strand
ccagaaauugcuuugaaaa

SEQ ID NO: 2314291 - RNA, 19 nt, Homo sapiens
  misc_RNA (1)...(19): siRNA sense strand
cagugauauugcaaagcau

SEQ ID NO: 2314292 - RNA, 19 nt, Homo sapiens
  misc_RNA (1)...(19): siRNA sense strand
gguguaaugucuuugcuga

SEQ ID NO: 2314293 - RNA, 19 nt, Homo sapiens
  misc_RNA (1)...(19): siRNA sense strand
ugguuggacaguucaguaa

SEQ ID NO: 2314294 - RNA, 19 nt, Homo sapiens
  misc_RNA (1)...(19): siRNA sense strand
acaucgagacgcugcagaa

SEQ ID NO: 2314295 - RNA, 19 nt, Homo sapiens
  misc_RNA (1)...(19): siRNA sense strand
cagaaaugguuguugaagc

SEQ ID NO: 2314296 - RNA, 19 nt, Homo sapiens
  misc_RNA (1)...(19): siRNA sense strand
aggccgaagugcagagcaa

SEQ ID NO: 2314297 - RNA, 19 nt, Homo sapiens
  misc_RNA (1)...(19): siRNA sense strand
ggccaaaagaugaaguaua

SEQ ID NO: 2314298 - RNA, 19 nt, Homo sapiens
  misc_RNA (1)...(19): siRNA sense strand
agaagaaggcagagcacca

SEQ ID NO: 2314299 - RNA, 19 nt, Homo sapiens
  misc_RNA (1)...(19): siRNA sense strand
acgugaagccacagaucaa

SEQ ID NO: 2314300 - RNA, 19 nt, Homo sapiens
  misc_RNA (1)...(19): siRNA sense strand
gugugauggaaguguuaaa

SEQ ID NO: 2314301 - RNA, 19 nt, Homo sapiens
  misc_RNA (1)...(19): siRNA sense strand
ggaaagaauguuuuggaau

SEQ ID NO: 2314302 - RNA, 19 nt, Homo sapiens
  misc_RNA (1)...(19): siRNA sense strand
agaaguuggccgagaucau

SEQ ID NO: 2314303 - RNA, 19 nt, Homo sapiens
  misc_RNA (1)...(19): siRNA sense strand
auucagugacucagaaauu

SEQ ID NO: 2314304 - RNA, 19 nt, Homo sapiens
  misc_RNA (1)...(19): siRNA sense strand
uugauaauccacaggagaa

SEQ ID NO: 2314305 - RNA, 19 nt, Homo sapiens
  misc_RNA (1)...(19): siRNA sense strand
acucaguagaucuugauaa

SEQ ID NO: 2314306 - RNA, 19 nt, Homo sapiens
  misc_RNA (1)...(19): siRNA sense strand
aguucaacagggagaauuu

SEQ ID NO: 2314307 - RNA, 19 nt, Homo sapiens
  misc_RNA (1)...(19): siRNA sense strand
cggugugauggaaguguua

SEQ ID NO: 2314308 - RNA, 19 nt, Homo sapiens
  misc_RNA (1)...(19): siRNA sense strand
aaguuugauucucaggaaa

SEQ ID NO: 2314309 - RNA, 19 nt, Homo sapiens
  misc_RNA (1)...(19): siRNA sense strand
caggagaacauuaaggcca

SEQ ID NO: 2314310 - RNA, 19 nt, Homo sapiens
  misc_RNA (1)...(19): siRNA sense strand
ggcaaugguuugacggugu

SEQ ID NO: 2314311 - RNA, 19 nt, Homo sapiens
  misc_RNA (1)...(19): siRNA sense strand
gaauuacacuuucuggcaa

SEQ ID NO: 2314312 - RNA, 19 nt, Homo sapiens
  misc_RNA (1)...(19): siRNA sense strand
cguucaucauugagaagca

SEQ ID NO: 2314313 - RNA, 19 nt, Homo sapiens
  misc_RNA (1)...(19): siRNA sense strand
aggccaagucucugcucaa

SEQ ID NO: 2314314 - RNA, 19 nt, Homo sapiens
  misc_RNA (1)...(19): siRNA sense strand
uugaacaacugcugcguca

SEQ ID NO: 2314315 - RNA, 19 nt, Homo sapiens
  misc_RNA (1)...(19): siRNA sense strand
uggcagaaccggcagcaga

SEQ ID NO: 2314316 - RNA, 19 nt, Homo sapiens
  misc_RNA (1)...(19): siRNA sense strand
gguugcagcgugaggcaca

SEQ ID NO: 2314317 - RNA, 19 nt, Homo sapiens
  misc_RNA (1)...(19): siRNA sense strand
ucagugagcagcaggccaa

SEQ ID NO: 2314318 - RNA, 19 nt, Homo sapiens
  misc_RNA (1)...(19): siRNA sense strand
auggauacgugaagccaca

SEQ ID NO: 2314319 - RNA, 19 nt, Homo sapiens
  misc_RNA (1)...(19): siRNA sense strand
aggccugguugcagcguga

SEQ ID NO: 2314320 - RNA, 19 nt, Homo sapiens
  misc_RNA (1)...(19): siRNA sense strand
uguacaaugaacagagguu

SEQ ID NO: 2314321 - RNA, 19 nt, Homo sapiens
  misc_RNA (1)...(19): siRNA sense strand
ccgagaagcaccagaagac

SEQ ID NO: 2314322 - RNA, 19 nt, Homo sapiens
  misc_RNA (1)...(19): siRNA sense strand
agaugcuggccgaggucaa

SEQ ID NO: 2314323 - RNA, 19 nt, Homo sapiens
  misc_RNA (1)...(19): siRNA sense strand
aauuacacuuucuggcaau

SEQ ID NO: 2314324 - RNA, 19 nt, Homo sapiens
  misc_RNA (1)...(19): siRNA sense strand
aggaaagaauguuuuggaa

SEQ ID NO: 2314325 - RNA, 19 nt, Homo sapiens
  misc_RNA (1)...(19): siRNA sense strand
gauuagacaugguugggaa

SEQ ID NO: 2314326 - RNA, 19 nt, Homo sapiens
  misc_RNA (1)...(19): siRNA sense strand
cugccaugcuugaggaaga

SEQ ID NO: 2314327 - RNA, 19 nt, Homo sapiens
  misc_RNA (1)...(19): siRNA sense strand
ucuuugacauggagagaau

SEQ ID NO: 2314328 - RNA, 19 nt, Homo sapiens
  misc_RNA (1)...(19): siRNA sense strand
gggcauaucaacaggucca

SEQ ID NO: 2314329 - RNA, 19 nt, Homo sapiens
  misc_RNA (1)...(19): siRNA sense strand
aaaaugaagccuaggagaa

SEQ ID NO: 2314330 - RNA, 19 nt, Homo sapiens
  misc_RNA (1)...(19): siRNA sense strand
ucacaaaccaagaagaacu

SEQ ID NO: 2314331 - RNA, 19 nt, Homo sapiens
  misc_RNA (1)...(19): siRNA sense strand
gaaauuuagaagaagacga

SEQ ID NO: 2314332 - RNA, 19 nt, Homo sapiens
  misc_RNA (1)...(19): siRNA sense strand
cauaaggacacgggagaga

SEQ ID NO: 2314333 - RNA, 19 nt, Homo sapiens
  misc_RNA (1)...(19): siRNA sense strand
aggaagaagauacugaaga

SEQ ID NO: 2314334 - RNA, 19 nt, Homo sapiens
  misc_RNA (1)...(19): siRNA sense strand
aggcgauccuacagauaca

SEQ ID NO: 2314335 - RNA, 19 nt, Homo sapiens
  misc_RNA (1)...(19): siRNA sense strand
auucagagcaagcuaggaa

SEQ ID NO: 2314336 - RNA, 19 nt, Homo sapiens
  misc_RNA (1)...(19): siRNA sense strand
aguggauguuaacaagaaa

SEQ ID NO: 2314337 - RNA, 19 nt, Homo sapiens
  misc_RNA (1)...(19): siRNA sense strand
cuucagaacuucagcacac

SEQ ID NO: 2314338 - RNA, 19 nt, Homo sapiens
  misc_RNA (1)...(19): siRNA sense strand
ucauaauggaaccaaguau

SEQ ID NO: 2314339 - RNA, 19 nt, Homo sapiens
  misc_RNA (1)...(19): siRNA sense strand
ggaauugugggauuggcaa

SEQ ID NO: 2314340 - RNA, 19 nt, Homo sapiens
  misc_RNA (1)...(19): siRNA sense strand
augaagccuaggagaaauu

SEQ ID NO: 2314341 - RNA, 19 nt, Homo sapiens
  misc_RNA (1)...(19): siRNA sense strand
cugagaaggcccaagacca

SEQ ID NO: 2314342 - RNA, 19 nt, Homo sapiens
  misc_RNA (1)...(19): siRNA sense strand
ccgacggcuaccagaacaa

SEQ ID NO: 2314343 - RNA, 19 nt, Homo sapiens
  misc_RNA (1)...(19): siRNA sense strand
cgggaagguaccaaggauu

SEQ ID NO: 2314344 - RNA, 19 nt, Homo sapiens
  misc_RNA (1)...(19): siRNA sense strand
gagacagcggaguggagaa

SEQ ID NO: 2314345 - RNA, 19 nt, Homo sapiens
  misc_RNA (1)...(19): siRNA sense strand
ccgaagagcaguacuggga

SEQ ID NO: 2314346 - RNA, 19 nt, Homo sapiens
  misc_RNA (1)...(19): siRNA sense strand
gcggaguggagaaguugaa

SEQ ID NO: 2314347 - RNA, 19 nt, Homo sapiens
  misc_RNA (1)...(19): siRNA sense strand
gaagagcaguacugggauc

SEQ ID NO: 2314348 - RNA, 19 nt, Homo sapiens
  misc_RNA (1)...(19): siRNA sense strand
ggaguggagaaguugaaaa

SEQ ID NO: 2314349 - RNA, 19 nt, Homo sapiens
  misc_RNA (1)...(19): siRNA sense strand
uggagaaguugaaaacaau

SEQ ID NO: 2314350 - RNA, 19 nt, Homo sapiens
  misc_RNA (1)...(19): siRNA sense strand
gggaagucugcuuuggaaa

SEQ ID NO: 2314351 - RNA, 19 nt, Homo sapiens
  misc_RNA (1)...(19): siRNA sense strand
acauggaaacugugggaca

SEQ ID NO: 2314352 - RNA, 19 nt, Homo sapiens
  misc_RNA (1)...(19): siRNA sense strand
cugaagagccacagcggga

SEQ ID NO: 2314353 - RNA, 19 nt, Homo sapiens
  misc_RNA (1)...(19): siRNA sense strand
uggaggagaugcagggcca

SEQ ID NO: 2314354 - RNA, 19 nt, Homo sapiens
  misc_RNA (1)...(19): siRNA sense strand
gagccaacguggagcugga

SEQ ID NO: 2314355 - RNA, 19 nt, Homo sapiens
  misc_RNA (1)...(19): siRNA sense strand
uggaauacaagaagaagca

SEQ ID NO: 2314356 - RNA, 19 nt, Homo sapiens
  misc_RNA (1)...(19): siRNA sense strand
cuuuagcagcaauggcaaa

SEQ ID NO: 2314357 - RNA, 19 nt, Homo sapiens
  misc_RNA (1)...(19): siRNA sense strand
uccaagaagcagaaacaau

SEQ ID NO: 2314358 - RNA, 19 nt, Homo sapiens
  misc_RNA (1)...(19): siRNA sense strand
auguggaauacaagaagaa

SEQ ID NO: 2314359 - RNA, 19 nt, Homo sapiens
  misc_RNA (1)...(19): siRNA sense strand
cagcggauucggaaggaga

SEQ ID NO: 2314360 - RNA, 19 nt, Homo sapiens
  misc_RNA (1)...(19): siRNA sense strand
agaaacaauaucagcggau

SEQ ID NO: 2314361 - RNA, 19 nt, Homo sapiens
  misc_RNA (1)...(19): siRNA sense strand
cagauguggaauacaagaa

SEQ ID NO: 2314362 - RNA, 19 nt, Homo sapiens
  misc_RNA (1)...(19): siRNA sense strand
cgacauuggcauugcuaac

SEQ ID NO: 2314363 - RNA, 19 nt, Homo sapiens
  misc_RNA (1)...(19): siRNA sense strand
cugcagaggaugacggaca

SEQ ID NO: 2314364 - RNA, 19 nt, Homo sapiens
  misc_RNA (1)...(19): siRNA sense strand
ucauaauggagcaggugaa

SEQ ID NO: 2314365 - RNA, 19 nt, Homo sapiens
  misc_RNA (1)...(19): siRNA sense strand
gagcagaagugcaucgcca

SEQ ID NO: 2314366 - RNA, 19 nt, Homo sapiens
  misc_RNA (1)...(19): siRNA sense strand
ggacaaguguuuccggaag

SEQ ID NO: 2314367 - RNA, 19 nt, Homo sapiens
  misc_RNA (1)...(19): siRNA sense strand
acuaaagagagcagaggca

SEQ ID NO: 2314368 - RNA, 19 nt, Homo sapiens
  misc_RNA (1)...(19): siRNA sense strand
ccugggcauuggugguaaa

SEQ ID NO: 2314369 - RNA, 19 nt, Homo sapiens
  misc_RNA (1)...(19): siRNA sense strand
uggucauggagaagcuaaa

SEQ ID NO: 2314370 - RNA, 19 nt, Homo sapiens
  misc_RNA (1)...(19): siRNA sense strand
cuguaaauccaucggaagu

SEQ ID NO: 2314371 - RNA, 19 nt, Homo sapiens
  misc_RNA (1)...(19): siRNA sense strand
ggaaguuacagcugccaca

SEQ ID NO: 2314372 - RNA, 19 nt, Homo sapiens
  misc_RNA (1)...(19): siRNA sense strand
gucuugaacugcuggccua

SEQ ID NO: 2314373 - RNA, 19 nt, Homo sapiens
  misc_RNA (1)...(19): siRNA sense strand
gcuauacgcgggagggaga

SEQ ID NO: 2314374 - RNA, 19 nt, Homo sapiens
  misc_RNA (1)...(19): siRNA sense strand
aagaagagcuagagucgga

SEQ ID NO: 2314375 - RNA, 19 nt, Homo sapiens
  misc_RNA (1)...(19): siRNA sense strand
cacuaaggaagaagagcua

SEQ ID NO: 2314376 - RNA, 19 nt, Homo sapiens
  misc_RNA (1)...(19): siRNA sense strand
cuaaggaagaagagcuaga

SEQ ID NO: 2314377 - RNA, 19 nt, Homo sapiens
  misc_RNA (1)...(19): siRNA sense strand
cggcagaaaacucgaagua

SEQ ID NO: 2314378 - RNA, 19 nt, Homo sapiens
  misc_RNA (1)...(19): siRNA sense strand
guuaagugaugaugaccga

SEQ ID NO: 2314379 - RNA, 19 nt, Homo sapiens
  misc_RNA (1)...(19): siRNA sense strand
gagcgagaggacagcaaga

SEQ ID NO: 2314380 - RNA, 19 nt, Homo sapiens
  misc_RNA (1)...(19): siRNA sense strand
cuucgaaaccugggaaaca

SEQ ID NO: 2314381 - RNA, 19 nt, Homo sapiens
  misc_RNA (1)...(19): siRNA sense strand
uggcauccagcgagggcua

SEQ ID NO: 2314382 - RNA, 19 nt, Homo sapiens
  misc_RNA (1)...(19): siRNA sense strand
gcgcagaaacccagccucu

SEQ ID NO: 2314383 - RNA, 19 nt, Homo sapiens
  misc_RNA (1)...(19): siRNA sense strand
aguugacaguacaaagauu

SEQ ID NO: 2314384 - RNA, 19 nt, Homo sapiens
  misc_RNA (1)...(19): siRNA sense strand
aagaagagcuagagucgga

SEQ ID NO: 2314385 - RNA, 19 nt, Homo sapiens
  misc_RNA (1)...(19): siRNA sense strand
cacuaaggaagaagagcua

SEQ ID NO: 2314386 - RNA, 19 nt, Homo sapiens
  misc_RNA (1)...(19): siRNA sense strand
cuaaggaagaagagcuaga

SEQ ID NO: 2314387 - RNA, 19 nt, Homo sapiens
  misc_RNA (1)...(19): siRNA sense strand
cggcagaaaacucgaagua

SEQ ID NO: 2314388 - RNA, 19 nt, Homo sapiens
  misc_RNA (1)...(19): siRNA sense strand
guuaagugaugaugaccga

SEQ ID NO: 2314389 - RNA, 19 nt, Homo sapiens
  misc_RNA (1)...(19): siRNA sense strand
gagcgagaggacagcaaga

SEQ ID NO: 2314390 - RNA, 19 nt, Homo sapiens
  misc_RNA (1)...(19): siRNA sense strand
cuucgaaaccugggaaaca

SEQ ID NO: 2314391 - RNA, 19 nt, Homo sapiens
  misc_RNA (1)...(19): siRNA sense strand
uggcauccagcgagggcua

SEQ ID NO: 2314392 - RNA, 19 nt, Homo sapiens
  misc_RNA (1)...(19): siRNA sense strand
gcgcagaaacccagccucu

SEQ ID NO: 2314393 - RNA, 19 nt, Homo sapiens
  misc_RNA (1)...(19): siRNA sense strand
aguugacaguacaaagauu

SEQ ID NO: 2314394 - RNA, 19 nt, Homo sapiens
  misc_RNA (1)...(19): siRNA sense strand
gcgagaugccaaagggaca

SEQ ID NO: 2314395 - RNA, 19 nt, Homo sapiens
  misc_RNA (1)...(19): siRNA sense strand
caaagggacaauucgggaa

SEQ ID NO: 2314396 - RNA, 19 nt, Homo sapiens
  misc_RNA (1)...(19): siRNA sense strand
agaagaaagaccagagcag

SEQ ID NO: 2314397 - RNA, 19 nt, Homo sapiens
  misc_RNA (1)...(19): siRNA sense strand
agagcagagaccuggagaa

SEQ ID NO: 2314398 - RNA, 19 nt, Homo sapiens
  misc_RNA (1)...(19): siRNA sense strand
acagcuggcuagaacggaa

SEQ ID NO: 2314399 - RNA, 19 nt, Homo sapiens
  misc_RNA (1)...(19): siRNA sense strand
ccauacagcuggcuagaac

SEQ ID NO: 2314400 - RNA, 19 nt, Homo sapiens
  misc_RNA (1)...(19): siRNA sense strand
cagcuggcuagaacggaaa

SEQ ID NO: 2314401 - RNA, 19 nt, Homo sapiens
  misc_RNA (1)...(19): siRNA sense strand
gaacaaauguggaaggugu

SEQ ID NO: 2314402 - RNA, 19 nt, Homo sapiens
  misc_RNA (1)...(19): siRNA sense strand
ccuacgaggaugugguuca

SEQ ID NO: 2314403 - RNA, 19 nt, Homo sapiens
  misc_RNA (1)...(19): siRNA sense strand
gagugaacaaccagcccua

SEQ ID NO: 2314404 - RNA, 19 nt, Homo sapiens
  misc_RNA (1)...(19): siRNA sense strand
ccgccaccgacgagcuaaa

SEQ ID NO: 2314405 - RNA, 19 nt, Homo sapiens
  misc_RNA (1)...(19): siRNA sense strand
cagucaaggaggugagggu

SEQ ID NO: 2314406 - RNA, 19 nt, Homo sapiens
  misc_RNA (1)...(19): siRNA sense strand
ugcuaugaaugcagagaaa

SEQ ID NO: 2314407 - RNA, 19 nt, Homo sapiens
  misc_RNA (1)...(19): siRNA sense strand
ugucaaagguggagggguu

SEQ ID NO: 2314408 - RNA, 19 nt, Homo sapiens
  misc_RNA (1)...(19): siRNA sense strand
caggagagaaggugggcau

SEQ ID NO: 2314409 - RNA, 19 nt, Homo sapiens
  misc_RNA (1)...(19): siRNA sense strand
ggaucaagccagacagcca

SEQ ID NO: 2314410 - RNA, 19 nt, Homo sapiens
  misc_RNA (1)...(19): siRNA sense strand
ccacagugcaccuggccua

SEQ ID NO: 2314411 - RNA, 19 nt, Homo sapiens
  misc_RNA (1)...(19): siRNA sense strand
cauugggccuggugggcua

SEQ ID NO: 2314412 - RNA, 19 nt, Homo sapiens
  misc_RNA (1)...(19): siRNA sense strand
gagauagaggagaaggaga

SEQ ID NO: 2314413 - RNA, 19 nt, Homo sapiens
  misc_RNA (1)...(19): siRNA sense strand
ggguucuggucauggacaa

SEQ ID NO: 2314414 - RNA, 19 nt, Homo sapiens
  misc_RNA (1)...(19): siRNA sense strand
caaaugaggcagaaggacu

SEQ ID NO: 2314415 - RNA, 19 nt, Homo sapiens
  misc_RNA (1)...(19): siRNA sense strand
acagaaagguccuggcucu

SEQ ID NO: 2314416 - RNA, 19 nt, Homo sapiens
  misc_RNA (1)...(19): siRNA sense strand
aggagaaggagaaacagaa

SEQ ID NO: 2314417 - RNA, 19 nt, Homo sapiens
  misc_RNA (1)...(19): siRNA sense strand
cagaacauguacaggcuca

SEQ ID NO: 2314418 - RNA, 19 nt, Homo sapiens
  misc_RNA (1)...(19): siRNA sense strand
guacaagugugcugaccga

SEQ ID NO: 2314419 - RNA, 19 nt, Homo sapiens
  misc_RNA (1)...(19): siRNA sense strand
ugguagagaaugugugcuu

SEQ ID NO: 2314420 - RNA, 19 nt, Homo sapiens
  misc_RNA (1)...(19): siRNA sense strand
aggagauagaggagaagga

SEQ ID NO: 2314421 - RNA, 19 nt, Homo sapiens
  misc_RNA (1)...(19): siRNA sense strand
cagacagccaggagauaga

SEQ ID NO: 2314422 - RNA, 19 nt, Homo sapiens
  misc_RNA (1)...(19): siRNA sense strand
ugauucacaccgagaggaa

SEQ ID NO: 2314423 - RNA, 19 nt, Homo sapiens
  misc_RNA (1)...(19): siRNA sense strand
gaaaaggaguggaugagga

SEQ ID NO: 2314424 - RNA, 19 nt, Homo sapiens
  misc_RNA (1)...(19): siRNA sense strand
cagcaggaaaggacagcau

SEQ ID NO: 2314425 - RNA, 19 nt, Homo sapiens
  misc_RNA (1)...(19): siRNA sense strand
cggaagacccagauccuca

SEQ ID NO: 2314426 - RNA, 19 nt, Homo sapiens
  misc_RNA (1)...(19): siRNA sense strand
ucgcaguguuccugauuca

SEQ ID NO: 2314427 - RNA, 19 nt, Homo sapiens
  misc_RNA (1)...(19): siRNA sense strand
ggaaccagacagagccuga

SEQ ID NO: 2314428 - RNA, 19 nt, Homo sapiens
  misc_RNA (1)...(19): siRNA sense strand
gcuuggagucagccagcua

SEQ ID NO: 2314429 - RNA, 19 nt, Homo sapiens
  misc_RNA (1)...(19): siRNA sense strand
cuugaaaaggaguggauga

SEQ ID NO: 2314430 - RNA, 19 nt, Homo sapiens
  misc_RNA (1)...(19): siRNA sense strand
gggaaggauugcaucacca

SEQ ID NO: 2314431 - RNA, 19 nt, Homo sapiens
  misc_RNA (1)...(19): siRNA sense strand
agccagauguggacagcuu

SEQ ID NO: 2314432 - RNA, 19 nt, Homo sapiens
  misc_RNA (1)...(19): siRNA sense strand
ggaaaauccaacagggaac

SEQ ID NO: 2314433 - RNA, 19 nt, Homo sapiens
  misc_RNA (1)...(19): siRNA sense strand
ggcucaaggugcugcagau

SEQ ID NO: 2314434 - RNA, 19 nt, Homo sapiens
  misc_RNA (1)...(19): siRNA sense strand
cggcaagaagggagccagu

SEQ ID NO: 2314435 - RNA, 19 nt, Homo sapiens
  misc_RNA (1)...(19): siRNA sense strand
aggaggagcaaaugaggca

SEQ ID NO: 2314436 - RNA, 19 nt, Homo sapiens
  misc_RNA (1)...(19): siRNA sense strand
uggagacggugcagcucaa

SEQ ID NO: 2314437 - RNA, 19 nt, Homo sapiens
  misc_RNA (1)...(19): siRNA sense strand
auucacaccgagaggaaaa

SEQ ID NO: 2314438 - RNA, 19 nt, Homo sapiens
  misc_RNA (1)...(19): siRNA sense strand
gagaaaacuccucagaaga

SEQ ID NO: 2314439 - RNA, 19 nt, Homo sapiens
  misc_RNA (1)...(19): siRNA sense strand
agaaaacuccucagaagaa

SEQ ID NO: 2314440 - RNA, 19 nt, Homo sapiens
  misc_RNA (1)...(19): siRNA sense strand
cggugggugauguggucaa

SEQ ID NO: 2314441 - RNA, 19 nt, Homo sapiens
  misc_RNA (1)...(19): siRNA sense strand
gaggagcaaaugaggcaga

SEQ ID NO: 2314442 - RNA, 19 nt, Homo sapiens
  misc_RNA (1)...(19): siRNA sense strand
ugacagggcaggauggcca

SEQ ID NO: 2314443 - RNA, 19 nt, Homo sapiens
  misc_RNA (1)...(19): siRNA sense strand
aggagcuucugcagaggaa

SEQ ID NO: 2314444 - RNA, 19 nt, Homo sapiens
  misc_RNA (1)...(19): siRNA sense strand
ggacgaggcuaucugggca

SEQ ID NO: 2314445 - RNA, 19 nt, Homo sapiens
  misc_RNA (1)...(19): siRNA sense strand
aagugguaccagagcauaa

SEQ ID NO: 2314446 - RNA, 19 nt, Homo sapiens
  misc_RNA (1)...(19): siRNA sense strand
agcgggaggaaguggauua

SEQ ID NO: 2314447 - RNA, 19 nt, Homo sapiens
  misc_RNA (1)...(19): siRNA sense strand
cagacaagaccaagcggga

SEQ ID NO: 2314448 - RNA, 19 nt, Homo sapiens
  misc_RNA (1)...(19): siRNA sense strand
ccuuugaagugguaccaga

SEQ ID NO: 2314449 - RNA, 19 nt, Homo sapiens
  misc_RNA (1)...(19): siRNA sense strand
ugaagugguaccagagcau

SEQ ID NO: 2314450 - RNA, 19 nt, Homo sapiens
  misc_RNA (1)...(19): siRNA sense strand
aagugguaccagagcauaa

SEQ ID NO: 2314451 - RNA, 19 nt, Homo sapiens
  misc_RNA (1)...(19): siRNA sense strand
agcgggaggaaguggauua

SEQ ID NO: 2314452 - RNA, 19 nt, Homo sapiens
  misc_RNA (1)...(19): siRNA sense strand
cagacaagaccaagcggga

SEQ ID NO: 2314453 - RNA, 19 nt, Homo sapiens
  misc_RNA (1)...(19): siRNA sense strand
ccuuugaagugguaccaga

SEQ ID NO: 2314454 - RNA, 19 nt, Homo sapiens
  misc_RNA (1)...(19): siRNA sense strand
ugaagugguaccagagcau

SEQ ID NO: 2314455 - RNA, 19 nt, Homo sapiens
  misc_RNA (1)...(19): siRNA sense strand
aagugguaccagagcauaa

SEQ ID NO: 2314456 - RNA, 19 nt, Homo sapiens
  misc_RNA (1)...(19): siRNA sense strand
agcgggaggaaguggauua

SEQ ID NO: 2314457 - RNA, 19 nt, Homo sapiens
  misc_RNA (1)...(19): siRNA sense strand
cagacaagaccaagcggga

SEQ ID NO: 2314458 - RNA, 19 nt, Homo sapiens
  misc_RNA (1)...(19): siRNA sense strand
ccuuugaagugguaccaga

SEQ ID NO: 2314459 - RNA, 19 nt, Homo sapiens
  misc_RNA (1)...(19): siRNA sense strand
ugaagugguaccagagcau

SEQ ID NO: 2314460 - RNA, 19 nt, Homo sapiens
  misc_RNA (1)...(19): siRNA sense strand
aauauaacuucuugggcau

SEQ ID NO: 2314461 - RNA, 19 nt, Homo sapiens
  misc_RNA (1)...(19): siRNA sense strand
aaauauaacuucuugggca

SEQ ID NO: 2314462 - RNA, 19 nt, Homo sapiens
  misc_RNA (1)...(19): siRNA sense strand
gcucagaugugguggacug

SEQ ID NO: 2314463 - RNA, 19 nt, Homo sapiens
  misc_RNA (1)...(19): siRNA sense strand
gcuacuacaucuucgguga

SEQ ID NO: 2314464 - RNA, 19 nt, Homo sapiens
  misc_RNA (1)...(19): siRNA sense strand
ggaaggagaaggacccgaa

SEQ ID NO: 2314465 - RNA, 19 nt, Homo sapiens
  misc_RNA (1)...(19): siRNA sense strand
agucuauggacgacgauuu

SEQ ID NO: 2314466 - RNA, 19 nt, Homo sapiens
  misc_RNA (1)...(19): siRNA sense strand
gcuaaauggaacugcgaag

SEQ ID NO: 2314467 - RNA, 19 nt, Homo sapiens
  misc_RNA (1)...(19): siRNA sense strand
gcagugagcuggagaccac

SEQ ID NO: 2314468 - RNA, 19 nt, Homo sapiens
  misc_RNA (1)...(19): siRNA sense strand
gaguggugaaggaggagau

SEQ ID NO: 2314469 - RNA, 19 nt, Homo sapiens
  misc_RNA (1)...(19): siRNA sense strand
agguaaacgagaucaacuu

SEQ ID NO: 2314470 - RNA, 19 nt, Homo sapiens
  misc_RNA (1)...(19): siRNA sense strand
ccauugugggccaaagcaa

SEQ ID NO: 2314471 - RNA, 19 nt, Homo sapiens
  misc_RNA (1)...(19): siRNA sense strand
ucggaguggugaaggagga

SEQ ID NO: 2314472 - RNA, 19 nt, Homo sapiens
  misc_RNA (1)...(19): siRNA sense strand
aggagaucucggaugacaa

SEQ ID NO: 2314473 - RNA, 19 nt, Homo sapiens
  misc_RNA (1)...(19): siRNA sense strand
acacagagcgccuagacga

SEQ ID NO: 2314474 - RNA, 19 nt, Homo sapiens
  misc_RNA (1)...(19): siRNA sense strand
gggaagaagcaauggaaaa

SEQ ID NO: 2314475 - RNA, 19 nt, Homo sapiens
  misc_RNA (1)...(19): siRNA sense strand
cagaaguagugauggagaa

SEQ ID NO: 2314476 - RNA, 19 nt, Homo sapiens
  misc_RNA (1)...(19): siRNA sense strand
cagaagaagaggugcaaga

SEQ ID NO: 2314477 - RNA, 19 nt, Homo sapiens
  misc_RNA (1)...(19): siRNA sense strand
cuccaaagauauagcaauu

SEQ ID NO: 2314478 - RNA, 19 nt, Homo sapiens
  misc_RNA (1)...(19): siRNA sense strand
aggagaaggagaaggaaga

SEQ ID NO: 2314479 - RNA, 19 nt, Homo sapiens
  misc_RNA (1)...(19): siRNA sense strand
cuccaaguuugcagagaaa

SEQ ID NO: 2314480 - RNA, 19 nt, Homo sapiens
  misc_RNA (1)...(19): siRNA sense strand
ccucagaaaugauugaaaa

SEQ ID NO: 2314481 - RNA, 19 nt, Homo sapiens
  misc_RNA (1)...(19): siRNA sense strand
gcugggaagaucagugaaa

SEQ ID NO: 2314482 - RNA, 19 nt, Homo sapiens
  misc_RNA (1)...(19): siRNA sense strand
uuggaaagagaaugggaua

SEQ ID NO: 2314483 - RNA, 19 nt, Homo sapiens
  misc_RNA (1)...(19): siRNA sense strand
gggaagaguacuuuguuau

SEQ ID NO: 2314484 - RNA, 19 nt, Homo sapiens
  misc_RNA (1)...(19): siRNA sense strand
cagugaaagacuugugauu

SEQ ID NO: 2314485 - RNA, 19 nt, Homo sapiens
  misc_RNA (1)...(19): siRNA sense strand
ugaugagccuuuagagaga

SEQ ID NO: 2314486 - RNA, 19 nt, Homo sapiens
  misc_RNA (1)...(19): siRNA sense strand
gaagaagacuuaaaggagu

SEQ ID NO: 2314487 - RNA, 19 nt, Homo sapiens
  misc_RNA (1)...(19): siRNA sense strand
ccaaguuugcagagaaaga

SEQ ID NO: 2314488 - RNA, 19 nt, Homo sapiens
  misc_RNA (1)...(19): siRNA sense strand
agaaggaagaguugguauu

SEQ ID NO: 2314489 - RNA, 19 nt, Homo sapiens
  misc_RNA (1)...(19): siRNA sense strand
agacagaagaagaggugca

SEQ ID NO: 2314490 - RNA, 19 nt, Homo sapiens
  misc_RNA (1)...(19): siRNA sense strand
gggaauuauuugagaaagc

SEQ ID NO: 2314491 - RNA, 19 nt, Homo sapiens
  misc_RNA (1)...(19): siRNA sense strand
cagccagacuuuagcucaa

SEQ ID NO: 2314492 - RNA, 19 nt, Homo sapiens
  misc_RNA (1)...(19): siRNA sense strand
ccuccaaaccucacagcaa

SEQ ID NO: 2314493 - RNA, 19 nt, Homo sapiens
  misc_RNA (1)...(19): siRNA sense strand
ccaaaugagaauagaaaug

SEQ ID NO: 2314494 - RNA, 19 nt, Homo sapiens
  misc_RNA (1)...(19): siRNA sense strand
gcucaaaacucaugggaug

SEQ ID NO: 2314495 - RNA, 19 nt, Homo sapiens
  misc_RNA (1)...(19): siRNA sense strand
acugaacacugaaggagaa

SEQ ID NO: 2314496 - RNA, 19 nt, Homo sapiens
  misc_RNA (1)...(19): siRNA sense strand
ccuucugggaggagggauu

SEQ ID NO: 2314497 - RNA, 19 nt, Homo sapiens
  misc_RNA (1)...(19): siRNA sense strand
uggucauagaagagaacaa

SEQ ID NO: 2314498 - RNA, 19 nt, Homo sapiens
  misc_RNA (1)...(19): siRNA sense strand
gugcaagauacaaggcuuu

SEQ ID NO: 2314499 - RNA, 19 nt, Homo sapiens
  misc_RNA (1)...(19): siRNA sense strand
ccuaugacccggauaacaa

SEQ ID NO: 2314500 - RNA, 19 nt, Homo sapiens
  misc_RNA (1)...(19): siRNA sense strand
uuaucuaggcauaggcuua

SEQ ID NO: 2314501 - RNA, 19 nt, Homo sapiens
  misc_RNA (1)...(19): siRNA sense strand
ugggaagaucagugaaaga

SEQ ID NO: 2314502 - RNA, 19 nt, Homo sapiens
  misc_RNA (1)...(19): siRNA sense strand
aagacaaacagaacugaaa

SEQ ID NO: 2314503 - RNA, 19 nt, Homo sapiens
  misc_RNA (1)...(19): siRNA sense strand
aauugugauuggagcuaua

SEQ ID NO: 2314504 - RNA, 19 nt, Homo sapiens
  misc_RNA (1)...(19): siRNA sense strand
cuuggaaauaagugaagaa

SEQ ID NO: 2314505 - RNA, 19 nt, Homo sapiens
  misc_RNA (1)...(19): siRNA sense strand
agggaagaguacuuuguua

SEQ ID NO: 2314506 - RNA, 19 nt, Homo sapiens
  misc_RNA (1)...(19): siRNA sense strand
guggauagcuugaugcgau

SEQ ID NO: 2314507 - RNA, 19 nt, Homo sapiens
  misc_RNA (1)...(19): siRNA sense strand
aaguagugauggagaaugu

SEQ ID NO: 2314508 - RNA, 19 nt, Homo sapiens
  misc_RNA (1)...(19): siRNA sense strand
cuucaagacaaagggaaua

SEQ ID NO: 2314509 - RNA, 19 nt, Homo sapiens
  misc_RNA (1)...(19): siRNA sense strand
caaucaacucuauacgaaa

SEQ ID NO: 2314510 - RNA, 19 nt, Homo sapiens
  misc_RNA (1)...(19): siRNA sense strand
caacagugccagugauagu

SEQ ID NO: 2314511 - RNA, 19 nt, Homo sapiens
  misc_RNA (1)...(19): siRNA sense strand
aauuaagcacaguggaaga

SEQ ID NO: 2314512 - RNA, 19 nt, Homo sapiens
  misc_RNA (1)...(19): siRNA sense strand
gagaaggaagaguugguau

SEQ ID NO: 2314513 - RNA, 19 nt, Homo sapiens
  misc_RNA (1)...(19): siRNA sense strand
ugacuuuagccaugaauau

SEQ ID NO: 2314514 - RNA, 19 nt, Homo sapiens
  misc_RNA (1)...(19): siRNA sense strand
ggaucagggaagaguacuu

SEQ ID NO: 2314515 - RNA, 19 nt, Homo sapiens
  misc_RNA (1)...(19): siRNA sense strand
uugcagagaaagacaauau

SEQ ID NO: 2314516 - RNA, 19 nt, Homo sapiens
  misc_RNA (1)...(19): siRNA sense strand
acaauauaguucuuggaga

SEQ ID NO: 2314517 - RNA, 19 nt, Homo sapiens
  misc_RNA (1)...(19): siRNA sense strand
gcuaacaaaacuaggauuu

SEQ ID NO: 2314518 - RNA, 19 nt, Homo sapiens
  misc_RNA (1)...(19): siRNA sense strand
ggugcaagauacaaggcuu

SEQ ID NO: 2314519 - RNA, 19 nt, Homo sapiens
  misc_RNA (1)...(19): siRNA sense strand
ugggaagaagcaauggaaa

SEQ ID NO: 2314520 - RNA, 19 nt, Homo sapiens
  misc_RNA (1)...(19): siRNA sense strand
gagcauaccagcagugacu

SEQ ID NO: 2314521 - RNA, 19 nt, Homo sapiens
  misc_RNA (1)...(19): siRNA sense strand
agaaacuggcuuggaaaua

SEQ ID NO: 2314522 - RNA, 19 nt, Homo sapiens
  misc_RNA (1)...(19): siRNA sense strand
aagaggagacagaagaaga

SEQ ID NO: 2314523 - RNA, 19 nt, Homo sapiens
  misc_RNA (1)...(19): siRNA sense strand
gggagaaugaugaugaagu

SEQ ID NO: 2314524 - RNA, 19 nt, Homo sapiens
  misc_RNA (1)...(19): siRNA sense strand
agaagguuaucucaagaaa

SEQ ID NO: 2314525 - RNA, 19 nt, Homo sapiens
  misc_RNA (1)...(19): siRNA sense strand
uugaugauauggagagcau

SEQ ID NO: 2314526 - RNA, 19 nt, Homo sapiens
  misc_RNA (1)...(19): siRNA sense strand
uuggaaugcagaugagaau

SEQ ID NO: 2314527 - RNA, 19 nt, Homo sapiens
  misc_RNA (1)...(19): siRNA sense strand
aaagagaaugggauagaga

SEQ ID NO: 2314528 - RNA, 19 nt, Homo sapiens
  misc_RNA (1)...(19): siRNA sense strand
ugacucucuuggagcaaua

SEQ ID NO: 2314529 - RNA, 19 nt, Homo sapiens
  misc_RNA (1)...(19): siRNA sense strand
ucuuggagcaauaaacaaa

SEQ ID NO: 2314530 - RNA, 19 nt, Homo sapiens
  misc_RNA (1)...(19): siRNA sense strand
gucagaacauucaccgaaa

SEQ ID NO: 2314531 - RNA, 19 nt, Homo sapiens
  misc_RNA (1)...(19): siRNA sense strand
augccauauuagagaacau

SEQ ID NO: 2314532 - RNA, 19 nt, Homo sapiens
  misc_RNA (1)...(19): siRNA sense strand
acuccuguccugaaagaua

SEQ ID NO: 2314533 - RNA, 19 nt, Homo sapiens
  misc_RNA (1)...(19): siRNA sense strand
caagcaagugcaagucuaa

SEQ ID NO: 2314534 - RNA, 19 nt, Homo sapiens
  misc_RNA (1)...(19): siRNA sense strand
gggcuagggagaaugauga

SEQ ID NO: 2314535 - RNA, 19 nt, Homo sapiens
  misc_RNA (1)...(19): siRNA sense strand
aagcacaguggaagaauuu

SEQ ID NO: 2314536 - RNA, 19 nt, Homo sapiens
  misc_RNA (1)...(19): siRNA sense strand
gcacaguggaagaauuuca

SEQ ID NO: 2314537 - RNA, 19 nt, Homo sapiens
  misc_RNA (1)...(19): siRNA sense strand
ccuuacaaaugaauggcau

SEQ ID NO: 2314538 - RNA, 19 nt, Homo sapiens
  misc_RNA (1)...(19): siRNA sense strand
acgaagaagacuuaaagga

SEQ ID NO: 2314539 - RNA, 19 nt, Homo sapiens
  misc_RNA (1)...(19): siRNA sense strand
gaucaagaaauauggaaag

SEQ ID NO: 2314540 - RNA, 19 nt, Homo sapiens
  misc_RNA (1)...(19): siRNA sense strand
cagccaugcuccugggcaa

SEQ ID NO: 2314541 - RNA, 19 nt, Homo sapiens
  misc_RNA (1)...(19): siRNA sense strand
cugaagaagaugguggaua

SEQ ID NO: 2314542 - RNA, 19 nt, Homo sapiens
  misc_RNA (1)...(19): siRNA sense strand
gcagaaauuucaugaggag

SEQ ID NO: 2314543 - RNA, 19 nt, Homo sapiens
  misc_RNA (1)...(19): siRNA sense strand
ccucguggccggagaaacu

SEQ ID NO: 2314544 - RNA, 19 nt, Homo sapiens
  misc_RNA (1)...(19): siRNA sense strand
agaaauuucaugaggaggu

SEQ ID NO: 2314545 - RNA, 19 nt, Homo sapiens
  misc_RNA (1)...(19): siRNA sense strand
cugaagaagaugguggaua

SEQ ID NO: 2314546 - RNA, 19 nt, Homo sapiens
  misc_RNA (1)...(19): siRNA sense strand
gcagaaauuucaugaggag

SEQ ID NO: 2314547 - RNA, 19 nt, Homo sapiens
  misc_RNA (1)...(19): siRNA sense strand
ccucguggccggagaaacu

SEQ ID NO: 2314548 - RNA, 19 nt, Homo sapiens
  misc_RNA (1)...(19): siRNA sense strand
agaaauuucaugaggaggu

SEQ ID NO: 2314549 - RNA, 19 nt, Homo sapiens
  misc_RNA (1)...(19): siRNA sense strand
gagcagagaacaaggccaa

SEQ ID NO: 2314550 - RNA, 19 nt, Homo sapiens
  misc_RNA (1)...(19): siRNA sense strand
ggaaauggauaaaugguac

SEQ ID NO: 2314551 - RNA, 19 nt, Homo sapiens
  misc_RNA (1)...(19): siRNA sense strand
ggcacuacacagagaggaa

SEQ ID NO: 2314552 - RNA, 19 nt, Homo sapiens
  misc_RNA (1)...(19): siRNA sense strand
ggagaaagacauuacacca

SEQ ID NO: 2314553 - RNA, 19 nt, Homo sapiens
  misc_RNA (1)...(19): siRNA sense strand
ugggcugagcagagaacaa

SEQ ID NO: 2314554 - RNA, 19 nt, Homo sapiens
  misc_RNA (1)...(19): siRNA sense strand
guuccaaaucagauauaca

SEQ ID NO: 2314555 - RNA, 19 nt, Homo sapiens
  misc_RNA (1)...(19): siRNA sense strand
uggauaaaugguacugaau

SEQ ID NO: 2314556 - RNA, 19 nt, Homo sapiens
  misc_RNA (1)...(19): siRNA sense strand
acaucaagucagagguuuu

SEQ ID NO: 2314557 - RNA, 19 nt, Homo sapiens
  misc_RNA (1)...(19): siRNA sense strand
aaaugguacugaauggaca

SEQ ID NO: 2314558 - RNA, 19 nt, Homo sapiens
  misc_RNA (1)...(19): siRNA sense strand
gugaugacguccagggcua

SEQ ID NO: 2314559 - RNA, 19 nt, Homo sapiens
  misc_RNA (1)...(19): siRNA sense strand
uggccaagcugaaacgcaa

SEQ ID NO: 2314560 - RNA, 19 nt, Homo sapiens
  misc_RNA (1)...(19): siRNA sense strand
agagcaaagaggcggaaau

SEQ ID NO: 2314561 - RNA, 19 nt, Homo sapiens
  misc_RNA (1)...(19): siRNA sense strand
ucaacaaggaacuggccaa

SEQ ID NO: 2314562 - RNA, 19 nt, Homo sapiens
  misc_RNA (1)...(19): siRNA sense strand
cagaaguuacuaaggccaa

SEQ ID NO: 2314563 - RNA, 19 nt, Homo sapiens
  misc_RNA (1)...(19): siRNA sense strand
ugucggagaugcugcggua

SEQ ID NO: 2314564 - RNA, 19 nt, Homo sapiens
  misc_RNA (1)...(19): siRNA sense strand
ccuuggauggcuacaguaa

SEQ ID NO: 2314565 - RNA, 19 nt, Homo sapiens
  misc_RNA (1)...(19): siRNA sense strand
cagaaaaucuucaaagcca

SEQ ID NO: 2314566 - RNA, 19 nt, Homo sapiens
  misc_RNA (1)...(19): siRNA sense strand
ccauccuggccgagaagua

SEQ ID NO: 2314567 - RNA, 19 nt, Homo sapiens
  misc_RNA (1)...(19): siRNA sense strand
acauggaggcugugaaucu

SEQ ID NO: 2314568 - RNA, 19 nt, Homo sapiens
  misc_RNA (1)...(19): siRNA sense strand
caacaggaggcgcagaaaa

SEQ ID NO: 2314569 - RNA, 19 nt, Homo sapiens
  misc_RNA (1)...(19): siRNA sense strand
aaauacacagagaagcaaa

SEQ ID NO: 2314570 - RNA, 19 nt, Homo sapiens
  misc_RNA (1)...(19): siRNA sense strand
aagcagaucgugucggaga

SEQ ID NO: 2314571 - RNA, 19 nt, Homo sapiens
  misc_RNA (1)...(19): siRNA sense strand
uggugaagguuggcggcua

SEQ ID NO: 2314572 - RNA, 19 nt, Homo sapiens
  misc_RNA (1)...(19): siRNA sense strand
gcaacaagaccucggugca

SEQ ID NO: 2314573 - RNA, 19 nt, Homo sapiens
  misc_RNA (1)...(19): siRNA sense strand
cgggcgacuacgugaguga

SEQ ID NO: 2314574 - RNA, 19 nt, Homo sapiens
  misc_RNA (1)...(19): siRNA sense strand
agaaaaucuucaaagccaa

SEQ ID NO: 2314575 - RNA, 19 nt, Homo sapiens
  misc_RNA (1)...(19): siRNA sense strand
aggccaagcuucugggguu

SEQ ID NO: 2314576 - RNA, 19 nt, Homo sapiens
  misc_RNA (1)...(19): siRNA sense strand
gugaugacguccagggcua

SEQ ID NO: 2314577 - RNA, 19 nt, Homo sapiens
  misc_RNA (1)...(19): siRNA sense strand
uggccaagcugaaacgcaa

SEQ ID NO: 2314578 - RNA, 19 nt, Homo sapiens
  misc_RNA (1)...(19): siRNA sense strand
agagcaaagaggcggaaau

SEQ ID NO: 2314579 - RNA, 19 nt, Homo sapiens
  misc_RNA (1)...(19): siRNA sense strand
ucaacaaggaacuggccaa

SEQ ID NO: 2314580 - RNA, 19 nt, Homo sapiens
  misc_RNA (1)...(19): siRNA sense strand
cagaaguuacuaaggccaa

SEQ ID NO: 2314581 - RNA, 19 nt, Homo sapiens
  misc_RNA (1)...(19): siRNA sense strand
ugucggagaugcugcggua

SEQ ID NO: 2314582 - RNA, 19 nt, Homo sapiens
  misc_RNA (1)...(19): siRNA sense strand
ccuuggauggcuacaguaa

SEQ ID NO: 2314583 - RNA, 19 nt, Homo sapiens
  misc_RNA (1)...(19): siRNA sense strand
cagaaaaucuucaaagcca

SEQ ID NO: 2314584 - RNA, 19 nt, Homo sapiens
  misc_RNA (1)...(19): siRNA sense strand
ccauccuggccgagaagua

SEQ ID NO: 2314585 - RNA, 19 nt, Homo sapiens
  misc_RNA (1)...(19): siRNA sense strand
acauggaggcugugaaucu

SEQ ID NO: 2314586 - RNA, 19 nt, Homo sapiens
  misc_RNA (1)...(19): siRNA sense strand
caacaggaggcgcagaaaa

SEQ ID NO: 2314587 - RNA, 19 nt, Homo sapiens
  misc_RNA (1)...(19): siRNA sense strand
aaauacacagagaagcaaa

SEQ ID NO: 2314588 - RNA, 19 nt, Homo sapiens
  misc_RNA (1)...(19): siRNA sense strand
aagcagaucgugucggaga

SEQ ID NO: 2314589 - RNA, 19 nt, Homo sapiens
  misc_RNA (1)...(19): siRNA sense strand
uggugaagguuggcggcua

SEQ ID NO: 2314590 - RNA, 19 nt, Homo sapiens
  misc_RNA (1)...(19): siRNA sense strand
gcaacaagaccucggugca

SEQ ID NO: 2314591 - RNA, 19 nt, Homo sapiens
  misc_RNA (1)...(19): siRNA sense strand
cgggcgacuacgugaguga

SEQ ID NO: 2314592 - RNA, 19 nt, Homo sapiens
  misc_RNA (1)...(19): siRNA sense strand
agaaaaucuucaaagccaa

SEQ ID NO: 2314593 - RNA, 19 nt, Homo sapiens
  misc_RNA (1)...(19): siRNA sense strand
aggccaagcuucugggguu

SEQ ID NO: 2314594 - RNA, 19 nt, Homo sapiens
  misc_RNA (1)...(19): siRNA sense strand
ggguaauacaagugaaaua

SEQ ID NO: 2314595 - RNA, 19 nt, Homo sapiens
  misc_RNA (1)...(19): siRNA sense strand
ccaaagaaucagagacaca

SEQ ID NO: 2314596 - RNA, 19 nt, Homo sapiens
  misc_RNA (1)...(19): siRNA sense strand
agacaguggcaaagguaaa

SEQ ID NO: 2314597 - RNA, 19 nt, Homo sapiens
  misc_RNA (1)...(19): siRNA sense strand
gggccaggaccaugggaaa

SEQ ID NO: 2314598 - RNA, 19 nt, Homo sapiens
  misc_RNA (1)...(19): siRNA sense strand
ucacaagggagaagggaau

SEQ ID NO: 2314599 - RNA, 19 nt, Homo sapiens
  misc_RNA (1)...(19): siRNA sense strand
guaaagaggauaaaggaca

SEQ ID NO: 2314600 - RNA, 19 nt, Homo sapiens
  misc_RNA (1)...(19): siRNA sense strand
gggcagaaguaggagggaa

SEQ ID NO: 2314601 - RNA, 19 nt, Homo sapiens
  misc_RNA (1)...(19): siRNA sense strand
caguacaggaugaguuaaa

SEQ ID NO: 2314602 - RNA, 19 nt, Homo sapiens
  misc_RNA (1)...(19): siRNA sense strand
ugacaaugcuggagccaca

SEQ ID NO: 2314603 - RNA, 19 nt, Homo sapiens
  misc_RNA (1)...(19): siRNA sense strand
agaugaagaagcagggaau

SEQ ID NO: 2314604 - RNA, 19 nt, Homo sapiens
  misc_RNA (1)...(19): siRNA sense strand
ugauggaauacaugggaaa

SEQ ID NO: 2314605 - RNA, 19 nt, Homo sapiens
  misc_RNA (1)...(19): siRNA sense strand
agaucaacagcaagagaaa

SEQ ID NO: 2314606 - RNA, 19 nt, Homo sapiens
  misc_RNA (1)...(19): siRNA sense strand
acgaagguaaagaggauaa

SEQ ID NO: 2314607 - RNA, 19 nt, Homo sapiens
  misc_RNA (1)...(19): siRNA sense strand
ccuguagaaacgaggguaa

SEQ ID NO: 2314608 - RNA, 19 nt, Homo sapiens
  misc_RNA (1)...(19): siRNA sense strand
aauaguaacagcagcgaua

SEQ ID NO: 2314609 - RNA, 19 nt, Homo sapiens
  misc_RNA (1)...(19): siRNA sense strand
aagcucaaccauagagaaa

SEQ ID NO: 2314610 - RNA, 19 nt, Homo sapiens
  misc_RNA (1)...(19): siRNA sense strand
gaggguaauacaagugaaa

SEQ ID NO: 2314611 - RNA, 19 nt, Homo sapiens
  misc_RNA (1)...(19): siRNA sense strand
gaaugaugacaaugacaaa

SEQ ID NO: 2314612 - RNA, 19 nt, Homo sapiens
  misc_RNA (1)...(19): siRNA sense strand
aagcaacacuaauggaaau

SEQ ID NO: 2314613 - RNA, 19 nt, Homo sapiens
  misc_RNA (1)...(19): siRNA sense strand
auggaaugaucuugggcaa

SEQ ID NO: 2314614 - RNA, 19 nt, Homo sapiens
  misc_RNA (1)...(19): siRNA sense strand
auaaugaaguugauggaga

SEQ ID NO: 2314615 - RNA, 19 nt, Homo sapiens
  misc_RNA (1)...(19): siRNA sense strand
caccaaagaaucagagaca

SEQ ID NO: 2314616 - RNA, 19 nt, Homo sapiens
  misc_RNA (1)...(19): siRNA sense strand
cagcaguagccgaggagau

SEQ ID NO: 2314617 - RNA, 19 nt, Homo sapiens
  misc_RNA (1)...(19): siRNA sense strand
caggaaaagcagaaacaua

SEQ ID NO: 2314618 - RNA, 19 nt, Homo sapiens
  misc_RNA (1)...(19): siRNA sense strand
ugauaguagcauaggucaa

SEQ ID NO: 2314619 - RNA, 19 nt, Homo sapiens
  misc_RNA (1)...(19): siRNA sense strand
gagaaaugggacuaaggaa

SEQ ID NO: 2314620 - RNA, 19 nt, Homo sapiens
  misc_RNA (1)...(19): siRNA sense strand
cagaagaugaugacaguga

SEQ ID NO: 2314621 - RNA, 19 nt, Homo sapiens
  misc_RNA (1)...(19): siRNA sense strand
aagcaaacgcguagaaaau

SEQ ID NO: 2314622 - RNA, 19 nt, Homo sapiens
  misc_RNA (1)...(19): siRNA sense strand
cauagaaggaccuggccaa

SEQ ID NO: 2314623 - RNA, 19 nt, Homo sapiens
  misc_RNA (1)...(19): siRNA sense strand
ggcaaagguaaaucagaua

SEQ ID NO: 2314624 - RNA, 19 nt, Homo sapiens
  misc_RNA (1)...(19): siRNA sense strand
gcagcaaaucagagagcga

SEQ ID NO: 2314625 - RNA, 19 nt, Homo sapiens
  misc_RNA (1)...(19): siRNA sense strand
caugaaggugauagaggaa

SEQ ID NO: 2314626 - RNA, 19 nt, Homo sapiens
  misc_RNA (1)...(19): siRNA sense strand
ccacauuagcaaacgaaga

SEQ ID NO: 2314627 - RNA, 19 nt, Homo sapiens
  misc_RNA (1)...(19): siRNA sense strand
ugggaguccuagugggaau

SEQ ID NO: 2314628 - RNA, 19 nt, Homo sapiens
  misc_RNA (1)...(19): siRNA sense strand
gcaugaaggugauagagga

SEQ ID NO: 2314629 - RNA, 19 nt, Homo sapiens
  misc_RNA (1)...(19): siRNA sense strand
uggcaaugaugaugcuaau

SEQ ID NO: 2314630 - RNA, 19 nt, Homo sapiens
  misc_RNA (1)...(19): siRNA sense strand
uagcaaacgaagaggggaa

SEQ ID NO: 2314631 - RNA, 19 nt, Homo sapiens
  misc_RNA (1)...(19): siRNA sense strand
gaagaaaacaucacagcaa

SEQ ID NO: 2314632 - RNA, 19 nt, Homo sapiens
  misc_RNA (1)...(19): siRNA sense strand
ggauaauuccgaugggagu

SEQ ID NO: 2314633 - RNA, 19 nt, Homo sapiens
  misc_RNA (1)...(19): siRNA sense strand
ugaugaaucuaauggcaau

SEQ ID NO: 2314634 - RNA, 19 nt, Homo sapiens
  misc_RNA (1)...(19): siRNA sense strand
aguagugacagcagcgaua

SEQ ID NO: 2314635 - RNA, 19 nt, Homo sapiens
  misc_RNA (1)...(19): siRNA sense strand
aguagugacagcagcgaua

SEQ ID NO: 2314636 - RNA, 19 nt, Homo sapiens
  misc_RNA (1)...(19): siRNA sense strand
caguaauaguagugacaac

SEQ ID NO: 2314637 - RNA, 19 nt, Homo sapiens
  misc_RNA (1)...(19): siRNA sense strand
uggcaaagguaaaucagau

SEQ ID NO: 2314638 - RNA, 19 nt, Homo sapiens
  misc_RNA (1)...(19): siRNA sense strand
caacaauggaagugacagu

SEQ ID NO: 2314639 - RNA, 19 nt, Homo sapiens
  misc_RNA (1)...(19): siRNA sense strand
gugaaggcagugacaguaa

SEQ ID NO: 2314640 - RNA, 19 nt, Homo sapiens
  misc_RNA (1)...(19): siRNA sense strand
cagcaauagcagugauagu

SEQ ID NO: 2314641 - RNA, 19 nt, Homo sapiens
  misc_RNA (1)...(19): siRNA sense strand
aguagugacagcagugaua

SEQ ID NO: 2314642 - RNA, 19 nt, Homo sapiens
  misc_RNA (1)...(19): siRNA sense strand
aguagugacaacagugaua

SEQ ID NO: 2314643 - RNA, 19 nt, Homo sapiens
  misc_RNA (1)...(19): siRNA sense strand
aguagugacagcagugaua

SEQ ID NO: 2314644 - RNA, 19 nt, Homo sapiens
  misc_RNA (1)...(19): siRNA sense strand
aguagugacagcagcaaua

SEQ ID NO: 2314645 - RNA, 19 nt, Homo sapiens
  misc_RNA (1)...(19): siRNA sense strand
aguagugacagcagugaua

SEQ ID NO: 2314646 - RNA, 19 nt, Homo sapiens
  misc_RNA (1)...(19): siRNA sense strand
aguagugacaacagcaaua

SEQ ID NO: 2314647 - RNA, 19 nt, Homo sapiens
  misc_RNA (1)...(19): siRNA sense strand
aguagugacagcagcaaua

SEQ ID NO: 2314648 - RNA, 19 nt, Homo sapiens
  misc_RNA (1)...(19): siRNA sense strand
gaguuaaaugccaguggaa

SEQ ID NO: 2314649 - RNA, 19 nt, Homo sapiens
  misc_RNA (1)...(19): siRNA sense strand
uagaggaaggcaagagaau

SEQ ID NO: 2314650 - RNA, 19 nt, Homo sapiens
  misc_RNA (1)...(19): siRNA sense strand
cagacaaugaggaugaaau

SEQ ID NO: 2314651 - RNA, 19 nt, Homo sapiens
  misc_RNA (1)...(19): siRNA sense strand
ccucagaucaacagcaaga

SEQ ID NO: 2314652 - RNA, 19 nt, Homo sapiens
  misc_RNA (1)...(19): siRNA sense strand
agauaagggaauagaaauc

SEQ ID NO: 2314653 - RNA, 19 nt, Homo sapiens
  misc_RNA (1)...(19): siRNA sense strand
caaauggcauccagggaca

SEQ ID NO: 2314654 - RNA, 19 nt, Homo sapiens
  misc_RNA (1)...(19): siRNA sense strand
ugaucaugauaguagcaua

SEQ ID NO: 2314655 - RNA, 19 nt, Homo sapiens
  misc_RNA (1)...(19): siRNA sense strand
gugauggauaugacaguua

SEQ ID NO: 2314656 - RNA, 19 nt, Homo sapiens
  misc_RNA (1)...(19): siRNA sense strand
uggcaauggcagugacuca

SEQ ID NO: 2314657 - RNA, 19 nt, Homo sapiens
  misc_RNA (1)...(19): siRNA sense strand
aguagugacagcaguaaua

SEQ ID NO: 2314658 - RNA, 19 nt, Homo sapiens
  misc_RNA (1)...(19): siRNA sense strand
aaauaacaccucagaucaa

SEQ ID NO: 2314659 - RNA, 19 nt, Homo sapiens
  misc_RNA (1)...(19): siRNA sense strand
caaccauagagaaagcaaa

SEQ ID NO: 2314660 - RNA, 19 nt, Homo sapiens
  misc_RNA (1)...(19): siRNA sense strand
gaggaaggcaagagaauac

SEQ ID NO: 2314661 - RNA, 19 nt, Homo sapiens
  misc_RNA (1)...(19): siRNA sense strand
aguggaaccaucaaagaaa

SEQ ID NO: 2314662 - RNA, 19 nt, Homo sapiens
  misc_RNA (1)...(19): siRNA sense strand
augaagucacugugggaaa

SEQ ID NO: 2314663 - RNA, 19 nt, Homo sapiens
  misc_RNA (1)...(19): siRNA sense strand
aaguagaagaagucaguau

SEQ ID NO: 2314664 - RNA, 19 nt, Homo sapiens
  misc_RNA (1)...(19): siRNA sense strand
cuagcauuucagagaguaa

SEQ ID NO: 2314665 - RNA, 19 nt, Homo sapiens
  misc_RNA (1)...(19): siRNA sense strand
auugaaauuuccagcgaca

SEQ ID NO: 2314666 - RNA, 19 nt, Homo sapiens
  misc_RNA (1)...(19): siRNA sense strand
ggcugguguuugaaggcaa

SEQ ID NO: 2314667 - RNA, 19 nt, Homo sapiens
  misc_RNA (1)...(19): siRNA sense strand
cuguaugcccucagaauca

SEQ ID NO: 2314668 - RNA, 19 nt, Homo sapiens
  misc_RNA (1)...(19): siRNA sense strand
gcagcaggagacaggaaau

SEQ ID NO: 2314669 - RNA, 19 nt, Homo sapiens
  misc_RNA (1)...(19): siRNA sense strand
cagagaguaacauggacua

SEQ ID NO: 2314670 - RNA, 19 nt, Homo sapiens
  misc_RNA (1)...(19): siRNA sense strand
auggaaaugauguggaguu

SEQ ID NO: 2314671 - RNA, 19 nt, Homo sapiens
  misc_RNA (1)...(19): siRNA sense strand
aguuugagcuucggaggaa

SEQ ID NO: 2314672 - RNA, 19 nt, Homo sapiens
  misc_RNA (1)...(19): siRNA sense strand
gcauugaaauuuccagcga

SEQ ID NO: 2314673 - RNA, 19 nt, Homo sapiens
  misc_RNA (1)...(19): siRNA sense strand
cagcaggagacaggaaauu

SEQ ID NO: 2314674 - RNA, 19 nt, Homo sapiens
  misc_RNA (1)...(19): siRNA sense strand
aguacaccauagagcggua

SEQ ID NO: 2314675 - RNA, 19 nt, Homo sapiens
  misc_RNA (1)...(19): siRNA sense strand
cugcuuuagcuuuguguuu

SEQ ID NO: 2314676 - RNA, 19 nt, Homo sapiens
  misc_RNA (1)...(19): siRNA sense strand
ccaugaagucacuguggga

SEQ ID NO: 2314677 - RNA, 19 nt, Homo sapiens
  misc_RNA (1)...(19): siRNA sense strand
cgcugaaggaggaggagaa

SEQ ID NO: 2314678 - RNA, 19 nt, Homo sapiens
  misc_RNA (1)...(19): siRNA sense strand
cguaggaugaaaaugaaaa

SEQ ID NO: 2314679 - RNA, 19 nt, Homo sapiens
  misc_RNA (1)...(19): siRNA sense strand
gcuacaaccuggagccaca

SEQ ID NO: 2314680 - RNA, 19 nt, Homo sapiens
  misc_RNA (1)...(19): siRNA sense strand
ccguaauagcagcagcaua

SEQ ID NO: 2314681 - RNA, 19 nt, Homo sapiens
  misc_RNA (1)...(19): siRNA sense strand
ucgagauccaggaggacaa

SEQ ID NO: 2314682 - RNA, 19 nt, Homo sapiens
  misc_RNA (1)...(19): siRNA sense strand
cggcaagaagagaaacaga

SEQ ID NO: 2314683 - RNA, 19 nt, Homo sapiens
  misc_RNA (1)...(19): siRNA sense strand
agacagacuauuaccgcaa

SEQ ID NO: 2314684 - RNA, 19 nt, Homo sapiens
  misc_RNA (1)...(19): siRNA sense strand
ccuaaagagugcaagguag

SEQ ID NO: 2314685 - RNA, 19 nt, Homo sapiens
  misc_RNA (1)...(19): siRNA sense strand
gggacguguaugagacaga

SEQ ID NO: 2314686 - RNA, 19 nt, Homo sapiens
  misc_RNA (1)...(19): siRNA sense strand
ucaccauucccgugggcaa

SEQ ID NO: 2314687 - RNA, 19 nt, Homo sapiens
  misc_RNA (1)...(19): siRNA sense strand
ccaacgugacggaggcaga

SEQ ID NO: 2314688 - RNA, 19 nt, Homo sapiens
  misc_RNA (1)...(19): siRNA sense strand
gcacgcauguggagggaag

SEQ ID NO: 2314689 - RNA, 19 nt, Homo sapiens
  misc_RNA (1)...(19): siRNA sense strand
uggcaauggcucuuggaca

SEQ ID NO: 2314690 - RNA, 19 nt, Homo sapiens
  misc_RNA (1)...(19): siRNA sense strand
ucuacggcaagaagagaaa

SEQ ID NO: 2314691 - RNA, 19 nt, Homo sapiens
  misc_RNA (1)...(19): siRNA sense strand
aggccucguuccagaagaa

SEQ ID NO: 2314692 - RNA, 19 nt, Homo sapiens
  misc_RNA (1)...(19): siRNA sense strand
cagcaagaacaguguccuu

SEQ ID NO: 2314693 - RNA, 19 nt, Homo sapiens
  misc_RNA (1)...(19): siRNA sense strand
cugugaauccagaguacuu

SEQ ID NO: 2314694 - RNA, 19 nt, Homo sapiens
  misc_RNA (1)...(19): siRNA sense strand
guuugugcaccgagaucua

SEQ ID NO: 2314695 - RNA, 19 nt, Homo sapiens
  misc_RNA (1)...(19): siRNA sense strand
gcaacaagcugggcgagga

SEQ ID NO: 2314696 - RNA, 19 nt, Homo sapiens
  misc_RNA (1)...(19): siRNA sense strand
ggacagacaguguugccuu

SEQ ID NO: 2314697 - RNA, 19 nt, Homo sapiens
  misc_RNA (1)...(19): siRNA sense strand
ccaccgaugcagagccuga

SEQ ID NO: 2314698 - RNA, 19 nt, Homo sapiens
  misc_RNA (1)...(19): siRNA sense strand
uuccagaagaaguuugaaa

SEQ ID NO: 2314699 - RNA, 19 nt, Homo sapiens
  misc_RNA (1)...(19): siRNA sense strand
acggaauaccggaucgaca

SEQ ID NO: 2314700 - RNA, 19 nt, Homo sapiens
  misc_RNA (1)...(19): siRNA sense strand
ggcaauggcucuuggacag

SEQ ID NO: 2314701 - RNA, 19 nt, Homo sapiens
  misc_RNA (1)...(19): siRNA sense strand
cugugcguguggagaagaa

SEQ ID NO: 2314702 - RNA, 19 nt, Homo sapiens
  misc_RNA (1)...(19): siRNA sense strand
caaaagaagaggugggaga

SEQ ID NO: 2314703 - RNA, 19 nt, Homo sapiens
  misc_RNA (1)...(19): siRNA sense strand
aggaauugccaaaguggaa

SEQ ID NO: 2314704 - RNA, 19 nt, Homo sapiens
  misc_RNA (1)...(19): siRNA sense strand
uggaaaaggaauugccaaa

SEQ ID NO: 2314705 - RNA, 19 nt, Homo sapiens
  misc_RNA (1)...(19): siRNA sense strand
gcucagaacuccaaaccga

SEQ ID NO: 2314706 - RNA, 19 nt, Homo sapiens
  misc_RNA (1)...(19): siRNA sense strand
caaccauaggauuuggaaa

SEQ ID NO: 2314707 - RNA, 19 nt, Homo sapiens
  misc_RNA (1)...(19): siRNA sense strand
aaauaguggcagcaauaaa

SEQ ID NO: 2314708 - RNA, 19 nt, Homo sapiens
  misc_RNA (1)...(19): siRNA sense strand
acgcacagaaggcggcaaa

SEQ ID NO: 2314709 - RNA, 19 nt, Homo sapiens
  misc_RNA (1)...(19): siRNA sense strand
agauuggcuccgagugaua

SEQ ID NO: 2314710 - RNA, 19 nt, Homo sapiens
  misc_RNA (1)...(19): siRNA sense strand
cugugcuggugaagagauu

SEQ ID NO: 2314711 - RNA, 19 nt, Homo sapiens
  misc_RNA (1)...(19): siRNA sense strand
ccauugugauccagaagca

SEQ ID NO: 2314712 - RNA, 19 nt, Homo sapiens
  misc_RNA (1)...(19): siRNA sense strand
ccaaaguggaagauacguu

SEQ ID NO: 2314713 - RNA, 19 nt, Homo sapiens
  misc_RNA (1)...(19): siRNA sense strand
cuucccggguggagaguga

SEQ ID NO: 2314714 - RNA, 19 nt, Homo sapiens
  misc_RNA (1)...(19): siRNA sense strand
uugcugugauugagaacau

SEQ ID NO: 2314715 - RNA, 19 nt, Homo sapiens
  misc_RNA (1)...(19): siRNA sense strand
ccucaugagauuucacaga

SEQ ID NO: 2314716 - RNA, 19 nt, Homo sapiens
  misc_RNA (1)...(19): siRNA sense strand
gagauuucacagaggacca

SEQ ID NO: 2314717 - RNA, 19 nt, Homo sapiens
  misc_RNA (1)...(19): siRNA sense strand
ccaacauuccugugucaau

SEQ ID NO: 2314718 - RNA, 19 nt, Homo sapiens
  misc_RNA (1)...(19): siRNA sense strand
agcaaauaguggcagcaau

SEQ ID NO: 2314719 - RNA, 19 nt, Homo sapiens
  misc_RNA (1)...(19): siRNA sense strand
gcuccgagugauaucuaaa

SEQ ID NO: 2314720 - RNA, 19 nt, Homo sapiens
  misc_RNA (1)...(19): siRNA sense strand
cagcaauaaaugcagggau

SEQ ID NO: 2314721 - RNA, 19 nt, Homo sapiens
  misc_RNA (1)...(19): siRNA sense strand
cgaucauauucaaacacau

SEQ ID NO: 2314722 - RNA, 19 nt, Homo sapiens
  misc_RNA (1)...(19): siRNA sense strand
acacauagaaggcuggagu

SEQ ID NO: 2314723 - RNA, 19 nt, Homo sapiens
  misc_RNA (1)...(19): siRNA sense strand
ccaugaaaacuguggcaaa

SEQ ID NO: 2314724 - RNA, 19 nt, Homo sapiens
  misc_RNA (1)...(19): siRNA sense strand
acaaaguaugccuccgaaa

SEQ ID NO: 2314725 - RNA, 19 nt, Homo sapiens
  misc_RNA (1)...(19): siRNA sense strand
uggcuuagcagaaggacca

SEQ ID NO: 2314726 - RNA, 19 nt, Homo sapiens
  misc_RNA (1)...(19): siRNA sense strand
uggcaaacgaugugcgaug

SEQ ID NO: 2314727 - RNA, 19 nt, Homo sapiens
  misc_RNA (1)...(19): siRNA sense strand
ccucuuggcucuuggugga

SEQ ID NO: 2314728 - RNA, 19 nt, Homo sapiens
  misc_RNA (1)...(19): siRNA sense strand
ccacaugguccgagugcac

SEQ ID NO: 2314729 - RNA, 19 nt, Homo sapiens
  misc_RNA (1)...(19): siRNA sense strand
ugaaaguagaugaggugaa

SEQ ID NO: 2314730 - RNA, 19 nt, Homo sapiens
  misc_RNA (1)...(19): siRNA sense strand
gguguuuagaggaaggcaa

SEQ ID NO: 2314731 - RNA, 19 nt, Homo sapiens
  misc_RNA (1)...(19): siRNA sense strand
ggagaacugucaaagguca

SEQ ID NO: 2314732 - RNA, 19 nt, Homo sapiens
  misc_RNA (1)...(19): siRNA sense strand
acgagugugugcuggacaa

SEQ ID NO: 2314733 - RNA, 19 nt, Homo sapiens
  misc_RNA (1)...(19): siRNA sense strand
aaguagaugaggugaaaau

SEQ ID NO: 2314734 - RNA, 19 nt, Homo sapiens
  misc_RNA (1)...(19): siRNA sense strand
gagaaagauccgaggcggu

SEQ ID NO: 2314735 - RNA, 19 nt, Homo sapiens
  misc_RNA (1)...(19): siRNA sense strand
gucgcaaacagcaggcaaa

SEQ ID NO: 2314736 - RNA, 19 nt, Homo sapiens
  misc_RNA (1)...(19): siRNA sense strand
aggaaggcaaacuggucaa

SEQ ID NO: 2314737 - RNA, 19 nt, Homo sapiens
  misc_RNA (1)...(19): siRNA sense strand
ggacagaccaugcagguga

SEQ ID NO: 2314738 - RNA, 19 nt, Homo sapiens
  misc_RNA (1)...(19): siRNA sense strand
ugacaaugcagguuggaga

SEQ ID NO: 2314739 - RNA, 19 nt, Homo sapiens
  misc_RNA (1)...(19): siRNA sense strand
ccggaauuuaacagugaaa

SEQ ID NO: 2314740 - RNA, 19 nt, Homo sapiens
  misc_RNA (1)...(19): siRNA sense strand
uggaugaagaugugaagau

SEQ ID NO: 2314741 - RNA, 19 nt, Homo sapiens
  misc_RNA (1)...(19): siRNA sense strand
gccacagggucaagcccaa

SEQ ID NO: 2314742 - RNA, 19 nt, Homo sapiens
  misc_RNA (1)...(19): siRNA sense strand
caacaggcccagaguggca

SEQ ID NO: 2314743 - RNA, 19 nt, Homo sapiens
  misc_RNA (1)...(19): siRNA sense strand
cucaaguugugcagggaca

SEQ ID NO: 2314744 - RNA, 19 nt, Homo sapiens
  misc_RNA (1)...(19): siRNA sense strand
gcucaacagauuacacaga

SEQ ID NO: 2314745 - RNA, 19 nt, Homo sapiens
  misc_RNA (1)...(19): siRNA sense strand
agauuaugaaacuggauga

SEQ ID NO: 2314746 - RNA, 19 nt, Homo sapiens
  misc_RNA (1)...(19): siRNA sense strand
ucaacagauuacacagaca

SEQ ID NO: 2314747 - RNA, 19 nt, Homo sapiens
  misc_RNA (1)...(19): siRNA sense strand
agacagagguccagcaagg

SEQ ID NO: 2314748 - RNA, 19 nt, Homo sapiens
  misc_RNA (1)...(19): siRNA sense strand
cagcaaggccagcagacca

SEQ ID NO: 2314749 - RNA, 19 nt, Homo sapiens
  misc_RNA (1)...(19): siRNA sense strand
ccaucgagguggaccguga

SEQ ID NO: 2314750 - RNA, 19 nt, Homo sapiens
  misc_RNA (1)...(19): siRNA sense strand
ggcugaugguggugguuau

SEQ ID NO: 2314751 - RNA, 19 nt, Homo sapiens
  misc_RNA (1)...(19): siRNA sense strand
gcuucugacucucggccua

SEQ ID NO: 2314752 - RNA, 19 nt, Homo sapiens
  misc_RNA (1)...(19): siRNA sense strand
cuggaugacuacagcgcca

SEQ ID NO: 2314753 - RNA, 19 nt, Homo sapiens
  misc_RNA (1)...(19): siRNA sense strand
gugagauugcagaggagga

SEQ ID NO: 2314754 - RNA, 19 nt, Homo sapiens
  misc_RNA (1)...(19): siRNA sense strand
cugccaagcuaaagaggaa

SEQ ID NO: 2314755 - RNA, 19 nt, Homo sapiens
  misc_RNA (1)...(19): siRNA sense strand
aggaaguauugguggaaaa

SEQ ID NO: 2314756 - RNA, 19 nt, Homo sapiens
  misc_RNA (1)...(19): siRNA sense strand
aggcacaaguggaggaggu

SEQ ID NO: 2314757 - RNA, 19 nt, Homo sapiens
  misc_RNA (1)...(19): siRNA sense strand
acaagguccuggagaggga

SEQ ID NO: 2314758 - RNA, 19 nt, Homo sapiens
  misc_RNA (1)...(19): siRNA sense strand
caucacaauuugagagcag

SEQ ID NO: 2314759 - RNA, 19 nt, Homo sapiens
  misc_RNA (1)...(19): siRNA sense strand
aagaggaaguauuggugga

SEQ ID NO: 2314760 - RNA, 19 nt, Homo sapiens
  misc_RNA (1)...(19): siRNA sense strand
ccaucaucgugguaguuau

SEQ ID NO: 2314761 - RNA, 19 nt, Homo sapiens
  misc_RNA (1)...(19): siRNA sense strand
ccuaacaugaccaguaaca

SEQ ID NO: 2314762 - RNA, 19 nt, Homo sapiens
  misc_RNA (1)...(19): siRNA sense strand
cugccaagcuaaagaggaa

SEQ ID NO: 2314763 - RNA, 19 nt, Homo sapiens
  misc_RNA (1)...(19): siRNA sense strand
aggaaguauugguggaaaa

SEQ ID NO: 2314764 - RNA, 19 nt, Homo sapiens
  misc_RNA (1)...(19): siRNA sense strand
aggcacaaguggaggaggu

SEQ ID NO: 2314765 - RNA, 19 nt, Homo sapiens
  misc_RNA (1)...(19): siRNA sense strand
acaagguccuggagaggga

SEQ ID NO: 2314766 - RNA, 19 nt, Homo sapiens
  misc_RNA (1)...(19): siRNA sense strand
caucacaauuugagagcag

SEQ ID NO: 2314767 - RNA, 19 nt, Homo sapiens
  misc_RNA (1)...(19): siRNA sense strand
aagaggaaguauuggugga

SEQ ID NO: 2314768 - RNA, 19 nt, Homo sapiens
  misc_RNA (1)...(19): siRNA sense strand
ccaucaucgugguaguuau

SEQ ID NO: 2314769 - RNA, 19 nt, Homo sapiens
  misc_RNA (1)...(19): siRNA sense strand
ccuaacaugaccaguaaca

SEQ ID NO: 2314770 - RNA, 19 nt, Homo sapiens
  misc_RNA (1)...(19): siRNA sense strand
cugccaagcuaaagaggaa

SEQ ID NO: 2314771 - RNA, 19 nt, Homo sapiens
  misc_RNA (1)...(19): siRNA sense strand
aggaaguauugguggaaaa

SEQ ID NO: 2314772 - RNA, 19 nt, Homo sapiens
  misc_RNA (1)...(19): siRNA sense strand
aggcacaaguggaggaggu

SEQ ID NO: 2314773 - RNA, 19 nt, Homo sapiens
  misc_RNA (1)...(19): siRNA sense strand
acaagguccuggagaggga

SEQ ID NO: 2314774 - RNA, 19 nt, Homo sapiens
  misc_RNA (1)...(19): siRNA sense strand
caucacaauuugagagcag

SEQ ID NO: 2314775 - RNA, 19 nt, Homo sapiens
  misc_RNA (1)...(19): siRNA sense strand
aagaggaaguauuggugga

SEQ ID NO: 2314776 - RNA, 19 nt, Homo sapiens
  misc_RNA (1)...(19): siRNA sense strand
ccaucaucgugguaguuau

SEQ ID NO: 2314777 - RNA, 19 nt, Homo sapiens
  misc_RNA (1)...(19): siRNA sense strand
ccuaacaugaccaguaaca

SEQ ID NO: 2314778 - RNA, 19 nt, Homo sapiens
  misc_RNA (1)...(19): siRNA sense strand
cagccaagcucaagcgcaa

SEQ ID NO: 2314779 - RNA, 19 nt, Homo sapiens
  misc_RNA (1)...(19): siRNA sense strand
cgcaaauacugguggaaaa

SEQ ID NO: 2314780 - RNA, 19 nt, Homo sapiens
  misc_RNA (1)...(19): siRNA sense strand
acaagguccuggagcgaga

SEQ ID NO: 2314781 - RNA, 19 nt, Homo sapiens
  misc_RNA (1)...(19): siRNA sense strand
guggacaucaugaggguga

SEQ ID NO: 2314782 - RNA, 19 nt, Homo sapiens
  misc_RNA (1)...(19): siRNA sense strand
ugagggugaacguggacaa

SEQ ID NO: 2314783 - RNA, 19 nt, Homo sapiens
  misc_RNA (1)...(19): siRNA sense strand
augcaaagggaaagggaua

SEQ ID NO: 2314784 - RNA, 19 nt, Homo sapiens
  misc_RNA (1)...(19): siRNA sense strand
ggauauaacuguaaugcca

SEQ ID NO: 2314785 - RNA, 19 nt, Homo sapiens
  misc_RNA (1)...(19): siRNA sense strand
cauuacaauugauggacaa

SEQ ID NO: 2314786 - RNA, 19 nt, Homo sapiens
  misc_RNA (1)...(19): siRNA sense strand
cacaaaaugcaaagggaaa

SEQ ID NO: 2314787 - RNA, 19 nt, Homo sapiens
  misc_RNA (1)...(19): siRNA sense strand
ccacggaagauuaagucaa

SEQ ID NO: 2314788 - RNA, 19 nt, Homo sapiens
  misc_RNA (1)...(19): siRNA sense strand
ccacaaaaugcaaagggaa

SEQ ID NO: 2314789 - RNA, 19 nt, Homo sapiens
  misc_RNA (1)...(19): siRNA sense strand
uagaaagaguauugaucca

SEQ ID NO: 2314790 - RNA, 19 nt, Homo sapiens
  misc_RNA (1)...(19): siRNA sense strand
guaaauaaaaccugcagaa

SEQ ID NO: 2314791 - RNA, 19 nt, Homo sapiens
  misc_RNA (1)...(19): siRNA sense strand
ugccagugguagaaagauu

SEQ ID NO: 2314792 - RNA, 19 nt, Homo sapiens
  misc_RNA (1)...(19): siRNA sense strand
ggauguucucuguggaaaa

SEQ ID NO: 2314793 - RNA, 19 nt, Homo sapiens
  misc_RNA (1)...(19): siRNA sense strand
guaguauugaugauggaaa

SEQ ID NO: 2314794 - RNA, 19 nt, Homo sapiens
  misc_RNA (1)...(19): siRNA sense strand
aagcuaugaugcagguauu

SEQ ID NO: 2314795 - RNA, 19 nt, Homo sapiens
  misc_RNA (1)...(19): siRNA sense strand
augcagaguauaaucguaa

SEQ ID NO: 2314796 - RNA, 19 nt, Homo sapiens
  misc_RNA (1)...(19): siRNA sense strand
uggaauugaaccaguagaa

SEQ ID NO: 2314797 - RNA, 19 nt, Homo sapiens
  misc_RNA (1)...(19): siRNA sense strand
ccuaaauaugugggagcaa

SEQ ID NO: 2314798 - RNA, 19 nt, Homo sapiens
  misc_RNA (1)...(19): siRNA sense strand
agaaugugacugugguaau

SEQ ID NO: 2314799 - RNA, 19 nt, Homo sapiens
  misc_RNA (1)...(19): siRNA sense strand
agggaaagggauauguaau

SEQ ID NO: 2314800 - RNA, 19 nt, Homo sapiens
  misc_RNA (1)...(19): siRNA sense strand
ggguaguauugaugaugga

SEQ ID NO: 2314801 - RNA, 19 nt, Homo sapiens
  misc_RNA (1)...(19): siRNA sense strand
augcacgacuauagauauu

SEQ ID NO: 2314802 - RNA, 19 nt, Homo sapiens
  misc_RNA (1)...(19): siRNA sense strand
caugagaucagauggaaca

SEQ ID NO: 2314803 - RNA, 19 nt, Homo sapiens
  misc_RNA (1)...(19): siRNA sense strand
acgaagguucugaaggaau

SEQ ID NO: 2314804 - RNA, 19 nt, Homo sapiens
  misc_RNA (1)...(19): siRNA sense strand
gguaaugggauuuuggaau

SEQ ID NO: 2314805 - RNA, 19 nt, Homo sapiens
  misc_RNA (1)...(19): siRNA sense strand
guuaauucucugcaugaaa

SEQ ID NO: 2314806 - RNA, 19 nt, Homo sapiens
  misc_RNA (1)...(19): siRNA sense strand
cugcaugaaagaucugaaa

SEQ ID NO: 2314807 - RNA, 19 nt, Homo sapiens
  misc_RNA (1)...(19): siRNA sense strand
ggcagaaagaccagcccua

SEQ ID NO: 2314808 - RNA, 19 nt, Homo sapiens
  misc_RNA (1)...(19): siRNA sense strand
agugugugguaaugggauu

SEQ ID NO: 2314809 - RNA, 19 nt, Homo sapiens
  misc_RNA (1)...(19): siRNA sense strand
ccaaggauaugcugccgaa

SEQ ID NO: 2314810 - RNA, 19 nt, Homo sapiens
  misc_RNA (1)...(19): siRNA sense strand
cuuacuuguuuacaggaaa

SEQ ID NO: 2314811 - RNA, 19 nt, Homo sapiens
  misc_RNA (1)...(19): siRNA sense strand
agugagugccagugguaga

SEQ ID NO: 2314812 - RNA, 19 nt, Homo sapiens
  misc_RNA (1)...(19): siRNA sense strand
uaauaaaagugacgcucaa

SEQ ID NO: 2314813 - RNA, 19 nt, Homo sapiens
  misc_RNA (1)...(19): siRNA sense strand
cagucauauuuggcagaaa

SEQ ID NO: 2314814 - RNA, 19 nt, Homo sapiens
  misc_RNA (1)...(19): siRNA sense strand
gaucagauggaacagacaa

SEQ ID NO: 2314815 - RNA, 19 nt, Homo sapiens
  misc_RNA (1)...(19): siRNA sense strand
aaaucauguaacagagaga

SEQ ID NO: 2314816 - RNA, 19 nt, Homo sapiens
  misc_RNA (1)...(19): siRNA sense strand
gaucugaaaugauggcugu

SEQ ID NO: 2314817 - RNA, 19 nt, Homo sapiens
  misc_RNA (1)...(19): siRNA sense strand
caauaaaagcuaugaugca

SEQ ID NO: 2314818 - RNA, 19 nt, Homo sapiens
  misc_RNA (1)...(19): siRNA sense strand
aauaaaaccugcagaaaag

SEQ ID NO: 2314819 - RNA, 19 nt, Homo sapiens
  misc_RNA (1)...(19): siRNA sense strand
gcagaguauaaucguaauu

SEQ ID NO: 2314820 - RNA, 19 nt, Homo sapiens
  misc_RNA (1)...(19): siRNA sense strand
gagaggaagaugauuuaca

SEQ ID NO: 2314821 - RNA, 19 nt, Homo sapiens
  misc_RNA (1)...(19): siRNA sense strand
cauguaaacugaagggcuc

SEQ ID NO: 2314822 - RNA, 19 nt, Homo sapiens
  misc_RNA (1)...(19): siRNA sense strand
cagaaauguacuguguaaa

SEQ ID NO: 2314823 - RNA, 19 nt, Homo sapiens
  misc_RNA (1)...(19): siRNA sense strand
uaaauaugugggagcaaca

SEQ ID NO: 2314824 - RNA, 19 nt, Homo sapiens
  misc_RNA (1)...(19): siRNA sense strand
gaaagaguauugauccaga

SEQ ID NO: 2314825 - RNA, 19 nt, Homo sapiens
  misc_RNA (1)...(19): siRNA sense strand
gaaguuucagagaggaaga

SEQ ID NO: 2314826 - RNA, 19 nt, Homo sapiens
  misc_RNA (1)...(19): siRNA sense strand
ugaaaugauggcuguaaca

SEQ ID NO: 2314827 - RNA, 19 nt, Homo sapiens
  misc_RNA (1)...(19): siRNA sense strand
cguuugugcaaguugggaa

SEQ ID NO: 2314828 - RNA, 19 nt, Homo sapiens
  misc_RNA (1)...(19): siRNA sense strand
cacuggaacaacugguuua

SEQ ID NO: 2314829 - RNA, 19 nt, Homo sapiens
  misc_RNA (1)...(19): siRNA sense strand
cgaugacgugggacauuaa

SEQ ID NO: 2314830 - RNA, 19 nt, Homo sapiens
  misc_RNA (1)...(19): siRNA sense strand
caguuauggaauugaacca

SEQ ID NO: 2314831 - RNA, 19 nt, Homo sapiens
  misc_RNA (1)...(19): siRNA sense strand
ccuuggaauuguggucaaa

SEQ ID NO: 2314832 - RNA, 19 nt, Homo sapiens
  misc_RNA (1)...(19): siRNA sense strand
cuauguauccagaugcaau

SEQ ID NO: 2314833 - RNA, 19 nt, Homo sapiens
  misc_RNA (1)...(19): siRNA sense strand
guuucagagaggaagauga

SEQ ID NO: 2314834 - RNA, 19 nt, Homo sapiens
  misc_RNA (1)...(19): siRNA sense strand
uggggaugcugaugauaua

SEQ ID NO: 2314835 - RNA, 19 nt, Homo sapiens
  misc_RNA (1)...(19): siRNA sense strand
cugcagaaaaguucauuua

SEQ ID NO: 2314836 - RNA, 19 nt, Homo sapiens
  misc_RNA (1)...(19): siRNA sense strand
ccucaaagaaagauggaaa

SEQ ID NO: 2314837 - RNA, 19 nt, Homo sapiens
  misc_RNA (1)...(19): siRNA sense strand
ggucauugcauguggaaga

SEQ ID NO: 2314838 - RNA, 19 nt, Homo sapiens
  misc_RNA (1)...(19): siRNA sense strand
augaagaaauggugcaaau

SEQ ID NO: 2314839 - RNA, 19 nt, Homo sapiens
  misc_RNA (1)...(19): siRNA sense strand
gcaaauacugcauggguga

SEQ ID NO: 2314840 - RNA, 19 nt, Homo sapiens
  misc_RNA (1)...(19): siRNA sense strand
gugcaauauucaagagugu

SEQ ID NO: 2314841 - RNA, 19 nt, Homo sapiens
  misc_RNA (1)...(19): siRNA sense strand
caucaaugguggucaggau

SEQ ID NO: 2314842 - RNA, 19 nt, Homo sapiens
  misc_RNA (1)...(19): siRNA sense strand
gugaaagugggcugugaua

SEQ ID NO: 2314843 - RNA, 19 nt, Homo sapiens
  misc_RNA (1)...(19): siRNA sense strand
gaauggagcaugauggaca

SEQ ID NO: 2314844 - RNA, 19 nt, Homo sapiens
  misc_RNA (1)...(19): siRNA sense strand
uggaaguguuggcacgaua

SEQ ID NO: 2314845 - RNA, 19 nt, Homo sapiens
  misc_RNA (1)...(19): siRNA sense strand
agaacacgccagugcaaua

SEQ ID NO: 2314846 - RNA, 19 nt, Homo sapiens
  misc_RNA (1)...(19): siRNA sense strand
auggaaagaucauugacaa

SEQ ID NO: 2314847 - RNA, 19 nt, Homo sapiens
  misc_RNA (1)...(19): siRNA sense strand
cugcuggaaugcaaggaua

SEQ ID NO: 2314848 - RNA, 19 nt, Homo sapiens
  misc_RNA (1)...(19): siRNA sense strand
gcuggaaaauggugcuaua

SEQ ID NO: 2314849 - RNA, 19 nt, Homo sapiens
  misc_RNA (1)...(19): siRNA sense strand
gggcuagacauguguuaau

SEQ ID NO: 2314850 - RNA, 19 nt, Homo sapiens
  misc_RNA (1)...(19): siRNA sense strand
uggucuggcuggaaugaua

SEQ ID NO: 2314851 - RNA, 19 nt, Homo sapiens
  misc_RNA (1)...(19): siRNA sense strand
ugaaugugcugcuggaaaa

SEQ ID NO: 2314852 - RNA, 19 nt, Homo sapiens
  misc_RNA (1)...(19): siRNA sense strand
gaaccaggcuacaggccau

SEQ ID NO: 2314853 - RNA, 19 nt, Homo sapiens
  misc_RNA (1)...(19): siRNA sense strand
gcacaaaucuagaaggacg

SEQ ID NO: 2314854 - RNA, 19 nt, Homo sapiens
  misc_RNA (1)...(19): siRNA sense strand
uguaaacagcuguggugua

SEQ ID NO: 2314855 - RNA, 19 nt, Homo sapiens
  misc_RNA (1)...(19): siRNA sense strand
cugaaugugcugcuggaaa

SEQ ID NO: 2314856 - RNA, 19 nt, Homo sapiens
  misc_RNA (1)...(19): siRNA sense strand
gguuaggacuucagcugau

SEQ ID NO: 2314857 - RNA, 19 nt, Homo sapiens
  misc_RNA (1)...(19): siRNA sense strand
ccaggaagugcuacguaua

SEQ ID NO: 2314858 - RNA, 19 nt, Homo sapiens
  misc_RNA (1)...(19): siRNA sense strand
caacaaugucauccaggaa

SEQ ID NO: 2314859 - RNA, 19 nt, Homo sapiens
  misc_RNA (1)...(19): siRNA sense strand
auauggaugccguaggaaa

SEQ ID NO: 2314860 - RNA, 19 nt, Homo sapiens
  misc_RNA (1)...(19): siRNA sense strand
acaaagauccauauagcau

SEQ ID NO: 2314861 - RNA, 19 nt, Homo sapiens
  misc_RNA (1)...(19): siRNA sense strand
gaggagagugugugaaagu

SEQ ID NO: 2314862 - RNA, 19 nt, Homo sapiens
  misc_RNA (1)...(19): siRNA sense strand
cuguggaaguucuggcuau

SEQ ID NO: 2314863 - RNA, 19 nt, Homo sapiens
  misc_RNA (1)...(19): siRNA sense strand
agaaagauggaaagaucau

SEQ ID NO: 2314864 - RNA, 19 nt, Homo sapiens
  misc_RNA (1)...(19): siRNA sense strand
gcuuuguaacacagaagaa

SEQ ID NO: 2314865 - RNA, 19 nt, Homo sapiens
  misc_RNA (1)...(19): siRNA sense strand
gcuauuaagaaccaggcua

SEQ ID NO: 2314866 - RNA, 19 nt, Homo sapiens
  misc_RNA (1)...(19): siRNA sense strand
gaaccauguuugggagaca

SEQ ID NO: 2314867 - RNA, 19 nt, Homo sapiens
  misc_RNA (1)...(19): siRNA sense strand
cgcucuagccugacauaua

SEQ ID NO: 2314868 - RNA, 19 nt, Homo sapiens
  misc_RNA (1)...(19): siRNA sense strand
gccuaaacucccagaacuu

SEQ ID NO: 2314869 - RNA, 19 nt, Homo sapiens
  misc_RNA (1)...(19): siRNA sense strand
ucuaauaagguugaggaua

SEQ ID NO: 2314870 - RNA, 19 nt, Homo sapiens
  misc_RNA (1)...(19): siRNA sense strand
gcaaaggggaggaagccaa

SEQ ID NO: 2314871 - RNA, 19 nt, Homo sapiens
  misc_RNA (1)...(19): siRNA sense strand
acaaugucauccaggaaga

SEQ ID NO: 2314872 - RNA, 19 nt, Homo sapiens
  misc_RNA (1)...(19): siRNA sense strand
ugaucuagguacuguuuau

SEQ ID NO: 2314873 - RNA, 19 nt, Homo sapiens
  misc_RNA (1)...(19): siRNA sense strand
ccgaaaccuauuagacgaa

SEQ ID NO: 2314874 - RNA, 19 nt, Homo sapiens
  misc_RNA (1)...(19): siRNA sense strand
aggcaagaaccucaaagaa

SEQ ID NO: 2314875 - RNA, 19 nt, Homo sapiens
  misc_RNA (1)...(19): siRNA sense strand
ggacuucagcugauggaca

SEQ ID NO: 2314876 - RNA, 19 nt, Homo sapiens
  misc_RNA (1)...(19): siRNA sense strand
acaagcugguaaugaagaa

SEQ ID NO: 2314877 - RNA, 19 nt, Homo sapiens
  misc_RNA (1)...(19): siRNA sense strand
cuuucaggccaaacaguaa

SEQ ID NO: 2314878 - RNA, 19 nt, Homo sapiens
  misc_RNA (1)...(19): siRNA sense strand
agagauauagagaguauga

SEQ ID NO: 2314879 - RNA, 19 nt, Homo sapiens
  misc_RNA (1)...(19): siRNA sense strand
caucacggcauuuggaaaa

SEQ ID NO: 2314880 - RNA, 19 nt, Homo sapiens
  misc_RNA (1)...(19): siRNA sense strand
aaacagauggaggaagaaa

SEQ ID NO: 2314881 - RNA, 19 nt, Homo sapiens
  misc_RNA (1)...(19): siRNA sense strand
ugucuguggaggagauaau

SEQ ID NO: 2314882 - RNA, 19 nt, Homo sapiens
  misc_RNA (1)...(19): siRNA sense strand
ccuacaaucaacagcaaca

SEQ ID NO: 2314883 - RNA, 19 nt, Homo sapiens
  misc_RNA (1)...(19): siRNA sense strand
gagguaaacagauggagga

SEQ ID NO: 2314884 - RNA, 19 nt, Homo sapiens
  misc_RNA (1)...(19): siRNA sense strand
gugagaaguuguacccuga

SEQ ID NO: 2314885 - RNA, 19 nt, Homo sapiens
  misc_RNA (1)...(19): siRNA sense strand
cgggccauguguugggaau

SEQ ID NO: 2314886 - RNA, 19 nt, Homo sapiens
  misc_RNA (1)...(19): siRNA sense strand
gcaauaaucccaugcccau

SEQ ID NO: 2314887 - RNA, 19 nt, Homo sapiens
  misc_RNA (1)...(19): siRNA sense strand
gcaggaaguaagacuguga

SEQ ID NO: 2314888 - RNA, 19 nt, Homo sapiens
  misc_RNA (1)...(19): siRNA sense strand
ccgaugcaguggucaagaa

SEQ ID NO: 2314889 - RNA, 19 nt, Homo sapiens
  misc_RNA (1)...(19): siRNA sense strand
ggucaagaacugaaaagau

SEQ ID NO: 2314890 - RNA, 19 nt, Homo sapiens
  misc_RNA (1)...(19): siRNA sense strand
gauaauucccacugccgaa

SEQ ID NO: 2314891 - RNA, 19 nt, Homo sapiens
  misc_RNA (1)...(19): siRNA sense strand
caagaaccucaaagaaaga

SEQ ID NO: 2314892 - RNA, 19 nt, Homo sapiens
  misc_RNA (1)...(19): siRNA sense strand
gaugagacugcuaugggaa

SEQ ID NO: 2314893 - RNA, 19 nt, Homo sapiens
  misc_RNA (1)...(19): siRNA sense strand
guguggagugggauuauaa

SEQ ID NO: 2314894 - RNA, 19 nt, Homo sapiens
  misc_RNA (1)...(19): siRNA sense strand
gggauuauaacauugaaga

SEQ ID NO: 2314895 - RNA, 19 nt, Homo sapiens
  misc_RNA (1)...(19): siRNA sense strand
ccuggaaggccuugaugau

SEQ ID NO: 2314896 - RNA, 19 nt, Homo sapiens
  misc_RNA (1)...(19): siRNA sense strand
gggaauggagcaugaugga

SEQ ID NO: 2314897 - RNA, 19 nt, Homo sapiens
  misc_RNA (1)...(19): siRNA sense strand
ccaggaagaauuagauacu

SEQ ID NO: 2314898 - RNA, 19 nt, Homo sapiens
  misc_RNA (1)...(19): siRNA sense strand
caguaaaccugauggugcu

SEQ ID NO: 2314899 - RNA, 19 nt, Homo sapiens
  misc_RNA (1)...(19): siRNA sense strand
cagcaagcaggaaguaaga

SEQ ID NO: 2314900 - RNA, 19 nt, Homo sapiens
  misc_RNA (1)...(19): siRNA sense strand
gguccguuuccauggcaaa

SEQ ID NO: 2314901 - RNA, 19 nt, Homo sapiens
  misc_RNA (1)...(19): siRNA sense strand
gcaaaguccaucagccuca

SEQ ID NO: 2314902 - RNA, 19 nt, Homo sapiens
  misc_RNA (1)...(19): siRNA sense strand
uggagugaguguucaguga

SEQ ID NO: 2314903 - RNA, 19 nt, Homo sapiens
  misc_RNA (1)...(19): siRNA sense strand
ugagcaaggccgugugcau

SEQ ID NO: 2314904 - RNA, 19 nt, Homo sapiens
  misc_RNA (1)...(19): siRNA sense strand
ugagcaaggccgugugcau

SEQ ID NO: 2314905 - RNA, 19 nt, Homo sapiens
  misc_RNA (1)...(19): siRNA sense strand
gggugaaagccguggacua

SEQ ID NO: 2314906 - RNA, 19 nt, Homo sapiens
  misc_RNA (1)...(19): siRNA sense strand
cgggaagaacugugagcaa

SEQ ID NO: 2314907 - RNA, 19 nt, Homo sapiens
  misc_RNA (1)...(19): siRNA sense strand
gggaucaaccagacggaaa

SEQ ID NO: 2314908 - RNA, 19 nt, Homo sapiens
  misc_RNA (1)...(19): siRNA sense strand
gccugaagguggagaccaa

SEQ ID NO: 2314909 - RNA, 19 nt, Homo sapiens
  misc_RNA (1)...(19): siRNA sense strand
aggaggagcgcgugagcua

SEQ ID NO: 2314910 - RNA, 19 nt, Homo sapiens
  misc_RNA (1)...(19): siRNA sense strand
agaaauacucgcugagcau

SEQ ID NO: 2314911 - RNA, 19 nt, Homo sapiens
  misc_RNA (1)...(19): siRNA sense strand
gggugggagcugaggaaaa

SEQ ID NO: 2314912 - RNA, 19 nt, Homo sapiens
  misc_RNA (1)...(19): siRNA sense strand
cuacaauggcugucccaaa

SEQ ID NO: 2314913 - RNA, 19 nt, Homo sapiens
  misc_RNA (1)...(19): siRNA sense strand
acaucgagguggaggacga

SEQ ID NO: 2314914 - RNA, 19 nt, Homo sapiens
  misc_RNA (1)...(19): siRNA sense strand
uggaauaaacuguguggau

SEQ ID NO: 2314915 - RNA, 19 nt, Homo sapiens
  misc_RNA (1)...(19): siRNA sense strand
ugaagaauguuaaggagga

SEQ ID NO: 2314916 - RNA, 19 nt, Homo sapiens
  misc_RNA (1)...(19): siRNA sense strand
gcgagugcuucgaggacuu

SEQ ID NO: 2314917 - RNA, 19 nt, Homo sapiens
  misc_RNA (1)...(19): siRNA sense strand
cgucagggaugaagggauc

SEQ ID NO: 2314918 - RNA, 19 nt, Homo sapiens
  misc_RNA (1)...(19): siRNA sense strand
agaacaugucccaggagaa

SEQ ID NO: 2314919 - RNA, 19 nt, Homo sapiens
  misc_RNA (1)...(19): siRNA sense strand
acaccuucgugcagggcaa

SEQ ID NO: 2314920 - RNA, 19 nt, Homo sapiens
  misc_RNA (1)...(19): siRNA sense strand
cggacgacaugcugaccaa

SEQ ID NO: 2314921 - RNA, 19 nt, Homo sapiens
  misc_RNA (1)...(19): siRNA sense strand
cuaagggauccguuggaaa

SEQ ID NO: 2314922 - RNA, 19 nt, Homo sapiens
  misc_RNA (1)...(19): siRNA sense strand
agaauguggccguguacaa

SEQ ID NO: 2314923 - RNA, 19 nt, Homo sapiens
  misc_RNA (1)...(19): siRNA sense strand
ggaucaaccagacggaaaa

SEQ ID NO: 2314924 - RNA, 19 nt, Homo sapiens
  misc_RNA (1)...(19): siRNA sense strand
aggacgagaacgacaacua

SEQ ID NO: 2314925 - RNA, 19 nt, Homo sapiens
  misc_RNA (1)...(19): siRNA sense strand
ccaagaagucccuggaucu

SEQ ID NO: 2314926 - RNA, 19 nt, Homo sapiens
  misc_RNA (1)...(19): siRNA sense strand
caacaauggcacccgggaa

SEQ ID NO: 2314927 - RNA, 19 nt, Homo sapiens
  misc_RNA (1)...(19): siRNA sense strand
agguggaggacgagaacga

SEQ ID NO: 2314928 - RNA, 19 nt, Homo sapiens
  misc_RNA (1)...(19): siRNA sense strand
aaauacucgcugagcauua

SEQ ID NO: 2314929 - RNA, 19 nt, Homo sapiens
  misc_RNA (1)...(19): siRNA sense strand
ugaccaucuuggacauuaa

SEQ ID NO: 2314930 - RNA, 19 nt, Homo sapiens
  misc_RNA (1)...(19): siRNA sense strand
ggccguacugugagaacaa

SEQ ID NO: 2314931 - RNA, 19 nt, Homo sapiens
  misc_RNA (1)...(19): siRNA sense strand
ugugucaacagguggaaua

SEQ ID NO: 2314932 - RNA, 19 nt, Homo sapiens
  misc_RNA (1)...(19): siRNA sense strand
aggacgaacuggagcuguu

SEQ ID NO: 2314933 - RNA, 19 nt, Homo sapiens
  misc_RNA (1)...(19): siRNA sense strand
ucaccaugaccuuggacua

SEQ ID NO: 2314934 - RNA, 19 nt, Homo sapiens
  misc_RNA (1)...(19): siRNA sense strand
gcacucaaggucaggguga

SEQ ID NO: 2314935 - RNA, 19 nt, Homo sapiens
  misc_RNA (1)...(19): siRNA sense strand
aggaaaggcaucuugaaaa

SEQ ID NO: 2314936 - RNA, 19 nt, Homo sapiens
  misc_RNA (1)...(19): siRNA sense strand
ccucgaugccaaugacaau

SEQ ID NO: 2314937 - RNA, 19 nt, Homo sapiens
  misc_RNA (1)...(19): siRNA sense strand
gcaaugagacgcaggugga

SEQ ID NO: 2314938 - RNA, 19 nt, Homo sapiens
  misc_RNA (1)...(19): siRNA sense strand
cagaaauacucgcugagca

SEQ ID NO: 2314939 - RNA, 19 nt, Homo sapiens
  misc_RNA (1)...(19): siRNA sense strand
guuaaggaggacagugaga

SEQ ID NO: 2314940 - RNA, 19 nt, Homo sapiens
  misc_RNA (1)...(19): siRNA sense strand
ccguguacaucgaggugga

SEQ ID NO: 2314941 - RNA, 19 nt, Homo sapiens
  misc_RNA (1)...(19): siRNA sense strand
guaauaagaccaacggcca

SEQ ID NO: 2314942 - RNA, 19 nt, Homo sapiens
  misc_RNA (1)...(19): siRNA sense strand
ccuuggauuucgaggaugu

SEQ ID NO: 2314943 - RNA, 19 nt, Homo sapiens
  misc_RNA (1)...(19): siRNA sense strand
ugaggacacaggagagaau

SEQ ID NO: 2314944 - RNA, 19 nt, Homo sapiens
  misc_RNA (1)...(19): siRNA sense strand
gagaacaugucccaggaga

SEQ ID NO: 2314945 - RNA, 19 nt, Homo sapiens
  misc_RNA (1)...(19): siRNA sense strand
caaccauggcugugcgcuu

SEQ ID NO: 2314946 - RNA, 19 nt, Homo sapiens
  misc_RNA (1)...(19): siRNA sense strand
cagcugcgucugugacaaa

SEQ ID NO: 2314947 - RNA, 19 nt, Homo sapiens
  misc_RNA (1)...(19): siRNA sense strand
aggccacggugcuggagaa

SEQ ID NO: 2314948 - RNA, 19 nt, Homo sapiens
  misc_RNA (1)...(19): siRNA sense strand
cggaggaacuucugcgaug

SEQ ID NO: 2314949 - RNA, 19 nt, Homo sapiens
  misc_RNA (1)...(19): siRNA sense strand
aggaggacagugagaugaa

SEQ ID NO: 2314950 - RNA, 19 nt, Homo sapiens
  misc_RNA (1)...(19): siRNA sense strand
ggacuucacuggagagcac

SEQ ID NO: 2314951 - RNA, 19 nt, Homo sapiens
  misc_RNA (1)...(19): siRNA sense strand
auguuaaggaggacaguga

SEQ ID NO: 2314952 - RNA, 19 nt, Homo sapiens
  misc_RNA (1)...(19): siRNA sense strand
cgguagaaauccaggugac

SEQ ID NO: 2314953 - RNA, 19 nt, Homo sapiens
  misc_RNA (1)...(19): siRNA sense strand
uuggaaaggacaucgggaa

SEQ ID NO: 2314954 - RNA, 19 nt, Homo sapiens
  misc_RNA (1)...(19): siRNA sense strand
gggacgucuuccagcucaa

SEQ ID NO: 2314955 - RNA, 19 nt, Homo sapiens
  misc_RNA (1)...(19): siRNA sense strand
gcaugcagggagugaggau

SEQ ID NO: 2314956 - RNA, 19 nt, Homo sapiens
  misc_RNA (1)...(19): siRNA sense strand
ggcaaagauucgugcuaac

SEQ ID NO: 2314957 - RNA, 19 nt, Homo sapiens
  misc_RNA (1)...(19): siRNA sense strand
ucuucaacguccagaacga

SEQ ID NO: 2314958 - RNA, 19 nt, Homo sapiens
  misc_RNA (1)...(19): siRNA sense strand
ccguggugacaguggauga

SEQ ID NO: 2314959 - RNA, 19 nt, Homo sapiens
  misc_RNA (1)...(19): siRNA sense strand
ccggauucaucgccaacaa

SEQ ID NO: 2314960 - RNA, 19 nt, Homo sapiens
  misc_RNA (1)...(19): siRNA sense strand
cugcaaagguuuccugcca

SEQ ID NO: 2314961 - RNA, 19 nt, Homo sapiens
  misc_RNA (1)...(19): siRNA sense strand
acuacaagcaggagcagca

SEQ ID NO: 2314962 - RNA, 19 nt, Homo sapiens
  misc_RNA (1)...(19): siRNA sense strand
ccaacuaccagguggcguu

SEQ ID NO: 2314963 - RNA, 19 nt, Homo sapiens
  misc_RNA (1)...(19): siRNA sense strand
ggaagcaccugaagggcgu

SEQ ID NO: 2314964 - RNA, 19 nt, Homo sapiens
  misc_RNA (1)...(19): siRNA sense strand
uugcggugcucauggauau

SEQ ID NO: 2314965 - RNA, 19 nt, Homo sapiens
  misc_RNA (1)...(19): siRNA sense strand
uagaaauccaggugaccau

SEQ ID NO: 2314966 - RNA, 19 nt, Homo sapiens
  misc_RNA (1)...(19): siRNA sense strand
agcuguuuguugaggagaa

SEQ ID NO: 2314967 - RNA, 19 nt, Homo sapiens
  misc_RNA (1)...(19): siRNA sense strand
guggcaaagauucgugcua

SEQ ID NO: 2314968 - RNA, 19 nt, Homo sapiens
  misc_RNA (1)...(19): siRNA sense strand
gggcacgcucuuuggcaau

SEQ ID NO: 2314969 - RNA, 19 nt, Homo sapiens
  misc_RNA (1)...(19): siRNA sense strand
acaagcaggagcagcagua

SEQ ID NO: 2314970 - RNA, 19 nt, Homo sapiens
  misc_RNA (1)...(19): siRNA sense strand
gugccaugguggagcugga

SEQ ID NO: 2314971 - RNA, 19 nt, Homo sapiens
  misc_RNA (1)...(19): siRNA sense strand
uggcugugcgcuuuggaaa

SEQ ID NO: 2314972 - RNA, 19 nt, Homo sapiens
  misc_RNA (1)...(19): siRNA sense strand
gcuccaacauccugaacgu

SEQ ID NO: 2314973 - RNA, 19 nt, Homo sapiens
  misc_RNA (1)...(19): siRNA sense strand
acuaugggauggaccagaa

SEQ ID NO: 2314974 - RNA, 19 nt, Homo sapiens
  misc_RNA (1)...(19): siRNA sense strand
ggaauaaacuguguggaug

SEQ ID NO: 2314975 - RNA, 19 nt, Homo sapiens
  misc_RNA (1)...(19): siRNA sense strand
ggauauugugguugauaac

SEQ ID NO: 2314976 - RNA, 19 nt, Homo sapiens
  misc_RNA (1)...(19): siRNA sense strand
ccauuggacaacagagagu

SEQ ID NO: 2314977 - RNA, 19 nt, Homo sapiens
  misc_RNA (1)...(19): siRNA sense strand
caacaaaauggcugggaau

SEQ ID NO: 2314978 - RNA, 19 nt, Homo sapiens
  misc_RNA (1)...(19): siRNA sense strand
ggaauuaugccaucggcua

SEQ ID NO: 2314979 - RNA, 19 nt, Homo sapiens
  misc_RNA (1)...(19): siRNA sense strand
gggaaugaauacauggguu

SEQ ID NO: 2314980 - RNA, 19 nt, Homo sapiens
  misc_RNA (1)...(19): siRNA sense strand
ggcuauuaucucaaggaaa

SEQ ID NO: 2314981 - RNA, 19 nt, Homo sapiens
  misc_RNA (1)...(19): siRNA sense strand
cugaaggacaggaacgaau

SEQ ID NO: 2314982 - RNA, 19 nt, Homo sapiens
  misc_RNA (1)...(19): siRNA sense strand
aagagaacuuagaaagcau

SEQ ID NO: 2314983 - RNA, 19 nt, Homo sapiens
  misc_RNA (1)...(19): siRNA sense strand
uggauauggaacagaaaga

SEQ ID NO: 2314984 - RNA, 19 nt, Homo sapiens
  misc_RNA (1)...(19): siRNA sense strand
gcgugaaggggcagaaauu

SEQ ID NO: 2314985 - RNA, 19 nt, Homo sapiens
  misc_RNA (1)...(19): siRNA sense strand
cgagacugcaugagcgaga

SEQ ID NO: 2314986 - RNA, 19 nt, Homo sapiens
  misc_RNA (1)...(19): siRNA sense strand
uccaaagagaacuuagaaa

SEQ ID NO: 2314987 - RNA, 19 nt, Homo sapiens
  misc_RNA (1)...(19): siRNA sense strand
ggacaggaacgaaucccua

SEQ ID NO: 2314988 - RNA, 19 nt, Homo sapiens
  misc_RNA (1)...(19): siRNA sense strand
auauggaacagaaagacua

SEQ ID NO: 2314989 - RNA, 19 nt, Homo sapiens
  misc_RNA (1)...(19): siRNA sense strand
acacuauugcugaaggaca

SEQ ID NO: 2314990 - RNA, 19 nt, Homo sapiens
  misc_RNA (1)...(19): siRNA sense strand
ggaaacaggggaucggaau

SEQ ID NO: 2314991 - RNA, 19 nt, Homo sapiens
  misc_RNA (1)...(19): siRNA sense strand
cauggauauggaacagaaa

SEQ ID NO: 2314992 - RNA, 19 nt, Homo sapiens
  misc_RNA (1)...(19): siRNA sense strand
ucuucaauuuccacaacua

SEQ ID NO: 2314993 - RNA, 19 nt, Homo sapiens
  misc_RNA (1)...(19): siRNA sense strand
cugaaggacaggaacgaau

SEQ ID NO: 2314994 - RNA, 19 nt, Homo sapiens
  misc_RNA (1)...(19): siRNA sense strand
cgagacugcaugagcgaga

SEQ ID NO: 2314995 - RNA, 19 nt, Homo sapiens
  misc_RNA (1)...(19): siRNA sense strand
ggacaggaacgaaucccua

SEQ ID NO: 2314996 - RNA, 19 nt, Homo sapiens
  misc_RNA (1)...(19): siRNA sense strand
acacuauugcugaaggaca

SEQ ID NO: 2314997 - RNA, 19 nt, Homo sapiens
  misc_RNA (1)...(19): siRNA sense strand
gcgggaagcacuauggcau

SEQ ID NO: 2314998 - RNA, 19 nt, Homo sapiens
  misc_RNA (1)...(19): siRNA sense strand
aggugauccugcuggaaga

SEQ ID NO: 2314999 - RNA, 19 nt, Homo sapiens
  misc_RNA (1)...(19): siRNA sense strand
uggacaaggcccaccgcaa

SEQ ID NO: 2315000 - RNA, 19 nt, Homo sapiens
  misc_RNA (1)...(19): siRNA sense strand
ggaugugccccguggacaa

SEQ ID NO: 2315001 - RNA, 19 nt, Homo sapiens
  misc_RNA (1)...(19): siRNA sense strand
acguagaggccuugcagga

SEQ ID NO: 2315002 - RNA, 19 nt, Homo sapiens
  misc_RNA (1)...(19): siRNA sense strand
gcaugaaggccuugguccu

SEQ ID NO: 2315003 - RNA, 19 nt, Homo sapiens
  misc_RNA (1)...(19): siRNA sense strand
cccaagugaugcugagcca

SEQ ID NO: 2315004 - RNA, 19 nt, Homo sapiens
  misc_RNA (1)...(19): siRNA sense strand
gcgggaagcacuauggcau

SEQ ID NO: 2315005 - RNA, 19 nt, Homo sapiens
  misc_RNA (1)...(19): siRNA sense strand
aggugauccugcuggaaga

SEQ ID NO: 2315006 - RNA, 19 nt, Homo sapiens
  misc_RNA (1)...(19): siRNA sense strand
uggacaaggcccaccgcaa

SEQ ID NO: 2315007 - RNA, 19 nt, Homo sapiens
  misc_RNA (1)...(19): siRNA sense strand
ggaugugccccguggacaa

SEQ ID NO: 2315008 - RNA, 19 nt, Homo sapiens
  misc_RNA (1)...(19): siRNA sense strand
acguagaggccuugcagga

SEQ ID NO: 2315009 - RNA, 19 nt, Homo sapiens
  misc_RNA (1)...(19): siRNA sense strand
gcaugaaggccuugguccu

SEQ ID NO: 2315010 - RNA, 19 nt, Homo sapiens
  misc_RNA (1)...(19): siRNA sense strand
cccaagugaugcugagcca

SEQ ID NO: 2315011 - RNA, 19 nt, Homo sapiens
  misc_RNA (1)...(19): siRNA sense strand
gcaaguacuaugugccaga

SEQ ID NO: 2315012 - RNA, 19 nt, Homo sapiens
  misc_RNA (1)...(19): siRNA sense strand
gucuggagcuugagggacu

SEQ ID NO: 2315013 - RNA, 19 nt, Homo sapiens
  misc_RNA (1)...(19): siRNA sense strand
ggguaugugucuggagcuu

SEQ ID NO: 2315014 - RNA, 19 nt, Homo sapiens
  misc_RNA (1)...(19): siRNA sense strand
gccaacaccucuaugguca

SEQ ID NO: 2315015 - RNA, 19 nt, Homo sapiens
  misc_RNA (1)...(19): siRNA sense strand
aggcacagacucacggaga

SEQ ID NO: 2315016 - RNA, 19 nt, Homo sapiens
  misc_RNA (1)...(19): siRNA sense strand
ugcuggagcuggaggcaca

SEQ ID NO: 2315017 - RNA, 19 nt, Homo sapiens
  misc_RNA (1)...(19): siRNA sense strand
aauuauagcucgagguacu

SEQ ID NO: 2315018 - RNA, 19 nt, Homo sapiens
  misc_RNA (1)...(19): siRNA sense strand
guaaaaggucgaacagaaa

SEQ ID NO: 2315019 - RNA, 19 nt, Homo sapiens
  misc_RNA (1)...(19): siRNA sense strand
agauguaguuccugagcau

SEQ ID NO: 2315020 - RNA, 19 nt, Homo sapiens
  misc_RNA (1)...(19): siRNA sense strand
aaagaagaaguguggaaau

SEQ ID NO: 2315021 - RNA, 19 nt, Homo sapiens
  misc_RNA (1)...(19): siRNA sense strand
auagcaaagcggaugguua

SEQ ID NO: 2315022 - RNA, 19 nt, Homo sapiens
  misc_RNA (1)...(19): siRNA sense strand
ugagaaugacagauggaau

SEQ ID NO: 2315023 - RNA, 19 nt, Homo sapiens
  misc_RNA (1)...(19): siRNA sense strand
cgagagauuagcugaaaca

SEQ ID NO: 2315024 - RNA, 19 nt, Homo sapiens
  misc_RNA (1)...(19): siRNA sense strand
ccaugaaggagcuggaguu

SEQ ID NO: 2315025 - RNA, 19 nt, Homo sapiens
  misc_RNA (1)...(19): siRNA sense strand
uacuauucuuggagguaaa

SEQ ID NO: 2315026 - RNA, 19 nt, Homo sapiens
  misc_RNA (1)...(19): siRNA sense strand
uauucaaggcagaccauaa

SEQ ID NO: 2315027 - RNA, 19 nt, Homo sapiens
  misc_RNA (1)...(19): siRNA sense strand
ccgaauuugaugagauguu

SEQ ID NO: 2315028 - RNA, 19 nt, Homo sapiens
  misc_RNA (1)...(19): siRNA sense strand
uaucauaauaggagccaca

SEQ ID NO: 2315029 - RNA, 19 nt, Homo sapiens
  misc_RNA (1)...(19): siRNA sense strand
cauccauauucaaggcaga

SEQ ID NO: 2315030 - RNA, 19 nt, Homo sapiens
  misc_RNA (1)...(19): siRNA sense strand
caaacuucccagaggcauu

SEQ ID NO: 2315031 - RNA, 19 nt, Homo sapiens
  misc_RNA (1)...(19): siRNA sense strand
cacaaauggauguuaguau

SEQ ID NO: 2315032 - RNA, 19 nt, Homo sapiens
  misc_RNA (1)...(19): siRNA sense strand
uguuaguaugggaggaaga

SEQ ID NO: 2315033 - RNA, 19 nt, Homo sapiens
  misc_RNA (1)...(19): siRNA sense strand
agugauacagggaaacuaa

SEQ ID NO: 2315034 - RNA, 19 nt, Homo sapiens
  misc_RNA (1)...(19): siRNA sense strand
augcaaugccuaucaacaa

SEQ ID NO: 2315035 - RNA, 19 nt, Homo sapiens
  misc_RNA (1)...(19): siRNA sense strand
aacaagaauuacaggaagu

SEQ ID NO: 2315036 - RNA, 19 nt, Homo sapiens
  misc_RNA (1)...(19): siRNA sense strand
aaaucaacuucuugcugaa

SEQ ID NO: 2315037 - RNA, 19 nt, Homo sapiens
  misc_RNA (1)...(19): siRNA sense strand
cgaacaagaaauaagaauc

SEQ ID NO: 2315038 - RNA, 19 nt, Homo sapiens
  misc_RNA (1)...(19): siRNA sense strand
agagauuagcugaaacaca

SEQ ID NO: 2315039 - RNA, 19 nt, Homo sapiens
  misc_RNA (1)...(19): siRNA sense strand
aagcauuuguucagaucuu

SEQ ID NO: 2315040 - RNA, 19 nt, Homo sapiens
  misc_RNA (1)...(19): siRNA sense strand
agugaaaagcuuggaguua

SEQ ID NO: 2315041 - RNA, 19 nt, Homo sapiens
  misc_RNA (1)...(19): siRNA sense strand
ucauaauaggagccacaaa

SEQ ID NO: 2315042 - RNA, 19 nt, Homo sapiens
  misc_RNA (1)...(19): siRNA sense strand
gaggaagaguggcagagga

SEQ ID NO: 2315043 - RNA, 19 nt, Homo sapiens
  misc_RNA (1)...(19): siRNA sense strand
gaguuaugaccuacaguga

SEQ ID NO: 2315044 - RNA, 19 nt, Homo sapiens
  misc_RNA (1)...(19): siRNA sense strand
aggaucagauguugagagu

SEQ ID NO: 2315045 - RNA, 19 nt, Homo sapiens
  misc_RNA (1)...(19): siRNA sense strand
ccggacaacaacagggcuu

SEQ ID NO: 2315046 - RNA, 19 nt, Homo sapiens
  misc_RNA (1)...(19): siRNA sense strand
ccggagcagaguuggagaa

SEQ ID NO: 2315047 - RNA, 19 nt, Homo sapiens
  misc_RNA (1)...(19): siRNA sense strand
gaaugaaacuagagcccag

SEQ ID NO: 2315048 - RNA, 19 nt, Homo sapiens
  misc_RNA (1)...(19): siRNA sense strand
cgacaucauucaagagcuc

SEQ ID NO: 2315049 - RNA, 19 nt, Homo sapiens
  misc_RNA (1)...(19): siRNA sense strand
ccuuggauuaucugaacua

SEQ ID NO: 2315050 - RNA, 19 nt, Homo sapiens
  misc_RNA (1)...(19): siRNA sense strand
ggguggaggaagcuaaaca

SEQ ID NO: 2315051 - RNA, 19 nt, Homo sapiens
  misc_RNA (1)...(19): siRNA sense strand
ccguugauccagaaauuau

SEQ ID NO: 2315052 - RNA, 19 nt, Homo sapiens
  misc_RNA (1)...(19): siRNA sense strand
agucuaccuccgagagauu

SEQ ID NO: 2315053 - RNA, 19 nt, Homo sapiens
  misc_RNA (1)...(19): siRNA sense strand
auguugagaguuuggacaa

SEQ ID NO: 2315054 - RNA, 19 nt, Homo sapiens
  misc_RNA (1)...(19): siRNA sense strand
augagauguuugugggugu

SEQ ID NO: 2315055 - RNA, 19 nt, Homo sapiens
  misc_RNA (1)...(19): siRNA sense strand
uuccaaggccagauguaaa

SEQ ID NO: 2315056 - RNA, 19 nt, Homo sapiens
  misc_RNA (1)...(19): siRNA sense strand
gaagaguggcagaggagcu

SEQ ID NO: 2315057 - RNA, 19 nt, Homo sapiens
  misc_RNA (1)...(19): siRNA sense strand
cuuaauacguccuggucgu

SEQ ID NO: 2315058 - RNA, 19 nt, Homo sapiens
  misc_RNA (1)...(19): siRNA sense strand
ccaaucugccaucgaacaa

SEQ ID NO: 2315059 - RNA, 19 nt, Homo sapiens
  misc_RNA (1)...(19): siRNA sense strand
caucauucgugaagggguu

SEQ ID NO: 2315060 - RNA, 19 nt, Homo sapiens
  misc_RNA (1)...(19): siRNA sense strand
ugacagauggaaugaaacu

SEQ ID NO: 2315061 - RNA, 19 nt, Homo sapiens
  misc_RNA (1)...(19): siRNA sense strand
gauguuaguaugggaggaa

SEQ ID NO: 2315062 - RNA, 19 nt, Homo sapiens
  misc_RNA (1)...(19): siRNA sense strand
agggaaacuaaguccagaa

SEQ ID NO: 2315063 - RNA, 19 nt, Homo sapiens
  misc_RNA (1)...(19): siRNA sense strand
uggaggaagcuaaacaaga

SEQ ID NO: 2315064 - RNA, 19 nt, Homo sapiens
  misc_RNA (1)...(19): siRNA sense strand
ggugggaagagaauugaau

SEQ ID NO: 2315065 - RNA, 19 nt, Homo sapiens
  misc_RNA (1)...(19): siRNA sense strand
cuaaaauagcaaagcggau

SEQ ID NO: 2315066 - RNA, 19 nt, Homo sapiens
  misc_RNA (1)...(19): siRNA sense strand
auucaaggcagaccauaaa

SEQ ID NO: 2315067 - RNA, 19 nt, Homo sapiens
  misc_RNA (1)...(19): siRNA sense strand
cccuguuaccugagaauga

SEQ ID NO: 2315068 - RNA, 19 nt, Homo sapiens
  misc_RNA (1)...(19): siRNA sense strand
uggaaugagugaaaagcuu

SEQ ID NO: 2315069 - RNA, 19 nt, Homo sapiens
  misc_RNA (1)...(19): siRNA sense strand
aauuauagcucgagguacu

SEQ ID NO: 2315070 - RNA, 19 nt, Homo sapiens
  misc_RNA (1)...(19): siRNA sense strand
guaaaaggucgaacagaaa

SEQ ID NO: 2315071 - RNA, 19 nt, Homo sapiens
  misc_RNA (1)...(19): siRNA sense strand
agauguaguuccugagcau

SEQ ID NO: 2315072 - RNA, 19 nt, Homo sapiens
  misc_RNA (1)...(19): siRNA sense strand
aaagaagaaguguggaaau

SEQ ID NO: 2315073 - RNA, 19 nt, Homo sapiens
  misc_RNA (1)...(19): siRNA sense strand
auagcaaagcggaugguua

SEQ ID NO: 2315074 - RNA, 19 nt, Homo sapiens
  misc_RNA (1)...(19): siRNA sense strand
ugagaaugacagauggaau

SEQ ID NO: 2315075 - RNA, 19 nt, Homo sapiens
  misc_RNA (1)...(19): siRNA sense strand
cgagagauuagcugaaaca

SEQ ID NO: 2315076 - RNA, 19 nt, Homo sapiens
  misc_RNA (1)...(19): siRNA sense strand
ccaugaaggagcuggaguu

SEQ ID NO: 2315077 - RNA, 19 nt, Homo sapiens
  misc_RNA (1)...(19): siRNA sense strand
uacuauucuuggagguaaa

SEQ ID NO: 2315078 - RNA, 19 nt, Homo sapiens
  misc_RNA (1)...(19): siRNA sense strand
uauucaaggcagaccauaa

SEQ ID NO: 2315079 - RNA, 19 nt, Homo sapiens
  misc_RNA (1)...(19): siRNA sense strand
ccgaauuugaugagauguu

SEQ ID NO: 2315080 - RNA, 19 nt, Homo sapiens
  misc_RNA (1)...(19): siRNA sense strand
uaucauaauaggagccaca

SEQ ID NO: 2315081 - RNA, 19 nt, Homo sapiens
  misc_RNA (1)...(19): siRNA sense strand
cauccauauucaaggcaga

SEQ ID NO: 2315082 - RNA, 19 nt, Homo sapiens
  misc_RNA (1)...(19): siRNA sense strand
caaacuucccagaggcauu

SEQ ID NO: 2315083 - RNA, 19 nt, Homo sapiens
  misc_RNA (1)...(19): siRNA sense strand
cacaaauggauguuaguau

SEQ ID NO: 2315084 - RNA, 19 nt, Homo sapiens
  misc_RNA (1)...(19): siRNA sense strand
uguuaguaugggaggaaga

SEQ ID NO: 2315085 - RNA, 19 nt, Homo sapiens
  misc_RNA (1)...(19): siRNA sense strand
agugauacagggaaacuaa

SEQ ID NO: 2315086 - RNA, 19 nt, Homo sapiens
  misc_RNA (1)...(19): siRNA sense strand
augcaaugccuaucaacaa

SEQ ID NO: 2315087 - RNA, 19 nt, Homo sapiens
  misc_RNA (1)...(19): siRNA sense strand
aacaagaauuacaggaagu

SEQ ID NO: 2315088 - RNA, 19 nt, Homo sapiens
  misc_RNA (1)...(19): siRNA sense strand
aaaucaacuucuugcugaa

SEQ ID NO: 2315089 - RNA, 19 nt, Homo sapiens
  misc_RNA (1)...(19): siRNA sense strand
cgaacaagaaauaagaauc

SEQ ID NO: 2315090 - RNA, 19 nt, Homo sapiens
  misc_RNA (1)...(19): siRNA sense strand
agagauuagcugaaacaca

SEQ ID NO: 2315091 - RNA, 19 nt, Homo sapiens
  misc_RNA (1)...(19): siRNA sense strand
aagcauuuguucagaucuu

SEQ ID NO: 2315092 - RNA, 19 nt, Homo sapiens
  misc_RNA (1)...(19): siRNA sense strand
agugaaaagcuuggaguua

SEQ ID NO: 2315093 - RNA, 19 nt, Homo sapiens
  misc_RNA (1)...(19): siRNA sense strand
ucauaauaggagccacaaa

SEQ ID NO: 2315094 - RNA, 19 nt, Homo sapiens
  misc_RNA (1)...(19): siRNA sense strand
gaggaagaguggcagagga

SEQ ID NO: 2315095 - RNA, 19 nt, Homo sapiens
  misc_RNA (1)...(19): siRNA sense strand
gaguuaugaccuacaguga

SEQ ID NO: 2315096 - RNA, 19 nt, Homo sapiens
  misc_RNA (1)...(19): siRNA sense strand
aggaucagauguugagagu

SEQ ID NO: 2315097 - RNA, 19 nt, Homo sapiens
  misc_RNA (1)...(19): siRNA sense strand
ccggacaacaacagggcuu

SEQ ID NO: 2315098 - RNA, 19 nt, Homo sapiens
  misc_RNA (1)...(19): siRNA sense strand
ccggagcagaguuggagaa

SEQ ID NO: 2315099 - RNA, 19 nt, Homo sapiens
  misc_RNA (1)...(19): siRNA sense strand
gaaugaaacuagagcccag

SEQ ID NO: 2315100 - RNA, 19 nt, Homo sapiens
  misc_RNA (1)...(19): siRNA sense strand
cgacaucauucaagagcuc

SEQ ID NO: 2315101 - RNA, 19 nt, Homo sapiens
  misc_RNA (1)...(19): siRNA sense strand
ccuuggauuaucugaacua

SEQ ID NO: 2315102 - RNA, 19 nt, Homo sapiens
  misc_RNA (1)...(19): siRNA sense strand
ggguggaggaagcuaaaca

SEQ ID NO: 2315103 - RNA, 19 nt, Homo sapiens
  misc_RNA (1)...(19): siRNA sense strand
ccguugauccagaaauuau

SEQ ID NO: 2315104 - RNA, 19 nt, Homo sapiens
  misc_RNA (1)...(19): siRNA sense strand
agucuaccuccgagagauu

SEQ ID NO: 2315105 - RNA, 19 nt, Homo sapiens
  misc_RNA (1)...(19): siRNA sense strand
auguugagaguuuggacaa

SEQ ID NO: 2315106 - RNA, 19 nt, Homo sapiens
  misc_RNA (1)...(19): siRNA sense strand
augagauguuugugggugu

SEQ ID NO: 2315107 - RNA, 19 nt, Homo sapiens
  misc_RNA (1)...(19): siRNA sense strand
uuccaaggccagauguaaa

SEQ ID NO: 2315108 - RNA, 19 nt, Homo sapiens
  misc_RNA (1)...(19): siRNA sense strand
gaagaguggcagaggagcu

SEQ ID NO: 2315109 - RNA, 19 nt, Homo sapiens
  misc_RNA (1)...(19): siRNA sense strand
cuuaauacguccuggucgu

SEQ ID NO: 2315110 - RNA, 19 nt, Homo sapiens
  misc_RNA (1)...(19): siRNA sense strand
ccaaucugccaucgaacaa

SEQ ID NO: 2315111 - RNA, 19 nt, Homo sapiens
  misc_RNA (1)...(19): siRNA sense strand
caucauucgugaagggguu

SEQ ID NO: 2315112 - RNA, 19 nt, Homo sapiens
  misc_RNA (1)...(19): siRNA sense strand
ugacagauggaaugaaacu

SEQ ID NO: 2315113 - RNA, 19 nt, Homo sapiens
  misc_RNA (1)...(19): siRNA sense strand
gauguuaguaugggaggaa

SEQ ID NO: 2315114 - RNA, 19 nt, Homo sapiens
  misc_RNA (1)...(19): siRNA sense strand
agggaaacuaaguccagaa

SEQ ID NO: 2315115 - RNA, 19 nt, Homo sapiens
  misc_RNA (1)...(19): siRNA sense strand
uggaggaagcuaaacaaga

SEQ ID NO: 2315116 - RNA, 19 nt, Homo sapiens
  misc_RNA (1)...(19): siRNA sense strand
ggugggaagagaauugaau

SEQ ID NO: 2315117 - RNA, 19 nt, Homo sapiens
  misc_RNA (1)...(19): siRNA sense strand
cuaaaauagcaaagcggau

SEQ ID NO: 2315118 - RNA, 19 nt, Homo sapiens
  misc_RNA (1)...(19): siRNA sense strand
auucaaggcagaccauaaa

SEQ ID NO: 2315119 - RNA, 19 nt, Homo sapiens
  misc_RNA (1)...(19): siRNA sense strand
cccuguuaccugagaauga

SEQ ID NO: 2315120 - RNA, 19 nt, Homo sapiens
  misc_RNA (1)...(19): siRNA sense strand
uggaaugagugaaaagcuu

SEQ ID NO: 2315121 - RNA, 19 nt, Homo sapiens
  misc_RNA (1)...(19): siRNA sense strand
aauuauagcucgagguacu

SEQ ID NO: 2315122 - RNA, 19 nt, Homo sapiens
  misc_RNA (1)...(19): siRNA sense strand
guaaaaggucgaacagaaa

SEQ ID NO: 2315123 - RNA, 19 nt, Homo sapiens
  misc_RNA (1)...(19): siRNA sense strand
agauguaguuccugagcau

SEQ ID NO: 2315124 - RNA, 19 nt, Homo sapiens
  misc_RNA (1)...(19): siRNA sense strand
aaagaagaaguguggaaau

SEQ ID NO: 2315125 - RNA, 19 nt, Homo sapiens
  misc_RNA (1)...(19): siRNA sense strand
auagcaaagcggaugguua

SEQ ID NO: 2315126 - RNA, 19 nt, Homo sapiens
  misc_RNA (1)...(19): siRNA sense strand
ugagaaugacagauggaau

SEQ ID NO: 2315127 - RNA, 19 nt, Homo sapiens
  misc_RNA (1)...(19): siRNA sense strand
cgagagauuagcugaaaca

SEQ ID NO: 2315128 - RNA, 19 nt, Homo sapiens
  misc_RNA (1)...(19): siRNA sense strand
ccaugaaggagcuggaguu

SEQ ID NO: 2315129 - RNA, 19 nt, Homo sapiens
  misc_RNA (1)...(19): siRNA sense strand
uacuauucuuggagguaaa

SEQ ID NO: 2315130 - RNA, 19 nt, Homo sapiens
  misc_RNA (1)...(19): siRNA sense strand
uauucaaggcagaccauaa

SEQ ID NO: 2315131 - RNA, 19 nt, Homo sapiens
  misc_RNA (1)...(19): siRNA sense strand
ccgaauuugaugagauguu

SEQ ID NO: 2315132 - RNA, 19 nt, Homo sapiens
  misc_RNA (1)...(19): siRNA sense strand
uaucauaauaggagccaca

SEQ ID NO: 2315133 - RNA, 19 nt, Homo sapiens
  misc_RNA (1)...(19): siRNA sense strand
cauccauauucaaggcaga

SEQ ID NO: 2315134 - RNA, 19 nt, Homo sapiens
  misc_RNA (1)...(19): siRNA sense strand
caaacuucccagaggcauu

SEQ ID NO: 2315135 - RNA, 19 nt, Homo sapiens
  misc_RNA (1)...(19): siRNA sense strand
cacaaauggauguuaguau

SEQ ID NO: 2315136 - RNA, 19 nt, Homo sapiens
  misc_RNA (1)...(19): siRNA sense strand
uguuaguaugggaggaaga

SEQ ID NO: 2315137 - RNA, 19 nt, Homo sapiens
  misc_RNA (1)...(19): siRNA sense strand
agugauacagggaaacuaa

SEQ ID NO: 2315138 - RNA, 19 nt, Homo sapiens
  misc_RNA (1)...(19): siRNA sense strand
augcaaugccuaucaacaa

SEQ ID NO: 2315139 - RNA, 19 nt, Homo sapiens
  misc_RNA (1)...(19): siRNA sense strand
aacaagaauuacaggaagu

SEQ ID NO: 2315140 - RNA, 19 nt, Homo sapiens
  misc_RNA (1)...(19): siRNA sense strand
aaaucaacuucuugcugaa

SEQ ID NO: 2315141 - RNA, 19 nt, Homo sapiens
  misc_RNA (1)...(19): siRNA sense strand
cgaacaagaaauaagaauc

SEQ ID NO: 2315142 - RNA, 19 nt, Homo sapiens
  misc_RNA (1)...(19): siRNA sense strand
agagauuagcugaaacaca

SEQ ID NO: 2315143 - RNA, 19 nt, Homo sapiens
  misc_RNA (1)...(19): siRNA sense strand
aagcauuuguucagaucuu

SEQ ID NO: 2315144 - RNA, 19 nt, Homo sapiens
  misc_RNA (1)...(19): siRNA sense strand
agugaaaagcuuggaguua

SEQ ID NO: 2315145 - RNA, 19 nt, Homo sapiens
  misc_RNA (1)...(19): siRNA sense strand
ucauaauaggagccacaaa

SEQ ID NO: 2315146 - RNA, 19 nt, Homo sapiens
  misc_RNA (1)...(19): siRNA sense strand
gaggaagaguggcagagga

SEQ ID NO: 2315147 - RNA, 19 nt, Homo sapiens
  misc_RNA (1)...(19): siRNA sense strand
gaguuaugaccuacaguga

SEQ ID NO: 2315148 - RNA, 19 nt, Homo sapiens
  misc_RNA (1)...(19): siRNA sense strand
aggaucagauguugagagu

SEQ ID NO: 2315149 - RNA, 19 nt, Homo sapiens
  misc_RNA (1)...(19): siRNA sense strand
ccggacaacaacagggcuu

SEQ ID NO: 2315150 - RNA, 19 nt, Homo sapiens
  misc_RNA (1)...(19): siRNA sense strand
ccggagcagaguuggagaa

SEQ ID NO: 2315151 - RNA, 19 nt, Homo sapiens
  misc_RNA (1)...(19): siRNA sense strand
gaaugaaacuagagcccag

SEQ ID NO: 2315152 - RNA, 19 nt, Homo sapiens
  misc_RNA (1)...(19): siRNA sense strand
cgacaucauucaagagcuc

SEQ ID NO: 2315153 - RNA, 19 nt, Homo sapiens
  misc_RNA (1)...(19): siRNA sense strand
ccuuggauuaucugaacua

SEQ ID NO: 2315154 - RNA, 19 nt, Homo sapiens
  misc_RNA (1)...(19): siRNA sense strand
ggguggaggaagcuaaaca

SEQ ID NO: 2315155 - RNA, 19 nt, Homo sapiens
  misc_RNA (1)...(19): siRNA sense strand
ccguugauccagaaauuau

SEQ ID NO: 2315156 - RNA, 19 nt, Homo sapiens
  misc_RNA (1)...(19): siRNA sense strand
agucuaccuccgagagauu

SEQ ID NO: 2315157 - RNA, 19 nt, Homo sapiens
  misc_RNA (1)...(19): siRNA sense strand
auguugagaguuuggacaa

SEQ ID NO: 2315158 - RNA, 19 nt, Homo sapiens
  misc_RNA (1)...(19): siRNA sense strand
augagauguuugugggugu

SEQ ID NO: 2315159 - RNA, 19 nt, Homo sapiens
  misc_RNA (1)...(19): siRNA sense strand
uuccaaggccagauguaaa

SEQ ID NO: 2315160 - RNA, 19 nt, Homo sapiens
  misc_RNA (1)...(19): siRNA sense strand
gaagaguggcagaggagcu

SEQ ID NO: 2315161 - RNA, 19 nt, Homo sapiens
  misc_RNA (1)...(19): siRNA sense strand
cuuaauacguccuggucgu

SEQ ID NO: 2315162 - RNA, 19 nt, Homo sapiens
  misc_RNA (1)...(19): siRNA sense strand
ccaaucugccaucgaacaa

SEQ ID NO: 2315163 - RNA, 19 nt, Homo sapiens
  misc_RNA (1)...(19): siRNA sense strand
caucauucgugaagggguu

SEQ ID NO: 2315164 - RNA, 19 nt, Homo sapiens
  misc_RNA (1)...(19): siRNA sense strand
ugacagauggaaugaaacu

SEQ ID NO: 2315165 - RNA, 19 nt, Homo sapiens
  misc_RNA (1)...(19): siRNA sense strand
gauguuaguaugggaggaa

SEQ ID NO: 2315166 - RNA, 19 nt, Homo sapiens
  misc_RNA (1)...(19): siRNA sense strand
agggaaacuaaguccagaa

SEQ ID NO: 2315167 - RNA, 19 nt, Homo sapiens
  misc_RNA (1)...(19): siRNA sense strand
uggaggaagcuaaacaaga

SEQ ID NO: 2315168 - RNA, 19 nt, Homo sapiens
  misc_RNA (1)...(19): siRNA sense strand
ggugggaagagaauugaau

SEQ ID NO: 2315169 - RNA, 19 nt, Homo sapiens
  misc_RNA (1)...(19): siRNA sense strand
cuaaaauagcaaagcggau

SEQ ID NO: 2315170 - RNA, 19 nt, Homo sapiens
  misc_RNA (1)...(19): siRNA sense strand
auucaaggcagaccauaaa

SEQ ID NO: 2315171 - RNA, 19 nt, Homo sapiens
  misc_RNA (1)...(19): siRNA sense strand
cccuguuaccugagaauga

SEQ ID NO: 2315172 - RNA, 19 nt, Homo sapiens
  misc_RNA (1)...(19): siRNA sense strand
uggaaugagugaaaagcuu

SEQ ID NO: 2315173 - RNA, 19 nt, Homo sapiens
  misc_RNA (1)...(19): siRNA sense strand
cugacaaggauaagauaaa

SEQ ID NO: 2315174 - RNA, 19 nt, Homo sapiens
  misc_RNA (1)...(19): siRNA sense strand
ggacugugauugugggaca

SEQ ID NO: 2315175 - RNA, 19 nt, Homo sapiens
  misc_RNA (1)...(19): siRNA sense strand
ggccaaagagccagagcaa

SEQ ID NO: 2315176 - RNA, 19 nt, Homo sapiens
  misc_RNA (1)...(19): siRNA sense strand
ucuuagaguugcagggaca

SEQ ID NO: 2315177 - RNA, 19 nt, Homo sapiens
  misc_RNA (1)...(19): siRNA sense strand
ggguauuugagauggcuaa

SEQ ID NO: 2315178 - RNA, 19 nt, Homo sapiens
  misc_RNA (1)...(19): siRNA sense strand
gagaucagaaagaggguau

SEQ ID NO: 2315179 - RNA, 19 nt, Homo sapiens
  misc_RNA (1)...(19): siRNA sense strand
cugaaauguguaaugguaa

SEQ ID NO: 2315180 - RNA, 19 nt, Homo sapiens
  misc_RNA (1)...(19): siRNA sense strand
ccuggauaauggugaguuu

SEQ ID NO: 2315181 - RNA, 19 nt, Homo sapiens
  misc_RNA (1)...(19): siRNA sense strand
uggauaauggugaguuuaa

SEQ ID NO: 2315182 - RNA, 19 nt, Homo sapiens
  misc_RNA (1)...(19): siRNA sense strand
gcuccauugccuacagaua

SEQ ID NO: 2315183 - RNA, 19 nt, Homo sapiens
  misc_RNA (1)...(19): siRNA sense strand
uucaggaacaugagaaaua

SEQ ID NO: 2315184 - RNA, 19 nt, Homo sapiens
  misc_RNA (1)...(19): siRNA sense strand
caacagaacuugcuggaac

SEQ ID NO: 2315185 - RNA, 19 nt, Homo sapiens
  misc_RNA (1)...(19): siRNA sense strand
cgauaaucuucuuagaguu

SEQ ID NO: 2315186 - RNA, 19 nt, Homo sapiens
  misc_RNA (1)...(19): siRNA sense strand
aguauaacccugaugaaaa

SEQ ID NO: 2315187 - RNA, 19 nt, Homo sapiens
  misc_RNA (1)...(19): siRNA sense strand
cagcaaaagaugagugcga

SEQ ID NO: 2315188 - RNA, 19 nt, Homo sapiens
  misc_RNA (1)...(19): siRNA sense strand
agccagagcaacaggaaca

SEQ ID NO: 2315189 - RNA, 19 nt, Homo sapiens
  misc_RNA (1)...(19): siRNA sense strand
gcuucaccuuggagaauuu

SEQ ID NO: 2315190 - RNA, 19 nt, Homo sapiens
  misc_RNA (1)...(19): siRNA sense strand
aaguauaacccugaugaaa

SEQ ID NO: 2315191 - RNA, 19 nt, Homo sapiens
  misc_RNA (1)...(19): siRNA sense strand
auggaaaucuggacugaca

SEQ ID NO: 2315192 - RNA, 19 nt, Homo sapiens
  misc_RNA (1)...(19): siRNA sense strand
acugacaaggauaagauaa

SEQ ID NO: 2315193 - RNA, 19 nt, Homo sapiens
  misc_RNA (1)...(19): siRNA sense strand
gggacaauggcacaugaaa

SEQ ID NO: 2315194 - RNA, 19 nt, Homo sapiens
  misc_RNA (1)...(19): siRNA sense strand
gggugaagaaguaugaagu

SEQ ID NO: 2315195 - RNA, 19 nt, Homo sapiens
  misc_RNA (1)...(19): siRNA sense strand
gcauaaaagagaggccaaa

SEQ ID NO: 2315196 - RNA, 19 nt, Homo sapiens
  misc_RNA (1)...(19): siRNA sense strand
ccuuaguugguauggaaau

SEQ ID NO: 2315197 - RNA, 19 nt, Homo sapiens
  misc_RNA (1)...(19): siRNA sense strand
gggagaggacugugauugu

SEQ ID NO: 2315198 - RNA, 19 nt, Homo sapiens
  misc_RNA (1)...(19): siRNA sense strand
caggcuacacggaaacaua

SEQ ID NO: 2315199 - RNA, 19 nt, Homo sapiens
  misc_RNA (1)...(19): siRNA sense strand
gcucaguuaaucacagcaa

SEQ ID NO: 2315200 - RNA, 19 nt, Homo sapiens
  misc_RNA (1)...(19): siRNA sense strand
agacaggaagguucaggaa

SEQ ID NO: 2315201 - RNA, 19 nt, Homo sapiens
  misc_RNA (1)...(19): siRNA sense strand
aaucacagcaacagaacuu

SEQ ID NO: 2315202 - RNA, 19 nt, Homo sapiens
  misc_RNA (1)...(19): siRNA sense strand
agauaaagauaaccccaaa

SEQ ID NO: 2315203 - RNA, 19 nt, Homo sapiens
  misc_RNA (1)...(19): siRNA sense strand
cuacaauaugugugaugga

SEQ ID NO: 2315204 - RNA, 19 nt, Homo sapiens
  misc_RNA (1)...(19): siRNA sense strand
ugguaauuguccugaugau

SEQ ID NO: 2315205 - RNA, 19 nt, Homo sapiens
  misc_RNA (1)...(19): siRNA sense strand
augcacucuucaaguauaa

SEQ ID NO: 2315206 - RNA, 19 nt, Homo sapiens
  misc_RNA (1)...(19): siRNA sense strand
caaguauaacccugaugaa

SEQ ID NO: 2315207 - RNA, 19 nt, Homo sapiens
  misc_RNA (1)...(19): siRNA sense strand
gacaaggauaagauaaaga

SEQ ID NO: 2315208 - RNA, 19 nt, Homo sapiens
  misc_RNA (1)...(19): siRNA sense strand
aagagaggccaaagagcca

SEQ ID NO: 2315209 - RNA, 19 nt, Homo sapiens
  misc_RNA (1)...(19): siRNA sense strand
cagagcaacaggaacaauu

SEQ ID NO: 2315210 - RNA, 19 nt, Homo sapiens
  misc_RNA (1)...(19): siRNA sense strand
gaugcuaagacauguaaaa

SEQ ID NO: 2315211 - RNA, 19 nt, Homo sapiens
  misc_RNA (1)...(19): siRNA sense strand
ccacaaauuauggaugauu

SEQ ID NO: 2315212 - RNA, 19 nt, Homo sapiens
  misc_RNA (1)...(19): siRNA sense strand
aucaagaugagaucagaaa

SEQ ID NO: 2315213 - RNA, 19 nt, Homo sapiens
  misc_RNA (1)...(19): siRNA sense strand
acaauaugugugauggaca

SEQ ID NO: 2315214 - RNA, 19 nt, Homo sapiens
  misc_RNA (1)...(19): siRNA sense strand
aaucaagaugagaucagaa

SEQ ID NO: 2315215 - RNA, 19 nt, Homo sapiens
  misc_RNA (1)...(19): siRNA sense strand
cugacaaggauaagauaaa

SEQ ID NO: 2315216 - RNA, 19 nt, Homo sapiens
  misc_RNA (1)...(19): siRNA sense strand
ggacugugauugugggaca

SEQ ID NO: 2315217 - RNA, 19 nt, Homo sapiens
  misc_RNA (1)...(19): siRNA sense strand
ggccaaagagccagagcaa

SEQ ID NO: 2315218 - RNA, 19 nt, Homo sapiens
  misc_RNA (1)...(19): siRNA sense strand
ucuuagaguugcagggaca

SEQ ID NO: 2315219 - RNA, 19 nt, Homo sapiens
  misc_RNA (1)...(19): siRNA sense strand
ggguauuugagauggcuaa

SEQ ID NO: 2315220 - RNA, 19 nt, Homo sapiens
  misc_RNA (1)...(19): siRNA sense strand
gagaucagaaagaggguau

SEQ ID NO: 2315221 - RNA, 19 nt, Homo sapiens
  misc_RNA (1)...(19): siRNA sense strand
cugaaauguguaaugguaa

SEQ ID NO: 2315222 - RNA, 19 nt, Homo sapiens
  misc_RNA (1)...(19): siRNA sense strand
ccuggauaauggugaguuu

SEQ ID NO: 2315223 - RNA, 19 nt, Homo sapiens
  misc_RNA (1)...(19): siRNA sense strand
uggauaauggugaguuuaa

SEQ ID NO: 2315224 - RNA, 19 nt, Homo sapiens
  misc_RNA (1)...(19): siRNA sense strand
gcuccauugccuacagaua

SEQ ID NO: 2315225 - RNA, 19 nt, Homo sapiens
  misc_RNA (1)...(19): siRNA sense strand
uucaggaacaugagaaaua

SEQ ID NO: 2315226 - RNA, 19 nt, Homo sapiens
  misc_RNA (1)...(19): siRNA sense strand
caacagaacuugcuggaac

SEQ ID NO: 2315227 - RNA, 19 nt, Homo sapiens
  misc_RNA (1)...(19): siRNA sense strand
cgauaaucuucuuagaguu

SEQ ID NO: 2315228 - RNA, 19 nt, Homo sapiens
  misc_RNA (1)...(19): siRNA sense strand
aguauaacccugaugaaaa

SEQ ID NO: 2315229 - RNA, 19 nt, Homo sapiens
  misc_RNA (1)...(19): siRNA sense strand
cagcaaaagaugagugcga

SEQ ID NO: 2315230 - RNA, 19 nt, Homo sapiens
  misc_RNA (1)...(19): siRNA sense strand
agccagagcaacaggaaca

SEQ ID NO: 2315231 - RNA, 19 nt, Homo sapiens
  misc_RNA (1)...(19): siRNA sense strand
gcuucaccuuggagaauuu

SEQ ID NO: 2315232 - RNA, 19 nt, Homo sapiens
  misc_RNA (1)...(19): siRNA sense strand
aaguauaacccugaugaaa

SEQ ID NO: 2315233 - RNA, 19 nt, Homo sapiens
  misc_RNA (1)...(19): siRNA sense strand
auggaaaucuggacugaca

SEQ ID NO: 2315234 - RNA, 19 nt, Homo sapiens
  misc_RNA (1)...(19): siRNA sense strand
acugacaaggauaagauaa

SEQ ID NO: 2315235 - RNA, 19 nt, Homo sapiens
  misc_RNA (1)...(19): siRNA sense strand
gggacaauggcacaugaaa

SEQ ID NO: 2315236 - RNA, 19 nt, Homo sapiens
  misc_RNA (1)...(19): siRNA sense strand
gggugaagaaguaugaagu

SEQ ID NO: 2315237 - RNA, 19 nt, Homo sapiens
  misc_RNA (1)...(19): siRNA sense strand
gcauaaaagagaggccaaa

SEQ ID NO: 2315238 - RNA, 19 nt, Homo sapiens
  misc_RNA (1)...(19): siRNA sense strand
ccuuaguugguauggaaau

SEQ ID NO: 2315239 - RNA, 19 nt, Homo sapiens
  misc_RNA (1)...(19): siRNA sense strand
gggagaggacugugauugu

SEQ ID NO: 2315240 - RNA, 19 nt, Homo sapiens
  misc_RNA (1)...(19): siRNA sense strand
caggcuacacggaaacaua

SEQ ID NO: 2315241 - RNA, 19 nt, Homo sapiens
  misc_RNA (1)...(19): siRNA sense strand
gcucaguuaaucacagcaa

SEQ ID NO: 2315242 - RNA, 19 nt, Homo sapiens
  misc_RNA (1)...(19): siRNA sense strand
agacaggaagguucaggaa

SEQ ID NO: 2315243 - RNA, 19 nt, Homo sapiens
  misc_RNA (1)...(19): siRNA sense strand
aaucacagcaacagaacuu

SEQ ID NO: 2315244 - RNA, 19 nt, Homo sapiens
  misc_RNA (1)...(19): siRNA sense strand
agauaaagauaaccccaaa

SEQ ID NO: 2315245 - RNA, 19 nt, Homo sapiens
  misc_RNA (1)...(19): siRNA sense strand
cuacaauaugugugaugga

SEQ ID NO: 2315246 - RNA, 19 nt, Homo sapiens
  misc_RNA (1)...(19): siRNA sense strand
ugguaauuguccugaugau

SEQ ID NO: 2315247 - RNA, 19 nt, Homo sapiens
  misc_RNA (1)...(19): siRNA sense strand
augcacucuucaaguauaa

SEQ ID NO: 2315248 - RNA, 19 nt, Homo sapiens
  misc_RNA (1)...(19): siRNA sense strand
caaguauaacccugaugaa

SEQ ID NO: 2315249 - RNA, 19 nt, Homo sapiens
  misc_RNA (1)...(19): siRNA sense strand
gacaaggauaagauaaaga

SEQ ID NO: 2315250 - RNA, 19 nt, Homo sapiens
  misc_RNA (1)...(19): siRNA sense strand
aagagaggccaaagagcca

SEQ ID NO: 2315251 - RNA, 19 nt, Homo sapiens
  misc_RNA (1)...(19): siRNA sense strand
cagagcaacaggaacaauu

SEQ ID NO: 2315252 - RNA, 19 nt, Homo sapiens
  misc_RNA (1)...(19): siRNA sense strand
gaugcuaagacauguaaaa

SEQ ID NO: 2315253 - RNA, 19 nt, Homo sapiens
  misc_RNA (1)...(19): siRNA sense strand
ccacaaauuauggaugauu

SEQ ID NO: 2315254 - RNA, 19 nt, Homo sapiens
  misc_RNA (1)...(19): siRNA sense strand
aucaagaugagaucagaaa

SEQ ID NO: 2315255 - RNA, 19 nt, Homo sapiens
  misc_RNA (1)...(19): siRNA sense strand
acaauaugugugauggaca

SEQ ID NO: 2315256 - RNA, 19 nt, Homo sapiens
  misc_RNA (1)...(19): siRNA sense strand
aaucaagaugagaucagaa

SEQ ID NO: 2315257 - RNA, 19 nt, Homo sapiens
  misc_RNA (1)...(19): siRNA sense strand
cugacaaggauaagauaaa

SEQ ID NO: 2315258 - RNA, 19 nt, Homo sapiens
  misc_RNA (1)...(19): siRNA sense strand
ggacugugauugugggaca

SEQ ID NO: 2315259 - RNA, 19 nt, Homo sapiens
  misc_RNA (1)...(19): siRNA sense strand
ggccaaagagccagagcaa

SEQ ID NO: 2315260 - RNA, 19 nt, Homo sapiens
  misc_RNA (1)...(19): siRNA sense strand
ucuuagaguugcagggaca

SEQ ID NO: 2315261 - RNA, 19 nt, Homo sapiens
  misc_RNA (1)...(19): siRNA sense strand
ggguauuugagauggcuaa

SEQ ID NO: 2315262 - RNA, 19 nt, Homo sapiens
  misc_RNA (1)...(19): siRNA sense strand
gagaucagaaagaggguau

SEQ ID NO: 2315263 - RNA, 19 nt, Homo sapiens
  misc_RNA (1)...(19): siRNA sense strand
cugaaauguguaaugguaa

SEQ ID NO: 2315264 - RNA, 19 nt, Homo sapiens
  misc_RNA (1)...(19): siRNA sense strand
ccuggauaauggugaguuu

SEQ ID NO: 2315265 - RNA, 19 nt, Homo sapiens
  misc_RNA (1)...(19): siRNA sense strand
uggauaauggugaguuuaa

SEQ ID NO: 2315266 - RNA, 19 nt, Homo sapiens
  misc_RNA (1)...(19): siRNA sense strand
gcuccauugccuacagaua

SEQ ID NO: 2315267 - RNA, 19 nt, Homo sapiens
  misc_RNA (1)...(19): siRNA sense strand
uucaggaacaugagaaaua

SEQ ID NO: 2315268 - RNA, 19 nt, Homo sapiens
  misc_RNA (1)...(19): siRNA sense strand
caacagaacuugcuggaac

SEQ ID NO: 2315269 - RNA, 19 nt, Homo sapiens
  misc_RNA (1)...(19): siRNA sense strand
cgauaaucuucuuagaguu

SEQ ID NO: 2315270 - RNA, 19 nt, Homo sapiens
  misc_RNA (1)...(19): siRNA sense strand
aguauaacccugaugaaaa

SEQ ID NO: 2315271 - RNA, 19 nt, Homo sapiens
  misc_RNA (1)...(19): siRNA sense strand
cagcaaaagaugagugcga

SEQ ID NO: 2315272 - RNA, 19 nt, Homo sapiens
  misc_RNA (1)...(19): siRNA sense strand
agccagagcaacaggaaca

SEQ ID NO: 2315273 - RNA, 19 nt, Homo sapiens
  misc_RNA (1)...(19): siRNA sense strand
gcuucaccuuggagaauuu

SEQ ID NO: 2315274 - RNA, 19 nt, Homo sapiens
  misc_RNA (1)...(19): siRNA sense strand
aaguauaacccugaugaaa

SEQ ID NO: 2315275 - RNA, 19 nt, Homo sapiens
  misc_RNA (1)...(19): siRNA sense strand
auggaaaucuggacugaca

SEQ ID NO: 2315276 - RNA, 19 nt, Homo sapiens
  misc_RNA (1)...(19): siRNA sense strand
acugacaaggauaagauaa

SEQ ID NO: 2315277 - RNA, 19 nt, Homo sapiens
  misc_RNA (1)...(19): siRNA sense strand
gggacaauggcacaugaaa

SEQ ID NO: 2315278 - RNA, 19 nt, Homo sapiens
  misc_RNA (1)...(19): siRNA sense strand
gggugaagaaguaugaagu

SEQ ID NO: 2315279 - RNA, 19 nt, Homo sapiens
  misc_RNA (1)...(19): siRNA sense strand
gcauaaaagagaggccaaa

SEQ ID NO: 2315280 - RNA, 19 nt, Homo sapiens
  misc_RNA (1)...(19): siRNA sense strand
ccuuaguugguauggaaau

SEQ ID NO: 2315281 - RNA, 19 nt, Homo sapiens
  misc_RNA (1)...(19): siRNA sense strand
gggagaggacugugauugu

SEQ ID NO: 2315282 - RNA, 19 nt, Homo sapiens
  misc_RNA (1)...(19): siRNA sense strand
caggcuacacggaaacaua

SEQ ID NO: 2315283 - RNA, 19 nt, Homo sapiens
  misc_RNA (1)...(19): siRNA sense strand
gcucaguuaaucacagcaa

SEQ ID NO: 2315284 - RNA, 19 nt, Homo sapiens
  misc_RNA (1)...(19): siRNA sense strand
agacaggaagguucaggaa

SEQ ID NO: 2315285 - RNA, 19 nt, Homo sapiens
  misc_RNA (1)...(19): siRNA sense strand
aaucacagcaacagaacuu

SEQ ID NO: 2315286 - RNA, 19 nt, Homo sapiens
  misc_RNA (1)...(19): siRNA sense strand
agauaaagauaaccccaaa

SEQ ID NO: 2315287 - RNA, 19 nt, Homo sapiens
  misc_RNA (1)...(19): siRNA sense strand
cuacaauaugugugaugga

SEQ ID NO: 2315288 - RNA, 19 nt, Homo sapiens
  misc_RNA (1)...(19): siRNA sense strand
ugguaauuguccugaugau

SEQ ID NO: 2315289 - RNA, 19 nt, Homo sapiens
  misc_RNA (1)...(19): siRNA sense strand
augcacucuucaaguauaa

SEQ ID NO: 2315290 - RNA, 19 nt, Homo sapiens
  misc_RNA (1)...(19): siRNA sense strand
caaguauaacccugaugaa

SEQ ID NO: 2315291 - RNA, 19 nt, Homo sapiens
  misc_RNA (1)...(19): siRNA sense strand
gacaaggauaagauaaaga

SEQ ID NO: 2315292 - RNA, 19 nt, Homo sapiens
  misc_RNA (1)...(19): siRNA sense strand
aagagaggccaaagagcca

SEQ ID NO: 2315293 - RNA, 19 nt, Homo sapiens
  misc_RNA (1)...(19): siRNA sense strand
cagagcaacaggaacaauu

SEQ ID NO: 2315294 - RNA, 19 nt, Homo sapiens
  misc_RNA (1)...(19): siRNA sense strand
gaugcuaagacauguaaaa

SEQ ID NO: 2315295 - RNA, 19 nt, Homo sapiens
  misc_RNA (1)...(19): siRNA sense strand
ccacaaauuauggaugauu

SEQ ID NO: 2315296 - RNA, 19 nt, Homo sapiens
  misc_RNA (1)...(19): siRNA sense strand
aucaagaugagaucagaaa

SEQ ID NO: 2315297 - RNA, 19 nt, Homo sapiens
  misc_RNA (1)...(19): siRNA sense strand
acaauaugugugauggaca

SEQ ID NO: 2315298 - RNA, 19 nt, Homo sapiens
  misc_RNA (1)...(19): siRNA sense strand
aaucaagaugagaucagaa

SEQ ID NO: 2315299 - RNA, 19 nt, Homo sapiens
  misc_RNA (1)...(19): siRNA sense strand
augaagagaaugaggcaaa

SEQ ID NO: 2315300 - RNA, 19 nt, Homo sapiens
  misc_RNA (1)...(19): siRNA sense strand
cgaagaugaaagugauaaa

SEQ ID NO: 2315301 - RNA, 19 nt, Homo sapiens
  misc_RNA (1)...(19): siRNA sense strand
aggcagaggcagaaggcaa

SEQ ID NO: 2315302 - RNA, 19 nt, Homo sapiens
  misc_RNA (1)...(19): siRNA sense strand
agauagaugaagagaauga

SEQ ID NO: 2315303 - RNA, 19 nt, Homo sapiens
  misc_RNA (1)...(19): siRNA sense strand
aagcaaagggagaggcaga

SEQ ID NO: 2315304 - RNA, 19 nt, Homo sapiens
  misc_RNA (1)...(19): siRNA sense strand
agaaacagcagcagagaca

SEQ ID NO: 2315305 - RNA, 19 nt, Homo sapiens
  misc_RNA (1)...(19): siRNA sense strand
ucaaagaagcccagguaca

SEQ ID NO: 2315306 - RNA, 19 nt, Homo sapiens
  misc_RNA (1)...(19): siRNA sense strand
agaauaucgcagagaguau

SEQ ID NO: 2315307 - RNA, 19 nt, Homo sapiens
  misc_RNA (1)...(19): siRNA sense strand
agggagaggcagaggcaga

SEQ ID NO: 2315308 - RNA, 19 nt, Homo sapiens
  misc_RNA (1)...(19): siRNA sense strand
ggcugaagagggaagaaua

SEQ ID NO: 2315309 - RNA, 19 nt, Homo sapiens
  misc_RNA (1)...(19): siRNA sense strand
agaagauagaugaagagaa

SEQ ID NO: 2315310 - RNA, 19 nt, Homo sapiens
  misc_RNA (1)...(19): siRNA sense strand
aaucacaggaucagaacaa

SEQ ID NO: 2315311 - RNA, 19 nt, Homo sapiens
  misc_RNA (1)...(19): siRNA sense strand
ggacacgaggaaaggaaga

SEQ ID NO: 2315312 - RNA, 19 nt, Homo sapiens
  misc_RNA (1)...(19): siRNA sense strand
gaagaauaucgcagagagu

SEQ ID NO: 2315313 - RNA, 19 nt, Homo sapiens
  misc_RNA (1)...(19): siRNA sense strand
gggaugauggagacagcua

SEQ ID NO: 2315314 - RNA, 19 nt, Homo sapiens
  misc_RNA (1)...(19): siRNA sense strand
gggacagugauuucaguaa

SEQ ID NO: 2315315 - RNA, 19 nt, Homo sapiens
  misc_RNA (1)...(19): siRNA sense strand
gaacagaaacagcagcaga

SEQ ID NO: 2315316 - RNA, 19 nt, Homo sapiens
  misc_RNA (1)...(19): siRNA sense strand
gagaguaugagaagcgaga

SEQ ID NO: 2315317 - RNA, 19 nt, Homo sapiens
  misc_RNA (1)...(19): siRNA sense strand
augacagcuacgaggaaua

SEQ ID NO: 2315318 - RNA, 19 nt, Homo sapiens
  misc_RNA (1)...(19): siRNA sense strand
ucaccauauuccaggucaa

SEQ ID NO: 2315319 - RNA, 19 nt, Homo sapiens
  misc_RNA (1)...(19): siRNA sense strand
auugaggagugcacaguaa

SEQ ID NO: 2315320 - RNA, 19 nt, Homo sapiens
  misc_RNA (1)...(19): siRNA sense strand
acgagaggcugaagaggga

SEQ ID NO: 2315321 - RNA, 19 nt, Homo sapiens
  misc_RNA (1)...(19): siRNA sense strand
agcaauaaagcgaagagua

SEQ ID NO: 2315322 - RNA, 19 nt, Homo sapiens
  misc_RNA (1)...(19): siRNA sense strand
auguagagauucuguguca

SEQ ID NO: 2315323 - RNA, 19 nt, Homo sapiens
  misc_RNA (1)...(19): siRNA sense strand
gaguaugagaagcgagagu

SEQ ID NO: 2315324 - RNA, 19 nt, Homo sapiens
  misc_RNA (1)...(19): siRNA sense strand
ugaagagcgccgugugauu

SEQ ID NO: 2315325 - RNA, 19 nt, Homo sapiens
  misc_RNA (1)...(19): siRNA sense strand
cauuugagaacaagacuau

SEQ ID NO: 2315326 - RNA, 19 nt, Homo sapiens
  misc_RNA (1)...(19): siRNA sense strand
ugaacaagcacuucgguca

SEQ ID NO: 2315327 - RNA, 19 nt, Homo sapiens
  misc_RNA (1)...(19): siRNA sense strand
ccauuugagaacaagacua

SEQ ID NO: 2315328 - RNA, 19 nt, Homo sapiens
  misc_RNA (1)...(19): siRNA sense strand
agucaagccacuacagaca

SEQ ID NO: 2315329 - RNA, 19 nt, Homo sapiens
  misc_RNA (1)...(19): siRNA sense strand
acugagaauucauggagca

SEQ ID NO: 2315330 - RNA, 19 nt, Homo sapiens
  misc_RNA (1)...(19): siRNA sense strand
agacaaaugcaccuccaaa

SEQ ID NO: 2315331 - RNA, 19 nt, Homo sapiens
  misc_RNA (1)...(19): siRNA sense strand
cagugaccaaucagaaaua

SEQ ID NO: 2315332 - RNA, 19 nt, Homo sapiens
  misc_RNA (1)...(19): siRNA sense strand
gagucuguauggagugaca

SEQ ID NO: 2315333 - RNA, 19 nt, Homo sapiens
  misc_RNA (1)...(19): siRNA sense strand
ucugagagggccaagcaaa

SEQ ID NO: 2315334 - RNA, 19 nt, Homo sapiens
  misc_RNA (1)...(19): siRNA sense strand
gaacaagacuauugaacgc

SEQ ID NO: 2315335 - RNA, 19 nt, Homo sapiens
  misc_RNA (1)...(19): siRNA sense strand
ggcagaaggcaauugaaga

SEQ ID NO: 2315336 - RNA, 19 nt, Homo sapiens
  misc_RNA (1)...(19): siRNA sense strand
acuugaucuuucugaacua

SEQ ID NO: 2315337 - RNA, 19 nt, Homo sapiens
  misc_RNA (1)...(19): siRNA sense strand
uuucugaacuagaugugaa

SEQ ID NO: 2315338 - RNA, 19 nt, Homo sapiens
  misc_RNA (1)...(19): siRNA sense strand
agacgugaccacugacaau

SEQ ID NO: 2315339 - RNA, 19 nt, Homo sapiens
  misc_RNA (1)...(19): siRNA sense strand
aaucacaaucacaggauca

SEQ ID NO: 2315340 - RNA, 19 nt, Homo sapiens
  misc_RNA (1)...(19): siRNA sense strand
guggacacgaggaaaggaa

SEQ ID NO: 2315341 - RNA, 19 nt, Homo sapiens
  misc_RNA (1)...(19): siRNA sense strand
acgaggaaaggaagaccaa

SEQ ID NO: 2315342 - RNA, 19 nt, Homo sapiens
  misc_RNA (1)...(19): siRNA sense strand
ggcagaggcagaaggcaau

SEQ ID NO: 2315343 - RNA, 19 nt, Homo sapiens
  misc_RNA (1)...(19): siRNA sense strand
acaccaaacccacagagaa

SEQ ID NO: 2315344 - RNA, 19 nt, Homo sapiens
  misc_RNA (1)...(19): siRNA sense strand
uugcgcaggucaaacgaaa

SEQ ID NO: 2315345 - RNA, 19 nt, Homo sapiens
  misc_RNA (1)...(19): siRNA sense strand
aguaugacucucuggauuu

SEQ ID NO: 2315346 - RNA, 19 nt, Homo sapiens
  misc_RNA (1)...(19): siRNA sense strand
caccaaacccacagagaac

SEQ ID NO: 2315347 - RNA, 19 nt, Homo sapiens
  misc_RNA (1)...(19): siRNA sense strand
cagugcuaccugagagaga

SEQ ID NO: 2315348 - RNA, 19 nt, Homo sapiens
  misc_RNA (1)...(19): siRNA sense strand
agagagacuuuggaggcaa

SEQ ID NO: 2315349 - RNA, 19 nt, Homo sapiens
  misc_RNA (1)...(19): siRNA sense strand
agacuuuggaggcaagcaa

SEQ ID NO: 2315350 - RNA, 19 nt, Homo sapiens
  misc_RNA (1)...(19): siRNA sense strand
gcgaagaguauuugucaac

SEQ ID NO: 2315351 - RNA, 19 nt, Homo sapiens
  misc_RNA (1)...(19): siRNA sense strand
gaaaacagcuccaagacca

SEQ ID NO: 2315352 - RNA, 19 nt, Homo sapiens
  misc_RNA (1)...(19): siRNA sense strand
acagcgaagaugaaaguga

SEQ ID NO: 2315353 - RNA, 19 nt, Homo sapiens
  misc_RNA (1)...(19): siRNA sense strand
uauuccaggucaagaucaa

SEQ ID NO: 2315354 - RNA, 19 nt, Homo sapiens
  misc_RNA (1)...(19): siRNA sense strand
gggaagaauaucgcagaga

SEQ ID NO: 2315355 - RNA, 19 nt, Homo sapiens
  misc_RNA (1)...(19): siRNA sense strand
gugugauuuaugucgguaa

SEQ ID NO: 2315356 - RNA, 19 nt, Homo sapiens
  misc_RNA (1)...(19): siRNA sense strand
gcacaguaaaucugcggga

SEQ ID NO: 2315357 - RNA, 19 nt, Homo sapiens
  misc_RNA (1)...(19): siRNA sense strand
auucaaacucagaugacuu

SEQ ID NO: 2315358 - RNA, 19 nt, Homo sapiens
  misc_RNA (1)...(19): siRNA sense strand
cagagaagcuugcgcaggu

SEQ ID NO: 2315359 - RNA, 19 nt, Homo sapiens
  misc_RNA (1)...(19): siRNA sense strand
gugcagugaccaaucagaa

SEQ ID NO: 2315360 - RNA, 19 nt, Homo sapiens
  misc_RNA (1)...(19): siRNA sense strand
cagugagucuucugguaca

SEQ ID NO: 2315361 - RNA, 19 nt, Homo sapiens
  misc_RNA (1)...(19): siRNA sense strand
cucuggaacugcaggccua

SEQ ID NO: 2315362 - RNA, 19 nt, Homo sapiens
  misc_RNA (1)...(19): siRNA sense strand
ccauauuccaggucaagau

SEQ ID NO: 2315363 - RNA, 19 nt, Homo sapiens
  misc_RNA (1)...(19): siRNA sense strand
cagaagaacacgagggcca

SEQ ID NO: 2315364 - RNA, 19 nt, Homo sapiens
  misc_RNA (1)...(19): siRNA sense strand
cagaagagccggaagcaga

SEQ ID NO: 2315365 - RNA, 19 nt, Homo sapiens
  misc_RNA (1)...(19): siRNA sense strand
gugcagagacuaauggaca

SEQ ID NO: 2315366 - RNA, 19 nt, Homo sapiens
  misc_RNA (1)...(19): siRNA sense strand
guggaaaaggaaagggauu

SEQ ID NO: 2315367 - RNA, 19 nt, Homo sapiens
  misc_RNA (1)...(19): siRNA sense strand
gguuaaugacauaguaucu

SEQ ID NO: 2315368 - RNA, 19 nt, Homo sapiens
  misc_RNA (1)...(19): siRNA sense strand
guaugauccuguagaggca

SEQ ID NO: 2315369 - RNA, 19 nt, Homo sapiens
  misc_RNA (1)...(19): siRNA sense strand
ccccaaauggcgagaacaa

SEQ ID NO: 2315370 - RNA, 19 nt, Homo sapiens
  misc_RNA (1)...(19): siRNA sense strand
ggaaguugagagagaucga

SEQ ID NO: 2315371 - RNA, 19 nt, Homo sapiens
  misc_RNA (1)...(19): siRNA sense strand
aguggagaagcuagugaaa

SEQ ID NO: 2315372 - RNA, 19 nt, Homo sapiens
  misc_RNA (1)...(19): siRNA sense strand
guguauucuaccucgauaa

SEQ ID NO: 2315373 - RNA, 19 nt, Homo sapiens
  misc_RNA (1)...(19): siRNA sense strand
gcgagaacaacaacgacau

SEQ ID NO: 2315374 - RNA, 19 nt, Homo sapiens
  misc_RNA (1)...(19): siRNA sense strand
aagaacacgggcaggaaaa

SEQ ID NO: 2315375 - RNA, 19 nt, Homo sapiens
  misc_RNA (1)...(19): siRNA sense strand
auuuagaaacgcaggucau

SEQ ID NO: 2315376 - RNA, 19 nt, Homo sapiens
  misc_RNA (1)...(19): siRNA sense strand
agcgaaugaacguugauaa

SEQ ID NO: 2315377 - RNA, 19 nt, Homo sapiens
  misc_RNA (1)...(19): siRNA sense strand
gggauuucuacuuugggaa

SEQ ID NO: 2315378 - RNA, 19 nt, Homo sapiens
  misc_RNA (1)...(19): siRNA sense strand
ggaaauuauaccugugaau

SEQ ID NO: 2315379 - RNA, 19 nt, Homo sapiens
  misc_RNA (1)...(19): siRNA sense strand
aagaaggugacuugggaaa

SEQ ID NO: 2315380 - RNA, 19 nt, Homo sapiens
  misc_RNA (1)...(19): siRNA sense strand
gaucaaagcaagcggcuga

SEQ ID NO: 2315381 - RNA, 19 nt, Homo sapiens
  misc_RNA (1)...(19): siRNA sense strand
uagaaugagcaaagaagaa

SEQ ID NO: 2315382 - RNA, 19 nt, Homo sapiens
  misc_RNA (1)...(19): siRNA sense strand
ggaacuugcuggaggccuu

SEQ ID NO: 2315383 - RNA, 19 nt, Homo sapiens
  misc_RNA (1)...(19): siRNA sense strand
gcuuauaagagaagucaga

SEQ ID NO: 2315384 - RNA, 19 nt, Homo sapiens
  misc_RNA (1)...(19): siRNA sense strand
agaagaugacauuggaaau

SEQ ID NO: 2315385 - RNA, 19 nt, Homo sapiens
  misc_RNA (1)...(19): siRNA sense strand
gggaaagugacauuagaau

SEQ ID NO: 2315386 - RNA, 19 nt, Homo sapiens
  misc_RNA (1)...(19): siRNA sense strand
aagagaagucagagaagau

SEQ ID NO: 2315387 - RNA, 19 nt, Homo sapiens
  misc_RNA (1)...(19): siRNA sense strand
ccuucauaaacgagagcua

SEQ ID NO: 2315388 - RNA, 19 nt, Homo sapiens
  misc_RNA (1)...(19): siRNA sense strand
uugaagaucuggaugaaaa

SEQ ID NO: 2315389 - RNA, 19 nt, Homo sapiens
  misc_RNA (1)...(19): siRNA sense strand
ccugaaauccuuugguaca

SEQ ID NO: 2315390 - RNA, 19 nt, Homo sapiens
  misc_RNA (1)...(19): siRNA sense strand
ccuuuaauuuacuggauga

SEQ ID NO: 2315391 - RNA, 19 nt, Homo sapiens
  misc_RNA (1)...(19): siRNA sense strand
agauagaaaucaugcucuu

SEQ ID NO: 2315392 - RNA, 19 nt, Homo sapiens
  misc_RNA (1)...(19): siRNA sense strand
gcuaauguacacaguggaa

SEQ ID NO: 2315393 - RNA, 19 nt, Homo sapiens
  misc_RNA (1)...(19): siRNA sense strand
gcaaagaagaagacuccau

SEQ ID NO: 2315394 - RNA, 19 nt, Homo sapiens
  misc_RNA (1)...(19): siRNA sense strand
guacaaggaaugcaggaca

SEQ ID NO: 2315395 - RNA, 19 nt, Homo sapiens
  misc_RNA (1)...(19): siRNA sense strand
gugagaagaacuacugaau

SEQ ID NO: 2315396 - RNA, 19 nt, Homo sapiens
  misc_RNA (1)...(19): siRNA sense strand
uacaaggaaugcaggacaa

SEQ ID NO: 2315397 - RNA, 19 nt, Homo sapiens
  misc_RNA (1)...(19): siRNA sense strand
caacauugcuacaggacag

SEQ ID NO: 2315398 - RNA, 19 nt, Homo sapiens
  misc_RNA (1)...(19): siRNA sense strand
uuuagaugucagugagcaa

SEQ ID NO: 2315399 - RNA, 19 nt, Homo sapiens
  misc_RNA (1)...(19): siRNA sense strand
cacaaaugcgucagaaaca

SEQ ID NO: 2315400 - RNA, 19 nt, Homo sapiens
  misc_RNA (1)...(19): siRNA sense strand
ugggagagccuguucgaau

SEQ ID NO: 2315401 - RNA, 19 nt, Homo sapiens
  misc_RNA (1)...(19): siRNA sense strand
gccaauagccuuugacgga

SEQ ID NO: 2315402 - RNA, 19 nt, Homo sapiens
  misc_RNA (1)...(19): siRNA sense strand
uuauaagagaagucagaga

SEQ ID NO: 2315403 - RNA, 19 nt, Homo sapiens
  misc_RNA (1)...(19): siRNA sense strand
ccaagggagaccaguauau

SEQ ID NO: 2315404 - RNA, 19 nt, Homo sapiens
  misc_RNA (1)...(19): siRNA sense strand
acaccaaaguggauccuga

SEQ ID NO: 2315405 - RNA, 19 nt, Homo sapiens
  misc_RNA (1)...(19): siRNA sense strand
guagaaugagcaaagaaga

SEQ ID NO: 2315406 - RNA, 19 nt, Homo sapiens
  misc_RNA (1)...(19): siRNA sense strand
gaaugagcaaagaagaaga

SEQ ID NO: 2315407 - RNA, 19 nt, Homo sapiens
  misc_RNA (1)...(19): siRNA sense strand
acgccugugucaucagaaa

SEQ ID NO: 2315408 - RNA, 19 nt, Homo sapiens
  misc_RNA (1)...(19): siRNA sense strand
ugcuauaauuccaagauga

SEQ ID NO: 2315409 - RNA, 19 nt, Homo sapiens
  misc_RNA (1)...(19): siRNA sense strand
cggagaugucaguccuuua

SEQ ID NO: 2315410 - RNA, 19 nt, Homo sapiens
  misc_RNA (1)...(19): siRNA sense strand
cugaaauccuuugguacaa

SEQ ID NO: 2315411 - RNA, 19 nt, Homo sapiens
  misc_RNA (1)...(19): siRNA sense strand
gagaagucagagaagauga

SEQ ID NO: 2315412 - RNA, 19 nt, Homo sapiens
  misc_RNA (1)...(19): siRNA sense strand
ggaagaaggugacuuggga

SEQ ID NO: 2315413 - RNA, 19 nt, Homo sapiens
  misc_RNA (1)...(19): siRNA sense strand
gaagaaggugacuugggaa

SEQ ID NO: 2315414 - RNA, 19 nt, Homo sapiens
  misc_RNA (1)...(19): siRNA sense strand
uggaaaguaaacugacaau

SEQ ID NO: 2315415 - RNA, 19 nt, Homo sapiens
  misc_RNA (1)...(19): siRNA sense strand
ugaccaucuacaaguguua

SEQ ID NO: 2315416 - RNA, 19 nt, Homo sapiens
  misc_RNA (1)...(19): siRNA sense strand
acugacuggucuaucgaua

SEQ ID NO: 2315417 - RNA, 19 nt, Homo sapiens
  misc_RNA (1)...(19): siRNA sense strand
ugacaauucaggagaccca

SEQ ID NO: 2315418 - RNA, 19 nt, Homo sapiens
  misc_RNA (1)...(19): siRNA sense strand
ccgcuguugccaagggaga

SEQ ID NO: 2315419 - RNA, 19 nt, Homo sapiens
  misc_RNA (1)...(19): siRNA sense strand
cggaaguagaaugagcaaa

SEQ ID NO: 2315420 - RNA, 19 nt, Homo sapiens
  misc_RNA (1)...(19): siRNA sense strand
gaaucaagagacuggggaa

SEQ ID NO: 2315421 - RNA, 19 nt, Homo sapiens
  misc_RNA (1)...(19): siRNA sense strand
uguuuauaccagauagaga

SEQ ID NO: 2315422 - RNA, 19 nt, Homo sapiens
  misc_RNA (1)...(19): siRNA sense strand
cagaaacacuacuaccgaa

SEQ ID NO: 2315423 - RNA, 19 nt, Homo sapiens
  misc_RNA (1)...(19): siRNA sense strand
aaguagaaugagcaaagaa

SEQ ID NO: 2315424 - RNA, 19 nt, Homo sapiens
  misc_RNA (1)...(19): siRNA sense strand
ccaguggaaucaagagacu

SEQ ID NO: 2315425 - RNA, 19 nt, Homo sapiens
  misc_RNA (1)...(19): siRNA sense strand
cuggagaaauuaaagugau

SEQ ID NO: 2315426 - RNA, 19 nt, Homo sapiens
  misc_RNA (1)...(19): siRNA sense strand
guacaaaaguucugguccu

SEQ ID NO: 2315427 - RNA, 19 nt, Homo sapiens
  misc_RNA (1)...(19): siRNA sense strand
cauugaagauguggcaaga

SEQ ID NO: 2315428 - RNA, 19 nt, Homo sapiens
  misc_RNA (1)...(19): siRNA sense strand
uggcaagauguguagauca

SEQ ID NO: 2315429 - RNA, 19 nt, Homo sapiens
  misc_RNA (1)...(19): siRNA sense strand
cgauggagacaauaaagau

SEQ ID NO: 2315430 - RNA, 19 nt, Homo sapiens
  misc_RNA (1)...(19): siRNA sense strand
guuuauaccagauagagau

SEQ ID NO: 2315431 - RNA, 19 nt, Homo sapiens
  misc_RNA (1)...(19): siRNA sense strand
ggucuaucgauaucaagaa

SEQ ID NO: 2315432 - RNA, 19 nt, Homo sapiens
  misc_RNA (1)...(19): siRNA sense strand
gucuaucgauaucaagaaa

SEQ ID NO: 2315433 - RNA, 19 nt, Homo sapiens
  misc_RNA (1)...(19): siRNA sense strand
aauuucaugccgugacaua

SEQ ID NO: 2315434 - RNA, 19 nt, Homo sapiens
  misc_RNA (1)...(19): siRNA sense strand
gagacuuugaagagccaau

SEQ ID NO: 2315435 - RNA, 19 nt, Homo sapiens
  misc_RNA (1)...(19): siRNA sense strand
acggaaguagaaugagcaa

SEQ ID NO: 2315436 - RNA, 19 nt, Homo sapiens
  misc_RNA (1)...(19): siRNA sense strand
uuauugaagaucuggauga

SEQ ID NO: 2315437 - RNA, 19 nt, Homo sapiens
  misc_RNA (1)...(19): siRNA sense strand
gcgaggacccggagaagua

SEQ ID NO: 2315438 - RNA, 19 nt, Homo sapiens
  misc_RNA (1)...(19): siRNA sense strand
gcagaggugugcagagaca

SEQ ID NO: 2315439 - RNA, 19 nt, Homo sapiens
  misc_RNA (1)...(19): siRNA sense strand
ggacaggaccaaugagguu

SEQ ID NO: 2315440 - RNA, 19 nt, Homo sapiens
  misc_RNA (1)...(19): siRNA sense strand
uuucaaggaugaugaggaa

SEQ ID NO: 2315441 - RNA, 19 nt, Homo sapiens
  misc_RNA (1)...(19): siRNA sense strand
gcgggaaacuggagcgagu

SEQ ID NO: 2315442 - RNA, 19 nt, Homo sapiens
  misc_RNA (1)...(19): siRNA sense strand
gcagauacuguguggguga

SEQ ID NO: 2315443 - RNA, 19 nt, Homo sapiens
  misc_RNA (1)...(19): siRNA sense strand
gagaugaaggucagggaca

SEQ ID NO: 2315444 - RNA, 19 nt, Homo sapiens
  misc_RNA (1)...(19): siRNA sense strand
ccaaauacaaaggcagaua

SEQ ID NO: 2315445 - RNA, 19 nt, Homo sapiens
  misc_RNA (1)...(19): siRNA sense strand
cugugagcccguugggaaa

SEQ ID NO: 2315446 - RNA, 19 nt, Homo sapiens
  misc_RNA (1)...(19): siRNA sense strand
cggcagaggugugcagaga

SEQ ID NO: 2315447 - RNA, 19 nt, Homo sapiens
  misc_RNA (1)...(19): siRNA sense strand
uggaagaugaggaggagga

SEQ ID NO: 2315448 - RNA, 19 nt, Homo sapiens
  misc_RNA (1)...(19): siRNA sense strand
cugaugaccaacagaggaa

SEQ ID NO: 2315449 - RNA, 19 nt, Homo sapiens
  misc_RNA (1)...(19): siRNA sense strand
gcugugacuucgagauuga

SEQ ID NO: 2315450 - RNA, 19 nt, Homo sapiens
  misc_RNA (1)...(19): siRNA sense strand
agccgcagguugagagcua

SEQ ID NO: 2315451 - RNA, 19 nt, Homo sapiens
  misc_RNA (1)...(19): siRNA sense strand
gggcugugacuucgagauu

SEQ ID NO: 2315452 - RNA, 19 nt, Homo sapiens
  misc_RNA (1)...(19): siRNA sense strand
gcccaaauacaaaggcaga

SEQ ID NO: 2315453 - RNA, 19 nt, Homo sapiens
  misc_RNA (1)...(19): siRNA sense strand
ucugcgaggacauggauaa

SEQ ID NO: 2315454 - RNA, 19 nt, Homo sapiens
  misc_RNA (1)...(19): siRNA sense strand
augccaaaaugguggagua

SEQ ID NO: 2315455 - RNA, 19 nt, Homo sapiens
  misc_RNA (1)...(19): siRNA sense strand
ggauaaugucugccacaca

SEQ ID NO: 2315456 - RNA, 19 nt, Homo sapiens
  misc_RNA (1)...(19): siRNA sense strand
gcaucaacggcaucuguaa

SEQ ID NO: 2315457 - RNA, 19 nt, Homo sapiens
  misc_RNA (1)...(19): siRNA sense strand
cugggaacccuuugaucaa

SEQ ID NO: 2315458 - RNA, 19 nt, Homo sapiens
  misc_RNA (1)...(19): siRNA sense strand
augaggaggaggaccuaaa

SEQ ID NO: 2315459 - RNA, 19 nt, Homo sapiens
  misc_RNA (1)...(19): siRNA sense strand
cagaaaagcaucaacauga

SEQ ID NO: 2315460 - RNA, 19 nt, Homo sapiens
  misc_RNA (1)...(19): siRNA sense strand
auacaaaggcagauacugu

SEQ ID NO: 2315461 - RNA, 19 nt, Homo sapiens
  misc_RNA (1)...(19): siRNA sense strand
gaggaggaccuaaagauca

SEQ ID NO: 2315462 - RNA, 19 nt, Homo sapiens
  misc_RNA (1)...(19): siRNA sense strand
gugcagagacagaaugugu

SEQ ID NO: 2315463 - RNA, 19 nt, Homo sapiens
  misc_RNA (1)...(19): siRNA sense strand
aaagagaaguggguggaga

SEQ ID NO: 2315464 - RNA, 19 nt, Homo sapiens
  misc_RNA (1)...(19): siRNA sense strand
cgaaauguccucugcacca

SEQ ID NO: 2315465 - RNA, 19 nt, Homo sapiens
  misc_RNA (1)...(19): siRNA sense strand
gcaaggacagccagagcca

SEQ ID NO: 2315466 - RNA, 19 nt, Homo sapiens
  misc_RNA (1)...(19): siRNA sense strand
acaucuuccuggagggagu

SEQ ID NO: 2315467 - RNA, 19 nt, Homo sapiens
  misc_RNA (1)...(19): siRNA sense strand
ccaaggacauuaucgacuu

SEQ ID NO: 2315468 - RNA, 19 nt, Homo sapiens
  misc_RNA (1)...(19): siRNA sense strand
ccaaggagccugucuggau

SEQ ID NO: 2315469 - RNA, 19 nt, Homo sapiens
  misc_RNA (1)...(19): siRNA sense strand
ccuucuacgagcuacaaua

SEQ ID NO: 2315470 - RNA, 19 nt, Homo sapiens
  misc_RNA (1)...(19): siRNA sense strand
caugggugcccguggucaa

SEQ ID NO: 2315471 - RNA, 19 nt, Homo sapiens
  misc_RNA (1)...(19): siRNA sense strand
gagauugacuccggugcua

SEQ ID NO: 2315472 - RNA, 19 nt, Homo sapiens
  misc_RNA (1)...(19): siRNA sense strand
acaacacccugaagagcuu

SEQ ID NO: 2315473 - RNA, 19 nt, Homo sapiens
  misc_RNA (1)...(19): siRNA sense strand
agaaaagcaucaacaugaa

SEQ ID NO: 2315474 - RNA, 19 nt, Homo sapiens
  misc_RNA (1)...(19): siRNA sense strand
cugccagagaugaagguca

SEQ ID NO: 2315475 - RNA, 19 nt, Homo sapiens
  misc_RNA (1)...(19): siRNA sense strand
ccgcaaagacauugaacau

SEQ ID NO: 2315476 - RNA, 19 nt, Homo sapiens
  misc_RNA (1)...(19): siRNA sense strand
agggcaagauggagaacaa

SEQ ID NO: 2315477 - RNA, 19 nt, Homo sapiens
  misc_RNA (1)...(19): siRNA sense strand
agacauugguaguggcaga

SEQ ID NO: 2315478 - RNA, 19 nt, Homo sapiens
  misc_RNA (1)...(19): siRNA sense strand
acaaaaugauggugggcua

SEQ ID NO: 2315479 - RNA, 19 nt, Homo sapiens
  misc_RNA (1)...(19): siRNA sense strand
ccaccaaagugauggaaac

SEQ ID NO: 2315480 - RNA, 19 nt, Homo sapiens
  misc_RNA (1)...(19): siRNA sense strand
aaauaagcccuguggaaca

SEQ ID NO: 2315481 - RNA, 19 nt, Homo sapiens
  misc_RNA (1)...(19): siRNA sense strand
uggaaauucuuguggacga

SEQ ID NO: 2315482 - RNA, 19 nt, Homo sapiens
  misc_RNA (1)...(19): siRNA sense strand
aagaacagaauuugggaau

SEQ ID NO: 2315483 - RNA, 19 nt, Homo sapiens
  misc_RNA (1)...(19): siRNA sense strand
caucauggcuucaucggaa

SEQ ID NO: 2315484 - RNA, 19 nt, Homo sapiens
  misc_RNA (1)...(19): siRNA sense strand
ugauaaacacucaaggaga

SEQ ID NO: 2315485 - RNA, 19 nt, Homo sapiens
  misc_RNA (1)...(19): siRNA sense strand
uguuauugcuacagaagau

SEQ ID NO: 2315486 - RNA, 19 nt, Homo sapiens
  misc_RNA (1)...(19): siRNA sense strand
ccuaggaaacguugugaau

SEQ ID NO: 2315487 - RNA, 19 nt, Homo sapiens
  misc_RNA (1)...(19): siRNA sense strand
uuucacaagaaguggcaaa

SEQ ID NO: 2315488 - RNA, 19 nt, Homo sapiens
  misc_RNA (1)...(19): siRNA sense strand
agauaaugaaguuggcuuu

SEQ ID NO: 2315489 - RNA, 19 nt, Homo sapiens
  misc_RNA (1)...(19): siRNA sense strand
agaagagaucagugagcau

SEQ ID NO: 2315490 - RNA, 19 nt, Homo sapiens
  misc_RNA (1)...(19): siRNA sense strand
caaacugggaauauugaaa

SEQ ID NO: 2315491 - RNA, 19 nt, Homo sapiens
  misc_RNA (1)...(19): siRNA sense strand
acauggaaguggugcagau

SEQ ID NO: 2315492 - RNA, 19 nt, Homo sapiens
  misc_RNA (1)...(19): siRNA sense strand
uuucauuacaagagaccaa

SEQ ID NO: 2315493 - RNA, 19 nt, Homo sapiens
  misc_RNA (1)...(19): siRNA sense strand
ccagagggcaagauggaga

SEQ ID NO: 2315494 - RNA, 19 nt, Homo sapiens
  misc_RNA (1)...(19): siRNA sense strand
aaagaauaccacagaggau

SEQ ID NO: 2315495 - RNA, 19 nt, Homo sapiens
  misc_RNA (1)...(19): siRNA sense strand
cuuuaaaaucugaaggaga

SEQ ID NO: 2315496 - RNA, 19 nt, Homo sapiens
  misc_RNA (1)...(19): siRNA sense strand
ggaaaguauuauaacugga

SEQ ID NO: 2315497 - RNA, 19 nt, Homo sapiens
  misc_RNA (1)...(19): siRNA sense strand
ucacauugaaguuagagaa

SEQ ID NO: 2315498 - RNA, 19 nt, Homo sapiens
  misc_RNA (1)...(19): siRNA sense strand
uccaauaaggguugaucaa

SEQ ID NO: 2315499 - RNA, 19 nt, Homo sapiens
  misc_RNA (1)...(19): siRNA sense strand
acacaggauauuugcaaga

SEQ ID NO: 2315500 - RNA, 19 nt, Homo sapiens
  misc_RNA (1)...(19): siRNA sense strand
agauaaaccaccaugcaga

SEQ ID NO: 2315501 - RNA, 19 nt, Homo sapiens
  misc_RNA (1)...(19): siRNA sense strand
cauuaaacugcuuggcuga

SEQ ID NO: 2315502 - RNA, 19 nt, Homo sapiens
  misc_RNA (1)...(19): siRNA sense strand
cugaaggagaugauuacua

SEQ ID NO: 2315503 - RNA, 19 nt, Homo sapiens
  misc_RNA (1)...(19): siRNA sense strand
gagauaaugaaguuggcuu

SEQ ID NO: 2315504 - RNA, 19 nt, Homo sapiens
  misc_RNA (1)...(19): siRNA sense strand
ugaugaauauuguugccaa

SEQ ID NO: 2315505 - RNA, 19 nt, Homo sapiens
  misc_RNA (1)...(19): siRNA sense strand
gcuuaauuguucucacaga

SEQ ID NO: 2315506 - RNA, 19 nt, Homo sapiens
  misc_RNA (1)...(19): siRNA sense strand
aggcaguaucuaaguuauu

SEQ ID NO: 2315507 - RNA, 19 nt, Homo sapiens
  misc_RNA (1)...(19): siRNA sense strand
gcaugguguuauugcuaca

SEQ ID NO: 2315508 - RNA, 19 nt, Homo sapiens
  misc_RNA (1)...(19): siRNA sense strand
ccuuuggguucccgagauu

SEQ ID NO: 2315509 - RNA, 19 nt, Homo sapiens
  misc_RNA (1)...(19): siRNA sense strand
auuaauggugccuggacua

SEQ ID NO: 2315510 - RNA, 19 nt, Homo sapiens
  misc_RNA (1)...(19): siRNA sense strand
cauagugaccacaggcuuu

SEQ ID NO: 2315511 - RNA, 19 nt, Homo sapiens
  misc_RNA (1)...(19): siRNA sense strand
acugcuuggcugaagguua

SEQ ID NO: 2315512 - RNA, 19 nt, Homo sapiens
  misc_RNA (1)...(19): siRNA sense strand
agguauaaguucaauguuc

SEQ ID NO: 2315513 - RNA, 19 nt, Homo sapiens
  misc_RNA (1)...(19): siRNA sense strand
cauugguaguggcagacaa

SEQ ID NO: 2315514 - RNA, 19 nt, Homo sapiens
  misc_RNA (1)...(19): siRNA sense strand
uguaaauggcagaaaucca

SEQ ID NO: 2315515 - RNA, 19 nt, Homo sapiens
  misc_RNA (1)...(19): siRNA sense strand
ccugaaaggagcugcagca

SEQ ID NO: 2315516 - RNA, 19 nt, Homo sapiens
  misc_RNA (1)...(19): siRNA sense strand
caagaacagaauuugggaa

SEQ ID NO: 2315517 - RNA, 19 nt, Homo sapiens
  misc_RNA (1)...(19): siRNA sense strand
ccacgauaaugcaguucuu

SEQ ID NO: 2315518 - RNA, 19 nt, Homo sapiens
  misc_RNA (1)...(19): siRNA sense strand
ggaaugugugagccugaaa

SEQ ID NO: 2315519 - RNA, 19 nt, Homo sapiens
  misc_RNA (1)...(19): siRNA sense strand
ucucagcuuuacugugaaa

SEQ ID NO: 2315520 - RNA, 19 nt, Homo sapiens
  misc_RNA (1)...(19): siRNA sense strand
ggcaaaccuugguggcuga

SEQ ID NO: 2315521 - RNA, 19 nt, Homo sapiens
  misc_RNA (1)...(19): siRNA sense strand
ccucgauagcuucuguaaa

SEQ ID NO: 2315522 - RNA, 19 nt, Homo sapiens
  misc_RNA (1)...(19): siRNA sense strand
ugaaaggagcugcagcauu

SEQ ID NO: 2315523 - RNA, 19 nt, Homo sapiens
  misc_RNA (1)...(19): siRNA sense strand
gggaucugaugcuagggaa

SEQ ID NO: 2315524 - RNA, 19 nt, Homo sapiens
  misc_RNA (1)...(19): siRNA sense strand
acagaggauuccaagcauu

SEQ ID NO: 2315525 - RNA, 19 nt, Homo sapiens
  misc_RNA (1)...(19): siRNA sense strand
uaccauugcacaugagauu

SEQ ID NO: 2315526 - RNA, 19 nt, Homo sapiens
  misc_RNA (1)...(19): siRNA sense strand
cggcagugacagagaacau

SEQ ID NO: 2315527 - RNA, 19 nt, Homo sapiens
  misc_RNA (1)...(19): siRNA sense strand
agggaguggcagagggaga

SEQ ID NO: 2315528 - RNA, 19 nt, Homo sapiens
  misc_RNA (1)...(19): siRNA sense strand
gaccauauucuguggguga

SEQ ID NO: 2315529 - RNA, 19 nt, Homo sapiens
  misc_RNA (1)...(19): siRNA sense strand
cagagaacaucaaggccuu

SEQ ID NO: 2315530 - RNA, 19 nt, Homo sapiens
  misc_RNA (1)...(19): siRNA sense strand
uggcagagggagaggugga

SEQ ID NO: 2315531 - RNA, 19 nt, Homo sapiens
  misc_RNA (1)...(19): siRNA sense strand
cucuaagacuggagcgguu

SEQ ID NO: 2315532 - RNA, 19 nt, Homo sapiens
  misc_RNA (1)...(19): siRNA sense strand
ucgagcacccggaggacaa

SEQ ID NO: 2315533 - RNA, 19 nt, Homo sapiens
  misc_RNA (1)...(19): siRNA sense strand
agagucagguggaggacca

SEQ ID NO: 2315534 - RNA, 19 nt, Homo sapiens
  misc_RNA (1)...(19): siRNA sense strand
ucuacaagggaguggcaga

SEQ ID NO: 2315535 - RNA, 19 nt, Homo sapiens
  misc_RNA (1)...(19): siRNA sense strand
ccagaaacugaaggacaaa

SEQ ID NO: 2315536 - RNA, 19 nt, Homo sapiens
  misc_RNA (1)...(19): siRNA sense strand
gaggugagcacgagccuga

SEQ ID NO: 2315537 - RNA, 19 nt, Homo sapiens
  misc_RNA (1)...(19): siRNA sense strand
ugucgguggugaugggcau

SEQ ID NO: 2315538 - RNA, 19 nt, Homo sapiens
  misc_RNA (1)...(19): siRNA sense strand
ccauauucugugggugaaa

SEQ ID NO: 2315539 - RNA, 19 nt, Homo sapiens
  misc_RNA (1)...(19): siRNA sense strand
gagagagucagguggagga

SEQ ID NO: 2315540 - RNA, 19 nt, Homo sapiens
  misc_RNA (1)...(19): siRNA sense strand
gagaaggaggacucgguca

SEQ ID NO: 2315541 - RNA, 19 nt, Homo sapiens
  misc_RNA (1)...(19): siRNA sense strand
agaaggaggacucggucau

SEQ ID NO: 2315542 - RNA, 19 nt, Homo sapiens
  misc_RNA (1)...(19): siRNA sense strand
auccagaaacugaaggaca

SEQ ID NO: 2315543 - RNA, 19 nt, Homo sapiens
  misc_RNA (1)...(19): siRNA sense strand
cggcagugacagagaacau

SEQ ID NO: 2315544 - RNA, 19 nt, Homo sapiens
  misc_RNA (1)...(19): siRNA sense strand
agggaguggcagagggaga

SEQ ID NO: 2315545 - RNA, 19 nt, Homo sapiens
  misc_RNA (1)...(19): siRNA sense strand
gaccauauucuguggguga

SEQ ID NO: 2315546 - RNA, 19 nt, Homo sapiens
  misc_RNA (1)...(19): siRNA sense strand
cagagaacaucaaggccuu

SEQ ID NO: 2315547 - RNA, 19 nt, Homo sapiens
  misc_RNA (1)...(19): siRNA sense strand
uggcagagggagaggugga

SEQ ID NO: 2315548 - RNA, 19 nt, Homo sapiens
  misc_RNA (1)...(19): siRNA sense strand
cucuaagacuggagcgguu

SEQ ID NO: 2315549 - RNA, 19 nt, Homo sapiens
  misc_RNA (1)...(19): siRNA sense strand
ucgagcacccggaggacaa

SEQ ID NO: 2315550 - RNA, 19 nt, Homo sapiens
  misc_RNA (1)...(19): siRNA sense strand
agagucagguggaggacca

SEQ ID NO: 2315551 - RNA, 19 nt, Homo sapiens
  misc_RNA (1)...(19): siRNA sense strand
ucuacaagggaguggcaga

SEQ ID NO: 2315552 - RNA, 19 nt, Homo sapiens
  misc_RNA (1)...(19): siRNA sense strand
ccagaaacugaaggacaaa

SEQ ID NO: 2315553 - RNA, 19 nt, Homo sapiens
  misc_RNA (1)...(19): siRNA sense strand
gaggugagcacgagccuga

SEQ ID NO: 2315554 - RNA, 19 nt, Homo sapiens
  misc_RNA (1)...(19): siRNA sense strand
ugucgguggugaugggcau

SEQ ID NO: 2315555 - RNA, 19 nt, Homo sapiens
  misc_RNA (1)...(19): siRNA sense strand
ccauauucugugggugaaa

SEQ ID NO: 2315556 - RNA, 19 nt, Homo sapiens
  misc_RNA (1)...(19): siRNA sense strand
gagagagucagguggagga

SEQ ID NO: 2315557 - RNA, 19 nt, Homo sapiens
  misc_RNA (1)...(19): siRNA sense strand
gagaaggaggacucgguca

SEQ ID NO: 2315558 - RNA, 19 nt, Homo sapiens
  misc_RNA (1)...(19): siRNA sense strand
agaaggaggacucggucau

SEQ ID NO: 2315559 - RNA, 19 nt, Homo sapiens
  misc_RNA (1)...(19): siRNA sense strand
auccagaaacugaaggaca

SEQ ID NO: 2315560 - RNA, 19 nt, Homo sapiens
  misc_RNA (1)...(19): siRNA sense strand
cccagaaaucauacggaaa

SEQ ID NO: 2315561 - RNA, 19 nt, Homo sapiens
  misc_RNA (1)...(19): siRNA sense strand
cagaagaagcagucgcuga

SEQ ID NO: 2315562 - RNA, 19 nt, Homo sapiens
  misc_RNA (1)...(19): siRNA sense strand
gcccagaaaucauacggaa

SEQ ID NO: 2315563 - RNA, 19 nt, Homo sapiens
  misc_RNA (1)...(19): siRNA sense strand
cagaugcagacaagaggaa

SEQ ID NO: 2315564 - RNA, 19 nt, Homo sapiens
  misc_RNA (1)...(19): siRNA sense strand
gcagaaaccauguacagga

SEQ ID NO: 2315565 - RNA, 19 nt, Homo sapiens
  misc_RNA (1)...(19): siRNA sense strand
cugcaggacagaucagaga

SEQ ID NO: 2315566 - RNA, 19 nt, Homo sapiens
  misc_RNA (1)...(19): siRNA sense strand
acggaaaugagaagcgguu

SEQ ID NO: 2315567 - RNA, 19 nt, Homo sapiens
  misc_RNA (1)...(19): siRNA sense strand
gugcauauccuccggcuca

SEQ ID NO: 2315568 - RNA, 19 nt, Homo sapiens
  misc_RNA (1)...(19): siRNA sense strand
ggccagagaugcugagcga

SEQ ID NO: 2315569 - RNA, 19 nt, Homo sapiens
  misc_RNA (1)...(19): siRNA sense strand
cagugaugguucugcgcaa

SEQ ID NO: 2315570 - RNA, 19 nt, Homo sapiens
  misc_RNA (1)...(19): siRNA sense strand
cuggcaagcacaagggcua

SEQ ID NO: 2315571 - RNA, 19 nt, Homo sapiens
  misc_RNA (1)...(19): siRNA sense strand
aggaagaagaggagcuguu

SEQ ID NO: 2315572 - RNA, 19 nt, Homo sapiens
  misc_RNA (1)...(19): siRNA sense strand
agaaacaaggcgaggagga

SEQ ID NO: 2315573 - RNA, 19 nt, Homo sapiens
  misc_RNA (1)...(19): siRNA sense strand
ucaucuaccaagagaaaca

SEQ ID NO: 2315574 - RNA, 19 nt, Homo sapiens
  misc_RNA (1)...(19): siRNA sense strand
gcgaggaggaggaugcaga

SEQ ID NO: 2315575 - RNA, 19 nt, Homo sapiens
  misc_RNA (1)...(19): siRNA sense strand
aggagaaggaagaagagga

SEQ ID NO: 2315576 - RNA, 19 nt, Homo sapiens
  misc_RNA (1)...(19): siRNA sense strand
gagcagaugaacucgguga

SEQ ID NO: 2315577 - RNA, 19 nt, Homo sapiens
  misc_RNA (1)...(19): siRNA sense strand
aggaggaggaugcagaaau

SEQ ID NO: 2315578 - RNA, 19 nt, Homo sapiens
  misc_RNA (1)...(19): siRNA sense strand
ucauagaccaguuggcuga

SEQ ID NO: 2315579 - RNA, 19 nt, Homo sapiens
  misc_RNA (1)...(19): siRNA sense strand
uguuugaggccuuuggcaa

SEQ ID NO: 2315580 - RNA, 19 nt, Homo sapiens
  misc_RNA (1)...(19): siRNA sense strand
uguacgaccaggagcguuu

SEQ ID NO: 2315581 - RNA, 19 nt, Homo sapiens
  misc_RNA (1)...(19): siRNA sense strand
agaaggaagaagaggagcu

SEQ ID NO: 2315582 - RNA, 19 nt, Homo sapiens
  misc_RNA (1)...(19): siRNA sense strand
ugacagaggaguguggcaa

SEQ ID NO: 2315583 - RNA, 19 nt, Homo sapiens
  misc_RNA (1)...(19): siRNA sense strand
agaaguacgccauggagca

SEQ ID NO: 2315584 - RNA, 19 nt, Homo sapiens
  misc_RNA (1)...(19): siRNA sense strand
uggcugaaguguacgacca

SEQ ID NO: 2315585 - RNA, 19 nt, Homo sapiens
  misc_RNA (1)...(19): siRNA sense strand
ccucggugggaguggugaa

SEQ ID NO: 2315586 - RNA, 19 nt, Homo sapiens
  misc_RNA (1)...(19): siRNA sense strand
ggccagagaugcugagcga

SEQ ID NO: 2315587 - RNA, 19 nt, Homo sapiens
  misc_RNA (1)...(19): siRNA sense strand
cagugaugguucugcgcaa

SEQ ID NO: 2315588 - RNA, 19 nt, Homo sapiens
  misc_RNA (1)...(19): siRNA sense strand
cuggcaagcacaagggcua

SEQ ID NO: 2315589 - RNA, 19 nt, Homo sapiens
  misc_RNA (1)...(19): siRNA sense strand
aggaagaagaggagcuguu

SEQ ID NO: 2315590 - RNA, 19 nt, Homo sapiens
  misc_RNA (1)...(19): siRNA sense strand
agaaacaaggcgaggagga

SEQ ID NO: 2315591 - RNA, 19 nt, Homo sapiens
  misc_RNA (1)...(19): siRNA sense strand
ucaucuaccaagagaaaca

SEQ ID NO: 2315592 - RNA, 19 nt, Homo sapiens
  misc_RNA (1)...(19): siRNA sense strand
gcgaggaggaggaugcaga

SEQ ID NO: 2315593 - RNA, 19 nt, Homo sapiens
  misc_RNA (1)...(19): siRNA sense strand
aggagaaggaagaagagga

SEQ ID NO: 2315594 - RNA, 19 nt, Homo sapiens
  misc_RNA (1)...(19): siRNA sense strand
gagcagaugaacucgguga

SEQ ID NO: 2315595 - RNA, 19 nt, Homo sapiens
  misc_RNA (1)...(19): siRNA sense strand
aggaggaggaugcagaaau

SEQ ID NO: 2315596 - RNA, 19 nt, Homo sapiens
  misc_RNA (1)...(19): siRNA sense strand
ucauagaccaguuggcuga

SEQ ID NO: 2315597 - RNA, 19 nt, Homo sapiens
  misc_RNA (1)...(19): siRNA sense strand
uguuugaggccuuuggcaa

SEQ ID NO: 2315598 - RNA, 19 nt, Homo sapiens
  misc_RNA (1)...(19): siRNA sense strand
uguacgaccaggagcguuu

SEQ ID NO: 2315599 - RNA, 19 nt, Homo sapiens
  misc_RNA (1)...(19): siRNA sense strand
agaaggaagaagaggagcu

SEQ ID NO: 2315600 - RNA, 19 nt, Homo sapiens
  misc_RNA (1)...(19): siRNA sense strand
ugacagaggaguguggcaa

SEQ ID NO: 2315601 - RNA, 19 nt, Homo sapiens
  misc_RNA (1)...(19): siRNA sense strand
agaaguacgccauggagca

SEQ ID NO: 2315602 - RNA, 19 nt, Homo sapiens
  misc_RNA (1)...(19): siRNA sense strand
uggcugaaguguacgacca

SEQ ID NO: 2315603 - RNA, 19 nt, Homo sapiens
  misc_RNA (1)...(19): siRNA sense strand
ccucggugggaguggugaa

SEQ ID NO: 2315604 - RNA, 19 nt, Homo sapiens
  misc_RNA (1)...(19): siRNA sense strand
gaacauaaccacagggaca

SEQ ID NO: 2315605 - RNA, 19 nt, Homo sapiens
  misc_RNA (1)...(19): siRNA sense strand
aggcguaagcuuugagaua

SEQ ID NO: 2315606 - RNA, 19 nt, Homo sapiens
  misc_RNA (1)...(19): siRNA sense strand
ugacagacgaagagggcaa

SEQ ID NO: 2315607 - RNA, 19 nt, Homo sapiens
  misc_RNA (1)...(19): siRNA sense strand
ccgucaagcagaugaauaa

SEQ ID NO: 2315608 - RNA, 19 nt, Homo sapiens
  misc_RNA (1)...(19): siRNA sense strand
cauuaugggucaagcuuua

SEQ ID NO: 2315609 - RNA, 19 nt, Homo sapiens
  misc_RNA (1)...(19): siRNA sense strand
uggaaaugggcgugagaau

SEQ ID NO: 2315610 - RNA, 19 nt, Homo sapiens
  misc_RNA (1)...(19): siRNA sense strand
cagaagaugcaaagagaca

SEQ ID NO: 2315611 - RNA, 19 nt, Homo sapiens
  misc_RNA (1)...(19): siRNA sense strand
agauaaaagcugaggauga

SEQ ID NO: 2315612 - RNA, 19 nt, Homo sapiens
  misc_RNA (1)...(19): siRNA sense strand
gccaagaaacagaagacaa

SEQ ID NO: 2315613 - RNA, 19 nt, Homo sapiens
  misc_RNA (1)...(19): siRNA sense strand
agucggacguggagaucaa

SEQ ID NO: 2315614 - RNA, 19 nt, Homo sapiens
  misc_RNA (1)...(19): siRNA sense strand
caguagucacccugaauaa

SEQ ID NO: 2315615 - RNA, 19 nt, Homo sapiens
  misc_RNA (1)...(19): siRNA sense strand
ucagagacggcgagaacua

SEQ ID NO: 2315616 - RNA, 19 nt, Homo sapiens
  misc_RNA (1)...(19): siRNA sense strand
ggugauugagguugggaau

SEQ ID NO: 2315617 - RNA, 19 nt, Homo sapiens
  misc_RNA (1)...(19): siRNA sense strand
ccaugaaaggcgugaaguu

SEQ ID NO: 2315618 - RNA, 19 nt, Homo sapiens
  misc_RNA (1)...(19): siRNA sense strand
ggagaaagcugcccaggga

SEQ ID NO: 2315619 - RNA, 19 nt, Homo sapiens
  misc_RNA (1)...(19): siRNA sense strand
uggaaggagucgagauugu

SEQ ID NO: 2315620 - RNA, 19 nt, Homo sapiens
  misc_RNA (1)...(19): siRNA sense strand
agagacaagccaagaaaca

SEQ ID NO: 2315621 - RNA, 19 nt, Homo sapiens
  misc_RNA (1)...(19): siRNA sense strand
gcucagagacggcgagaac

SEQ ID NO: 2315622 - RNA, 19 nt, Homo sapiens
  misc_RNA (1)...(19): siRNA sense strand
cuuacaaagugcaggugau

SEQ ID NO: 2315623 - RNA, 19 nt, Homo sapiens
  misc_RNA (1)...(19): siRNA sense strand
gcaguugaguucaggcaga

SEQ ID NO: 2315624 - RNA, 19 nt, Homo sapiens
  misc_RNA (1)...(19): siRNA sense strand
ccgcagugggcuaccauaa

SEQ ID NO: 2315625 - RNA, 19 nt, Homo sapiens
  misc_RNA (1)...(19): siRNA sense strand
caucucaagacaaggacaa

SEQ ID NO: 2315626 - RNA, 19 nt, Homo sapiens
  misc_RNA (1)...(19): siRNA sense strand
ggugaugguuccugaggca

SEQ ID NO: 2315627 - RNA, 19 nt, Homo sapiens
  misc_RNA (1)...(19): siRNA sense strand
ggaccgaagcaaagaucca

SEQ ID NO: 2315628 - RNA, 19 nt, Homo sapiens
  misc_RNA (1)...(19): siRNA sense strand
guuggaaggagucgagauu

SEQ ID NO: 2315629 - RNA, 19 nt, Homo sapiens
  misc_RNA (1)...(19): siRNA sense strand
ucggagacuucaaggccua

SEQ ID NO: 2315630 - RNA, 19 nt, Homo sapiens
  misc_RNA (1)...(19): siRNA sense strand
ccucauaguugcuggcuac

SEQ ID NO: 2315631 - RNA, 19 nt, Homo sapiens
  misc_RNA (1)...(19): siRNA sense strand
agacaagccaagaaacaga

SEQ ID NO: 2315632 - RNA, 19 nt, Homo sapiens
  misc_RNA (1)...(19): siRNA sense strand
cagaagacaaggcggacuu

SEQ ID NO: 2315633 - RNA, 19 nt, Homo sapiens
  misc_RNA (1)...(19): siRNA sense strand
acacugggaccgaagcaaa

SEQ ID NO: 2315634 - RNA, 19 nt, Homo sapiens
  misc_RNA (1)...(19): siRNA sense strand
gagcaugacagcuugaaaa

SEQ ID NO: 2315635 - RNA, 19 nt, Homo sapiens
  misc_RNA (1)...(19): siRNA sense strand
aaacagaagacaaggcgga

SEQ ID NO: 2315636 - RNA, 19 nt, Homo sapiens
  misc_RNA (1)...(19): siRNA sense strand
aagcaugggacuuugaaau

SEQ ID NO: 2315637 - RNA, 19 nt, Homo sapiens
  misc_RNA (1)...(19): siRNA sense strand
gagauaaagcuguacacca

SEQ ID NO: 2315638 - RNA, 19 nt, Homo sapiens
  misc_RNA (1)...(19): siRNA sense strand
gaauaaugacaucgaugau

SEQ ID NO: 2315639 - RNA, 19 nt, Homo sapiens
  misc_RNA (1)...(19): siRNA sense strand
uggcaagguccucagcaaa

SEQ ID NO: 2315640 - RNA, 19 nt, Homo sapiens
  misc_RNA (1)...(19): siRNA sense strand
ccacagugaguguaaccaa

SEQ ID NO: 2315641 - RNA, 19 nt, Homo sapiens
  misc_RNA (1)...(19): siRNA sense strand
aggagaugguagaugaguu

SEQ ID NO: 2315642 - RNA, 19 nt, Homo sapiens
  misc_RNA (1)...(19): siRNA sense strand
ccugaauaaccaaaucaaa

SEQ ID NO: 2315643 - RNA, 19 nt, Homo sapiens
  misc_RNA (1)...(19): siRNA sense strand
cggagaagacaccgugaca

SEQ ID NO: 2315644 - RNA, 19 nt, Homo sapiens
  misc_RNA (1)...(19): siRNA sense strand
gcucaaggcagaaggcaac

SEQ ID NO: 2315645 - RNA, 19 nt, Homo sapiens
  misc_RNA (1)...(19): siRNA sense strand
aguucugccuggagauuau

SEQ ID NO: 2315646 - RNA, 19 nt, Homo sapiens
  misc_RNA (1)...(19): siRNA sense strand
cuuccuacauuauggguca

SEQ ID NO: 2315647 - RNA, 19 nt, Homo sapiens
  misc_RNA (1)...(19): siRNA sense strand
agcaugggacuuugaaaua

SEQ ID NO: 2315648 - RNA, 19 nt, Homo sapiens
  misc_RNA (1)...(19): siRNA sense strand
aggagaugguguuccagaa

SEQ ID NO: 2315649 - RNA, 19 nt, Homo sapiens
  misc_RNA (1)...(19): siRNA sense strand
gguuugagcaagcguucua

SEQ ID NO: 2315650 - RNA, 19 nt, Homo sapiens
  misc_RNA (1)...(19): siRNA sense strand
agcucaaggcagaaggcaa

SEQ ID NO: 2315651 - RNA, 19 nt, Homo sapiens
  misc_RNA (1)...(19): siRNA sense strand
ccauagggugauugagguu

SEQ ID NO: 2315652 - RNA, 19 nt, Homo sapiens
  misc_RNA (1)...(19): siRNA sense strand
cguugaaaccccagacauu

SEQ ID NO: 2315653 - RNA, 19 nt, Homo sapiens
  misc_RNA (1)...(19): siRNA sense strand
agguggaagugcuggagga

SEQ ID NO: 2315654 - RNA, 19 nt, Homo sapiens
  misc_RNA (1)...(19): siRNA sense strand
cugaauaccuuccuacauu

SEQ ID NO: 2315655 - RNA, 19 nt, Homo sapiens
  misc_RNA (1)...(19): siRNA sense strand
cgacaauccaauccagaca

SEQ ID NO: 2315656 - RNA, 19 nt, Homo sapiens
  misc_RNA (1)...(19): siRNA sense strand
cuuugaaauaccagacaga

SEQ ID NO: 2315657 - RNA, 19 nt, Homo sapiens
  misc_RNA (1)...(19): siRNA sense strand
ugaacggacccgaaggaga

SEQ ID NO: 2315658 - RNA, 19 nt, Homo sapiens
  misc_RNA (1)...(19): siRNA sense strand
acaagagccuggaggugga

SEQ ID NO: 2315659 - RNA, 19 nt, Homo sapiens
  misc_RNA (1)...(19): siRNA sense strand
caguggagcaugacagcuu

SEQ ID NO: 2315660 - RNA, 19 nt, Homo sapiens
  misc_RNA (1)...(19): siRNA sense strand
ccagggaagcugaucgaga

SEQ ID NO: 2315661 - RNA, 19 nt, Homo sapiens
  misc_RNA (1)...(19): siRNA sense strand
augcaaagagacaagccaa

SEQ ID NO: 2315662 - RNA, 19 nt, Homo sapiens
  misc_RNA (1)...(19): siRNA sense strand
aauccaauccagacaguuu

SEQ ID NO: 2315663 - RNA, 19 nt, Homo sapiens
  misc_RNA (1)...(19): siRNA sense strand
auggcaagguccucagcaa

SEQ ID NO: 2315664 - RNA, 19 nt, Homo sapiens
  misc_RNA (1)...(19): siRNA sense strand
guuccaaccucuugaccca

SEQ ID NO: 2315665 - RNA, 19 nt, Homo sapiens
  misc_RNA (1)...(19): siRNA sense strand
ccuuaaacggagagcccga

SEQ ID NO: 2315666 - RNA, 19 nt, Homo sapiens
  misc_RNA (1)...(19): siRNA sense strand
cugcagcauuuacggagaa

SEQ ID NO: 2315667 - RNA, 19 nt, Homo sapiens
  misc_RNA (1)...(19): siRNA sense strand
gggugauugagguugggaa

SEQ ID NO: 2315668 - RNA, 19 nt, Homo sapiens
  misc_RNA (1)...(19): siRNA sense strand
cagaugagcugcugggugu

SEQ ID NO: 2315669 - RNA, 19 nt, Homo sapiens
  misc_RNA (1)...(19): siRNA sense strand
uggaagagugagcggguca

SEQ ID NO: 2315670 - RNA, 19 nt, Homo sapiens
  misc_RNA (1)...(19): siRNA sense strand
cugccaagacccagagguu

SEQ ID NO: 2315671 - RNA, 19 nt, Homo sapiens
  misc_RNA (1)...(19): siRNA sense strand
caagaaucuagaagcaaaa

SEQ ID NO: 2315672 - RNA, 19 nt, Homo sapiens
  misc_RNA (1)...(19): siRNA sense strand
gugcauagcgaggaagaca

SEQ ID NO: 2315673 - RNA, 19 nt, Homo sapiens
  misc_RNA (1)...(19): siRNA sense strand
acaaguugguggaggccuu

SEQ ID NO: 2315674 - RNA, 19 nt, Homo sapiens
  misc_RNA (1)...(19): siRNA sense strand
caucaagccucaugggauc

SEQ ID NO: 2315675 - RNA, 19 nt, Homo sapiens
  misc_RNA (1)...(19): siRNA sense strand
gggaagacaaguuggugga

SEQ ID NO: 2315676 - RNA, 19 nt, Homo sapiens
  misc_RNA (1)...(19): siRNA sense strand
cccugagccugaaggacaa

SEQ ID NO: 2315677 - RNA, 19 nt, Homo sapiens
  misc_RNA (1)...(19): siRNA sense strand
gcgaagagcugcugcugcu

SEQ ID NO: 2315678 - RNA, 19 nt, Homo sapiens
  misc_RNA (1)...(19): siRNA sense strand
gugacauugcccaguuuaa

SEQ ID NO: 2315679 - RNA, 19 nt, Homo sapiens
  misc_RNA (1)...(19): siRNA sense strand
agaggcaggaaguggaaaa

SEQ ID NO: 2315680 - RNA, 19 nt, Homo sapiens
  misc_RNA (1)...(19): siRNA sense strand
cgggcaggccaacgagauu

SEQ ID NO: 2315681 - RNA, 19 nt, Homo sapiens
  misc_RNA (1)...(19): siRNA sense strand
acaaguugguggaggccuu

SEQ ID NO: 2315682 - RNA, 19 nt, Homo sapiens
  misc_RNA (1)...(19): siRNA sense strand
caucaagccucaugggauc

SEQ ID NO: 2315683 - RNA, 19 nt, Homo sapiens
  misc_RNA (1)...(19): siRNA sense strand
gggaagacaaguuggugga

SEQ ID NO: 2315684 - RNA, 19 nt, Homo sapiens
  misc_RNA (1)...(19): siRNA sense strand
cccugagccugaaggacaa

SEQ ID NO: 2315685 - RNA, 19 nt, Homo sapiens
  misc_RNA (1)...(19): siRNA sense strand
gcgaagagcugcugcugcu

SEQ ID NO: 2315686 - RNA, 19 nt, Homo sapiens
  misc_RNA (1)...(19): siRNA sense strand
gugacauugcccaguuuaa

SEQ ID NO: 2315687 - RNA, 19 nt, Homo sapiens
  misc_RNA (1)...(19): siRNA sense strand
agaggcaggaaguggaaaa

SEQ ID NO: 2315688 - RNA, 19 nt, Homo sapiens
  misc_RNA (1)...(19): siRNA sense strand
cgggcaggccaacgagauu

SEQ ID NO: 2315689 - RNA, 19 nt, Homo sapiens
  misc_RNA (1)...(19): siRNA sense strand
ugacagaagcugaaggaga

SEQ ID NO: 2315690 - RNA, 19 nt, Homo sapiens
  misc_RNA (1)...(19): siRNA sense strand
cugauaaaguccugcaaaa

SEQ ID NO: 2315691 - RNA, 19 nt, Homo sapiens
  misc_RNA (1)...(19): siRNA sense strand
augcacaaggacagagaua

SEQ ID NO: 2315692 - RNA, 19 nt, Homo sapiens
  misc_RNA (1)...(19): siRNA sense strand
cagaagaaauagaaguacu

SEQ ID NO: 2315693 - RNA, 19 nt, Homo sapiens
  misc_RNA (1)...(19): siRNA sense strand
gugggaaguauaugguaaa

SEQ ID NO: 2315694 - RNA, 19 nt, Homo sapiens
  misc_RNA (1)...(19): siRNA sense strand
ugugggaaguauaugguaa

SEQ ID NO: 2315695 - RNA, 19 nt, Homo sapiens
  misc_RNA (1)...(19): siRNA sense strand
aguacaaacuggaggugca

SEQ ID NO: 2315696 - RNA, 19 nt, Homo sapiens
  misc_RNA (1)...(19): siRNA sense strand
gcuacgaggaccaaggcaa

SEQ ID NO: 2315697 - RNA, 19 nt, Homo sapiens
  misc_RNA (1)...(19): siRNA sense strand
ccucauuauuugacuaaga

SEQ ID NO: 2315698 - RNA, 19 nt, Homo sapiens
  misc_RNA (1)...(19): siRNA sense strand
ugcgaauaaucgagaauuu

SEQ ID NO: 2315699 - RNA, 19 nt, Homo sapiens
  misc_RNA (1)...(19): siRNA sense strand
aaauauaccuucugggauc

SEQ ID NO: 2315700 - RNA, 19 nt, Homo sapiens
  misc_RNA (1)...(19): siRNA sense strand
ggcacuagacagagcagaa

SEQ ID NO: 2315701 - RNA, 19 nt, Homo sapiens
  misc_RNA (1)...(19): siRNA sense strand
uaagcaaggaccugugaaa

SEQ ID NO: 2315702 - RNA, 19 nt, Homo sapiens
  misc_RNA (1)...(19): siRNA sense strand
ugacuauagguguggguuu

SEQ ID NO: 2315703 - RNA, 19 nt, Homo sapiens
  misc_RNA (1)...(19): siRNA sense strand
aggaagauacagugaaaau

SEQ ID NO: 2315704 - RNA, 19 nt, Homo sapiens
  misc_RNA (1)...(19): siRNA sense strand
agcagaagaaauagaagua

SEQ ID NO: 2315705 - RNA, 19 nt, Homo sapiens
  misc_RNA (1)...(19): siRNA sense strand
cggcauaauuuacccucaa

SEQ ID NO: 2315706 - RNA, 19 nt, Homo sapiens
  misc_RNA (1)...(19): siRNA sense strand
auuuauaaguccucaguca

SEQ ID NO: 2315707 - RNA, 19 nt, Homo sapiens
  misc_RNA (1)...(19): siRNA sense strand
acauaacagacaaggauga

SEQ ID NO: 2315708 - RNA, 19 nt, Homo sapiens
  misc_RNA (1)...(19): siRNA sense strand
uauacaagacugaugggaa

SEQ ID NO: 2315709 - RNA, 19 nt, Homo sapiens
  misc_RNA (1)...(19): siRNA sense strand
ggacagagauacacagcag

SEQ ID NO: 2315710 - RNA, 19 nt, Homo sapiens
  misc_RNA (1)...(19): siRNA sense strand
ccauuaucaccuaaacaaa

SEQ ID NO: 2315711 - RNA, 19 nt, Homo sapiens
  misc_RNA (1)...(19): siRNA sense strand
agcaaggaccugugaaaga

SEQ ID NO: 2315712 - RNA, 19 nt, Homo sapiens
  misc_RNA (1)...(19): siRNA sense strand
cgauuuauccaguugaaaa

SEQ ID NO: 2315713 - RNA, 19 nt, Homo sapiens
  misc_RNA (1)...(19): siRNA sense strand
cauuuacguuggaaaggaa

SEQ ID NO: 2315714 - RNA, 19 nt, Homo sapiens
  misc_RNA (1)...(19): siRNA sense strand
aggaugauuuugcgaauaa

SEQ ID NO: 2315715 - RNA, 19 nt, Homo sapiens
  misc_RNA (1)...(19): siRNA sense strand
cugaguaucuggaaagagu

SEQ ID NO: 2315716 - RNA, 19 nt, Homo sapiens
  misc_RNA (1)...(19): siRNA sense strand
gauacacagcagaagaaau

SEQ ID NO: 2315717 - RNA, 19 nt, Homo sapiens
  misc_RNA (1)...(19): siRNA sense strand
auaacugaguaucuggaaa

SEQ ID NO: 2315718 - RNA, 19 nt, Homo sapiens
  misc_RNA (1)...(19): siRNA sense strand
ccucaauggugucccaaga

SEQ ID NO: 2315719 - RNA, 19 nt, Homo sapiens
  misc_RNA (1)...(19): siRNA sense strand
agaaaauagacaacggaau

SEQ ID NO: 2315720 - RNA, 19 nt, Homo sapiens
  misc_RNA (1)...(19): siRNA sense strand
cuacgaggaccaaggcaau

SEQ ID NO: 2315721 - RNA, 19 nt, Homo sapiens
  misc_RNA (1)...(19): siRNA sense strand
aguucaagcucuacauuca

SEQ ID NO: 2315722 - RNA, 19 nt, Homo sapiens
  misc_RNA (1)...(19): siRNA sense strand
cagcagaagaaauagaagu

SEQ ID NO: 2315723 - RNA, 19 nt, Homo sapiens
  misc_RNA (1)...(19): siRNA sense strand
gagucauuuacguuggaaa

SEQ ID NO: 2315724 - RNA, 19 nt, Homo sapiens
  misc_RNA (1)...(19): siRNA sense strand
uuacaaggaagcugcacaa

SEQ ID NO: 2315725 - RNA, 19 nt, Homo sapiens
  misc_RNA (1)...(19): siRNA sense strand
ggcaauauagcguuggauu

SEQ ID NO: 2315726 - RNA, 19 nt, Homo sapiens
  misc_RNA (1)...(19): siRNA sense strand
auucagcaguucagucaaa

SEQ ID NO: 2315727 - RNA, 19 nt, Homo sapiens
  misc_RNA (1)...(19): siRNA sense strand
acagagauacacagcagaa

SEQ ID NO: 2315728 - RNA, 19 nt, Homo sapiens
  misc_RNA (1)...(19): siRNA sense strand
auagaaguacucaggacaa

SEQ ID NO: 2315729 - RNA, 19 nt, Homo sapiens
  misc_RNA (1)...(19): siRNA sense strand
guugaagaugcuauagaau

SEQ ID NO: 2315730 - RNA, 19 nt, Homo sapiens
  misc_RNA (1)...(19): siRNA sense strand
cuguugaucacaagggaga

SEQ ID NO: 2315731 - RNA, 19 nt, Homo sapiens
  misc_RNA (1)...(19): siRNA sense strand
acacauaacagacaaggau

SEQ ID NO: 2315732 - RNA, 19 nt, Homo sapiens
  misc_RNA (1)...(19): siRNA sense strand
gagagaacguuuugccuau

SEQ ID NO: 2315733 - RNA, 19 nt, Homo sapiens
  misc_RNA (1)...(19): siRNA sense strand
gaggaaaucuaguggugac

SEQ ID NO: 2315734 - RNA, 19 nt, Homo sapiens
  misc_RNA (1)...(19): siRNA sense strand
uugaaagaccucagucauu

SEQ ID NO: 2315735 - RNA, 19 nt, Homo sapiens
  misc_RNA (1)...(19): siRNA sense strand
ccagaagaccucaccaaca

SEQ ID NO: 2315736 - RNA, 19 nt, Homo sapiens
  misc_RNA (1)...(19): siRNA sense strand
guucuuauuccaacaacaa

SEQ ID NO: 2315737 - RNA, 19 nt, Homo sapiens
  misc_RNA (1)...(19): siRNA sense strand
gaaugaugacagaagcuga

SEQ ID NO: 2315738 - RNA, 19 nt, Homo sapiens
  misc_RNA (1)...(19): siRNA sense strand
cguuggaaaggaagauaca

SEQ ID NO: 2315739 - RNA, 19 nt, Homo sapiens
  misc_RNA (1)...(19): siRNA sense strand
gcguuggauuugagguugu

SEQ ID NO: 2315740 - RNA, 19 nt, Homo sapiens
  misc_RNA (1)...(19): siRNA sense strand
caucaagaucacacaacuu

SEQ ID NO: 2315741 - RNA, 19 nt, Homo sapiens
  misc_RNA (1)...(19): siRNA sense strand
gcugauaaaguccugcaaa

SEQ ID NO: 2315742 - RNA, 19 nt, Homo sapiens
  misc_RNA (1)...(19): siRNA sense strand
ccuugaaagaccucaguca

SEQ ID NO: 2315743 - RNA, 19 nt, Homo sapiens
  misc_RNA (1)...(19): siRNA sense strand
agagauacacagcagaaga

SEQ ID NO: 2315744 - RNA, 19 nt, Homo sapiens
  misc_RNA (1)...(19): siRNA sense strand
ggaaacagcgccucgggau

SEQ ID NO: 2315745 - RNA, 19 nt, Homo sapiens
  misc_RNA (1)...(19): siRNA sense strand
ggacagacuuccagcaagg

SEQ ID NO: 2315746 - RNA, 19 nt, Homo sapiens
  misc_RNA (1)...(19): siRNA sense strand
uugucaaaaucaugggcaa

SEQ ID NO: 2315747 - RNA, 19 nt, Homo sapiens
  misc_RNA (1)...(19): siRNA sense strand
uggugauggugaaggauaa

SEQ ID NO: 2315748 - RNA, 19 nt, Homo sapiens
  misc_RNA (1)...(19): siRNA sense strand
guggcaggcacgaggaaga

SEQ ID NO: 2315749 - RNA, 19 nt, Homo sapiens
  misc_RNA (1)...(19): siRNA sense strand
cuggugauggugaaggaua

SEQ ID NO: 2315750 - RNA, 19 nt, Homo sapiens
  misc_RNA (1)...(19): siRNA sense strand
uggacaacuucaagccaga

SEQ ID NO: 2315751 - RNA, 19 nt, Homo sapiens
  misc_RNA (1)...(19): siRNA sense strand
ccaaagagguggcuccagu

SEQ ID NO: 2315752 - RNA, 19 nt, Homo sapiens
  misc_RNA (1)...(19): siRNA sense strand
gaucgaagcuggugccggu

SEQ ID NO: 2315753 - RNA, 19 nt, Homo sapiens
  misc_RNA (1)...(19): siRNA sense strand
aggaaguggaagagaauaa

SEQ ID NO: 2315754 - RNA, 19 nt, Homo sapiens
  misc_RNA (1)...(19): siRNA sense strand
aggaagaggacaagugcaa

SEQ ID NO: 2315755 - RNA, 19 nt, Homo sapiens
  misc_RNA (1)...(19): siRNA sense strand
gaggaaagaaacagggaca

SEQ ID NO: 2315756 - RNA, 19 nt, Homo sapiens
  misc_RNA (1)...(19): siRNA sense strand
agucggaggaagaggacaa

SEQ ID NO: 2315757 - RNA, 19 nt, Homo sapiens
  misc_RNA (1)...(19): siRNA sense strand
ucaugauaguccaggcaaa

SEQ ID NO: 2315758 - RNA, 19 nt, Homo sapiens
  misc_RNA (1)...(19): siRNA sense strand
ccuccaagaugaagggcuu

SEQ ID NO: 2315759 - RNA, 19 nt, Homo sapiens
  misc_RNA (1)...(19): siRNA sense strand
gaacaauaaagaagcgcuu

SEQ ID NO: 2315760 - RNA, 19 nt, Homo sapiens
  misc_RNA (1)...(19): siRNA sense strand
agaggaaguggaagagaau

SEQ ID NO: 2315761 - RNA, 19 nt, Homo sapiens
  misc_RNA (1)...(19): siRNA sense strand
cuaacaagcccaagaggca

SEQ ID NO: 2315762 - RNA, 19 nt, Homo sapiens
  misc_RNA (1)...(19): siRNA sense strand
auuaaaacgccuauggaua

SEQ ID NO: 2315763 - RNA, 19 nt, Homo sapiens
  misc_RNA (1)...(19): siRNA sense strand
gagaagagcagcaaggucu

SEQ ID NO: 2315764 - RNA, 19 nt, Homo sapiens
  misc_RNA (1)...(19): siRNA sense strand
cagaacaaaccaaagaaaa

SEQ ID NO: 2315765 - RNA, 19 nt, Homo sapiens
  misc_RNA (1)...(19): siRNA sense strand
gcagcaaggucucggagca

SEQ ID NO: 2315766 - RNA, 19 nt, Homo sapiens
  misc_RNA (1)...(19): siRNA sense strand
gaggacaagugcaagccua

SEQ ID NO: 2315767 - RNA, 19 nt, Homo sapiens
  misc_RNA (1)...(19): siRNA sense strand
ccucagagucggagagcuc

SEQ ID NO: 2315768 - RNA, 19 nt, Homo sapiens
  misc_RNA (1)...(19): siRNA sense strand
agaaacagggacagcaaaa

SEQ ID NO: 2315769 - RNA, 19 nt, Homo sapiens
  misc_RNA (1)...(19): siRNA sense strand
ccagagaccuccaacccua

SEQ ID NO: 2315770 - RNA, 19 nt, Homo sapiens
  misc_RNA (1)...(19): siRNA sense strand
caaagaaggacgugcccga

SEQ ID NO: 2315771 - RNA, 19 nt, Homo sapiens
  misc_RNA (1)...(19): siRNA sense strand
uugagaaaucugccaguaa

SEQ ID NO: 2315772 - RNA, 19 nt, Homo sapiens
  misc_RNA (1)...(19): siRNA sense strand
ucaaggagauguuugccaa

SEQ ID NO: 2315773 - RNA, 19 nt, Homo sapiens
  misc_RNA (1)...(19): siRNA sense strand
aagaaaagaggaaguggaa

SEQ ID NO: 2315774 - RNA, 19 nt, Homo sapiens
  misc_RNA (1)...(19): siRNA sense strand
agacaaagaagggagugaa

SEQ ID NO: 2315775 - RNA, 19 nt, Homo sapiens
  misc_RNA (1)...(19): siRNA sense strand
aggagauguuugccaagaa

SEQ ID NO: 2315776 - RNA, 19 nt, Homo sapiens
  misc_RNA (1)...(19): siRNA sense strand
ugcgugagcuggagcgcua

SEQ ID NO: 2315777 - RNA, 19 nt, Homo sapiens
  misc_RNA (1)...(19): siRNA sense strand
gcaccagagaagagcagca

SEQ ID NO: 2315778 - RNA, 19 nt, Homo sapiens
  misc_RNA (1)...(19): siRNA sense strand
acauagucuuaauggcaga

SEQ ID NO: 2315779 - RNA, 19 nt, Homo sapiens
  misc_RNA (1)...(19): siRNA sense strand
acaaaagaaaagaggaagu

SEQ ID NO: 2315780 - RNA, 19 nt, Homo sapiens
  misc_RNA (1)...(19): siRNA sense strand
auggauaugggaacaauaa

SEQ ID NO: 2315781 - RNA, 19 nt, Homo sapiens
  misc_RNA (1)...(19): siRNA sense strand
ugacauagucuuaauggca

SEQ ID NO: 2315782 - RNA, 19 nt, Homo sapiens
  misc_RNA (1)...(19): siRNA sense strand
ccacagaagaaaccgagau

SEQ ID NO: 2315783 - RNA, 19 nt, Homo sapiens
  misc_RNA (1)...(19): siRNA sense strand
ccgugaugcucaggaguuu

SEQ ID NO: 2315784 - RNA, 19 nt, Homo sapiens
  misc_RNA (1)...(19): siRNA sense strand
aggaagaggacgugggagg

SEQ ID NO: 2315785 - RNA, 19 nt, Homo sapiens
  misc_RNA (1)...(19): siRNA sense strand
ggcaaaaggaagaggacgu

SEQ ID NO: 2315786 - RNA, 19 nt, Homo sapiens
  misc_RNA (1)...(19): siRNA sense strand
ccaacugcuauaaguacaa

SEQ ID NO: 2315787 - RNA, 19 nt, Homo sapiens
  misc_RNA (1)...(19): siRNA sense strand
agcgauagcuccucggaca

SEQ ID NO: 2315788 - RNA, 19 nt, Homo sapiens
  misc_RNA (1)...(19): siRNA sense strand
cugaugacucugaggagga

SEQ ID NO: 2315789 - RNA, 19 nt, Homo sapiens
  misc_RNA (1)...(19): siRNA sense strand
ccuaugaggagaagcggca

SEQ ID NO: 2315790 - RNA, 19 nt, Homo sapiens
  misc_RNA (1)...(19): siRNA sense strand
aagacaaagaagggaguga

SEQ ID NO: 2315791 - RNA, 19 nt, Homo sapiens
  misc_RNA (1)...(19): siRNA sense strand
gagugaagaggaaagcaga

SEQ ID NO: 2315792 - RNA, 19 nt, Homo sapiens
  misc_RNA (1)...(19): siRNA sense strand
cugugaaaccuccaaagaa

SEQ ID NO: 2315793 - RNA, 19 nt, Homo sapiens
  misc_RNA (1)...(19): siRNA sense strand
agcgacagcagcagcgaua

SEQ ID NO: 2315794 - RNA, 19 nt, Homo sapiens
  misc_RNA (1)...(19): siRNA sense strand
ggacagugacaguucgacu

SEQ ID NO: 2315795 - RNA, 19 nt, Homo sapiens
  misc_RNA (1)...(19): siRNA sense strand
aggacaagugcaagccuau

SEQ ID NO: 2315796 - RNA, 19 nt, Homo sapiens
  misc_RNA (1)...(19): siRNA sense strand
gaggagaagcggcagcuca

SEQ ID NO: 2315797 - RNA, 19 nt, Homo sapiens
  misc_RNA (1)...(19): siRNA sense strand
aggaaguggaagagaauaa

SEQ ID NO: 2315798 - RNA, 19 nt, Homo sapiens
  misc_RNA (1)...(19): siRNA sense strand
aggaagaggacaagugcaa

SEQ ID NO: 2315799 - RNA, 19 nt, Homo sapiens
  misc_RNA (1)...(19): siRNA sense strand
gaggaaagaaacagggaca

SEQ ID NO: 2315800 - RNA, 19 nt, Homo sapiens
  misc_RNA (1)...(19): siRNA sense strand
agucggaggaagaggacaa

SEQ ID NO: 2315801 - RNA, 19 nt, Homo sapiens
  misc_RNA (1)...(19): siRNA sense strand
ucaugauaguccaggcaaa

SEQ ID NO: 2315802 - RNA, 19 nt, Homo sapiens
  misc_RNA (1)...(19): siRNA sense strand
ccuccaagaugaagggcuu

SEQ ID NO: 2315803 - RNA, 19 nt, Homo sapiens
  misc_RNA (1)...(19): siRNA sense strand
gaacaauaaagaagcgcuu

SEQ ID NO: 2315804 - RNA, 19 nt, Homo sapiens
  misc_RNA (1)...(19): siRNA sense strand
agaggaaguggaagagaau

SEQ ID NO: 2315805 - RNA, 19 nt, Homo sapiens
  misc_RNA (1)...(19): siRNA sense strand
cuaacaagcccaagaggca

SEQ ID NO: 2315806 - RNA, 19 nt, Homo sapiens
  misc_RNA (1)...(19): siRNA sense strand
auuaaaacgccuauggaua

SEQ ID NO: 2315807 - RNA, 19 nt, Homo sapiens
  misc_RNA (1)...(19): siRNA sense strand
gagaagagcagcaaggucu

SEQ ID NO: 2315808 - RNA, 19 nt, Homo sapiens
  misc_RNA (1)...(19): siRNA sense strand
cagaacaaaccaaagaaaa

SEQ ID NO: 2315809 - RNA, 19 nt, Homo sapiens
  misc_RNA (1)...(19): siRNA sense strand
gcagcaaggucucggagca

SEQ ID NO: 2315810 - RNA, 19 nt, Homo sapiens
  misc_RNA (1)...(19): siRNA sense strand
gaggacaagugcaagccua

SEQ ID NO: 2315811 - RNA, 19 nt, Homo sapiens
  misc_RNA (1)...(19): siRNA sense strand
ccucagagucggagagcuc

SEQ ID NO: 2315812 - RNA, 19 nt, Homo sapiens
  misc_RNA (1)...(19): siRNA sense strand
agaaacagggacagcaaaa

SEQ ID NO: 2315813 - RNA, 19 nt, Homo sapiens
  misc_RNA (1)...(19): siRNA sense strand
ccagagaccuccaacccua

SEQ ID NO: 2315814 - RNA, 19 nt, Homo sapiens
  misc_RNA (1)...(19): siRNA sense strand
caaagaaggacgugcccga

SEQ ID NO: 2315815 - RNA, 19 nt, Homo sapiens
  misc_RNA (1)...(19): siRNA sense strand
uugagaaaucugccaguaa

SEQ ID NO: 2315816 - RNA, 19 nt, Homo sapiens
  misc_RNA (1)...(19): siRNA sense strand
ucaaggagauguuugccaa

SEQ ID NO: 2315817 - RNA, 19 nt, Homo sapiens
  misc_RNA (1)...(19): siRNA sense strand
aagaaaagaggaaguggaa

SEQ ID NO: 2315818 - RNA, 19 nt, Homo sapiens
  misc_RNA (1)...(19): siRNA sense strand
agacaaagaagggagugaa

SEQ ID NO: 2315819 - RNA, 19 nt, Homo sapiens
  misc_RNA (1)...(19): siRNA sense strand
aggagauguuugccaagaa

SEQ ID NO: 2315820 - RNA, 19 nt, Homo sapiens
  misc_RNA (1)...(19): siRNA sense strand
ugcgugagcuggagcgcua

SEQ ID NO: 2315821 - RNA, 19 nt, Homo sapiens
  misc_RNA (1)...(19): siRNA sense strand
gcaccagagaagagcagca

SEQ ID NO: 2315822 - RNA, 19 nt, Homo sapiens
  misc_RNA (1)...(19): siRNA sense strand
acauagucuuaauggcaga

SEQ ID NO: 2315823 - RNA, 19 nt, Homo sapiens
  misc_RNA (1)...(19): siRNA sense strand
acaaaagaaaagaggaagu

SEQ ID NO: 2315824 - RNA, 19 nt, Homo sapiens
  misc_RNA (1)...(19): siRNA sense strand
auggauaugggaacaauaa

SEQ ID NO: 2315825 - RNA, 19 nt, Homo sapiens
  misc_RNA (1)...(19): siRNA sense strand
ugacauagucuuaauggca

SEQ ID NO: 2315826 - RNA, 19 nt, Homo sapiens
  misc_RNA (1)...(19): siRNA sense strand
ccacagaagaaaccgagau

SEQ ID NO: 2315827 - RNA, 19 nt, Homo sapiens
  misc_RNA (1)...(19): siRNA sense strand
ccgugaugcucaggaguuu

SEQ ID NO: 2315828 - RNA, 19 nt, Homo sapiens
  misc_RNA (1)...(19): siRNA sense strand
aggaagaggacgugggagg

SEQ ID NO: 2315829 - RNA, 19 nt, Homo sapiens
  misc_RNA (1)...(19): siRNA sense strand
ggcaaaaggaagaggacgu

SEQ ID NO: 2315830 - RNA, 19 nt, Homo sapiens
  misc_RNA (1)...(19): siRNA sense strand
ccaacugcuauaaguacaa

SEQ ID NO: 2315831 - RNA, 19 nt, Homo sapiens
  misc_RNA (1)...(19): siRNA sense strand
agcgauagcuccucggaca

SEQ ID NO: 2315832 - RNA, 19 nt, Homo sapiens
  misc_RNA (1)...(19): siRNA sense strand
cugaugacucugaggagga

SEQ ID NO: 2315833 - RNA, 19 nt, Homo sapiens
  misc_RNA (1)...(19): siRNA sense strand
ccuaugaggagaagcggca

SEQ ID NO: 2315834 - RNA, 19 nt, Homo sapiens
  misc_RNA (1)...(19): siRNA sense strand
aagacaaagaagggaguga

SEQ ID NO: 2315835 - RNA, 19 nt, Homo sapiens
  misc_RNA (1)...(19): siRNA sense strand
gagugaagaggaaagcaga

SEQ ID NO: 2315836 - RNA, 19 nt, Homo sapiens
  misc_RNA (1)...(19): siRNA sense strand
cugugaaaccuccaaagaa

SEQ ID NO: 2315837 - RNA, 19 nt, Homo sapiens
  misc_RNA (1)...(19): siRNA sense strand
agcgacagcagcagcgaua

SEQ ID NO: 2315838 - RNA, 19 nt, Homo sapiens
  misc_RNA (1)...(19): siRNA sense strand
ggacagugacaguucgacu

SEQ ID NO: 2315839 - RNA, 19 nt, Homo sapiens
  misc_RNA (1)...(19): siRNA sense strand
aggacaagugcaagccuau

SEQ ID NO: 2315840 - RNA, 19 nt, Homo sapiens
  misc_RNA (1)...(19): siRNA sense strand
gaggagaagcggcagcuca

SEQ ID NO: 2315841 - RNA, 19 nt, Homo sapiens
  misc_RNA (1)...(19): siRNA sense strand
caucauuguugguggcuga

SEQ ID NO: 2315842 - RNA, 19 nt, Homo sapiens
  misc_RNA (1)...(19): siRNA sense strand
gguuaaaagaugcacuaaa

SEQ ID NO: 2315843 - RNA, 19 nt, Homo sapiens
  misc_RNA (1)...(19): siRNA sense strand
uggcaacagcaauaggauu

SEQ ID NO: 2315844 - RNA, 19 nt, Homo sapiens
  misc_RNA (1)...(19): siRNA sense strand
ggccagaggucgauggagu

SEQ ID NO: 2315845 - RNA, 19 nt, Homo sapiens
  misc_RNA (1)...(19): siRNA sense strand
uggaaauaggagacgagaa

SEQ ID NO: 2315846 - RNA, 19 nt, Homo sapiens
  misc_RNA (1)...(19): siRNA sense strand
gagcugagaucguggcgga

SEQ ID NO: 2315847 - RNA, 19 nt, Homo sapiens
  misc_RNA (1)...(19): siRNA sense strand
ggaucuggccaaagcucaa

SEQ ID NO: 2315848 - RNA, 19 nt, Homo sapiens
  misc_RNA (1)...(19): siRNA sense strand
gcucagaacuggagaaggc

SEQ ID NO: 2315849 - RNA, 19 nt, Homo sapiens
  misc_RNA (1)...(19): siRNA sense strand
ggagguaaacugaggcaac

SEQ ID NO: 2315850 - RNA, 19 nt, Homo sapiens
  misc_RNA (1)...(19): siRNA sense strand
ggucgauggaguccgcaaa

SEQ ID NO: 2315851 - RNA, 19 nt, Homo sapiens
  misc_RNA (1)...(19): siRNA sense strand
ggccaaagcucaaagggag

SEQ ID NO: 2315852 - RNA, 19 nt, Homo sapiens
  misc_RNA (1)...(19): siRNA sense strand
gaauuguggaaauaggaga

SEQ ID NO: 2315853 - RNA, 19 nt, Homo sapiens
  misc_RNA (1)...(19): siRNA sense strand
cuggauuucuagagggcuu

SEQ ID NO: 2315854 - RNA, 19 nt, Homo sapiens
  misc_RNA (1)...(19): siRNA sense strand
agguuauguugcuaaagaa

SEQ ID NO: 2315855 - RNA, 19 nt, Homo sapiens
  misc_RNA (1)...(19): siRNA sense strand
cguaagagugauagaggaa

SEQ ID NO: 2315856 - RNA, 19 nt, Homo sapiens
  misc_RNA (1)...(19): siRNA sense strand
ccagaaucuuagugagaau

SEQ ID NO: 2315857 - RNA, 19 nt, Homo sapiens
  misc_RNA (1)...(19): siRNA sense strand
ggaauuuggaacacagaaa

SEQ ID NO: 2315858 - RNA, 19 nt, Homo sapiens
  misc_RNA (1)...(19): siRNA sense strand
aggcagaggaagagcaaga

SEQ ID NO: 2315859 - RNA, 19 nt, Homo sapiens
  misc_RNA (1)...(19): siRNA sense strand
acuuaaacccagagacaau

SEQ ID NO: 2315860 - RNA, 19 nt, Homo sapiens
  misc_RNA (1)...(19): siRNA sense strand
uugaaaaguuggaggagua

SEQ ID NO: 2315861 - RNA, 19 nt, Homo sapiens
  misc_RNA (1)...(19): siRNA sense strand
ccacuuaaacccagagaca

SEQ ID NO: 2315862 - RNA, 19 nt, Homo sapiens
  misc_RNA (1)...(19): siRNA sense strand
gggaggaagaggugcagua

SEQ ID NO: 2315863 - RNA, 19 nt, Homo sapiens
  misc_RNA (1)...(19): siRNA sense strand
gauccaaaccagaggcaga

SEQ ID NO: 2315864 - RNA, 19 nt, Homo sapiens
  misc_RNA (1)...(19): siRNA sense strand
gauuguagagaaagguaua

SEQ ID NO: 2315865 - RNA, 19 nt, Homo sapiens
  misc_RNA (1)...(19): siRNA sense strand
auucaaagccaguggagau

SEQ ID NO: 2315866 - RNA, 19 nt, Homo sapiens
  misc_RNA (1)...(19): siRNA sense strand
acuguggauuguagagaaa

SEQ ID NO: 2315867 - RNA, 19 nt, Homo sapiens
  misc_RNA (1)...(19): siRNA sense strand
aggcauuucuggagcaaca

SEQ ID NO: 2315868 - RNA, 19 nt, Homo sapiens
  misc_RNA (1)...(19): siRNA sense strand
agugauagcaacagucaaa

SEQ ID NO: 2315869 - RNA, 19 nt, Homo sapiens
  misc_RNA (1)...(19): siRNA sense strand
agacaaagaugaagagagc

SEQ ID NO: 2315870 - RNA, 19 nt, Homo sapiens
  misc_RNA (1)...(19): siRNA sense strand
uggcaggugcagagaaauu

SEQ ID NO: 2315871 - RNA, 19 nt, Homo sapiens
  misc_RNA (1)...(19): siRNA sense strand
ugaugaaggcauugacauu

SEQ ID NO: 2315872 - RNA, 19 nt, Homo sapiens
  misc_RNA (1)...(19): siRNA sense strand
aaccagaggcagaggaaga

SEQ ID NO: 2315873 - RNA, 19 nt, Homo sapiens
  misc_RNA (1)...(19): siRNA sense strand
ucagaaacuuggaggaucu

SEQ ID NO: 2315874 - RNA, 19 nt, Homo sapiens
  misc_RNA (1)...(19): siRNA sense strand
aagaaaagcugcaggaacu

SEQ ID NO: 2315875 - RNA, 19 nt, Homo sapiens
  misc_RNA (1)...(19): siRNA sense strand
gauuguuacaguucagaaa

SEQ ID NO: 2315876 - RNA, 19 nt, Homo sapiens
  misc_RNA (1)...(19): siRNA sense strand
agaggaagagcaagaggua

SEQ ID NO: 2315877 - RNA, 19 nt, Homo sapiens
  misc_RNA (1)...(19): siRNA sense strand
cgacagaacugcagccaug

SEQ ID NO: 2315878 - RNA, 19 nt, Homo sapiens
  misc_RNA (1)...(19): siRNA sense strand
uggaggaacuggagcaagu

SEQ ID NO: 2315879 - RNA, 19 nt, Homo sapiens
  misc_RNA (1)...(19): siRNA sense strand
cuugaggauaagauggaaa

SEQ ID NO: 2315880 - RNA, 19 nt, Homo sapiens
  misc_RNA (1)...(19): siRNA sense strand
cagcaggauucgaugagau

SEQ ID NO: 2315881 - RNA, 19 nt, Homo sapiens
  misc_RNA (1)...(19): siRNA sense strand
uuuaugaguaugugggcaa

SEQ ID NO: 2315882 - RNA, 19 nt, Homo sapiens
  misc_RNA (1)...(19): siRNA sense strand
aagaagaguaccacuuaaa

SEQ ID NO: 2315883 - RNA, 19 nt, Homo sapiens
  misc_RNA (1)...(19): siRNA sense strand
gaggaagaggugcaguaua

SEQ ID NO: 2315884 - RNA, 19 nt, Homo sapiens
  misc_RNA (1)...(19): siRNA sense strand
ggauuguagagaaagguau

SEQ ID NO: 2315885 - RNA, 19 nt, Homo sapiens
  misc_RNA (1)...(19): siRNA sense strand
ugagaaugucccaguggaa

SEQ ID NO: 2315886 - RNA, 19 nt, Homo sapiens
  misc_RNA (1)...(19): siRNA sense strand
cagcaauguccgagcagca

SEQ ID NO: 2315887 - RNA, 19 nt, Homo sapiens
  misc_RNA (1)...(19): siRNA sense strand
ggguauagaguuacaggca

SEQ ID NO: 2315888 - RNA, 19 nt, Homo sapiens
  misc_RNA (1)...(19): siRNA sense strand
ggagaugcuuuuaaggaau

SEQ ID NO: 2315889 - RNA, 19 nt, Homo sapiens
  misc_RNA (1)...(19): siRNA sense strand
gagaaagaaaggaacaagu

SEQ ID NO: 2315890 - RNA, 19 nt, Homo sapiens
  misc_RNA (1)...(19): siRNA sense strand
gaaucagaucccaguguau

SEQ ID NO: 2315891 - RNA, 19 nt, Homo sapiens
  misc_RNA (1)...(19): siRNA sense strand
gcaagaucuuacucagaga

SEQ ID NO: 2315892 - RNA, 19 nt, Homo sapiens
  misc_RNA (1)...(19): siRNA sense strand
aaggaaaacuggcccaaaa

SEQ ID NO: 2315893 - RNA, 19 nt, Homo sapiens
  misc_RNA (1)...(19): siRNA sense strand
ggggaauccaugugaagua

SEQ ID NO: 2315894 - RNA, 19 nt, Homo sapiens
  misc_RNA (1)...(19): siRNA sense strand
uaaucaggaaugugaagaa

SEQ ID NO: 2315895 - RNA, 19 nt, Homo sapiens
  misc_RNA (1)...(19): siRNA sense strand
aaucaggaaugugaagaaa

SEQ ID NO: 2315896 - RNA, 19 nt, Homo sapiens
  misc_RNA (1)...(19): siRNA sense strand
gguauagaguuacaggcau

SEQ ID NO: 2315897 - RNA, 19 nt, Homo sapiens
  misc_RNA (1)...(19): siRNA sense strand
guuccagaugccagacaaa

SEQ ID NO: 2315898 - RNA, 19 nt, Homo sapiens
  misc_RNA (1)...(19): siRNA sense strand
cuggauuacuugaaagacu

SEQ ID NO: 2315899 - RNA, 19 nt, Homo sapiens
  misc_RNA (1)...(19): siRNA sense strand
aggaaugcuuugugaguag

SEQ ID NO: 2315900 - RNA, 19 nt, Homo sapiens
  misc_RNA (1)...(19): siRNA sense strand
aguuggaggaguauagauu

SEQ ID NO: 2315901 - RNA, 19 nt, Homo sapiens
  misc_RNA (1)...(19): siRNA sense strand
gugcagagaaauuggugga

SEQ ID NO: 2315902 - RNA, 19 nt, Homo sapiens
  misc_RNA (1)...(19): siRNA sense strand
aacagaagaucuugaggau

SEQ ID NO: 2315903 - RNA, 19 nt, Homo sapiens
  misc_RNA (1)...(19): siRNA sense strand
uccuacagguuguggaaaa

SEQ ID NO: 2315904 - RNA, 19 nt, Homo sapiens
  misc_RNA (1)...(19): siRNA sense strand
guguaugaacagcagaaau

SEQ ID NO: 2315905 - RNA, 19 nt, Homo sapiens
  misc_RNA (1)...(19): siRNA sense strand
cugcaagccuuccaggauu

SEQ ID NO: 2315906 - RNA, 19 nt, Homo sapiens
  misc_RNA (1)...(19): siRNA sense strand
ugagcaugcacgaaugaaa

SEQ ID NO: 2315907 - RNA, 19 nt, Homo sapiens
  misc_RNA (1)...(19): siRNA sense strand
ggacaaaaggggaaaguug

SEQ ID NO: 2315908 - RNA, 19 nt, Homo sapiens
  misc_RNA (1)...(19): siRNA sense strand
agaaugucccaguggaaca

SEQ ID NO: 2315909 - RNA, 19 nt, Homo sapiens
  misc_RNA (1)...(19): siRNA sense strand
ggcaaagagaaucugcaaa

SEQ ID NO: 2315910 - RNA, 19 nt, Homo sapiens
  misc_RNA (1)...(19): siRNA sense strand
caggauucgaugagauuga

SEQ ID NO: 2315911 - RNA, 19 nt, Homo sapiens
  misc_RNA (1)...(19): siRNA sense strand
cgaagcaguauuuagggaa

SEQ ID NO: 2315912 - RNA, 19 nt, Homo sapiens
  misc_RNA (1)...(19): siRNA sense strand
gaucagaaacuuggaggau

SEQ ID NO: 2315913 - RNA, 19 nt, Homo sapiens
  misc_RNA (1)...(19): siRNA sense strand
acaacagaacuuaaggaaa

SEQ ID NO: 2315914 - RNA, 19 nt, Homo sapiens
  misc_RNA (1)...(19): siRNA sense strand
aggaaaucucugaguacua

SEQ ID NO: 2315915 - RNA, 19 nt, Homo sapiens
  misc_RNA (1)...(19): siRNA sense strand
ggucaaaagaaaaugagaa

SEQ ID NO: 2315916 - RNA, 19 nt, Homo sapiens
  misc_RNA (1)...(19): siRNA sense strand
aacacacaguggugagaaa

SEQ ID NO: 2315917 - RNA, 19 nt, Homo sapiens
  misc_RNA (1)...(19): siRNA sense strand
caugaagcaauaagagaga

SEQ ID NO: 2315918 - RNA, 19 nt, Homo sapiens
  misc_RNA (1)...(19): siRNA sense strand
gcgcaggcucauaggcaga

SEQ ID NO: 2315919 - RNA, 19 nt, Homo sapiens
  misc_RNA (1)...(19): siRNA sense strand
gcucauaggcagaagggac

SEQ ID NO: 2315920 - RNA, 19 nt, Homo sapiens
  misc_RNA (1)...(19): siRNA sense strand
uguacucacaagagauaaa

SEQ ID NO: 2315921 - RNA, 19 nt, Homo sapiens
  misc_RNA (1)...(19): siRNA sense strand
ucgccuaucaguacggaaa

SEQ ID NO: 2315922 - RNA, 19 nt, Homo sapiens
  misc_RNA (1)...(19): siRNA sense strand
cacacaguggugagaaaua

SEQ ID NO: 2315923 - RNA, 19 nt, Homo sapiens
  misc_RNA (1)...(19): siRNA sense strand
augaaagauuugcacacua

SEQ ID NO: 2315924 - RNA, 19 nt, Homo sapiens
  misc_RNA (1)...(19): siRNA sense strand
ugaggguauuagaaaggaa

SEQ ID NO: 2315925 - RNA, 19 nt, Homo sapiens
  misc_RNA (1)...(19): siRNA sense strand
uuucaaacucgguuggaga

SEQ ID NO: 2315926 - RNA, 19 nt, Homo sapiens
  misc_RNA (1)...(19): siRNA sense strand
cauaucaacaacagaacuu

SEQ ID NO: 2315927 - RNA, 19 nt, Homo sapiens
  misc_RNA (1)...(19): siRNA sense strand
aggaaaacacacaguuaau

SEQ ID NO: 2315928 - RNA, 19 nt, Homo sapiens
  misc_RNA (1)...(19): siRNA sense strand
agauuuggugcguggugaa

SEQ ID NO: 2315929 - RNA, 19 nt, Homo sapiens
  misc_RNA (1)...(19): siRNA sense strand
ccagaugggcaaaccaaca

SEQ ID NO: 2315930 - RNA, 19 nt, Homo sapiens
  misc_RNA (1)...(19): siRNA sense strand
agauguagacagagcucga

SEQ ID NO: 2315931 - RNA, 19 nt, Homo sapiens
  misc_RNA (1)...(19): siRNA sense strand
ccuuaauugcagaaaugau

SEQ ID NO: 2315932 - RNA, 19 nt, Homo sapiens
  misc_RNA (1)...(19): siRNA sense strand
cguuauugacgaugcaagu

SEQ ID NO: 2315933 - RNA, 19 nt, Homo sapiens
  misc_RNA (1)...(19): siRNA sense strand
agaggaaaacacacaguua

SEQ ID NO: 2315934 - RNA, 19 nt, Homo sapiens
  misc_RNA (1)...(19): siRNA sense strand
ccuuguggguggaggguac

SEQ ID NO: 2315935 - RNA, 19 nt, Homo sapiens
  misc_RNA (1)...(19): siRNA sense strand
ggccauggaaugaagcaga

SEQ ID NO: 2315936 - RNA, 19 nt, Homo sapiens
  misc_RNA (1)...(19): siRNA sense strand
aggaaauggagaagguaga

SEQ ID NO: 2315937 - RNA, 19 nt, Homo sapiens
  misc_RNA (1)...(19): siRNA sense strand
agguagaggagaugccaca

SEQ ID NO: 2315938 - RNA, 19 nt, Homo sapiens
  misc_RNA (1)...(19): siRNA sense strand
aggauuaugaagaauggaa

SEQ ID NO: 2315939 - RNA, 19 nt, Homo sapiens
  misc_RNA (1)...(19): siRNA sense strand
gccacauaaaccacagaaa

SEQ ID NO: 2315940 - RNA, 19 nt, Homo sapiens
  misc_RNA (1)...(19): siRNA sense strand
ccagcaaaggaaauggaga

SEQ ID NO: 2315941 - RNA, 19 nt, Homo sapiens
  misc_RNA (1)...(19): siRNA sense strand
cuguauagaagcagugaac

SEQ ID NO: 2315942 - RNA, 19 nt, Homo sapiens
  misc_RNA (1)...(19): siRNA sense strand
gugaagaagugccgggaga

SEQ ID NO: 2315943 - RNA, 19 nt, Homo sapiens
  misc_RNA (1)...(19): siRNA sense strand
gaggaauucuucagccaga

SEQ ID NO: 2315944 - RNA, 19 nt, Homo sapiens
  misc_RNA (1)...(19): siRNA sense strand
acgaaauagaagauggagu

SEQ ID NO: 2315945 - RNA, 19 nt, Homo sapiens
  misc_RNA (1)...(19): siRNA sense strand
ccaaggacuuuauucggaa

SEQ ID NO: 2315946 - RNA, 19 nt, Homo sapiens
  misc_RNA (1)...(19): siRNA sense strand
acgacuuugaugaggaauu

SEQ ID NO: 2315947 - RNA, 19 nt, Homo sapiens
  misc_RNA (1)...(19): siRNA sense strand
cuaccuucacacaaagaaa

SEQ ID NO: 2315948 - RNA, 19 nt, Homo sapiens
  misc_RNA (1)...(19): siRNA sense strand
ccugaggaacugugagagu

SEQ ID NO: 2315949 - RNA, 19 nt, Homo sapiens
  misc_RNA (1)...(19): siRNA sense strand
agcaggaaacacuggcaaa

SEQ ID NO: 2315950 - RNA, 19 nt, Homo sapiens
  misc_RNA (1)...(19): siRNA sense strand
gcaucgugucccugugcaa

SEQ ID NO: 2315951 - RNA, 19 nt, Homo sapiens
  misc_RNA (1)...(19): siRNA sense strand
ggugaugggcagugggagu

SEQ ID NO: 2315952 - RNA, 19 nt, Homo sapiens
  misc_RNA (1)...(19): siRNA sense strand
guaaagacacugaggagcu

SEQ ID NO: 2315953 - RNA, 19 nt, Homo sapiens
  misc_RNA (1)...(19): siRNA sense strand
ugggaguggccuuggguga

SEQ ID NO: 2315954 - RNA, 19 nt, Homo sapiens
  misc_RNA (1)...(19): siRNA sense strand
caggaggugcagagggcuu

SEQ ID NO: 2315955 - RNA, 19 nt, Homo sapiens
  misc_RNA (1)...(19): siRNA sense strand
auggacagagggagggauu

SEQ ID NO: 2315956 - RNA, 19 nt, Homo sapiens
  misc_RNA (1)...(19): siRNA sense strand
acgcagagccaaagcugga

SEQ ID NO: 2315957 - RNA, 19 nt, Homo sapiens
  misc_RNA (1)...(19): siRNA sense strand
agugauuaccagagggaga

SEQ ID NO: 2315958 - RNA, 19 nt, Homo sapiens
  misc_RNA (1)...(19): siRNA sense strand
cggagaacgaggaggagga

SEQ ID NO: 2315959 - RNA, 19 nt, Homo sapiens
  misc_RNA (1)...(19): siRNA sense strand
agaaagugcuggagcugga

SEQ ID NO: 2315960 - RNA, 19 nt, Homo sapiens
  misc_RNA (1)...(19): siRNA sense strand
ccaaguaccaggaggccau

SEQ ID NO: 2315961 - RNA, 19 nt, Homo sapiens
  misc_RNA (1)...(19): siRNA sense strand
agaccuggaaccugagcaa

SEQ ID NO: 2315962 - RNA, 19 nt, Homo sapiens
  misc_RNA (1)...(19): siRNA sense strand
gagcugaggcugcuggaga

SEQ ID NO: 2315963 - RNA, 19 nt, Homo sapiens
  misc_RNA (1)...(19): siRNA sense strand
ugcugaagaaggaggagua

SEQ ID NO: 2315964 - RNA, 19 nt, Homo sapiens
  misc_RNA (1)...(19): siRNA sense strand
gcuacgaggaccuggacga

SEQ ID NO: 2315965 - RNA, 19 nt, Homo sapiens
  misc_RNA (1)...(19): siRNA sense strand
gaaacauguucaagcucga

SEQ ID NO: 2315966 - RNA, 19 nt, Homo sapiens
  misc_RNA (1)...(19): siRNA sense strand
uggcggagaacgaggagga

SEQ ID NO: 2315967 - RNA, 19 nt, Homo sapiens
  misc_RNA (1)...(19): siRNA sense strand
ccacagagccaccugcaga

SEQ ID NO: 2315968 - RNA, 19 nt, Homo sapiens
  misc_RNA (1)...(19): siRNA sense strand
guggaaggggucaagaaaa

SEQ ID NO: 2315969 - RNA, 19 nt, Homo sapiens
  misc_RNA (1)...(19): siRNA sense strand
agggagaccuggaaccuga

SEQ ID NO: 2315970 - RNA, 19 nt, Homo sapiens
  misc_RNA (1)...(19): siRNA sense strand
agcugaggcugcuggagaa

SEQ ID NO: 2315971 - RNA, 19 nt, Homo sapiens
  misc_RNA (1)...(19): siRNA sense strand
ccaugaaaugugaugagga

SEQ ID NO: 2315972 - RNA, 19 nt, Homo sapiens
  misc_RNA (1)...(19): siRNA sense strand
caugaaaugugaugaggag

SEQ ID NO: 2315973 - RNA, 19 nt, Homo sapiens
  misc_RNA (1)...(19): siRNA sense strand
ccuaugaggcaguggaaca

SEQ ID NO: 2315974 - RNA, 19 nt, Homo sapiens
  misc_RNA (1)...(19): siRNA sense strand
aggcaguggaacagcuaaa

SEQ ID NO: 2315975 - RNA, 19 nt, Homo sapiens
  misc_RNA (1)...(19): siRNA sense strand
agcuaaauaucaaggccaa

SEQ ID NO: 2315976 - RNA, 19 nt, Homo sapiens
  misc_RNA (1)...(19): siRNA sense strand
ccaagaacagugaggggaa

SEQ ID NO: 2315977 - RNA, 19 nt, Homo sapiens
  misc_RNA (1)...(19): siRNA sense strand
uugugaagaagaagggcua

SEQ ID NO: 2315978 - RNA, 19 nt, Homo sapiens
  misc_RNA (1)...(19): siRNA sense strand
ccaacaagggcgaccucaa

SEQ ID NO: 2315979 - RNA, 19 nt, Homo sapiens
  misc_RNA (1)...(19): siRNA sense strand
acgaggaugugcugcgcua

SEQ ID NO: 2315980 - RNA, 19 nt, Homo sapiens
  misc_RNA (1)...(19): siRNA sense strand
auaucaaggccaagaacuu

SEQ ID NO: 2315981 - RNA, 19 nt, Homo sapiens
  misc_RNA (1)...(19): siRNA sense strand
guucaaaggggacgagauu

SEQ ID NO: 2315982 - RNA, 19 nt, Homo sapiens
  misc_RNA (1)...(19): siRNA sense strand
agaccaaagugaagagcag

SEQ ID NO: 2315983 - RNA, 19 nt, Homo sapiens
  misc_RNA (1)...(19): siRNA sense strand
gagagaagcuggacgggag

SEQ ID NO: 2315984 - RNA, 19 nt, Homo sapiens
  misc_RNA (1)...(19): siRNA sense strand
ccggcaacgucuacgccua

SEQ ID NO: 2315985 - RNA, 19 nt, Homo sapiens
  misc_RNA (1)...(19): siRNA sense strand
cuuaagaaguacgggacca

SEQ ID NO: 2315986 - RNA, 19 nt, Homo sapiens
  misc_RNA (1)...(19): siRNA sense strand
gagaagaagaaaguggaca

SEQ ID NO: 2315987 - RNA, 19 nt, Homo sapiens
  misc_RNA (1)...(19): siRNA sense strand
cagcuaaauaucaaggcca

SEQ ID NO: 2315988 - RNA, 19 nt, Homo sapiens
  misc_RNA (1)...(19): siRNA sense strand
augaagagaaggccaaaca

SEQ ID NO: 2315989 - RNA, 19 nt, Homo sapiens
  misc_RNA (1)...(19): siRNA sense strand
ccuaugaggcaguggaaca

SEQ ID NO: 2315990 - RNA, 19 nt, Homo sapiens
  misc_RNA (1)...(19): siRNA sense strand
aggcaguggaacagcuaaa

SEQ ID NO: 2315991 - RNA, 19 nt, Homo sapiens
  misc_RNA (1)...(19): siRNA sense strand
agcuaaauaucaaggccaa

SEQ ID NO: 2315992 - RNA, 19 nt, Homo sapiens
  misc_RNA (1)...(19): siRNA sense strand
ccaagaacagugaggggaa

SEQ ID NO: 2315993 - RNA, 19 nt, Homo sapiens
  misc_RNA (1)...(19): siRNA sense strand
uugugaagaagaagggcua

SEQ ID NO: 2315994 - RNA, 19 nt, Homo sapiens
  misc_RNA (1)...(19): siRNA sense strand
ccaacaagggcgaccucaa

SEQ ID NO: 2315995 - RNA, 19 nt, Homo sapiens
  misc_RNA (1)...(19): siRNA sense strand
acgaggaugugcugcgcua

SEQ ID NO: 2315996 - RNA, 19 nt, Homo sapiens
  misc_RNA (1)...(19): siRNA sense strand
auaucaaggccaagaacuu

SEQ ID NO: 2315997 - RNA, 19 nt, Homo sapiens
  misc_RNA (1)...(19): siRNA sense strand
guucaaaggggacgagauu

SEQ ID NO: 2315998 - RNA, 19 nt, Homo sapiens
  misc_RNA (1)...(19): siRNA sense strand
agaccaaagugaagagcag

SEQ ID NO: 2315999 - RNA, 19 nt, Homo sapiens
  misc_RNA (1)...(19): siRNA sense strand
gagagaagcuggacgggag

SEQ ID NO: 2316000 - RNA, 19 nt, Homo sapiens
  misc_RNA (1)...(19): siRNA sense strand
ccggcaacgucuacgccua

SEQ ID NO: 2316001 - RNA, 19 nt, Homo sapiens
  misc_RNA (1)...(19): siRNA sense strand
cuuaagaaguacgggacca

SEQ ID NO: 2316002 - RNA, 19 nt, Homo sapiens
  misc_RNA (1)...(19): siRNA sense strand
gagaagaagaaaguggaca

SEQ ID NO: 2316003 - RNA, 19 nt, Homo sapiens
  misc_RNA (1)...(19): siRNA sense strand
cagcuaaauaucaaggcca

SEQ ID NO: 2316004 - RNA, 19 nt, Homo sapiens
  misc_RNA (1)...(19): siRNA sense strand
augaagagaaggccaaaca

SEQ ID NO: 2316005 - RNA, 19 nt, Homo sapiens
  misc_RNA (1)...(19): siRNA sense strand
ccuaugaggcaguggaaca

SEQ ID NO: 2316006 - RNA, 19 nt, Homo sapiens
  misc_RNA (1)...(19): siRNA sense strand
aggcaguggaacagcuaaa

SEQ ID NO: 2316007 - RNA, 19 nt, Homo sapiens
  misc_RNA (1)...(19): siRNA sense strand
agcuaaauaucaaggccaa

SEQ ID NO: 2316008 - RNA, 19 nt, Homo sapiens
  misc_RNA (1)...(19): siRNA sense strand
ccaagaacagugaggggaa

SEQ ID NO: 2316009 - RNA, 19 nt, Homo sapiens
  misc_RNA (1)...(19): siRNA sense strand
uugugaagaagaagggcua

SEQ ID NO: 2316010 - RNA, 19 nt, Homo sapiens
  misc_RNA (1)...(19): siRNA sense strand
ccaacaagggcgaccucaa

SEQ ID NO: 2316011 - RNA, 19 nt, Homo sapiens
  misc_RNA (1)...(19): siRNA sense strand
acgaggaugugcugcgcua

SEQ ID NO: 2316012 - RNA, 19 nt, Homo sapiens
  misc_RNA (1)...(19): siRNA sense strand
auaucaaggccaagaacuu

SEQ ID NO: 2316013 - RNA, 19 nt, Homo sapiens
  misc_RNA (1)...(19): siRNA sense strand
guucaaaggggacgagauu

SEQ ID NO: 2316014 - RNA, 19 nt, Homo sapiens
  misc_RNA (1)...(19): siRNA sense strand
agaccaaagugaagagcag

SEQ ID NO: 2316015 - RNA, 19 nt, Homo sapiens
  misc_RNA (1)...(19): siRNA sense strand
gagagaagcuggacgggag

SEQ ID NO: 2316016 - RNA, 19 nt, Homo sapiens
  misc_RNA (1)...(19): siRNA sense strand
ccggcaacgucuacgccua

SEQ ID NO: 2316017 - RNA, 19 nt, Homo sapiens
  misc_RNA (1)...(19): siRNA sense strand
cuuaagaaguacgggacca

SEQ ID NO: 2316018 - RNA, 19 nt, Homo sapiens
  misc_RNA (1)...(19): siRNA sense strand
gagaagaagaaaguggaca

SEQ ID NO: 2316019 - RNA, 19 nt, Homo sapiens
  misc_RNA (1)...(19): siRNA sense strand
cagcuaaauaucaaggcca

SEQ ID NO: 2316020 - RNA, 19 nt, Homo sapiens
  misc_RNA (1)...(19): siRNA sense strand
augaagagaaggccaaaca

SEQ ID NO: 2316021 - RNA, 19 nt, Homo sapiens
  misc_RNA (1)...(19): siRNA sense strand
agcaaagggaggagaagaa

SEQ ID NO: 2316022 - RNA, 19 nt, Homo sapiens
  misc_RNA (1)...(19): siRNA sense strand
cguaaucaccuuagcacaa

SEQ ID NO: 2316023 - RNA, 19 nt, Homo sapiens
  misc_RNA (1)...(19): siRNA sense strand
uuguaaggacagugggauu

SEQ ID NO: 2316024 - RNA, 19 nt, Homo sapiens
  misc_RNA (1)...(19): siRNA sense strand
ugcugaaaguagaaagaau

SEQ ID NO: 2316025 - RNA, 19 nt, Homo sapiens
  misc_RNA (1)...(19): siRNA sense strand
gagcauuccgagacagcaa

SEQ ID NO: 2316026 - RNA, 19 nt, Homo sapiens
  misc_RNA (1)...(19): siRNA sense strand
gagaaagaaccuuacaaaa

SEQ ID NO: 2316027 - RNA, 19 nt, Homo sapiens
  misc_RNA (1)...(19): siRNA sense strand
aaccgaagcuacagagaca

SEQ ID NO: 2316028 - RNA, 19 nt, Homo sapiens
  misc_RNA (1)...(19): siRNA sense strand
ggaacugugcauauagcaa

SEQ ID NO: 2316029 - RNA, 19 nt, Homo sapiens
  misc_RNA (1)...(19): siRNA sense strand
auucauaucucuuggaaac

SEQ ID NO: 2316030 - RNA, 19 nt, Homo sapiens
  misc_RNA (1)...(19): siRNA sense strand
ucaccaaaccacagggagu

SEQ ID NO: 2316031 - RNA, 19 nt, Homo sapiens
  misc_RNA (1)...(19): siRNA sense strand
gugcaagaugaaaugggua

SEQ ID NO: 2316032 - RNA, 19 nt, Homo sapiens
  misc_RNA (1)...(19): siRNA sense strand
agaaaagguucgugggaug

SEQ ID NO: 2316033 - RNA, 19 nt, Homo sapiens
  misc_RNA (1)...(19): siRNA sense strand
ggaggagaagaaaggauga

SEQ ID NO: 2316034 - RNA, 19 nt, Homo sapiens
  misc_RNA (1)...(19): siRNA sense strand
gccugguucuagauggaaa

SEQ ID NO: 2316035 - RNA, 19 nt, Homo sapiens
  misc_RNA (1)...(19): siRNA sense strand
gcauagaagagggagcauu

SEQ ID NO: 2316036 - RNA, 19 nt, Homo sapiens
  misc_RNA (1)...(19): siRNA sense strand
agcaagagaaagaaccuua

SEQ ID NO: 2316037 - RNA, 19 nt, Homo sapiens
  misc_RNA (1)...(19): siRNA sense strand
cucucuaccuucagaacaa

SEQ ID NO: 2316038 - RNA, 19 nt, Homo sapiens
  misc_RNA (1)...(19): siRNA sense strand
cauucauaucucuuggaaa

SEQ ID NO: 2316039 - RNA, 19 nt, Homo sapiens
  misc_RNA (1)...(19): siRNA sense strand
gcauauagcaaagggagga

SEQ ID NO: 2316040 - RNA, 19 nt, Homo sapiens
  misc_RNA (1)...(19): siRNA sense strand
ucgaaggaggaguuuguaa

SEQ ID NO: 2316041 - RNA, 19 nt, Homo sapiens
  misc_RNA (1)...(19): siRNA sense strand
aucgagagcaagagaaaga

SEQ ID NO: 2316042 - RNA, 19 nt, Homo sapiens
  misc_RNA (1)...(19): siRNA sense strand
agauguuaccaauaagcaa

SEQ ID NO: 2316043 - RNA, 19 nt, Homo sapiens
  misc_RNA (1)...(19): siRNA sense strand
aguaaaccuuccaggcaca

SEQ ID NO: 2316044 - RNA, 19 nt, Homo sapiens
  misc_RNA (1)...(19): siRNA sense strand
cuguuugauuguaaggaca

SEQ ID NO: 2316045 - RNA, 19 nt, Homo sapiens
  misc_RNA (1)...(19): siRNA sense strand
cucuaucaguuauggcuaa

SEQ ID NO: 2316046 - RNA, 19 nt, Homo sapiens
  misc_RNA (1)...(19): siRNA sense strand
ucuuugaugauuuggacaa

SEQ ID NO: 2316047 - RNA, 19 nt, Homo sapiens
  misc_RNA (1)...(19): siRNA sense strand
ugggauggcuauuaaggau

SEQ ID NO: 2316048 - RNA, 19 nt, Homo sapiens
  misc_RNA (1)...(19): siRNA sense strand
cacccucaaucgagagcaa

SEQ ID NO: 2316049 - RNA, 19 nt, Homo sapiens
  misc_RNA (1)...(19): siRNA sense strand
gaaaggaugacuaugcaga

SEQ ID NO: 2316050 - RNA, 19 nt, Homo sapiens
  misc_RNA (1)...(19): siRNA sense strand
caggacuauagaagaacua

SEQ ID NO: 2316051 - RNA, 19 nt, Homo sapiens
  misc_RNA (1)...(19): siRNA sense strand
gguuuaggugacaaaguuu

SEQ ID NO: 2316052 - RNA, 19 nt, Homo sapiens
  misc_RNA (1)...(19): siRNA sense strand
guuuguauugagacugaaa

SEQ ID NO: 2316053 - RNA, 19 nt, Homo sapiens
  misc_RNA (1)...(19): siRNA sense strand
acuaagaaggacaacucua

SEQ ID NO: 2316054 - RNA, 19 nt, Homo sapiens
  misc_RNA (1)...(19): siRNA sense strand
gugaccaaacagccagaua

SEQ ID NO: 2316055 - RNA, 19 nt, Homo sapiens
  misc_RNA (1)...(19): siRNA sense strand
cuaccuauuugaugaaacu

SEQ ID NO: 2316056 - RNA, 19 nt, Homo sapiens
  misc_RNA (1)...(19): siRNA sense strand
cuauagaagaacuacgcuu

SEQ ID NO: 2316057 - RNA, 19 nt, Homo sapiens
  misc_RNA (1)...(19): siRNA sense strand
cgcaacaaucccugguauu

SEQ ID NO: 2316058 - RNA, 19 nt, Homo sapiens
  misc_RNA (1)...(19): siRNA sense strand
cuauaaaguaugcaugguu

SEQ ID NO: 2316059 - RNA, 19 nt, Homo sapiens
  misc_RNA (1)...(19): siRNA sense strand
agcaaagggaggagaagaa

SEQ ID NO: 2316060 - RNA, 19 nt, Homo sapiens
  misc_RNA (1)...(19): siRNA sense strand
cguaaucaccuuagcacaa

SEQ ID NO: 2316061 - RNA, 19 nt, Homo sapiens
  misc_RNA (1)...(19): siRNA sense strand
uuguaaggacagugggauu

SEQ ID NO: 2316062 - RNA, 19 nt, Homo sapiens
  misc_RNA (1)...(19): siRNA sense strand
ugcugaaaguagaaagaau

SEQ ID NO: 2316063 - RNA, 19 nt, Homo sapiens
  misc_RNA (1)...(19): siRNA sense strand
gagcauuccgagacagcaa

SEQ ID NO: 2316064 - RNA, 19 nt, Homo sapiens
  misc_RNA (1)...(19): siRNA sense strand
gagaaagaaccuuacaaaa

SEQ ID NO: 2316065 - RNA, 19 nt, Homo sapiens
  misc_RNA (1)...(19): siRNA sense strand
aaccgaagcuacagagaca

SEQ ID NO: 2316066 - RNA, 19 nt, Homo sapiens
  misc_RNA (1)...(19): siRNA sense strand
ggaacugugcauauagcaa

SEQ ID NO: 2316067 - RNA, 19 nt, Homo sapiens
  misc_RNA (1)...(19): siRNA sense strand
auucauaucucuuggaaac

SEQ ID NO: 2316068 - RNA, 19 nt, Homo sapiens
  misc_RNA (1)...(19): siRNA sense strand
ucaccaaaccacagggagu

SEQ ID NO: 2316069 - RNA, 19 nt, Homo sapiens
  misc_RNA (1)...(19): siRNA sense strand
gugcaagaugaaaugggua

SEQ ID NO: 2316070 - RNA, 19 nt, Homo sapiens
  misc_RNA (1)...(19): siRNA sense strand
agaaaagguucgugggaug

SEQ ID NO: 2316071 - RNA, 19 nt, Homo sapiens
  misc_RNA (1)...(19): siRNA sense strand
ggaggagaagaaaggauga

SEQ ID NO: 2316072 - RNA, 19 nt, Homo sapiens
  misc_RNA (1)...(19): siRNA sense strand
gccugguucuagauggaaa

SEQ ID NO: 2316073 - RNA, 19 nt, Homo sapiens
  misc_RNA (1)...(19): siRNA sense strand
gcauagaagagggagcauu

SEQ ID NO: 2316074 - RNA, 19 nt, Homo sapiens
  misc_RNA (1)...(19): siRNA sense strand
agcaagagaaagaaccuua

SEQ ID NO: 2316075 - RNA, 19 nt, Homo sapiens
  misc_RNA (1)...(19): siRNA sense strand
cucucuaccuucagaacaa

SEQ ID NO: 2316076 - RNA, 19 nt, Homo sapiens
  misc_RNA (1)...(19): siRNA sense strand
cauucauaucucuuggaaa

SEQ ID NO: 2316077 - RNA, 19 nt, Homo sapiens
  misc_RNA (1)...(19): siRNA sense strand
gcauauagcaaagggagga

SEQ ID NO: 2316078 - RNA, 19 nt, Homo sapiens
  misc_RNA (1)...(19): siRNA sense strand
ucgaaggaggaguuuguaa

SEQ ID NO: 2316079 - RNA, 19 nt, Homo sapiens
  misc_RNA (1)...(19): siRNA sense strand
aucgagagcaagagaaaga

SEQ ID NO: 2316080 - RNA, 19 nt, Homo sapiens
  misc_RNA (1)...(19): siRNA sense strand
agauguuaccaauaagcaa

SEQ ID NO: 2316081 - RNA, 19 nt, Homo sapiens
  misc_RNA (1)...(19): siRNA sense strand
aguaaaccuuccaggcaca

SEQ ID NO: 2316082 - RNA, 19 nt, Homo sapiens
  misc_RNA (1)...(19): siRNA sense strand
cuguuugauuguaaggaca

SEQ ID NO: 2316083 - RNA, 19 nt, Homo sapiens
  misc_RNA (1)...(19): siRNA sense strand
cucuaucaguuauggcuaa

SEQ ID NO: 2316084 - RNA, 19 nt, Homo sapiens
  misc_RNA (1)...(19): siRNA sense strand
ucuuugaugauuuggacaa

SEQ ID NO: 2316085 - RNA, 19 nt, Homo sapiens
  misc_RNA (1)...(19): siRNA sense strand
ugggauggcuauuaaggau

SEQ ID NO: 2316086 - RNA, 19 nt, Homo sapiens
  misc_RNA (1)...(19): siRNA sense strand
cacccucaaucgagagcaa

SEQ ID NO: 2316087 - RNA, 19 nt, Homo sapiens
  misc_RNA (1)...(19): siRNA sense strand
gaaaggaugacuaugcaga

SEQ ID NO: 2316088 - RNA, 19 nt, Homo sapiens
  misc_RNA (1)...(19): siRNA sense strand
caggacuauagaagaacua

SEQ ID NO: 2316089 - RNA, 19 nt, Homo sapiens
  misc_RNA (1)...(19): siRNA sense strand
gguuuaggugacaaaguuu

SEQ ID NO: 2316090 - RNA, 19 nt, Homo sapiens
  misc_RNA (1)...(19): siRNA sense strand
guuuguauugagacugaaa

SEQ ID NO: 2316091 - RNA, 19 nt, Homo sapiens
  misc_RNA (1)...(19): siRNA sense strand
acuaagaaggacaacucua

SEQ ID NO: 2316092 - RNA, 19 nt, Homo sapiens
  misc_RNA (1)...(19): siRNA sense strand
gugaccaaacagccagaua

SEQ ID NO: 2316093 - RNA, 19 nt, Homo sapiens
  misc_RNA (1)...(19): siRNA sense strand
cuaccuauuugaugaaacu

SEQ ID NO: 2316094 - RNA, 19 nt, Homo sapiens
  misc_RNA (1)...(19): siRNA sense strand
cuauagaagaacuacgcuu

SEQ ID NO: 2316095 - RNA, 19 nt, Homo sapiens
  misc_RNA (1)...(19): siRNA sense strand
cgcaacaaucccugguauu

SEQ ID NO: 2316096 - RNA, 19 nt, Homo sapiens
  misc_RNA (1)...(19): siRNA sense strand
cuauaaaguaugcaugguu

SEQ ID NO: 2316097 - RNA, 19 nt, Homo sapiens
  misc_RNA (1)...(19): siRNA sense strand
cggucuaccuguauggcaa

SEQ ID NO: 2316098 - RNA, 19 nt, Homo sapiens
  misc_RNA (1)...(19): siRNA sense strand
auuccaaacccuagcagaa

SEQ ID NO: 2316099 - RNA, 19 nt, Homo sapiens
  misc_RNA (1)...(19): siRNA sense strand
ggcucuauuugcaggacaa

SEQ ID NO: 2316100 - RNA, 19 nt, Homo sapiens
  misc_RNA (1)...(19): siRNA sense strand
gggauggccgucagggaau

SEQ ID NO: 2316101 - RNA, 19 nt, Homo sapiens
  misc_RNA (1)...(19): siRNA sense strand
cugggauggcagagaaaga

SEQ ID NO: 2316102 - RNA, 19 nt, Homo sapiens
  misc_RNA (1)...(19): siRNA sense strand
ggaaagaugauuauugcga

SEQ ID NO: 2316103 - RNA, 19 nt, Homo sapiens
  misc_RNA (1)...(19): siRNA sense strand
acgggaaccuccugaccaa

SEQ ID NO: 2316104 - RNA, 19 nt, Homo sapiens
  misc_RNA (1)...(19): siRNA sense strand
auuaaaugggucacagaau

SEQ ID NO: 2316105 - RNA, 19 nt, Homo sapiens
  misc_RNA (1)...(19): siRNA sense strand
uguaaugagcgaagcuuga

SEQ ID NO: 2316106 - RNA, 19 nt, Homo sapiens
  misc_RNA (1)...(19): siRNA sense strand
cagugugccuguugggcuu

SEQ ID NO: 2316107 - RNA, 19 nt, Homo sapiens
  misc_RNA (1)...(19): siRNA sense strand
gcugagaguggaugaaaau

SEQ ID NO: 2316108 - RNA, 19 nt, Homo sapiens
  misc_RNA (1)...(19): siRNA sense strand
guucaggagcgcauaguca

SEQ ID NO: 2316109 - RNA, 19 nt, Homo sapiens
  misc_RNA (1)...(19): siRNA sense strand
ccaacaaccaacugcggau

SEQ ID NO: 2316110 - RNA, 19 nt, Homo sapiens
  misc_RNA (1)...(19): siRNA sense strand
cugaacaacggcagcaaca

SEQ ID NO: 2316111 - RNA, 19 nt, Homo sapiens
  misc_RNA (1)...(19): siRNA sense strand
ccgucagggaauuaaauau

SEQ ID NO: 2316112 - RNA, 19 nt, Homo sapiens
  misc_RNA (1)...(19): siRNA sense strand
gacugggauggcagagaaa

SEQ ID NO: 2316113 - RNA, 19 nt, Homo sapiens
  misc_RNA (1)...(19): siRNA sense strand
guauuaaaugggucacaga

SEQ ID NO: 2316114 - RNA, 19 nt, Homo sapiens
  misc_RNA (1)...(19): siRNA sense strand
cggagcagauucagggcga

SEQ ID NO: 2316115 - RNA, 19 nt, Homo sapiens
  misc_RNA (1)...(19): siRNA sense strand
guagcaggcaugugggaca

SEQ ID NO: 2316116 - RNA, 19 nt, Homo sapiens
  misc_RNA (1)...(19): siRNA sense strand
ucgacuaccugacggccaa

SEQ ID NO: 2316117 - RNA, 19 nt, Homo sapiens
  misc_RNA (1)...(19): siRNA sense strand
ugaaugauaagcugggcua

SEQ ID NO: 2316118 - RNA, 19 nt, Homo sapiens
  misc_RNA (1)...(19): siRNA sense strand
uauaaacagaagaugggaa

SEQ ID NO: 2316119 - RNA, 19 nt, Homo sapiens
  misc_RNA (1)...(19): siRNA sense strand
gguuugagcacgugcagga

SEQ ID NO: 2316120 - RNA, 19 nt, Homo sapiens
  misc_RNA (1)...(19): siRNA sense strand
cggagguuuaugaaugaua

SEQ ID NO: 2316121 - RNA, 19 nt, Homo sapiens
  misc_RNA (1)...(19): siRNA sense strand
agaagaugggaaaguguga

SEQ ID NO: 2316122 - RNA, 19 nt, Homo sapiens
  misc_RNA (1)...(19): siRNA sense strand
uggucuacuuggugagcca

SEQ ID NO: 2316123 - RNA, 19 nt, Homo sapiens
  misc_RNA (1)...(19): siRNA sense strand
ugaaugauaagcugggcua

SEQ ID NO: 2316124 - RNA, 19 nt, Homo sapiens
  misc_RNA (1)...(19): siRNA sense strand
gguuugagcacgugcagga

SEQ ID NO: 2316125 - RNA, 19 nt, Homo sapiens
  misc_RNA (1)...(19): siRNA sense strand
cggagguuuaugaaugaua

SEQ ID NO: 2316126 - RNA, 19 nt, Homo sapiens
  misc_RNA (1)...(19): siRNA sense strand
uggucuacuuggugagcca

SEQ ID NO: 2316127 - RNA, 19 nt, Homo sapiens
  misc_RNA (1)...(19): siRNA sense strand
ccgacugcugugagaguga

SEQ ID NO: 2316128 - RNA, 19 nt, Homo sapiens
  misc_RNA (1)...(19): siRNA sense strand
ccaaaucagacgagggaaa

SEQ ID NO: 2316129 - RNA, 19 nt, Homo sapiens
  misc_RNA (1)...(19): siRNA sense strand
agucaaaacuagagggaau

SEQ ID NO: 2316130 - RNA, 19 nt, Homo sapiens
  misc_RNA (1)...(19): siRNA sense strand
ucgaaauggaacagaaaua

SEQ ID NO: 2316131 - RNA, 19 nt, Homo sapiens
  misc_RNA (1)...(19): siRNA sense strand
cagaauugacagugggaga

SEQ ID NO: 2316132 - RNA, 19 nt, Homo sapiens
  misc_RNA (1)...(19): siRNA sense strand
cagccaaguuauugaaaca

SEQ ID NO: 2316133 - RNA, 19 nt, Homo sapiens
  misc_RNA (1)...(19): siRNA sense strand
ggaagauacagcagaaaca

SEQ ID NO: 2316134 - RNA, 19 nt, Homo sapiens
  misc_RNA (1)...(19): siRNA sense strand
ggaaagacauggaacagga

SEQ ID NO: 2316135 - RNA, 19 nt, Homo sapiens
  misc_RNA (1)...(19): siRNA sense strand
cuauugauuucgaggaaga

SEQ ID NO: 2316136 - RNA, 19 nt, Homo sapiens
  misc_RNA (1)...(19): siRNA sense strand
uauugaaguucgagcauau

SEQ ID NO: 2316137 - RNA, 19 nt, Homo sapiens
  misc_RNA (1)...(19): siRNA sense strand
gggaaugagucuuucguca

SEQ ID NO: 2316138 - RNA, 19 nt, Homo sapiens
  misc_RNA (1)...(19): siRNA sense strand
auguaaggcuacuggaaaa

SEQ ID NO: 2316139 - RNA, 19 nt, Homo sapiens
  misc_RNA (1)...(19): siRNA sense strand
cgaugggaauguaaggcua

SEQ ID NO: 2316140 - RNA, 19 nt, Homo sapiens
  misc_RNA (1)...(19): siRNA sense strand
gauucuuguugcauggaaa

SEQ ID NO: 2316141 - RNA, 19 nt, Homo sapiens
  misc_RNA (1)...(19): siRNA sense strand
gcuucgaaauggaacagaa

SEQ ID NO: 2316142 - RNA, 19 nt, Homo sapiens
  misc_RNA (1)...(19): siRNA sense strand
cuucgaaauggaacagaaa

SEQ ID NO: 2316143 - RNA, 19 nt, Homo sapiens
  misc_RNA (1)...(19): siRNA sense strand
gauuuaaugaucaggaaca

SEQ ID NO: 2316144 - RNA, 19 nt, Homo sapiens
  misc_RNA (1)...(19): siRNA sense strand
auaugaauuucgaguggua

SEQ ID NO: 2316145 - RNA, 19 nt, Homo sapiens
  misc_RNA (1)...(19): siRNA sense strand
agauauggcugcaggguac

SEQ ID NO: 2316146 - RNA, 19 nt, Homo sapiens
  misc_RNA (1)...(19): siRNA sense strand
uugugaaguucguggcaau

SEQ ID NO: 2316147 - RNA, 19 nt, Homo sapiens
  misc_RNA (1)...(19): siRNA sense strand
guggacaauuacaaguaua

SEQ ID NO: 2316148 - RNA, 19 nt, Homo sapiens
  misc_RNA (1)...(19): siRNA sense strand
caauaaaggagaugggccu

SEQ ID NO: 2316149 - RNA, 19 nt, Homo sapiens
  misc_RNA (1)...(19): siRNA sense strand
uaggaagaccacagggauu

SEQ ID NO: 2316150 - RNA, 19 nt, Homo sapiens
  misc_RNA (1)...(19): siRNA sense strand
ggcaagagggucacagcaa

SEQ ID NO: 2316151 - RNA, 19 nt, Homo sapiens
  misc_RNA (1)...(19): siRNA sense strand
cauuaucaguguuuagcaa

SEQ ID NO: 2316152 - RNA, 19 nt, Homo sapiens
  misc_RNA (1)...(19): siRNA sense strand
gcguaaugauggugugaug

SEQ ID NO: 2316153 - RNA, 19 nt, Homo sapiens
  misc_RNA (1)...(19): siRNA sense strand
gccuauugauuucgaggaa

SEQ ID NO: 2316154 - RNA, 19 nt, Homo sapiens
  misc_RNA (1)...(19): siRNA sense strand
ggauaguaauuguugagga

SEQ ID NO: 2316155 - RNA, 19 nt, Homo sapiens
  misc_RNA (1)...(19): siRNA sense strand
aagcggaagaaguggaaga

SEQ ID NO: 2316156 - RNA, 19 nt, Homo sapiens
  misc_RNA (1)...(19): siRNA sense strand
agugaaaguuggcguuuau

SEQ ID NO: 2316157 - RNA, 19 nt, Homo sapiens
  misc_RNA (1)...(19): siRNA sense strand
uuacaauggagcuggauau

SEQ ID NO: 2316158 - RNA, 19 nt, Homo sapiens
  misc_RNA (1)...(19): siRNA sense strand
ugaaggaggagauggaaca

SEQ ID NO: 2316159 - RNA, 19 nt, Homo sapiens
  misc_RNA (1)...(19): siRNA sense strand
gcugaaaacucacguggaa

SEQ ID NO: 2316160 - RNA, 19 nt, Homo sapiens
  misc_RNA (1)...(19): siRNA sense strand
cgaggaagaggguggacau

SEQ ID NO: 2316161 - RNA, 19 nt, Homo sapiens
  misc_RNA (1)...(19): siRNA sense strand
ugaaaacucacguggaaaa

SEQ ID NO: 2316162 - RNA, 19 nt, Homo sapiens
  misc_RNA (1)...(19): siRNA sense strand
cggaagaaguggaagaagg

SEQ ID NO: 2316163 - RNA, 19 nt, Homo sapiens
  misc_RNA (1)...(19): siRNA sense strand
cuauauuugucuggugaaa

SEQ ID NO: 2316164 - RNA, 19 nt, Homo sapiens
  misc_RNA (1)...(19): siRNA sense strand
gggagaaagcauuguccuu

SEQ ID NO: 2316165 - RNA, 19 nt, Homo sapiens
  misc_RNA (1)...(19): siRNA sense strand
ccgcacaaaugaagcaguu

SEQ ID NO: 2316166 - RNA, 19 nt, Homo sapiens
  misc_RNA (1)...(19): siRNA sense strand
gagacagagcaguuagaga

SEQ ID NO: 2316167 - RNA, 19 nt, Homo sapiens
  misc_RNA (1)...(19): siRNA sense strand
gacagagcaguuagagaaa

SEQ ID NO: 2316168 - RNA, 19 nt, Homo sapiens
  misc_RNA (1)...(19): siRNA sense strand
cgaauguacagcuggauga

SEQ ID NO: 2316169 - RNA, 19 nt, Homo sapiens
  misc_RNA (1)...(19): siRNA sense strand
gaauugacagugggagaaa

SEQ ID NO: 2316170 - RNA, 19 nt, Homo sapiens
  misc_RNA (1)...(19): siRNA sense strand
gagauauggcugcagggua

SEQ ID NO: 2316171 - RNA, 19 nt, Homo sapiens
  misc_RNA (1)...(19): siRNA sense strand
caauguaagcggaagaagu

SEQ ID NO: 2316172 - RNA, 19 nt, Homo sapiens
  misc_RNA (1)...(19): siRNA sense strand
cagauuuaaugaucaggaa

SEQ ID NO: 2316173 - RNA, 19 nt, Homo sapiens
  misc_RNA (1)...(19): siRNA sense strand
ugcaagaaccagaugauau

SEQ ID NO: 2316174 - RNA, 19 nt, Homo sapiens
  misc_RNA (1)...(19): siRNA sense strand
uggaaacacauuaaagaga

SEQ ID NO: 2316175 - RNA, 19 nt, Homo sapiens
  misc_RNA (1)...(19): siRNA sense strand
gaaaauaaguauggagcca

SEQ ID NO: 2316176 - RNA, 19 nt, Homo sapiens
  misc_RNA (1)...(19): siRNA sense strand
caucauauucagguggaaa

SEQ ID NO: 2316177 - RNA, 19 nt, Homo sapiens
  misc_RNA (1)...(19): siRNA sense strand
cuguuaagauggaaugcuu

SEQ ID NO: 2316178 - RNA, 19 nt, Homo sapiens
  misc_RNA (1)...(19): siRNA sense strand
accaagaaguugucauaga

SEQ ID NO: 2316179 - RNA, 19 nt, Homo sapiens
  misc_RNA (1)...(19): siRNA sense strand
cgucuuugguucugcugaa

SEQ ID NO: 2316180 - RNA, 19 nt, Homo sapiens
  misc_RNA (1)...(19): siRNA sense strand
caguaaagacagucccaga

SEQ ID NO: 2316181 - RNA, 19 nt, Homo sapiens
  misc_RNA (1)...(19): siRNA sense strand
gagaauaugagccgaaaau

SEQ ID NO: 2316182 - RNA, 19 nt, Homo sapiens
  misc_RNA (1)...(19): siRNA sense strand
cagcaacagccaaguuauu

SEQ ID NO: 2316183 - RNA, 19 nt, Homo sapiens
  misc_RNA (1)...(19): siRNA sense strand
ugggagaauaugagccgaa

SEQ ID NO: 2316184 - RNA, 19 nt, Homo sapiens
  misc_RNA (1)...(19): siRNA sense strand
ccaaagaccaagaaguugu

SEQ ID NO: 2316185 - RNA, 19 nt, Homo sapiens
  misc_RNA (1)...(19): siRNA sense strand
aagaaguggaagaaggcau

SEQ ID NO: 2316186 - RNA, 19 nt, Homo sapiens
  misc_RNA (1)...(19): siRNA sense strand
guugguuacuggaaagaca

SEQ ID NO: 2316187 - RNA, 19 nt, Homo sapiens
  misc_RNA (1)...(19): siRNA sense strand
aagcaaaggauucugguca

SEQ ID NO: 2316188 - RNA, 19 nt, Homo sapiens
  misc_RNA (1)...(19): siRNA sense strand
ccaaaucagacgagggaaa

SEQ ID NO: 2316189 - RNA, 19 nt, Homo sapiens
  misc_RNA (1)...(19): siRNA sense strand
agucaaaacuagagggaau

SEQ ID NO: 2316190 - RNA, 19 nt, Homo sapiens
  misc_RNA (1)...(19): siRNA sense strand
ucgaaauggaacagaaaua

SEQ ID NO: 2316191 - RNA, 19 nt, Homo sapiens
  misc_RNA (1)...(19): siRNA sense strand
cagaauugacagugggaga

SEQ ID NO: 2316192 - RNA, 19 nt, Homo sapiens
  misc_RNA (1)...(19): siRNA sense strand
cagccaaguuauugaaaca

SEQ ID NO: 2316193 - RNA, 19 nt, Homo sapiens
  misc_RNA (1)...(19): siRNA sense strand
ggaagauacagcagaaaca

SEQ ID NO: 2316194 - RNA, 19 nt, Homo sapiens
  misc_RNA (1)...(19): siRNA sense strand
ggaaagacauggaacagga

SEQ ID NO: 2316195 - RNA, 19 nt, Homo sapiens
  misc_RNA (1)...(19): siRNA sense strand
cuauugauuucgaggaaga

SEQ ID NO: 2316196 - RNA, 19 nt, Homo sapiens
  misc_RNA (1)...(19): siRNA sense strand
uauugaaguucgagcauau

SEQ ID NO: 2316197 - RNA, 19 nt, Homo sapiens
  misc_RNA (1)...(19): siRNA sense strand
gggaaugagucuuucguca

SEQ ID NO: 2316198 - RNA, 19 nt, Homo sapiens
  misc_RNA (1)...(19): siRNA sense strand
auguaaggcuacuggaaaa

SEQ ID NO: 2316199 - RNA, 19 nt, Homo sapiens
  misc_RNA (1)...(19): siRNA sense strand
cgaugggaauguaaggcua

SEQ ID NO: 2316200 - RNA, 19 nt, Homo sapiens
  misc_RNA (1)...(19): siRNA sense strand
gauucuuguugcauggaaa

SEQ ID NO: 2316201 - RNA, 19 nt, Homo sapiens
  misc_RNA (1)...(19): siRNA sense strand
gcuucgaaauggaacagaa

SEQ ID NO: 2316202 - RNA, 19 nt, Homo sapiens
  misc_RNA (1)...(19): siRNA sense strand
cuucgaaauggaacagaaa

SEQ ID NO: 2316203 - RNA, 19 nt, Homo sapiens
  misc_RNA (1)...(19): siRNA sense strand
gauuuaaugaucaggaaca

SEQ ID NO: 2316204 - RNA, 19 nt, Homo sapiens
  misc_RNA (1)...(19): siRNA sense strand
auaugaauuucgaguggua

SEQ ID NO: 2316205 - RNA, 19 nt, Homo sapiens
  misc_RNA (1)...(19): siRNA sense strand
agauauggcugcaggguac

SEQ ID NO: 2316206 - RNA, 19 nt, Homo sapiens
  misc_RNA (1)...(19): siRNA sense strand
uugugaaguucguggcaau

SEQ ID NO: 2316207 - RNA, 19 nt, Homo sapiens
  misc_RNA (1)...(19): siRNA sense strand
guggacaauuacaaguaua

SEQ ID NO: 2316208 - RNA, 19 nt, Homo sapiens
  misc_RNA (1)...(19): siRNA sense strand
caauaaaggagaugggccu

SEQ ID NO: 2316209 - RNA, 19 nt, Homo sapiens
  misc_RNA (1)...(19): siRNA sense strand
uaggaagaccacagggauu

SEQ ID NO: 2316210 - RNA, 19 nt, Homo sapiens
  misc_RNA (1)...(19): siRNA sense strand
ggcaagagggucacagcaa

SEQ ID NO: 2316211 - RNA, 19 nt, Homo sapiens
  misc_RNA (1)...(19): siRNA sense strand
cauuaucaguguuuagcaa

SEQ ID NO: 2316212 - RNA, 19 nt, Homo sapiens
  misc_RNA (1)...(19): siRNA sense strand
gcguaaugauggugugaug

SEQ ID NO: 2316213 - RNA, 19 nt, Homo sapiens
  misc_RNA (1)...(19): siRNA sense strand
gccuauugauuucgaggaa

SEQ ID NO: 2316214 - RNA, 19 nt, Homo sapiens
  misc_RNA (1)...(19): siRNA sense strand
ggauaguaauuguugagga

SEQ ID NO: 2316215 - RNA, 19 nt, Homo sapiens
  misc_RNA (1)...(19): siRNA sense strand
aagcggaagaaguggaaga

SEQ ID NO: 2316216 - RNA, 19 nt, Homo sapiens
  misc_RNA (1)...(19): siRNA sense strand
agugaaaguuggcguuuau

SEQ ID NO: 2316217 - RNA, 19 nt, Homo sapiens
  misc_RNA (1)...(19): siRNA sense strand
uuacaauggagcuggauau

SEQ ID NO: 2316218 - RNA, 19 nt, Homo sapiens
  misc_RNA (1)...(19): siRNA sense strand
ugaaggaggagauggaaca

SEQ ID NO: 2316219 - RNA, 19 nt, Homo sapiens
  misc_RNA (1)...(19): siRNA sense strand
gcugaaaacucacguggaa

SEQ ID NO: 2316220 - RNA, 19 nt, Homo sapiens
  misc_RNA (1)...(19): siRNA sense strand
cgaggaagaggguggacau

SEQ ID NO: 2316221 - RNA, 19 nt, Homo sapiens
  misc_RNA (1)...(19): siRNA sense strand
ugaaaacucacguggaaaa

SEQ ID NO: 2316222 - RNA, 19 nt, Homo sapiens
  misc_RNA (1)...(19): siRNA sense strand
cggaagaaguggaagaagg

SEQ ID NO: 2316223 - RNA, 19 nt, Homo sapiens
  misc_RNA (1)...(19): siRNA sense strand
cuauauuugucuggugaaa

SEQ ID NO: 2316224 - RNA, 19 nt, Homo sapiens
  misc_RNA (1)...(19): siRNA sense strand
gggagaaagcauuguccuu

SEQ ID NO: 2316225 - RNA, 19 nt, Homo sapiens
  misc_RNA (1)...(19): siRNA sense strand
ccgcacaaaugaagcaguu

SEQ ID NO: 2316226 - RNA, 19 nt, Homo sapiens
  misc_RNA (1)...(19): siRNA sense strand
gagacagagcaguuagaga

SEQ ID NO: 2316227 - RNA, 19 nt, Homo sapiens
  misc_RNA (1)...(19): siRNA sense strand
gacagagcaguuagagaaa

SEQ ID NO: 2316228 - RNA, 19 nt, Homo sapiens
  misc_RNA (1)...(19): siRNA sense strand
cgaauguacagcuggauga

SEQ ID NO: 2316229 - RNA, 19 nt, Homo sapiens
  misc_RNA (1)...(19): siRNA sense strand
gaauugacagugggagaaa

SEQ ID NO: 2316230 - RNA, 19 nt, Homo sapiens
  misc_RNA (1)...(19): siRNA sense strand
gagauauggcugcagggua

SEQ ID NO: 2316231 - RNA, 19 nt, Homo sapiens
  misc_RNA (1)...(19): siRNA sense strand
caauguaagcggaagaagu

SEQ ID NO: 2316232 - RNA, 19 nt, Homo sapiens
  misc_RNA (1)...(19): siRNA sense strand
cagauuuaaugaucaggaa

SEQ ID NO: 2316233 - RNA, 19 nt, Homo sapiens
  misc_RNA (1)...(19): siRNA sense strand
ugcaagaaccagaugauau

SEQ ID NO: 2316234 - RNA, 19 nt, Homo sapiens
  misc_RNA (1)...(19): siRNA sense strand
uggaaacacauuaaagaga

SEQ ID NO: 2316235 - RNA, 19 nt, Homo sapiens
  misc_RNA (1)...(19): siRNA sense strand
gaaaauaaguauggagcca

SEQ ID NO: 2316236 - RNA, 19 nt, Homo sapiens
  misc_RNA (1)...(19): siRNA sense strand
caucauauucagguggaaa

SEQ ID NO: 2316237 - RNA, 19 nt, Homo sapiens
  misc_RNA (1)...(19): siRNA sense strand
cuguuaagauggaaugcuu

SEQ ID NO: 2316238 - RNA, 19 nt, Homo sapiens
  misc_RNA (1)...(19): siRNA sense strand
accaagaaguugucauaga

SEQ ID NO: 2316239 - RNA, 19 nt, Homo sapiens
  misc_RNA (1)...(19): siRNA sense strand
cgucuuugguucugcugaa

SEQ ID NO: 2316240 - RNA, 19 nt, Homo sapiens
  misc_RNA (1)...(19): siRNA sense strand
caguaaagacagucccaga

SEQ ID NO: 2316241 - RNA, 19 nt, Homo sapiens
  misc_RNA (1)...(19): siRNA sense strand
gagaauaugagccgaaaau

SEQ ID NO: 2316242 - RNA, 19 nt, Homo sapiens
  misc_RNA (1)...(19): siRNA sense strand
cagcaacagccaaguuauu

SEQ ID NO: 2316243 - RNA, 19 nt, Homo sapiens
  misc_RNA (1)...(19): siRNA sense strand
ugggagaauaugagccgaa

SEQ ID NO: 2316244 - RNA, 19 nt, Homo sapiens
  misc_RNA (1)...(19): siRNA sense strand
ccaaagaccaagaaguugu

SEQ ID NO: 2316245 - RNA, 19 nt, Homo sapiens
  misc_RNA (1)...(19): siRNA sense strand
aagaaguggaagaaggcau

SEQ ID NO: 2316246 - RNA, 19 nt, Homo sapiens
  misc_RNA (1)...(19): siRNA sense strand
guugguuacuggaaagaca

SEQ ID NO: 2316247 - RNA, 19 nt, Homo sapiens
  misc_RNA (1)...(19): siRNA sense strand
aagcaaaggauucugguca

SEQ ID NO: 2316248 - RNA, 19 nt, Homo sapiens
  misc_RNA (1)...(19): siRNA sense strand
gcgacuacauuaauggcaa

SEQ ID NO: 2316249 - RNA, 19 nt, Homo sapiens
  misc_RNA (1)...(19): siRNA sense strand
ggaaaaggugugagcggua

SEQ ID NO: 2316250 - RNA, 19 nt, Homo sapiens
  misc_RNA (1)...(19): siRNA sense strand
cugucgagagauagagaau

SEQ ID NO: 2316251 - RNA, 19 nt, Homo sapiens
  misc_RNA (1)...(19): siRNA sense strand
agauagagaaugggcggaa

SEQ ID NO: 2316252 - RNA, 19 nt, Homo sapiens
  misc_RNA (1)...(19): siRNA sense strand
auaaaggagaaguggcuga

SEQ ID NO: 2316253 - RNA, 19 nt, Homo sapiens
  misc_RNA (1)...(19): siRNA sense strand
aggaagagggacacagcga

SEQ ID NO: 2316254 - RNA, 19 nt, Homo sapiens
  misc_RNA (1)...(19): siRNA sense strand
ugauaaaggagaaguggcu

SEQ ID NO: 2316255 - RNA, 19 nt, Homo sapiens
  misc_RNA (1)...(19): siRNA sense strand
auagagaaugggcggaaaa

SEQ ID NO: 2316256 - RNA, 19 nt, Homo sapiens
  misc_RNA (1)...(19): siRNA sense strand
acucgaacacacugggaaa

SEQ ID NO: 2316257 - RNA, 19 nt, Homo sapiens
  misc_RNA (1)...(19): siRNA sense strand
uggucaaugcaaagcaaua

SEQ ID NO: 2316258 - RNA, 19 nt, Homo sapiens
  misc_RNA (1)...(19): siRNA sense strand
aguuuauggucaaugcaaa

SEQ ID NO: 2316259 - RNA, 19 nt, Homo sapiens
  misc_RNA (1)...(19): siRNA sense strand
cagaaagaaggcauggcaa

SEQ ID NO: 2316260 - RNA, 19 nt, Homo sapiens
  misc_RNA (1)...(19): siRNA sense strand
cgggauauuaacaaagaca

SEQ ID NO: 2316261 - RNA, 19 nt, Homo sapiens
  misc_RNA (1)...(19): siRNA sense strand
ggcuuugcccugcgggaua

SEQ ID NO: 2316262 - RNA, 19 nt, Homo sapiens
  misc_RNA (1)...(19): siRNA sense strand
gcuucuagccaguggguug

SEQ ID NO: 2316263 - RNA, 19 nt, Homo sapiens
  misc_RNA (1)...(19): siRNA sense strand
aagacagaaaggauggcua

SEQ ID NO: 2316264 - RNA, 19 nt, Homo sapiens
  misc_RNA (1)...(19): siRNA sense strand
gugaaaacucugcuguuaa

SEQ ID NO: 2316265 - RNA, 19 nt, Homo sapiens
  misc_RNA (1)...(19): siRNA sense strand
agaaagaaggcauggcaag

SEQ ID NO: 2316266 - RNA, 19 nt, Homo sapiens
  misc_RNA (1)...(19): siRNA sense strand
uugaaucaguuuaugguca

SEQ ID NO: 2316267 - RNA, 19 nt, Homo sapiens
  misc_RNA (1)...(19): siRNA sense strand
gagcaugcuuggaaggaca

SEQ ID NO: 2316268 - RNA, 19 nt, Homo sapiens
  misc_RNA (1)...(19): siRNA sense strand
cgagaaacaacgagaggca

SEQ ID NO: 2316269 - RNA, 19 nt, Homo sapiens
  misc_RNA (1)...(19): siRNA sense strand
ccaaagacagagaaggaga

SEQ ID NO: 2316270 - RNA, 19 nt, Homo sapiens
  misc_RNA (1)...(19): siRNA sense strand
gcugaauaaaggagcaaaa

SEQ ID NO: 2316271 - RNA, 19 nt, Homo sapiens
  misc_RNA (1)...(19): siRNA sense strand
agaaacaacgagaggcaga

SEQ ID NO: 2316272 - RNA, 19 nt, Homo sapiens
  misc_RNA (1)...(19): siRNA sense strand
cuggaaagaagaauggcaa

SEQ ID NO: 2316273 - RNA, 19 nt, Homo sapiens
  misc_RNA (1)...(19): siRNA sense strand
gaacaaagaucaaagcuug

SEQ ID NO: 2316274 - RNA, 19 nt, Homo sapiens
  misc_RNA (1)...(19): siRNA sense strand
aggcagaccucaacgccaa

SEQ ID NO: 2316275 - RNA, 19 nt, Homo sapiens
  misc_RNA (1)...(19): siRNA sense strand
gggaagacgccgauggauc

SEQ ID NO: 2316276 - RNA, 19 nt, Homo sapiens
  misc_RNA (1)...(19): siRNA sense strand
uggaaggacauuuggcaau

SEQ ID NO: 2316277 - RNA, 19 nt, Homo sapiens
  misc_RNA (1)...(19): siRNA sense strand
agaacaaagaucaaagcuu

SEQ ID NO: 2316278 - RNA, 19 nt, Homo sapiens
  misc_RNA (1)...(19): siRNA sense strand
ggggagcaacaguggaaaa

SEQ ID NO: 2316279 - RNA, 19 nt, Homo sapiens
  misc_RNA (1)...(19): siRNA sense strand
uggaaagaagaauggcaau

SEQ ID NO: 2316280 - RNA, 19 nt, Homo sapiens
  misc_RNA (1)...(19): siRNA sense strand
cuuuagagaagcaggagga

SEQ ID NO: 2316281 - RNA, 19 nt, Homo sapiens
  misc_RNA (1)...(19): siRNA sense strand
guauaaacggacagcucuu

SEQ ID NO: 2316282 - RNA, 19 nt, Homo sapiens
  misc_RNA (1)...(19): siRNA sense strand
guggagaaguuaauggaag

SEQ ID NO: 2316283 - RNA, 19 nt, Homo sapiens
  misc_RNA (1)...(19): siRNA sense strand
gcuauaagaugauccgacu

SEQ ID NO: 2316284 - RNA, 19 nt, Homo sapiens
  misc_RNA (1)...(19): siRNA sense strand
gaguauaaacggacagcuc

SEQ ID NO: 2316285 - RNA, 19 nt, Homo sapiens
  misc_RNA (1)...(19): siRNA sense strand
caacaguggaaaagcgaga

SEQ ID NO: 2316286 - RNA, 19 nt, Homo sapiens
  misc_RNA (1)...(19): siRNA sense strand
cuggcagaauggaaccaaa

SEQ ID NO: 2316287 - RNA, 19 nt, Homo sapiens
  misc_RNA (1)...(19): siRNA sense strand
cuacacuggcagaauggaa

SEQ ID NO: 2316288 - RNA, 19 nt, Homo sapiens
  misc_RNA (1)...(19): siRNA sense strand
aacgagaggcagagcucaa

SEQ ID NO: 2316289 - RNA, 19 nt, Homo sapiens
  misc_RNA (1)...(19): siRNA sense strand
cgacagccucagagagaac

SEQ ID NO: 2316290 - RNA, 19 nt, Homo sapiens
  misc_RNA (1)...(19): siRNA sense strand
caauuguggagaaguuaau

SEQ ID NO: 2316291 - RNA, 19 nt, Homo sapiens
  misc_RNA (1)...(19): siRNA sense strand
aagcaauauucgacagccu

SEQ ID NO: 2316292 - RNA, 19 nt, Homo sapiens
  misc_RNA (1)...(19): siRNA sense strand
cugcagaaggagaaggaaa

SEQ ID NO: 2316293 - RNA, 19 nt, Homo sapiens
  misc_RNA (1)...(19): siRNA sense strand
cuucaaaacaacuggaaua

SEQ ID NO: 2316294 - RNA, 19 nt, Homo sapiens
  misc_RNA (1)...(19): siRNA sense strand
ggagaaggaaauagcaaaa

SEQ ID NO: 2316295 - RNA, 19 nt, Homo sapiens
  misc_RNA (1)...(19): siRNA sense strand
aggaaaaggagccggauua

SEQ ID NO: 2316296 - RNA, 19 nt, Homo sapiens
  misc_RNA (1)...(19): siRNA sense strand
aggagaaggaaauagcaaa

SEQ ID NO: 2316297 - RNA, 19 nt, Homo sapiens
  misc_RNA (1)...(19): siRNA sense strand
ggugaaucaggaaaggaua

SEQ ID NO: 2316298 - RNA, 19 nt, Homo sapiens
  misc_RNA (1)...(19): siRNA sense strand
aggaacaggaccuaauaaa

SEQ ID NO: 2316299 - RNA, 19 nt, Homo sapiens
  misc_RNA (1)...(19): siRNA sense strand
agcugaagccauagguuua

SEQ ID NO: 2316300 - RNA, 19 nt, Homo sapiens
  misc_RNA (1)...(19): siRNA sense strand
cgacaagcugcuagacaca

SEQ ID NO: 2316301 - RNA, 19 nt, Homo sapiens
  misc_RNA (1)...(19): siRNA sense strand
aggauauggaugaugacaa

SEQ ID NO: 2316302 - RNA, 19 nt, Homo sapiens
  misc_RNA (1)...(19): siRNA sense strand
uauuaaagaaaguggacca

SEQ ID NO: 2316303 - RNA, 19 nt, Homo sapiens
  misc_RNA (1)...(19): siRNA sense strand
gugaaucaggaaaggauau

SEQ ID NO: 2316304 - RNA, 19 nt, Homo sapiens
  misc_RNA (1)...(19): siRNA sense strand
ugcagaaggagaaggaaau

SEQ ID NO: 2316305 - RNA, 19 nt, Homo sapiens
  misc_RNA (1)...(19): siRNA sense strand
ccgucuuacaggagcuuaa

SEQ ID NO: 2316306 - RNA, 19 nt, Homo sapiens
  misc_RNA (1)...(19): siRNA sense strand
ggugagcagacaugggaau

SEQ ID NO: 2316307 - RNA, 19 nt, Homo sapiens
  misc_RNA (1)...(19): siRNA sense strand
uggcacuacucuaggcuau

SEQ ID NO: 2316308 - RNA, 19 nt, Homo sapiens
  misc_RNA (1)...(19): siRNA sense strand
uucccaaauuauagagcua

SEQ ID NO: 2316309 - RNA, 19 nt, Homo sapiens
  misc_RNA (1)...(19): siRNA sense strand
uagcaaggauucaaggcuu

SEQ ID NO: 2316310 - RNA, 19 nt, Homo sapiens
  misc_RNA (1)...(19): siRNA sense strand
cuuuguuacucgaguguca

SEQ ID NO: 2316311 - RNA, 19 nt, Homo sapiens
  misc_RNA (1)...(19): siRNA sense strand
uggaauauuuagcaaggau

SEQ ID NO: 2316312 - RNA, 19 nt, Homo sapiens
  misc_RNA (1)...(19): siRNA sense strand
aggaaagacucgacaagcu

SEQ ID NO: 2316313 - RNA, 19 nt, Homo sapiens
  misc_RNA (1)...(19): siRNA sense strand
aaggagaaggaaauagcaa

SEQ ID NO: 2316314 - RNA, 19 nt, Homo sapiens
  misc_RNA (1)...(19): siRNA sense strand
cagaauggugaaucaggaa

SEQ ID NO: 2316315 - RNA, 19 nt, Homo sapiens
  misc_RNA (1)...(19): siRNA sense strand
cagaauauggccaagggau

SEQ ID NO: 2316316 - RNA, 19 nt, Homo sapiens
  misc_RNA (1)...(19): siRNA sense strand
cgcaaauucaacaggccaa

SEQ ID NO: 2316317 - RNA, 19 nt, Homo sapiens
  misc_RNA (1)...(19): siRNA sense strand
ccaacaaauaauacuccaa

SEQ ID NO: 2316318 - RNA, 19 nt, Homo sapiens
  misc_RNA (1)...(19): siRNA sense strand
agcaaggauucaaggcuuu

SEQ ID NO: 2316319 - RNA, 19 nt, Homo sapiens
  misc_RNA (1)...(19): siRNA sense strand
agaauauggccaagggaug

SEQ ID NO: 2316320 - RNA, 19 nt, Homo sapiens
  misc_RNA (1)...(19): siRNA sense strand
gcucacuguaggaaauaau

SEQ ID NO: 2316321 - RNA, 19 nt, Homo sapiens
  misc_RNA (1)...(19): siRNA sense strand
gaaauugcucugaagcgaa

SEQ ID NO: 2316322 - RNA, 19 nt, Homo sapiens
  misc_RNA (1)...(19): siRNA sense strand
aguacaaccuucaaaacaa

SEQ ID NO: 2316323 - RNA, 19 nt, Homo sapiens
  misc_RNA (1)...(19): siRNA sense strand
ggugaagguaggcaaugaa

SEQ ID NO: 2316324 - RNA, 19 nt, Homo sapiens
  misc_RNA (1)...(19): siRNA sense strand
ccuuaugaauggaacaucu

SEQ ID NO: 2316325 - RNA, 19 nt, Homo sapiens
  misc_RNA (1)...(19): siRNA sense strand
ggaugaugacaaagaugca

SEQ ID NO: 2316326 - RNA, 19 nt, Homo sapiens
  misc_RNA (1)...(19): siRNA sense strand
gcuguuacaacuugguuau

SEQ ID NO: 2316327 - RNA, 19 nt, Homo sapiens
  misc_RNA (1)...(19): siRNA sense strand
gccauuagauccaaagcca

SEQ ID NO: 2316328 - RNA, 19 nt, Homo sapiens
  misc_RNA (1)...(19): siRNA sense strand
uggaaaagccaaaacuauu

SEQ ID NO: 2316329 - RNA, 19 nt, Homo sapiens
  misc_RNA (1)...(19): siRNA sense strand
gcaaauucaacaggccaaa

SEQ ID NO: 2316330 - RNA, 19 nt, Homo sapiens
  misc_RNA (1)...(19): siRNA sense strand
gcaggugaagguaggcaau

SEQ ID NO: 2316331 - RNA, 19 nt, Homo sapiens
  misc_RNA (1)...(19): siRNA sense strand
ugaaccuauuccagaaaga

SEQ ID NO: 2316332 - RNA, 19 nt, Homo sapiens
  misc_RNA (1)...(19): siRNA sense strand
agaauggugaaucaggaaa

SEQ ID NO: 2316333 - RNA, 19 nt, Homo sapiens
  misc_RNA (1)...(19): siRNA sense strand
aauuugugaugcaggugaa

SEQ ID NO: 2316334 - RNA, 19 nt, Homo sapiens
  misc_RNA (1)...(19): siRNA sense strand
uaacaauaacccaggcagu

SEQ ID NO: 2316335 - RNA, 19 nt, Homo sapiens
  misc_RNA (1)...(19): siRNA sense strand
gauccaaagccauucccaa

SEQ ID NO: 2316336 - RNA, 19 nt, Homo sapiens
  misc_RNA (1)...(19): siRNA sense strand
auccaaagccauucccaaa

SEQ ID NO: 2316337 - RNA, 19 nt, Homo sapiens
  misc_RNA (1)...(19): siRNA sense strand
augaugacaaagaugcaaa

SEQ ID NO: 2316338 - RNA, 19 nt, Homo sapiens
  misc_RNA (1)...(19): siRNA sense strand
guggaaaagccaaaacuau

SEQ ID NO: 2316339 - RNA, 19 nt, Homo sapiens
  misc_RNA (1)...(19): siRNA sense strand
caaaguaaucucuggcacu

SEQ ID NO: 2316340 - RNA, 19 nt, Homo sapiens
  misc_RNA (1)...(19): siRNA sense strand
acaucgaauaguucagcua

SEQ ID NO: 2316341 - RNA, 19 nt, Homo sapiens
  misc_RNA (1)...(19): siRNA sense strand
ggauuuugauucagagaaa

SEQ ID NO: 2316342 - RNA, 19 nt, Homo sapiens
  misc_RNA (1)...(19): siRNA sense strand
agaugauuauggaggaauu

SEQ ID NO: 2316343 - RNA, 19 nt, Homo sapiens
  misc_RNA (1)...(19): siRNA sense strand
ggccaaggaacgagaccaa

SEQ ID NO: 2316344 - RNA, 19 nt, Homo sapiens
  misc_RNA (1)...(19): siRNA sense strand
gagauguuguaguggccaa

SEQ ID NO: 2316345 - RNA, 19 nt, Homo sapiens
  misc_RNA (1)...(19): siRNA sense strand
gggaacauaaggaguguga

SEQ ID NO: 2316346 - RNA, 19 nt, Homo sapiens
  misc_RNA (1)...(19): siRNA sense strand
ggagaagaauuucacgaga

SEQ ID NO: 2316347 - RNA, 19 nt, Homo sapiens
  misc_RNA (1)...(19): siRNA sense strand
cagagaaagcuguugacau

SEQ ID NO: 2316348 - RNA, 19 nt, Homo sapiens
  misc_RNA (1)...(19): siRNA sense strand
ggacaaugugacacugauu

SEQ ID NO: 2316349 - RNA, 19 nt, Homo sapiens
  misc_RNA (1)...(19): siRNA sense strand
ggagaaugaauguagagau

SEQ ID NO: 2316350 - RNA, 19 nt, Homo sapiens
  misc_RNA (1)...(19): siRNA sense strand
gguggagagaggagacuau

SEQ ID NO: 2316351 - RNA, 19 nt, Homo sapiens
  misc_RNA (1)...(19): siRNA sense strand
gcaagaugauggagagcug

SEQ ID NO: 2316352 - RNA, 19 nt, Homo sapiens
  misc_RNA (1)...(19): siRNA sense strand
gugcaauuuuggagaugaa

SEQ ID NO: 2316353 - RNA, 19 nt, Homo sapiens
  misc_RNA (1)...(19): siRNA sense strand
aagaauuucacgagacuuu

SEQ ID NO: 2316354 - RNA, 19 nt, Homo sapiens
  misc_RNA (1)...(19): siRNA sense strand
gccagugaaaugagggauu

SEQ ID NO: 2316355 - RNA, 19 nt, Homo sapiens
  misc_RNA (1)...(19): siRNA sense strand
ucagaggcuuucaggagaa

SEQ ID NO: 2316356 - RNA, 19 nt, Homo sapiens
  misc_RNA (1)...(19): siRNA sense strand
gcagcugaaauuagccaaa

SEQ ID NO: 2316357 - RNA, 19 nt, Homo sapiens
  misc_RNA (1)...(19): siRNA sense strand
aagaaauuggacagcuuaa

SEQ ID NO: 2316358 - RNA, 19 nt, Homo sapiens
  misc_RNA (1)...(19): siRNA sense strand
agagugauuaugaggguuu

SEQ ID NO: 2316359 - RNA, 19 nt, Homo sapiens
  misc_RNA (1)...(19): siRNA sense strand
ugauauaagucuucgccca

SEQ ID NO: 2316360 - RNA, 19 nt, Homo sapiens
  misc_RNA (1)...(19): siRNA sense strand
gaaagagaauacugugcca

SEQ ID NO: 2316361 - RNA, 19 nt, Homo sapiens
  misc_RNA (1)...(19): siRNA sense strand
ccaaggaacgagaccaaga

SEQ ID NO: 2316362 - RNA, 19 nt, Homo sapiens
  misc_RNA (1)...(19): siRNA sense strand
ggaacaucacucagaaguu

SEQ ID NO: 2316363 - RNA, 19 nt, Homo sapiens
  misc_RNA (1)...(19): siRNA sense strand
aguugauccacaagcauaa

SEQ ID NO: 2316364 - RNA, 19 nt, Homo sapiens
  misc_RNA (1)...(19): siRNA sense strand
ugaagaugauuauggagga

SEQ ID NO: 2316365 - RNA, 19 nt, Homo sapiens
  misc_RNA (1)...(19): siRNA sense strand
ugacaucaucucaaagcaa

SEQ ID NO: 2316366 - RNA, 19 nt, Homo sapiens
  misc_RNA (1)...(19): siRNA sense strand
ggagagugauuaugagggu

SEQ ID NO: 2316367 - RNA, 19 nt, Homo sapiens
  misc_RNA (1)...(19): siRNA sense strand
uaguggaagaauuggaaga

SEQ ID NO: 2316368 - RNA, 19 nt, Homo sapiens
  misc_RNA (1)...(19): siRNA sense strand
aagaggaacccaagcugaa

SEQ ID NO: 2316369 - RNA, 19 nt, Homo sapiens
  misc_RNA (1)...(19): siRNA sense strand
aaacuuuguagaagagaca

SEQ ID NO: 2316370 - RNA, 19 nt, Homo sapiens
  misc_RNA (1)...(19): siRNA sense strand
gcugaaguaugaaaggcuu

SEQ ID NO: 2316371 - RNA, 19 nt, Homo sapiens
  misc_RNA (1)...(19): siRNA sense strand
agaagaauuucacgagacu

SEQ ID NO: 2316372 - RNA, 19 nt, Homo sapiens
  misc_RNA (1)...(19): siRNA sense strand
caguugauccacaagcaua

SEQ ID NO: 2316373 - RNA, 19 nt, Homo sapiens
  misc_RNA (1)...(19): siRNA sense strand
cuucugagccgaaugggua

SEQ ID NO: 2316374 - RNA, 19 nt, Homo sapiens
  misc_RNA (1)...(19): siRNA sense strand
ccgaauggguaauagccga

SEQ ID NO: 2316375 - RNA, 19 nt, Homo sapiens
  misc_RNA (1)...(19): siRNA sense strand
guuaaacaacauuggcaca

SEQ ID NO: 2316376 - RNA, 19 nt, Homo sapiens
  misc_RNA (1)...(19): siRNA sense strand
uugagagauuccuugguua

SEQ ID NO: 2316377 - RNA, 19 nt, Homo sapiens
  misc_RNA (1)...(19): siRNA sense strand
ucaagagagaccaccauaa

SEQ ID NO: 2316378 - RNA, 19 nt, Homo sapiens
  misc_RNA (1)...(19): siRNA sense strand
cgaauggguaauagccgaa

SEQ ID NO: 2316379 - RNA, 19 nt, Homo sapiens
  misc_RNA (1)...(19): siRNA sense strand
ccacauuucgugagaucca

SEQ ID NO: 2316380 - RNA, 19 nt, Homo sapiens
  misc_RNA (1)...(19): siRNA sense strand
acacauuauggcaagguuu

SEQ ID NO: 2316381 - RNA, 19 nt, Homo sapiens
  misc_RNA (1)...(19): siRNA sense strand
ggaaggacaaugugacacu

SEQ ID NO: 2316382 - RNA, 19 nt, Homo sapiens
  misc_RNA (1)...(19): siRNA sense strand
ggauuugccaagucgauau

SEQ ID NO: 2316383 - RNA, 19 nt, Homo sapiens
  misc_RNA (1)...(19): siRNA sense strand
uggauauuggcuuggcaua

SEQ ID NO: 2316384 - RNA, 19 nt, Homo sapiens
  misc_RNA (1)...(19): siRNA sense strand
augcagcacucugggaaua

SEQ ID NO: 2316385 - RNA, 19 nt, Homo sapiens
  misc_RNA (1)...(19): siRNA sense strand
uggaagaauuggaagacag

SEQ ID NO: 2316386 - RNA, 19 nt, Homo sapiens
  misc_RNA (1)...(19): siRNA sense strand
gagaagaauuucacgagac

SEQ ID NO: 2316387 - RNA, 19 nt, Homo sapiens
  misc_RNA (1)...(19): siRNA sense strand
ccuggagaucuguauaaua

SEQ ID NO: 2316388 - RNA, 19 nt, Homo sapiens
  misc_RNA (1)...(19): siRNA sense strand
guugauaaagcaaucgaau

SEQ ID NO: 2316389 - RNA, 19 nt, Homo sapiens
  misc_RNA (1)...(19): siRNA sense strand
ggaagggaacauaaggagu

SEQ ID NO: 2316390 - RNA, 19 nt, Homo sapiens
  misc_RNA (1)...(19): siRNA sense strand
auugauggcagcugaaauu

SEQ ID NO: 2316391 - RNA, 19 nt, Homo sapiens
  misc_RNA (1)...(19): siRNA sense strand
uuggacagcuuaaggcuau

SEQ ID NO: 2316392 - RNA, 19 nt, Homo sapiens
  misc_RNA (1)...(19): siRNA sense strand
auggagagcugugggaaga

SEQ ID NO: 2316393 - RNA, 19 nt, Homo sapiens
  misc_RNA (1)...(19): siRNA sense strand
uuugaacggucuuggauga

SEQ ID NO: 2316394 - RNA, 19 nt, Homo sapiens
  misc_RNA (1)...(19): siRNA sense strand
gggccaauaauaugggugu

SEQ ID NO: 2316395 - RNA, 19 nt, Homo sapiens
  misc_RNA (1)...(19): siRNA sense strand
ggauuuugauucagagaaa

SEQ ID NO: 2316396 - RNA, 19 nt, Homo sapiens
  misc_RNA (1)...(19): siRNA sense strand
agaugauuauggaggaauu

SEQ ID NO: 2316397 - RNA, 19 nt, Homo sapiens
  misc_RNA (1)...(19): siRNA sense strand
ggccaaggaacgagaccaa

SEQ ID NO: 2316398 - RNA, 19 nt, Homo sapiens
  misc_RNA (1)...(19): siRNA sense strand
gagauguuguaguggccaa

SEQ ID NO: 2316399 - RNA, 19 nt, Homo sapiens
  misc_RNA (1)...(19): siRNA sense strand
gggaacauaaggaguguga

SEQ ID NO: 2316400 - RNA, 19 nt, Homo sapiens
  misc_RNA (1)...(19): siRNA sense strand
ggagaagaauuucacgaga

SEQ ID NO: 2316401 - RNA, 19 nt, Homo sapiens
  misc_RNA (1)...(19): siRNA sense strand
cagagaaagcuguugacau

SEQ ID NO: 2316402 - RNA, 19 nt, Homo sapiens
  misc_RNA (1)...(19): siRNA sense strand
ggacaaugugacacugauu

SEQ ID NO: 2316403 - RNA, 19 nt, Homo sapiens
  misc_RNA (1)...(19): siRNA sense strand
ggagaaugaauguagagau

SEQ ID NO: 2316404 - RNA, 19 nt, Homo sapiens
  misc_RNA (1)...(19): siRNA sense strand
gguggagagaggagacuau

SEQ ID NO: 2316405 - RNA, 19 nt, Homo sapiens
  misc_RNA (1)...(19): siRNA sense strand
gcaagaugauggagagcug

SEQ ID NO: 2316406 - RNA, 19 nt, Homo sapiens
  misc_RNA (1)...(19): siRNA sense strand
gugcaauuuuggagaugaa

SEQ ID NO: 2316407 - RNA, 19 nt, Homo sapiens
  misc_RNA (1)...(19): siRNA sense strand
aagaauuucacgagacuuu

SEQ ID NO: 2316408 - RNA, 19 nt, Homo sapiens
  misc_RNA (1)...(19): siRNA sense strand
gccagugaaaugagggauu

SEQ ID NO: 2316409 - RNA, 19 nt, Homo sapiens
  misc_RNA (1)...(19): siRNA sense strand
ucagaggcuuucaggagaa

SEQ ID NO: 2316410 - RNA, 19 nt, Homo sapiens
  misc_RNA (1)...(19): siRNA sense strand
gcagcugaaauuagccaaa

SEQ ID NO: 2316411 - RNA, 19 nt, Homo sapiens
  misc_RNA (1)...(19): siRNA sense strand
aagaaauuggacagcuuaa

SEQ ID NO: 2316412 - RNA, 19 nt, Homo sapiens
  misc_RNA (1)...(19): siRNA sense strand
agagugauuaugaggguuu

SEQ ID NO: 2316413 - RNA, 19 nt, Homo sapiens
  misc_RNA (1)...(19): siRNA sense strand
ugauauaagucuucgccca

SEQ ID NO: 2316414 - RNA, 19 nt, Homo sapiens
  misc_RNA (1)...(19): siRNA sense strand
gaaagagaauacugugcca

SEQ ID NO: 2316415 - RNA, 19 nt, Homo sapiens
  misc_RNA (1)...(19): siRNA sense strand
ccaaggaacgagaccaaga

SEQ ID NO: 2316416 - RNA, 19 nt, Homo sapiens
  misc_RNA (1)...(19): siRNA sense strand
aguugauccacaagcauaa

SEQ ID NO: 2316417 - RNA, 19 nt, Homo sapiens
  misc_RNA (1)...(19): siRNA sense strand
ugaagaugauuauggagga

SEQ ID NO: 2316418 - RNA, 19 nt, Homo sapiens
  misc_RNA (1)...(19): siRNA sense strand
ggaacaucacucagaaguu

SEQ ID NO: 2316419 - RNA, 19 nt, Homo sapiens
  misc_RNA (1)...(19): siRNA sense strand
ugacaucaucucaaagcaa

SEQ ID NO: 2316420 - RNA, 19 nt, Homo sapiens
  misc_RNA (1)...(19): siRNA sense strand
ggagagugauuaugagggu

SEQ ID NO: 2316421 - RNA, 19 nt, Homo sapiens
  misc_RNA (1)...(19): siRNA sense strand
uaguggaagaauuggaaga

SEQ ID NO: 2316422 - RNA, 19 nt, Homo sapiens
  misc_RNA (1)...(19): siRNA sense strand
aaacuuuguagaagagaca

SEQ ID NO: 2316423 - RNA, 19 nt, Homo sapiens
  misc_RNA (1)...(19): siRNA sense strand
agaagaauuucacgagacu

SEQ ID NO: 2316424 - RNA, 19 nt, Homo sapiens
  misc_RNA (1)...(19): siRNA sense strand
caguugauccacaagcaua

SEQ ID NO: 2316425 - RNA, 19 nt, Homo sapiens
  misc_RNA (1)...(19): siRNA sense strand
cuucugagccgaaugggua

SEQ ID NO: 2316426 - RNA, 19 nt, Homo sapiens
  misc_RNA (1)...(19): siRNA sense strand
ccgaauggguaauagccga

SEQ ID NO: 2316427 - RNA, 19 nt, Homo sapiens
  misc_RNA (1)...(19): siRNA sense strand
guuaaacaacauuggcaca

SEQ ID NO: 2316428 - RNA, 19 nt, Homo sapiens
  misc_RNA (1)...(19): siRNA sense strand
uugagagauuccuugguua

SEQ ID NO: 2316429 - RNA, 19 nt, Homo sapiens
  misc_RNA (1)...(19): siRNA sense strand
ucaagagagaccaccauaa

SEQ ID NO: 2316430 - RNA, 19 nt, Homo sapiens
  misc_RNA (1)...(19): siRNA sense strand
cgaauggguaauagccgaa

SEQ ID NO: 2316431 - RNA, 19 nt, Homo sapiens
  misc_RNA (1)...(19): siRNA sense strand
ccacauuucgugagaucca

SEQ ID NO: 2316432 - RNA, 19 nt, Homo sapiens
  misc_RNA (1)...(19): siRNA sense strand
ggaaggacaaugugacacu

SEQ ID NO: 2316433 - RNA, 19 nt, Homo sapiens
  misc_RNA (1)...(19): siRNA sense strand
ggauuugccaagucgauau

SEQ ID NO: 2316434 - RNA, 19 nt, Homo sapiens
  misc_RNA (1)...(19): siRNA sense strand
acacauuauggcaagguuu

SEQ ID NO: 2316435 - RNA, 19 nt, Homo sapiens
  misc_RNA (1)...(19): siRNA sense strand
uggauauuggcuuggcaua

SEQ ID NO: 2316436 - RNA, 19 nt, Homo sapiens
  misc_RNA (1)...(19): siRNA sense strand
augcagcacucugggaaua

SEQ ID NO: 2316437 - RNA, 19 nt, Homo sapiens
  misc_RNA (1)...(19): siRNA sense strand
uggaagaauuggaagacag

SEQ ID NO: 2316438 - RNA, 19 nt, Homo sapiens
  misc_RNA (1)...(19): siRNA sense strand
gagaagaauuucacgagac

SEQ ID NO: 2316439 - RNA, 19 nt, Homo sapiens
  misc_RNA (1)...(19): siRNA sense strand
ccuggagaucuguauaaua

SEQ ID NO: 2316440 - RNA, 19 nt, Homo sapiens
  misc_RNA (1)...(19): siRNA sense strand
guugauaaagcaaucgaau

SEQ ID NO: 2316441 - RNA, 19 nt, Homo sapiens
  misc_RNA (1)...(19): siRNA sense strand
ggaagggaacauaaggagu

SEQ ID NO: 2316442 - RNA, 19 nt, Homo sapiens
  misc_RNA (1)...(19): siRNA sense strand
auugauggcagcugaaauu

SEQ ID NO: 2316443 - RNA, 19 nt, Homo sapiens
  misc_RNA (1)...(19): siRNA sense strand
uuggacagcuuaaggcuau

SEQ ID NO: 2316444 - RNA, 19 nt, Homo sapiens
  misc_RNA (1)...(19): siRNA sense strand
auggagagcugugggaaga

SEQ ID NO: 2316445 - RNA, 19 nt, Homo sapiens
  misc_RNA (1)...(19): siRNA sense strand
uuugaacggucuuggauga

SEQ ID NO: 2316446 - RNA, 19 nt, Homo sapiens
  misc_RNA (1)...(19): siRNA sense strand
gggccaauaauaugggugu

SEQ ID NO: 2316447 - RNA, 19 nt, Homo sapiens
  misc_RNA (1)...(19): siRNA sense strand
ccgagaauggccuggagau

SEQ ID NO: 2316448 - RNA, 19 nt, Homo sapiens
  misc_RNA (1)...(19): siRNA sense strand
aaaagguaguggaagaauu

SEQ ID NO: 2316449 - RNA, 19 nt, Homo sapiens
  misc_RNA (1)...(19): siRNA sense strand
gguuggaacaauacggcaa

SEQ ID NO: 2316450 - RNA, 19 nt, Homo sapiens
  misc_RNA (1)...(19): siRNA sense strand
gggucugauuggagcugua

SEQ ID NO: 2316451 - RNA, 19 nt, Homo sapiens
  misc_RNA (1)...(19): siRNA sense strand
uuacagagauccugggugu

SEQ ID NO: 2316452 - RNA, 19 nt, Homo sapiens
  misc_RNA (1)...(19): siRNA sense strand
cugcuuuacaccuugguua

SEQ ID NO: 2316453 - RNA, 19 nt, Homo sapiens
  misc_RNA (1)...(19): siRNA sense strand
gagagauccaagaggagga

SEQ ID NO: 2316454 - RNA, 19 nt, Homo sapiens
  misc_RNA (1)...(19): siRNA sense strand
ugacaaaugagcaacgcau

SEQ ID NO: 2316455 - RNA, 19 nt, Homo sapiens
  misc_RNA (1)...(19): siRNA sense strand
cggcaugugaucagcuaca

SEQ ID NO: 2316456 - RNA, 19 nt, Homo sapiens
  misc_RNA (1)...(19): siRNA sense strand
cuucauguucauuggguuu

SEQ ID NO: 2316457 - RNA, 19 nt, Homo sapiens
  misc_RNA (1)...(19): siRNA sense strand
uagaauaugugaugcccau

SEQ ID NO: 2316458 - RNA, 19 nt, Homo sapiens
  misc_RNA (1)...(19): siRNA sense strand
cuucauguucauuggguuu

SEQ ID NO: 2316459 - RNA, 19 nt, Homo sapiens
  misc_RNA (1)...(19): siRNA sense strand
uagaauaugugaugcccau

SEQ ID NO: 2316460 - RNA, 19 nt, Homo sapiens
  misc_RNA (1)...(19): siRNA sense strand
gaguugagguuuaagacca

SEQ ID NO: 2316461 - RNA, 19 nt, Homo sapiens
  misc_RNA (1)...(19): siRNA sense strand
aguugagguuuaagaccaa

SEQ ID NO: 2316462 - RNA, 19 nt, Homo sapiens
  misc_RNA (1)...(19): siRNA sense strand
uuuaagaccaaacgggaau

SEQ ID NO: 2316463 - RNA, 19 nt, Homo sapiens
  misc_RNA (1)...(19): siRNA sense strand
cgcucgagguccagcucaa

SEQ ID NO: 2316464 - RNA, 19 nt, Homo sapiens
  misc_RNA (1)...(19): siRNA sense strand
acaggugacccgagugaca

SEQ ID NO: 2316465 - RNA, 19 nt, Homo sapiens
  misc_RNA (1)...(19): siRNA sense strand
aggcagaaccccagcaaua

SEQ ID NO: 2316466 - RNA, 19 nt, Homo sapiens
  misc_RNA (1)...(19): siRNA sense strand
aggaggaugaugaggauga

SEQ ID NO: 2316467 - RNA, 19 nt, Homo sapiens
  misc_RNA (1)...(19): siRNA sense strand
cgguugaagcugugggacu

SEQ ID NO: 2316468 - RNA, 19 nt, Homo sapiens
  misc_RNA (1)...(19): siRNA sense strand
gugauauucuggaggagga

SEQ ID NO: 2316469 - RNA, 19 nt, Homo sapiens
  misc_RNA (1)...(19): siRNA sense strand
ggaugaugaggaugauaau

SEQ ID NO: 2316470 - RNA, 19 nt, Homo sapiens
  misc_RNA (1)...(19): siRNA sense strand
agauguggacugugucaaa

SEQ ID NO: 2316471 - RNA, 19 nt, Homo sapiens
  misc_RNA (1)...(19): siRNA sense strand
cuccaaagugacaacaaua

SEQ ID NO: 2316472 - RNA, 19 nt, Homo sapiens
  misc_RNA (1)...(19): siRNA sense strand
cugcagaaugcuagccaga

SEQ ID NO: 2316473 - RNA, 19 nt, Homo sapiens
  misc_RNA (1)...(19): siRNA sense strand
aagacauguccaucagaua

SEQ ID NO: 2316474 - RNA, 19 nt, Homo sapiens
  misc_RNA (1)...(19): siRNA sense strand
acaccgggcagaugagcaa

SEQ ID NO: 2316475 - RNA, 19 nt, Homo sapiens
  misc_RNA (1)...(19): siRNA sense strand
ggaccaguguacagcacga

SEQ ID NO: 2316476 - RNA, 19 nt, Homo sapiens
  misc_RNA (1)...(19): siRNA sense strand
acaacuaccuuauccgcua

SEQ ID NO: 2316477 - RNA, 19 nt, Homo sapiens
  misc_RNA (1)...(19): siRNA sense strand
ggccaaucuaacagugcaa

SEQ ID NO: 2316478 - RNA, 19 nt, Homo sapiens
  misc_RNA (1)...(19): siRNA sense strand
gggaacucggugaggcuuu

SEQ ID NO: 2316479 - RNA, 19 nt, Homo sapiens
  misc_RNA (1)...(19): siRNA sense strand
aggucuuacaggagagcau

SEQ ID NO: 2316480 - RNA, 19 nt, Homo sapiens
  misc_RNA (1)...(19): siRNA sense strand
augcaggcacggagaugaa

SEQ ID NO: 2316481 - RNA, 19 nt, Homo sapiens
  misc_RNA (1)...(19): siRNA sense strand
gaggauauaugcaggacac

SEQ ID NO: 2316482 - RNA, 19 nt, Homo sapiens
  misc_RNA (1)...(19): siRNA sense strand
acucaaaccauccaggaca

SEQ ID NO: 2316483 - RNA, 19 nt, Homo sapiens
  misc_RNA (1)...(19): siRNA sense strand
cgaagagcacaguggaaag

SEQ ID NO: 2316484 - RNA, 19 nt, Homo sapiens
  misc_RNA (1)...(19): siRNA sense strand
gauaaugcaggcacggaga

SEQ ID NO: 2316485 - RNA, 19 nt, Homo sapiens
  misc_RNA (1)...(19): siRNA sense strand
agguaaagguguugcugga

SEQ ID NO: 2316486 - RNA, 19 nt, Homo sapiens
  misc_RNA (1)...(19): siRNA sense strand
guguagaaagaaaguggaa

SEQ ID NO: 2316487 - RNA, 19 nt, Homo sapiens
  misc_RNA (1)...(19): siRNA sense strand
aucuaaaugggaagaguua

SEQ ID NO: 2316488 - RNA, 19 nt, Homo sapiens
  misc_RNA (1)...(19): siRNA sense strand
agaaagaucuagaagaggu

SEQ ID NO: 2316489 - RNA, 19 nt, Homo sapiens
  misc_RNA (1)...(19): siRNA sense strand
caguaauuauggaugggau

SEQ ID NO: 2316490 - RNA, 19 nt, Homo sapiens
  misc_RNA (1)...(19): siRNA sense strand
caagagagaagcaagccaa

SEQ ID NO: 2316491 - RNA, 19 nt, Homo sapiens
  misc_RNA (1)...(19): siRNA sense strand
aagaucuagaagagguaaa

SEQ ID NO: 2316492 - RNA, 19 nt, Homo sapiens
  misc_RNA (1)...(19): siRNA sense strand
aacagaaaucacagaagaa

SEQ ID NO: 2316493 - RNA, 19 nt, Homo sapiens
  misc_RNA (1)...(19): siRNA sense strand
guaaagaaucuaaauggga

SEQ ID NO: 2316494 - RNA, 19 nt, Homo sapiens
  misc_RNA (1)...(19): siRNA sense strand
gguggaaucaagagagaag

SEQ ID NO: 2316495 - RNA, 19 nt, Homo sapiens
  misc_RNA (1)...(19): siRNA sense strand
uccaagauugagacagaaa

SEQ ID NO: 2316496 - RNA, 19 nt, Homo sapiens
  misc_RNA (1)...(19): siRNA sense strand
acaacgggcuauacgguga

SEQ ID NO: 2316497 - RNA, 19 nt, Homo sapiens
  misc_RNA (1)...(19): siRNA sense strand
cuaaaugggaagaguuacu

SEQ ID NO: 2316498 - RNA, 19 nt, Homo sapiens
  misc_RNA (1)...(19): siRNA sense strand
ucaaguucccacugagaau

SEQ ID NO: 2316499 - RNA, 19 nt, Homo sapiens
  misc_RNA (1)...(19): siRNA sense strand
agaagcaagccaaaggaga

SEQ ID NO: 2316500 - RNA, 19 nt, Homo sapiens
  misc_RNA (1)...(19): siRNA sense strand
aagagagaagcaagccaaa

SEQ ID NO: 2316501 - RNA, 19 nt, Homo sapiens
  misc_RNA (1)...(19): siRNA sense strand
gccaaaggagacacggaau

SEQ ID NO: 2316502 - RNA, 19 nt, Homo sapiens
  misc_RNA (1)...(19): siRNA sense strand
uguagaaagaaaguggaaa

SEQ ID NO: 2316503 - RNA, 19 nt, Homo sapiens
  misc_RNA (1)...(19): siRNA sense strand
uggaaaaggcuacuaggaa

SEQ ID NO: 2316504 - RNA, 19 nt, Homo sapiens
  misc_RNA (1)...(19): siRNA sense strand
gucagauaaguuugugaaa

SEQ ID NO: 2316505 - RNA, 19 nt, Homo sapiens
  misc_RNA (1)...(19): siRNA sense strand
cagaaaucacagaagaaag

SEQ ID NO: 2316506 - RNA, 19 nt, Homo sapiens
  misc_RNA (1)...(19): siRNA sense strand
augaagauggagacgauga

SEQ ID NO: 2316507 - RNA, 19 nt, Homo sapiens
  misc_RNA (1)...(19): siRNA sense strand
ggaauaaauuagaugguca

SEQ ID NO: 2316508 - RNA, 19 nt, Homo sapiens
  misc_RNA (1)...(19): siRNA sense strand
gggugagggaugacggaaa

SEQ ID NO: 2316509 - RNA, 19 nt, Homo sapiens
  misc_RNA (1)...(19): siRNA sense strand
auuggauagucgagagaaa

SEQ ID NO: 2316510 - RNA, 19 nt, Homo sapiens
  misc_RNA (1)...(19): siRNA sense strand
gaugaagauaauagagcaa

SEQ ID NO: 2316511 - RNA, 19 nt, Homo sapiens
  misc_RNA (1)...(19): siRNA sense strand
cagaauaacaagucgguga

SEQ ID NO: 2316512 - RNA, 19 nt, Homo sapiens
  misc_RNA (1)...(19): siRNA sense strand
cuacaucacaacagagcua

SEQ ID NO: 2316513 - RNA, 19 nt, Homo sapiens
  misc_RNA (1)...(19): siRNA sense strand
aagaauugguagaaggugu

SEQ ID NO: 2316514 - RNA, 19 nt, Homo sapiens
  misc_RNA (1)...(19): siRNA sense strand
cagacuggaccaacagaaa

SEQ ID NO: 2316515 - RNA, 19 nt, Homo sapiens
  misc_RNA (1)...(19): siRNA sense strand
guuggaaggaucugaguau

SEQ ID NO: 2316516 - RNA, 19 nt, Homo sapiens
  misc_RNA (1)...(19): siRNA sense strand
cuuaaugaggucugcuaaa

SEQ ID NO: 2316517 - RNA, 19 nt, Homo sapiens
  misc_RNA (1)...(19): siRNA sense strand
ggaagaguauacaagguca

SEQ ID NO: 2316518 - RNA, 19 nt, Homo sapiens
  misc_RNA (1)...(19): siRNA sense strand
agacagaggcacaguacca

SEQ ID NO: 2316519 - RNA, 19 nt, Homo sapiens
  misc_RNA (1)...(19): siRNA sense strand
aacuaaagaagcagcuaaa

SEQ ID NO: 2316520 - RNA, 19 nt, Homo sapiens
  misc_RNA (1)...(19): siRNA sense strand
ccgaacaguuggaaggauc

SEQ ID NO: 2316521 - RNA, 19 nt, Homo sapiens
  misc_RNA (1)...(19): siRNA sense strand
uggaaggaucugaguauga

SEQ ID NO: 2316522 - RNA, 19 nt, Homo sapiens
  misc_RNA (1)...(19): siRNA sense strand
caugaagguccuacgggaa

SEQ ID NO: 2316523 - RNA, 19 nt, Homo sapiens
  misc_RNA (1)...(19): siRNA sense strand
cccuacagaugaagauaau

SEQ ID NO: 2316524 - RNA, 19 nt, Homo sapiens
  misc_RNA (1)...(19): siRNA sense strand
gcaugaagguccuacggga

SEQ ID NO: 2316525 - RNA, 19 nt, Homo sapiens
  misc_RNA (1)...(19): siRNA sense strand
ggaccaacagaaacgggaa

SEQ ID NO: 2316526 - RNA, 19 nt, Homo sapiens
  misc_RNA (1)...(19): siRNA sense strand
ggagaaucugacacugaaa

SEQ ID NO: 2316527 - RNA, 19 nt, Homo sapiens
  misc_RNA (1)...(19): siRNA sense strand
gcacuuaacgagaaggaac

SEQ ID NO: 2316528 - RNA, 19 nt, Homo sapiens
  misc_RNA (1)...(19): siRNA sense strand
gaucugaguaugaugccaa

SEQ ID NO: 2316529 - RNA, 19 nt, Homo sapiens
  misc_RNA (1)...(19): siRNA sense strand
agaaggaacucaucgcaga

SEQ ID NO: 2316530 - RNA, 19 nt, Homo sapiens
  misc_RNA (1)...(19): siRNA sense strand
acauacauaacaugggaau

SEQ ID NO: 2316531 - RNA, 19 nt, Homo sapiens
  misc_RNA (1)...(19): siRNA sense strand
agaauaacaagucggugaa

SEQ ID NO: 2316532 - RNA, 19 nt, Homo sapiens
  misc_RNA (1)...(19): siRNA sense strand
ggauuggauagucgagaga

SEQ ID NO: 2316533 - RNA, 19 nt, Homo sapiens
  misc_RNA (1)...(19): siRNA sense strand
cuacagaagaacacagacu

SEQ ID NO: 2316534 - RNA, 19 nt, Homo sapiens
  misc_RNA (1)...(19): siRNA sense strand
aggaaaagguggauacgga

SEQ ID NO: 2316535 - RNA, 19 nt, Homo sapiens
  misc_RNA (1)...(19): siRNA sense strand
cauugagacuacaucacaa

SEQ ID NO: 2316536 - RNA, 19 nt, Homo sapiens
  misc_RNA (1)...(19): siRNA sense strand
cuaaagagagaguucguca

SEQ ID NO: 2316537 - RNA, 19 nt, Homo sapiens
  misc_RNA (1)...(19): siRNA sense strand
gugaaguacaccaccaauu

SEQ ID NO: 2316538 - RNA, 19 nt, Homo sapiens
  misc_RNA (1)...(19): siRNA sense strand
uggauagucgagagaaaca

SEQ ID NO: 2316539 - RNA, 19 nt, Homo sapiens
  misc_RNA (1)...(19): siRNA sense strand
acagaaacgggaagagaac

SEQ ID NO: 2316540 - RNA, 19 nt, Homo sapiens
  misc_RNA (1)...(19): siRNA sense strand
agaugaagauaauagagca

SEQ ID NO: 2316541 - RNA, 19 nt, Homo sapiens
  misc_RNA (1)...(19): siRNA sense strand
ugaugaaaguagcagcuca

SEQ ID NO: 2316542 - RNA, 19 nt, Homo sapiens
  misc_RNA (1)...(19): siRNA sense strand
ugguagaagguguguuuua

SEQ ID NO: 2316543 - RNA, 19 nt, Homo sapiens
  misc_RNA (1)...(19): siRNA sense strand
acacauacguccagagugg

SEQ ID NO: 2316544 - RNA, 19 nt, Homo sapiens
  misc_RNA (1)...(19): siRNA sense strand
guccuuauguuauggccaa

SEQ ID NO: 2316545 - RNA, 19 nt, Homo sapiens
  misc_RNA (1)...(19): siRNA sense strand
gaaaaucagaucaagggaa

SEQ ID NO: 2316546 - RNA, 19 nt, Homo sapiens
  misc_RNA (1)...(19): siRNA sense strand
auacaaggucaggaauaaa

SEQ ID NO: 2316547 - RNA, 19 nt, Homo sapiens
  misc_RNA (1)...(19): siRNA sense strand
gagcucucgcugugggauu

SEQ ID NO: 2316548 - RNA, 19 nt, Homo sapiens
  misc_RNA (1)...(19): siRNA sense strand
uaaaagguguccagugcaa

SEQ ID NO: 2316549 - RNA, 19 nt, Homo sapiens
  misc_RNA (1)...(19): siRNA sense strand
aaucagaucaagggaagua

SEQ ID NO: 2316550 - RNA, 19 nt, Homo sapiens
  misc_RNA (1)...(19): siRNA sense strand
gggaaguagccuuggaagc

SEQ ID NO: 2316551 - RNA, 19 nt, Homo sapiens
  misc_RNA (1)...(19): siRNA sense strand
agguggauacggaagagua

SEQ ID NO: 2316552 - RNA, 19 nt, Homo sapiens
  misc_RNA (1)...(19): siRNA sense strand
aacagaaacgggaagagaa

SEQ ID NO: 2316553 - RNA, 19 nt, Homo sapiens
  misc_RNA (1)...(19): siRNA sense strand
ggaaaagguggauacggaa

SEQ ID NO: 2316554 - RNA, 19 nt, Homo sapiens
  misc_RNA (1)...(19): siRNA sense strand
cagugcaagccaaguauau

SEQ ID NO: 2316555 - RNA, 19 nt, Homo sapiens
  misc_RNA (1)...(19): siRNA sense strand
gcacaaagugggagcccga

SEQ ID NO: 2316556 - RNA, 19 nt, Homo sapiens
  misc_RNA (1)...(19): siRNA sense strand
uggaugaagcagagaggca

SEQ ID NO: 2316557 - RNA, 19 nt, Homo sapiens
  misc_RNA (1)...(19): siRNA sense strand
acaaagugggagcccgaua

SEQ ID NO: 2316558 - RNA, 19 nt, Homo sapiens
  misc_RNA (1)...(19): siRNA sense strand
auaccuacauucaaggaga

SEQ ID NO: 2316559 - RNA, 19 nt, Homo sapiens
  misc_RNA (1)...(19): siRNA sense strand
ggagaggggaccaugcaaa

SEQ ID NO: 2316560 - RNA, 19 nt, Homo sapiens
  misc_RNA (1)...(19): siRNA sense strand
gcacaaagugggagcccga

SEQ ID NO: 2316561 - RNA, 19 nt, Homo sapiens
  misc_RNA (1)...(19): siRNA sense strand
uggaugaagcagagaggca

SEQ ID NO: 2316562 - RNA, 19 nt, Homo sapiens
  misc_RNA (1)...(19): siRNA sense strand
acaaagugggagcccgaua

SEQ ID NO: 2316563 - RNA, 19 nt, Homo sapiens
  misc_RNA (1)...(19): siRNA sense strand
auaccuacauucaaggaga

SEQ ID NO: 2316564 - RNA, 19 nt, Homo sapiens
  misc_RNA (1)...(19): siRNA sense strand
ggagaggggaccaugcaaa

SEQ ID NO: 2316565 - RNA, 19 nt, Homo sapiens
  misc_RNA (1)...(19): siRNA sense strand
gcacaaagugggagcccga

SEQ ID NO: 2316566 - RNA, 19 nt, Homo sapiens
  misc_RNA (1)...(19): siRNA sense strand
uggaugaagcagagaggca

SEQ ID NO: 2316567 - RNA, 19 nt, Homo sapiens
  misc_RNA (1)...(19): siRNA sense strand
acaaagugggagcccgaua

SEQ ID NO: 2316568 - RNA, 19 nt, Homo sapiens
  misc_RNA (1)...(19): siRNA sense strand
auaccuacauucaaggaga

SEQ ID NO: 2316569 - RNA, 19 nt, Homo sapiens
  misc_RNA (1)...(19): siRNA sense strand
ggagaggggaccaugcaaa

SEQ ID NO: 2316570 - RNA, 19 nt, Homo sapiens
  misc_RNA (1)...(19): siRNA sense strand
ggaaggagcuguuucgcaa

SEQ ID NO: 2316571 - RNA, 19 nt, Homo sapiens
  misc_RNA (1)...(19): siRNA sense strand
agacaaagagggaagaaca

SEQ ID NO: 2316572 - RNA, 19 nt, Homo sapiens
  misc_RNA (1)...(19): siRNA sense strand
ggaagaaaacaaacgaaaa

SEQ ID NO: 2316573 - RNA, 19 nt, Homo sapiens
  misc_RNA (1)...(19): siRNA sense strand
ugaaacagccagagaacau

SEQ ID NO: 2316574 - RNA, 19 nt, Homo sapiens
  misc_RNA (1)...(19): siRNA sense strand
uggcaaaggcagugaugau

SEQ ID NO: 2316575 - RNA, 19 nt, Homo sapiens
  misc_RNA (1)...(19): siRNA sense strand
agaacuaugcugagcuuaa

SEQ ID NO: 2316576 - RNA, 19 nt, Homo sapiens
  misc_RNA (1)...(19): siRNA sense strand
guuuauggcaccaggagaa

SEQ ID NO: 2316577 - RNA, 19 nt, Homo sapiens
  misc_RNA (1)...(19): siRNA sense strand
aggcaagagucuacagcau

SEQ ID NO: 2316578 - RNA, 19 nt, Homo sapiens
  misc_RNA (1)...(19): siRNA sense strand
agcaugaacaguugagaaa

SEQ ID NO: 2316579 - RNA, 19 nt, Homo sapiens
  misc_RNA (1)...(19): siRNA sense strand
caggagcagaugugaauaa

SEQ ID NO: 2316580 - RNA, 19 nt, Homo sapiens
  misc_RNA (1)...(19): siRNA sense strand
ccauuaaauuacugcuaga

SEQ ID NO: 2316581 - RNA, 19 nt, Homo sapiens
  misc_RNA (1)...(19): siRNA sense strand
gagaacaguggaagaucaa

SEQ ID NO: 2316582 - RNA, 19 nt, Homo sapiens
  misc_RNA (1)...(19): siRNA sense strand
cuacaauaacccugagcau

SEQ ID NO: 2316583 - RNA, 19 nt, Homo sapiens
  misc_RNA (1)...(19): siRNA sense strand
cccuaacauucaagacaaa

SEQ ID NO: 2316584 - RNA, 19 nt, Homo sapiens
  misc_RNA (1)...(19): siRNA sense strand
ggguagaucuaguugacca

SEQ ID NO: 2316585 - RNA, 19 nt, Homo sapiens
  misc_RNA (1)...(19): siRNA sense strand
gagcaaacuggaugcaaaa

SEQ ID NO: 2316586 - RNA, 19 nt, Homo sapiens
  misc_RNA (1)...(19): siRNA sense strand
uuaacauggcugacaaaua

SEQ ID NO: 2316587 - RNA, 19 nt, Homo sapiens
  misc_RNA (1)...(19): siRNA sense strand
ccuugaugccauuaaauua

SEQ ID NO: 2316588 - RNA, 19 nt, Homo sapiens
  misc_RNA (1)...(19): siRNA sense strand
ccucagauuugcagggaac

SEQ ID NO: 2316589 - RNA, 19 nt, Homo sapiens
  misc_RNA (1)...(19): siRNA sense strand
ccaagagacagcagaggau

SEQ ID NO: 2316590 - RNA, 19 nt, Homo sapiens
  misc_RNA (1)...(19): siRNA sense strand
gcguguuggcugacagauu

SEQ ID NO: 2316591 - RNA, 19 nt, Homo sapiens
  misc_RNA (1)...(19): siRNA sense strand
uggcaguucucauggaaaa

SEQ ID NO: 2316592 - RNA, 19 nt, Homo sapiens
  misc_RNA (1)...(19): siRNA sense strand
caaugaaggcagugaugga

SEQ ID NO: 2316593 - RNA, 19 nt, Homo sapiens
  misc_RNA (1)...(19): siRNA sense strand
cauuaaagguggagcaagg

SEQ ID NO: 2316594 - RNA, 19 nt, Homo sapiens
  misc_RNA (1)...(19): siRNA sense strand
aggaagaaaacaaacgaaa

SEQ ID NO: 2316595 - RNA, 19 nt, Homo sapiens
  misc_RNA (1)...(19): siRNA sense strand
ccuugagaacaguggaaga

SEQ ID NO: 2316596 - RNA, 19 nt, Homo sapiens
  misc_RNA (1)...(19): siRNA sense strand
cagaaggccaaaugaaaca

SEQ ID NO: 2316597 - RNA, 19 nt, Homo sapiens
  misc_RNA (1)...(19): siRNA sense strand
cagauaauucagagagaac

SEQ ID NO: 2316598 - RNA, 19 nt, Homo sapiens
  misc_RNA (1)...(19): siRNA sense strand
aaguggauacacaggauaa

SEQ ID NO: 2316599 - RNA, 19 nt, Homo sapiens
  misc_RNA (1)...(19): siRNA sense strand
ggaggaaggaacuggaacu

SEQ ID NO: 2316600 - RNA, 19 nt, Homo sapiens
  misc_RNA (1)...(19): siRNA sense strand
gggaagaacagcuuugcau

SEQ ID NO: 2316601 - RNA, 19 nt, Homo sapiens
  misc_RNA (1)...(19): siRNA sense strand
gauaauucagagagaacga

SEQ ID NO: 2316602 - RNA, 19 nt, Homo sapiens
  misc_RNA (1)...(19): siRNA sense strand
guggaagaucaaagaacuu

SEQ ID NO: 2316603 - RNA, 19 nt, Homo sapiens
  misc_RNA (1)...(19): siRNA sense strand
uuacuuacacgcagagcaa

SEQ ID NO: 2316604 - RNA, 19 nt, Homo sapiens
  misc_RNA (1)...(19): siRNA sense strand
gcuuaaaaucggacauaga

SEQ ID NO: 2316605 - RNA, 19 nt, Homo sapiens
  misc_RNA (1)...(19): siRNA sense strand
ccacuuauguauugcgugu

SEQ ID NO: 2316606 - RNA, 19 nt, Homo sapiens
  misc_RNA (1)...(19): siRNA sense strand
aggcaggagcagaugugaa

SEQ ID NO: 2316607 - RNA, 19 nt, Homo sapiens
  misc_RNA (1)...(19): siRNA sense strand
ccaggauuaugcaggaaga

SEQ ID NO: 2316608 - RNA, 19 nt, Homo sapiens
  misc_RNA (1)...(19): siRNA sense strand
gguagaucuaguugaccaa

SEQ ID NO: 2316609 - RNA, 19 nt, Homo sapiens
  misc_RNA (1)...(19): siRNA sense strand
aagcaugaacaguugagaa

SEQ ID NO: 2316610 - RNA, 19 nt, Homo sapiens
  misc_RNA (1)...(19): siRNA sense strand
cauucaagacaaagaggga

SEQ ID NO: 2316611 - RNA, 19 nt, Homo sapiens
  misc_RNA (1)...(19): siRNA sense strand
ggcaggagcagaugugaau

SEQ ID NO: 2316612 - RNA, 19 nt, Homo sapiens
  misc_RNA (1)...(19): siRNA sense strand
ccauaaagauccaagugcu

SEQ ID NO: 2316613 - RNA, 19 nt, Homo sapiens
  misc_RNA (1)...(19): siRNA sense strand
gguccugcaacaauggaua

SEQ ID NO: 2316614 - RNA, 19 nt, Homo sapiens
  misc_RNA (1)...(19): siRNA sense strand
uugcagcccagaagggaaa

SEQ ID NO: 2316615 - RNA, 19 nt, Homo sapiens
  misc_RNA (1)...(19): siRNA sense strand
agaaaagccuuccgagaca

SEQ ID NO: 2316616 - RNA, 19 nt, Homo sapiens
  misc_RNA (1)...(19): siRNA sense strand
uccagaaggccaaaugaaa

SEQ ID NO: 2316617 - RNA, 19 nt, Homo sapiens
  misc_RNA (1)...(19): siRNA sense strand
gaccauagccagagaacag

SEQ ID NO: 2316618 - RNA, 19 nt, Homo sapiens
  misc_RNA (1)...(19): siRNA sense strand
ugcaguugcugaugggaau

SEQ ID NO: 2316619 - RNA, 19 nt, Homo sapiens
  misc_RNA (1)...(19): siRNA sense strand
ugcagauaauucagagaga

SEQ ID NO: 2316620 - RNA, 19 nt, Homo sapiens
  misc_RNA (1)...(19): siRNA sense strand
gaggaaggaacuggaacua

SEQ ID NO: 2316621 - RNA, 19 nt, Homo sapiens
  misc_RNA (1)...(19): siRNA sense strand
augugaagcugcucaucaa

SEQ ID NO: 2316622 - RNA, 19 nt, Homo sapiens
  misc_RNA (1)...(19): siRNA sense strand
aaaagaugcugcugccaaa

SEQ ID NO: 2316623 - RNA, 19 nt, Homo sapiens
  misc_RNA (1)...(19): siRNA sense strand
ggaacaaacuccagaaggc

SEQ ID NO: 2316624 - RNA, 19 nt, Homo sapiens
  misc_RNA (1)...(19): siRNA sense strand
gcugaaacgguuaaagugu

SEQ ID NO: 2316625 - RNA, 19 nt, Homo sapiens
  misc_RNA (1)...(19): siRNA sense strand
cuaaucagauggaaaacaa

SEQ ID NO: 2316626 - RNA, 19 nt, Homo sapiens
  misc_RNA (1)...(19): siRNA sense strand
caaugaagagagauacaca

SEQ ID NO: 2316627 - RNA, 19 nt, Homo sapiens
  misc_RNA (1)...(19): siRNA sense strand
aaggguacaaggucagaaa

SEQ ID NO: 2316628 - RNA, 19 nt, Homo sapiens
  misc_RNA (1)...(19): siRNA sense strand
aagcaggcauccaggaguu

SEQ ID NO: 2316629 - RNA, 19 nt, Homo sapiens
  misc_RNA (1)...(19): siRNA sense strand
agaagaucaguuugggaga

SEQ ID NO: 2316630 - RNA, 19 nt, Homo sapiens
  misc_RNA (1)...(19): siRNA sense strand
auucagaccuggaaggaag

SEQ ID NO: 2316631 - RNA, 19 nt, Homo sapiens
  misc_RNA (1)...(19): siRNA sense strand
auauuaacauggcugacaa

SEQ ID NO: 2316632 - RNA, 19 nt, Homo sapiens
  misc_RNA (1)...(19): siRNA sense strand
gaaaagaggcagaacagca

SEQ ID NO: 2316633 - RNA, 19 nt, Homo sapiens
  misc_RNA (1)...(19): siRNA sense strand
ggaaggagcuguuucgcaa

SEQ ID NO: 2316634 - RNA, 19 nt, Homo sapiens
  misc_RNA (1)...(19): siRNA sense strand
agacaaagagggaagaaca

SEQ ID NO: 2316635 - RNA, 19 nt, Homo sapiens
  misc_RNA (1)...(19): siRNA sense strand
ggaagaaaacaaacgaaaa

SEQ ID NO: 2316636 - RNA, 19 nt, Homo sapiens
  misc_RNA (1)...(19): siRNA sense strand
ugaaacagccagagaacau

SEQ ID NO: 2316637 - RNA, 19 nt, Homo sapiens
  misc_RNA (1)...(19): siRNA sense strand
uggcaaaggcagugaugau

SEQ ID NO: 2316638 - RNA, 19 nt, Homo sapiens
  misc_RNA (1)...(19): siRNA sense strand
agaacuaugcugagcuuaa

SEQ ID NO: 2316639 - RNA, 19 nt, Homo sapiens
  misc_RNA (1)...(19): siRNA sense strand
guuuauggcaccaggagaa

SEQ ID NO: 2316640 - RNA, 19 nt, Homo sapiens
  misc_RNA (1)...(19): siRNA sense strand
aggcaagagucuacagcau

SEQ ID NO: 2316641 - RNA, 19 nt, Homo sapiens
  misc_RNA (1)...(19): siRNA sense strand
agcaugaacaguugagaaa

SEQ ID NO: 2316642 - RNA, 19 nt, Homo sapiens
  misc_RNA (1)...(19): siRNA sense strand
caggagcagaugugaauaa

SEQ ID NO: 2316643 - RNA, 19 nt, Homo sapiens
  misc_RNA (1)...(19): siRNA sense strand
ccauuaaauuacugcuaga

SEQ ID NO: 2316644 - RNA, 19 nt, Homo sapiens
  misc_RNA (1)...(19): siRNA sense strand
gagaacaguggaagaucaa

SEQ ID NO: 2316645 - RNA, 19 nt, Homo sapiens
  misc_RNA (1)...(19): siRNA sense strand
cuacaauaacccugagcau

SEQ ID NO: 2316646 - RNA, 19 nt, Homo sapiens
  misc_RNA (1)...(19): siRNA sense strand
cccuaacauucaagacaaa

SEQ ID NO: 2316647 - RNA, 19 nt, Homo sapiens
  misc_RNA (1)...(19): siRNA sense strand
ggguagaucuaguugacca

SEQ ID NO: 2316648 - RNA, 19 nt, Homo sapiens
  misc_RNA (1)...(19): siRNA sense strand
gagcaaacuggaugcaaaa

SEQ ID NO: 2316649 - RNA, 19 nt, Homo sapiens
  misc_RNA (1)...(19): siRNA sense strand
uuaacauggcugacaaaua

SEQ ID NO: 2316650 - RNA, 19 nt, Homo sapiens
  misc_RNA (1)...(19): siRNA sense strand
ccuugaugccauuaaauua

SEQ ID NO: 2316651 - RNA, 19 nt, Homo sapiens
  misc_RNA (1)...(19): siRNA sense strand
ccucagauuugcagggaac

SEQ ID NO: 2316652 - RNA, 19 nt, Homo sapiens
  misc_RNA (1)...(19): siRNA sense strand
ccaagagacagcagaggau

SEQ ID NO: 2316653 - RNA, 19 nt, Homo sapiens
  misc_RNA (1)...(19): siRNA sense strand
gcguguuggcugacagauu

SEQ ID NO: 2316654 - RNA, 19 nt, Homo sapiens
  misc_RNA (1)...(19): siRNA sense strand
uggcaguucucauggaaaa

SEQ ID NO: 2316655 - RNA, 19 nt, Homo sapiens
  misc_RNA (1)...(19): siRNA sense strand
caaugaaggcagugaugga

SEQ ID NO: 2316656 - RNA, 19 nt, Homo sapiens
  misc_RNA (1)...(19): siRNA sense strand
cauuaaagguggagcaagg

SEQ ID NO: 2316657 - RNA, 19 nt, Homo sapiens
  misc_RNA (1)...(19): siRNA sense strand
aggaagaaaacaaacgaaa

SEQ ID NO: 2316658 - RNA, 19 nt, Homo sapiens
  misc_RNA (1)...(19): siRNA sense strand
ccuugagaacaguggaaga

SEQ ID NO: 2316659 - RNA, 19 nt, Homo sapiens
  misc_RNA (1)...(19): siRNA sense strand
cagaaggccaaaugaaaca

SEQ ID NO: 2316660 - RNA, 19 nt, Homo sapiens
  misc_RNA (1)...(19): siRNA sense strand
cagauaauucagagagaac

SEQ ID NO: 2316661 - RNA, 19 nt, Homo sapiens
  misc_RNA (1)...(19): siRNA sense strand
aaguggauacacaggauaa

SEQ ID NO: 2316662 - RNA, 19 nt, Homo sapiens
  misc_RNA (1)...(19): siRNA sense strand
ggaggaaggaacuggaacu

SEQ ID NO: 2316663 - RNA, 19 nt, Homo sapiens
  misc_RNA (1)...(19): siRNA sense strand
gggaagaacagcuuugcau

SEQ ID NO: 2316664 - RNA, 19 nt, Homo sapiens
  misc_RNA (1)...(19): siRNA sense strand
gauaauucagagagaacga

SEQ ID NO: 2316665 - RNA, 19 nt, Homo sapiens
  misc_RNA (1)...(19): siRNA sense strand
guggaagaucaaagaacuu

SEQ ID NO: 2316666 - RNA, 19 nt, Homo sapiens
  misc_RNA (1)...(19): siRNA sense strand
uuacuuacacgcagagcaa

SEQ ID NO: 2316667 - RNA, 19 nt, Homo sapiens
  misc_RNA (1)...(19): siRNA sense strand
gcuuaaaaucggacauaga

SEQ ID NO: 2316668 - RNA, 19 nt, Homo sapiens
  misc_RNA (1)...(19): siRNA sense strand
ccacuuauguauugcgugu

SEQ ID NO: 2316669 - RNA, 19 nt, Homo sapiens
  misc_RNA (1)...(19): siRNA sense strand
aggcaggagcagaugugaa

SEQ ID NO: 2316670 - RNA, 19 nt, Homo sapiens
  misc_RNA (1)...(19): siRNA sense strand
ccaggauuaugcaggaaga

SEQ ID NO: 2316671 - RNA, 19 nt, Homo sapiens
  misc_RNA (1)...(19): siRNA sense strand
gguagaucuaguugaccaa

SEQ ID NO: 2316672 - RNA, 19 nt, Homo sapiens
  misc_RNA (1)...(19): siRNA sense strand
aagcaugaacaguugagaa

SEQ ID NO: 2316673 - RNA, 19 nt, Homo sapiens
  misc_RNA (1)...(19): siRNA sense strand
cauucaagacaaagaggga

SEQ ID NO: 2316674 - RNA, 19 nt, Homo sapiens
  misc_RNA (1)...(19): siRNA sense strand
ggcaggagcagaugugaau

SEQ ID NO: 2316675 - RNA, 19 nt, Homo sapiens
  misc_RNA (1)...(19): siRNA sense strand
ccauaaagauccaagugcu

SEQ ID NO: 2316676 - RNA, 19 nt, Homo sapiens
  misc_RNA (1)...(19): siRNA sense strand
gguccugcaacaauggaua

SEQ ID NO: 2316677 - RNA, 19 nt, Homo sapiens
  misc_RNA (1)...(19): siRNA sense strand
uugcagcccagaagggaaa

SEQ ID NO: 2316678 - RNA, 19 nt, Homo sapiens
  misc_RNA (1)...(19): siRNA sense strand
agaaaagccuuccgagaca

SEQ ID NO: 2316679 - RNA, 19 nt, Homo sapiens
  misc_RNA (1)...(19): siRNA sense strand
uccagaaggccaaaugaaa

SEQ ID NO: 2316680 - RNA, 19 nt, Homo sapiens
  misc_RNA (1)...(19): siRNA sense strand
gaccauagccagagaacag

SEQ ID NO: 2316681 - RNA, 19 nt, Homo sapiens
  misc_RNA (1)...(19): siRNA sense strand
ugcaguugcugaugggaau

SEQ ID NO: 2316682 - RNA, 19 nt, Homo sapiens
  misc_RNA (1)...(19): siRNA sense strand
ugcagauaauucagagaga

SEQ ID NO: 2316683 - RNA, 19 nt, Homo sapiens
  misc_RNA (1)...(19): siRNA sense strand
gaggaaggaacuggaacua

SEQ ID NO: 2316684 - RNA, 19 nt, Homo sapiens
  misc_RNA (1)...(19): siRNA sense strand
augugaagcugcucaucaa

SEQ ID NO: 2316685 - RNA, 19 nt, Homo sapiens
  misc_RNA (1)...(19): siRNA sense strand
aaaagaugcugcugccaaa

SEQ ID NO: 2316686 - RNA, 19 nt, Homo sapiens
  misc_RNA (1)...(19): siRNA sense strand
ggaacaaacuccagaaggc

SEQ ID NO: 2316687 - RNA, 19 nt, Homo sapiens
  misc_RNA (1)...(19): siRNA sense strand
gcugaaacgguuaaagugu

SEQ ID NO: 2316688 - RNA, 19 nt, Homo sapiens
  misc_RNA (1)...(19): siRNA sense strand
cuaaucagauggaaaacaa

SEQ ID NO: 2316689 - RNA, 19 nt, Homo sapiens
  misc_RNA (1)...(19): siRNA sense strand
caaugaagagagauacaca

SEQ ID NO: 2316690 - RNA, 19 nt, Homo sapiens
  misc_RNA (1)...(19): siRNA sense strand
aaggguacaaggucagaaa

SEQ ID NO: 2316691 - RNA, 19 nt, Homo sapiens
  misc_RNA (1)...(19): siRNA sense strand
aagcaggcauccaggaguu

SEQ ID NO: 2316692 - RNA, 19 nt, Homo sapiens
  misc_RNA (1)...(19): siRNA sense strand
agaagaucaguuugggaga

SEQ ID NO: 2316693 - RNA, 19 nt, Homo sapiens
  misc_RNA (1)...(19): siRNA sense strand
auucagaccuggaaggaag

SEQ ID NO: 2316694 - RNA, 19 nt, Homo sapiens
  misc_RNA (1)...(19): siRNA sense strand
auauuaacauggcugacaa

SEQ ID NO: 2316695 - RNA, 19 nt, Homo sapiens
  misc_RNA (1)...(19): siRNA sense strand
gaaaagaggcagaacagca

SEQ ID NO: 2316696 - RNA, 19 nt, Homo sapiens
  misc_RNA (1)...(19): siRNA sense strand
gggagaaggugaagggucu

SEQ ID NO: 2316697 - RNA, 19 nt, Homo sapiens
  misc_RNA (1)...(19): siRNA sense strand
auugaagguugcugagcua

SEQ ID NO: 2316698 - RNA, 19 nt, Homo sapiens
  misc_RNA (1)...(19): siRNA sense strand
gucuaugaccaaagaagaa

SEQ ID NO: 2316699 - RNA, 19 nt, Homo sapiens
  misc_RNA (1)...(19): siRNA sense strand
aagaauuugccaagaugaa

SEQ ID NO: 2316700 - RNA, 19 nt, Homo sapiens
  misc_RNA (1)...(19): siRNA sense strand
guuucagagcccagaguuu

SEQ ID NO: 2316701 - RNA, 19 nt, Homo sapiens
  misc_RNA (1)...(19): siRNA sense strand
aacaagaacuggaagcuga

SEQ ID NO: 2316702 - RNA, 19 nt, Homo sapiens
  misc_RNA (1)...(19): siRNA sense strand
cugccagaaauuugaacaa

SEQ ID NO: 2316703 - RNA, 19 nt, Homo sapiens
  misc_RNA (1)...(19): siRNA sense strand
agaacuggaagcugaguau

SEQ ID NO: 2316704 - RNA, 19 nt, Homo sapiens
  misc_RNA (1)...(19): siRNA sense strand
gugugaaagcugacaaaau

SEQ ID NO: 2316705 - RNA, 19 nt, Homo sapiens
  misc_RNA (1)...(19): siRNA sense strand
ucaaguuggcugaggcaca

SEQ ID NO: 2316706 - RNA, 19 nt, Homo sapiens
  misc_RNA (1)...(19): siRNA sense strand
gugagagagacaaagucaa

SEQ ID NO: 2316707 - RNA, 19 nt, Homo sapiens
  misc_RNA (1)...(19): siRNA sense strand
ugacacucuuauugaaaca

SEQ ID NO: 2316708 - RNA, 19 nt, Homo sapiens
  misc_RNA (1)...(19): siRNA sense strand
aaauaaaacaugccaggaa

SEQ ID NO: 2316709 - RNA, 19 nt, Homo sapiens
  misc_RNA (1)...(19): siRNA sense strand
gguuaaagagcaaagacgu

SEQ ID NO: 2316710 - RNA, 19 nt, Homo sapiens
  misc_RNA (1)...(19): siRNA sense strand
agaaacugggagaagguga

SEQ ID NO: 2316711 - RNA, 19 nt, Homo sapiens
  misc_RNA (1)...(19): siRNA sense strand
cgagagaagaugcagaaac

SEQ ID NO: 2316712 - RNA, 19 nt, Homo sapiens
  misc_RNA (1)...(19): siRNA sense strand
ugacauaccugaugcgcuc

SEQ ID NO: 2316713 - RNA, 19 nt, Homo sapiens
  misc_RNA (1)...(19): siRNA sense strand
cugauaaauuucaaacgga

SEQ ID NO: 2316714 - RNA, 19 nt, Homo sapiens
  misc_RNA (1)...(19): siRNA sense strand
gggagaaggugaagggucu

SEQ ID NO: 2316715 - RNA, 19 nt, Homo sapiens
  misc_RNA (1)...(19): siRNA sense strand
auugaagguugcugagcua

SEQ ID NO: 2316716 - RNA, 19 nt, Homo sapiens
  misc_RNA (1)...(19): siRNA sense strand
gucuaugaccaaagaagaa

SEQ ID NO: 2316717 - RNA, 19 nt, Homo sapiens
  misc_RNA (1)...(19): siRNA sense strand
aagaauuugccaagaugaa

SEQ ID NO: 2316718 - RNA, 19 nt, Homo sapiens
  misc_RNA (1)...(19): siRNA sense strand
guuucagagcccagaguuu

SEQ ID NO: 2316719 - RNA, 19 nt, Homo sapiens
  misc_RNA (1)...(19): siRNA sense strand
aacaagaacuggaagcuga

SEQ ID NO: 2316720 - RNA, 19 nt, Homo sapiens
  misc_RNA (1)...(19): siRNA sense strand
cugccagaaauuugaacaa

SEQ ID NO: 2316721 - RNA, 19 nt, Homo sapiens
  misc_RNA (1)...(19): siRNA sense strand
agaacuggaagcugaguau

SEQ ID NO: 2316722 - RNA, 19 nt, Homo sapiens
  misc_RNA (1)...(19): siRNA sense strand
gugugaaagcugacaaaau

SEQ ID NO: 2316723 - RNA, 19 nt, Homo sapiens
  misc_RNA (1)...(19): siRNA sense strand
ucaaguuggcugaggcaca

SEQ ID NO: 2316724 - RNA, 19 nt, Homo sapiens
  misc_RNA (1)...(19): siRNA sense strand
gugagagagacaaagucaa

SEQ ID NO: 2316725 - RNA, 19 nt, Homo sapiens
  misc_RNA (1)...(19): siRNA sense strand
ugacacucuuauugaaaca

SEQ ID NO: 2316726 - RNA, 19 nt, Homo sapiens
  misc_RNA (1)...(19): siRNA sense strand
aaauaaaacaugccaggaa

SEQ ID NO: 2316727 - RNA, 19 nt, Homo sapiens
  misc_RNA (1)...(19): siRNA sense strand
gguuaaagagcaaagacgu

SEQ ID NO: 2316728 - RNA, 19 nt, Homo sapiens
  misc_RNA (1)...(19): siRNA sense strand
agaaacugggagaagguga

SEQ ID NO: 2316729 - RNA, 19 nt, Homo sapiens
  misc_RNA (1)...(19): siRNA sense strand
cgagagaagaugcagaaac

SEQ ID NO: 2316730 - RNA, 19 nt, Homo sapiens
  misc_RNA (1)...(19): siRNA sense strand
ugacauaccugaugcgcuc

SEQ ID NO: 2316731 - RNA, 19 nt, Homo sapiens
  misc_RNA (1)...(19): siRNA sense strand
cugauaaauuucaaacgga

SEQ ID NO: 2316732 - RNA, 19 nt, Homo sapiens
  misc_RNA (1)...(19): siRNA sense strand
cgaggagagcaccgggaaa

SEQ ID NO: 2316733 - RNA, 19 nt, Homo sapiens
  misc_RNA (1)...(19): siRNA sense strand
agauuguggcccagaagaa

SEQ ID NO: 2316734 - RNA, 19 nt, Homo sapiens
  misc_RNA (1)...(19): siRNA sense strand
cggugaucgccgaggacau

SEQ ID NO: 2316735 - RNA, 19 nt, Homo sapiens
  misc_RNA (1)...(19): siRNA sense strand
gcgagaucugccaggacua

SEQ ID NO: 2316736 - RNA, 19 nt, Homo sapiens
  misc_RNA (1)...(19): siRNA sense strand
cugaggacgaugaguguga

SEQ ID NO: 2316737 - RNA, 19 nt, Homo sapiens
  misc_RNA (1)...(19): siRNA sense strand
ccuucgaggagaugcagaa

SEQ ID NO: 2316738 - RNA, 19 nt, Homo sapiens
  misc_RNA (1)...(19): siRNA sense strand
agcaggugguggaguacua

SEQ ID NO: 2316739 - RNA, 19 nt, Homo sapiens
  misc_RNA (1)...(19): siRNA sense strand
ucaucgugggcgugggcaa

SEQ ID NO: 2316740 - RNA, 19 nt, Homo sapiens
  misc_RNA (1)...(19): siRNA sense strand
gcagaaggccuuugaggag

SEQ ID NO: 2316741 - RNA, 19 nt, Homo sapiens
  misc_RNA (1)...(19): siRNA sense strand
acgaguaccugaaggcacu

SEQ ID NO: 2316742 - RNA, 19 nt, Homo sapiens
  misc_RNA (1)...(19): siRNA sense strand
gugaaggcauccagggcgu

SEQ ID NO: 2316743 - RNA, 19 nt, Homo sapiens
  misc_RNA (1)...(19): siRNA sense strand
cgaggagagcaccgggaaa

SEQ ID NO: 2316744 - RNA, 19 nt, Homo sapiens
  misc_RNA (1)...(19): siRNA sense strand
agauuguggcccagaagaa

SEQ ID NO: 2316745 - RNA, 19 nt, Homo sapiens
  misc_RNA (1)...(19): siRNA sense strand
cggugaucgccgaggacau

SEQ ID NO: 2316746 - RNA, 19 nt, Homo sapiens
  misc_RNA (1)...(19): siRNA sense strand
gcgagaucugccaggacua

SEQ ID NO: 2316747 - RNA, 19 nt, Homo sapiens
  misc_RNA (1)...(19): siRNA sense strand
cugaggacgaugaguguga

SEQ ID NO: 2316748 - RNA, 19 nt, Homo sapiens
  misc_RNA (1)...(19): siRNA sense strand
ccuucgaggagaugcagaa

SEQ ID NO: 2316749 - RNA, 19 nt, Homo sapiens
  misc_RNA (1)...(19): siRNA sense strand
agcaggugguggaguacua

SEQ ID NO: 2316750 - RNA, 19 nt, Homo sapiens
  misc_RNA (1)...(19): siRNA sense strand
ucaucgugggcgugggcaa

SEQ ID NO: 2316751 - RNA, 19 nt, Homo sapiens
  misc_RNA (1)...(19): siRNA sense strand
gcagaaggccuuugaggag

SEQ ID NO: 2316752 - RNA, 19 nt, Homo sapiens
  misc_RNA (1)...(19): siRNA sense strand
acgaguaccugaaggcacu

SEQ ID NO: 2316753 - RNA, 19 nt, Homo sapiens
  misc_RNA (1)...(19): siRNA sense strand
gugaaggcauccagggcgu

SEQ ID NO: 2316754 - RNA, 19 nt, Homo sapiens
  misc_RNA (1)...(19): siRNA sense strand
ucaaggaaacagugagaaa

SEQ ID NO: 2316755 - RNA, 19 nt, Homo sapiens
  misc_RNA (1)...(19): siRNA sense strand
auucaagccaagagaguua

SEQ ID NO: 2316756 - RNA, 19 nt, Homo sapiens
  misc_RNA (1)...(19): siRNA sense strand
gauucaaauacaagaggaa

SEQ ID NO: 2316757 - RNA, 19 nt, Homo sapiens
  misc_RNA (1)...(19): siRNA sense strand
ugaaagaagcacaaaucaa

SEQ ID NO: 2316758 - RNA, 19 nt, Homo sapiens
  misc_RNA (1)...(19): siRNA sense strand
gcgcaggcgugguuggaau

SEQ ID NO: 2316759 - RNA, 19 nt, Homo sapiens
  misc_RNA (1)...(19): siRNA sense strand
aagucuaaguuaagggaga

SEQ ID NO: 2316760 - RNA, 19 nt, Homo sapiens
  misc_RNA (1)...(19): siRNA sense strand
aggcagaagaagcaguaaa

SEQ ID NO: 2316761 - RNA, 19 nt, Homo sapiens
  misc_RNA (1)...(19): siRNA sense strand
cagaagaagcaguaaagau

SEQ ID NO: 2316762 - RNA, 19 nt, Homo sapiens
  misc_RNA (1)...(19): siRNA sense strand
gaaacauagaagagacaga

SEQ ID NO: 2316763 - RNA, 19 nt, Homo sapiens
  misc_RNA (1)...(19): siRNA sense strand
uggcugaauugcuggacaa

SEQ ID NO: 2316764 - RNA, 19 nt, Homo sapiens
  misc_RNA (1)...(19): siRNA sense strand
aauaagaaccagagaaucu

SEQ ID NO: 2316765 - RNA, 19 nt, Homo sapiens
  misc_RNA (1)...(19): siRNA sense strand
ucucaauguccaagaguau

SEQ ID NO: 2316766 - RNA, 19 nt, Homo sapiens
  misc_RNA (1)...(19): siRNA sense strand
uggcaugagcccugaggaa

SEQ ID NO: 2316767 - RNA, 19 nt, Homo sapiens
  misc_RNA (1)...(19): siRNA sense strand
gagccguagaggacagaaa

SEQ ID NO: 2316768 - RNA, 19 nt, Homo sapiens
  misc_RNA (1)...(19): siRNA sense strand
augaaaagacuucggaaaa

SEQ ID NO: 2316769 - RNA, 19 nt, Homo sapiens
  misc_RNA (1)...(19): siRNA sense strand
agaaagucuuagugagguu

SEQ ID NO: 2316770 - RNA, 19 nt, Homo sapiens
  misc_RNA (1)...(19): siRNA sense strand
ugucaaacuagcugagaga

SEQ ID NO: 2316771 - RNA, 19 nt, Homo sapiens
  misc_RNA (1)...(19): siRNA sense strand
aguaauaaccguuugauca

SEQ ID NO: 2316772 - RNA, 19 nt, Homo sapiens
  misc_RNA (1)...(19): siRNA sense strand
aauccugguuucagauaaa

SEQ ID NO: 2316773 - RNA, 19 nt, Homo sapiens
  misc_RNA (1)...(19): siRNA sense strand
cgaagaaggaagaaacgau

SEQ ID NO: 2316774 - RNA, 19 nt, Homo sapiens
  misc_RNA (1)...(19): siRNA sense strand
ugucuuaaauggagagucu

SEQ ID NO: 2316775 - RNA, 19 nt, Homo sapiens
  misc_RNA (1)...(19): siRNA sense strand
cagagaagucagauugcua

SEQ ID NO: 2316776 - RNA, 19 nt, Homo sapiens
  misc_RNA (1)...(19): siRNA sense strand
cggcaucaauaauagaaau

SEQ ID NO: 2316777 - RNA, 19 nt, Homo sapiens
  misc_RNA (1)...(19): siRNA sense strand
guuaauaagaaccagagaa

SEQ ID NO: 2316778 - RNA, 19 nt, Homo sapiens
  misc_RNA (1)...(19): siRNA sense strand
aggaaauugcaguccauua

SEQ ID NO: 2316779 - RNA, 19 nt, Homo sapiens
  misc_RNA (1)...(19): siRNA sense strand
agauguagaagcaaagcaa

SEQ ID NO: 2316780 - RNA, 19 nt, Homo sapiens
  misc_RNA (1)...(19): siRNA sense strand
auguagaagcaaagcaaaa

SEQ ID NO: 2316781 - RNA, 19 nt, Homo sapiens
  misc_RNA (1)...(19): siRNA sense strand
uugaugugaucuauggaaa

SEQ ID NO: 2316782 - RNA, 19 nt, Homo sapiens
  misc_RNA (1)...(19): siRNA sense strand
cugaauccauauugaaaga

SEQ ID NO: 2316783 - RNA, 19 nt, Homo sapiens
  misc_RNA (1)...(19): siRNA sense strand
aaaguaaaccagugugaca

SEQ ID NO: 2316784 - RNA, 19 nt, Homo sapiens
  misc_RNA (1)...(19): siRNA sense strand
uuagagagucggucauaaa

SEQ ID NO: 2316785 - RNA, 19 nt, Homo sapiens
  misc_RNA (1)...(19): siRNA sense strand
agguauugacugaagauga

SEQ ID NO: 2316786 - RNA, 19 nt, Homo sapiens
  misc_RNA (1)...(19): siRNA sense strand
acacauagccagaguuucu

SEQ ID NO: 2316787 - RNA, 19 nt, Homo sapiens
  misc_RNA (1)...(19): siRNA sense strand
cugccuaacuucagcacau

SEQ ID NO: 2316788 - RNA, 19 nt, Homo sapiens
  misc_RNA (1)...(19): siRNA sense strand
aagaaacauagaagagaca

SEQ ID NO: 2316789 - RNA, 19 nt, Homo sapiens
  misc_RNA (1)...(19): siRNA sense strand
aaugaaaagacuucggaaa

SEQ ID NO: 2316790 - RNA, 19 nt, Homo sapiens
  misc_RNA (1)...(19): siRNA sense strand
ucauagggcaauacggcaa

SEQ ID NO: 2316791 - RNA, 19 nt, Homo sapiens
  misc_RNA (1)...(19): siRNA sense strand
ucaauguccaagaguauaa

SEQ ID NO: 2316792 - RNA, 19 nt, Homo sapiens
  misc_RNA (1)...(19): siRNA sense strand
acuauagaugcaagacaua

SEQ ID NO: 2316793 - RNA, 19 nt, Homo sapiens
  misc_RNA (1)...(19): siRNA sense strand
ccauauugaaagaagcaca

SEQ ID NO: 2316794 - RNA, 19 nt, Homo sapiens
  misc_RNA (1)...(19): siRNA sense strand
gcacaauaucaccaucaaa

SEQ ID NO: 2316795 - RNA, 19 nt, Homo sapiens
  misc_RNA (1)...(19): siRNA sense strand
gagaagcaacuuagagagu

SEQ ID NO: 2316796 - RNA, 19 nt, Homo sapiens
  misc_RNA (1)...(19): siRNA sense strand
cugaagggugccugaagaa

SEQ ID NO: 2316797 - RNA, 19 nt, Homo sapiens
  misc_RNA (1)...(19): siRNA sense strand
ugucaaggaaacagugaga

SEQ ID NO: 2316798 - RNA, 19 nt, Homo sapiens
  misc_RNA (1)...(19): siRNA sense strand
ggggcaaugugaaaauaaa

SEQ ID NO: 2316799 - RNA, 19 nt, Homo sapiens
  misc_RNA (1)...(19): siRNA sense strand
cauauugaaagaagcacaa

SEQ ID NO: 2316800 - RNA, 19 nt, Homo sapiens
  misc_RNA (1)...(19): siRNA sense strand
guagaggacagaaaagaaa

SEQ ID NO: 2316801 - RNA, 19 nt, Homo sapiens
  misc_RNA (1)...(19): siRNA sense strand
gggcaaugugaaaauaaaa

SEQ ID NO: 2316802 - RNA, 19 nt, Homo sapiens
  misc_RNA (1)...(19): siRNA sense strand
aagcagaauugaugcagca

SEQ ID NO: 2316803 - RNA, 19 nt, Homo sapiens
  misc_RNA (1)...(19): siRNA sense strand
cagaaauuugcaauggaau

SEQ ID NO: 2316804 - RNA, 19 nt, Homo sapiens
  misc_RNA (1)...(19): siRNA sense strand
agucuauggaggagaaaau

SEQ ID NO: 2316805 - RNA, 19 nt, Homo sapiens
  misc_RNA (1)...(19): siRNA sense strand
cguagaaaaccgaagccaa

SEQ ID NO: 2316806 - RNA, 19 nt, Homo sapiens
  misc_RNA (1)...(19): siRNA sense strand
cauuuggauuugugcuaau

SEQ ID NO: 2316807 - RNA, 19 nt, Homo sapiens
  misc_RNA (1)...(19): siRNA sense strand
aagagaagcaacuuagaga

SEQ ID NO: 2316808 - RNA, 19 nt, Homo sapiens
  misc_RNA (1)...(19): siRNA sense strand
ugugaguggcaguuguaaa

SEQ ID NO: 2316809 - RNA, 19 nt, Homo sapiens
  misc_RNA (1)...(19): siRNA sense strand
cggcaauggucuuaaaagu

SEQ ID NO: 2316810 - RNA, 19 nt, Homo sapiens
  misc_RNA (1)...(19): siRNA sense strand
ucaaaguaaaccaguguga

SEQ ID NO: 2316811 - RNA, 19 nt, Homo sapiens
  misc_RNA (1)...(19): siRNA sense strand
caacuuagagagucgguca

SEQ ID NO: 2316812 - RNA, 19 nt, Homo sapiens
  misc_RNA (1)...(19): siRNA sense strand
gaaucuaaguucuggacac

SEQ ID NO: 2316813 - RNA, 19 nt, Homo sapiens
  misc_RNA (1)...(19): siRNA sense strand
cccauaauaaacaggaauu

SEQ ID NO: 2316814 - RNA, 19 nt, Homo sapiens
  misc_RNA (1)...(19): siRNA sense strand
cuucagcacauaaggaaaa

SEQ ID NO: 2316815 - RNA, 19 nt, Homo sapiens
  misc_RNA (1)...(19): siRNA sense strand
aggaagaggaggugaaaca

SEQ ID NO: 2316816 - RNA, 19 nt, Homo sapiens
  misc_RNA (1)...(19): siRNA sense strand
aggaggaagaggaggugaa

SEQ ID NO: 2316817 - RNA, 19 nt, Homo sapiens
  misc_RNA (1)...(19): siRNA sense strand
gagaaguggaagagaaauc

SEQ ID NO: 2316818 - RNA, 19 nt, Homo sapiens
  misc_RNA (1)...(19): siRNA sense strand
caguauuaugccaaaguua

SEQ ID NO: 2316819 - RNA, 19 nt, Homo sapiens
  misc_RNA (1)...(19): siRNA sense strand
agacaggccaccaggagaa

SEQ ID NO: 2316820 - RNA, 19 nt, Homo sapiens
  misc_RNA (1)...(19): siRNA sense strand
gggcaaaagaaauggcuga

SEQ ID NO: 2316821 - RNA, 19 nt, Homo sapiens
  misc_RNA (1)...(19): siRNA sense strand
gaauaaaucagaaugcaga

SEQ ID NO: 2316822 - RNA, 19 nt, Homo sapiens
  misc_RNA (1)...(19): siRNA sense strand
auaugaguuuacugggaaa

SEQ ID NO: 2316823 - RNA, 19 nt, Homo sapiens
  misc_RNA (1)...(19): siRNA sense strand
uuauaugugcagauggaaa

SEQ ID NO: 2316824 - RNA, 19 nt, Homo sapiens
  misc_RNA (1)...(19): siRNA sense strand
ggauaugaguuuacuggga

SEQ ID NO: 2316825 - RNA, 19 nt, Homo sapiens
  misc_RNA (1)...(19): siRNA sense strand
gaacauuauuggagucgca

SEQ ID NO: 2316826 - RNA, 19 nt, Homo sapiens
  misc_RNA (1)...(19): siRNA sense strand
aggugaaacauuuagggua

SEQ ID NO: 2316827 - RNA, 19 nt, Homo sapiens
  misc_RNA (1)...(19): siRNA sense strand
gcuucgcauuugauggaaa

SEQ ID NO: 2316828 - RNA, 19 nt, Homo sapiens
  misc_RNA (1)...(19): siRNA sense strand
gauaugaguuuacugggaa

SEQ ID NO: 2316829 - RNA, 19 nt, Homo sapiens
  misc_RNA (1)...(19): siRNA sense strand
ucaucagaguucaaggcua

SEQ ID NO: 2316830 - RNA, 19 nt, Homo sapiens
  misc_RNA (1)...(19): siRNA sense strand
gggucuucaaggaguuaaa

SEQ ID NO: 2316831 - RNA, 19 nt, Homo sapiens
  misc_RNA (1)...(19): siRNA sense strand
gauauauccacguuggcaa

SEQ ID NO: 2316832 - RNA, 19 nt, Homo sapiens
  misc_RNA (1)...(19): siRNA sense strand
gaauaugaugucagaacca

SEQ ID NO: 2316833 - RNA, 19 nt, Homo sapiens
  misc_RNA (1)...(19): siRNA sense strand
augccaaaguuaaggccau

SEQ ID NO: 2316834 - RNA, 19 nt, Homo sapiens
  misc_RNA (1)...(19): siRNA sense strand
cauauaugggcaaaagaaa

SEQ ID NO: 2316835 - RNA, 19 nt, Homo sapiens
  misc_RNA (1)...(19): siRNA sense strand
guauuucauauaugggcaa

SEQ ID NO: 2316836 - RNA, 19 nt, Homo sapiens
  misc_RNA (1)...(19): siRNA sense strand
ggcugaaaguggacgguuc

SEQ ID NO: 2316837 - RNA, 19 nt, Homo sapiens
  misc_RNA (1)...(19): siRNA sense strand
auauauccacguuggcaaa

SEQ ID NO: 2316838 - RNA, 19 nt, Homo sapiens
  misc_RNA (1)...(19): siRNA sense strand
gcgcaggagcacacagacu

SEQ ID NO: 2316839 - RNA, 19 nt, Homo sapiens
  misc_RNA (1)...(19): siRNA sense strand
guuaaggccauuuggggaa

SEQ ID NO: 2316840 - RNA, 19 nt, Homo sapiens
  misc_RNA (1)...(19): siRNA sense strand
aaagagaaacacccagcaa

SEQ ID NO: 2316841 - RNA, 19 nt, Homo sapiens
  misc_RNA (1)...(19): siRNA sense strand
gcauaucucgagagggcaa

SEQ ID NO: 2316842 - RNA, 19 nt, Homo sapiens
  misc_RNA (1)...(19): siRNA sense strand
agguggagguggaggagga

SEQ ID NO: 2316843 - RNA, 19 nt, Homo sapiens
  misc_RNA (1)...(19): siRNA sense strand
ugaaagacccaguggagca

SEQ ID NO: 2316844 - RNA, 19 nt, Homo sapiens
  misc_RNA (1)...(19): siRNA sense strand
gcaacaguauggugcgcau

SEQ ID NO: 2316845 - RNA, 19 nt, Homo sapiens
  misc_RNA (1)...(19): siRNA sense strand
agguggaggaggaggaguu

SEQ ID NO: 2316846 - RNA, 19 nt, Homo sapiens
  misc_RNA (1)...(19): siRNA sense strand
ucuacaaggccaugaacau

SEQ ID NO: 2316847 - RNA, 19 nt, Homo sapiens
  misc_RNA (1)...(19): siRNA sense strand
auggagaaccugaaagcuu

SEQ ID NO: 2316848 - RNA, 19 nt, Homo sapiens
  misc_RNA (1)...(19): siRNA sense strand
aaagcuuugcugaaggaua

SEQ ID NO: 2316849 - RNA, 19 nt, Homo sapiens
  misc_RNA (1)...(19): siRNA sense strand
cagcauaucucgagagggc

SEQ ID NO: 2316850 - RNA, 19 nt, Homo sapiens
  misc_RNA (1)...(19): siRNA sense strand
agguggagacuuacgaaaa

SEQ ID NO: 2316851 - RNA, 19 nt, Homo sapiens
  misc_RNA (1)...(19): siRNA sense strand
aggagguguuggaggcaga

SEQ ID NO: 2316852 - RNA, 19 nt, Homo sapiens
  misc_RNA (1)...(19): siRNA sense strand
gggacuaagcgcagggaga

SEQ ID NO: 2316853 - RNA, 19 nt, Homo sapiens
  misc_RNA (1)...(19): siRNA sense strand
gaagaaagugcaagggcuu

SEQ ID NO: 2316854 - RNA, 19 nt, Homo sapiens
  misc_RNA (1)...(19): siRNA sense strand
acgaggaggacgaggaaga

SEQ ID NO: 2316855 - RNA, 19 nt, Homo sapiens
  misc_RNA (1)...(19): siRNA sense strand
gguuggaggacgaggagga

SEQ ID NO: 2316856 - RNA, 19 nt, Homo sapiens
  misc_RNA (1)...(19): siRNA sense strand
aggacgaggaagaggcuga

SEQ ID NO: 2316857 - RNA, 19 nt, Homo sapiens
  misc_RNA (1)...(19): siRNA sense strand
ugucugaggaggauggaga

SEQ ID NO: 2316858 - RNA, 19 nt, Homo sapiens
  misc_RNA (1)...(19): siRNA sense strand
ccaucaugucugaggagga

SEQ ID NO: 2316859 - RNA, 19 nt, Homo sapiens
  misc_RNA (1)...(19): siRNA sense strand
gacacagguuggaggacga

SEQ ID NO: 2316860 - RNA, 19 nt, Homo sapiens
  misc_RNA (1)...(19): siRNA sense strand
uggaggacgaggaggacga

SEQ ID NO: 2316861 - RNA, 19 nt, Homo sapiens
  misc_RNA (1)...(19): siRNA sense strand
uaacggagccacaggacca

SEQ ID NO: 2316862 - RNA, 19 nt, Homo sapiens
  misc_RNA (1)...(19): siRNA sense strand
ugaagaaagugcaagggcu

SEQ ID NO: 2316863 - RNA, 19 nt, Homo sapiens
  misc_RNA (1)...(19): siRNA sense strand
gggacuaagcgcagggaga

SEQ ID NO: 2316864 - RNA, 19 nt, Homo sapiens
  misc_RNA (1)...(19): siRNA sense strand
gaagaaagugcaagggcuu

SEQ ID NO: 2316865 - RNA, 19 nt, Homo sapiens
  misc_RNA (1)...(19): siRNA sense strand
acgaggaggacgaggaaga

SEQ ID NO: 2316866 - RNA, 19 nt, Homo sapiens
  misc_RNA (1)...(19): siRNA sense strand
gguuggaggacgaggagga

SEQ ID NO: 2316867 - RNA, 19 nt, Homo sapiens
  misc_RNA (1)...(19): siRNA sense strand
aggacgaggaagaggcuga

SEQ ID NO: 2316868 - RNA, 19 nt, Homo sapiens
  misc_RNA (1)...(19): siRNA sense strand
ugucugaggaggauggaga

SEQ ID NO: 2316869 - RNA, 19 nt, Homo sapiens
  misc_RNA (1)...(19): siRNA sense strand
ccaucaugucugaggagga

SEQ ID NO: 2316870 - RNA, 19 nt, Homo sapiens
  misc_RNA (1)...(19): siRNA sense strand
gacacagguuggaggacga

SEQ ID NO: 2316871 - RNA, 19 nt, Homo sapiens
  misc_RNA (1)...(19): siRNA sense strand
uggaggacgaggaggacga

SEQ ID NO: 2316872 - RNA, 19 nt, Homo sapiens
  misc_RNA (1)...(19): siRNA sense strand
uaacggagccacaggacca

SEQ ID NO: 2316873 - RNA, 19 nt, Homo sapiens
  misc_RNA (1)...(19): siRNA sense strand
ugaagaaagugcaagggcu

SEQ ID NO: 2316874 - RNA, 19 nt, Homo sapiens
  misc_RNA (1)...(19): siRNA sense strand
uaacaguagaagagggcaa

SEQ ID NO: 2316875 - RNA, 19 nt, Homo sapiens
  misc_RNA (1)...(19): siRNA sense strand
aagagguaauggagaguga

SEQ ID NO: 2316876 - RNA, 19 nt, Homo sapiens
  misc_RNA (1)...(19): siRNA sense strand
aaaccuuggaagugauuaa

SEQ ID NO: 2316877 - RNA, 19 nt, Homo sapiens
  misc_RNA (1)...(19): siRNA sense strand
agguaugauccgaaggaga

SEQ ID NO: 2316878 - RNA, 19 nt, Homo sapiens
  misc_RNA (1)...(19): siRNA sense strand
acgagagggcuauggaauu

SEQ ID NO: 2316879 - RNA, 19 nt, Homo sapiens
  misc_RNA (1)...(19): siRNA sense strand
uggcaguggucaauggaca

SEQ ID NO: 2316880 - RNA, 19 nt, Homo sapiens
  misc_RNA (1)...(19): siRNA sense strand
cagaaguagugauccgaga

SEQ ID NO: 2316881 - RNA, 19 nt, Homo sapiens
  misc_RNA (1)...(19): siRNA sense strand
aaguguugguguagcagua

SEQ ID NO: 2316882 - RNA, 19 nt, Homo sapiens
  misc_RNA (1)...(19): siRNA sense strand
ccaagaagauauaugccca

SEQ ID NO: 2316883 - RNA, 19 nt, Homo sapiens
  misc_RNA (1)...(19): siRNA sense strand
cuugaagaccauagaaguu

SEQ ID NO: 2316884 - RNA, 19 nt, Homo sapiens
  misc_RNA (1)...(19): siRNA sense strand
aguagugauccgagacauu

SEQ ID NO: 2316885 - RNA, 19 nt, Homo sapiens
  misc_RNA (1)...(19): siRNA sense strand
gacauugacgagagggcua

SEQ ID NO: 2316886 - RNA, 19 nt, Homo sapiens
  misc_RNA (1)...(19): siRNA sense strand
ccuccagcuggcagaaaua

SEQ ID NO: 2316887 - RNA, 19 nt, Homo sapiens
  misc_RNA (1)...(19): siRNA sense strand
acuugguagaugaggcuaa

SEQ ID NO: 2316888 - RNA, 19 nt, Homo sapiens
  misc_RNA (1)...(19): siRNA sense strand
aaacguucgcagugaagaa

SEQ ID NO: 2316889 - RNA, 19 nt, Homo sapiens
  misc_RNA (1)...(19): siRNA sense strand
gugcaguauaucaggacau

SEQ ID NO: 2316890 - RNA, 19 nt, Homo sapiens
  misc_RNA (1)...(19): siRNA sense strand
gggaaguacucuuugcagu

SEQ ID NO: 2316891 - RNA, 19 nt, Homo sapiens
  misc_RNA (1)...(19): siRNA sense strand
acaacauacuugaagacca

SEQ ID NO: 2316892 - RNA, 19 nt, Homo sapiens
  misc_RNA (1)...(19): siRNA sense strand
ggaccaaggacgagaccac

SEQ ID NO: 2316893 - RNA, 19 nt, Homo sapiens
  misc_RNA (1)...(19): siRNA sense strand
gaucuaugcuguaggaggu

SEQ ID NO: 2316894 - RNA, 19 nt, Homo sapiens
  misc_RNA (1)...(19): siRNA sense strand
agacaagcacccucgacaa

SEQ ID NO: 2316895 - RNA, 19 nt, Homo sapiens
  misc_RNA (1)...(19): siRNA sense strand
gaacaaguggacucgggua

SEQ ID NO: 2316896 - RNA, 19 nt, Homo sapiens
  misc_RNA (1)...(19): siRNA sense strand
gaugaauuaccgucggcua

SEQ ID NO: 2316897 - RNA, 19 nt, Homo sapiens
  misc_RNA (1)...(19): siRNA sense strand
gcguaggaguuauuaaaau

SEQ ID NO: 2316898 - RNA, 19 nt, Homo sapiens
  misc_RNA (1)...(19): siRNA sense strand
gaggaaacaccuaggcugu

SEQ ID NO: 2316899 - RNA, 19 nt, Homo sapiens
  misc_RNA (1)...(19): siRNA sense strand
gagcuauguuuacaggaga

SEQ ID NO: 2316900 - RNA, 19 nt, Homo sapiens
  misc_RNA (1)...(19): siRNA sense strand
gcucauggcaguaggaggu

SEQ ID NO: 2316901 - RNA, 19 nt, Homo sapiens
  misc_RNA (1)...(19): siRNA sense strand
gguuauauggcgggaugaa

SEQ ID NO: 2316902 - RNA, 19 nt, Homo sapiens
  misc_RNA (1)...(19): siRNA sense strand
aggagagacuggaauggau

SEQ ID NO: 2316903 - RNA, 19 nt, Homo sapiens
  misc_RNA (1)...(19): siRNA sense strand
augcaaggaccaaggacga

SEQ ID NO: 2316904 - RNA, 19 nt, Homo sapiens
  misc_RNA (1)...(19): siRNA sense strand
uuuccaguguugaacgaua

SEQ ID NO: 2316905 - RNA, 19 nt, Homo sapiens
  misc_RNA (1)...(19): siRNA sense strand
uaugaguaccagaagacua

SEQ ID NO: 2316906 - RNA, 19 nt, Homo sapiens
  misc_RNA (1)...(19): siRNA sense strand
gacgagagggcuauggaau

SEQ ID NO: 2316907 - RNA, 19 nt, Homo sapiens
  misc_RNA (1)...(19): siRNA sense strand
agaacgaccacuaaugcaa

SEQ ID NO: 2316908 - RNA, 19 nt, Homo sapiens
  misc_RNA (1)...(19): siRNA sense strand
gugcaguggagaugccauu

SEQ ID NO: 2316909 - RNA, 19 nt, Homo sapiens
  misc_RNA (1)...(19): siRNA sense strand
agcaguacuuggaggcuuu

SEQ ID NO: 2316910 - RNA, 19 nt, Homo sapiens
  misc_RNA (1)...(19): siRNA sense strand
agcuauguuuacaggagaa

SEQ ID NO: 2316911 - RNA, 19 nt, Homo sapiens
  misc_RNA (1)...(19): siRNA sense strand
aagccaaugcgcaggugua

SEQ ID NO: 2316912 - RNA, 19 nt, Homo sapiens
  misc_RNA (1)...(19): siRNA sense strand
acugauugacuuugcguau

SEQ ID NO: 2316913 - RNA, 19 nt, Homo sapiens
  misc_RNA (1)...(19): siRNA sense strand
cggguagcuucuaugagua

SEQ ID NO: 2316914 - RNA, 19 nt, Homo sapiens
  misc_RNA (1)...(19): siRNA sense strand
uuacaggagaauuggcaga

SEQ ID NO: 2316915 - RNA, 19 nt, Homo sapiens
  misc_RNA (1)...(19): siRNA sense strand
uggcagaaauacaggaagc

SEQ ID NO: 2316916 - RNA, 19 nt, Homo sapiens
  misc_RNA (1)...(19): siRNA sense strand
uauccagugaugagcuaaa

SEQ ID NO: 2316917 - RNA, 19 nt, Homo sapiens
  misc_RNA (1)...(19): siRNA sense strand
ggcagagagccgucagaca

SEQ ID NO: 2316918 - RNA, 19 nt, Homo sapiens
  misc_RNA (1)...(19): siRNA sense strand
caacauaacuuucaagagg

SEQ ID NO: 2316919 - RNA, 19 nt, Homo sapiens
  misc_RNA (1)...(19): siRNA sense strand
agaccaaugaauggagaau

SEQ ID NO: 2316920 - RNA, 19 nt, Homo sapiens
  misc_RNA (1)...(19): siRNA sense strand
caggaaaacagauggcaca

SEQ ID NO: 2316921 - RNA, 19 nt, Homo sapiens
  misc_RNA (1)...(19): siRNA sense strand
cauucgaccaggagagacu

SEQ ID NO: 2316922 - RNA, 19 nt, Homo sapiens
  misc_RNA (1)...(19): siRNA sense strand
ccuacaagcaccugcagga

SEQ ID NO: 2316923 - RNA, 19 nt, Homo sapiens
  misc_RNA (1)...(19): siRNA sense strand
agguagagauccaggacau

SEQ ID NO: 2316924 - RNA, 19 nt, Homo sapiens
  misc_RNA (1)...(19): siRNA sense strand
ccgcgcacuuggagagcaa

SEQ ID NO: 2316925 - RNA, 19 nt, Homo sapiens
  misc_RNA (1)...(19): siRNA sense strand
agugcaagcgcgagaacaa

SEQ ID NO: 2316926 - RNA, 19 nt, Homo sapiens
  misc_RNA (1)...(19): siRNA sense strand
gggacuaaugcaagcgaga

SEQ ID NO: 2316927 - RNA, 19 nt, Homo sapiens
  misc_RNA (1)...(19): siRNA sense strand
agaacaacaucccgggaga

SEQ ID NO: 2316928 - RNA, 19 nt, Homo sapiens
  misc_RNA (1)...(19): siRNA sense strand
aagaagaagaagaucaaca

SEQ ID NO: 2316929 - RNA, 19 nt, Homo sapiens
  misc_RNA (1)...(19): siRNA sense strand
cgaucaagauucuagacga

SEQ ID NO: 2316930 - RNA, 19 nt, Homo sapiens
  misc_RNA (1)...(19): siRNA sense strand
gagcagcaccacugggaca

SEQ ID NO: 2316931 - RNA, 19 nt, Homo sapiens
  misc_RNA (1)...(19): siRNA sense strand
ccagaaagagccagccuga

SEQ ID NO: 2316932 - RNA, 19 nt, Homo sapiens
  misc_RNA (1)...(19): siRNA sense strand
cauccuacuugguggaacu

SEQ ID NO: 2316933 - RNA, 19 nt, Homo sapiens
  misc_RNA (1)...(19): siRNA sense strand
gugauugacuccaacgaca

SEQ ID NO: 2316934 - RNA, 19 nt, Homo sapiens
  misc_RNA (1)...(19): siRNA sense strand
acugcaaagucacggucaa

SEQ ID NO: 2316935 - RNA, 19 nt, Homo sapiens
  misc_RNA (1)...(19): siRNA sense strand
ggugagggugacagugcua

SEQ ID NO: 2316936 - RNA, 19 nt, Homo sapiens
  misc_RNA (1)...(19): siRNA sense strand
ggggcaagggcaagaagaa

SEQ ID NO: 2316937 - RNA, 19 nt, Homo sapiens
  misc_RNA (1)...(19): siRNA sense strand
cauaauucagacagacaau

SEQ ID NO: 2316938 - RNA, 19 nt, Homo sapiens
  misc_RNA (1)...(19): siRNA sense strand
ccauaauucagacagacaa

SEQ ID NO: 2316939 - RNA, 19 nt, Homo sapiens
  misc_RNA (1)...(19): siRNA sense strand
ugcuagacgugaaugacaa

SEQ ID NO: 2316940 - RNA, 19 nt, Homo sapiens
  misc_RNA (1)...(19): siRNA sense strand
ccgcaguggccaagcucau

SEQ ID NO: 2316941 - RNA, 19 nt, Homo sapiens
  misc_RNA (1)...(19): siRNA sense strand
ccgccaccguacagaucaa

SEQ ID NO: 2316942 - RNA, 19 nt, Homo sapiens
  misc_RNA (1)...(19): siRNA sense strand
gaucaagauucuagacgag

SEQ ID NO: 2316943 - RNA, 19 nt, Homo sapiens
  misc_RNA (1)...(19): siRNA sense strand
gggugaauggcgagcagca

SEQ ID NO: 2316944 - RNA, 19 nt, Homo sapiens
  misc_RNA (1)...(19): siRNA sense strand
cagaucaacgugaagguga

SEQ ID NO: 2316945 - RNA, 19 nt, Homo sapiens
  misc_RNA (1)...(19): siRNA sense strand
aggagaacuacgacaacuu

SEQ ID NO: 2316946 - RNA, 19 nt, Homo sapiens
  misc_RNA (1)...(19): siRNA sense strand
agggcaagaagaagaagau

SEQ ID NO: 2316947 - RNA, 19 nt, Homo sapiens
  misc_RNA (1)...(19): siRNA sense strand
acguuuaaggacccagaaa

SEQ ID NO: 2316948 - RNA, 19 nt, Homo sapiens
  misc_RNA (1)...(19): siRNA sense strand
ccauggagguggaggaagu

SEQ ID NO: 2316949 - RNA, 19 nt, Homo sapiens
  misc_RNA (1)...(19): siRNA sense strand
aauuagagucaguggaaau

SEQ ID NO: 2316950 - RNA, 19 nt, Homo sapiens
  misc_RNA (1)...(19): siRNA sense strand
cggcaacagcauugggauu

SEQ ID NO: 2316951 - RNA, 19 nt, Homo sapiens
  misc_RNA (1)...(19): siRNA sense strand
cuggaagagugcugggcua

SEQ ID NO: 2316952 - RNA, 19 nt, Homo sapiens
  misc_RNA (1)...(19): siRNA sense strand
acggagacccuuagacaaa

SEQ ID NO: 2316953 - RNA, 19 nt, Homo sapiens
  misc_RNA (1)...(19): siRNA sense strand
agucaaaguggguguguau

SEQ ID NO: 2316954 - RNA, 19 nt, Homo sapiens
  misc_RNA (1)...(19): siRNA sense strand
caaaacagacagaguaaaa

SEQ ID NO: 2316955 - RNA, 19 nt, Homo sapiens
  misc_RNA (1)...(19): siRNA sense strand
auguaaagcuaguggaaag

SEQ ID NO: 2316956 - RNA, 19 nt, Homo sapiens
  misc_RNA (1)...(19): siRNA sense strand
ggaaagucaaguacagcaa

SEQ ID NO: 2316957 - RNA, 19 nt, Homo sapiens
  misc_RNA (1)...(19): siRNA sense strand
cagcauugggauuggagaa

SEQ ID NO: 2316958 - RNA, 19 nt, Homo sapiens
  misc_RNA (1)...(19): siRNA sense strand
acaaagaggcccagagaag

SEQ ID NO: 2316959 - RNA, 19 nt, Homo sapiens
  misc_RNA (1)...(19): siRNA sense strand
gaauauuucucuuggagga

SEQ ID NO: 2316960 - RNA, 19 nt, Homo sapiens
  misc_RNA (1)...(19): siRNA sense strand
uggcgagaguauagugcua

SEQ ID NO: 2316961 - RNA, 19 nt, Homo sapiens
  misc_RNA (1)...(19): siRNA sense strand
agucagugaugguggagau

SEQ ID NO: 2316962 - RNA, 19 nt, Homo sapiens
  misc_RNA (1)...(19): siRNA sense strand
gagaaguguucaaggucca

SEQ ID NO: 2316963 - RNA, 19 nt, Homo sapiens
  misc_RNA (1)...(19): siRNA sense strand
uggagaugucauagacuua

SEQ ID NO: 2316964 - RNA, 19 nt, Homo sapiens
  misc_RNA (1)...(19): siRNA sense strand
acaaacaacccuagaaagu

SEQ ID NO: 2316965 - RNA, 19 nt, Homo sapiens
  misc_RNA (1)...(19): siRNA sense strand
uggaagcagcagugaggaa

SEQ ID NO: 2316966 - RNA, 19 nt, Homo sapiens
  misc_RNA (1)...(19): siRNA sense strand
ccaucagaauuguuaagaa

SEQ ID NO: 2316967 - RNA, 19 nt, Homo sapiens
  misc_RNA (1)...(19): siRNA sense strand
ggcaaaacagacagaguaa

SEQ ID NO: 2316968 - RNA, 19 nt, Homo sapiens
  misc_RNA (1)...(19): siRNA sense strand
cagaaugggaacagaaaau

SEQ ID NO: 2316969 - RNA, 19 nt, Homo sapiens
  misc_RNA (1)...(19): siRNA sense strand
caucagaauuguuaagaac

SEQ ID NO: 2316970 - RNA, 19 nt, Homo sapiens
  misc_RNA (1)...(19): siRNA sense strand
cuccaaaaguccaguuaaa

SEQ ID NO: 2316971 - RNA, 19 nt, Homo sapiens
  misc_RNA (1)...(19): siRNA sense strand
caaccugguccaaggagaa

SEQ ID NO: 2316972 - RNA, 19 nt, Homo sapiens
  misc_RNA (1)...(19): siRNA sense strand
gagagcaggcccagauaau

SEQ ID NO: 2316973 - RNA, 19 nt, Homo sapiens
  misc_RNA (1)...(19): siRNA sense strand
uuacaacacugcugggaca

SEQ ID NO: 2316974 - RNA, 19 nt, Homo sapiens
  misc_RNA (1)...(19): siRNA sense strand
ccuuauacguccaagagga

SEQ ID NO: 2316975 - RNA, 19 nt, Homo sapiens
  misc_RNA (1)...(19): siRNA sense strand
agucugaaguuuuggggua

SEQ ID NO: 2316976 - RNA, 19 nt, Homo sapiens
  misc_RNA (1)...(19): siRNA sense strand
uaauaaugaaggagaagga

SEQ ID NO: 2316977 - RNA, 19 nt, Homo sapiens
  misc_RNA (1)...(19): siRNA sense strand
uggaaaugucacaaccaaa

SEQ ID NO: 2316978 - RNA, 19 nt, Homo sapiens
  misc_RNA (1)...(19): siRNA sense strand
ggauuugaugauaaggaau

SEQ ID NO: 2316979 - RNA, 19 nt, Homo sapiens
  misc_RNA (1)...(19): siRNA sense strand
guuacaucauucaggaaaa

SEQ ID NO: 2316980 - RNA, 19 nt, Homo sapiens
  misc_RNA (1)...(19): siRNA sense strand
aaauaagaacagucaguga

SEQ ID NO: 2316981 - RNA, 19 nt, Homo sapiens
  misc_RNA (1)...(19): siRNA sense strand
cagugaugguggagaugga

SEQ ID NO: 2316982 - RNA, 19 nt, Homo sapiens
  misc_RNA (1)...(19): siRNA sense strand
ucaaauagaaaaugggaca

SEQ ID NO: 2316983 - RNA, 19 nt, Homo sapiens
  misc_RNA (1)...(19): siRNA sense strand
aggaugugcaaguggaaga

SEQ ID NO: 2316984 - RNA, 19 nt, Homo sapiens
  misc_RNA (1)...(19): siRNA sense strand
uggaauagaaacacuggaa

SEQ ID NO: 2316985 - RNA, 19 nt, Homo sapiens
  misc_RNA (1)...(19): siRNA sense strand
caaagauugaagugcguuu

SEQ ID NO: 2316986 - RNA, 19 nt, Homo sapiens
  misc_RNA (1)...(19): siRNA sense strand
gaggaagaaaccuugcaaa

SEQ ID NO: 2316987 - RNA, 19 nt, Homo sapiens
  misc_RNA (1)...(19): siRNA sense strand
ggaaaugucacaaccaaaa

SEQ ID NO: 2316988 - RNA, 19 nt, Homo sapiens
  misc_RNA (1)...(19): siRNA sense strand
agaggagagaauucaaaua

SEQ ID NO: 2316989 - RNA, 19 nt, Homo sapiens
  misc_RNA (1)...(19): siRNA sense strand
aaugcugaauugagaguuu

SEQ ID NO: 2316990 - RNA, 19 nt, Homo sapiens
  misc_RNA (1)...(19): siRNA sense strand
uuacaguuggcgagaguau

SEQ ID NO: 2316991 - RNA, 19 nt, Homo sapiens
  misc_RNA (1)...(19): siRNA sense strand
uaucauuguuagaggucca

SEQ ID NO: 2316992 - RNA, 19 nt, Homo sapiens
  misc_RNA (1)...(19): siRNA sense strand
auucugagucggaaggcaa

SEQ ID NO: 2316993 - RNA, 19 nt, Homo sapiens
  misc_RNA (1)...(19): siRNA sense strand
ugcuacaguuccagaaauu

SEQ ID NO: 2316994 - RNA, 19 nt, Homo sapiens
  misc_RNA (1)...(19): siRNA sense strand
aaagaauccaugauaggua

SEQ ID NO: 2316995 - RNA, 19 nt, Homo sapiens
  misc_RNA (1)...(19): siRNA sense strand
ccugaauugugcugcuaau

SEQ ID NO: 2316996 - RNA, 19 nt, Homo sapiens
  misc_RNA (1)...(19): siRNA sense strand
uuucaauggagaugucaua

SEQ ID NO: 2316997 - RNA, 19 nt, Homo sapiens
  misc_RNA (1)...(19): siRNA sense strand
ccaagugaaccaucagaau

SEQ ID NO: 2316998 - RNA, 19 nt, Homo sapiens
  misc_RNA (1)...(19): siRNA sense strand
agucaauguuaccaccaaa

SEQ ID NO: 2316999 - RNA, 19 nt, Homo sapiens
  misc_RNA (1)...(19): siRNA sense strand
ugaaauaagaacagucagu

SEQ ID NO: 2317000 - RNA, 19 nt, Homo sapiens
  misc_RNA (1)...(19): siRNA sense strand
gaagcagcagugaggaaau

SEQ ID NO: 2317001 - RNA, 19 nt, Homo sapiens
  misc_RNA (1)...(19): siRNA sense strand
auacaugcauagccacaaa

SEQ ID NO: 2317002 - RNA, 19 nt, Homo sapiens
  misc_RNA (1)...(19): siRNA sense strand
ccucauuguaaaagagaga

SEQ ID NO: 2317003 - RNA, 19 nt, Homo sapiens
  misc_RNA (1)...(19): siRNA sense strand
cauugggauuggagaacca

SEQ ID NO: 2317004 - RNA, 19 nt, Homo sapiens
  misc_RNA (1)...(19): siRNA sense strand
uggagaaccaagugaacca

SEQ ID NO: 2317005 - RNA, 19 nt, Homo sapiens
  misc_RNA (1)...(19): siRNA sense strand
cggcaaaacagacagagua

SEQ ID NO: 2317006 - RNA, 19 nt, Homo sapiens
  misc_RNA (1)...(19): siRNA sense strand
gggaauaugaaccaaagau

SEQ ID NO: 2317007 - RNA, 19 nt, Homo sapiens
  misc_RNA (1)...(19): siRNA sense strand
aggaagaaaccuugcaaag

SEQ ID NO: 2317008 - RNA, 19 nt, Homo sapiens
  misc_RNA (1)...(19): siRNA sense strand
aggagagaauucaaauaga

SEQ ID NO: 2317009 - RNA, 19 nt, Homo sapiens
  misc_RNA (1)...(19): siRNA sense strand
auggcagccucaagauaua

SEQ ID NO: 2317010 - RNA, 19 nt, Homo sapiens
  misc_RNA (1)...(19): siRNA sense strand
ccagagaguugcaacggaa

SEQ ID NO: 2317011 - RNA, 19 nt, Homo sapiens
  misc_RNA (1)...(19): siRNA sense strand
cggaauuugccuucaggaa

SEQ ID NO: 2317012 - RNA, 19 nt, Homo sapiens
  misc_RNA (1)...(19): siRNA sense strand
aagaauaccuuggaggaga

SEQ ID NO: 2317013 - RNA, 19 nt, Homo sapiens
  misc_RNA (1)...(19): siRNA sense strand
ucgcugagcugcaggagga

SEQ ID NO: 2317014 - RNA, 19 nt, Homo sapiens
  misc_RNA (1)...(19): siRNA sense strand
agaagaauaccuuggagga

SEQ ID NO: 2317015 - RNA, 19 nt, Homo sapiens
  misc_RNA (1)...(19): siRNA sense strand
agcaaaaccugcaggccaa

SEQ ID NO: 2317016 - RNA, 19 nt, Homo sapiens
  misc_RNA (1)...(19): siRNA sense strand
gaacaugacaacaggacuc

SEQ ID NO: 2317017 - RNA, 19 nt, Homo sapiens
  misc_RNA (1)...(19): siRNA sense strand
ugccugacccugcgggaaa

SEQ ID NO: 2317018 - RNA, 19 nt, Homo sapiens
  misc_RNA (1)...(19): siRNA sense strand
ugaaggacccuguggagga

SEQ ID NO: 2317019 - RNA, 19 nt, Homo sapiens
  misc_RNA (1)...(19): siRNA sense strand
agaccaacaacgagcuuga

SEQ ID NO: 2317020 - RNA, 19 nt, Homo sapiens
  misc_RNA (1)...(19): siRNA sense strand
cugagagguucgugccuga

SEQ ID NO: 2317021 - RNA, 19 nt, Homo sapiens
  misc_RNA (1)...(19): siRNA sense strand
ugacagauuuagaugccga

SEQ ID NO: 2317022 - RNA, 19 nt, Homo sapiens
  misc_RNA (1)...(19): siRNA sense strand
gagcaaaaccugcaggcca

SEQ ID NO: 2317023 - RNA, 19 nt, Homo sapiens
  misc_RNA (1)...(19): siRNA sense strand
uggagacacuagagaucga

SEQ ID NO: 2317024 - RNA, 19 nt, Homo sapiens
  misc_RNA (1)...(19): siRNA sense strand
auuuagaugccgagaucga

SEQ ID NO: 2317025 - RNA, 19 nt, Homo sapiens
  misc_RNA (1)...(19): siRNA sense strand
caacaaggaccgagcggag

SEQ ID NO: 2317026 - RNA, 19 nt, Homo sapiens
  misc_RNA (1)...(19): siRNA sense strand
caugaaacacaaacggcaa

SEQ ID NO: 2317027 - RNA, 19 nt, Homo sapiens
  misc_RNA (1)...(19): siRNA sense strand
gguugaguaaggagccaaa

SEQ ID NO: 2317028 - RNA, 19 nt, Homo sapiens
  misc_RNA (1)...(19): siRNA sense strand
augaaacacaaacggcaaa

SEQ ID NO: 2317029 - RNA, 19 nt, Homo sapiens
  misc_RNA (1)...(19): siRNA sense strand
gcaugaaacacaaacggca

SEQ ID NO: 2317030 - RNA, 19 nt, Homo sapiens
  misc_RNA (1)...(19): siRNA sense strand
cugaugaaagaccgagaaa

SEQ ID NO: 2317031 - RNA, 19 nt, Homo sapiens
  misc_RNA (1)...(19): siRNA sense strand
cgagaaaccaacaagucga

SEQ ID NO: 2317032 - RNA, 19 nt, Homo sapiens
  misc_RNA (1)...(19): siRNA sense strand
aggccggagcagauacuaa

SEQ ID NO: 2317033 - RNA, 19 nt, Homo sapiens
  misc_RNA (1)...(19): siRNA sense strand
ccuuugagagcuacggaga

SEQ ID NO: 2317034 - RNA, 19 nt, Homo sapiens
  misc_RNA (1)...(19): siRNA sense strand
gggccgaaaagaaggggua

SEQ ID NO: 2317035 - RNA, 19 nt, Homo sapiens
  misc_RNA (1)...(19): siRNA sense strand
acacagaggagcugcggca

SEQ ID NO: 2317036 - RNA, 19 nt, Homo sapiens
  misc_RNA (1)...(19): siRNA sense strand
ucaccuugcugcuggccua

SEQ ID NO: 2317037 - RNA, 19 nt, Homo sapiens
  misc_RNA (1)...(19): siRNA sense strand
acgaaauguccgaguucaa

SEQ ID NO: 2317038 - RNA, 19 nt, Homo sapiens
  misc_RNA (1)...(19): siRNA sense strand
gggagcuggaggagagcaa

SEQ ID NO: 2317039 - RNA, 19 nt, Homo sapiens
  misc_RNA (1)...(19): siRNA sense strand
gcucaaguguggaagcuga

SEQ ID NO: 2317040 - RNA, 19 nt, Homo sapiens
  misc_RNA (1)...(19): siRNA sense strand
gcucagauccggauggcau

SEQ ID NO: 2317041 - RNA, 19 nt, Homo sapiens
  misc_RNA (1)...(19): siRNA sense strand
ccaacaucauggugcucaa

SEQ ID NO: 2317042 - RNA, 19 nt, Homo sapiens
  misc_RNA (1)...(19): siRNA sense strand
ucaaagaagcugcugccaa

SEQ ID NO: 2317043 - RNA, 19 nt, Homo sapiens
  misc_RNA (1)...(19): siRNA sense strand
agcaaaaguuucugggaca

SEQ ID NO: 2317044 - RNA, 19 nt, Homo sapiens
  misc_RNA (1)...(19): siRNA sense strand
gaugaugaguccaagcaca

SEQ ID NO: 2317045 - RNA, 19 nt, Homo sapiens
  misc_RNA (1)...(19): siRNA sense strand
cuaugaaaucagaagagau

SEQ ID NO: 2317046 - RNA, 19 nt, Homo sapiens
  misc_RNA (1)...(19): siRNA sense strand
gguuugacagcguggauga

SEQ ID NO: 2317047 - RNA, 19 nt, Homo sapiens
  misc_RNA (1)...(19): siRNA sense strand
agaccuacacgguggacau

SEQ ID NO: 2317048 - RNA, 19 nt, Homo sapiens
  misc_RNA (1)...(19): siRNA sense strand
cugaaguggaugagcaagu

SEQ ID NO: 2317049 - RNA, 19 nt, Homo sapiens
  misc_RNA (1)...(19): siRNA sense strand
gggaagaugcuggagaaca

SEQ ID NO: 2317050 - RNA, 19 nt, Homo sapiens
  misc_RNA (1)...(19): siRNA sense strand
acaucauggugcucaacaa

SEQ ID NO: 2317051 - RNA, 19 nt, Homo sapiens
  misc_RNA (1)...(19): siRNA sense strand
uuauaaagaaggaccugaa

SEQ ID NO: 2317052 - RNA, 19 nt, Homo sapiens
  misc_RNA (1)...(19): siRNA sense strand
ccgagaagaggacagcaaa

SEQ ID NO: 2317053 - RNA, 19 nt, Homo sapiens
  misc_RNA (1)...(19): siRNA sense strand
guguaugauaacaagaaga

SEQ ID NO: 2317054 - RNA, 19 nt, Homo sapiens
  misc_RNA (1)...(19): siRNA sense strand
gcaaaaguuucugggacaa

SEQ ID NO: 2317055 - RNA, 19 nt, Homo sapiens
  misc_RNA (1)...(19): siRNA sense strand
cgguauugcaguaucucua

SEQ ID NO: 2317056 - RNA, 19 nt, Homo sapiens
  misc_RNA (1)...(19): siRNA sense strand
aggagagggagcugcagaa

SEQ ID NO: 2317057 - RNA, 19 nt, Homo sapiens
  misc_RNA (1)...(19): siRNA sense strand
ccucaagaagaguccggua

SEQ ID NO: 2317058 - RNA, 19 nt, Homo sapiens
  misc_RNA (1)...(19): siRNA sense strand
aggaaaugauauucgaaag

SEQ ID NO: 2317059 - RNA, 19 nt, Homo sapiens
  misc_RNA (1)...(19): siRNA sense strand
agaaggagcuggcagagca

SEQ ID NO: 2317060 - RNA, 19 nt, Homo sapiens
  misc_RNA (1)...(19): siRNA sense strand
gaaagacaaauguggcuca

SEQ ID NO: 2317061 - RNA, 19 nt, Homo sapiens
  misc_RNA (1)...(19): siRNA sense strand
cagaagagaucaccgccuu

SEQ ID NO: 2317062 - RNA, 19 nt, Homo sapiens
  misc_RNA (1)...(19): siRNA sense strand
ugugagaucgccaggaaca

SEQ ID NO: 2317063 - RNA, 19 nt, Homo sapiens
  misc_RNA (1)...(19): siRNA sense strand
uccgagaagaggacagcaa

SEQ ID NO: 2317064 - RNA, 19 nt, Homo sapiens
  misc_RNA (1)...(19): siRNA sense strand
uggcagaugaccugaggaa

SEQ ID NO: 2317065 - RNA, 19 nt, Homo sapiens
  misc_RNA (1)...(19): siRNA sense strand
cgggugaagcugauggaga

SEQ ID NO: 2317066 - RNA, 19 nt, Homo sapiens
  misc_RNA (1)...(19): siRNA sense strand
caacgaggcuggaggcauc

SEQ ID NO: 2317067 - RNA, 19 nt, Homo sapiens
  misc_RNA (1)...(19): siRNA sense strand
ugaagaagaauguggcgau

SEQ ID NO: 2317068 - RNA, 19 nt, Homo sapiens
  misc_RNA (1)...(19): siRNA sense strand
gggugaagcugauggagag

SEQ ID NO: 2317069 - RNA, 19 nt, Homo sapiens
  misc_RNA (1)...(19): siRNA sense strand
cucauaugcugcagaccaa

SEQ ID NO: 2317070 - RNA, 19 nt, Homo sapiens
  misc_RNA (1)...(19): siRNA sense strand
gggagaaagauuuggcccu

SEQ ID NO: 2317071 - RNA, 19 nt, Homo sapiens
  misc_RNA (1)...(19): siRNA sense strand
cagaaugggaagugggauu

SEQ ID NO: 2317072 - RNA, 19 nt, Homo sapiens
  misc_RNA (1)...(19): siRNA sense strand
gggaagaggcagaacguca

SEQ ID NO: 2317073 - RNA, 19 nt, Homo sapiens
  misc_RNA (1)...(19): siRNA sense strand
gagaaugggaagaggcaga

SEQ ID NO: 2317074 - RNA, 19 nt, Homo sapiens
  misc_RNA (1)...(19): siRNA sense strand
agaugggagugaagacaaa

SEQ ID NO: 2317075 - RNA, 19 nt, Homo sapiens
  misc_RNA (1)...(19): siRNA sense strand
aagagaggcuugaggccaa

SEQ ID NO: 2317076 - RNA, 19 nt, Homo sapiens
  misc_RNA (1)...(19): siRNA sense strand
agguagaggaagaggcuga

SEQ ID NO: 2317077 - RNA, 19 nt, Homo sapiens
  misc_RNA (1)...(19): siRNA sense strand
cagaugacgucuuggccaa

SEQ ID NO: 2317078 - RNA, 19 nt, Homo sapiens
  misc_RNA (1)...(19): siRNA sense strand
ggucaugagagaaugggaa

SEQ ID NO: 2317079 - RNA, 19 nt, Homo sapiens
  misc_RNA (1)...(19): siRNA sense strand
uggugaugcugaagaagaa

SEQ ID NO: 2317080 - RNA, 19 nt, Homo sapiens
  misc_RNA (1)...(19): siRNA sense strand
aggcagaacgucaagcaaa

SEQ ID NO: 2317081 - RNA, 19 nt, Homo sapiens
  misc_RNA (1)...(19): siRNA sense strand
ccaaugugguagaagccaa

SEQ ID NO: 2317082 - RNA, 19 nt, Homo sapiens
  misc_RNA (1)...(19): siRNA sense strand
ggccaagcaccgagagaga

SEQ ID NO: 2317083 - RNA, 19 nt, Homo sapiens
  misc_RNA (1)...(19): siRNA sense strand
ccuaaagcauuucgagcau

SEQ ID NO: 2317084 - RNA, 19 nt, Homo sapiens
  misc_RNA (1)...(19): siRNA sense strand
ugacaaauaucaagacgga

SEQ ID NO: 2317085 - RNA, 19 nt, Homo sapiens
  misc_RNA (1)...(19): siRNA sense strand
cugcaguggccgaggagau

SEQ ID NO: 2317086 - RNA, 19 nt, Homo sapiens
  misc_RNA (1)...(19): siRNA sense strand
ccaagcaccgagagagaau

SEQ ID NO: 2317087 - RNA, 19 nt, Homo sapiens
  misc_RNA (1)...(19): siRNA sense strand
ccgacaugacucaggauau

SEQ ID NO: 2317088 - RNA, 19 nt, Homo sapiens
  misc_RNA (1)...(19): siRNA sense strand
cagaacagaaggacagaca

SEQ ID NO: 2317089 - RNA, 19 nt, Homo sapiens
  misc_RNA (1)...(19): siRNA sense strand
ggaagaagaagaagccgau

SEQ ID NO: 2317090 - RNA, 19 nt, Homo sapiens
  misc_RNA (1)...(19): siRNA sense strand
ggcugaagaaagugacaau

SEQ ID NO: 2317091 - RNA, 19 nt, Homo sapiens
  misc_RNA (1)...(19): siRNA sense strand
aagacaaaguaguagaagu

SEQ ID NO: 2317092 - RNA, 19 nt, Homo sapiens
  misc_RNA (1)...(19): siRNA sense strand
ggaugaaguugaugagcug

SEQ ID NO: 2317093 - RNA, 19 nt, Homo sapiens
  misc_RNA (1)...(19): siRNA sense strand
ccuuggugaugcugaagaa

SEQ ID NO: 2317094 - RNA, 19 nt, Homo sapiens
  misc_RNA (1)...(19): siRNA sense strand
ccgaugaugacgaggacga

SEQ ID NO: 2317095 - RNA, 19 nt, Homo sapiens
  misc_RNA (1)...(19): siRNA sense strand
agaggaagaggcugaggaa

SEQ ID NO: 2317096 - RNA, 19 nt, Homo sapiens
  misc_RNA (1)...(19): siRNA sense strand
gaguggaagccaugcucaa

SEQ ID NO: 2317097 - RNA, 19 nt, Homo sapiens
  misc_RNA (1)...(19): siRNA sense strand
auaucaagacggaggagau

SEQ ID NO: 2317098 - RNA, 19 nt, Homo sapiens
  misc_RNA (1)...(19): siRNA sense strand
gugaagacaaaguaguaga

SEQ ID NO: 2317099 - RNA, 19 nt, Homo sapiens
  misc_RNA (1)...(19): siRNA sense strand
uagaaguagcagaggagga

SEQ ID NO: 2317100 - RNA, 19 nt, Homo sapiens
  misc_RNA (1)...(19): siRNA sense strand
aggaggaagaaguggcuga

SEQ ID NO: 2317101 - RNA, 19 nt, Homo sapiens
  misc_RNA (1)...(19): siRNA sense strand
aagugaagauggaugcaga

SEQ ID NO: 2317102 - RNA, 19 nt, Homo sapiens
  misc_RNA (1)...(19): siRNA sense strand
aggauggauguuugcgaaa

SEQ ID NO: 2317103 - RNA, 19 nt, Homo sapiens
  misc_RNA (1)...(19): siRNA sense strand
ugacaaguuccgaggggua

SEQ ID NO: 2317104 - RNA, 19 nt, Homo sapiens
  misc_RNA (1)...(19): siRNA sense strand
cugaggaacccuacgaaga

SEQ ID NO: 2317105 - RNA, 19 nt, Homo sapiens
  misc_RNA (1)...(19): siRNA sense strand
gcgcagaacagaaggacag

SEQ ID NO: 2317106 - RNA, 19 nt, Homo sapiens
  misc_RNA (1)...(19): siRNA sense strand
cugcauugauaccaaggaa

SEQ ID NO: 2317107 - RNA, 19 nt, Homo sapiens
  misc_RNA (1)...(19): siRNA sense strand
aaguagcagaggaggaaga

SEQ ID NO: 2317108 - RNA, 19 nt, Homo sapiens
  misc_RNA (1)...(19): siRNA sense strand
uagcagaggaggaagaagu

SEQ ID NO: 2317109 - RNA, 19 nt, Homo sapiens
  misc_RNA (1)...(19): siRNA sense strand
gagagaaugucccagguca

SEQ ID NO: 2317110 - RNA, 19 nt, Homo sapiens
  misc_RNA (1)...(19): siRNA sense strand
gaggauggauguuugcgaa

SEQ ID NO: 2317111 - RNA, 19 nt, Homo sapiens
  misc_RNA (1)...(19): siRNA sense strand
aggaagaggcugaggaacc

SEQ ID NO: 2317112 - RNA, 19 nt, Homo sapiens
  misc_RNA (1)...(19): siRNA sense strand
gccaagaagucuacccuga

SEQ ID NO: 2317113 - RNA, 19 nt, Homo sapiens
  misc_RNA (1)...(19): siRNA sense strand
agaaguagcagaggaggaa

SEQ ID NO: 2317114 - RNA, 19 nt, Homo sapiens
  misc_RNA (1)...(19): siRNA sense strand
ccagaaagccaaagagagg

SEQ ID NO: 2317115 - RNA, 19 nt, Homo sapiens
  misc_RNA (1)...(19): siRNA sense strand
ugucccaggucaugagaga

SEQ ID NO: 2317116 - RNA, 19 nt, Homo sapiens
  misc_RNA (1)...(19): siRNA sense strand
aagaagaagaagccgauga

SEQ ID NO: 2317117 - RNA, 19 nt, Homo sapiens
  misc_RNA (1)...(19): siRNA sense strand
gagagaaugggaagaggca

SEQ ID NO: 2317118 - RNA, 19 nt, Homo sapiens
  misc_RNA (1)...(19): siRNA sense strand
gugccagccaacacagaaa

SEQ ID NO: 2317119 - RNA, 19 nt, Homo sapiens
  misc_RNA (1)...(19): siRNA sense strand
aagaaguggcugaggugga

SEQ ID NO: 2317120 - RNA, 19 nt, Homo sapiens
  misc_RNA (1)...(19): siRNA sense strand
uggaagaagaagaagccga

SEQ ID NO: 2317121 - RNA, 19 nt, Homo sapiens
  misc_RNA (1)...(19): siRNA sense strand
uggugaugagguagaggaa

SEQ ID NO: 2317122 - RNA, 19 nt, Homo sapiens
  misc_RNA (1)...(19): siRNA sense strand
aaguggaaucuuuggaaca

SEQ ID NO: 2317123 - RNA, 19 nt, Homo sapiens
  misc_RNA (1)...(19): siRNA sense strand
aagaagaaacaguacacau

SEQ ID NO: 2317124 - RNA, 19 nt, Homo sapiens
  misc_RNA (1)...(19): siRNA sense strand
guuccugacaagugcaaau

SEQ ID NO: 2317125 - RNA, 19 nt, Homo sapiens
  misc_RNA (1)...(19): siRNA sense strand
cagaugggagugaagacaa

SEQ ID NO: 2317126 - RNA, 19 nt, Homo sapiens
  misc_RNA (1)...(19): siRNA sense strand
agagaaugucccaggucau

SEQ ID NO: 2317127 - RNA, 19 nt, Homo sapiens
  misc_RNA (1)...(19): siRNA sense strand
ugccuaaagcugauaagaa

SEQ ID NO: 2317128 - RNA, 19 nt, Homo sapiens
  misc_RNA (1)...(19): siRNA sense strand
ccuacaaguucuuugagca

SEQ ID NO: 2317129 - RNA, 19 nt, Homo sapiens
  misc_RNA (1)...(19): siRNA sense strand
agaaagugacaauguggau

SEQ ID NO: 2317130 - RNA, 19 nt, Homo sapiens
  misc_RNA (1)...(19): siRNA sense strand
cggagcagacacagacuau

SEQ ID NO: 2317131 - RNA, 19 nt, Homo sapiens
  misc_RNA (1)...(19): siRNA sense strand
ccaaggaucaguuacggaa

SEQ ID NO: 2317132 - RNA, 19 nt, Homo sapiens
  misc_RNA (1)...(19): siRNA sense strand
augccaucuuugaccgaaa

SEQ ID NO: 2317133 - RNA, 19 nt, Homo sapiens
  misc_RNA (1)...(19): siRNA sense strand
ugaagauggaugcagaauu

SEQ ID NO: 2317134 - RNA, 19 nt, Homo sapiens
  misc_RNA (1)...(19): siRNA sense strand
uugcagaagauguggguuc

SEQ ID NO: 2317135 - RNA, 19 nt, Homo sapiens
  misc_RNA (1)...(19): siRNA sense strand
cugaagaaagugacaaugu

SEQ ID NO: 2317136 - RNA, 19 nt, Homo sapiens
  misc_RNA (1)...(19): siRNA sense strand
agacuaugcagaugggagu

SEQ ID NO: 2317137 - RNA, 19 nt, Homo sapiens
  misc_RNA (1)...(19): siRNA sense strand
cagaaugggaagugggauu

SEQ ID NO: 2317138 - RNA, 19 nt, Homo sapiens
  misc_RNA (1)...(19): siRNA sense strand
gggaagaggcagaacguca

SEQ ID NO: 2317139 - RNA, 19 nt, Homo sapiens
  misc_RNA (1)...(19): siRNA sense strand
gagaaugggaagaggcaga

SEQ ID NO: 2317140 - RNA, 19 nt, Homo sapiens
  misc_RNA (1)...(19): siRNA sense strand
agaugggagugaagacaaa

SEQ ID NO: 2317141 - RNA, 19 nt, Homo sapiens
  misc_RNA (1)...(19): siRNA sense strand
aagagaggcuugaggccaa

SEQ ID NO: 2317142 - RNA, 19 nt, Homo sapiens
  misc_RNA (1)...(19): siRNA sense strand
agguagaggaagaggcuga

SEQ ID NO: 2317143 - RNA, 19 nt, Homo sapiens
  misc_RNA (1)...(19): siRNA sense strand
cagaugacgucuuggccaa

SEQ ID NO: 2317144 - RNA, 19 nt, Homo sapiens
  misc_RNA (1)...(19): siRNA sense strand
ggucaugagagaaugggaa

SEQ ID NO: 2317145 - RNA, 19 nt, Homo sapiens
  misc_RNA (1)...(19): siRNA sense strand
uggugaugcugaagaagaa

SEQ ID NO: 2317146 - RNA, 19 nt, Homo sapiens
  misc_RNA (1)...(19): siRNA sense strand
aggcagaacgucaagcaaa

SEQ ID NO: 2317147 - RNA, 19 nt, Homo sapiens
  misc_RNA (1)...(19): siRNA sense strand
ccaaugugguagaagccaa

SEQ ID NO: 2317148 - RNA, 19 nt, Homo sapiens
  misc_RNA (1)...(19): siRNA sense strand
ggccaagcaccgagagaga

SEQ ID NO: 2317149 - RNA, 19 nt, Homo sapiens
  misc_RNA (1)...(19): siRNA sense strand
ccuaaagcauuucgagcau

SEQ ID NO: 2317150 - RNA, 19 nt, Homo sapiens
  misc_RNA (1)...(19): siRNA sense strand
ugacaaauaucaagacgga

SEQ ID NO: 2317151 - RNA, 19 nt, Homo sapiens
  misc_RNA (1)...(19): siRNA sense strand
cugcaguggccgaggagau

SEQ ID NO: 2317152 - RNA, 19 nt, Homo sapiens
  misc_RNA (1)...(19): siRNA sense strand
ccaagcaccgagagagaau

SEQ ID NO: 2317153 - RNA, 19 nt, Homo sapiens
  misc_RNA (1)...(19): siRNA sense strand
ccgacaugacucaggauau

SEQ ID NO: 2317154 - RNA, 19 nt, Homo sapiens
  misc_RNA (1)...(19): siRNA sense strand
cagaacagaaggacagaca

SEQ ID NO: 2317155 - RNA, 19 nt, Homo sapiens
  misc_RNA (1)...(19): siRNA sense strand
ggaagaagaagaagccgau

SEQ ID NO: 2317156 - RNA, 19 nt, Homo sapiens
  misc_RNA (1)...(19): siRNA sense strand
ggcugaagaaagugacaau

SEQ ID NO: 2317157 - RNA, 19 nt, Homo sapiens
  misc_RNA (1)...(19): siRNA sense strand
aagacaaaguaguagaagu

SEQ ID NO: 2317158 - RNA, 19 nt, Homo sapiens
  misc_RNA (1)...(19): siRNA sense strand
ggaugaaguugaugagcug

SEQ ID NO: 2317159 - RNA, 19 nt, Homo sapiens
  misc_RNA (1)...(19): siRNA sense strand
ccuuggugaugcugaagaa

SEQ ID NO: 2317160 - RNA, 19 nt, Homo sapiens
  misc_RNA (1)...(19): siRNA sense strand
ccgaugaugacgaggacga

SEQ ID NO: 2317161 - RNA, 19 nt, Homo sapiens
  misc_RNA (1)...(19): siRNA sense strand
agaggaagaggcugaggaa

SEQ ID NO: 2317162 - RNA, 19 nt, Homo sapiens
  misc_RNA (1)...(19): siRNA sense strand
gaguggaagccaugcucaa

SEQ ID NO: 2317163 - RNA, 19 nt, Homo sapiens
  misc_RNA (1)...(19): siRNA sense strand
auaucaagacggaggagau

SEQ ID NO: 2317164 - RNA, 19 nt, Homo sapiens
  misc_RNA (1)...(19): siRNA sense strand
gugaagacaaaguaguaga

SEQ ID NO: 2317165 - RNA, 19 nt, Homo sapiens
  misc_RNA (1)...(19): siRNA sense strand
uagaaguagcagaggagga

SEQ ID NO: 2317166 - RNA, 19 nt, Homo sapiens
  misc_RNA (1)...(19): siRNA sense strand
aggaggaagaaguggcuga

SEQ ID NO: 2317167 - RNA, 19 nt, Homo sapiens
  misc_RNA (1)...(19): siRNA sense strand
aagugaagauggaugcaga

SEQ ID NO: 2317168 - RNA, 19 nt, Homo sapiens
  misc_RNA (1)...(19): siRNA sense strand
aggauggauguuugcgaaa

SEQ ID NO: 2317169 - RNA, 19 nt, Homo sapiens
  misc_RNA (1)...(19): siRNA sense strand
ugacaaguuccgaggggua

SEQ ID NO: 2317170 - RNA, 19 nt, Homo sapiens
  misc_RNA (1)...(19): siRNA sense strand
cugaggaacccuacgaaga

SEQ ID NO: 2317171 - RNA, 19 nt, Homo sapiens
  misc_RNA (1)...(19): siRNA sense strand
gcgcagaacagaaggacag

SEQ ID NO: 2317172 - RNA, 19 nt, Homo sapiens
  misc_RNA (1)...(19): siRNA sense strand
cugcauugauaccaaggaa

SEQ ID NO: 2317173 - RNA, 19 nt, Homo sapiens
  misc_RNA (1)...(19): siRNA sense strand
aaguagcagaggaggaaga

SEQ ID NO: 2317174 - RNA, 19 nt, Homo sapiens
  misc_RNA (1)...(19): siRNA sense strand
uagcagaggaggaagaagu

SEQ ID NO: 2317175 - RNA, 19 nt, Homo sapiens
  misc_RNA (1)...(19): siRNA sense strand
gagagaaugucccagguca

SEQ ID NO: 2317176 - RNA, 19 nt, Homo sapiens
  misc_RNA (1)...(19): siRNA sense strand
gaggauggauguuugcgaa

SEQ ID NO: 2317177 - RNA, 19 nt, Homo sapiens
  misc_RNA (1)...(19): siRNA sense strand
aggaagaggcugaggaacc

SEQ ID NO: 2317178 - RNA, 19 nt, Homo sapiens
  misc_RNA (1)...(19): siRNA sense strand
gccaagaagucuacccuga

SEQ ID NO: 2317179 - RNA, 19 nt, Homo sapiens
  misc_RNA (1)...(19): siRNA sense strand
agaaguagcagaggaggaa

SEQ ID NO: 2317180 - RNA, 19 nt, Homo sapiens
  misc_RNA (1)...(19): siRNA sense strand
ccagaaagccaaagagagg

SEQ ID NO: 2317181 - RNA, 19 nt, Homo sapiens
  misc_RNA (1)...(19): siRNA sense strand
ugucccaggucaugagaga

SEQ ID NO: 2317182 - RNA, 19 nt, Homo sapiens
  misc_RNA (1)...(19): siRNA sense strand
aagaagaagaagccgauga

SEQ ID NO: 2317183 - RNA, 19 nt, Homo sapiens
  misc_RNA (1)...(19): siRNA sense strand
gagagaaugggaagaggca

SEQ ID NO: 2317184 - RNA, 19 nt, Homo sapiens
  misc_RNA (1)...(19): siRNA sense strand
gugccagccaacacagaaa

SEQ ID NO: 2317185 - RNA, 19 nt, Homo sapiens
  misc_RNA (1)...(19): siRNA sense strand
aagaaguggcugaggugga

SEQ ID NO: 2317186 - RNA, 19 nt, Homo sapiens
  misc_RNA (1)...(19): siRNA sense strand
uggaagaagaagaagccga

SEQ ID NO: 2317187 - RNA, 19 nt, Homo sapiens
  misc_RNA (1)...(19): siRNA sense strand
uggugaugagguagaggaa

SEQ ID NO: 2317188 - RNA, 19 nt, Homo sapiens
  misc_RNA (1)...(19): siRNA sense strand
aaguggaaucuuuggaaca

SEQ ID NO: 2317189 - RNA, 19 nt, Homo sapiens
  misc_RNA (1)...(19): siRNA sense strand
aagaagaaacaguacacau

SEQ ID NO: 2317190 - RNA, 19 nt, Homo sapiens
  misc_RNA (1)...(19): siRNA sense strand
guuccugacaagugcaaau

SEQ ID NO: 2317191 - RNA, 19 nt, Homo sapiens
  misc_RNA (1)...(19): siRNA sense strand
cagaugggagugaagacaa

SEQ ID NO: 2317192 - RNA, 19 nt, Homo sapiens
  misc_RNA (1)...(19): siRNA sense strand
agagaaugucccaggucau

SEQ ID NO: 2317193 - RNA, 19 nt, Homo sapiens
  misc_RNA (1)...(19): siRNA sense strand
ugccuaaagcugauaagaa

SEQ ID NO: 2317194 - RNA, 19 nt, Homo sapiens
  misc_RNA (1)...(19): siRNA sense strand
ccuacaaguucuuugagca

SEQ ID NO: 2317195 - RNA, 19 nt, Homo sapiens
  misc_RNA (1)...(19): siRNA sense strand
agaaagugacaauguggau

SEQ ID NO: 2317196 - RNA, 19 nt, Homo sapiens
  misc_RNA (1)...(19): siRNA sense strand
cggagcagacacagacuau

SEQ ID NO: 2317197 - RNA, 19 nt, Homo sapiens
  misc_RNA (1)...(19): siRNA sense strand
ccaaggaucaguuacggaa

SEQ ID NO: 2317198 - RNA, 19 nt, Homo sapiens
  misc_RNA (1)...(19): siRNA sense strand
augccaucuuugaccgaaa

SEQ ID NO: 2317199 - RNA, 19 nt, Homo sapiens
  misc_RNA (1)...(19): siRNA sense strand
ugaagauggaugcagaauu

SEQ ID NO: 2317200 - RNA, 19 nt, Homo sapiens
  misc_RNA (1)...(19): siRNA sense strand
uugcagaagauguggguuc

SEQ ID NO: 2317201 - RNA, 19 nt, Homo sapiens
  misc_RNA (1)...(19): siRNA sense strand
cugaagaaagugacaaugu

SEQ ID NO: 2317202 - RNA, 19 nt, Homo sapiens
  misc_RNA (1)...(19): siRNA sense strand
agacuaugcagaugggagu

SEQ ID NO: 2317203 - RNA, 19 nt, Homo sapiens
  misc_RNA (1)...(19): siRNA sense strand
cagaaugggaagugggauu

SEQ ID NO: 2317204 - RNA, 19 nt, Homo sapiens
  misc_RNA (1)...(19): siRNA sense strand
gggaagaggcagaacguca

SEQ ID NO: 2317205 - RNA, 19 nt, Homo sapiens
  misc_RNA (1)...(19): siRNA sense strand
gagaaugggaagaggcaga

SEQ ID NO: 2317206 - RNA, 19 nt, Homo sapiens
  misc_RNA (1)...(19): siRNA sense strand
agaugggagugaagacaaa

SEQ ID NO: 2317207 - RNA, 19 nt, Homo sapiens
  misc_RNA (1)...(19): siRNA sense strand
aagagaggcuugaggccaa

SEQ ID NO: 2317208 - RNA, 19 nt, Homo sapiens
  misc_RNA (1)...(19): siRNA sense strand
agguagaggaagaggcuga

SEQ ID NO: 2317209 - RNA, 19 nt, Homo sapiens
  misc_RNA (1)...(19): siRNA sense strand
cagaugacgucuuggccaa

SEQ ID NO: 2317210 - RNA, 19 nt, Homo sapiens
  misc_RNA (1)...(19): siRNA sense strand
ggucaugagagaaugggaa

SEQ ID NO: 2317211 - RNA, 19 nt, Homo sapiens
  misc_RNA (1)...(19): siRNA sense strand
uggugaugcugaagaagaa

SEQ ID NO: 2317212 - RNA, 19 nt, Homo sapiens
  misc_RNA (1)...(19): siRNA sense strand
aggcagaacgucaagcaaa

SEQ ID NO: 2317213 - RNA, 19 nt, Homo sapiens
  misc_RNA (1)...(19): siRNA sense strand
ccaaugugguagaagccaa

SEQ ID NO: 2317214 - RNA, 19 nt, Homo sapiens
  misc_RNA (1)...(19): siRNA sense strand
ggccaagcaccgagagaga

SEQ ID NO: 2317215 - RNA, 19 nt, Homo sapiens
  misc_RNA (1)...(19): siRNA sense strand
ccuaaagcauuucgagcau

SEQ ID NO: 2317216 - RNA, 19 nt, Homo sapiens
  misc_RNA (1)...(19): siRNA sense strand
ugacaaauaucaagacgga

SEQ ID NO: 2317217 - RNA, 19 nt, Homo sapiens
  misc_RNA (1)...(19): siRNA sense strand
cugcaguggccgaggagau

SEQ ID NO: 2317218 - RNA, 19 nt, Homo sapiens
  misc_RNA (1)...(19): siRNA sense strand
ccaagcaccgagagagaau

SEQ ID NO: 2317219 - RNA, 19 nt, Homo sapiens
  misc_RNA (1)...(19): siRNA sense strand
ccgacaugacucaggauau

SEQ ID NO: 2317220 - RNA, 19 nt, Homo sapiens
  misc_RNA (1)...(19): siRNA sense strand
cagaacagaaggacagaca

SEQ ID NO: 2317221 - RNA, 19 nt, Homo sapiens
  misc_RNA (1)...(19): siRNA sense strand
ggaagaagaagaagccgau

SEQ ID NO: 2317222 - RNA, 19 nt, Homo sapiens
  misc_RNA (1)...(19): siRNA sense strand
ggcugaagaaagugacaau

SEQ ID NO: 2317223 - RNA, 19 nt, Homo sapiens
  misc_RNA (1)...(19): siRNA sense strand
aagacaaaguaguagaagu

SEQ ID NO: 2317224 - RNA, 19 nt, Homo sapiens
  misc_RNA (1)...(19): siRNA sense strand
ggaugaaguugaugagcug

SEQ ID NO: 2317225 - RNA, 19 nt, Homo sapiens
  misc_RNA (1)...(19): siRNA sense strand
ccuuggugaugcugaagaa

SEQ ID NO: 2317226 - RNA, 19 nt, Homo sapiens
  misc_RNA (1)...(19): siRNA sense strand
ccgaugaugacgaggacga

SEQ ID NO: 2317227 - RNA, 19 nt, Homo sapiens
  misc_RNA (1)...(19): siRNA sense strand
agaggaagaggcugaggaa

SEQ ID NO: 2317228 - RNA, 19 nt, Homo sapiens
  misc_RNA (1)...(19): siRNA sense strand
gaguggaagccaugcucaa

SEQ ID NO: 2317229 - RNA, 19 nt, Homo sapiens
  misc_RNA (1)...(19): siRNA sense strand
auaucaagacggaggagau

SEQ ID NO: 2317230 - RNA, 19 nt, Homo sapiens
  misc_RNA (1)...(19): siRNA sense strand
gugaagacaaaguaguaga

SEQ ID NO: 2317231 - RNA, 19 nt, Homo sapiens
  misc_RNA (1)...(19): siRNA sense strand
uagaaguagcagaggagga

SEQ ID NO: 2317232 - RNA, 19 nt, Homo sapiens
  misc_RNA (1)...(19): siRNA sense strand
aggaggaagaaguggcuga

SEQ ID NO: 2317233 - RNA, 19 nt, Homo sapiens
  misc_RNA (1)...(19): siRNA sense strand
aagugaagauggaugcaga

SEQ ID NO: 2317234 - RNA, 19 nt, Homo sapiens
  misc_RNA (1)...(19): siRNA sense strand
aggauggauguuugcgaaa

SEQ ID NO: 2317235 - RNA, 19 nt, Homo sapiens
  misc_RNA (1)...(19): siRNA sense strand
ugacaaguuccgaggggua

SEQ ID NO: 2317236 - RNA, 19 nt, Homo sapiens
  misc_RNA (1)...(19): siRNA sense strand
cugaggaacccuacgaaga

SEQ ID NO: 2317237 - RNA, 19 nt, Homo sapiens
  misc_RNA (1)...(19): siRNA sense strand
gcgcagaacagaaggacag

SEQ ID NO: 2317238 - RNA, 19 nt, Homo sapiens
  misc_RNA (1)...(19): siRNA sense strand
cugcauugauaccaaggaa

SEQ ID NO: 2317239 - RNA, 19 nt, Homo sapiens
  misc_RNA (1)...(19): siRNA sense strand
aaguagcagaggaggaaga

SEQ ID NO: 2317240 - RNA, 19 nt, Homo sapiens
  misc_RNA (1)...(19): siRNA sense strand
uagcagaggaggaagaagu

SEQ ID NO: 2317241 - RNA, 19 nt, Homo sapiens
  misc_RNA (1)...(19): siRNA sense strand
gagagaaugucccagguca

SEQ ID NO: 2317242 - RNA, 19 nt, Homo sapiens
  misc_RNA (1)...(19): siRNA sense strand
gaggauggauguuugcgaa

SEQ ID NO: 2317243 - RNA, 19 nt, Homo sapiens
  misc_RNA (1)...(19): siRNA sense strand
aggaagaggcugaggaacc

SEQ ID NO: 2317244 - RNA, 19 nt, Homo sapiens
  misc_RNA (1)...(19): siRNA sense strand
gccaagaagucuacccuga

SEQ ID NO: 2317245 - RNA, 19 nt, Homo sapiens
  misc_RNA (1)...(19): siRNA sense strand
agaaguagcagaggaggaa

SEQ ID NO: 2317246 - RNA, 19 nt, Homo sapiens
  misc_RNA (1)...(19): siRNA sense strand
ccagaaagccaaagagagg

SEQ ID NO: 2317247 - RNA, 19 nt, Homo sapiens
  misc_RNA (1)...(19): siRNA sense strand
ugucccaggucaugagaga

SEQ ID NO: 2317248 - RNA, 19 nt, Homo sapiens
  misc_RNA (1)...(19): siRNA sense strand
aagaagaagaagccgauga

SEQ ID NO: 2317249 - RNA, 19 nt, Homo sapiens
  misc_RNA (1)...(19): siRNA sense strand
gagagaaugggaagaggca

SEQ ID NO: 2317250 - RNA, 19 nt, Homo sapiens
  misc_RNA (1)...(19): siRNA sense strand
gugccagccaacacagaaa

SEQ ID NO: 2317251 - RNA, 19 nt, Homo sapiens
  misc_RNA (1)...(19): siRNA sense strand
aagaaguggcugaggugga

SEQ ID NO: 2317252 - RNA, 19 nt, Homo sapiens
  misc_RNA (1)...(19): siRNA sense strand
uggaagaagaagaagccga

SEQ ID NO: 2317253 - RNA, 19 nt, Homo sapiens
  misc_RNA (1)...(19): siRNA sense strand
uggugaugagguagaggaa

SEQ ID NO: 2317254 - RNA, 19 nt, Homo sapiens
  misc_RNA (1)...(19): siRNA sense strand
aaguggaaucuuuggaaca

SEQ ID NO: 2317255 - RNA, 19 nt, Homo sapiens
  misc_RNA (1)...(19): siRNA sense strand
aagaagaaacaguacacau

SEQ ID NO: 2317256 - RNA, 19 nt, Homo sapiens
  misc_RNA (1)...(19): siRNA sense strand
guuccugacaagugcaaau

SEQ ID NO: 2317257 - RNA, 19 nt, Homo sapiens
  misc_RNA (1)...(19): siRNA sense strand
cagaugggagugaagacaa

SEQ ID NO: 2317258 - RNA, 19 nt, Homo sapiens
  misc_RNA (1)...(19): siRNA sense strand
agagaaugucccaggucau

SEQ ID NO: 2317259 - RNA, 19 nt, Homo sapiens
  misc_RNA (1)...(19): siRNA sense strand
ugccuaaagcugauaagaa

SEQ ID NO: 2317260 - RNA, 19 nt, Homo sapiens
  misc_RNA (1)...(19): siRNA sense strand
ccuacaaguucuuugagca

SEQ ID NO: 2317261 - RNA, 19 nt, Homo sapiens
  misc_RNA (1)...(19): siRNA sense strand
agaaagugacaauguggau

SEQ ID NO: 2317262 - RNA, 19 nt, Homo sapiens
  misc_RNA (1)...(19): siRNA sense strand
cggagcagacacagacuau

SEQ ID NO: 2317263 - RNA, 19 nt, Homo sapiens
  misc_RNA (1)...(19): siRNA sense strand
ccaaggaucaguuacggaa

SEQ ID NO: 2317264 - RNA, 19 nt, Homo sapiens
  misc_RNA (1)...(19): siRNA sense strand
augccaucuuugaccgaaa

SEQ ID NO: 2317265 - RNA, 19 nt, Homo sapiens
  misc_RNA (1)...(19): siRNA sense strand
ugaagauggaugcagaauu

SEQ ID NO: 2317266 - RNA, 19 nt, Homo sapiens
  misc_RNA (1)...(19): siRNA sense strand
uugcagaagauguggguuc

SEQ ID NO: 2317267 - RNA, 19 nt, Homo sapiens
  misc_RNA (1)...(19): siRNA sense strand
cugaagaaagugacaaugu

SEQ ID NO: 2317268 - RNA, 19 nt, Homo sapiens
  misc_RNA (1)...(19): siRNA sense strand
agacuaugcagaugggagu

SEQ ID NO: 2317269 - RNA, 19 nt, Homo sapiens
  misc_RNA (1)...(19): siRNA sense strand
gggaacuguccaaggccaa

SEQ ID NO: 2317270 - RNA, 19 nt, Homo sapiens
  misc_RNA (1)...(19): siRNA sense strand
gguaaaugaagaaggcagu

SEQ ID NO: 2317271 - RNA, 19 nt, Homo sapiens
  misc_RNA (1)...(19): siRNA sense strand
ugauguaccaggaaggcaa

SEQ ID NO: 2317272 - RNA, 19 nt, Homo sapiens
  misc_RNA (1)...(19): siRNA sense strand
ucuacaaggcugauggaga

SEQ ID NO: 2317273 - RNA, 19 nt, Homo sapiens
  misc_RNA (1)...(19): siRNA sense strand
guccaaacucccagguauu

SEQ ID NO: 2317274 - RNA, 19 nt, Homo sapiens
  misc_RNA (1)...(19): siRNA sense strand
augaauuggaggagaugau

SEQ ID NO: 2317275 - RNA, 19 nt, Homo sapiens
  misc_RNA (1)...(19): siRNA sense strand
agaugaugcugguggucca

SEQ ID NO: 2317276 - RNA, 19 nt, Homo sapiens
  misc_RNA (1)...(19): siRNA sense strand
cugagaagagccuggccaa

SEQ ID NO: 2317277 - RNA, 19 nt, Homo sapiens
  misc_RNA (1)...(19): siRNA sense strand
ugacaccauaucugagaaa

SEQ ID NO: 2317278 - RNA, 19 nt, Homo sapiens
  misc_RNA (1)...(19): siRNA sense strand
acaucagugaguugguaua

SEQ ID NO: 2317279 - RNA, 19 nt, Homo sapiens
  misc_RNA (1)...(19): siRNA sense strand
ccaaguuaguaucagccaa

SEQ ID NO: 2317280 - RNA, 19 nt, Homo sapiens
  misc_RNA (1)...(19): siRNA sense strand
caacugaggaugagggcuc

SEQ ID NO: 2317281 - RNA, 19 nt, Homo sapiens
  misc_RNA (1)...(19): siRNA sense strand
cuacaaggcugauggagag

SEQ ID NO: 2317282 - RNA, 19 nt, Homo sapiens
  misc_RNA (1)...(19): siRNA sense strand
gggugacuuucaaggccaa

SEQ ID NO: 2317283 - RNA, 19 nt, Homo sapiens
  misc_RNA (1)...(19): siRNA sense strand
agcaacugauggagguauu

SEQ ID NO: 2317284 - RNA, 19 nt, Homo sapiens
  misc_RNA (1)...(19): siRNA sense strand
ucaacaaauggguguccaa

SEQ ID NO: 2317285 - RNA, 19 nt, Homo sapiens
  misc_RNA (1)...(19): siRNA sense strand
ccauuuacuucaagggccu

SEQ ID NO: 2317286 - RNA, 19 nt, Homo sapiens
  misc_RNA (1)...(19): siRNA sense strand
cuguggaagucaaaguuca

SEQ ID NO: 2317287 - RNA, 19 nt, Homo sapiens
  misc_RNA (1)...(19): siRNA sense strand
cugaguaucuccacggcuu

SEQ ID NO: 2317288 - RNA, 19 nt, Homo sapiens
  misc_RNA (1)...(19): siRNA sense strand
cccuggacuucaaggaaaa

SEQ ID NO: 2317289 - RNA, 19 nt, Homo sapiens
  misc_RNA (1)...(19): siRNA sense strand
aacaaauggguguccaaua

SEQ ID NO: 2317290 - RNA, 19 nt, Homo sapiens
  misc_RNA (1)...(19): siRNA sense strand
cuguucuggugcugguuaa

SEQ ID NO: 2317291 - RNA, 19 nt, Homo sapiens
  misc_RNA (1)...(19): siRNA sense strand
ccaaagggcagaagggaga

SEQ ID NO: 2317292 - RNA, 19 nt, Homo sapiens
  misc_RNA (1)...(19): siRNA sense strand
acuacgacauggugggcau

SEQ ID NO: 2317293 - RNA, 19 nt, Homo sapiens
  misc_RNA (1)...(19): siRNA sense strand
ggugaggagggcagauaca

SEQ ID NO: 2317294 - RNA, 19 nt, Homo sapiens
  misc_RNA (1)...(19): siRNA sense strand
augaagagguagagggcca

SEQ ID NO: 2317295 - RNA, 19 nt, Homo sapiens
  misc_RNA (1)...(19): siRNA sense strand
agguagagggccaggguuu

SEQ ID NO: 2317296 - RNA, 19 nt, Homo sapiens
  misc_RNA (1)...(19): siRNA sense strand
auaccugacccuagagaau

SEQ ID NO: 2317297 - RNA, 19 nt, Homo sapiens
  misc_RNA (1)...(19): siRNA sense strand
cugucuggaugaagaggua

SEQ ID NO: 2317298 - RNA, 19 nt, Homo sapiens
  misc_RNA (1)...(19): siRNA sense strand
ggaggaagcuguaacgaag

SEQ ID NO: 2317299 - RNA, 19 nt, Homo sapiens
  misc_RNA (1)...(19): siRNA sense strand
aggaggaagcuguaacgaa

SEQ ID NO: 2317300 - RNA, 19 nt, Homo sapiens
  misc_RNA (1)...(19): siRNA sense strand
acgaaguuccugagcucua

SEQ ID NO: 2317301 - RNA, 19 nt, Homo sapiens
  misc_RNA (1)...(19): siRNA sense strand
ccucauccucucuggcaaa

SEQ ID NO: 2317302 - RNA, 19 nt, Homo sapiens
  misc_RNA (1)...(19): siRNA sense strand
gggucaacacugagcucau

SEQ ID NO: 2317303 - RNA, 19 nt, Homo sapiens
  misc_RNA (1)...(19): siRNA sense strand
cugugauccguaagcgaua

SEQ ID NO: 2317304 - RNA, 19 nt, Homo sapiens
  misc_RNA (1)...(19): siRNA sense strand
cccuagagaauguggcuga

SEQ ID NO: 2317305 - RNA, 19 nt, Homo sapiens
  misc_RNA (1)...(19): siRNA sense strand
gagcaggaguuaagcccaa

SEQ ID NO: 2317306 - RNA, 19 nt, Homo sapiens
  misc_RNA (1)...(19): siRNA sense strand
cggagugaagccugggaaa

SEQ ID NO: 2317307 - RNA, 19 nt, Homo sapiens
  misc_RNA (1)...(19): siRNA sense strand
ggaaacugcccuauggcua

SEQ ID NO: 2317308 - RNA, 19 nt, Homo sapiens
  misc_RNA (1)...(19): siRNA sense strand
aggcaaaccucuuaagcca

SEQ ID NO: 2317309 - RNA, 19 nt, Homo sapiens
  misc_RNA (1)...(19): siRNA sense strand
gggcaaggcugguuaccca

SEQ ID NO: 2317310 - RNA, 19 nt, Homo sapiens
  misc_RNA (1)...(19): siRNA sense strand
cuauaaagcugcuaaggcu

SEQ ID NO: 2317311 - RNA, 19 nt, Homo sapiens
  misc_RNA (1)...(19): siRNA sense strand
agguguagguggagcuuuu

SEQ ID NO: 2317312 - RNA, 19 nt, Homo sapiens
  misc_RNA (1)...(19): siRNA sense strand
agccaaauauggagcagca

SEQ ID NO: 2317313 - RNA, 19 nt, Homo sapiens
  misc_RNA (1)...(19): siRNA sense strand
cuuagugccuggugggcca

SEQ ID NO: 2317314 - RNA, 19 nt, Homo sapiens
  misc_RNA (1)...(19): siRNA sense strand
cagaagagcccgagacgga

SEQ ID NO: 2317315 - RNA, 19 nt, Homo sapiens
  misc_RNA (1)...(19): siRNA sense strand
gcaucaagaaccagcguga

SEQ ID NO: 2317316 - RNA, 19 nt, Homo sapiens
  misc_RNA (1)...(19): siRNA sense strand
gggccaugguccagaucau

SEQ ID NO: 2317317 - RNA, 19 nt, Homo sapiens
  misc_RNA (1)...(19): siRNA sense strand
acacaaugcuccagcccuu

SEQ ID NO: 2317318 - RNA, 19 nt, Homo sapiens
  misc_RNA (1)...(19): siRNA sense strand
ccaaccagauugugcgcuu

SEQ ID NO: 2317319 - RNA, 19 nt, Homo sapiens
  misc_RNA (1)...(19): siRNA sense strand
cggcaagugaggaggauug

SEQ ID NO: 2317320 - RNA, 19 nt, Homo sapiens
  misc_RNA (1)...(19): siRNA sense strand
augccauguuaguggauga

SEQ ID NO: 2317321 - RNA, 19 nt, Homo sapiens
  misc_RNA (1)...(19): siRNA sense strand
cugccaagcugaaccguca

SEQ ID NO: 2317322 - RNA, 19 nt, Homo sapiens
  misc_RNA (1)...(19): siRNA sense strand
ucuuuaugcgagagcacaa

SEQ ID NO: 2317323 - RNA, 19 nt, Homo sapiens
  misc_RNA (1)...(19): siRNA sense strand
aggccaaguugcuggugga

SEQ ID NO: 2317324 - RNA, 19 nt, Homo sapiens
  misc_RNA (1)...(19): siRNA sense strand
auuauaugcauguggcuuu

SEQ ID NO: 2317325 - RNA, 19 nt, Homo sapiens
  misc_RNA (1)...(19): siRNA sense strand
agaccgaagaggagggaga

SEQ ID NO: 2317326 - RNA, 19 nt, Homo sapiens
  misc_RNA (1)...(19): siRNA sense strand
ugaugaaucugcagggaga

SEQ ID NO: 2317327 - RNA, 19 nt, Homo sapiens
  misc_RNA (1)...(19): siRNA sense strand
aaugaugaaaggugggaua

SEQ ID NO: 2317328 - RNA, 19 nt, Homo sapiens
  misc_RNA (1)...(19): siRNA sense strand
gaaaauguguagagggcau

SEQ ID NO: 2317329 - RNA, 19 nt, Homo sapiens
  misc_RNA (1)...(19): siRNA sense strand
uggacaggaaccagggaaa

SEQ ID NO: 2317330 - RNA, 19 nt, Homo sapiens
  misc_RNA (1)...(19): siRNA sense strand
ggacaagaucacagacacu

SEQ ID NO: 2317331 - RNA, 19 nt, Homo sapiens
  misc_RNA (1)...(19): siRNA sense strand
ccaggguggcagagaaaga

SEQ ID NO: 2317332 - RNA, 19 nt, Homo sapiens
  misc_RNA (1)...(19): siRNA sense strand
agagaaguauucaaggaca

SEQ ID NO: 2317333 - RNA, 19 nt, Homo sapiens
  misc_RNA (1)...(19): siRNA sense strand
ggacaggaaccagggaaaa

SEQ ID NO: 2317334 - RNA, 19 nt, Homo sapiens
  misc_RNA (1)...(19): siRNA sense strand
acgaagugggaaugaugaa

SEQ ID NO: 2317335 - RNA, 19 nt, Homo sapiens
  misc_RNA (1)...(19): siRNA sense strand
guaacaaaggcauggagca

SEQ ID NO: 2317336 - RNA, 19 nt, Homo sapiens
  misc_RNA (1)...(19): siRNA sense strand
cgaagagggugccaggcuu

SEQ ID NO: 2317337 - RNA, 19 nt, Homo sapiens
  misc_RNA (1)...(19): siRNA sense strand
uguacagcaugaagugcaa

SEQ ID NO: 2317338 - RNA, 19 nt, Homo sapiens
  misc_RNA (1)...(19): siRNA sense strand
agggcaugguggagaucuu

SEQ ID NO: 2317339 - RNA, 19 nt, Homo sapiens
  misc_RNA (1)...(19): siRNA sense strand
gagaggaguuugugugccu

SEQ ID NO: 2317340 - RNA, 19 nt, Homo sapiens
  misc_RNA (1)...(19): siRNA sense strand
gacaagggaaguauggcua

SEQ ID NO: 2317341 - RNA, 19 nt, Homo sapiens
  misc_RNA (1)...(19): siRNA sense strand
aaugcuacgaagugggaau

SEQ ID NO: 2317342 - RNA, 19 nt, Homo sapiens
  misc_RNA (1)...(19): siRNA sense strand
gcaugaagugcaagaacgu

SEQ ID NO: 2317343 - RNA, 19 nt, Homo sapiens
  misc_RNA (1)...(19): siRNA sense strand
gggaaguauggcuauggaa

SEQ ID NO: 2317344 - RNA, 19 nt, Homo sapiens
  misc_RNA (1)...(19): siRNA sense strand
gcaucagauccaagggaac

SEQ ID NO: 2317345 - RNA, 19 nt, Homo sapiens
  misc_RNA (1)...(19): siRNA sense strand
gaaaggugggauacgaaaa

SEQ ID NO: 2317346 - RNA, 19 nt, Homo sapiens
  misc_RNA (1)...(19): siRNA sense strand
acgaaaagaccgaagagga

SEQ ID NO: 2317347 - RNA, 19 nt, Homo sapiens
  misc_RNA (1)...(19): siRNA sense strand
cccugaagucucuggaaga

SEQ ID NO: 2317348 - RNA, 19 nt, Homo sapiens
  misc_RNA (1)...(19): siRNA sense strand
guguagagggcauggugga

SEQ ID NO: 2317349 - RNA, 19 nt, Homo sapiens
  misc_RNA (1)...(19): siRNA sense strand
ccggcauucuacaggccaa

SEQ ID NO: 2317350 - RNA, 19 nt, Homo sapiens
  misc_RNA (1)...(19): siRNA sense strand
aacacaagcgccagagaga

SEQ ID NO: 2317351 - RNA, 19 nt, Homo sapiens
  misc_RNA (1)...(19): siRNA sense strand
uugcaauagagaaagaaga

SEQ ID NO: 2317352 - RNA, 19 nt, Homo sapiens
  misc_RNA (1)...(19): siRNA sense strand
gcuggaaacugcaggagga

SEQ ID NO: 2317353 - RNA, 19 nt, Homo sapiens
  misc_RNA (1)...(19): siRNA sense strand
cuguuguggucgugcuaaa

SEQ ID NO: 2317354 - RNA, 19 nt, Homo sapiens
  misc_RNA (1)...(19): siRNA sense strand
aggaagauaccaagcucaa

SEQ ID NO: 2317355 - RNA, 19 nt, Homo sapiens
  misc_RNA (1)...(19): siRNA sense strand
aagccuuugaguaggguaa

SEQ ID NO: 2317356 - RNA, 19 nt, Homo sapiens
  misc_RNA (1)...(19): siRNA sense strand
gaguacacgcagugggcga

SEQ ID NO: 2317357 - RNA, 19 nt, Homo sapiens
  misc_RNA (1)...(19): siRNA sense strand
gggcaaaggugguacugac

SEQ ID NO: 2317358 - RNA, 19 nt, Homo sapiens
  misc_RNA (1)...(19): siRNA sense strand
gggcagugacagcugaaaa

SEQ ID NO: 2317359 - RNA, 19 nt, Homo sapiens
  misc_RNA (1)...(19): siRNA sense strand
caggcagugucgugggcau

SEQ ID NO: 2317360 - RNA, 19 nt, Homo sapiens
  misc_RNA (1)...(19): siRNA sense strand
ugaaguuccuggaugccua

SEQ ID NO: 2317361 - RNA, 19 nt, Homo sapiens
  misc_RNA (1)...(19): siRNA sense strand
aggaaugucccaagccuuu

SEQ ID NO: 2317362 - RNA, 19 nt, Homo sapiens
  misc_RNA (1)...(19): siRNA sense strand
gcaccuacaccuaugcaga

SEQ ID NO: 2317363 - RNA, 19 nt, Homo sapiens
  misc_RNA (1)...(19): siRNA sense strand
cugcaagcccuuuggcaau

SEQ ID NO: 2317364 - RNA, 19 nt, Homo sapiens
  misc_RNA (1)...(19): siRNA sense strand
ugaaccaggucuauggcua

SEQ ID NO: 2317365 - RNA, 19 nt, Homo sapiens
  misc_RNA (1)...(19): siRNA sense strand
cccagaaggcagagaagga

SEQ ID NO: 2317366 - RNA, 19 nt, Homo sapiens
  misc_RNA (1)...(19): siRNA sense strand
agaaggaagugacgcgcau

SEQ ID NO: 2317367 - RNA, 19 nt, Homo sapiens
  misc_RNA (1)...(19): siRNA sense strand
ggaagaagguugacgaugg

SEQ ID NO: 2317368 - RNA, 19 nt, Homo sapiens
  misc_RNA (1)...(19): siRNA sense strand
uguguguccuggagggcua

SEQ ID NO: 2317369 - RNA, 19 nt, Homo sapiens
  misc_RNA (1)...(19): siRNA sense strand
gauggaugguggucugcaa

SEQ ID NO: 2317370 - RNA, 19 nt, Homo sapiens
  misc_RNA (1)...(19): siRNA sense strand
ccauccgagcgguggcaaa

SEQ ID NO: 2317371 - RNA, 19 nt, Homo sapiens
  misc_RNA (1)...(19): siRNA sense strand
cuaucagcguugugaacca

SEQ ID NO: 2317372 - RNA, 19 nt, Homo sapiens
  misc_RNA (1)...(19): siRNA sense strand
gcguugugaaccaggucua

SEQ ID NO: 2317373 - RNA, 19 nt, Homo sapiens
  misc_RNA (1)...(19): siRNA sense strand
ccuuuggcaaugugagauu

SEQ ID NO: 2317374 - RNA, 19 nt, Homo sapiens
  misc_RNA (1)...(19): siRNA sense strand
caucauuuccugggagaga

SEQ ID NO: 2317375 - RNA, 19 nt, Homo sapiens
  misc_RNA (1)...(19): siRNA sense strand
gcuacuucgugcugggcca

SEQ ID NO: 2317376 - RNA, 19 nt, Homo sapiens
  misc_RNA (1)...(19): siRNA sense strand
gcaacgaagucaaggccau

SEQ ID NO: 2317377 - RNA, 19 nt, Homo sapiens
  misc_RNA (1)...(19): siRNA sense strand
cagagaagaaugaggccuu

SEQ ID NO: 2317378 - RNA, 19 nt, Homo sapiens
  misc_RNA (1)...(19): siRNA sense strand
cuacauugcacuagaaacu

SEQ ID NO: 2317379 - RNA, 19 nt, Homo sapiens
  misc_RNA (1)...(19): siRNA sense strand
gaaacuauauccacaucaa

SEQ ID NO: 2317380 - RNA, 19 nt, Homo sapiens
  misc_RNA (1)...(19): siRNA sense strand
gaacgguaccgcagggagu

SEQ ID NO: 2317381 - RNA, 19 nt, Homo sapiens
  misc_RNA (1)...(19): siRNA sense strand
acuagaaacuauauccaca

SEQ ID NO: 2317382 - RNA, 19 nt, Homo sapiens
  misc_RNA (1)...(19): siRNA sense strand
gcaaaugcgcugccgggau

SEQ ID NO: 2317383 - RNA, 19 nt, Homo sapiens
  misc_RNA (1)...(19): siRNA sense strand
ucauguacacugucggcua

SEQ ID NO: 2317384 - RNA, 19 nt, Homo sapiens
  misc_RNA (1)...(19): siRNA sense strand
gggcuagagcacuggacaa

SEQ ID NO: 2317385 - RNA, 19 nt, Homo sapiens
  misc_RNA (1)...(19): siRNA sense strand
gcagaugguuauaagcaca

SEQ ID NO: 2317386 - RNA, 19 nt, Homo sapiens
  misc_RNA (1)...(19): siRNA sense strand
ugauaaaccggcaggagau

SEQ ID NO: 2317387 - RNA, 19 nt, Homo sapiens
  misc_RNA (1)...(19): siRNA sense strand
aagcccaauuauacagaaa

SEQ ID NO: 2317388 - RNA, 19 nt, Homo sapiens
  misc_RNA (1)...(19): siRNA sense strand
aggcagacccucagcgcuu

SEQ ID NO: 2317389 - RNA, 19 nt, Homo sapiens
  misc_RNA (1)...(19): siRNA sense strand
cugaauaggacuggcagaa

SEQ ID NO: 2317390 - RNA, 19 nt, Homo sapiens
  misc_RNA (1)...(19): siRNA sense strand
gcgaaauuuugcugacauu

SEQ ID NO: 2317391 - RNA, 19 nt, Homo sapiens
  misc_RNA (1)...(19): siRNA sense strand
cuuuuaaccaggagagaau

SEQ ID NO: 2317392 - RNA, 19 nt, Homo sapiens
  misc_RNA (1)...(19): siRNA sense strand
aggacugaagcuagggauu

SEQ ID NO: 2317393 - RNA, 19 nt, Homo sapiens
  misc_RNA (1)...(19): siRNA sense strand
ucagaaggcuggaaggaug

SEQ ID NO: 2317394 - RNA, 19 nt, Homo sapiens
  misc_RNA (1)...(19): siRNA sense strand
cuggaaaaguauaaagagu

SEQ ID NO: 2317395 - RNA, 19 nt, Homo sapiens
  misc_RNA (1)...(19): siRNA sense strand
augauaaaccggcaggaga

SEQ ID NO: 2317396 - RNA, 19 nt, Homo sapiens
  misc_RNA (1)...(19): siRNA sense strand
aagguuaagaagucacaua

SEQ ID NO: 2317397 - RNA, 19 nt, Homo sapiens
  misc_RNA (1)...(19): siRNA sense strand
agguuaagaagucacauaa

SEQ ID NO: 2317398 - RNA, 19 nt, Homo sapiens
  misc_RNA (1)...(19): siRNA sense strand
cagcuuagacagggagaca

SEQ ID NO: 2317399 - RNA, 19 nt, Homo sapiens
  misc_RNA (1)...(19): siRNA sense strand
ccaaagagauucagaaggc

SEQ ID NO: 2317400 - RNA, 19 nt, Homo sapiens
  misc_RNA (1)...(19): siRNA sense strand
aaaauuuggcagaugguua

SEQ ID NO: 2317401 - RNA, 19 nt, Homo sapiens
  misc_RNA (1)...(19): siRNA sense strand
gguuggaaugacccagaua

SEQ ID NO: 2317402 - RNA, 19 nt, Homo sapiens
  misc_RNA (1)...(19): siRNA sense strand
uggcagaagcauuguguac

SEQ ID NO: 2317403 - RNA, 19 nt, Homo sapiens
  misc_RNA (1)...(19): siRNA sense strand
auauguuagugauuggcaa

SEQ ID NO: 2317404 - RNA, 19 nt, Homo sapiens
  misc_RNA (1)...(19): siRNA sense strand
ggggaguagaucugcuaaa

SEQ ID NO: 2317405 - RNA, 19 nt, Homo sapiens
  misc_RNA (1)...(19): siRNA sense strand
gcuuagacagggagacaac

SEQ ID NO: 2317406 - RNA, 19 nt, Homo sapiens
  misc_RNA (1)...(19): siRNA sense strand
uggcagagcucauggucuc

SEQ ID NO: 2317407 - RNA, 19 nt, Homo sapiens
  misc_RNA (1)...(19): siRNA sense strand
ccugaauaggacuggcaga

SEQ ID NO: 2317408 - RNA, 19 nt, Homo sapiens
  misc_RNA (1)...(19): siRNA sense strand
gcaggagauugguggaccu

SEQ ID NO: 2317409 - RNA, 19 nt, Homo sapiens
  misc_RNA (1)...(19): siRNA sense strand
cauaaaucccacaggcacu

SEQ ID NO: 2317410 - RNA, 19 nt, Homo sapiens
  misc_RNA (1)...(19): siRNA sense strand
agggaguccuugagcgaaa

SEQ ID NO: 2317411 - RNA, 19 nt, Homo sapiens
  misc_RNA (1)...(19): siRNA sense strand
agggaaagcuggagccacu

SEQ ID NO: 2317412 - RNA, 19 nt, Homo sapiens
  misc_RNA (1)...(19): siRNA sense strand
ccuccaaaccuguugaaaa

SEQ ID NO: 2317413 - RNA, 19 nt, Homo sapiens
  misc_RNA (1)...(19): siRNA sense strand
aggaccaugauguggaaua

SEQ ID NO: 2317414 - RNA, 19 nt, Homo sapiens
  misc_RNA (1)...(19): siRNA sense strand
cuaucagaauggagggcca

SEQ ID NO: 2317415 - RNA, 19 nt, Homo sapiens
  misc_RNA (1)...(19): siRNA sense strand
ucugaacauaacagggaaa

SEQ ID NO: 2317416 - RNA, 19 nt, Homo sapiens
  misc_RNA (1)...(19): siRNA sense strand
acccagaggauguuugaaa

SEQ ID NO: 2317417 - RNA, 19 nt, Homo sapiens
  misc_RNA (1)...(19): siRNA sense strand
uggaaaaguuaaagacagu

SEQ ID NO: 2317418 - RNA, 19 nt, Homo sapiens
  misc_RNA (1)...(19): siRNA sense strand
cauuuauccaggugaaaca

SEQ ID NO: 2317419 - RNA, 19 nt, Homo sapiens
  misc_RNA (1)...(19): siRNA sense strand
acaugggacgugugaacua

SEQ ID NO: 2317420 - RNA, 19 nt, Homo sapiens
  misc_RNA (1)...(19): siRNA sense strand
agaggaagugugagcccaa

SEQ ID NO: 2317421 - RNA, 19 nt, Homo sapiens
  misc_RNA (1)...(19): siRNA sense strand
ccagggaguccuugagcga

SEQ ID NO: 2317422 - RNA, 19 nt, Homo sapiens
  misc_RNA (1)...(19): siRNA sense strand
aguuaaagacagugggagc

SEQ ID NO: 2317423 - RNA, 19 nt, Homo sapiens
  misc_RNA (1)...(19): siRNA sense strand
ugaaacagcauuauggguu

SEQ ID NO: 2317424 - RNA, 19 nt, Homo sapiens
  misc_RNA (1)...(19): siRNA sense strand
aaacaaagauucauggcug

SEQ ID NO: 2317425 - RNA, 19 nt, Homo sapiens
  misc_RNA (1)...(19): siRNA sense strand
caaucaagaccgaagcagu

SEQ ID NO: 2317426 - RNA, 19 nt, Homo sapiens
  misc_RNA (1)...(19): siRNA sense strand
gggacaaagaccagagaga

SEQ ID NO: 2317427 - RNA, 19 nt, Homo sapiens
  misc_RNA (1)...(19): siRNA sense strand
ccacugagucggaggacaa

SEQ ID NO: 2317428 - RNA, 19 nt, Homo sapiens
  misc_RNA (1)...(19): siRNA sense strand
ucaugaaaccagagaacaa

SEQ ID NO: 2317429 - RNA, 19 nt, Homo sapiens
  misc_RNA (1)...(19): siRNA sense strand
uggauaagcacaaggagaa

SEQ ID NO: 2317430 - RNA, 19 nt, Homo sapiens
  misc_RNA (1)...(19): siRNA sense strand
ggaaagaaguguaucgucu

SEQ ID NO: 2317431 - RNA, 19 nt, Homo sapiens
  misc_RNA (1)...(19): siRNA sense strand
aagagaugccacugggaaa

SEQ ID NO: 2317432 - RNA, 19 nt, Homo sapiens
  misc_RNA (1)...(19): siRNA sense strand
uguccagacucgagccaaa

SEQ ID NO: 2317433 - RNA, 19 nt, Homo sapiens
  misc_RNA (1)...(19): siRNA sense strand
caacacauucggagagaca

SEQ ID NO: 2317434 - RNA, 19 nt, Homo sapiens
  misc_RNA (1)...(19): siRNA sense strand
ugaaaagacccuugaaaau

SEQ ID NO: 2317435 - RNA, 19 nt, Homo sapiens
  misc_RNA (1)...(19): siRNA sense strand
gggcaaauaugaaugcuca

SEQ ID NO: 2317436 - RNA, 19 nt, Homo sapiens
  misc_RNA (1)...(19): siRNA sense strand
cacaacaagaggaggaaau

SEQ ID NO: 2317437 - RNA, 19 nt, Homo sapiens
  misc_RNA (1)...(19): siRNA sense strand
guggauaagcacaaggaga

SEQ ID NO: 2317438 - RNA, 19 nt, Homo sapiens
  misc_RNA (1)...(19): siRNA sense strand
ccaucggagugaagaaaca

SEQ ID NO: 2317439 - RNA, 19 nt, Homo sapiens
  misc_RNA (1)...(19): siRNA sense strand
gagaaugaugccuggaaga

SEQ ID NO: 2317440 - RNA, 19 nt, Homo sapiens
  misc_RNA (1)...(19): siRNA sense strand
cugcaaauauugaggcugu

SEQ ID NO: 2317441 - RNA, 19 nt, Homo sapiens
  misc_RNA (1)...(19): siRNA sense strand
gcauauugcuaggagggua

SEQ ID NO: 2317442 - RNA, 19 nt, Homo sapiens
  misc_RNA (1)...(19): siRNA sense strand
cugcagaacugguugcuga

SEQ ID NO: 2317443 - RNA, 19 nt, Homo sapiens
  misc_RNA (1)...(19): siRNA sense strand
ugguauuucucuugaugaa

SEQ ID NO: 2317444 - RNA, 19 nt, Homo sapiens
  misc_RNA (1)...(19): siRNA sense strand
ggccaagcgauuagaaaca

SEQ ID NO: 2317445 - RNA, 19 nt, Homo sapiens
  misc_RNA (1)...(19): siRNA sense strand
agacacaacaagaggagga

SEQ ID NO: 2317446 - RNA, 19 nt, Homo sapiens
  misc_RNA (1)...(19): siRNA sense strand
ccagagauuuggagugcca

SEQ ID NO: 2317447 - RNA, 19 nt, Homo sapiens
  misc_RNA (1)...(19): siRNA sense strand
acuuaaaccagaaaggaga

SEQ ID NO: 2317448 - RNA, 19 nt, Homo sapiens
  misc_RNA (1)...(19): siRNA sense strand
gcucagugaaggaggucuu

SEQ ID NO: 2317449 - RNA, 19 nt, Homo sapiens
  misc_RNA (1)...(19): siRNA sense strand
acaugaagaaacuggaaaa

SEQ ID NO: 2317450 - RNA, 19 nt, Homo sapiens
  misc_RNA (1)...(19): siRNA sense strand
ccuaucacauggaaagaau

SEQ ID NO: 2317451 - RNA, 19 nt, Homo sapiens
  misc_RNA (1)...(19): siRNA sense strand
cugaaguuacccugugaaa

SEQ ID NO: 2317452 - RNA, 19 nt, Homo sapiens
  misc_RNA (1)...(19): siRNA sense strand
cgauauuaaaugccaacua

SEQ ID NO: 2317453 - RNA, 19 nt, Homo sapiens
  misc_RNA (1)...(19): siRNA sense strand
uggaucaagcucaaggaua

SEQ ID NO: 2317454 - RNA, 19 nt, Homo sapiens
  misc_RNA (1)...(19): siRNA sense strand
gguggauaaauaugggaau

SEQ ID NO: 2317455 - RNA, 19 nt, Homo sapiens
  misc_RNA (1)...(19): siRNA sense strand
acggaaacugcgauauuaa

SEQ ID NO: 2317456 - RNA, 19 nt, Homo sapiens
  misc_RNA (1)...(19): siRNA sense strand
cauggaaagaauuugcaaa

SEQ ID NO: 2317457 - RNA, 19 nt, Homo sapiens
  misc_RNA (1)...(19): siRNA sense strand
ggaggaaauuucucguuga

SEQ ID NO: 2317458 - RNA, 19 nt, Homo sapiens
  misc_RNA (1)...(19): siRNA sense strand
cuuaaacaagccacggaaa

SEQ ID NO: 2317459 - RNA, 19 nt, Homo sapiens
  misc_RNA (1)...(19): siRNA sense strand
cguauauuggcaugggcua

SEQ ID NO: 2317460 - RNA, 19 nt, Homo sapiens
  misc_RNA (1)...(19): siRNA sense strand
gguggaagacuuuacggaa

SEQ ID NO: 2317461 - RNA, 19 nt, Homo sapiens
  misc_RNA (1)...(19): siRNA sense strand
ccaugguggauaagcacaa

SEQ ID NO: 2317462 - RNA, 19 nt, Homo sapiens
  misc_RNA (1)...(19): siRNA sense strand
uugaaaagacccuugaaaa

SEQ ID NO: 2317463 - RNA, 19 nt, Homo sapiens
  misc_RNA (1)...(19): siRNA sense strand
gcucagugccacagacgau

SEQ ID NO: 2317464 - RNA, 19 nt, Homo sapiens
  misc_RNA (1)...(19): siRNA sense strand
uagaaacacacuacagaau

SEQ ID NO: 2317465 - RNA, 19 nt, Homo sapiens
  misc_RNA (1)...(19): siRNA sense strand
gggucaauccgcugaagau

SEQ ID NO: 2317466 - RNA, 19 nt, Homo sapiens
  misc_RNA (1)...(19): siRNA sense strand
acuacauggccaagcgauu

SEQ ID NO: 2317467 - RNA, 19 nt, Homo sapiens
  misc_RNA (1)...(19): siRNA sense strand
aggggaggcuggagaguuu

SEQ ID NO: 2317468 - RNA, 19 nt, Homo sapiens
  misc_RNA (1)...(19): siRNA sense strand
agucggaggacaaggcaga

SEQ ID NO: 2317469 - RNA, 19 nt, Homo sapiens
  misc_RNA (1)...(19): siRNA sense strand
guggaagacuuuacggaac

SEQ ID NO: 2317470 - RNA, 19 nt, Homo sapiens
  misc_RNA (1)...(19): siRNA sense strand
aggaaauugcugacauuga

SEQ ID NO: 2317471 - RNA, 19 nt, Homo sapiens
  misc_RNA (1)...(19): siRNA sense strand
gcuaccacucugaaacaaa

SEQ ID NO: 2317472 - RNA, 19 nt, Homo sapiens
  misc_RNA (1)...(19): siRNA sense strand
agccuguggagguggauaa

SEQ ID NO: 2317473 - RNA, 19 nt, Homo sapiens
  misc_RNA (1)...(19): siRNA sense strand
uggcgagcauugaugaauu

SEQ ID NO: 2317474 - RNA, 19 nt, Homo sapiens
  misc_RNA (1)...(19): siRNA sense strand
ggagcaacacauucggaga

SEQ ID NO: 2317475 - RNA, 19 nt, Homo sapiens
  misc_RNA (1)...(19): siRNA sense strand
cggcucagcggcagaucaa

SEQ ID NO: 2317476 - RNA, 19 nt, Homo sapiens
  misc_RNA (1)...(19): siRNA sense strand
uugagaaggauuuguguga

SEQ ID NO: 2317477 - RNA, 19 nt, Homo sapiens
  misc_RNA (1)...(19): siRNA sense strand
cggaaacugcgauauuaaa

SEQ ID NO: 2317478 - RNA, 19 nt, Homo sapiens
  misc_RNA (1)...(19): siRNA sense strand
caagagguuauguggguca

SEQ ID NO: 2317479 - RNA, 19 nt, Homo sapiens
  misc_RNA (1)...(19): siRNA sense strand
aggcuguggauguggccaa

SEQ ID NO: 2317480 - RNA, 19 nt, Homo sapiens
  misc_RNA (1)...(19): siRNA sense strand
uggaagacuuuacggaacu

SEQ ID NO: 2317481 - RNA, 19 nt, Homo sapiens
  misc_RNA (1)...(19): siRNA sense strand
acauaaugccacuuugauu

SEQ ID NO: 2317482 - RNA, 19 nt, Homo sapiens
  misc_RNA (1)...(19): siRNA sense strand
ucucaagcgagcagggcau

SEQ ID NO: 2317483 - RNA, 19 nt, Homo sapiens
  misc_RNA (1)...(19): siRNA sense strand
aggacaaggcagagcugga

SEQ ID NO: 2317484 - RNA, 19 nt, Homo sapiens
  misc_RNA (1)...(19): siRNA sense strand
ccgagaaagcuuggugaga

SEQ ID NO: 2317485 - RNA, 19 nt, Homo sapiens
  misc_RNA (1)...(19): siRNA sense strand
ugaaggaggucuugggcag

SEQ ID NO: 2317486 - RNA, 19 nt, Homo sapiens
  misc_RNA (1)...(19): siRNA sense strand
agaggagugcagagguauu

SEQ ID NO: 2317487 - RNA, 19 nt, Homo sapiens
  misc_RNA (1)...(19): siRNA sense strand
agaagaaagagaaagggaa

SEQ ID NO: 2317488 - RNA, 19 nt, Homo sapiens
  misc_RNA (1)...(19): siRNA sense strand
gacacagaagaaagagaaa

SEQ ID NO: 2317489 - RNA, 19 nt, Homo sapiens
  misc_RNA (1)...(19): siRNA sense strand
cagaagaaagagaaaggga

SEQ ID NO: 2317490 - RNA, 19 nt, Homo sapiens
  misc_RNA (1)...(19): siRNA sense strand
cuggaugggauguggaaca

SEQ ID NO: 2317491 - RNA, 19 nt, Homo sapiens
  misc_RNA (1)...(19): siRNA sense strand
gaacaauauaccaagagca

SEQ ID NO: 2317492 - RNA, 19 nt, Homo sapiens
  misc_RNA (1)...(19): siRNA sense strand
ccuucaugaugguggugau

SEQ ID NO: 2317493 - RNA, 19 nt, Homo sapiens
  misc_RNA (1)...(19): siRNA sense strand
gguauugguuugauccuga

SEQ ID NO: 2317494 - RNA, 19 nt, Homo sapiens
  misc_RNA (1)...(19): siRNA sense strand
gcaacagcaaagucggaca

SEQ ID NO: 2317495 - RNA, 19 nt, Homo sapiens
  misc_RNA (1)...(19): siRNA sense strand
uguccuaggaauuugguau

SEQ ID NO: 2317496 - RNA, 19 nt, Homo sapiens
  misc_RNA (1)...(19): siRNA sense strand
uggaagaaguggugcguag

SEQ ID NO: 2317497 - RNA, 19 nt, Homo sapiens
  misc_RNA (1)...(19): siRNA sense strand
aaaacaaagucguggcgaa

SEQ ID NO: 2317498 - RNA, 19 nt, Homo sapiens
  misc_RNA (1)...(19): siRNA sense strand
cgacgagagugcuggggaa

SEQ ID NO: 2317499 - RNA, 19 nt, Homo sapiens
  misc_RNA (1)...(19): siRNA sense strand
gguacgaacgggaggugau

SEQ ID NO: 2317500 - RNA, 19 nt, Homo sapiens
  misc_RNA (1)...(19): siRNA sense strand
cugugaccuuugugagcaa

SEQ ID NO: 2317501 - RNA, 19 nt, Homo sapiens
  misc_RNA (1)...(19): siRNA sense strand
agucacaauguuuggaaaa

SEQ ID NO: 2317502 - RNA, 19 nt, Homo sapiens
  misc_RNA (1)...(19): siRNA sense strand
ggucgacacgcuagagcau

SEQ ID NO: 2317503 - RNA, 19 nt, Homo sapiens
  misc_RNA (1)...(19): siRNA sense strand
gaaguggugcguagggaca

SEQ ID NO: 2317504 - RNA, 19 nt, Homo sapiens
  misc_RNA (1)...(19): siRNA sense strand
ugauguggucuguggccaa

SEQ ID NO: 2317505 - RNA, 19 nt, Homo sapiens
  misc_RNA (1)...(19): siRNA sense strand
cagaaacgauugcaggguu

SEQ ID NO: 2317506 - RNA, 19 nt, Homo sapiens
  misc_RNA (1)...(19): siRNA sense strand
cuaacuaugcagcagacaa

SEQ ID NO: 2317507 - RNA, 19 nt, Homo sapiens
  misc_RNA (1)...(19): siRNA sense strand
ugguauaagaaguaucaga

SEQ ID NO: 2317508 - RNA, 19 nt, Homo sapiens
  misc_RNA (1)...(19): siRNA sense strand
aagucacaauguuuggaaa

SEQ ID NO: 2317509 - RNA, 19 nt, Homo sapiens
  misc_RNA (1)...(19): siRNA sense strand
cauuauucagagcgaguau

SEQ ID NO: 2317510 - RNA, 19 nt, Homo sapiens
  misc_RNA (1)...(19): siRNA sense strand
ucacugaagaguaccagaa

SEQ ID NO: 2317511 - RNA, 19 nt, Homo sapiens
  misc_RNA (1)...(19): siRNA sense strand
ccaucugggucuggaucaa

SEQ ID NO: 2317512 - RNA, 19 nt, Homo sapiens
  misc_RNA (1)...(19): siRNA sense strand
gguuauaagccgaaggcau

SEQ ID NO: 2317513 - RNA, 19 nt, Homo sapiens
  misc_RNA (1)...(19): siRNA sense strand
cuucaaaguaccaggaaaa

SEQ ID NO: 2317514 - RNA, 19 nt, Homo sapiens
  misc_RNA (1)...(19): siRNA sense strand
ccuucaaaguaccaggaaa

SEQ ID NO: 2317515 - RNA, 19 nt, Homo sapiens
  misc_RNA (1)...(19): siRNA sense strand
gcagaaaacuacaugggua

SEQ ID NO: 2317516 - RNA, 19 nt, Homo sapiens
  misc_RNA (1)...(19): siRNA sense strand
cgaagaagacguuagccaa

SEQ ID NO: 2317517 - RNA, 19 nt, Homo sapiens
  misc_RNA (1)...(19): siRNA sense strand
aaggcauauuugagggauu

SEQ ID NO: 2317518 - RNA, 19 nt, Homo sapiens
  misc_RNA (1)...(19): siRNA sense strand
cuccaaaaguucuagaaaa

SEQ ID NO: 2317519 - RNA, 19 nt, Homo sapiens
  misc_RNA (1)...(19): siRNA sense strand
gauacaguuaccaaagaua

SEQ ID NO: 2317520 - RNA, 19 nt, Homo sapiens
  misc_RNA (1)...(19): siRNA sense strand
auaaagaccugaugccaca

SEQ ID NO: 2317521 - RNA, 19 nt, Homo sapiens
  misc_RNA (1)...(19): siRNA sense strand
acgaagaagacguuagcca

SEQ ID NO: 2317522 - RNA, 19 nt, Homo sapiens
  misc_RNA (1)...(19): siRNA sense strand
cugcauucaucaagcccua

SEQ ID NO: 2317523 - RNA, 19 nt, Homo sapiens
  misc_RNA (1)...(19): siRNA sense strand
ggaauguugugguggugga

SEQ ID NO: 2317524 - RNA, 19 nt, Homo sapiens
  misc_RNA (1)...(19): siRNA sense strand
caauguggcuagagaggcu

SEQ ID NO: 2317525 - RNA, 19 nt, Homo sapiens
  misc_RNA (1)...(19): siRNA sense strand
aggcucuggccauggguua

SEQ ID NO: 2317526 - RNA, 19 nt, Homo sapiens
  misc_RNA (1)...(19): siRNA sense strand
aggaaaaggcucuggccau

SEQ ID NO: 2317527 - RNA, 19 nt, Homo sapiens
  misc_RNA (1)...(19): siRNA sense strand
ugccaacagauuacggaaa

SEQ ID NO: 2317528 - RNA, 19 nt, Homo sapiens
  misc_RNA (1)...(19): siRNA sense strand
gaaaagauacaguuaccaa

SEQ ID NO: 2317529 - RNA, 19 nt, Homo sapiens
  misc_RNA (1)...(19): siRNA sense strand
aggcacaggaugaaggacu

SEQ ID NO: 2317530 - RNA, 19 nt, Homo sapiens
  misc_RNA (1)...(19): siRNA sense strand
ccaggaaaagauacaguua

SEQ ID NO: 2317531 - RNA, 19 nt, Homo sapiens
  misc_RNA (1)...(19): siRNA sense strand
ccaacagauuacggaaaga

SEQ ID NO: 2317532 - RNA, 19 nt, Homo sapiens
  misc_RNA (1)...(19): siRNA sense strand
ccuuuggagaaguuuaaua

SEQ ID NO: 2317533 - RNA, 19 nt, Homo sapiens
  misc_RNA (1)...(19): siRNA sense strand
cagauuacggaaagaagga

SEQ ID NO: 2317534 - RNA, 19 nt, Homo sapiens
  misc_RNA (1)...(19): siRNA sense strand
cucaauaaggccaaaucua

SEQ ID NO: 2317535 - RNA, 19 nt, Homo sapiens
  misc_RNA (1)...(19): siRNA sense strand
ccagugagaccaugggcca

SEQ ID NO: 2317536 - RNA, 19 nt, Homo sapiens
  misc_RNA (1)...(19): siRNA sense strand
cugauugguuugcagaaaa

SEQ ID NO: 2317537 - RNA, 19 nt, Homo sapiens
  misc_RNA (1)...(19): siRNA sense strand
ccauaagaccucugagcug

SEQ ID NO: 2317538 - RNA, 19 nt, Homo sapiens
  misc_RNA (1)...(19): siRNA sense strand
agaaauagugauagaucca

SEQ ID NO: 2317539 - RNA, 19 nt, Homo sapiens
  misc_RNA (1)...(19): siRNA sense strand
gcuauaaauucuuugcuga

SEQ ID NO: 2317540 - RNA, 19 nt, Homo sapiens
  misc_RNA (1)...(19): siRNA sense strand
cgagaugugaugaaggaga

SEQ ID NO: 2317541 - RNA, 19 nt, Homo sapiens
  misc_RNA (1)...(19): siRNA sense strand
cuugauuguggaagauaua

SEQ ID NO: 2317542 - RNA, 19 nt, Homo sapiens
  misc_RNA (1)...(19): siRNA sense strand
cauuagugaaacuggaaaa

SEQ ID NO: 2317543 - RNA, 19 nt, Homo sapiens
  misc_RNA (1)...(19): siRNA sense strand
cgucgugauuagugaugau

SEQ ID NO: 2317544 - RNA, 19 nt, Homo sapiens
  misc_RNA (1)...(19): siRNA sense strand
uggucaaggucgcaagcuu

SEQ ID NO: 2317545 - RNA, 19 nt, Homo sapiens
  misc_RNA (1)...(19): siRNA sense strand
ggaagauauaauugacacu

SEQ ID NO: 2317546 - RNA, 19 nt, Homo sapiens
  misc_RNA (1)...(19): siRNA sense strand
ugaaacuggaaaagcaaaa

SEQ ID NO: 2317547 - RNA, 19 nt, Homo sapiens
  misc_RNA (1)...(19): siRNA sense strand
cauaaaaguaauuggugga

SEQ ID NO: 2317548 - RNA, 19 nt, Homo sapiens
  misc_RNA (1)...(19): siRNA sense strand
gagaaggaacugaaggaga

SEQ ID NO: 2317549 - RNA, 19 nt, Homo sapiens
  misc_RNA (1)...(19): siRNA sense strand
acaagaaggcucagcgaga

SEQ ID NO: 2317550 - RNA, 19 nt, Homo sapiens
  misc_RNA (1)...(19): siRNA sense strand
agaucagggccuuggacaa

SEQ ID NO: 2317551 - RNA, 19 nt, Homo sapiens
  misc_RNA (1)...(19): siRNA sense strand
caggagggcuucuggguca

SEQ ID NO: 2317552 - RNA, 19 nt, Homo sapiens
  misc_RNA (1)...(19): siRNA sense strand
ugacuguacuugaaggaga

SEQ ID NO: 2317553 - RNA, 19 nt, Homo sapiens
  misc_RNA (1)...(19): siRNA sense strand
caccaguagcauagaggua

SEQ ID NO: 2317554 - RNA, 19 nt, Homo sapiens
  misc_RNA (1)...(19): siRNA sense strand
cccaaguguccgaggucaa

SEQ ID NO: 2317555 - RNA, 19 nt, Homo sapiens
  misc_RNA (1)...(19): siRNA sense strand
ggacaaggccuucagacca

SEQ ID NO: 2317556 - RNA, 19 nt, Homo sapiens
  misc_RNA (1)...(19): siRNA sense strand
gacaggagcaggagggcuu

SEQ ID NO: 2317557 - RNA, 19 nt, Homo sapiens
  misc_RNA (1)...(19): siRNA sense strand
cuccauacccguacagcaa

SEQ ID NO: 2317558 - RNA, 19 nt, Homo sapiens
  misc_RNA (1)...(19): siRNA sense strand
aagagaaggaacugaagga

SEQ ID NO: 2317559 - RNA, 19 nt, Homo sapiens
  misc_RNA (1)...(19): siRNA sense strand
ugcuggaaguagugagcuu

SEQ ID NO: 2317560 - RNA, 19 nt, Homo sapiens
  misc_RNA (1)...(19): siRNA sense strand
uguacuugaaggagacauu

SEQ ID NO: 2317561 - RNA, 19 nt, Homo sapiens
  misc_RNA (1)...(19): siRNA sense strand
accagaauugagagaggaa

SEQ ID NO: 2317562 - RNA, 19 nt, Homo sapiens
  misc_RNA (1)...(19): siRNA sense strand
cagaacaggaccaagcuga

SEQ ID NO: 2317563 - RNA, 19 nt, Homo sapiens
  misc_RNA (1)...(19): siRNA sense strand
uguccaagccagugugcca

SEQ ID NO: 2317564 - RNA, 19 nt, Homo sapiens
  misc_RNA (1)...(19): siRNA sense strand
cuggagaggaggcgggauu

SEQ ID NO: 2317565 - RNA, 19 nt, Homo sapiens
  misc_RNA (1)...(19): siRNA sense strand
aggcucaaguggacaacaa

SEQ ID NO: 2317566 - RNA, 19 nt, Homo sapiens
  misc_RNA (1)...(19): siRNA sense strand
cacaggaagucgugcgaga

SEQ ID NO: 2317567 - RNA, 19 nt, Homo sapiens
  misc_RNA (1)...(19): siRNA sense strand
guaaaugcgcagcaggcaa

SEQ ID NO: 2317568 - RNA, 19 nt, Homo sapiens
  misc_RNA (1)...(19): siRNA sense strand
gcuucuacacagacagcaa

SEQ ID NO: 2317569 - RNA, 19 nt, Homo sapiens
  misc_RNA (1)...(19): siRNA sense strand
cagugaaacaugacgacuu

SEQ ID NO: 2317570 - RNA, 19 nt, Homo sapiens
  misc_RNA (1)...(19): siRNA sense strand
cgcuggaacccauggaaau

SEQ ID NO: 2317571 - RNA, 19 nt, Homo sapiens
  misc_RNA (1)...(19): siRNA sense strand
gggcaacguuugauccuga

SEQ ID NO: 2317572 - RNA, 19 nt, Homo sapiens
  misc_RNA (1)...(19): siRNA sense strand
gguaauauuucccagcuca

SEQ ID NO: 2317573 - RNA, 19 nt, Homo sapiens
  misc_RNA (1)...(19): siRNA sense strand
ggugaugaacgaugaggca

SEQ ID NO: 2317574 - RNA, 19 nt, Homo sapiens
  misc_RNA (1)...(19): siRNA sense strand
aguauaggugacaacgaaa

SEQ ID NO: 2317575 - RNA, 19 nt, Homo sapiens
  misc_RNA (1)...(19): siRNA sense strand
acgcuggaacccauggaaa

SEQ ID NO: 2317576 - RNA, 19 nt, Homo sapiens
  misc_RNA (1)...(19): siRNA sense strand
gaaucaagaaugacaucca

SEQ ID NO: 2317577 - RNA, 19 nt, Homo sapiens
  misc_RNA (1)...(19): siRNA sense strand
ccaacaugugguucaagaa

SEQ ID NO: 2317578 - RNA, 19 nt, Homo sapiens
  misc_RNA (1)...(19): siRNA sense strand
gcgaaaggacccagugcca

SEQ ID NO: 2317579 - RNA, 19 nt, Homo sapiens
  misc_RNA (1)...(19): siRNA sense strand
gaaaggacccagugccaga

SEQ ID NO: 2317580 - RNA, 19 nt, Homo sapiens
  misc_RNA (1)...(19): siRNA sense strand
ugacccaggcagagaucaa

SEQ ID NO: 2317581 - RNA, 19 nt, Homo sapiens
  misc_RNA (1)...(19): siRNA sense strand
gccagaacgaaguggucua

SEQ ID NO: 2317582 - RNA, 19 nt, Homo sapiens
  misc_RNA (1)...(19): siRNA sense strand
ggguguucccucaggucaa

SEQ ID NO: 2317583 - RNA, 19 nt, Homo sapiens
  misc_RNA (1)...(19): siRNA sense strand
agagcugaucaaagaguuu

SEQ ID NO: 2317584 - RNA, 19 nt, Homo sapiens
  misc_RNA (1)...(19): siRNA sense strand
aggucaaugucacgaagau

SEQ ID NO: 2317585 - RNA, 19 nt, Homo sapiens
  misc_RNA (1)...(19): siRNA sense strand
ccaagaacuaccaggacaa

SEQ ID NO: 2317586 - RNA, 19 nt, Homo sapiens
  misc_RNA (1)...(19): siRNA sense strand
ggucugugcugaugggaga

SEQ ID NO: 2317587 - RNA, 19 nt, Homo sapiens
  misc_RNA (1)...(19): siRNA sense strand
aggaggagauugugggagu

SEQ ID NO: 2317588 - RNA, 19 nt, Homo sapiens
  misc_RNA (1)...(19): siRNA sense strand
aggagaaggaggaggagga

SEQ ID NO: 2317589 - RNA, 19 nt, Homo sapiens
  misc_RNA (1)...(19): siRNA sense strand
ugaucauggcagugaacaa

SEQ ID NO: 2317590 - RNA, 19 nt, Homo sapiens
  misc_RNA (1)...(19): siRNA sense strand
gcaaagacgucguggcggu

SEQ ID NO: 2317591 - RNA, 19 nt, Homo sapiens
  misc_RNA (1)...(19): siRNA sense strand
cugaugaguaugaggccaa

SEQ ID NO: 2317592 - RNA, 19 nt, Homo sapiens
  misc_RNA (1)...(19): siRNA sense strand
ucaacaagaaggaggagau

SEQ ID NO: 2317593 - RNA, 19 nt, Homo sapiens
  misc_RNA (1)...(19): siRNA sense strand
acaauaggaaagaguggaa

SEQ ID NO: 2317594 - RNA, 19 nt, Homo sapiens
  misc_RNA (1)...(19): siRNA sense strand
acggcaaggaggagaucaa

SEQ ID NO: 2317595 - RNA, 19 nt, Homo sapiens
  misc_RNA (1)...(19): siRNA sense strand
gagacgacccggaaggaga

SEQ ID NO: 2317596 - RNA, 19 nt, Homo sapiens
  misc_RNA (1)...(19): siRNA sense strand
aggaggagaucaaggucau

SEQ ID NO: 2317597 - RNA, 19 nt, Homo sapiens
  misc_RNA (1)...(19): siRNA sense strand
cggaggagacccugaacau

SEQ ID NO: 2317598 - RNA, 19 nt, Homo sapiens
  misc_RNA (1)...(19): siRNA sense strand
cugcagaacaauaggaaag

SEQ ID NO: 2317599 - RNA, 19 nt, Homo sapiens
  misc_RNA (1)...(19): siRNA sense strand
cgggaagcccuuugacgaa

SEQ ID NO: 2317600 - RNA, 19 nt, Homo sapiens
  misc_RNA (1)...(19): siRNA sense strand
agcaaaggguaccggagaa

SEQ ID NO: 2317601 - RNA, 19 nt, Homo sapiens
  misc_RNA (1)...(19): siRNA sense strand
ugacggacaucgagaggca

SEQ ID NO: 2317602 - RNA, 19 nt, Homo sapiens
  misc_RNA (1)...(19): siRNA sense strand
agaugaacaagcuggagaa

SEQ ID NO: 2317603 - RNA, 19 nt, Homo sapiens
  misc_RNA (1)...(19): siRNA sense strand
agaucuaucaccugagcua

SEQ ID NO: 2317604 - RNA, 19 nt, Homo sapiens
  misc_RNA (1)...(19): siRNA sense strand
ggaaagacgggaagcccuu

SEQ ID NO: 2317605 - RNA, 19 nt, Homo sapiens
  misc_RNA (1)...(19): siRNA sense strand
cagcaaaggguaccggaga

SEQ ID NO: 2317606 - RNA, 19 nt, Homo sapiens
  misc_RNA (1)...(19): siRNA sense strand
aagaaaguaggcacagaaa

SEQ ID NO: 2317607 - RNA, 19 nt, Homo sapiens
  misc_RNA (1)...(19): siRNA sense strand
uggacaugaccaaggagaa

SEQ ID NO: 2317608 - RNA, 19 nt, Homo sapiens
  misc_RNA (1)...(19): siRNA sense strand
acacggaccuggaggccuu

SEQ ID NO: 2317609 - RNA, 19 nt, Homo sapiens
  misc_RNA (1)...(19): siRNA sense strand
ccuacgacaagaugaacaa

SEQ ID NO: 2317610 - RNA, 19 nt, Homo sapiens
  misc_RNA (1)...(19): siRNA sense strand
acgaagagauccugcccau

SEQ ID NO: 2317611 - RNA, 19 nt, Homo sapiens
  misc_RNA (1)...(19): siRNA sense strand
cuggagaaccgcaaggaca

SEQ ID NO: 2317612 - RNA, 19 nt, Homo sapiens
  misc_RNA (1)...(19): siRNA sense strand
gcgaagacgaagauguguu

SEQ ID NO: 2317613 - RNA, 19 nt, Homo sapiens
  misc_RNA (1)...(19): siRNA sense strand
acaccuacgacaagaugaa

SEQ ID NO: 2317614 - RNA, 19 nt, Homo sapiens
  misc_RNA (1)...(19): siRNA sense strand
gcaucaacauggagcgcgu

SEQ ID NO: 2317615 - RNA, 19 nt, Homo sapiens
  misc_RNA (1)...(19): siRNA sense strand
gcgacagggacgagaucca

SEQ ID NO: 2317616 - RNA, 19 nt, Homo sapiens
  misc_RNA (1)...(19): siRNA sense strand
ucuugaaguaccugaauuu

SEQ ID NO: 2317617 - RNA, 19 nt, Homo sapiens
  misc_RNA (1)...(19): siRNA sense strand
aguaugaggccaaagugaa

SEQ ID NO: 2317618 - RNA, 19 nt, Homo sapiens
  misc_RNA (1)...(19): siRNA sense strand
acaacaggaaagacgggaa

SEQ ID NO: 2317619 - RNA, 19 nt, Homo sapiens
  misc_RNA (1)...(19): siRNA sense strand
cagaacaauaggaaagagu

SEQ ID NO: 2317620 - RNA, 19 nt, Homo sapiens
  misc_RNA (1)...(19): siRNA sense strand
aggccaaagugaaggcucu

SEQ ID NO: 2317621 - RNA, 19 nt, Homo sapiens
  misc_RNA (1)...(19): siRNA sense strand
agaagagcuggguggagua

SEQ ID NO: 2317622 - RNA, 19 nt, Homo sapiens
  misc_RNA (1)...(19): siRNA sense strand
uggaggagaaggaggagga

SEQ ID NO: 2317623 - RNA, 19 nt, Homo sapiens
  misc_RNA (1)...(19): siRNA sense strand
uggagaaccgcaaggacau

SEQ ID NO: 2317624 - RNA, 19 nt, Homo sapiens
  misc_RNA (1)...(19): siRNA sense strand
uggcagugaacaagcucaa

SEQ ID NO: 2317625 - RNA, 19 nt, Homo sapiens
  misc_RNA (1)...(19): siRNA sense strand
ggucagugaugaacaccga

SEQ ID NO: 2317626 - RNA, 19 nt, Homo sapiens
  misc_RNA (1)...(19): siRNA sense strand
uggagcuggugcaggauau

SEQ ID NO: 2317627 - RNA, 19 nt, Homo sapiens
  misc_RNA (1)...(19): siRNA sense strand
ggacagucuuggaucagca

SEQ ID NO: 2317628 - RNA, 19 nt, Homo sapiens
  misc_RNA (1)...(19): siRNA sense strand
ggaaagaguggaaggcgcu

SEQ ID NO: 2317629 - RNA, 19 nt, Homo sapiens
  misc_RNA (1)...(19): siRNA sense strand
ugaugaacaccgacaccua

SEQ ID NO: 2317630 - RNA, 19 nt, Homo sapiens
  misc_RNA (1)...(19): siRNA sense strand
agaaaguaggcacagaaau

SEQ ID NO: 2317631 - RNA, 19 nt, Homo sapiens
  misc_RNA (1)...(19): siRNA sense strand
gggaagaaacugagcccug

SEQ ID NO: 2317632 - RNA, 19 nt, Homo sapiens
  misc_RNA (1)...(19): siRNA sense strand
ucgaccgacugcagaacaa

SEQ ID NO: 2317633 - RNA, 19 nt, Homo sapiens
  misc_RNA (1)...(19): siRNA sense strand
aggaggaggaggagagggu

SEQ ID NO: 2317634 - RNA, 19 nt, Homo sapiens
  misc_RNA (1)...(19): siRNA sense strand
ucauguaccgccagcgcaa

SEQ ID NO: 2317635 - RNA, 19 nt, Homo sapiens
  misc_RNA (1)...(19): siRNA sense strand
aagugaaggcucuggagga

SEQ ID NO: 2317636 - RNA, 19 nt, Homo sapiens
  misc_RNA (1)...(19): siRNA sense strand
acaccgacaccuacgacaa

SEQ ID NO: 2317637 - RNA, 19 nt, Homo sapiens
  misc_RNA (1)...(19): siRNA sense strand
uggaagaacuaaaggaaau

SEQ ID NO: 2317638 - RNA, 19 nt, Homo sapiens
  misc_RNA (1)...(19): siRNA sense strand
agguugugcuaaagggaaa

SEQ ID NO: 2317639 - RNA, 19 nt, Homo sapiens
  misc_RNA (1)...(19): siRNA sense strand
ugauggagcugcagacuua

SEQ ID NO: 2317640 - RNA, 19 nt, Homo sapiens
  misc_RNA (1)...(19): siRNA sense strand
guggaagaacuaaaggaaa

SEQ ID NO: 2317641 - RNA, 19 nt, Homo sapiens
  misc_RNA (1)...(19): siRNA sense strand
aguuuaagucagucaguua

SEQ ID NO: 2317642 - RNA, 19 nt, Homo sapiens
  misc_RNA (1)...(19): siRNA sense strand
ccuguaaguauaauggaaa

SEQ ID NO: 2317643 - RNA, 19 nt, Homo sapiens
  misc_RNA (1)...(19): siRNA sense strand
ccguacacgagaagaaauu

SEQ ID NO: 2317644 - RNA, 19 nt, Homo sapiens
  misc_RNA (1)...(19): siRNA sense strand
gaauggaguugaaagcaga

SEQ ID NO: 2317645 - RNA, 19 nt, Homo sapiens
  misc_RNA (1)...(19): siRNA sense strand
ggcugagaguggauggaau

SEQ ID NO: 2317646 - RNA, 19 nt, Homo sapiens
  misc_RNA (1)...(19): siRNA sense strand
ggaaggagauugaggaugc

SEQ ID NO: 2317647 - RNA, 19 nt, Homo sapiens
  misc_RNA (1)...(19): siRNA sense strand
aaguaagaaguaagaguga

SEQ ID NO: 2317648 - RNA, 19 nt, Homo sapiens
  misc_RNA (1)...(19): siRNA sense strand
acgagaagaaauucaggaa

SEQ ID NO: 2317649 - RNA, 19 nt, Homo sapiens
  misc_RNA (1)...(19): siRNA sense strand
aggaaauugauguggaagu

SEQ ID NO: 2317650 - RNA, 19 nt, Homo sapiens
  misc_RNA (1)...(19): siRNA sense strand
cuuuggaagagcugggcua

SEQ ID NO: 2317651 - RNA, 19 nt, Homo sapiens
  misc_RNA (1)...(19): siRNA sense strand
cgaaaaggagguugugcua

SEQ ID NO: 2317652 - RNA, 19 nt, Homo sapiens
  misc_RNA (1)...(19): siRNA sense strand
caaucuugccaguguggaa

SEQ ID NO: 2317653 - RNA, 19 nt, Homo sapiens
  misc_RNA (1)...(19): siRNA sense strand
ggaagaacuaaaggaaauu

SEQ ID NO: 2317654 - RNA, 19 nt, Homo sapiens
  misc_RNA (1)...(19): siRNA sense strand
gaggaaggagauugaggau

SEQ ID NO: 2317655 - RNA, 19 nt, Homo sapiens
  misc_RNA (1)...(19): siRNA sense strand
guggaagugaggaaggaga

SEQ ID NO: 2317656 - RNA, 19 nt, Homo sapiens
  misc_RNA (1)...(19): siRNA sense strand
gggcaauggcaucguggga

SEQ ID NO: 2317657 - RNA, 19 nt, Homo sapiens
  misc_RNA (1)...(19): siRNA sense strand
uguggaagaacuaaaggaa

SEQ ID NO: 2317658 - RNA, 19 nt, Homo sapiens
  misc_RNA (1)...(19): siRNA sense strand
acauguaugccaagaacuu

SEQ ID NO: 2317659 - RNA, 19 nt, Homo sapiens
  misc_RNA (1)...(19): siRNA sense strand
uuaccguacacgagaagaa

SEQ ID NO: 2317660 - RNA, 19 nt, Homo sapiens
  misc_RNA (1)...(19): siRNA sense strand
gaguggauggaauggauau

SEQ ID NO: 2317661 - RNA, 19 nt, Homo sapiens
  misc_RNA (1)...(19): siRNA sense strand
uugauguggaagugaggaa

SEQ ID NO: 2317662 - RNA, 19 nt, Homo sapiens
  misc_RNA (1)...(19): siRNA sense strand
gcuaaagggaaaggaggau

SEQ ID NO: 2317663 - RNA, 19 nt, Homo sapiens
  misc_RNA (1)...(19): siRNA sense strand
auucaggaaguaagaagua

SEQ ID NO: 2317664 - RNA, 19 nt, Homo sapiens
  misc_RNA (1)...(19): siRNA sense strand
ccaguguggaagaacuaaa

SEQ ID NO: 2317665 - RNA, 19 nt, Homo sapiens
  misc_RNA (1)...(19): siRNA sense strand
uggaagugaggaaggagau

SEQ ID NO: 2317666 - RNA, 19 nt, Homo sapiens
  misc_RNA (1)...(19): siRNA sense strand
cgaauggaguugaaagcag

SEQ ID NO: 2317667 - RNA, 19 nt, Homo sapiens
  misc_RNA (1)...(19): siRNA sense strand
ggaaaggaggaucgaugca

SEQ ID NO: 2317668 - RNA, 19 nt, Homo sapiens
  misc_RNA (1)...(19): siRNA sense strand
caacagugcucaccaggga

SEQ ID NO: 2317669 - RNA, 19 nt, Homo sapiens
  misc_RNA (1)...(19): siRNA sense strand
aagugaggaaggagauuga

SEQ ID NO: 2317670 - RNA, 19 nt, Homo sapiens
  misc_RNA (1)...(19): siRNA sense strand
ugccaaagcugcagggcca

SEQ ID NO: 2317671 - RNA, 19 nt, Homo sapiens
  misc_RNA (1)...(19): siRNA sense strand
guuugaacuucuuggucau

SEQ ID NO: 2317672 - RNA, 19 nt, Homo sapiens
  misc_RNA (1)...(19): siRNA sense strand
aaugagaauuugcugguga

SEQ ID NO: 2317673 - RNA, 19 nt, Homo sapiens
  misc_RNA (1)...(19): siRNA sense strand
aggcugggacuuaaggaau

SEQ ID NO: 2317674 - RNA, 19 nt, Homo sapiens
  misc_RNA (1)...(19): siRNA sense strand
aggcagcaggaguaagaau

SEQ ID NO: 2317675 - RNA, 19 nt, Homo sapiens
  misc_RNA (1)...(19): siRNA sense strand
acuuaaggaauguacgaca

SEQ ID NO: 2317676 - RNA, 19 nt, Homo sapiens
  misc_RNA (1)...(19): siRNA sense strand
cuguaagauucuggaacuu

SEQ ID NO: 2317677 - RNA, 19 nt, Homo sapiens
  misc_RNA (1)...(19): siRNA sense strand
uguuugaacuucuugguca

SEQ ID NO: 2317678 - RNA, 19 nt, Homo sapiens
  misc_RNA (1)...(19): siRNA sense strand
ggguuuggucagagagaaa

SEQ ID NO: 2317679 - RNA, 19 nt, Homo sapiens
  misc_RNA (1)...(19): siRNA sense strand
cuggaauucucaaggguaa

SEQ ID NO: 2317680 - RNA, 19 nt, Homo sapiens
  misc_RNA (1)...(19): siRNA sense strand
uauuagggucugagagaaa

SEQ ID NO: 2317681 - RNA, 19 nt, Homo sapiens
  misc_RNA (1)...(19): siRNA sense strand
gcuuaaaugucaaggggaa

SEQ ID NO: 2317682 - RNA, 19 nt, Homo sapiens
  misc_RNA (1)...(19): siRNA sense strand
gcuuacaggaaauggauaa

SEQ ID NO: 2317683 - RNA, 19 nt, Homo sapiens
  misc_RNA (1)...(19): siRNA sense strand
caggaagauaagaaggaaa

SEQ ID NO: 2317684 - RNA, 19 nt, Homo sapiens
  misc_RNA (1)...(19): siRNA sense strand
aggaagauaagaaggaaau

SEQ ID NO: 2317685 - RNA, 19 nt, Homo sapiens
  misc_RNA (1)...(19): siRNA sense strand
ggaagaggacccugggaga

SEQ ID NO: 2317686 - RNA, 19 nt, Homo sapiens
  misc_RNA (1)...(19): siRNA sense strand
aggaauugguugagggcgu

SEQ ID NO: 2317687 - RNA, 19 nt, Homo sapiens
  misc_RNA (1)...(19): siRNA sense strand
uugacaugcuagagaaaga

SEQ ID NO: 2317688 - RNA, 19 nt, Homo sapiens
  misc_RNA (1)...(19): siRNA sense strand
aagaaaagccguuccaaaa

SEQ ID NO: 2317689 - RNA, 19 nt, Homo sapiens
  misc_RNA (1)...(19): siRNA sense strand
gaaagaagaccauugccaa

SEQ ID NO: 2317690 - RNA, 19 nt, Homo sapiens
  misc_RNA (1)...(19): siRNA sense strand
gauggaugcaggaacgaaa

SEQ ID NO: 2317691 - RNA, 19 nt, Homo sapiens
  misc_RNA (1)...(19): siRNA sense strand
cuacaaacucgcaaguauu

SEQ ID NO: 2317692 - RNA, 19 nt, Homo sapiens
  misc_RNA (1)...(19): siRNA sense strand
agaaggaaaugauggagga

SEQ ID NO: 2317693 - RNA, 19 nt, Homo sapiens
  misc_RNA (1)...(19): siRNA sense strand
agaagcugcccgagaacaa

SEQ ID NO: 2317694 - RNA, 19 nt, Homo sapiens
  misc_RNA (1)...(19): siRNA sense strand
uauccuuggcugagacaua

SEQ ID NO: 2317695 - RNA, 19 nt, Homo sapiens
  misc_RNA (1)...(19): siRNA sense strand
ugauuaaccaguauagcaa

SEQ ID NO: 2317696 - RNA, 19 nt, Homo sapiens
  misc_RNA (1)...(19): siRNA sense strand
caaugggacaaauguguaa

SEQ ID NO: 2317697 - RNA, 19 nt, Homo sapiens
  misc_RNA (1)...(19): siRNA sense strand
cuuaagucuccaagcuaaa

SEQ ID NO: 2317698 - RNA, 19 nt, Homo sapiens
  misc_RNA (1)...(19): siRNA sense strand
gcuugugauggcuggauaa

SEQ ID NO: 2317699 - RNA, 19 nt, Homo sapiens
  misc_RNA (1)...(19): siRNA sense strand
aaugagaaagcgauugaaa

SEQ ID NO: 2317700 - RNA, 19 nt, Homo sapiens
  misc_RNA (1)...(19): siRNA sense strand
gggacaaauguguaaacuu

SEQ ID NO: 2317701 - RNA, 19 nt, Homo sapiens
  misc_RNA (1)...(19): siRNA sense strand
uuauggugcuauaggagua

SEQ ID NO: 2317702 - RNA, 19 nt, Homo sapiens
  misc_RNA (1)...(19): siRNA sense strand
aagaggacccugggagaaa

SEQ ID NO: 2317703 - RNA, 19 nt, Homo sapiens
  misc_RNA (1)...(19): siRNA sense strand
aggaaauggauaaaugaca

SEQ ID NO: 2317704 - RNA, 19 nt, Homo sapiens
  misc_RNA (1)...(19): siRNA sense strand
aaugaagaccucaaagcua

SEQ ID NO: 2317705 - RNA, 19 nt, Homo sapiens
  misc_RNA (1)...(19): siRNA sense strand
caugaaugagaaagcgauu

SEQ ID NO: 2317706 - RNA, 19 nt, Homo sapiens
  misc_RNA (1)...(19): siRNA sense strand
ccagcgaggccauguacaa

SEQ ID NO: 2317707 - RNA, 19 nt, Homo sapiens
  misc_RNA (1)...(19): siRNA sense strand
ucccuuauguuguuggaaa

SEQ ID NO: 2317708 - RNA, 19 nt, Homo sapiens
  misc_RNA (1)...(19): siRNA sense strand
gagagaaaguucagccuuc

SEQ ID NO: 2317709 - RNA, 19 nt, Homo sapiens
  misc_RNA (1)...(19): siRNA sense strand
guuccagagcagagcauga

SEQ ID NO: 2317710 - RNA, 19 nt, Homo sapiens
  misc_RNA (1)...(19): siRNA sense strand
agaaagaaaaugaguggau

SEQ ID NO: 2317711 - RNA, 19 nt, Homo sapiens
  misc_RNA (1)...(19): siRNA sense strand
aaaggaaagccaaagaaaa

SEQ ID NO: 2317712 - RNA, 19 nt, Homo sapiens
  misc_RNA (1)...(19): siRNA sense strand
gcuaacaguuccagagcag

SEQ ID NO: 2317713 - RNA, 19 nt, Homo sapiens
  misc_RNA (1)...(19): siRNA sense strand
cugaagaauuccagaaagc

SEQ ID NO: 2317714 - RNA, 19 nt, Homo sapiens
  misc_RNA (1)...(19): siRNA sense strand
gaaaaugaguggauggaug

SEQ ID NO: 2317715 - RNA, 19 nt, Homo sapiens
  misc_RNA (1)...(19): siRNA sense strand
ucugaguuauggugcuaua

SEQ ID NO: 2317716 - RNA, 19 nt, Homo sapiens
  misc_RNA (1)...(19): siRNA sense strand
ugauggaggaauugguuga

SEQ ID NO: 2317717 - RNA, 19 nt, Homo sapiens
  misc_RNA (1)...(19): siRNA sense strand
ggaaauggauaaaugacag

SEQ ID NO: 2317718 - RNA, 19 nt, Homo sapiens
  misc_RNA (1)...(19): siRNA sense strand
uguggauccuugugauaau

SEQ ID NO: 2317719 - RNA, 19 nt, Homo sapiens
  misc_RNA (1)...(19): siRNA sense strand
uauugacaugcuagagaaa

SEQ ID NO: 2317720 - RNA, 19 nt, Homo sapiens
  misc_RNA (1)...(19): siRNA sense strand
acuauuugguguggagaau

SEQ ID NO: 2317721 - RNA, 19 nt, Homo sapiens
  misc_RNA (1)...(19): siRNA sense strand
gggagaaaauauugcugau

SEQ ID NO: 2317722 - RNA, 19 nt, Homo sapiens
  misc_RNA (1)...(19): siRNA sense strand
gggucugagagaaagaaga

SEQ ID NO: 2317723 - RNA, 19 nt, Homo sapiens
  misc_RNA (1)...(19): siRNA sense strand
aguauagauggcuggaauu

SEQ ID NO: 2317724 - RNA, 19 nt, Homo sapiens
  misc_RNA (1)...(19): siRNA sense strand
ccuugguggucuacugaau

SEQ ID NO: 2317725 - RNA, 19 nt, Homo sapiens
  misc_RNA (1)...(19): siRNA sense strand
agacuggaaagaaggccaa

SEQ ID NO: 2317726 - RNA, 19 nt, Homo sapiens
  misc_RNA (1)...(19): siRNA sense strand
agaaagaagaccauugcca

SEQ ID NO: 2317727 - RNA, 19 nt, Homo sapiens
  misc_RNA (1)...(19): siRNA sense strand
gcuggaauucucaagggua

SEQ ID NO: 2317728 - RNA, 19 nt, Homo sapiens
  misc_RNA (1)...(19): siRNA sense strand
aaaaggaaagccaaagaaa

SEQ ID NO: 2317729 - RNA, 19 nt, Homo sapiens
  misc_RNA (1)...(19): siRNA sense strand
agccauacagaaagccaaa

SEQ ID NO: 2317730 - RNA, 19 nt, Homo sapiens
  misc_RNA (1)...(19): siRNA sense strand
augagaaagcgauugaaaa

SEQ ID NO: 2317731 - RNA, 19 nt, Homo sapiens
  misc_RNA (1)...(19): siRNA sense strand
guuuaggauauuagggucu

SEQ ID NO: 2317732 - RNA, 19 nt, Homo sapiens
  misc_RNA (1)...(19): siRNA sense strand
uaagaaaagccguuccaaa

SEQ ID NO: 2317733 - RNA, 19 nt, Homo sapiens
  misc_RNA (1)...(19): siRNA sense strand
gcaacuauuauuggaagaa

SEQ ID NO: 2317734 - RNA, 19 nt, Homo sapiens
  misc_RNA (1)...(19): siRNA sense strand
gcgggacaccgaagccaua

SEQ ID NO: 2317735 - RNA, 19 nt, Homo sapiens
  misc_RNA (1)...(19): siRNA sense strand
gaaggaaaugauggaggaa

SEQ ID NO: 2317736 - RNA, 19 nt, Homo sapiens
  misc_RNA (1)...(19): siRNA sense strand
ccaccaaccagauccgauu

SEQ ID NO: 2317737 - RNA, 19 nt, Homo sapiens
  misc_RNA (1)...(19): siRNA sense strand
gauaaaugacagaaggcag

SEQ ID NO: 2317738 - RNA, 19 nt, Homo sapiens
  misc_RNA (1)...(19): siRNA sense strand
cguggagacuggaaagaag

SEQ ID NO: 2317739 - RNA, 19 nt, Homo sapiens
  misc_RNA (1)...(19): siRNA sense strand
cgaaaaggaaagccaaaga

SEQ ID NO: 2317740 - RNA, 19 nt, Homo sapiens
  misc_RNA (1)...(19): siRNA sense strand
ccauauucuaagugggaaa

SEQ ID NO: 2317741 - RNA, 19 nt, Homo sapiens
  misc_RNA (1)...(19): siRNA sense strand
ggaagaaaguggagguccu

SEQ ID NO: 2317742 - RNA, 19 nt, Homo sapiens
  misc_RNA (1)...(19): siRNA sense strand
uggccaaaguggagaaguu

SEQ ID NO: 2317743 - RNA, 19 nt, Homo sapiens
  misc_RNA (1)...(19): siRNA sense strand
ggagaaagaccaagccaca

SEQ ID NO: 2317744 - RNA, 19 nt, Homo sapiens
  misc_RNA (1)...(19): siRNA sense strand
gcgaugaggacaaggccaa

SEQ ID NO: 2317745 - RNA, 19 nt, Homo sapiens
  misc_RNA (1)...(19): siRNA sense strand
agguagaugaagaguacaa

SEQ ID NO: 2317746 - RNA, 19 nt, Homo sapiens
  misc_RNA (1)...(19): siRNA sense strand
ccuucgagaugguuauaaa

SEQ ID NO: 2317747 - RNA, 19 nt, Homo sapiens
  misc_RNA (1)...(19): siRNA sense strand
uggcaaaagcaaaggguuu

SEQ ID NO: 2317748 - RNA, 19 nt, Homo sapiens
  misc_RNA (1)...(19): siRNA sense strand
ccaaaguggagaaguucaa

SEQ ID NO: 2317749 - RNA, 19 nt, Homo sapiens
  misc_RNA (1)...(19): siRNA sense strand
acacaaaucucucuggaca

SEQ ID NO: 2317750 - RNA, 19 nt, Homo sapiens
  misc_RNA (1)...(19): siRNA sense strand
cuguucagguccaagaaua

SEQ ID NO: 2317751 - RNA, 19 nt, Homo sapiens
  misc_RNA (1)...(19): siRNA sense strand
acugaggagugaaaugaaa

SEQ ID NO: 2317752 - RNA, 19 nt, Homo sapiens
  misc_RNA (1)...(19): siRNA sense strand
gcucacaaaugauggcuca

SEQ ID NO: 2317753 - RNA, 19 nt, Homo sapiens
  misc_RNA (1)...(19): siRNA sense strand
uggaggagccagaguaaaa

SEQ ID NO: 2317754 - RNA, 19 nt, Homo sapiens
  misc_RNA (1)...(19): siRNA sense strand
acucagagcaccaaggaca

SEQ ID NO: 2317755 - RNA, 19 nt, Homo sapiens
  misc_RNA (1)...(19): siRNA sense strand
gugagaagcugguugagca

SEQ ID NO: 2317756 - RNA, 19 nt, Homo sapiens
  misc_RNA (1)...(19): siRNA sense strand
guucgaaccuacaggacca

SEQ ID NO: 2317757 - RNA, 19 nt, Homo sapiens
  misc_RNA (1)...(19): siRNA sense strand
ccggauucuuagucacaua

SEQ ID NO: 2317758 - RNA, 19 nt, Homo sapiens
  misc_RNA (1)...(19): siRNA sense strand
gaaaacuagaggauggaua

SEQ ID NO: 2317759 - RNA, 19 nt, Homo sapiens
  misc_RNA (1)...(19): siRNA sense strand
aggcagcucuugaggcaau

SEQ ID NO: 2317760 - RNA, 19 nt, Homo sapiens
  misc_RNA (1)...(19): siRNA sense strand
ccucuaaacuauaugugau

SEQ ID NO: 2317761 - RNA, 19 nt, Homo sapiens
  misc_RNA (1)...(19): siRNA sense strand
ucuaagugggaaagaguuu

SEQ ID NO: 2317762 - RNA, 19 nt, Homo sapiens
  misc_RNA (1)...(19): siRNA sense strand
gcgguuuagugcugaugaa

SEQ ID NO: 2317763 - RNA, 19 nt, Homo sapiens
  misc_RNA (1)...(19): siRNA sense strand
uggugagcucuaugggaaa

SEQ ID NO: 2317764 - RNA, 19 nt, Homo sapiens
  misc_RNA (1)...(19): siRNA sense strand
gaaagaagugugcgcccua

SEQ ID NO: 2317765 - RNA, 19 nt, Homo sapiens
  misc_RNA (1)...(19): siRNA sense strand
cagaugacuaggcgguuua

SEQ ID NO: 2317766 - RNA, 19 nt, Homo sapiens
  misc_RNA (1)...(19): siRNA sense strand
ccauggacacccuggagaa

SEQ ID NO: 2317767 - RNA, 19 nt, Homo sapiens
  misc_RNA (1)...(19): siRNA sense strand
ugaugagacagguggccaa

SEQ ID NO: 2317768 - RNA, 19 nt, Homo sapiens
  misc_RNA (1)...(19): siRNA sense strand
uugcaguggaagauguaaa

SEQ ID NO: 2317769 - RNA, 19 nt, Homo sapiens
  misc_RNA (1)...(19): siRNA sense strand
cugcaaagcacaucguuga

SEQ ID NO: 2317770 - RNA, 19 nt, Homo sapiens
  misc_RNA (1)...(19): siRNA sense strand
cgcuguuggcagagggauu

SEQ ID NO: 2317771 - RNA, 19 nt, Homo sapiens
  misc_RNA (1)...(19): siRNA sense strand
uggacacccuggagaaaga

SEQ ID NO: 2317772 - RNA, 19 nt, Homo sapiens
  misc_RNA (1)...(19): siRNA sense strand
ccuuggaaccucuaaacua

SEQ ID NO: 2317773 - RNA, 19 nt, Homo sapiens
  misc_RNA (1)...(19): siRNA sense strand
agaccaagccacaggaauc

SEQ ID NO: 2317774 - RNA, 19 nt, Homo sapiens
  misc_RNA (1)...(19): siRNA sense strand
augagaugaucguggagau

SEQ ID NO: 2317775 - RNA, 19 nt, Homo sapiens
  misc_RNA (1)...(19): siRNA sense strand
agaaaagguuccugaaagu

SEQ ID NO: 2317776 - RNA, 19 nt, Homo sapiens
  misc_RNA (1)...(19): siRNA sense strand
acaagguagaugaagagua

SEQ ID NO: 2317777 - RNA, 19 nt, Homo sapiens
  misc_RNA (1)...(19): siRNA sense strand
uagaugaagaguacaagaa

SEQ ID NO: 2317778 - RNA, 19 nt, Homo sapiens
  misc_RNA (1)...(19): siRNA sense strand
cggccuuugcaguggaaga

SEQ ID NO: 2317779 - RNA, 19 nt, Homo sapiens
  misc_RNA (1)...(19): siRNA sense strand
cagccagccaugagcagaa

SEQ ID NO: 2317780 - RNA, 19 nt, Homo sapiens
  misc_RNA (1)...(19): siRNA sense strand
agaguuuggcguugaaaga

SEQ ID NO: 2317781 - RNA, 19 nt, Homo sapiens
  misc_RNA (1)...(19): siRNA sense strand
uaccagaggguguggaaga

SEQ ID NO: 2317782 - RNA, 19 nt, Homo sapiens
  misc_RNA (1)...(19): siRNA sense strand
gcuucuuauuugcaggaau

SEQ ID NO: 2317783 - RNA, 19 nt, Homo sapiens
  misc_RNA (1)...(19): siRNA sense strand
augcaagcuccguaggaau

SEQ ID NO: 2317784 - RNA, 19 nt, Homo sapiens
  misc_RNA (1)...(19): siRNA sense strand
cugcugaacucaagcucuu

SEQ ID NO: 2317785 - RNA, 19 nt, Homo sapiens
  misc_RNA (1)...(19): siRNA sense strand
gcuaaaagauuguucgaac

SEQ ID NO: 2317786 - RNA, 19 nt, Homo sapiens
  misc_RNA (1)...(19): siRNA sense strand
gcauuaugacccugcugaa

SEQ ID NO: 2317787 - RNA, 19 nt, Homo sapiens
  misc_RNA (1)...(19): siRNA sense strand
ccagagaugaccaugguga

SEQ ID NO: 2317788 - RNA, 19 nt, Homo sapiens
  misc_RNA (1)...(19): siRNA sense strand
aaguggagguccuggcuga

SEQ ID NO: 2317789 - RNA, 19 nt, Homo sapiens
  misc_RNA (1)...(19): siRNA sense strand
ugguaggauaucuggaaga

SEQ ID NO: 2317790 - RNA, 19 nt, Homo sapiens
  misc_RNA (1)...(19): siRNA sense strand
gguuuagugcugaugaaca

SEQ ID NO: 2317791 - RNA, 19 nt, Homo sapiens
  misc_RNA (1)...(19): siRNA sense strand
ccauggaggacgcaaguca

SEQ ID NO: 2317792 - RNA, 19 nt, Homo sapiens
  misc_RNA (1)...(19): siRNA sense strand
cagaugaggucgagcacug

SEQ ID NO: 2317793 - RNA, 19 nt, Homo sapiens
  misc_RNA (1)...(19): siRNA sense strand
gagcguggagauaagacua

SEQ ID NO: 2317794 - RNA, 19 nt, Homo sapiens
  misc_RNA (1)...(19): siRNA sense strand
uuggugagcucuaugggaa

SEQ ID NO: 2317795 - RNA, 19 nt, Homo sapiens
  misc_RNA (1)...(19): siRNA sense strand
cuucugaaaguuugaugaa

SEQ ID NO: 2317796 - RNA, 19 nt, Homo sapiens
  misc_RNA (1)...(19): siRNA sense strand
gcaaggaacugcagggugu

SEQ ID NO: 2317797 - RNA, 19 nt, Homo sapiens
  misc_RNA (1)...(19): siRNA sense strand
acgacaagucuguggaaaa

SEQ ID NO: 2317798 - RNA, 19 nt, Homo sapiens
  misc_RNA (1)...(19): siRNA sense strand
gggaauggcucauggggau

SEQ ID NO: 2317799 - RNA, 19 nt, Homo sapiens
  misc_RNA (1)...(19): siRNA sense strand
gggaagugguggacccuga

SEQ ID NO: 2317800 - RNA, 19 nt, Homo sapiens
  misc_RNA (1)...(19): siRNA sense strand
uugauugggcugaaggaaa

SEQ ID NO: 2317801 - RNA, 19 nt, Homo sapiens
  misc_RNA (1)...(19): siRNA sense strand
cugccaagcaacaggucua

SEQ ID NO: 2317802 - RNA, 19 nt, Homo sapiens
  misc_RNA (1)...(19): siRNA sense strand
cugcagaaccugacagcca

SEQ ID NO: 2317803 - RNA, 19 nt, Homo sapiens
  misc_RNA (1)...(19): siRNA sense strand
cugacgagcugaaggagga

SEQ ID NO: 2317804 - RNA, 19 nt, Homo sapiens
  misc_RNA (1)...(19): siRNA sense strand
gcuuccaggaccaggacaa

SEQ ID NO: 2317805 - RNA, 19 nt, Homo sapiens
  misc_RNA (1)...(19): siRNA sense strand
ccugcuacacugugaggaa

SEQ ID NO: 2317806 - RNA, 19 nt, Homo sapiens
  misc_RNA (1)...(19): siRNA sense strand
gauaggaacaugcugggaa

SEQ ID NO: 2317807 - RNA, 19 nt, Homo sapiens
  misc_RNA (1)...(19): siRNA sense strand
accugaaccucaugggcaa

SEQ ID NO: 2317808 - RNA, 19 nt, Homo sapiens
  misc_RNA (1)...(19): siRNA sense strand
gggcugauguccaguggca

SEQ ID NO: 2317809 - RNA, 19 nt, Homo sapiens
  misc_RNA (1)...(19): siRNA sense strand
ccuacagccagauggagaa

SEQ ID NO: 2317810 - RNA, 19 nt, Homo sapiens
  misc_RNA (1)...(19): siRNA sense strand
gaugagaaguaccaggcca

SEQ ID NO: 2317811 - RNA, 19 nt, Homo sapiens
  misc_RNA (1)...(19): siRNA sense strand
agaugaugaacaacaacua

SEQ ID NO: 2317812 - RNA, 19 nt, Homo sapiens
  misc_RNA (1)...(19): siRNA sense strand
ugggcaagagcaagaaaga

SEQ ID NO: 2317813 - RNA, 19 nt, Homo sapiens
  misc_RNA (1)...(19): siRNA sense strand
ugccugaggaagagaccaa

SEQ ID NO: 2317814 - RNA, 19 nt, Homo sapiens
  misc_RNA (1)...(19): siRNA sense strand
agcaagguuucgauaggaa

SEQ ID NO: 2317815 - RNA, 19 nt, Homo sapiens
  misc_RNA (1)...(19): siRNA sense strand
gggccaacagccucaggaa

SEQ ID NO: 2317816 - RNA, 19 nt, Homo sapiens
  misc_RNA (1)...(19): siRNA sense strand
ccagcaacuccgaagacau

SEQ ID NO: 2317817 - RNA, 19 nt, Homo sapiens
  misc_RNA (1)...(19): siRNA sense strand
aaccggaggcagagagaaa

SEQ ID NO: 2317818 - RNA, 19 nt, Homo sapiens
  misc_RNA (1)...(19): siRNA sense strand
augcaaacugaaagcaaua

SEQ ID NO: 2317819 - RNA, 19 nt, Homo sapiens
  misc_RNA (1)...(19): siRNA sense strand
ccaaauggcuggaggaagc

SEQ ID NO: 2317820 - RNA, 19 nt, Homo sapiens
  misc_RNA (1)...(19): siRNA sense strand
ggagcaaaugaaaggaaaa

SEQ ID NO: 2317821 - RNA, 19 nt, Homo sapiens
  misc_RNA (1)...(19): siRNA sense strand
acuuuggagaacagaauaa

SEQ ID NO: 2317822 - RNA, 19 nt, Homo sapiens
  misc_RNA (1)...(19): siRNA sense strand
aggaaaagaaaacgaagaa

SEQ ID NO: 2317823 - RNA, 19 nt, Homo sapiens
  misc_RNA (1)...(19): siRNA sense strand
aaguaggagcuuuguacaa

SEQ ID NO: 2317824 - RNA, 19 nt, Homo sapiens
  misc_RNA (1)...(19): siRNA sense strand
guggaagagccaauagaca

SEQ ID NO: 2317825 - RNA, 19 nt, Homo sapiens
  misc_RNA (1)...(19): siRNA sense strand
gcuggaggaagcugagcaa

SEQ ID NO: 2317826 - RNA, 19 nt, Homo sapiens
  misc_RNA (1)...(19): siRNA sense strand
ggugaaaacaagucugaau

SEQ ID NO: 2317827 - RNA, 19 nt, Homo sapiens
  misc_RNA (1)...(19): siRNA sense strand
uggaggaagcugagcaagu

SEQ ID NO: 2317828 - RNA, 19 nt, Homo sapiens
  misc_RNA (1)...(19): siRNA sense strand
gcuaaagaugcucuggaga

SEQ ID NO: 2317829 - RNA, 19 nt, Homo sapiens
  misc_RNA (1)...(19): siRNA sense strand
acacuuuggagaacagaau

SEQ ID NO: 2317830 - RNA, 19 nt, Homo sapiens
  misc_RNA (1)...(19): siRNA sense strand
gcaggaacucaggcggaaa

SEQ ID NO: 2317831 - RNA, 19 nt, Homo sapiens
  misc_RNA (1)...(19): siRNA sense strand
uccagaaaucagagaacuu

SEQ ID NO: 2317832 - RNA, 19 nt, Homo sapiens
  misc_RNA (1)...(19): siRNA sense strand
caugaggauggcugaagaa

SEQ ID NO: 2317833 - RNA, 19 nt, Homo sapiens
  misc_RNA (1)...(19): siRNA sense strand
cugaagaacugaaucugga

SEQ ID NO: 2317834 - RNA, 19 nt, Homo sapiens
  misc_RNA (1)...(19): siRNA sense strand
gccgagagaaggaggccaa

SEQ ID NO: 2317835 - RNA, 19 nt, Homo sapiens
  misc_RNA (1)...(19): siRNA sense strand
cagaagaccaagaagacca

SEQ ID NO: 2317836 - RNA, 19 nt, Homo sapiens
  misc_RNA (1)...(19): siRNA sense strand
ccaagcacgucgacgguga

SEQ ID NO: 2317837 - RNA, 19 nt, Homo sapiens
  misc_RNA (1)...(19): siRNA sense strand
gcacgugcaucgacggcau

SEQ ID NO: 2317838 - RNA, 19 nt, Homo sapiens
  misc_RNA (1)...(19): siRNA sense strand
gggagaagugggagcugga

SEQ ID NO: 2317839 - RNA, 19 nt, Homo sapiens
  misc_RNA (1)...(19): siRNA sense strand
gugacuucgaggaggccaa

SEQ ID NO: 2317840 - RNA, 19 nt, Homo sapiens
  misc_RNA (1)...(19): siRNA sense strand
acauggugucugagaacau

SEQ ID NO: 2317841 - RNA, 19 nt, Homo sapiens
  misc_RNA (1)...(19): siRNA sense strand
aguaaggaccagagacaaa

SEQ ID NO: 2317842 - RNA, 19 nt, Homo sapiens
  misc_RNA (1)...(19): siRNA sense strand
agaaagacuugaaggcgua

SEQ ID NO: 2317843 - RNA, 19 nt, Homo sapiens
  misc_RNA (1)...(19): siRNA sense strand
cuguaaagcuggaaaggga

SEQ ID NO: 2317844 - RNA, 19 nt, Homo sapiens
  misc_RNA (1)...(19): siRNA sense strand
gcagauaaugacaaggaau

SEQ ID NO: 2317845 - RNA, 19 nt, Homo sapiens
  misc_RNA (1)...(19): siRNA sense strand
caaauaaagacaaagccaa

SEQ ID NO: 2317846 - RNA, 19 nt, Homo sapiens
  misc_RNA (1)...(19): siRNA sense strand
cagaaagacuugaaggcgu

SEQ ID NO: 2317847 - RNA, 19 nt, Homo sapiens
  misc_RNA (1)...(19): siRNA sense strand
gcaaauaaagacaaagcca

SEQ ID NO: 2317848 - RNA, 19 nt, Homo sapiens
  misc_RNA (1)...(19): siRNA sense strand
aagacaaagccaaccgaua

SEQ ID NO: 2317849 - RNA, 19 nt, Homo sapiens
  misc_RNA (1)...(19): siRNA sense strand
caguagaggagccgucaaa

SEQ ID NO: 2317850 - RNA, 19 nt, Homo sapiens
  misc_RNA (1)...(19): siRNA sense strand
uugugaagaucuugaccaa

SEQ ID NO: 2317851 - RNA, 19 nt, Homo sapiens
  misc_RNA (1)...(19): siRNA sense strand
caguauagagcgugcagau

SEQ ID NO: 2317852 - RNA, 19 nt, Homo sapiens
  misc_RNA (1)...(19): siRNA sense strand
cgucaaauccagaggcuag

SEQ ID NO: 2317853 - RNA, 19 nt, Homo sapiens
  misc_RNA (1)...(19): siRNA sense strand
ccacacgacgggaagacaa

SEQ ID NO: 2317854 - RNA, 19 nt, Homo sapiens
  misc_RNA (1)...(19): siRNA sense strand
cauaccaggaccagaggaa

SEQ ID NO: 2317855 - RNA, 19 nt, Homo sapiens
  misc_RNA (1)...(19): siRNA sense strand
uggaagucuaugugaucaa

SEQ ID NO: 2317856 - RNA, 19 nt, Homo sapiens
  misc_RNA (1)...(19): siRNA sense strand
uugaaggcguauacaggaa

SEQ ID NO: 2317857 - RNA, 19 nt, Homo sapiens
  misc_RNA (1)...(19): siRNA sense strand
ggcuaagugaagaugacaa

SEQ ID NO: 2317858 - RNA, 19 nt, Homo sapiens
  misc_RNA (1)...(19): siRNA sense strand
acauuauugcuaugggauu

SEQ ID NO: 2317859 - RNA, 19 nt, Homo sapiens
  misc_RNA (1)...(19): siRNA sense strand
gcagaaacaaaaggagaua

SEQ ID NO: 2317860 - RNA, 19 nt, Homo sapiens
  misc_RNA (1)...(19): siRNA sense strand
aucaagaaaucgauagcau

SEQ ID NO: 2317861 - RNA, 19 nt, Homo sapiens
  misc_RNA (1)...(19): siRNA sense strand
ccauaacccaccacagcua

SEQ ID NO: 2317862 - RNA, 19 nt, Homo sapiens
  misc_RNA (1)...(19): siRNA sense strand
ugacaaucauguugcagca

SEQ ID NO: 2317863 - RNA, 19 nt, Homo sapiens
  misc_RNA (1)...(19): siRNA sense strand
ggcguauacaggaacaaua

SEQ ID NO: 2317864 - RNA, 19 nt, Homo sapiens
  misc_RNA (1)...(19): siRNA sense strand
gcuaccuguuaaagaauca

SEQ ID NO: 2317865 - RNA, 19 nt, Homo sapiens
  misc_RNA (1)...(19): siRNA sense strand
agaggauggauucgacuua

SEQ ID NO: 2317866 - RNA, 19 nt, Homo sapiens
  misc_RNA (1)...(19): siRNA sense strand
aaauaaagacaaagccaac

SEQ ID NO: 2317867 - RNA, 19 nt, Homo sapiens
  misc_RNA (1)...(19): siRNA sense strand
ucaaagagaucguuagcag

SEQ ID NO: 2317868 - RNA, 19 nt, Homo sapiens
  misc_RNA (1)...(19): siRNA sense strand
ggauuauagaccaguggca

SEQ ID NO: 2317869 - RNA, 19 nt, Homo sapiens
  misc_RNA (1)...(19): siRNA sense strand
gacaaagcaaauaaagaca

SEQ ID NO: 2317870 - RNA, 19 nt, Homo sapiens
  misc_RNA (1)...(19): siRNA sense strand
accagauguuagugacaau

SEQ ID NO: 2317871 - RNA, 19 nt, Homo sapiens
  misc_RNA (1)...(19): siRNA sense strand
ugaugauguaguaagguuu

SEQ ID NO: 2317872 - RNA, 19 nt, Homo sapiens
  misc_RNA (1)...(19): siRNA sense strand
agucuaugugaucaagaaa

SEQ ID NO: 2317873 - RNA, 19 nt, Homo sapiens
  misc_RNA (1)...(19): siRNA sense strand
ggagauaucaagaggaugg

SEQ ID NO: 2317874 - RNA, 19 nt, Homo sapiens
  misc_RNA (1)...(19): siRNA sense strand
agaucagcauacacaaauu

SEQ ID NO: 2317875 - RNA, 19 nt, Homo sapiens
  misc_RNA (1)...(19): siRNA sense strand
cugcaaaagacauggcuaa

SEQ ID NO: 2317876 - RNA, 19 nt, Homo sapiens
  misc_RNA (1)...(19): siRNA sense strand
aagagaucugugagugaaa

SEQ ID NO: 2317877 - RNA, 19 nt, Homo sapiens
  misc_RNA (1)...(19): siRNA sense strand
uuacaaaaucggaugggaa

SEQ ID NO: 2317878 - RNA, 19 nt, Homo sapiens
  misc_RNA (1)...(19): siRNA sense strand
cguaagaagcugcaggaug

SEQ ID NO: 2317879 - RNA, 19 nt, Homo sapiens
  misc_RNA (1)...(19): siRNA sense strand
ucuuggagaggcagacaaa

SEQ ID NO: 2317880 - RNA, 19 nt, Homo sapiens
  misc_RNA (1)...(19): siRNA sense strand
augucuugguugagagcca

SEQ ID NO: 2317881 - RNA, 19 nt, Homo sapiens
  misc_RNA (1)...(19): siRNA sense strand
uacaaaaucggaugggaaa

SEQ ID NO: 2317882 - RNA, 19 nt, Homo sapiens
  misc_RNA (1)...(19): siRNA sense strand
caacaauccaaauggccau

SEQ ID NO: 2317883 - RNA, 19 nt, Homo sapiens
  misc_RNA (1)...(19): siRNA sense strand
gcaacaauccaaauggcca

SEQ ID NO: 2317884 - RNA, 19 nt, Homo sapiens
  misc_RNA (1)...(19): siRNA sense strand
gguuuauaaaggagaauag

SEQ ID NO: 2317885 - RNA, 19 nt, Homo sapiens
  misc_RNA (1)...(19): siRNA sense strand
caguacauggagagauuga

SEQ ID NO: 2317886 - RNA, 19 nt, Homo sapiens
  misc_RNA (1)...(19): siRNA sense strand
ccaaauggccaugggcaca

SEQ ID NO: 2317887 - RNA, 19 nt, Homo sapiens
  misc_RNA (1)...(19): siRNA sense strand
agaaagacuugguaggaga

SEQ ID NO: 2317888 - RNA, 19 nt, Homo sapiens
  misc_RNA (1)...(19): siRNA sense strand
gguguacagccgagggaaa

SEQ ID NO: 2317889 - RNA, 19 nt, Homo sapiens
  misc_RNA (1)...(19): siRNA sense strand
uggcauaccaggagacaau

SEQ ID NO: 2317890 - RNA, 19 nt, Homo sapiens
  misc_RNA (1)...(19): siRNA sense strand
caguaauaacauagccuua

SEQ ID NO: 2317891 - RNA, 19 nt, Homo sapiens
  misc_RNA (1)...(19): siRNA sense strand
uguuauuguugguggcuau

SEQ ID NO: 2317892 - RNA, 19 nt, Homo sapiens
  misc_RNA (1)...(19): siRNA sense strand
cauuaagcacagcaagaua

SEQ ID NO: 2317893 - RNA, 19 nt, Homo sapiens
  misc_RNA (1)...(19): siRNA sense strand
cuuugaagacucugaagaa

SEQ ID NO: 2317894 - RNA, 19 nt, Homo sapiens
  misc_RNA (1)...(19): siRNA sense strand
gagcauguggagauagcaa

SEQ ID NO: 2317895 - RNA, 19 nt, Homo sapiens
  misc_RNA (1)...(19): siRNA sense strand
augaagaugaugaagaaga

SEQ ID NO: 2317896 - RNA, 19 nt, Homo sapiens
  misc_RNA (1)...(19): siRNA sense strand
uugaagacucugaagaauu

SEQ ID NO: 2317897 - RNA, 19 nt, Homo sapiens
  misc_RNA (1)...(19): siRNA sense strand
ccuauaaugaagaugauga

SEQ ID NO: 2317898 - RNA, 19 nt, Homo sapiens
  misc_RNA (1)...(19): siRNA sense strand
augaagaagaugagucuga

SEQ ID NO: 2317899 - RNA, 19 nt, Homo sapiens
  misc_RNA (1)...(19): siRNA sense strand
agauaugguuuggaagcaa

SEQ ID NO: 2317900 - RNA, 19 nt, Homo sapiens
  misc_RNA (1)...(19): siRNA sense strand
agaugguaacagucaguaa

SEQ ID NO: 2317901 - RNA, 19 nt, Homo sapiens
  misc_RNA (1)...(19): siRNA sense strand
augaugaauuugacaccua

SEQ ID NO: 2317902 - RNA, 19 nt, Homo sapiens
  misc_RNA (1)...(19): siRNA sense strand
cuacuugugauguggauau

SEQ ID NO: 2317903 - RNA, 19 nt, Homo sapiens
  misc_RNA (1)...(19): siRNA sense strand
gaugaauuuugauggacaa

SEQ ID NO: 2317904 - RNA, 19 nt, Homo sapiens
  misc_RNA (1)...(19): siRNA sense strand
acaaacagucaaacaucaa

SEQ ID NO: 2317905 - RNA, 19 nt, Homo sapiens
  misc_RNA (1)...(19): siRNA sense strand
cagucaaacaucaacagaa

SEQ ID NO: 2317906 - RNA, 19 nt, Homo sapiens
  misc_RNA (1)...(19): siRNA sense strand
ggauaucaacacuugggua

SEQ ID NO: 2317907 - RNA, 19 nt, Homo sapiens
  misc_RNA (1)...(19): siRNA sense strand
gcauguggagauagcaaga

SEQ ID NO: 2317908 - RNA, 19 nt, Homo sapiens
  misc_RNA (1)...(19): siRNA sense strand
cuuuagaggacaacaagau

SEQ ID NO: 2317909 - RNA, 19 nt, Homo sapiens
  misc_RNA (1)...(19): siRNA sense strand
aacaaugagguuucagaua

SEQ ID NO: 2317910 - RNA, 19 nt, Homo sapiens
  misc_RNA (1)...(19): siRNA sense strand
guuucagugcagaagcaaa

SEQ ID NO: 2317911 - RNA, 19 nt, Homo sapiens
  misc_RNA (1)...(19): siRNA sense strand
uuucagugcagaagcaaau

SEQ ID NO: 2317912 - RNA, 19 nt, Homo sapiens
  misc_RNA (1)...(19): siRNA sense strand
aggacaacaagauagaaau

SEQ ID NO: 2317913 - RNA, 19 nt, Homo sapiens
  misc_RNA (1)...(19): siRNA sense strand
uggauuacaugcugcccua

SEQ ID NO: 2317914 - RNA, 19 nt, Homo sapiens
  misc_RNA (1)...(19): siRNA sense strand
aaugaagagcagacaacau

SEQ ID NO: 2317915 - RNA, 19 nt, Homo sapiens
  misc_RNA (1)...(19): siRNA sense strand
ugaugaagaagaugagucu

SEQ ID NO: 2317916 - RNA, 19 nt, Homo sapiens
  misc_RNA (1)...(19): siRNA sense strand
caucauacauucuuccaga

SEQ ID NO: 2317917 - RNA, 19 nt, Homo sapiens
  misc_RNA (1)...(19): siRNA sense strand
aagaugaugaagaagauga

SEQ ID NO: 2317918 - RNA, 19 nt, Homo sapiens
  misc_RNA (1)...(19): siRNA sense strand
acuaaugaagagcagacaa

SEQ ID NO: 2317919 - RNA, 19 nt, Homo sapiens
  misc_RNA (1)...(19): siRNA sense strand
ccucaaacaaggaagagaa

SEQ ID NO: 2317920 - RNA, 19 nt, Homo sapiens
  misc_RNA (1)...(19): siRNA sense strand
gcauaugcaaagugaagaa

SEQ ID NO: 2317921 - RNA, 19 nt, Homo sapiens
  misc_RNA (1)...(19): siRNA sense strand
cugaaaagagugaaggaua

SEQ ID NO: 2317922 - RNA, 19 nt, Homo sapiens
  misc_RNA (1)...(19): siRNA sense strand
ugaaaagagugaaggauau

SEQ ID NO: 2317923 - RNA, 19 nt, Homo sapiens
  misc_RNA (1)...(19): siRNA sense strand
guaauauagaugaggugaa

SEQ ID NO: 2317924 - RNA, 19 nt, Homo sapiens
  misc_RNA (1)...(19): siRNA sense strand
aguccaaauuucagcagaa

SEQ ID NO: 2317925 - RNA, 19 nt, Homo sapiens
  misc_RNA (1)...(19): siRNA sense strand
cugagaaguuccagaaaau

SEQ ID NO: 2317926 - RNA, 19 nt, Homo sapiens
  misc_RNA (1)...(19): siRNA sense strand
cagcagaaacuggcagaaa

SEQ ID NO: 2317927 - RNA, 19 nt, Homo sapiens
  misc_RNA (1)...(19): siRNA sense strand
gcucaaaagaagugcugaa

SEQ ID NO: 2317928 - RNA, 19 nt, Homo sapiens
  misc_RNA (1)...(19): siRNA sense strand
acauauagcagaaguacau

SEQ ID NO: 2317929 - RNA, 19 nt, Homo sapiens
  misc_RNA (1)...(19): siRNA sense strand
agaucaugucagagagaga

SEQ ID NO: 2317930 - RNA, 19 nt, Homo sapiens
  misc_RNA (1)...(19): siRNA sense strand
gcuaaauacacuuugugaa

SEQ ID NO: 2317931 - RNA, 19 nt, Homo sapiens
  misc_RNA (1)...(19): siRNA sense strand
cguguaaauucuacugcaa

SEQ ID NO: 2317932 - RNA, 19 nt, Homo sapiens
  misc_RNA (1)...(19): siRNA sense strand
gguucaacuacgcguguaa

SEQ ID NO: 2317933 - RNA, 19 nt, Homo sapiens
  misc_RNA (1)...(19): siRNA sense strand
uuaucaaagcagaaggcaa

SEQ ID NO: 2317934 - RNA, 19 nt, Homo sapiens
  misc_RNA (1)...(19): siRNA sense strand
gagaaguuccagaaaauaa

SEQ ID NO: 2317935 - RNA, 19 nt, Homo sapiens
  misc_RNA (1)...(19): siRNA sense strand
cugcauuaugucagaaauu

SEQ ID NO: 2317936 - RNA, 19 nt, Homo sapiens
  misc_RNA (1)...(19): siRNA sense strand
augaaugauagcauggaua

SEQ ID NO: 2317937 - RNA, 19 nt, Homo sapiens
  misc_RNA (1)...(19): siRNA sense strand
uugguuaacuugggagaaa

SEQ ID NO: 2317938 - RNA, 19 nt, Homo sapiens
  misc_RNA (1)...(19): siRNA sense strand
cagaaguacaucucagaau

SEQ ID NO: 2317939 - RNA, 19 nt, Homo sapiens
  misc_RNA (1)...(19): siRNA sense strand
aguaucaauuggugaauca

SEQ ID NO: 2317940 - RNA, 19 nt, Homo sapiens
  misc_RNA (1)...(19): siRNA sense strand
cagagagagagcuugguua

SEQ ID NO: 2317941 - RNA, 19 nt, Homo sapiens
  misc_RNA (1)...(19): siRNA sense strand
cagcaaauuggaaaggaca

SEQ ID NO: 2317942 - RNA, 19 nt, Homo sapiens
  misc_RNA (1)...(19): siRNA sense strand
ggucagaacaggagugcac

SEQ ID NO: 2317943 - RNA, 19 nt, Homo sapiens
  misc_RNA (1)...(19): siRNA sense strand
ugaucaaccuucagaaaau

SEQ ID NO: 2317944 - RNA, 19 nt, Homo sapiens
  misc_RNA (1)...(19): siRNA sense strand
agugaagaauauagaccuu

SEQ ID NO: 2317945 - RNA, 19 nt, Homo sapiens
  misc_RNA (1)...(19): siRNA sense strand
cucaaacaaggaagagaaa

SEQ ID NO: 2317946 - RNA, 19 nt, Homo sapiens
  misc_RNA (1)...(19): siRNA sense strand
uauugaaggaucagaugaa

SEQ ID NO: 2317947 - RNA, 19 nt, Homo sapiens
  misc_RNA (1)...(19): siRNA sense strand
agaugaagcagauggaagu

SEQ ID NO: 2317948 - RNA, 19 nt, Homo sapiens
  misc_RNA (1)...(19): siRNA sense strand
acccagaauuagaacauau

SEQ ID NO: 2317949 - RNA, 19 nt, Homo sapiens
  misc_RNA (1)...(19): siRNA sense strand
agcagaaacuggcagaaau

SEQ ID NO: 2317950 - RNA, 19 nt, Homo sapiens
  misc_RNA (1)...(19): siRNA sense strand
cuaaacgauacgaagaaau

SEQ ID NO: 2317951 - RNA, 19 nt, Homo sapiens
  misc_RNA (1)...(19): siRNA sense strand
cagacugauucuauagaca

SEQ ID NO: 2317952 - RNA, 19 nt, Homo sapiens
  misc_RNA (1)...(19): siRNA sense strand
gggaaguauuacaaaugga

SEQ ID NO: 2317953 - RNA, 19 nt, Homo sapiens
  misc_RNA (1)...(19): siRNA sense strand
acagagaacaccacgaaaa

SEQ ID NO: 2317954 - RNA, 19 nt, Homo sapiens
  misc_RNA (1)...(19): siRNA sense strand
agugaaggauauaggauac

SEQ ID NO: 2317955 - RNA, 19 nt, Homo sapiens
  misc_RNA (1)...(19): siRNA sense strand
augcaaaagcagaaaauga

SEQ ID NO: 2317956 - RNA, 19 nt, Homo sapiens
  misc_RNA (1)...(19): siRNA sense strand
aguucgauaucuacugaaa

SEQ ID NO: 2317957 - RNA, 19 nt, Homo sapiens
  misc_RNA (1)...(19): siRNA sense strand
cuaaaaguuucuuggauca

SEQ ID NO: 2317958 - RNA, 19 nt, Homo sapiens
  misc_RNA (1)...(19): siRNA sense strand
guguaaauucuacugcaaa

SEQ ID NO: 2317959 - RNA, 19 nt, Homo sapiens
  misc_RNA (1)...(19): siRNA sense strand
gcacccagaauuagaacau

SEQ ID NO: 2317960 - RNA, 19 nt, Homo sapiens
  misc_RNA (1)...(19): siRNA sense strand
aggcuugaguuugaagaaa

SEQ ID NO: 2317961 - RNA, 19 nt, Homo sapiens
  misc_RNA (1)...(19): siRNA sense strand
cugaagaguccauauaaaa

SEQ ID NO: 2317962 - RNA, 19 nt, Homo sapiens
  misc_RNA (1)...(19): siRNA sense strand
gcuauguguccuugacuau

SEQ ID NO: 2317963 - RNA, 19 nt, Homo sapiens
  misc_RNA (1)...(19): siRNA sense strand
ugauaaaacucuucagacu

SEQ ID NO: 2317964 - RNA, 19 nt, Homo sapiens
  misc_RNA (1)...(19): siRNA sense strand
cuaaauacacuuugugaac

SEQ ID NO: 2317965 - RNA, 19 nt, Homo sapiens
  misc_RNA (1)...(19): siRNA sense strand
augcagagacugaaaacaa

SEQ ID NO: 2317966 - RNA, 19 nt, Homo sapiens
  misc_RNA (1)...(19): siRNA sense strand
uaucaaagcagaaggcaac

SEQ ID NO: 2317967 - RNA, 19 nt, Homo sapiens
  misc_RNA (1)...(19): siRNA sense strand
cuuaguaucaauuggugaa

SEQ ID NO: 2317968 - RNA, 19 nt, Homo sapiens
  misc_RNA (1)...(19): siRNA sense strand
acgaaaucaguguccauaa

SEQ ID NO: 2317969 - RNA, 19 nt, Homo sapiens
  misc_RNA (1)...(19): siRNA sense strand
agugaucaaccuucagaaa

SEQ ID NO: 2317970 - RNA, 19 nt, Homo sapiens
  misc_RNA (1)...(19): siRNA sense strand
ugaagaaacagaagaaccu

SEQ ID NO: 2317971 - RNA, 19 nt, Homo sapiens
  misc_RNA (1)...(19): siRNA sense strand
uaugaauucucuuggacuu

SEQ ID NO: 2317972 - RNA, 19 nt, Homo sapiens
  misc_RNA (1)...(19): siRNA sense strand
gaaaagagugaaggauaua

SEQ ID NO: 2317973 - RNA, 19 nt, Homo sapiens
  misc_RNA (1)...(19): siRNA sense strand
acucgaacacgaaugcaaa

SEQ ID NO: 2317974 - RNA, 19 nt, Homo sapiens
  misc_RNA (1)...(19): siRNA sense strand
gcuaaaaguuucuuggauc

SEQ ID NO: 2317975 - RNA, 19 nt, Homo sapiens
  misc_RNA (1)...(19): siRNA sense strand
ccagaucaugucagagaga

SEQ ID NO: 2317976 - RNA, 19 nt, Homo sapiens
  misc_RNA (1)...(19): siRNA sense strand
guugaagaaguaugaugua

SEQ ID NO: 2317977 - RNA, 19 nt, Homo sapiens
  misc_RNA (1)...(19): siRNA sense strand
uggaguauugggagguuau

SEQ ID NO: 2317978 - RNA, 19 nt, Homo sapiens
  misc_RNA (1)...(19): siRNA sense strand
agcuaaaggggaaguauua

SEQ ID NO: 2317979 - RNA, 19 nt, Homo sapiens
  misc_RNA (1)...(19): siRNA sense strand
gcuuugauauugaaggauc

SEQ ID NO: 2317980 - RNA, 19 nt, Homo sapiens
  misc_RNA (1)...(19): siRNA sense strand
cuuuacugagcuacagaaa

SEQ ID NO: 2317981 - RNA, 19 nt, Homo sapiens
  misc_RNA (1)...(19): siRNA sense strand
aggagugcacggauagcaa

SEQ ID NO: 2317982 - RNA, 19 nt, Homo sapiens
  misc_RNA (1)...(19): siRNA sense strand
gcgagagcguggaggagaa

SEQ ID NO: 2317983 - RNA, 19 nt, Homo sapiens
  misc_RNA (1)...(19): siRNA sense strand
aggaagaugaggaggagaa

SEQ ID NO: 2317984 - RNA, 19 nt, Homo sapiens
  misc_RNA (1)...(19): siRNA sense strand
augagaaggcggaggacaa

SEQ ID NO: 2317985 - RNA, 19 nt, Homo sapiens
  misc_RNA (1)...(19): siRNA sense strand
ggucagcagaggagagcaa

SEQ ID NO: 2317986 - RNA, 19 nt, Homo sapiens
  misc_RNA (1)...(19): siRNA sense strand
ucgacaagauccagaacaa

SEQ ID NO: 2317987 - RNA, 19 nt, Homo sapiens
  misc_RNA (1)...(19): siRNA sense strand
cuaacaaggagaaggaaau

SEQ ID NO: 2317988 - RNA, 19 nt, Homo sapiens
  misc_RNA (1)...(19): siRNA sense strand
gcgaugaggaugugaaaca

SEQ ID NO: 2317989 - RNA, 19 nt, Homo sapiens
  misc_RNA (1)...(19): siRNA sense strand
aggagaaggaggaggauga

SEQ ID NO: 2317990 - RNA, 19 nt, Homo sapiens
  misc_RNA (1)...(19): siRNA sense strand
ggcuaaggcgggagauaua

SEQ ID NO: 2317991 - RNA, 19 nt, Homo sapiens
  misc_RNA (1)...(19): siRNA sense strand
gcgaugaggaugagaacau

SEQ ID NO: 2317992 - RNA, 19 nt, Homo sapiens
  misc_RNA (1)...(19): siRNA sense strand
gaggaggagaagacggaaa

SEQ ID NO: 2317993 - RNA, 19 nt, Homo sapiens
  misc_RNA (1)...(19): siRNA sense strand
aggaggaaccagaggaaga

SEQ ID NO: 2317994 - RNA, 19 nt, Homo sapiens
  misc_RNA (1)...(19): siRNA sense strand
aaaaggaagaugaggaaaa

SEQ ID NO: 2317995 - RNA, 19 nt, Homo sapiens
  misc_RNA (1)...(19): siRNA sense strand
gggagaaagaagaaggcuu

SEQ ID NO: 2317996 - RNA, 19 nt, Homo sapiens
  misc_RNA (1)...(19): siRNA sense strand
aggaagaggaggaggagga

SEQ ID NO: 2317997 - RNA, 19 nt, Homo sapiens
  misc_RNA (1)...(19): siRNA sense strand
agagaaggacaaagagauu

SEQ ID NO: 2317998 - RNA, 19 nt, Homo sapiens
  misc_RNA (1)...(19): siRNA sense strand
agaaggacaaagagauuua

SEQ ID NO: 2317999 - RNA, 19 nt, Homo sapiens
  misc_RNA (1)...(19): siRNA sense strand
aggaggaggaggaggaaga

SEQ ID NO: 2318000 - RNA, 19 nt, Homo sapiens
  misc_RNA (1)...(19): siRNA sense strand
ggaaaaggaagaugaggaa

SEQ ID NO: 2318001 - RNA, 19 nt, Homo sapiens
  misc_RNA (1)...(19): siRNA sense strand
cggaggacaucgagaagau

SEQ ID NO: 2318002 - RNA, 19 nt, Homo sapiens
  misc_RNA (1)...(19): siRNA sense strand
gggacaaggcacugaggau

SEQ ID NO: 2318003 - RNA, 19 nt, Homo sapiens
  misc_RNA (1)...(19): siRNA sense strand
acauguuccuggagagcua

SEQ ID NO: 2318004 - RNA, 19 nt, Homo sapiens
  misc_RNA (1)...(19): siRNA sense strand
ggagaaggcacgagaucga

SEQ ID NO: 2318005 - RNA, 19 nt, Homo sapiens
  misc_RNA (1)...(19): siRNA sense strand
ucuaacaaggagaaggaaa

SEQ ID NO: 2318006 - RNA, 19 nt, Homo sapiens
  misc_RNA (1)...(19): siRNA sense strand
gggacgcaguggugggauu

SEQ ID NO: 2318007 - RNA, 19 nt, Homo sapiens
  misc_RNA (1)...(19): siRNA sense strand
cacaugaacaggagauuaa

SEQ ID NO: 2318008 - RNA, 19 nt, Homo sapiens
  misc_RNA (1)...(19): siRNA sense strand
ccuggaaggagcacagaaa

SEQ ID NO: 2318009 - RNA, 19 nt, Homo sapiens
  misc_RNA (1)...(19): siRNA sense strand
uggaaaagguuguguccua

SEQ ID NO: 2318010 - RNA, 19 nt, Homo sapiens
  misc_RNA (1)...(19): siRNA sense strand
aggaggaagagguggaaga

SEQ ID NO: 2318011 - RNA, 19 nt, Homo sapiens
  misc_RNA (1)...(19): siRNA sense strand
aggaggauauggagaccaa

SEQ ID NO: 2318012 - RNA, 19 nt, Homo sapiens
  misc_RNA (1)...(19): siRNA sense strand
acgaggaggaagaggguga

SEQ ID NO: 2318013 - RNA, 19 nt, Homo sapiens
  misc_RNA (1)...(19): siRNA sense strand
gcucaggacucaagccaga

SEQ ID NO: 2318014 - RNA, 19 nt, Homo sapiens
  misc_RNA (1)...(19): siRNA sense strand
acaacaagagcgaggauga

SEQ ID NO: 2318015 - RNA, 19 nt, Homo sapiens
  misc_RNA (1)...(19): siRNA sense strand
uaaacaaggaugagacaga

SEQ ID NO: 2318016 - RNA, 19 nt, Homo sapiens
  misc_RNA (1)...(19): siRNA sense strand
gaauucagcuagauggaga

SEQ ID NO: 2318017 - RNA, 19 nt, Homo sapiens
  misc_RNA (1)...(19): siRNA sense strand
ccaacaguguggaggagau

SEQ ID NO: 2318018 - RNA, 19 nt, Homo sapiens
  misc_RNA (1)...(19): siRNA sense strand
ccaauggcaaagagagcaa

SEQ ID NO: 2318019 - RNA, 19 nt, Homo sapiens
  misc_RNA (1)...(19): siRNA sense strand
cagcagaaggggagaaaga

SEQ ID NO: 2318020 - RNA, 19 nt, Homo sapiens
  misc_RNA (1)...(19): siRNA sense strand
ggaggaggaaccagaggaa

SEQ ID NO: 2318021 - RNA, 19 nt, Homo sapiens
  misc_RNA (1)...(19): siRNA sense strand
ggagaagacggaaaagaaa

SEQ ID NO: 2318022 - RNA, 19 nt, Homo sapiens
  misc_RNA (1)...(19): siRNA sense strand
cagcagugggcgaguggaa

SEQ ID NO: 2318023 - RNA, 19 nt, Homo sapiens
  misc_RNA (1)...(19): siRNA sense strand
gagagaaggucauggcgga

SEQ ID NO: 2318024 - RNA, 19 nt, Homo sapiens
  misc_RNA (1)...(19): siRNA sense strand
agacagaacacacggguca

SEQ ID NO: 2318025 - RNA, 19 nt, Homo sapiens
  misc_RNA (1)...(19): siRNA sense strand
acgaggagaagcagagcaa

SEQ ID NO: 2318026 - RNA, 19 nt, Homo sapiens
  misc_RNA (1)...(19): siRNA sense strand
ucauugaagagcagggcaa

SEQ ID NO: 2318027 - RNA, 19 nt, Homo sapiens
  misc_RNA (1)...(19): siRNA sense strand
gagcagggcaagaggaacu

SEQ ID NO: 2318028 - RNA, 19 nt, Homo sapiens
  misc_RNA (1)...(19): siRNA sense strand
gggcggagaaugagaagga

SEQ ID NO: 2318029 - RNA, 19 nt, Homo sapiens
  misc_RNA (1)...(19): siRNA sense strand
aagagaaaccugaggagga

SEQ ID NO: 2318030 - RNA, 19 nt, Homo sapiens
  misc_RNA (1)...(19): siRNA sense strand
gggagggugaggaggagaa

SEQ ID NO: 2318031 - RNA, 19 nt, Homo sapiens
  misc_RNA (1)...(19): siRNA sense strand
cagaacaacuggcagaaaa

SEQ ID NO: 2318032 - RNA, 19 nt, Homo sapiens
  misc_RNA (1)...(19): siRNA sense strand
aggaggacgaggaggaaga

SEQ ID NO: 2318033 - RNA, 19 nt, Homo sapiens
  misc_RNA (1)...(19): siRNA sense strand
aggaaacagcacaggaaaa

SEQ ID NO: 2318034 - RNA, 19 nt, Homo sapiens
  misc_RNA (1)...(19): siRNA sense strand
gagcaaacuggaugaggau

SEQ ID NO: 2318035 - RNA, 19 nt, Homo sapiens
  misc_RNA (1)...(19): siRNA sense strand
uggaggaccuugugggcau

SEQ ID NO: 2318036 - RNA, 19 nt, Homo sapiens
  misc_RNA (1)...(19): siRNA sense strand
acauagacgaggagcugaa

SEQ ID NO: 2318037 - RNA, 19 nt, Homo sapiens
  misc_RNA (1)...(19): siRNA sense strand
gagaagacggaaaagaaaa

SEQ ID NO: 2318038 - RNA, 19 nt, Homo sapiens
  misc_RNA (1)...(19): siRNA sense strand
agaagaaggcuuggaggaa

SEQ ID NO: 2318039 - RNA, 19 nt, Homo sapiens
  misc_RNA (1)...(19): siRNA sense strand
ggagcggauugcugagcua

SEQ ID NO: 2318040 - RNA, 19 nt, Homo sapiens
  misc_RNA (1)...(19): siRNA sense strand
augagaacaugguguacua

SEQ ID NO: 2318041 - RNA, 19 nt, Homo sapiens
  misc_RNA (1)...(19): siRNA sense strand
cuggaaagagauugugaau

SEQ ID NO: 2318042 - RNA, 19 nt, Homo sapiens
  misc_RNA (1)...(19): siRNA sense strand
ugaacaucauccaggagaa

SEQ ID NO: 2318043 - RNA, 19 nt, Homo sapiens
  misc_RNA (1)...(19): siRNA sense strand
gaggaaacagcacaggaaa

SEQ ID NO: 2318044 - RNA, 19 nt, Homo sapiens
  misc_RNA (1)...(19): siRNA sense strand
ggaagaggaggcagcagaa

SEQ ID NO: 2318045 - RNA, 19 nt, Homo sapiens
  misc_RNA (1)...(19): siRNA sense strand
uggugaagaagaaggaaga

SEQ ID NO: 2318046 - RNA, 19 nt, Homo sapiens
  misc_RNA (1)...(19): siRNA sense strand
gugaagaggaagaugagga

SEQ ID NO: 2318047 - RNA, 19 nt, Homo sapiens
  misc_RNA (1)...(19): siRNA sense strand
ugagaaucaucgucaacaa

SEQ ID NO: 2318048 - RNA, 19 nt, Homo sapiens
  misc_RNA (1)...(19): siRNA sense strand
ccuagcaacuacugggaca

SEQ ID NO: 2318049 - RNA, 19 nt, Homo sapiens
  misc_RNA (1)...(19): siRNA sense strand
cauugagaguccagagguu

SEQ ID NO: 2318050 - RNA, 19 nt, Homo sapiens
  misc_RNA (1)...(19): siRNA sense strand
gaaacagccuuccgggaga

SEQ ID NO: 2318051 - RNA, 19 nt, Homo sapiens
  misc_RNA (1)...(19): siRNA sense strand
gugugguaccugagagcaa

SEQ ID NO: 2318052 - RNA, 19 nt, Homo sapiens
  misc_RNA (1)...(19): siRNA sense strand
agcugugguuggaggaaua

SEQ ID NO: 2318053 - RNA, 19 nt, Homo sapiens
  misc_RNA (1)...(19): siRNA sense strand
guggauuauaggaacaaua

SEQ ID NO: 2318054 - RNA, 19 nt, Homo sapiens
  misc_RNA (1)...(19): siRNA sense strand
cgaacagcuguguggacaa

SEQ ID NO: 2318055 - RNA, 19 nt, Homo sapiens
  misc_RNA (1)...(19): siRNA sense strand
ccuauugggucgauggcga

SEQ ID NO: 2318056 - RNA, 19 nt, Homo sapiens
  misc_RNA (1)...(19): siRNA sense strand
ugggaugcaacguggaaau

SEQ ID NO: 2318057 - RNA, 19 nt, Homo sapiens
  misc_RNA (1)...(19): siRNA sense strand
auuccagagagcaaagaaa

SEQ ID NO: 2318058 - RNA, 19 nt, Homo sapiens
  misc_RNA (1)...(19): siRNA sense strand
gggcauuuguguuggcuuc

SEQ ID NO: 2318059 - RNA, 19 nt, Homo sapiens
  misc_RNA (1)...(19): siRNA sense strand
acuguggauuauaggaaca

SEQ ID NO: 2318060 - RNA, 19 nt, Homo sapiens
  misc_RNA (1)...(19): siRNA sense strand
uggcugaacaagaggaaga

SEQ ID NO: 2318061 - RNA, 19 nt, Homo sapiens
  misc_RNA (1)...(19): siRNA sense strand
cggcaaaggcuauggcaag

SEQ ID NO: 2318062 - RNA, 19 nt, Homo sapiens
  misc_RNA (1)...(19): siRNA sense strand
ccaccaauggcaaggucaa

SEQ ID NO: 2318063 - RNA, 19 nt, Homo sapiens
  misc_RNA (1)...(19): siRNA sense strand
acaccaaguggcugaacaa

SEQ ID NO: 2318064 - RNA, 19 nt, Homo sapiens
  misc_RNA (1)...(19): siRNA sense strand
ggcaagaagaccauagaca

SEQ ID NO: 2318065 - RNA, 19 nt, Homo sapiens
  misc_RNA (1)...(19): siRNA sense strand
ucaaugagguggaagacca

SEQ ID NO: 2318066 - RNA, 19 nt, Homo sapiens
  misc_RNA (1)...(19): siRNA sense strand
ugguuggguucaagaagaa

SEQ ID NO: 2318067 - RNA, 19 nt, Homo sapiens
  misc_RNA (1)...(19): siRNA sense strand
gggcacaccaaguggcuga

SEQ ID NO: 2318068 - RNA, 19 nt, Homo sapiens
  misc_RNA (1)...(19): siRNA sense strand
agaggaagaucaaggccuu

SEQ ID NO: 2318069 - RNA, 19 nt, Homo sapiens
  misc_RNA (1)...(19): siRNA sense strand
cugaacaagaggaagauca

SEQ ID NO: 2318070 - RNA, 19 nt, Homo sapiens
  misc_RNA (1)...(19): siRNA sense strand
caacauaucuggugaccuc

SEQ ID NO: 2318071 - RNA, 19 nt, Homo sapiens
  misc_RNA (1)...(19): siRNA sense strand
gagcagggcaagaagacca

SEQ ID NO: 2318072 - RNA, 19 nt, Homo sapiens
  misc_RNA (1)...(19): siRNA sense strand
gggccaacauaucugguga

SEQ ID NO: 2318073 - RNA, 19 nt, Homo sapiens
  misc_RNA (1)...(19): siRNA sense strand
gcgugugugucaugaggau

SEQ ID NO: 2318074 - RNA, 19 nt, Homo sapiens
  misc_RNA (1)...(19): siRNA sense strand
gaaggaagccagcgccaga

SEQ ID NO: 2318075 - RNA, 19 nt, Homo sapiens
  misc_RNA (1)...(19): siRNA sense strand
ccaagaugaugcaggcgca

SEQ ID NO: 2318076 - RNA, 19 nt, Homo sapiens
  misc_RNA (1)...(19): siRNA sense strand
ugaaugagauugugcugga

SEQ ID NO: 2318077 - RNA, 19 nt, Homo sapiens
  misc_RNA (1)...(19): siRNA sense strand
ggugaggcugaaugagauu

SEQ ID NO: 2318078 - RNA, 19 nt, Homo sapiens
  misc_RNA (1)...(19): siRNA sense strand
ccucaagcaggaaggcaga

SEQ ID NO: 2318079 - RNA, 19 nt, Homo sapiens
  misc_RNA (1)...(19): siRNA sense strand
guggcuaccugcuggccua

SEQ ID NO: 2318080 - RNA, 19 nt, Homo sapiens
  misc_RNA (1)...(19): siRNA sense strand
ccauagggaggaaggggaa

SEQ ID NO: 2318081 - RNA, 19 nt, Homo sapiens
  misc_RNA (1)...(19): siRNA sense strand
cgagaugacugaugggcug

SEQ ID NO: 2318082 - RNA, 19 nt, Homo sapiens
  misc_RNA (1)...(19): siRNA sense strand
agguggagcaaaugcaaga

SEQ ID NO: 2318083 - RNA, 19 nt, Homo sapiens
  misc_RNA (1)...(19): siRNA sense strand
auuacgaagaacagaguca

SEQ ID NO: 2318084 - RNA, 19 nt, Homo sapiens
  misc_RNA (1)...(19): siRNA sense strand
ucgccuggguggagaccuu

SEQ ID NO: 2318085 - RNA, 19 nt, Homo sapiens
  misc_RNA (1)...(19): siRNA sense strand
uugcagagaccgugcggga

SEQ ID NO: 2318086 - RNA, 19 nt, Homo sapiens
  misc_RNA (1)...(19): siRNA sense strand
aggagaaucuggagcagga

SEQ ID NO: 2318087 - RNA, 19 nt, Homo sapiens
  misc_RNA (1)...(19): siRNA sense strand
gcaagauggucaagggcuc

SEQ ID NO: 2318088 - RNA, 19 nt, Homo sapiens
  misc_RNA (1)...(19): siRNA sense strand
aucuggagcaggaggaaua

SEQ ID NO: 2318089 - RNA, 19 nt, Homo sapiens
  misc_RNA (1)...(19): siRNA sense strand
ggaggaauaugaagaccca

SEQ ID NO: 2318090 - RNA, 19 nt, Homo sapiens
  misc_RNA (1)...(19): siRNA sense strand
gggaugaauacgacgaagu

SEQ ID NO: 2318091 - RNA, 19 nt, Homo sapiens
  misc_RNA (1)...(19): siRNA sense strand
augaagacaugauggagga

SEQ ID NO: 2318092 - RNA, 19 nt, Homo sapiens
  misc_RNA (1)...(19): siRNA sense strand
cccuauuaccugagugaca

SEQ ID NO: 2318093 - RNA, 19 nt, Homo sapiens
  misc_RNA (1)...(19): siRNA sense strand
acuuauaacuacaacgugu

SEQ ID NO: 2318094 - RNA, 19 nt, Homo sapiens
  misc_RNA (1)...(19): siRNA sense strand
gucaaagagcagcggauca

SEQ ID NO: 2318095 - RNA, 19 nt, Homo sapiens
  misc_RNA (1)...(19): siRNA sense strand
aggaauaugaagacccaga

SEQ ID NO: 2318096 - RNA, 19 nt, Homo sapiens
  misc_RNA (1)...(19): siRNA sense strand
ccugauggcuucaaggugu

SEQ ID NO: 2318097 - RNA, 19 nt, Homo sapiens
  misc_RNA (1)...(19): siRNA sense strand
ccaucuggaauucuggaaa

SEQ ID NO: 2318098 - RNA, 19 nt, Homo sapiens
  misc_RNA (1)...(19): siRNA sense strand
acaugauggaggagaaucu

SEQ ID NO: 2318099 - RNA, 19 nt, Homo sapiens
  misc_RNA (1)...(19): siRNA sense strand
cagagaggguguuccgcau

SEQ ID NO: 2318100 - RNA, 19 nt, Homo sapiens
  misc_RNA (1)...(19): siRNA sense strand
gaaaagacccggaaccaga

SEQ ID NO: 2318101 - RNA, 19 nt, Homo sapiens
  misc_RNA (1)...(19): siRNA sense strand
acguguugauggugcccaa

SEQ ID NO: 2318102 - RNA, 19 nt, Homo sapiens
  misc_RNA (1)...(19): siRNA sense strand
aggucaaagagcagcggau

SEQ ID NO: 2318103 - RNA, 19 nt, Homo sapiens
  misc_RNA (1)...(19): siRNA sense strand
cagaugugcccuacgucaa

SEQ ID NO: 2318104 - RNA, 19 nt, Homo sapiens
  misc_RNA (1)...(19): siRNA sense strand
gcuccuauuucccuggcaa

SEQ ID NO: 2318105 - RNA, 19 nt, Homo sapiens
  misc_RNA (1)...(19): siRNA sense strand
gaucuauaaaggaggaaaa

SEQ ID NO: 2318106 - RNA, 19 nt, Homo sapiens
  misc_RNA (1)...(19): siRNA sense strand
caacagcacugauagggaa

SEQ ID NO: 2318107 - RNA, 19 nt, Homo sapiens
  misc_RNA (1)...(19): siRNA sense strand
ggaaauggcaccuugggau

SEQ ID NO: 2318108 - RNA, 19 nt, Homo sapiens
  misc_RNA (1)...(19): siRNA sense strand
ggaaggagguauccggguu

SEQ ID NO: 2318109 - RNA, 19 nt, Homo sapiens
  misc_RNA (1)...(19): siRNA sense strand
cugucuugccagugugaua

SEQ ID NO: 2318110 - RNA, 19 nt, Homo sapiens
  misc_RNA (1)...(19): siRNA sense strand
ugccagugugauagagaaa

SEQ ID NO: 2318111 - RNA, 19 nt, Homo sapiens
  misc_RNA (1)...(19): siRNA sense strand
gaacaaaacuaucaggacu

SEQ ID NO: 2318112 - RNA, 19 nt, Homo sapiens
  misc_RNA (1)...(19): siRNA sense strand
cggggaugcuguugaggaa

SEQ ID NO: 2318113 - RNA, 19 nt, Homo sapiens
  misc_RNA (1)...(19): siRNA sense strand
aggagaaauucauggcgga

SEQ ID NO: 2318114 - RNA, 19 nt, Homo sapiens
  misc_RNA (1)...(19): siRNA sense strand
ggagaaauucauggcggaa

SEQ ID NO: 2318115 - RNA, 19 nt, Homo sapiens
  misc_RNA (1)...(19): siRNA sense strand
ccucaaagucaugcaggaa

SEQ ID NO: 2318116 - RNA, 19 nt, Homo sapiens
  misc_RNA (1)...(19): siRNA sense strand
ggaucuauaaaggaggaaa

SEQ ID NO: 2318117 - RNA, 19 nt, Homo sapiens
  misc_RNA (1)...(19): siRNA sense strand
uccaaagaucccagagaga

SEQ ID NO: 2318118 - RNA, 19 nt, Homo sapiens
  misc_RNA (1)...(19): siRNA sense strand
cuuuaaggaagaugaagau

SEQ ID NO: 2318119 - RNA, 19 nt, Homo sapiens
  misc_RNA (1)...(19): siRNA sense strand
aaucucacccagaggcuaa

SEQ ID NO: 2318120 - RNA, 19 nt, Homo sapiens
  misc_RNA (1)...(19): siRNA sense strand
uggcggaaguaaugggauc

SEQ ID NO: 2318121 - RNA, 19 nt, Homo sapiens
  misc_RNA (1)...(19): siRNA sense strand
gggcagaucuugaaccuuc

SEQ ID NO: 2318122 - RNA, 19 nt, Homo sapiens
  misc_RNA (1)...(19): siRNA sense strand
cuucguuggcccaggguga

SEQ ID NO: 2318123 - RNA, 19 nt, Homo sapiens
  misc_RNA (1)...(19): siRNA sense strand
cuauaaaggaggaaaagca

SEQ ID NO: 2318124 - RNA, 19 nt, Homo sapiens
  misc_RNA (1)...(19): siRNA sense strand
ugugggaagccgagagcca

SEQ ID NO: 2318125 - RNA, 19 nt, Homo sapiens
  misc_RNA (1)...(19): siRNA sense strand
gaucaguuuucauggaaca

SEQ ID NO: 2318126 - RNA, 19 nt, Homo sapiens
  misc_RNA (1)...(19): siRNA sense strand
gauaagagacugagccgcu

SEQ ID NO: 2318127 - RNA, 19 nt, Homo sapiens
  misc_RNA (1)...(19): siRNA sense strand
uggaauugcagauaggaaa

SEQ ID NO: 2318128 - RNA, 19 nt, Homo sapiens
  misc_RNA (1)...(19): siRNA sense strand
gugcaucaccugaaggcaa

SEQ ID NO: 2318129 - RNA, 19 nt, Homo sapiens
  misc_RNA (1)...(19): siRNA sense strand
ggagagaagcacaaggagu

SEQ ID NO: 2318130 - RNA, 19 nt, Homo sapiens
  misc_RNA (1)...(19): siRNA sense strand
agggaaaguugugggucua

SEQ ID NO: 2318131 - RNA, 19 nt, Homo sapiens
  misc_RNA (1)...(19): siRNA sense strand
aagggaaaguugugggucu

SEQ ID NO: 2318132 - RNA, 19 nt, Homo sapiens
  misc_RNA (1)...(19): siRNA sense strand
uucaagaccucaagccaaa

SEQ ID NO: 2318133 - RNA, 19 nt, Homo sapiens
  misc_RNA (1)...(19): siRNA sense strand
cuccaaugguagagaucca

SEQ ID NO: 2318134 - RNA, 19 nt, Homo sapiens
  misc_RNA (1)...(19): siRNA sense strand
ugcaaauggacuacagcaa

SEQ ID NO: 2318135 - RNA, 19 nt, Homo sapiens
  misc_RNA (1)...(19): siRNA sense strand
gcacauuggugaaaaggga

SEQ ID NO: 2318136 - RNA, 19 nt, Homo sapiens
  misc_RNA (1)...(19): siRNA sense strand
agucauguggagaugcaaa

SEQ ID NO: 2318137 - RNA, 19 nt, Homo sapiens
  misc_RNA (1)...(19): siRNA sense strand
caucuaaaacacugaagaa

SEQ ID NO: 2318138 - RNA, 19 nt, Homo sapiens
  misc_RNA (1)...(19): siRNA sense strand
gggaaaguugugaacccaa

SEQ ID NO: 2318139 - RNA, 19 nt, Homo sapiens
  misc_RNA (1)...(19): siRNA sense strand
cuggaauugcagauaggaa

SEQ ID NO: 2318140 - RNA, 19 nt, Homo sapiens
  misc_RNA (1)...(19): siRNA sense strand
cugagauuguggagaccuu

SEQ ID NO: 2318141 - RNA, 19 nt, Homo sapiens
  misc_RNA (1)...(19): siRNA sense strand
gcaagaaugcucuggcacu

SEQ ID NO: 2318142 - RNA, 19 nt, Homo sapiens
  misc_RNA (1)...(19): siRNA sense strand
gcuacaauccacugugcau

SEQ ID NO: 2318143 - RNA, 19 nt, Homo sapiens
  misc_RNA (1)...(19): siRNA sense strand
cuacagaagggauggguug

SEQ ID NO: 2318144 - RNA, 19 nt, Homo sapiens
  misc_RNA (1)...(19): siRNA sense strand
auucaagaccucaagccaa

SEQ ID NO: 2318145 - RNA, 19 nt, Homo sapiens
  misc_RNA (1)...(19): siRNA sense strand
ucacagaggacaauggucu

SEQ ID NO: 2318146 - RNA, 19 nt, Homo sapiens
  misc_RNA (1)...(19): siRNA sense strand
aucugaaaccacuggcaaa

SEQ ID NO: 2318147 - RNA, 19 nt, Homo sapiens
  misc_RNA (1)...(19): siRNA sense strand
ccaaagagcaagaaggaga

SEQ ID NO: 2318148 - RNA, 19 nt, Homo sapiens
  misc_RNA (1)...(19): siRNA sense strand
gcucggaagaggaggaaga

SEQ ID NO: 2318149 - RNA, 19 nt, Homo sapiens
  misc_RNA (1)...(19): siRNA sense strand
agacaaagcaaguggugau

SEQ ID NO: 2318150 - RNA, 19 nt, Homo sapiens
  misc_RNA (1)...(19): siRNA sense strand
ggaagaagcagaagccgaa

SEQ ID NO: 2318151 - RNA, 19 nt, Homo sapiens
  misc_RNA (1)...(19): siRNA sense strand
ggaacauccuccaggccaa

SEQ ID NO: 2318152 - RNA, 19 nt, Homo sapiens
  misc_RNA (1)...(19): siRNA sense strand
cugaaaagcccauggacaa

SEQ ID NO: 2318153 - RNA, 19 nt, Homo sapiens
  misc_RNA (1)...(19): siRNA sense strand
aggcaaagucuguggggaa

SEQ ID NO: 2318154 - RNA, 19 nt, Homo sapiens
  misc_RNA (1)...(19): siRNA sense strand
cccuaaaacagguggaaaa

SEQ ID NO: 2318155 - RNA, 19 nt, Homo sapiens
  misc_RNA (1)...(19): siRNA sense strand
gaaagaaggugguggacac

SEQ ID NO: 2318156 - RNA, 19 nt, Homo sapiens
  misc_RNA (1)...(19): siRNA sense strand
agagcaagaaggagaagaa

SEQ ID NO: 2318157 - RNA, 19 nt, Homo sapiens
  misc_RNA (1)...(19): siRNA sense strand
cgacaguucuucagggagu

SEQ ID NO: 2318158 - RNA, 19 nt, Homo sapiens
  misc_RNA (1)...(19): siRNA sense strand
ggacagagacccuggugga

SEQ ID NO: 2318159 - RNA, 19 nt, Homo sapiens
  misc_RNA (1)...(19): siRNA sense strand
aagaaggagaagaagaaau

SEQ ID NO: 2318160 - RNA, 19 nt, Homo sapiens
  misc_RNA (1)...(19): siRNA sense strand
aagccaaggcagagacaga

SEQ ID NO: 2318161 - RNA, 19 nt, Homo sapiens
  misc_RNA (1)...(19): siRNA sense strand
agacagagaaagcuggcaa

SEQ ID NO: 2318162 - RNA, 19 nt, Homo sapiens
  misc_RNA (1)...(19): siRNA sense strand
agacagggccagaggagga

SEQ ID NO: 2318163 - RNA, 19 nt, Homo sapiens
  misc_RNA (1)...(19): siRNA sense strand
gcgaggaaucagacaguga

SEQ ID NO: 2318164 - RNA, 19 nt, Homo sapiens
  misc_RNA (1)...(19): siRNA sense strand
aaucagauagugaggaaga

SEQ ID NO: 2318165 - RNA, 19 nt, Homo sapiens
  misc_RNA (1)...(19): siRNA sense strand
gggaaaggccuccagguga

SEQ ID NO: 2318166 - RNA, 19 nt, Homo sapiens
  misc_RNA (1)...(19): siRNA sense strand
ggagugaggaagaugguga

SEQ ID NO: 2318167 - RNA, 19 nt, Homo sapiens
  misc_RNA (1)...(19): siRNA sense strand
gagaagaagaaauccgaca

SEQ ID NO: 2318168 - RNA, 19 nt, Homo sapiens
  misc_RNA (1)...(19): siRNA sense strand
aaagcaacccaaagagcaa

SEQ ID NO: 2318169 - RNA, 19 nt, Homo sapiens
  misc_RNA (1)...(19): siRNA sense strand
agguaaaggccucugaaaa

SEQ ID NO: 2318170 - RNA, 19 nt, Homo sapiens
  misc_RNA (1)...(19): siRNA sense strand
agacagugacagagaagca

SEQ ID NO: 2318171 - RNA, 19 nt, Homo sapiens
  misc_RNA (1)...(19): siRNA sense strand
cagggaagccagaggagga

SEQ ID NO: 2318172 - RNA, 19 nt, Homo sapiens
  misc_RNA (1)...(19): siRNA sense strand
ggcgaaggccucaggaaaa

SEQ ID NO: 2318173 - RNA, 19 nt, Homo sapiens
  misc_RNA (1)...(19): siRNA sense strand
gcaagaaacaggagggacc

SEQ ID NO: 2318174 - RNA, 19 nt, Homo sapiens
  misc_RNA (1)...(19): siRNA sense strand
gcaaauacuacguuggucu

SEQ ID NO: 2318175 - RNA, 19 nt, Homo sapiens
  misc_RNA (1)...(19): siRNA sense strand
gugaggaaucagauaguga

SEQ ID NO: 2318176 - RNA, 19 nt, Homo sapiens
  misc_RNA (1)...(19): siRNA sense strand
aggaagaagcagaagccga

SEQ ID NO: 2318177 - RNA, 19 nt, Homo sapiens
  misc_RNA (1)...(19): siRNA sense strand
aggcagggaagcaggauga

SEQ ID NO: 2318178 - RNA, 19 nt, Homo sapiens
  misc_RNA (1)...(19): siRNA sense strand
cugggaagacgguggccaa

SEQ ID NO: 2318179 - RNA, 19 nt, Homo sapiens
  misc_RNA (1)...(19): siRNA sense strand
ugcuggaacaggaaagaaa

SEQ ID NO: 2318180 - RNA, 19 nt, Homo sapiens
  misc_RNA (1)...(19): siRNA sense strand
ccucagagcuuggucggaa

SEQ ID NO: 2318181 - RNA, 19 nt, Homo sapiens
  misc_RNA (1)...(19): siRNA sense strand
aggugaagcccuuggggaa

SEQ ID NO: 2318182 - RNA, 19 nt, Homo sapiens
  misc_RNA (1)...(19): siRNA sense strand
aagaugacccagauggcaa

SEQ ID NO: 2318183 - RNA, 19 nt, Homo sapiens
  misc_RNA (1)...(19): siRNA sense strand
gugaugucaaggagaagaa

SEQ ID NO: 2318184 - RNA, 19 nt, Homo sapiens
  misc_RNA (1)...(19): siRNA sense strand
cagauagugaggaagagaa

SEQ ID NO: 2318185 - RNA, 19 nt, Homo sapiens
  misc_RNA (1)...(19): siRNA sense strand
aggaggaaucagacaguga

SEQ ID NO: 2318186 - RNA, 19 nt, Homo sapiens
  misc_RNA (1)...(19): siRNA sense strand
aggaggagucagacaguga

SEQ ID NO: 2318187 - RNA, 19 nt, Homo sapiens
  misc_RNA (1)...(19): siRNA sense strand
aaagaaagaagguggugga

SEQ ID NO: 2318188 - RNA, 19 nt, Homo sapiens
  misc_RNA (1)...(19): siRNA sense strand
agaagaagaaauccgacaa

SEQ ID NO: 2318189 - RNA, 19 nt, Homo sapiens
  misc_RNA (1)...(19): siRNA sense strand
ccguaacccuucuggacau

SEQ ID NO: 2318190 - RNA, 19 nt, Homo sapiens
  misc_RNA (1)...(19): siRNA sense strand
ugaagccaccagugagaaa

SEQ ID NO: 2318191 - RNA, 19 nt, Homo sapiens
  misc_RNA (1)...(19): siRNA sense strand
ucaaggagaagaaagggaa

SEQ ID NO: 2318192 - RNA, 19 nt, Homo sapiens
  misc_RNA (1)...(19): siRNA sense strand
agcaagaaggagaagaaga

SEQ ID NO: 2318193 - RNA, 19 nt, Homo sapiens
  misc_RNA (1)...(19): siRNA sense strand
uugcaguaaccgugggaca

SEQ ID NO: 2318194 - RNA, 19 nt, Homo sapiens
  misc_RNA (1)...(19): siRNA sense strand
agcggaaggcagaggaaga

SEQ ID NO: 2318195 - RNA, 19 nt, Homo sapiens
  misc_RNA (1)...(19): siRNA sense strand
agucagacagugaggagga

SEQ ID NO: 2318196 - RNA, 19 nt, Homo sapiens
  misc_RNA (1)...(19): siRNA sense strand
gcuccagugaugagacaga

SEQ ID NO: 2318197 - RNA, 19 nt, Homo sapiens
  misc_RNA (1)...(19): siRNA sense strand
cagcagugauggagaggug

SEQ ID NO: 2318198 - RNA, 19 nt, Homo sapiens
  misc_RNA (1)...(19): siRNA sense strand
gcugaaaagcccauggaca

SEQ ID NO: 2318199 - RNA, 19 nt, Homo sapiens
  misc_RNA (1)...(19): siRNA sense strand
gagugaggaagauggugaa

SEQ ID NO: 2318200 - RNA, 19 nt, Homo sapiens
  misc_RNA (1)...(19): siRNA sense strand
cuguagccguccaggucaa

SEQ ID NO: 2318201 - RNA, 19 nt, Homo sapiens
  misc_RNA (1)...(19): siRNA sense strand
ugacugcagcucaggcaaa

SEQ ID NO: 2318202 - RNA, 19 nt, Homo sapiens
  misc_RNA (1)...(19): siRNA sense strand
ggcaaagucuguggggaaa

SEQ ID NO: 2318203 - RNA, 19 nt, Homo sapiens
  misc_RNA (1)...(19): siRNA sense strand
ccaggagcaagaagaagaa

SEQ ID NO: 2318204 - RNA, 19 nt, Homo sapiens
  misc_RNA (1)...(19): siRNA sense strand
cggaagaggaggaagaagc

SEQ ID NO: 2318205 - RNA, 19 nt, Homo sapiens
  misc_RNA (1)...(19): siRNA sense strand
aggcagagacagagaaagc

SEQ ID NO: 2318206 - RNA, 19 nt, Homo sapiens
  misc_RNA (1)...(19): siRNA sense strand
ggaagugggaggaggacuc

SEQ ID NO: 2318207 - RNA, 19 nt, Homo sapiens
  misc_RNA (1)...(19): siRNA sense strand
ccaaggagguagugcugca

SEQ ID NO: 2318208 - RNA, 19 nt, Homo sapiens
  misc_RNA (1)...(19): siRNA sense strand
gugagugcccugaaggcua

SEQ ID NO: 2318209 - RNA, 19 nt, Homo sapiens
  misc_RNA (1)...(19): siRNA sense strand
gggacugcagcguggagaa

SEQ ID NO: 2318210 - RNA, 19 nt, Homo sapiens
  misc_RNA (1)...(19): siRNA sense strand
aagugaaggccgauggcuu

SEQ ID NO: 2318211 - RNA, 19 nt, Homo sapiens
  misc_RNA (1)...(19): siRNA sense strand
ccucaaugccagucagauc

SEQ ID NO: 2318212 - RNA, 19 nt, Homo sapiens
  misc_RNA (1)...(19): siRNA sense strand
ggguuacgggagacaacaa

SEQ ID NO: 2318213 - RNA, 19 nt, Homo sapiens
  misc_RNA (1)...(19): siRNA sense strand
agaccaaggcacaggacau

SEQ ID NO: 2318214 - RNA, 19 nt, Homo sapiens
  misc_RNA (1)...(19): siRNA sense strand
cagcagggauucagagcca

SEQ ID NO: 2318215 - RNA, 19 nt, Homo sapiens
  misc_RNA (1)...(19): siRNA sense strand
gaauggaacucguggacuc

SEQ ID NO: 2318216 - RNA, 19 nt, Homo sapiens
  misc_RNA (1)...(19): siRNA sense strand
cccagauggaggagaccaa

SEQ ID NO: 2318217 - RNA, 19 nt, Homo sapiens
  misc_RNA (1)...(19): siRNA sense strand
uggaggagaccaaggcaca

SEQ ID NO: 2318218 - RNA, 19 nt, Homo sapiens
  misc_RNA (1)...(19): siRNA sense strand
ccuccgaguccucaguaaa

SEQ ID NO: 2318219 - RNA, 19 nt, Homo sapiens
  misc_RNA (1)...(19): siRNA sense strand
agaccaaggcacaggacau

SEQ ID NO: 2318220 - RNA, 19 nt, Homo sapiens
  misc_RNA (1)...(19): siRNA sense strand
cagcagggauucagagcca

SEQ ID NO: 2318221 - RNA, 19 nt, Homo sapiens
  misc_RNA (1)...(19): siRNA sense strand
gaauggaacucguggacuc

SEQ ID NO: 2318222 - RNA, 19 nt, Homo sapiens
  misc_RNA (1)...(19): siRNA sense strand
cccagauggaggagaccaa

SEQ ID NO: 2318223 - RNA, 19 nt, Homo sapiens
  misc_RNA (1)...(19): siRNA sense strand
uggaggagaccaaggcaca

SEQ ID NO: 2318224 - RNA, 19 nt, Homo sapiens
  misc_RNA (1)...(19): siRNA sense strand
ccuccgaguccucaguaaa

SEQ ID NO: 2318225 - RNA, 19 nt, Homo sapiens
  misc_RNA (1)...(19): siRNA sense strand
agaccaaggcacaggacau

SEQ ID NO: 2318226 - RNA, 19 nt, Homo sapiens
  misc_RNA (1)...(19): siRNA sense strand
cagcagggauucagagcca

SEQ ID NO: 2318227 - RNA, 19 nt, Homo sapiens
  misc_RNA (1)...(19): siRNA sense strand
ucuccuaacugcaaggcua

SEQ ID NO: 2318228 - RNA, 19 nt, Homo sapiens
  misc_RNA (1)...(19): siRNA sense strand
gaauggaacucguggacuc

SEQ ID NO: 2318229 - RNA, 19 nt, Homo sapiens
  misc_RNA (1)...(19): siRNA sense strand
cccagauggaggagaccaa

SEQ ID NO: 2318230 - RNA, 19 nt, Homo sapiens
  misc_RNA (1)...(19): siRNA sense strand
uggaggagaccaaggcaca

SEQ ID NO: 2318231 - RNA, 19 nt, Homo sapiens
  misc_RNA (1)...(19): siRNA sense strand
ccuccgaguccucaguaaa

SEQ ID NO: 2318232 - RNA, 19 nt, Homo sapiens
  misc_RNA (1)...(19): siRNA sense strand
ccaggaaggaagagagaau

SEQ ID NO: 2318233 - RNA, 19 nt, Homo sapiens
  misc_RNA (1)...(19): siRNA sense strand
gggcaguaguggaagcaga

SEQ ID NO: 2318234 - RNA, 19 nt, Homo sapiens
  misc_RNA (1)...(19): siRNA sense strand
ccucauaugaagauggcua

SEQ ID NO: 2318235 - RNA, 19 nt, Homo sapiens
  misc_RNA (1)...(19): siRNA sense strand
ccucgaagguggaagagau

SEQ ID NO: 2318236 - RNA, 19 nt, Homo sapiens
  misc_RNA (1)...(19): siRNA sense strand
gcagcaugaccgagaggaa

SEQ ID NO: 2318237 - RNA, 19 nt, Homo sapiens
  misc_RNA (1)...(19): siRNA sense strand
aaggaaacacagaggaaga

SEQ ID NO: 2318238 - RNA, 19 nt, Homo sapiens
  misc_RNA (1)...(19): siRNA sense strand
guaauaagagcgagagcca

SEQ ID NO: 2318239 - RNA, 19 nt, Homo sapiens
  misc_RNA (1)...(19): siRNA sense strand
aguugaaguuacaagagaa

SEQ ID NO: 2318240 - RNA, 19 nt, Homo sapiens
  misc_RNA (1)...(19): siRNA sense strand
aagaaguggucaagccaau

SEQ ID NO: 2318241 - RNA, 19 nt, Homo sapiens
  misc_RNA (1)...(19): siRNA sense strand
agacugaggagcuguuaaa

SEQ ID NO: 2318242 - RNA, 19 nt, Homo sapiens
  misc_RNA (1)...(19): siRNA sense strand
ugauggagcaugugcgaau

SEQ ID NO: 2318243 - RNA, 19 nt, Homo sapiens
  misc_RNA (1)...(19): siRNA sense strand
ccucugaagaagauaguau

SEQ ID NO: 2318244 - RNA, 19 nt, Homo sapiens
  misc_RNA (1)...(19): siRNA sense strand
ccaugaaagaucaguugaa

SEQ ID NO: 2318245 - RNA, 19 nt, Homo sapiens
  misc_RNA (1)...(19): siRNA sense strand
cuggaggacugcaggaaca

SEQ ID NO: 2318246 - RNA, 19 nt, Homo sapiens
  misc_RNA (1)...(19): siRNA sense strand
cagcgugacacuaugguaa

SEQ ID NO: 2318247 - RNA, 19 nt, Homo sapiens
  misc_RNA (1)...(19): siRNA sense strand
agguggaagagauuagaaa

SEQ ID NO: 2318248 - RNA, 19 nt, Homo sapiens
  misc_RNA (1)...(19): siRNA sense strand
agacgaagcuggaggacug

SEQ ID NO: 2318249 - RNA, 19 nt, Homo sapiens
  misc_RNA (1)...(19): siRNA sense strand
uuaacgaauaugugggcaa

SEQ ID NO: 2318250 - RNA, 19 nt, Homo sapiens
  misc_RNA (1)...(19): siRNA sense strand
aggaaguagaaaugaugaa

SEQ ID NO: 2318251 - RNA, 19 nt, Homo sapiens
  misc_RNA (1)...(19): siRNA sense strand
cagccaucuuggaagcaua

SEQ ID NO: 2318252 - RNA, 19 nt, Homo sapiens
  misc_RNA (1)...(19): siRNA sense strand
caucauggugccugaagaa

SEQ ID NO: 2318253 - RNA, 19 nt, Homo sapiens
  misc_RNA (1)...(19): siRNA sense strand
gcgugaacccugagccuuu

SEQ ID NO: 2318254 - RNA, 19 nt, Homo sapiens
  misc_RNA (1)...(19): siRNA sense strand
guggauuauuaccuggaaa

SEQ ID NO: 2318255 - RNA, 19 nt, Homo sapiens
  misc_RNA (1)...(19): siRNA sense strand
agguuagucugcagaaaga

SEQ ID NO: 2318256 - RNA, 19 nt, Homo sapiens
  misc_RNA (1)...(19): siRNA sense strand
gccaggaauuacagacgaa

SEQ ID NO: 2318257 - RNA, 19 nt, Homo sapiens
  misc_RNA (1)...(19): siRNA sense strand
uggaagugcuggacagacu

SEQ ID NO: 2318258 - RNA, 19 nt, Homo sapiens
  misc_RNA (1)...(19): siRNA sense strand
ccaacaacaagguguguca

SEQ ID NO: 2318259 - RNA, 19 nt, Homo sapiens
  misc_RNA (1)...(19): siRNA sense strand
uguuugaauuggagaucuu

SEQ ID NO: 2318260 - RNA, 19 nt, Homo sapiens
  misc_RNA (1)...(19): siRNA sense strand
guggaagagauuagaaacu

SEQ ID NO: 2318261 - RNA, 19 nt, Homo sapiens
  misc_RNA (1)...(19): siRNA sense strand
gggagacgacuaugggaga

SEQ ID NO: 2318262 - RNA, 19 nt, Homo sapiens
  misc_RNA (1)...(19): siRNA sense strand
ggauagaacugaagaaggc

SEQ ID NO: 2318263 - RNA, 19 nt, Homo sapiens
  misc_RNA (1)...(19): siRNA sense strand
gcugauaacugaaccacca

SEQ ID NO: 2318264 - RNA, 19 nt, Homo sapiens
  misc_RNA (1)...(19): siRNA sense strand
augaaagcccugcgggaga

SEQ ID NO: 2318265 - RNA, 19 nt, Homo sapiens
  misc_RNA (1)...(19): siRNA sense strand
cugagagccuaaagacaga

SEQ ID NO: 2318266 - RNA, 19 nt, Homo sapiens
  misc_RNA (1)...(19): siRNA sense strand
gcugcaauaucuagagaac

SEQ ID NO: 2318267 - RNA, 19 nt, Homo sapiens
  misc_RNA (1)...(19): siRNA sense strand
aguuacaagagaaggacau

SEQ ID NO: 2318268 - RNA, 19 nt, Homo sapiens
  misc_RNA (1)...(19): siRNA sense strand
agauaaagaagaagcugca

SEQ ID NO: 2318269 - RNA, 19 nt, Homo sapiens
  misc_RNA (1)...(19): siRNA sense strand
auggcagguuggagaaaga

SEQ ID NO: 2318270 - RNA, 19 nt, Homo sapiens
  misc_RNA (1)...(19): siRNA sense strand
gccacaacggugagaccaa

SEQ ID NO: 2318271 - RNA, 19 nt, Homo sapiens
  misc_RNA (1)...(19): siRNA sense strand
ugcaagagccacaugacaa

SEQ ID NO: 2318272 - RNA, 19 nt, Homo sapiens
  misc_RNA (1)...(19): siRNA sense strand
aagugaucuuccaggguuu

SEQ ID NO: 2318273 - RNA, 19 nt, Homo sapiens
  misc_RNA (1)...(19): siRNA sense strand
ugaaguuacaagagaagga

SEQ ID NO: 2318274 - RNA, 19 nt, Homo sapiens
  misc_RNA (1)...(19): siRNA sense strand
cugaagaaggccaacaaca

SEQ ID NO: 2318275 - RNA, 19 nt, Homo sapiens
  misc_RNA (1)...(19): siRNA sense strand
gguaugaaggcucgagagu

SEQ ID NO: 2318276 - RNA, 19 nt, Homo sapiens
  misc_RNA (1)...(19): siRNA sense strand
cggcaugaccaguagccuu

SEQ ID NO: 2318277 - RNA, 19 nt, Homo sapiens
  misc_RNA (1)...(19): siRNA sense strand
aaggaagagagaauggauu

SEQ ID NO: 2318278 - RNA, 19 nt, Homo sapiens
  misc_RNA (1)...(19): siRNA sense strand
ugaucuggccucugaagaa

SEQ ID NO: 2318279 - RNA, 19 nt, Homo sapiens
  misc_RNA (1)...(19): siRNA sense strand
aaaaggaaacacagaggaa

SEQ ID NO: 2318280 - RNA, 19 nt, Homo sapiens
  misc_RNA (1)...(19): siRNA sense strand
uaaccaagcuccacagcca

SEQ ID NO: 2318281 - RNA, 19 nt, Homo sapiens
  misc_RNA (1)...(19): siRNA sense strand
auaaagaagaagcugcaau

SEQ ID NO: 2318282 - RNA, 19 nt, Homo sapiens
  misc_RNA (1)...(19): siRNA sense strand
cucgagaguuauuucguaa

SEQ ID NO: 2318283 - RNA, 19 nt, Homo sapiens
  misc_RNA (1)...(19): siRNA sense strand
ggaauguacccuugcaacu

SEQ ID NO: 2318284 - RNA, 19 nt, Homo sapiens
  misc_RNA (1)...(19): siRNA sense strand
ccuggagacuuuugaagaa

SEQ ID NO: 2318285 - RNA, 19 nt, Homo sapiens
  misc_RNA (1)...(19): siRNA sense strand
acagaauagcuaugggugu

SEQ ID NO: 2318286 - RNA, 19 nt, Homo sapiens
  misc_RNA (1)...(19): siRNA sense strand
cggaugacuacgugcacau

SEQ ID NO: 2318287 - RNA, 19 nt, Homo sapiens
  misc_RNA (1)...(19): siRNA sense strand
gagcuguuaaagaaagcaa

SEQ ID NO: 2318288 - RNA, 19 nt, Homo sapiens
  misc_RNA (1)...(19): siRNA sense strand
ggcugauguuguuaaauau

SEQ ID NO: 2318289 - RNA, 19 nt, Homo sapiens
  misc_RNA (1)...(19): siRNA sense strand
ccaucgacacggcugauaa

SEQ ID NO: 2318290 - RNA, 19 nt, Homo sapiens
  misc_RNA (1)...(19): siRNA sense strand
caucgaaaggagagagugu

SEQ ID NO: 2318291 - RNA, 19 nt, Homo sapiens
  misc_RNA (1)...(19): siRNA sense strand
aaguguggcaagugcaaua

SEQ ID NO: 2318292 - RNA, 19 nt, Homo sapiens
  misc_RNA (1)...(19): siRNA sense strand
agaaauaccaggaugccca

SEQ ID NO: 2318293 - RNA, 19 nt, Homo sapiens
  misc_RNA (1)...(19): siRNA sense strand
ccaaauaugcucuguccca

SEQ ID NO: 2318294 - RNA, 19 nt, Homo sapiens
  misc_RNA (1)...(19): siRNA sense strand
acgggauaucaauggcaaa

SEQ ID NO: 2318295 - RNA, 19 nt, Homo sapiens
  misc_RNA (1)...(19): siRNA sense strand
gugaagacauaaugggcua

SEQ ID NO: 2318296 - RNA, 19 nt, Homo sapiens
  misc_RNA (1)...(19): siRNA sense strand
ggacaaagcuggaugcugu

SEQ ID NO: 2318297 - RNA, 19 nt, Homo sapiens
  misc_RNA (1)...(19): siRNA sense strand
uugaagaacaagaggauga

SEQ ID NO: 2318298 - RNA, 19 nt, Homo sapiens
  misc_RNA (1)...(19): siRNA sense strand
ccuucuacaauuugaguaa

SEQ ID NO: 2318299 - RNA, 19 nt, Homo sapiens
  misc_RNA (1)...(19): siRNA sense strand
cagaagaaaaucagaggaa

SEQ ID NO: 2318300 - RNA, 19 nt, Homo sapiens
  misc_RNA (1)...(19): siRNA sense strand
cugaaggaacugauagcaa

SEQ ID NO: 2318301 - RNA, 19 nt, Homo sapiens
  misc_RNA (1)...(19): siRNA sense strand
aggaacugauagcaagaaa

SEQ ID NO: 2318302 - RNA, 19 nt, Homo sapiens
  misc_RNA (1)...(19): siRNA sense strand
aggaauaugaagagaaucu

SEQ ID NO: 2318303 - RNA, 19 nt, Homo sapiens
  misc_RNA (1)...(19): siRNA sense strand
ccaaagaagcaaggccaaa

SEQ ID NO: 2318304 - RNA, 19 nt, Homo sapiens
  misc_RNA (1)...(19): siRNA sense strand
aauaaguagcuaugccaaa

SEQ ID NO: 2318305 - RNA, 19 nt, Homo sapiens
  misc_RNA (1)...(19): siRNA sense strand
ccacuuaacuccugugcca

SEQ ID NO: 2318306 - RNA, 19 nt, Homo sapiens
  misc_RNA (1)...(19): siRNA sense strand
augaagagaaucuggguga

SEQ ID NO: 2318307 - RNA, 19 nt, Homo sapiens
  misc_RNA (1)...(19): siRNA sense strand
ccuaaaguuccuuggcauu

SEQ ID NO: 2318308 - RNA, 19 nt, Homo sapiens
  misc_RNA (1)...(19): siRNA sense strand
agagcuugcgccagagaaa

SEQ ID NO: 2318309 - RNA, 19 nt, Homo sapiens
  misc_RNA (1)...(19): siRNA sense strand
ugucuuugcaagcgaguua

SEQ ID NO: 2318310 - RNA, 19 nt, Homo sapiens
  misc_RNA (1)...(19): siRNA sense strand
agaugcauuuggaggagua

SEQ ID NO: 2318311 - RNA, 19 nt, Homo sapiens
  misc_RNA (1)...(19): siRNA sense strand
gaagaaaaucagaggaauc

SEQ ID NO: 2318312 - RNA, 19 nt, Homo sapiens
  misc_RNA (1)...(19): siRNA sense strand
augcagagcuugcgccaga

SEQ ID NO: 2318313 - RNA, 19 nt, Homo sapiens
  misc_RNA (1)...(19): siRNA sense strand
cuuugaagaacaagaggau

SEQ ID NO: 2318314 - RNA, 19 nt, Homo sapiens
  misc_RNA (1)...(19): siRNA sense strand
gccaaaucucagaagagua

SEQ ID NO: 2318315 - RNA, 19 nt, Homo sapiens
  misc_RNA (1)...(19): siRNA sense strand
ccaaaggccuggagcaccu

SEQ ID NO: 2318316 - RNA, 19 nt, Homo sapiens
  misc_RNA (1)...(19): siRNA sense strand
aguccaaguuccaggauac

SEQ ID NO: 2318317 - RNA, 19 nt, Homo sapiens
  misc_RNA (1)...(19): siRNA sense strand
ccaaaauugccaagaggau

SEQ ID NO: 2318318 - RNA, 19 nt, Homo sapiens
  misc_RNA (1)...(19): siRNA sense strand
gucuaugaacugauugaaa

SEQ ID NO: 2318319 - RNA, 19 nt, Homo sapiens
  misc_RNA (1)...(19): siRNA sense strand
gcaaggauauucaacgcau

SEQ ID NO: 2318320 - RNA, 19 nt, Homo sapiens
  misc_RNA (1)...(19): siRNA sense strand
gugacagcauuguugggua

SEQ ID NO: 2318321 - RNA, 19 nt, Homo sapiens
  misc_RNA (1)...(19): siRNA sense strand
cagaagaguauaugcaaac

SEQ ID NO: 2318322 - RNA, 19 nt, Homo sapiens
  misc_RNA (1)...(19): siRNA sense strand
gcaagaaacaccuggacuc

SEQ ID NO: 2318323 - RNA, 19 nt, Homo sapiens
  misc_RNA (1)...(19): siRNA sense strand
caauuugaguaaagugacu

SEQ ID NO: 2318324 - RNA, 19 nt, Homo sapiens
  misc_RNA (1)...(19): siRNA sense strand
cccaaagaagcaaggccaa

SEQ ID NO: 2318325 - RNA, 19 nt, Homo sapiens
  misc_RNA (1)...(19): siRNA sense strand
acacugaagcuguacaaca

SEQ ID NO: 2318326 - RNA, 19 nt, Homo sapiens
  misc_RNA (1)...(19): siRNA sense strand
gguacaaggaaaaguccaa

SEQ ID NO: 2318327 - RNA, 19 nt, Homo sapiens
  misc_RNA (1)...(19): siRNA sense strand
gaauaaguagcuaugccaa

SEQ ID NO: 2318328 - RNA, 19 nt, Homo sapiens
  misc_RNA (1)...(19): siRNA sense strand
agaauaaauaccugacagu

SEQ ID NO: 2318329 - RNA, 19 nt, Homo sapiens
  misc_RNA (1)...(19): siRNA sense strand
ggaauaaguagcuaugcca

SEQ ID NO: 2318330 - RNA, 19 nt, Homo sapiens
  misc_RNA (1)...(19): siRNA sense strand
ggauaugcuuucaauggga

SEQ ID NO: 2318331 - RNA, 19 nt, Homo sapiens
  misc_RNA (1)...(19): siRNA sense strand
aggaguauacaguggacca

SEQ ID NO: 2318332 - RNA, 19 nt, Homo sapiens
  misc_RNA (1)...(19): siRNA sense strand
aagaacaagaggaugagau

SEQ ID NO: 2318333 - RNA, 19 nt, Homo sapiens
  misc_RNA (1)...(19): siRNA sense strand
agaacaagaggaugagauc

SEQ ID NO: 2318334 - RNA, 19 nt, Homo sapiens
  misc_RNA (1)...(19): siRNA sense strand
acauaaugggcuacaaguu

SEQ ID NO: 2318335 - RNA, 19 nt, Homo sapiens
  misc_RNA (1)...(19): siRNA sense strand
auguguaaugagagcagua

SEQ ID NO: 2318336 - RNA, 19 nt, Homo sapiens
  misc_RNA (1)...(19): siRNA sense strand
aaguggaaauagacaccaa

SEQ ID NO: 2318337 - RNA, 19 nt, Homo sapiens
  misc_RNA (1)...(19): siRNA sense strand
cauccaaagaucugggcua

SEQ ID NO: 2318338 - RNA, 19 nt, Homo sapiens
  misc_RNA (1)...(19): siRNA sense strand
ucuaagaaccugauggaga

SEQ ID NO: 2318339 - RNA, 19 nt, Homo sapiens
  misc_RNA (1)...(19): siRNA sense strand
gcguaauccuggaaaccau

SEQ ID NO: 2318340 - RNA, 19 nt, Homo sapiens
  misc_RNA (1)...(19): siRNA sense strand
caagaaauccagaagcuga

SEQ ID NO: 2318341 - RNA, 19 nt, Homo sapiens
  misc_RNA (1)...(19): siRNA sense strand
cuuuagaaauacacuggaa

SEQ ID NO: 2318342 - RNA, 19 nt, Homo sapiens
  misc_RNA (1)...(19): siRNA sense strand
augcauuuguugacaguau

SEQ ID NO: 2318343 - RNA, 19 nt, Homo sapiens
  misc_RNA (1)...(19): siRNA sense strand
cuggcaacuucaugggauu

SEQ ID NO: 2318344 - RNA, 19 nt, Homo sapiens
  misc_RNA (1)...(19): siRNA sense strand
gggaacaagaaauccagaa

SEQ ID NO: 2318345 - RNA, 19 nt, Homo sapiens
  misc_RNA (1)...(19): siRNA sense strand
ucucaaagcagcaugcaca

SEQ ID NO: 2318346 - RNA, 19 nt, Homo sapiens
  misc_RNA (1)...(19): siRNA sense strand
uaguccacuuacugggaua

SEQ ID NO: 2318347 - RNA, 19 nt, Homo sapiens
  misc_RNA (1)...(19): siRNA sense strand
ucuacaagauucagaccca

SEQ ID NO: 2318348 - RNA, 19 nt, Homo sapiens
  misc_RNA (1)...(19): siRNA sense strand
gagaaagaggauuaccaca

SEQ ID NO: 2318349 - RNA, 19 nt, Homo sapiens
  misc_RNA (1)...(19): siRNA sense strand
caucuauaugaauggaaca

SEQ ID NO: 2318350 - RNA, 19 nt, Homo sapiens
  misc_RNA (1)...(19): siRNA sense strand
guuuaguguaccugagaua

SEQ ID NO: 2318351 - RNA, 19 nt, Homo sapiens
  misc_RNA (1)...(19): siRNA sense strand
gaugaauggcugaggagau

SEQ ID NO: 2318352 - RNA, 19 nt, Homo sapiens
  misc_RNA (1)...(19): siRNA sense strand
augaauggcugaggagaua

SEQ ID NO: 2318353 - RNA, 19 nt, Homo sapiens
  misc_RNA (1)...(19): siRNA sense strand
cgccacaauuugagaacau

SEQ ID NO: 2318354 - RNA, 19 nt, Homo sapiens
  misc_RNA (1)...(19): siRNA sense strand
ggguaggacaggaaagcuu

SEQ ID NO: 2318355 - RNA, 19 nt, Homo sapiens
  misc_RNA (1)...(19): siRNA sense strand
guaaagaagaaaagaacca

SEQ ID NO: 2318356 - RNA, 19 nt, Homo sapiens
  misc_RNA (1)...(19): siRNA sense strand
ccaggagaucagaagaaau

SEQ ID NO: 2318357 - RNA, 19 nt, Homo sapiens
  misc_RNA (1)...(19): siRNA sense strand
caccaggagaucagaagaa

SEQ ID NO: 2318358 - RNA, 19 nt, Homo sapiens
  misc_RNA (1)...(19): siRNA sense strand
gggccaauuaggagaaauc

SEQ ID NO: 2318359 - RNA, 19 nt, Homo sapiens
  misc_RNA (1)...(19): siRNA sense strand
cuaaucagucuguggucua

SEQ ID NO: 2318360 - RNA, 19 nt, Homo sapiens
  misc_RNA (1)...(19): siRNA sense strand
acggaugacuugaugggau

SEQ ID NO: 2318361 - RNA, 19 nt, Homo sapiens
  misc_RNA (1)...(19): siRNA sense strand
ugggauacacuuaugaaau

SEQ ID NO: 2318362 - RNA, 19 nt, Homo sapiens
  misc_RNA (1)...(19): siRNA sense strand
cggaugacuugaugggauc

SEQ ID NO: 2318363 - RNA, 19 nt, Homo sapiens
  misc_RNA (1)...(19): siRNA sense strand
ccacaauuugagaacauuu

SEQ ID NO: 2318364 - RNA, 19 nt, Homo sapiens
  misc_RNA (1)...(19): siRNA sense strand
gggcccuggauauggcaaa

SEQ ID NO: 2318365 - RNA, 19 nt, Homo sapiens
  misc_RNA (1)...(19): siRNA sense strand
guaucaaugcuaugcugaa

SEQ ID NO: 2318366 - RNA, 19 nt, Homo sapiens
  misc_RNA (1)...(19): siRNA sense strand
acacuauuacucagucaaa

SEQ ID NO: 2318367 - RNA, 19 nt, Homo sapiens
  misc_RNA (1)...(19): siRNA sense strand
caguggaagguuacaguga

SEQ ID NO: 2318368 - RNA, 19 nt, Homo sapiens
  misc_RNA (1)...(19): siRNA sense strand
caguauggaugaagcuaac

SEQ ID NO: 2318369 - RNA, 19 nt, Homo sapiens
  misc_RNA (1)...(19): siRNA sense strand
agaugcagucuuugaugaa

SEQ ID NO: 2318370 - RNA, 19 nt, Homo sapiens
  misc_RNA (1)...(19): siRNA sense strand
caucagagacggagcauuu

SEQ ID NO: 2318371 - RNA, 19 nt, Homo sapiens
  misc_RNA (1)...(19): siRNA sense strand
gagaagaaagcuauggcaa

SEQ ID NO: 2318372 - RNA, 19 nt, Homo sapiens
  misc_RNA (1)...(19): siRNA sense strand
cggaaaugcuuggggaaaa

SEQ ID NO: 2318373 - RNA, 19 nt, Homo sapiens
  misc_RNA (1)...(19): siRNA sense strand
gcuuauggcuaccggaaau

SEQ ID NO: 2318374 - RNA, 19 nt, Homo sapiens
  misc_RNA (1)...(19): siRNA sense strand
gacaaaaguuacaaggaga

SEQ ID NO: 2318375 - RNA, 19 nt, Homo sapiens
  misc_RNA (1)...(19): siRNA sense strand
gggcaaaaucccucagaca

SEQ ID NO: 2318376 - RNA, 19 nt, Homo sapiens
  misc_RNA (1)...(19): siRNA sense strand
cccugaauguucuggaaau

SEQ ID NO: 2318377 - RNA, 19 nt, Homo sapiens
  misc_RNA (1)...(19): siRNA sense strand
cccaggaauuugaagccua

SEQ ID NO: 2318378 - RNA, 19 nt, Homo sapiens
  misc_RNA (1)...(19): siRNA sense strand
ccggaaaugcuuggggaaa

SEQ ID NO: 2318379 - RNA, 19 nt, Homo sapiens
  misc_RNA (1)...(19): siRNA sense strand
acaugaaauaguuguccua

SEQ ID NO: 2318380 - RNA, 19 nt, Homo sapiens
  misc_RNA (1)...(19): siRNA sense strand
gggugaagaacaugcucau

SEQ ID NO: 2318381 - RNA, 19 nt, Homo sapiens
  misc_RNA (1)...(19): siRNA sense strand
acaaaaguuacaaggagaa

SEQ ID NO: 2318382 - RNA, 19 nt, Homo sapiens
  misc_RNA (1)...(19): siRNA sense strand
aucaauggucucagaaauu

SEQ ID NO: 2318383 - RNA, 19 nt, Homo sapiens
  misc_RNA (1)...(19): siRNA sense strand
auuccagagaagaaagcua

SEQ ID NO: 2318384 - RNA, 19 nt, Homo sapiens
  misc_RNA (1)...(19): siRNA sense strand
uggcaauugcugaugcuuu

SEQ ID NO: 2318385 - RNA, 19 nt, Homo sapiens
  misc_RNA (1)...(19): siRNA sense strand
aggaaagaaacaaaggauu

SEQ ID NO: 2318386 - RNA, 19 nt, Homo sapiens
  misc_RNA (1)...(19): siRNA sense strand
aaacaaaggauuauggaac

SEQ ID NO: 2318387 - RNA, 19 nt, Homo sapiens
  misc_RNA (1)...(19): siRNA sense strand
guuggaagcaggaggagau

SEQ ID NO: 2318388 - RNA, 19 nt, Homo sapiens
  misc_RNA (1)...(19): siRNA sense strand
acuauuaauccaggagaaa

SEQ ID NO: 2318389 - RNA, 19 nt, Homo sapiens
  misc_RNA (1)...(19): siRNA sense strand
uggaagcagcagagaugua

SEQ ID NO: 2318390 - RNA, 19 nt, Homo sapiens
  misc_RNA (1)...(19): siRNA sense strand
aaggagggcuugaagguca

SEQ ID NO: 2318391 - RNA, 19 nt, Homo sapiens
  misc_RNA (1)...(19): siRNA sense strand
aacuauuaauccaggagaa

SEQ ID NO: 2318392 - RNA, 19 nt, Homo sapiens
  misc_RNA (1)...(19): siRNA sense strand
cuauaaaggaagcacccaa

SEQ ID NO: 2318393 - RNA, 19 nt, Homo sapiens
  misc_RNA (1)...(19): siRNA sense strand
ggaucuaguguuuuggaaa

SEQ ID NO: 2318394 - RNA, 19 nt, Homo sapiens
  misc_RNA (1)...(19): siRNA sense strand
ggagaaugucuuuguggca

SEQ ID NO: 2318395 - RNA, 19 nt, Homo sapiens
  misc_RNA (1)...(19): siRNA sense strand
gagacaguugggagaguga

SEQ ID NO: 2318396 - RNA, 19 nt, Homo sapiens
  misc_RNA (1)...(19): siRNA sense strand
auuucuggcucccgaguaa

SEQ ID NO: 2318397 - RNA, 19 nt, Homo sapiens
  misc_RNA (1)...(19): siRNA sense strand
gagcagggaggcaaggaca

SEQ ID NO: 2318398 - RNA, 19 nt, Homo sapiens
  misc_RNA (1)...(19): siRNA sense strand
aggacaaguugcaggcgca

SEQ ID NO: 2318399 - RNA, 19 nt, Homo sapiens
  misc_RNA (1)...(19): siRNA sense strand
ugcaaaagaaggagaccaa

SEQ ID NO: 2318400 - RNA, 19 nt, Homo sapiens
  misc_RNA (1)...(19): siRNA sense strand
gaguaagcaugaaaccaga

SEQ ID NO: 2318401 - RNA, 19 nt, Homo sapiens
  misc_RNA (1)...(19): siRNA sense strand
aaggaaagaaacaaaggau

SEQ ID NO: 2318402 - RNA, 19 nt, Homo sapiens
  misc_RNA (1)...(19): siRNA sense strand
uuagaauggcugaggagca

SEQ ID NO: 2318403 - RNA, 19 nt, Homo sapiens
  misc_RNA (1)...(19): siRNA sense strand
cugaagacucauguagaua

SEQ ID NO: 2318404 - RNA, 19 nt, Homo sapiens
  misc_RNA (1)...(19): siRNA sense strand
gcuuauuagaaggaaagaa

SEQ ID NO: 2318405 - RNA, 19 nt, Homo sapiens
  misc_RNA (1)...(19): siRNA sense strand
ugauauuugaagaccggaa

SEQ ID NO: 2318406 - RNA, 19 nt, Homo sapiens
  misc_RNA (1)...(19): siRNA sense strand
uggaaacuguugagguucu

SEQ ID NO: 2318407 - RNA, 19 nt, Homo sapiens
  misc_RNA (1)...(19): siRNA sense strand
acagagagcagggaggcaa

SEQ ID NO: 2318408 - RNA, 19 nt, Homo sapiens
  misc_RNA (1)...(19): siRNA sense strand
guguguacauuguccaaaa

SEQ ID NO: 2318409 - RNA, 19 nt, Homo sapiens
  misc_RNA (1)...(19): siRNA sense strand
cuucucaggcuuaugcaaa

SEQ ID NO: 2318410 - RNA, 19 nt, Homo sapiens
  misc_RNA (1)...(19): siRNA sense strand
ccuaguaucugcaugcuga

SEQ ID NO: 2318411 - RNA, 19 nt, Homo sapiens
  misc_RNA (1)...(19): siRNA sense strand
ugaugaaggaguugauaac

SEQ ID NO: 2318412 - RNA, 19 nt, Homo sapiens
  misc_RNA (1)...(19): siRNA sense strand
gugcagaggaagcgggaga

SEQ ID NO: 2318413 - RNA, 19 nt, Homo sapiens
  misc_RNA (1)...(19): siRNA sense strand
agaugauccugaagcggaa

SEQ ID NO: 2318414 - RNA, 19 nt, Homo sapiens
  misc_RNA (1)...(19): siRNA sense strand
cuggagacuuugaccggaa

SEQ ID NO: 2318415 - RNA, 19 nt, Homo sapiens
  misc_RNA (1)...(19): siRNA sense strand
ggcgaagcaugaagcggaa

SEQ ID NO: 2318416 - RNA, 19 nt, Homo sapiens
  misc_RNA (1)...(19): siRNA sense strand
gaaugaugguggagggagc

SEQ ID NO: 2318417 - RNA, 19 nt, Homo sapiens
  misc_RNA (1)...(19): siRNA sense strand
cugcugaagucaagugcca

SEQ ID NO: 2318418 - RNA, 19 nt, Homo sapiens
  misc_RNA (1)...(19): siRNA sense strand
gcaugaagcggaaggcacu

SEQ ID NO: 2318419 - RNA, 19 nt, Homo sapiens
  misc_RNA (1)...(19): siRNA sense strand
gcucaaacgcuguguggac

SEQ ID NO: 2318420 - RNA, 19 nt, Homo sapiens
  misc_RNA (1)...(19): siRNA sense strand
cugaggagcagcagcgcau

SEQ ID NO: 2318421 - RNA, 19 nt, Homo sapiens
  misc_RNA (1)...(19): siRNA sense strand
ugaacuugcaugaggagga

SEQ ID NO: 2318422 - RNA, 19 nt, Homo sapiens
  misc_RNA (1)...(19): siRNA sense strand
aggcccaacuccagacaca

SEQ ID NO: 2318423 - RNA, 19 nt, Homo sapiens
  misc_RNA (1)...(19): siRNA sense strand
agaaagaccuggagcggcu

SEQ ID NO: 2318424 - RNA, 19 nt, Homo sapiens
  misc_RNA (1)...(19): siRNA sense strand
agaaagaccuggagcggcu

SEQ ID NO: 2318425 - RNA, 19 nt, Homo sapiens
  misc_RNA (1)...(19): siRNA sense strand
ucgagaagugcgaggugaa

SEQ ID NO: 2318426 - RNA, 19 nt, Homo sapiens
  misc_RNA (1)...(19): siRNA sense strand
ccauugacaucgagccuga

SEQ ID NO: 2318427 - RNA, 19 nt, Homo sapiens
  misc_RNA (1)...(19): siRNA sense strand
aggagaacgccaagaacga

SEQ ID NO: 2318428 - RNA, 19 nt, Homo sapiens
  misc_RNA (1)...(19): siRNA sense strand
acuucaugcucuucgagaa

SEQ ID NO: 2318429 - RNA, 19 nt, Homo sapiens
  misc_RNA (1)...(19): siRNA sense strand
acgccaagaacgaagagau

SEQ ID NO: 2318430 - RNA, 19 nt, Homo sapiens
  misc_RNA (1)...(19): siRNA sense strand
agguacuacuuaucgagaa

SEQ ID NO: 2318431 - RNA, 19 nt, Homo sapiens
  misc_RNA (1)...(19): siRNA sense strand
agguacuacuuaucgagaa

SEQ ID NO: 2318432 - RNA, 19 nt, Homo sapiens
  misc_RNA (1)...(19): siRNA sense strand
guuuauggacugaggucaa

SEQ ID NO: 2318433 - RNA, 19 nt, Homo sapiens
  misc_RNA (1)...(19): siRNA sense strand
ccagauuauauaagcggaa

SEQ ID NO: 2318434 - RNA, 19 nt, Homo sapiens
  misc_RNA (1)...(19): siRNA sense strand
uggaaagcgaggaguugaa

SEQ ID NO: 2318435 - RNA, 19 nt, Homo sapiens
  misc_RNA (1)...(19): siRNA sense strand
cuggaaguucugaggaaaa

SEQ ID NO: 2318436 - RNA, 19 nt, Homo sapiens
  misc_RNA (1)...(19): siRNA sense strand
ggaugauauggaugaugaa

SEQ ID NO: 2318437 - RNA, 19 nt, Homo sapiens
  misc_RNA (1)...(19): siRNA sense strand
ccucacacauggaaagcga

SEQ ID NO: 2318438 - RNA, 19 nt, Homo sapiens
  misc_RNA (1)...(19): siRNA sense strand
gugcaucuucugaggucaa

SEQ ID NO: 2318439 - RNA, 19 nt, Homo sapiens
  misc_RNA (1)...(19): siRNA sense strand
ugaugagagcaaugagcau

SEQ ID NO: 2318440 - RNA, 19 nt, Homo sapiens
  misc_RNA (1)...(19): siRNA sense strand
acauggaaagcgaggaguu

SEQ ID NO: 2318441 - RNA, 19 nt, Homo sapiens
  misc_RNA (1)...(19): siRNA sense strand
ccaaaaguaaggaagaaga

SEQ ID NO: 2318442 - RNA, 19 nt, Homo sapiens
  misc_RNA (1)...(19): siRNA sense strand
gugccauaccaguuaaaca

SEQ ID NO: 2318443 - RNA, 19 nt, Homo sapiens
  misc_RNA (1)...(19): siRNA sense strand
acaaauacccagaugcugu

SEQ ID NO: 2318444 - RNA, 19 nt, Homo sapiens
  misc_RNA (1)...(19): siRNA sense strand
augauauggaugaugaaga

SEQ ID NO: 2318445 - RNA, 19 nt, Homo sapiens
  misc_RNA (1)...(19): siRNA sense strand
cggagauaacugaggagga

SEQ ID NO: 2318446 - RNA, 19 nt, Homo sapiens
  misc_RNA (1)...(19): siRNA sense strand
agacaucaggagaagaaau

SEQ ID NO: 2318447 - RNA, 19 nt, Homo sapiens
  misc_RNA (1)...(19): siRNA sense strand
aggagaagaaauuuccaaa

SEQ ID NO: 2318448 - RNA, 19 nt, Homo sapiens
  misc_RNA (1)...(19): siRNA sense strand
acaggagacaucaggagaa

SEQ ID NO: 2318449 - RNA, 19 nt, Homo sapiens
  misc_RNA (1)...(19): siRNA sense strand
cugaaagcccagagagcac

SEQ ID NO: 2318450 - RNA, 19 nt, Homo sapiens
  misc_RNA (1)...(19): siRNA sense strand
uggaaggagcccugccgaa

SEQ ID NO: 2318451 - RNA, 19 nt, Homo sapiens
  misc_RNA (1)...(19): siRNA sense strand
cugcaacaagaauggauuu

SEQ ID NO: 2318452 - RNA, 19 nt, Homo sapiens
  misc_RNA (1)...(19): siRNA sense strand
cguagagaguuuagccaag

SEQ ID NO: 2318453 - RNA, 19 nt, Homo sapiens
  misc_RNA (1)...(19): siRNA sense strand
gcaaagaggcacuggcaga

SEQ ID NO: 2318454 - RNA, 19 nt, Homo sapiens
  misc_RNA (1)...(19): siRNA sense strand
ugacgaagcugcaggcaca

SEQ ID NO: 2318455 - RNA, 19 nt, Homo sapiens
  misc_RNA (1)...(19): siRNA sense strand
auuugagaguagugaggaa

SEQ ID NO: 2318456 - RNA, 19 nt, Homo sapiens
  misc_RNA (1)...(19): siRNA sense strand
ccugagggcucuucggcaa

SEQ ID NO: 2318457 - RNA, 19 nt, Homo sapiens
  misc_RNA (1)...(19): siRNA sense strand
acauguaacaagaguaaca

SEQ ID NO: 2318458 - RNA, 19 nt, Homo sapiens
  misc_RNA (1)...(19): siRNA sense strand
gguacauccucgacggcau

SEQ ID NO: 2318459 - RNA, 19 nt, Homo sapiens
  misc_RNA (1)...(19): siRNA sense strand
cuucagaacgaauugacaa

SEQ ID NO: 2318460 - RNA, 19 nt, Homo sapiens
  misc_RNA (1)...(19): siRNA sense strand
cugagaaaggagacaugua

SEQ ID NO: 2318461 - RNA, 19 nt, Homo sapiens
  misc_RNA (1)...(19): siRNA sense strand
gagacauguaacaagagua

SEQ ID NO: 2318462 - RNA, 19 nt, Homo sapiens
  misc_RNA (1)...(19): siRNA sense strand
gcacagaaccaguggcugc

SEQ ID NO: 2318463 - RNA, 19 nt, Homo sapiens
  misc_RNA (1)...(19): siRNA sense strand
ugaaagcagcaaagaggca

SEQ ID NO: 2318464 - RNA, 19 nt, Homo sapiens
  misc_RNA (1)...(19): siRNA sense strand
acuacugcuuccaggguaa

SEQ ID NO: 2318465 - RNA, 19 nt, Homo sapiens
  misc_RNA (1)...(19): siRNA sense strand
gacuagugcccaugggaau

SEQ ID NO: 2318466 - RNA, 19 nt, Homo sapiens
  misc_RNA (1)...(19): siRNA sense strand
aggagaaaggauacccaaa

SEQ ID NO: 2318467 - RNA, 19 nt, Homo sapiens
  misc_RNA (1)...(19): siRNA sense strand
cgacuagugcccaugggaa

SEQ ID NO: 2318468 - RNA, 19 nt, Homo sapiens
  misc_RNA (1)...(19): siRNA sense strand
uugcugaaggcgagaccaa

SEQ ID NO: 2318469 - RNA, 19 nt, Homo sapiens
  misc_RNA (1)...(19): siRNA sense strand
agaccaagccagacccaga

SEQ ID NO: 2318470 - RNA, 19 nt, Homo sapiens
  misc_RNA (1)...(19): siRNA sense strand
ggaauguugcugaaggcga

SEQ ID NO: 2318471 - RNA, 19 nt, Homo sapiens
  misc_RNA (1)...(19): siRNA sense strand
ccugacaaagggaggcuau

SEQ ID NO: 2318472 - RNA, 19 nt, Homo sapiens
  misc_RNA (1)...(19): siRNA sense strand
aggagaugccaaagauaaa

SEQ ID NO: 2318473 - RNA, 19 nt, Homo sapiens
  misc_RNA (1)...(19): siRNA sense strand
aggacauggaggagggcaa

SEQ ID NO: 2318474 - RNA, 19 nt, Homo sapiens
  misc_RNA (1)...(19): siRNA sense strand
cugagaaccagcaaggaaa

SEQ ID NO: 2318475 - RNA, 19 nt, Homo sapiens
  misc_RNA (1)...(19): siRNA sense strand
aagcaaagccagagugcca

SEQ ID NO: 2318476 - RNA, 19 nt, Homo sapiens
  misc_RNA (1)...(19): siRNA sense strand
ggaaacacacagagcccaa

SEQ ID NO: 2318477 - RNA, 19 nt, Homo sapiens
  misc_RNA (1)...(19): siRNA sense strand
ccauggaauuagaggagca

SEQ ID NO: 2318478 - RNA, 19 nt, Homo sapiens
  misc_RNA (1)...(19): siRNA sense strand
gggccaagggcaaggacau

SEQ ID NO: 2318479 - RNA, 19 nt, Homo sapiens
  misc_RNA (1)...(19): siRNA sense strand
ccguagaagcaaagccaga

SEQ ID NO: 2318480 - RNA, 19 nt, Homo sapiens
  misc_RNA (1)...(19): siRNA sense strand
agaugggagaggauggaaa

SEQ ID NO: 2318481 - RNA, 19 nt, Homo sapiens
  misc_RNA (1)...(19): siRNA sense strand
cgaggauggcagugaguca

SEQ ID NO: 2318482 - RNA, 19 nt, Homo sapiens
  misc_RNA (1)...(19): siRNA sense strand
agaucaacuucaaggacau

SEQ ID NO: 2318483 - RNA, 19 nt, Homo sapiens
  misc_RNA (1)...(19): siRNA sense strand
ggacaaaggauggggaaca

SEQ ID NO: 2318484 - RNA, 19 nt, Homo sapiens
  misc_RNA (1)...(19): siRNA sense strand
gaacaaggcuggcgagcag

SEQ ID NO: 2318485 - RNA, 19 nt, Homo sapiens
  misc_RNA (1)...(19): siRNA sense strand
gagaucaacuucaaggaca

SEQ ID NO: 2318486 - RNA, 19 nt, Homo sapiens
  misc_RNA (1)...(19): siRNA sense strand
ucgaagggcagaugggaga

SEQ ID NO: 2318487 - RNA, 19 nt, Homo sapiens
  misc_RNA (1)...(19): siRNA sense strand
ccgucaacgugaagaucuu

SEQ ID NO: 2318488 - RNA, 19 nt, Homo sapiens
  misc_RNA (1)...(19): siRNA sense strand
aagaggaagacgaugagaa

SEQ ID NO: 2318489 - RNA, 19 nt, Homo sapiens
  misc_RNA (1)...(19): siRNA sense strand
ccugcuacuuccugaacaa

SEQ ID NO: 2318490 - RNA, 19 nt, Homo sapiens
  misc_RNA (1)...(19): siRNA sense strand
cagacaaaggagaacgaga

SEQ ID NO: 2318491 - RNA, 19 nt, Homo sapiens
  misc_RNA (1)...(19): siRNA sense strand
ucucgaaagaugaguccaa

SEQ ID NO: 2318492 - RNA, 19 nt, Homo sapiens
  misc_RNA (1)...(19): siRNA sense strand
cggucaaccuguguggaaa

SEQ ID NO: 2318493 - RNA, 19 nt, Homo sapiens
  misc_RNA (1)...(19): siRNA sense strand
ggucaaccuguguggaaaa

SEQ ID NO: 2318494 - RNA, 19 nt, Homo sapiens
  misc_RNA (1)...(19): siRNA sense strand
auaagaacgacgaggcuga

SEQ ID NO: 2318495 - RNA, 19 nt, Homo sapiens
  misc_RNA (1)...(19): siRNA sense strand
augcugaguaugaggucua

SEQ ID NO: 2318496 - RNA, 19 nt, Homo sapiens
  misc_RNA (1)...(19): siRNA sense strand
aggucuacgugguggcuga

SEQ ID NO: 2318497 - RNA, 19 nt, Homo sapiens
  misc_RNA (1)...(19): siRNA sense strand
caggcagaauauugugaau

SEQ ID NO: 2318498 - RNA, 19 nt, Homo sapiens
  misc_RNA (1)...(19): siRNA sense strand
auacaaagcugaguggaga

SEQ ID NO: 2318499 - RNA, 19 nt, Homo sapiens
  misc_RNA (1)...(19): siRNA sense strand
agcaagaggaagacgauga

SEQ ID NO: 2318500 - RNA, 19 nt, Homo sapiens
  misc_RNA (1)...(19): siRNA sense strand
gaacggaggaggagaggac

SEQ ID NO: 2318501 - RNA, 19 nt, Homo sapiens
  misc_RNA (1)...(19): siRNA sense strand
gauucauaguccuguccaa

SEQ ID NO: 2318502 - RNA, 19 nt, Homo sapiens
  misc_RNA (1)...(19): siRNA sense strand
acgacgaggcugaguacau

SEQ ID NO: 2318503 - RNA, 19 nt, Homo sapiens
  misc_RNA (1)...(19): siRNA sense strand
aagccagcauggagggcau

SEQ ID NO: 2318504 - RNA, 19 nt, Homo sapiens
  misc_RNA (1)...(19): siRNA sense strand
caccuaagcucgaagggca

SEQ ID NO: 2318505 - RNA, 19 nt, Homo sapiens
  misc_RNA (1)...(19): siRNA sense strand
uuaaagugaaccugaucaa

SEQ ID NO: 2318506 - RNA, 19 nt, Homo sapiens
  misc_RNA (1)...(19): siRNA sense strand
gcucaauggcaaagggcug

SEQ ID NO: 2318507 - RNA, 19 nt, Homo sapiens
  misc_RNA (1)...(19): siRNA sense strand
ccaagugguaugaugccaa

SEQ ID NO: 2318508 - RNA, 19 nt, Homo sapiens
  misc_RNA (1)...(19): siRNA sense strand
cagagugccaggagacaga

SEQ ID NO: 2318509 - RNA, 19 nt, Homo sapiens
  misc_RNA (1)...(19): siRNA sense strand
ccauguaccuugaagugca

SEQ ID NO: 2318510 - RNA, 19 nt, Homo sapiens
  misc_RNA (1)...(19): siRNA sense strand
ggagaaaagcucaccccaa

SEQ ID NO: 2318511 - RNA, 19 nt, Homo sapiens
  misc_RNA (1)...(19): siRNA sense strand
agucagaggccaccgucaa

SEQ ID NO: 2318512 - RNA, 19 nt, Homo sapiens
  misc_RNA (1)...(19): siRNA sense strand
guagagaaccagacugcca

SEQ ID NO: 2318513 - RNA, 19 nt, Homo sapiens
  misc_RNA (1)...(19): siRNA sense strand
ccaaauucuucuuaugcca

SEQ ID NO: 2318514 - RNA, 19 nt, Homo sapiens
  misc_RNA (1)...(19): siRNA sense strand
ccuccgaguucaagacgca

SEQ ID NO: 2318515 - RNA, 19 nt, Homo sapiens
  misc_RNA (1)...(19): siRNA sense strand
aggagaugccaaagauaaa

SEQ ID NO: 2318516 - RNA, 19 nt, Homo sapiens
  misc_RNA (1)...(19): siRNA sense strand
aggacauggaggagggcaa

SEQ ID NO: 2318517 - RNA, 19 nt, Homo sapiens
  misc_RNA (1)...(19): siRNA sense strand
cugagaaccagcaaggaaa

SEQ ID NO: 2318518 - RNA, 19 nt, Homo sapiens
  misc_RNA (1)...(19): siRNA sense strand
aagcaaagccagagugcca

SEQ ID NO: 2318519 - RNA, 19 nt, Homo sapiens
  misc_RNA (1)...(19): siRNA sense strand
ggaaacacacagagcccaa

SEQ ID NO: 2318520 - RNA, 19 nt, Homo sapiens
  misc_RNA (1)...(19): siRNA sense strand
ccauggaauuagaggagca

SEQ ID NO: 2318521 - RNA, 19 nt, Homo sapiens
  misc_RNA (1)...(19): siRNA sense strand
gggccaagggcaaggacau

SEQ ID NO: 2318522 - RNA, 19 nt, Homo sapiens
  misc_RNA (1)...(19): siRNA sense strand
ccguagaagcaaagccaga

SEQ ID NO: 2318523 - RNA, 19 nt, Homo sapiens
  misc_RNA (1)...(19): siRNA sense strand
agaugggagaggauggaaa

SEQ ID NO: 2318524 - RNA, 19 nt, Homo sapiens
  misc_RNA (1)...(19): siRNA sense strand
cgaggauggcagugaguca

SEQ ID NO: 2318525 - RNA, 19 nt, Homo sapiens
  misc_RNA (1)...(19): siRNA sense strand
agaucaacuucaaggacau

SEQ ID NO: 2318526 - RNA, 19 nt, Homo sapiens
  misc_RNA (1)...(19): siRNA sense strand
ggacaaaggauggggaaca

SEQ ID NO: 2318527 - RNA, 19 nt, Homo sapiens
  misc_RNA (1)...(19): siRNA sense strand
gaacaaggcuggcgagcag

SEQ ID NO: 2318528 - RNA, 19 nt, Homo sapiens
  misc_RNA (1)...(19): siRNA sense strand
gagaucaacuucaaggaca

SEQ ID NO: 2318529 - RNA, 19 nt, Homo sapiens
  misc_RNA (1)...(19): siRNA sense strand
ucgaagggcagaugggaga

SEQ ID NO: 2318530 - RNA, 19 nt, Homo sapiens
  misc_RNA (1)...(19): siRNA sense strand
ccgucaacgugaagaucuu

SEQ ID NO: 2318531 - RNA, 19 nt, Homo sapiens
  misc_RNA (1)...(19): siRNA sense strand
aagaggaagacgaugagaa

SEQ ID NO: 2318532 - RNA, 19 nt, Homo sapiens
  misc_RNA (1)...(19): siRNA sense strand
ccugcuacuuccugaacaa

SEQ ID NO: 2318533 - RNA, 19 nt, Homo sapiens
  misc_RNA (1)...(19): siRNA sense strand
cagacaaaggagaacgaga

SEQ ID NO: 2318534 - RNA, 19 nt, Homo sapiens
  misc_RNA (1)...(19): siRNA sense strand
ucucgaaagaugaguccaa

SEQ ID NO: 2318535 - RNA, 19 nt, Homo sapiens
  misc_RNA (1)...(19): siRNA sense strand
cggucaaccuguguggaaa

SEQ ID NO: 2318536 - RNA, 19 nt, Homo sapiens
  misc_RNA (1)...(19): siRNA sense strand
ggucaaccuguguggaaaa

SEQ ID NO: 2318537 - RNA, 19 nt, Homo sapiens
  misc_RNA (1)...(19): siRNA sense strand
auaagaacgacgaggcuga

SEQ ID NO: 2318538 - RNA, 19 nt, Homo sapiens
  misc_RNA (1)...(19): siRNA sense strand
augcugaguaugaggucua

SEQ ID NO: 2318539 - RNA, 19 nt, Homo sapiens
  misc_RNA (1)...(19): siRNA sense strand
aggucuacgugguggcuga

SEQ ID NO: 2318540 - RNA, 19 nt, Homo sapiens
  misc_RNA (1)...(19): siRNA sense strand
caggcagaauauugugaau

SEQ ID NO: 2318541 - RNA, 19 nt, Homo sapiens
  misc_RNA (1)...(19): siRNA sense strand
auacaaagcugaguggaga

SEQ ID NO: 2318542 - RNA, 19 nt, Homo sapiens
  misc_RNA (1)...(19): siRNA sense strand
agcaagaggaagacgauga

SEQ ID NO: 2318543 - RNA, 19 nt, Homo sapiens
  misc_RNA (1)...(19): siRNA sense strand
gaacggaggaggagaggac

SEQ ID NO: 2318544 - RNA, 19 nt, Homo sapiens
  misc_RNA (1)...(19): siRNA sense strand
gauucauaguccuguccaa

SEQ ID NO: 2318545 - RNA, 19 nt, Homo sapiens
  misc_RNA (1)...(19): siRNA sense strand
acgacgaggcugaguacau

SEQ ID NO: 2318546 - RNA, 19 nt, Homo sapiens
  misc_RNA (1)...(19): siRNA sense strand
aagccagcauggagggcau

SEQ ID NO: 2318547 - RNA, 19 nt, Homo sapiens
  misc_RNA (1)...(19): siRNA sense strand
caccuaagcucgaagggca

SEQ ID NO: 2318548 - RNA, 19 nt, Homo sapiens
  misc_RNA (1)...(19): siRNA sense strand
uuaaagugaaccugaucaa

SEQ ID NO: 2318549 - RNA, 19 nt, Homo sapiens
  misc_RNA (1)...(19): siRNA sense strand
gcucaauggcaaagggcug

SEQ ID NO: 2318550 - RNA, 19 nt, Homo sapiens
  misc_RNA (1)...(19): siRNA sense strand
ccaagugguaugaugccaa

SEQ ID NO: 2318551 - RNA, 19 nt, Homo sapiens
  misc_RNA (1)...(19): siRNA sense strand
cagagugccaggagacaga

SEQ ID NO: 2318552 - RNA, 19 nt, Homo sapiens
  misc_RNA (1)...(19): siRNA sense strand
ccauguaccuugaagugca

SEQ ID NO: 2318553 - RNA, 19 nt, Homo sapiens
  misc_RNA (1)...(19): siRNA sense strand
ggagaaaagcucaccccaa

SEQ ID NO: 2318554 - RNA, 19 nt, Homo sapiens
  misc_RNA (1)...(19): siRNA sense strand
agucagaggccaccgucaa

SEQ ID NO: 2318555 - RNA, 19 nt, Homo sapiens
  misc_RNA (1)...(19): siRNA sense strand
guagagaaccagacugcca

SEQ ID NO: 2318556 - RNA, 19 nt, Homo sapiens
  misc_RNA (1)...(19): siRNA sense strand
ccaaauucuucuuaugcca

SEQ ID NO: 2318557 - RNA, 19 nt, Homo sapiens
  misc_RNA (1)...(19): siRNA sense strand
ccuccgaguucaagacgca

SEQ ID NO: 2318558 - RNA, 19 nt, Homo sapiens
  misc_RNA (1)...(19): siRNA sense strand
aguuaaaaguggagcagca

SEQ ID NO: 2318559 - RNA, 19 nt, Homo sapiens
  misc_RNA (1)...(19): siRNA sense strand
gaggggaaauugagggcuu

SEQ ID NO: 2318560 - RNA, 19 nt, Homo sapiens
  misc_RNA (1)...(19): siRNA sense strand
gagaagaacugcugcgugc

SEQ ID NO: 2318561 - RNA, 19 nt, Homo sapiens
  misc_RNA (1)...(19): siRNA sense strand
uggagcuguaccagaaaua

SEQ ID NO: 2318562 - RNA, 19 nt, Homo sapiens
  misc_RNA (1)...(19): siRNA sense strand
ggaagcgcaucgaggccau

SEQ ID NO: 2318563 - RNA, 19 nt, Homo sapiens
  misc_RNA (1)...(19): siRNA sense strand
uggugaagcggaagcgcau

SEQ ID NO: 2318564 - RNA, 19 nt, Homo sapiens
  misc_RNA (1)...(19): siRNA sense strand
gcaagaaccucgaggccau

SEQ ID NO: 2318565 - RNA, 19 nt, Homo sapiens
  misc_RNA (1)...(19): siRNA sense strand
gcgcaaaguuggcccgaga

SEQ ID NO: 2318566 - RNA, 19 nt, Homo sapiens
  misc_RNA (1)...(19): siRNA sense strand
cugaauuacuccaaagcga

SEQ ID NO: 2318567 - RNA, 19 nt, Homo sapiens
  misc_RNA (1)...(19): siRNA sense strand
uguauaagaaccuggccaa

SEQ ID NO: 2318568 - RNA, 19 nt, Homo sapiens
  misc_RNA (1)...(19): siRNA sense strand
ucagaaucgagaagcgcaa

SEQ ID NO: 2318569 - RNA, 19 nt, Homo sapiens
  misc_RNA (1)...(19): siRNA sense strand
acguaaagaacuggaaaca

SEQ ID NO: 2318570 - RNA, 19 nt, Homo sapiens
  misc_RNA (1)...(19): siRNA sense strand
caauaucgauggauggagu

SEQ ID NO: 2318571 - RNA, 19 nt, Homo sapiens
  misc_RNA (1)...(19): siRNA sense strand
gcaaaauacgacuggcuuu

SEQ ID NO: 2318572 - RNA, 19 nt, Homo sapiens
  misc_RNA (1)...(19): siRNA sense strand
gcauguacccagaagagca

SEQ ID NO: 2318573 - RNA, 19 nt, Homo sapiens
  misc_RNA (1)...(19): siRNA sense strand
ggccauugucagcgugauu

SEQ ID NO: 2318574 - RNA, 19 nt, Homo sapiens
  misc_RNA (1)...(19): siRNA sense strand
guaaagaacuggaaacacg

SEQ ID NO: 2318575 - RNA, 19 nt, Homo sapiens
  misc_RNA (1)...(19): siRNA sense strand
ucgccgacuuugagaaaau

SEQ ID NO: 2318576 - RNA, 19 nt, Homo sapiens
  misc_RNA (1)...(19): siRNA sense strand
cggagaugguagagugcag

SEQ ID NO: 2318577 - RNA, 19 nt, Homo sapiens
  misc_RNA (1)...(19): siRNA sense strand
acaucuacuacgagggcga

SEQ ID NO: 2318578 - RNA, 19 nt, Homo sapiens
  misc_RNA (1)...(19): siRNA sense strand
ugacuguggacgaggaacu

SEQ ID NO: 2318579 - RNA, 19 nt, Homo sapiens
  misc_RNA (1)...(19): siRNA sense strand
gcucgguggaugaggucaa

SEQ ID NO: 2318580 - RNA, 19 nt, Homo sapiens
  misc_RNA (1)...(19): siRNA sense strand
ccguauacaacgccacaaa

SEQ ID NO: 2318581 - RNA, 19 nt, Homo sapiens
  misc_RNA (1)...(19): siRNA sense strand
gggcuguggcagagaacca

SEQ ID NO: 2318582 - RNA, 19 nt, Homo sapiens
  misc_RNA (1)...(19): siRNA sense strand
aggagaaggccuggaggaa

SEQ ID NO: 2318583 - RNA, 19 nt, Homo sapiens
  misc_RNA (1)...(19): siRNA sense strand
gagaaggccuggaggaagc

SEQ ID NO: 2318584 - RNA, 19 nt, Homo sapiens
  misc_RNA (1)...(19): siRNA sense strand
acaucagugacuugggcaa

SEQ ID NO: 2318585 - RNA, 19 nt, Homo sapiens
  misc_RNA (1)...(19): siRNA sense strand
ggcacuaucugcugagcca

SEQ ID NO: 2318586 - RNA, 19 nt, Homo sapiens
  misc_RNA (1)...(19): siRNA sense strand
uugagcaggccgagcggaa

SEQ ID NO: 2318587 - RNA, 19 nt, Homo sapiens
  misc_RNA (1)...(19): siRNA sense strand
agaucgacuuggugcugaa

SEQ ID NO: 2318588 - RNA, 19 nt, Homo sapiens
  misc_RNA (1)...(19): siRNA sense strand
ccuaguggugagugggaca

SEQ ID NO: 2318589 - RNA, 19 nt, Homo sapiens
  misc_RNA (1)...(19): siRNA sense strand
gacgaugaccagagcguga

SEQ ID NO: 2318590 - RNA, 19 nt, Homo sapiens
  misc_RNA (1)...(19): siRNA sense strand
aguuugacaacaugaagaa

SEQ ID NO: 2318591 - RNA, 19 nt, Homo sapiens
  misc_RNA (1)...(19): siRNA sense strand
agaagaugacguugugcau

SEQ ID NO: 2318592 - RNA, 19 nt, Homo sapiens
  misc_RNA (1)...(19): siRNA sense strand
gagcagaucaugaccacca

SEQ ID NO: 2318593 - RNA, 19 nt, Homo sapiens
  misc_RNA (1)...(19): siRNA sense strand
ggagcgaggacgaugacca

SEQ ID NO: 2318594 - RNA, 19 nt, Homo sapiens
  misc_RNA (1)...(19): siRNA sense strand
aggaaaagcugauggacga

SEQ ID NO: 2318595 - RNA, 19 nt, Homo sapiens
  misc_RNA (1)...(19): siRNA sense strand
ccuccaacuucuaugggaa

SEQ ID NO: 2318596 - RNA, 19 nt, Homo sapiens
  misc_RNA (1)...(19): siRNA sense strand
uggccaaugcggaggaaaa

SEQ ID NO: 2318597 - RNA, 19 nt, Homo sapiens
  misc_RNA (1)...(19): siRNA sense strand
aggaugugcaggaggcauu

SEQ ID NO: 2318598 - RNA, 19 nt, Homo sapiens
  misc_RNA (1)...(19): siRNA sense strand
cauuagaaggugucagcuu

SEQ ID NO: 2318599 - RNA, 19 nt, Homo sapiens
  misc_RNA (1)...(19): siRNA sense strand
acgaugaagaccagagugu

SEQ ID NO: 2318600 - RNA, 19 nt, Homo sapiens
  misc_RNA (1)...(19): siRNA sense strand
acuggaaguacguggcuau

SEQ ID NO: 2318601 - RNA, 19 nt, Homo sapiens
  misc_RNA (1)...(19): siRNA sense strand
acuucaucaucaagcgcaa

SEQ ID NO: 2318602 - RNA, 19 nt, Homo sapiens
  misc_RNA (1)...(19): siRNA sense strand
gagcagaucaugaccacca

SEQ ID NO: 2318603 - RNA, 19 nt, Homo sapiens
  misc_RNA (1)...(19): siRNA sense strand
agaaugacgaugaagacca

SEQ ID NO: 2318604 - RNA, 19 nt, Homo sapiens
  misc_RNA (1)...(19): siRNA sense strand
ugacagugcuggaaggaga

SEQ ID NO: 2318605 - RNA, 19 nt, Homo sapiens
  misc_RNA (1)...(19): siRNA sense strand
gagaaggagcugaaggaga

SEQ ID NO: 2318606 - RNA, 19 nt, Homo sapiens
  misc_RNA (1)...(19): siRNA sense strand
agaucagggucuuggacaa

SEQ ID NO: 2318607 - RNA, 19 nt, Homo sapiens
  misc_RNA (1)...(19): siRNA sense strand
ggacaaggccuucggacca

SEQ ID NO: 2318608 - RNA, 19 nt, Homo sapiens
  misc_RNA (1)...(19): siRNA sense strand
auaagaaggcucagcgaga

SEQ ID NO: 2318609 - RNA, 19 nt, Homo sapiens
  misc_RNA (1)...(19): siRNA sense strand
caggaggguuucugggaca

SEQ ID NO: 2318610 - RNA, 19 nt, Homo sapiens
  misc_RNA (1)...(19): siRNA sense strand
caccaguagcauagaggua

SEQ ID NO: 2318611 - RNA, 19 nt, Homo sapiens
  misc_RNA (1)...(19): siRNA sense strand
uguccaagcuagugugcca

SEQ ID NO: 2318612 - RNA, 19 nt, Homo sapiens
  misc_RNA (1)...(19): siRNA sense strand
gccucuuggugaaggagaa

SEQ ID NO: 2318613 - RNA, 19 nt, Homo sapiens
  misc_RNA (1)...(19): siRNA sense strand
aggagaaggagcugaagga

SEQ ID NO: 2318614 - RNA, 19 nt, Homo sapiens
  misc_RNA (1)...(19): siRNA sense strand
ggaccagaauugagagagg

SEQ ID NO: 2318615 - RNA, 19 nt, Homo sapiens
  misc_RNA (1)...(19): siRNA sense strand
acauagucacauugucaaa

SEQ ID NO: 2318616 - RNA, 19 nt, Homo sapiens
  misc_RNA (1)...(19): siRNA sense strand
cuccauacccacacagcaa

SEQ ID NO: 2318617 - RNA, 19 nt, Homo sapiens
  misc_RNA (1)...(19): siRNA sense strand
accagaauugagagaggaa

SEQ ID NO: 2318618 - RNA, 19 nt, Homo sapiens
  misc_RNA (1)...(19): siRNA sense strand
cgaagaaagaagaaggaga

SEQ ID NO: 2318619 - RNA, 19 nt, Homo sapiens
  misc_RNA (1)...(19): siRNA sense strand
acguaauccuauugagcau

SEQ ID NO: 2318620 - RNA, 19 nt, Homo sapiens
  misc_RNA (1)...(19): siRNA sense strand
cugauaugcuagugggacu

SEQ ID NO: 2318621 - RNA, 19 nt, Homo sapiens
  misc_RNA (1)...(19): siRNA sense strand
cguuucaauucgcggacua

SEQ ID NO: 2318622 - RNA, 19 nt, Homo sapiens
  misc_RNA (1)...(19): siRNA sense strand
aagaaaagguguucgugaa

SEQ ID NO: 2318623 - RNA, 19 nt, Homo sapiens
  misc_RNA (1)...(19): siRNA sense strand
agagaugcaaguugagaau

SEQ ID NO: 2318624 - RNA, 19 nt, Homo sapiens
  misc_RNA (1)...(19): siRNA sense strand
cuauaucgcuggaucggua

SEQ ID NO: 2318625 - RNA, 19 nt, Homo sapiens
  misc_RNA (1)...(19): siRNA sense strand
caguaagcauggaaaagaa

SEQ ID NO: 2318626 - RNA, 19 nt, Homo sapiens
  misc_RNA (1)...(19): siRNA sense strand
gaggaauacggccgaggaa

SEQ ID NO: 2318627 - RNA, 19 nt, Homo sapiens
  misc_RNA (1)...(19): siRNA sense strand
uggaaaagaaacugcacaa

SEQ ID NO: 2318628 - RNA, 19 nt, Homo sapiens
  misc_RNA (1)...(19): siRNA sense strand
gugauuacguauugccuga

SEQ ID NO: 2318629 - RNA, 19 nt, Homo sapiens
  misc_RNA (1)...(19): siRNA sense strand
aagugcugcaagaggaaua

SEQ ID NO: 2318630 - RNA, 19 nt, Homo sapiens
  misc_RNA (1)...(19): siRNA sense strand
gaaagaagaaggagagacg

SEQ ID NO: 2318631 - RNA, 19 nt, Homo sapiens
  misc_RNA (1)...(19): siRNA sense strand
gaagaaagaagaaggagag

SEQ ID NO: 2318632 - RNA, 19 nt, Homo sapiens
  misc_RNA (1)...(19): siRNA sense strand
aaccaaaagcucauggaaa

SEQ ID NO: 2318633 - RNA, 19 nt, Homo sapiens
  misc_RNA (1)...(19): siRNA sense strand
cugaagugcugcaagagga

SEQ ID NO: 2318634 - RNA, 19 nt, Homo sapiens
  misc_RNA (1)...(19): siRNA sense strand
ugaaagaaaagcuucgaaa

SEQ ID NO: 2318635 - RNA, 19 nt, Homo sapiens
  misc_RNA (1)...(19): siRNA sense strand
cuucgaaaguccuugggau

SEQ ID NO: 2318636 - RNA, 19 nt, Homo sapiens
  misc_RNA (1)...(19): siRNA sense strand
caucaugaagauugcuauu

SEQ ID NO: 2318637 - RNA, 19 nt, Homo sapiens
  misc_RNA (1)...(19): siRNA sense strand
uucgaaaguccuugggauu

SEQ ID NO: 2318638 - RNA, 19 nt, Homo sapiens
  misc_RNA (1)...(19): siRNA sense strand
aaggauuagcaguguguga

SEQ ID NO: 2318639 - RNA, 19 nt, Homo sapiens
  misc_RNA (1)...(19): siRNA sense strand
uggcaguaagcauggaaaa

SEQ ID NO: 2318640 - RNA, 19 nt, Homo sapiens
  misc_RNA (1)...(19): siRNA sense strand
ggcuauguuuguucaggaa

SEQ ID NO: 2318641 - RNA, 19 nt, Homo sapiens
  misc_RNA (1)...(19): siRNA sense strand
ccgcugacgauuaugguga

SEQ ID NO: 2318642 - RNA, 19 nt, Homo sapiens
  misc_RNA (1)...(19): siRNA sense strand
agcuauaguaacugacauu

SEQ ID NO: 2318643 - RNA, 19 nt, Homo sapiens
  misc_RNA (1)...(19): siRNA sense strand
ccuaauuggccuauugguu

SEQ ID NO: 2318644 - RNA, 19 nt, Homo sapiens
  misc_RNA (1)...(19): siRNA sense strand
gauuauggugauuacguau

SEQ ID NO: 2318645 - RNA, 19 nt, Homo sapiens
  misc_RNA (1)...(19): siRNA sense strand
ugaagugcugcaagaggaa

SEQ ID NO: 2318646 - RNA, 19 nt, Homo sapiens
  misc_RNA (1)...(19): siRNA sense strand
ccaugcaggcuaucaacaa

SEQ ID NO: 2318647 - RNA, 19 nt, Homo sapiens
  misc_RNA (1)...(19): siRNA sense strand
gcaccaugcaggcuaucaa

SEQ ID NO: 2318648 - RNA, 19 nt, Homo sapiens
  misc_RNA (1)...(19): siRNA sense strand
cagcaaauauccagcccau

SEQ ID NO: 2318649 - RNA, 19 nt, Homo sapiens
  misc_RNA (1)...(19): siRNA sense strand
cgaaucaaccagacgguga

SEQ ID NO: 2318650 - RNA, 19 nt, Homo sapiens
  misc_RNA (1)...(19): siRNA sense strand
ucuucuugguggaggauga

SEQ ID NO: 2318651 - RNA, 19 nt, Homo sapiens
  misc_RNA (1)...(19): siRNA sense strand
ucuaccaggagcugaguaa

SEQ ID NO: 2318652 - RNA, 19 nt, Homo sapiens
  misc_RNA (1)...(19): siRNA sense strand
gagugagaccccaagaaaa

SEQ ID NO: 2318653 - RNA, 19 nt, Homo sapiens
  misc_RNA (1)...(19): siRNA sense strand
gcagugauggccagggaca

SEQ ID NO: 2318654 - RNA, 19 nt, Homo sapiens
  misc_RNA (1)...(19): siRNA sense strand
uugagaaggagcagcaaca

SEQ ID NO: 2318655 - RNA, 19 nt, Homo sapiens
  misc_RNA (1)...(19): siRNA sense strand
aggaggugcugcaggacca

SEQ ID NO: 2318656 - RNA, 19 nt, Homo sapiens
  misc_RNA (1)...(19): siRNA sense strand
ggagcagauuggcuggaga

SEQ ID NO: 2318657 - RNA, 19 nt, Homo sapiens
  misc_RNA (1)...(19): siRNA sense strand
ugagcagaggugagaguga

SEQ ID NO: 2318658 - RNA, 19 nt, Homo sapiens
  misc_RNA (1)...(19): siRNA sense strand
gugugaggguccugagaag

SEQ ID NO: 2318659 - RNA, 19 nt, Homo sapiens
  misc_RNA (1)...(19): siRNA sense strand
ggaugauggcuggugcaaa

SEQ ID NO: 2318660 - RNA, 19 nt, Homo sapiens
  misc_RNA (1)...(19): siRNA sense strand
gcuuugagaaggagcagca

SEQ ID NO: 2318661 - RNA, 19 nt, Homo sapiens
  misc_RNA (1)...(19): siRNA sense strand
gaggaugacgccagaggca

SEQ ID NO: 2318662 - RNA, 19 nt, Homo sapiens
  misc_RNA (1)...(19): siRNA sense strand
agaaagagcagguggaaaa

SEQ ID NO: 2318663 - RNA, 19 nt, Homo sapiens
  misc_RNA (1)...(19): siRNA sense strand
agacaaaguuacaagggau

SEQ ID NO: 2318664 - RNA, 19 nt, Homo sapiens
  misc_RNA (1)...(19): siRNA sense strand
cuaaagaacugguggcacu

SEQ ID NO: 2318665 - RNA, 19 nt, Homo sapiens
  misc_RNA (1)...(19): siRNA sense strand
gcuuggaggaccagagauu

SEQ ID NO: 2318666 - RNA, 19 nt, Homo sapiens
  misc_RNA (1)...(19): siRNA sense strand
gagaaagagcagguggaaa

SEQ ID NO: 2318667 - RNA, 19 nt, Homo sapiens
  misc_RNA (1)...(19): siRNA sense strand
acauaaagcgaaugcaaga

SEQ ID NO: 2318668 - RNA, 19 nt, Homo sapiens
  misc_RNA (1)...(19): siRNA sense strand
ucucauagcuggacaggga

SEQ ID NO: 2318669 - RNA, 19 nt, Homo sapiens
  misc_RNA (1)...(19): siRNA sense strand
cugccaaagaagaugauuu

SEQ ID NO: 2318670 - RNA, 19 nt, Homo sapiens
  misc_RNA (1)...(19): siRNA sense strand
gcuuaaaauagcagaagau

SEQ ID NO: 2318671 - RNA, 19 nt, Homo sapiens
  misc_RNA (1)...(19): siRNA sense strand
ucaaauaugcucuuggaga

SEQ ID NO: 2318672 - RNA, 19 nt, Homo sapiens
  misc_RNA (1)...(19): siRNA sense strand
uuuaguuguuggagcuuua

SEQ ID NO: 2318673 - RNA, 19 nt, Homo sapiens
  misc_RNA (1)...(19): siRNA sense strand
gggaggauggggagaacua

SEQ ID NO: 2318674 - RNA, 19 nt, Homo sapiens
  misc_RNA (1)...(19): siRNA sense strand
augauaugacucugacaaa

SEQ ID NO: 2318675 - RNA, 19 nt, Homo sapiens
  misc_RNA (1)...(19): siRNA sense strand
aguagugaucaauggacaa

SEQ ID NO: 2318676 - RNA, 19 nt, Homo sapiens
  misc_RNA (1)...(19): siRNA sense strand
ugguguggucugagaaaga

SEQ ID NO: 2318677 - RNA, 19 nt, Homo sapiens
  misc_RNA (1)...(19): siRNA sense strand
aaauaugcucuuggagaaa

SEQ ID NO: 2318678 - RNA, 19 nt, Homo sapiens
  misc_RNA (1)...(19): siRNA sense strand
aaguagugaucaauggaca

SEQ ID NO: 2318679 - RNA, 19 nt, Homo sapiens
  misc_RNA (1)...(19): siRNA sense strand
ccagaagacccaagcagga

SEQ ID NO: 2318680 - RNA, 19 nt, Homo sapiens
  misc_RNA (1)...(19): siRNA sense strand
ccaagugggaggacgcaau

SEQ ID NO: 2318681 - RNA, 19 nt, Homo sapiens
  misc_RNA (1)...(19): siRNA sense strand
auggagaauccuugccuua

SEQ ID NO: 2318682 - RNA, 19 nt, Homo sapiens
  misc_RNA (1)...(19): siRNA sense strand
aagauggauuacugccaaa

SEQ ID NO: 2318683 - RNA, 19 nt, Homo sapiens
  misc_RNA (1)...(19): siRNA sense strand
auggacaagaagucaaaua

SEQ ID NO: 2318684 - RNA, 19 nt, Homo sapiens
  misc_RNA (1)...(19): siRNA sense strand
uauucgugauggagaaaca

SEQ ID NO: 2318685 - RNA, 19 nt, Homo sapiens
  misc_RNA (1)...(19): siRNA sense strand
uuggagaaagacaaaguua

SEQ ID NO: 2318686 - RNA, 19 nt, Homo sapiens
  misc_RNA (1)...(19): siRNA sense strand
agggaucgccaauggaaau

SEQ ID NO: 2318687 - RNA, 19 nt, Homo sapiens
  misc_RNA (1)...(19): siRNA sense strand
ugacagauauagacccuga

SEQ ID NO: 2318688 - RNA, 19 nt, Homo sapiens
  misc_RNA (1)...(19): siRNA sense strand
cuuaagucaaagauggauu

SEQ ID NO: 2318689 - RNA, 19 nt, Homo sapiens
  misc_RNA (1)...(19): siRNA sense strand
gagaaacaccugacccaga

SEQ ID NO: 2318690 - RNA, 19 nt, Homo sapiens
  misc_RNA (1)...(19): siRNA sense strand
gauuacugccaaagaagau

SEQ ID NO: 2318691 - RNA, 19 nt, Homo sapiens
  misc_RNA (1)...(19): siRNA sense strand
gaucaauggacaagaaguc

SEQ ID NO: 2318692 - RNA, 19 nt, Homo sapiens
  misc_RNA (1)...(19): siRNA sense strand
ugcuauucgugauggagaa

SEQ ID NO: 2318693 - RNA, 19 nt, Homo sapiens
  misc_RNA (1)...(19): siRNA sense strand
gcuaaagauggcaacugaa

SEQ ID NO: 2318694 - RNA, 19 nt, Homo sapiens
  misc_RNA (1)...(19): siRNA sense strand
cugagaaagagcaggugga

SEQ ID NO: 2318695 - RNA, 19 nt, Homo sapiens
  misc_RNA (1)...(19): siRNA sense strand
guaaagacauuuggggaga

SEQ ID NO: 2318696 - RNA, 19 nt, Homo sapiens
  misc_RNA (1)...(19): siRNA sense strand
agcgaaugcaagaggugua

SEQ ID NO: 2318697 - RNA, 19 nt, Homo sapiens
  misc_RNA (1)...(19): siRNA sense strand
acaacugcuuggaggacca

SEQ ID NO: 2318698 - RNA, 19 nt, Homo sapiens
  misc_RNA (1)...(19): siRNA sense strand
cugaugacuggaaggauuu

SEQ ID NO: 2318699 - RNA, 19 nt, Homo sapiens
  misc_RNA (1)...(19): siRNA sense strand
ucaauggacaagaagucaa

SEQ ID NO: 2318700 - RNA, 19 nt, Homo sapiens
  misc_RNA (1)...(19): siRNA sense strand
uuguauugccuuaagucaa

SEQ ID NO: 2318701 - RNA, 19 nt, Homo sapiens
  misc_RNA (1)...(19): siRNA sense strand
agaagacccaagcaggaaa

SEQ ID NO: 2318702 - RNA, 19 nt, Homo sapiens
  misc_RNA (1)...(19): siRNA sense strand
cuucaguucccuaugagaa

SEQ ID NO: 2318703 - RNA, 19 nt, Homo sapiens
  misc_RNA (1)...(19): siRNA sense strand
ggcaacugaacaaggaaga

SEQ ID NO: 2318704 - RNA, 19 nt, Homo sapiens
  misc_RNA (1)...(19): siRNA sense strand
uaccaagagcacaaagcaa

SEQ ID NO: 2318705 - RNA, 19 nt, Homo sapiens
  misc_RNA (1)...(19): siRNA sense strand
ugggaucacuuuugguuaa

SEQ ID NO: 2318706 - RNA, 19 nt, Homo sapiens
  misc_RNA (1)...(19): siRNA sense strand
cggacgauuguuuggugaa

SEQ ID NO: 2318707 - RNA, 19 nt, Homo sapiens
  misc_RNA (1)...(19): siRNA sense strand
gccaaguaccugauggaga

SEQ ID NO: 2318708 - RNA, 19 nt, Homo sapiens
  misc_RNA (1)...(19): siRNA sense strand
cugucaaggcccuggacuu

SEQ ID NO: 2318709 - RNA, 19 nt, Homo sapiens
  misc_RNA (1)...(19): siRNA sense strand
ugaugaguguugaccgcua

SEQ ID NO: 2318710 - RNA, 19 nt, Homo sapiens
  misc_RNA (1)...(19): siRNA sense strand
cgguacacuaagaugaaga

SEQ ID NO: 2318711 - RNA, 19 nt, Homo sapiens
  misc_RNA (1)...(19): siRNA sense strand
acuaagaugaagacggcca

SEQ ID NO: 2318712 - RNA, 19 nt, Homo sapiens
  misc_RNA (1)...(19): siRNA sense strand
agaugaagacggccaccaa

SEQ ID NO: 2318713 - RNA, 19 nt, Homo sapiens
  misc_RNA (1)...(19): siRNA sense strand
ccaaguaccugauggagac

SEQ ID NO: 2318714 - RNA, 19 nt, Homo sapiens
  misc_RNA (1)...(19): siRNA sense strand
ccaucgacuacuacaauau

SEQ ID NO: 2318715 - RNA, 19 nt, Homo sapiens
  misc_RNA (1)...(19): siRNA sense strand
aggcagaugaagaggaaua

SEQ ID NO: 2318716 - RNA, 19 nt, Homo sapiens
  misc_RNA (1)...(19): siRNA sense strand
auguaaagcugaugggaau

SEQ ID NO: 2318717 - RNA, 19 nt, Homo sapiens
  misc_RNA (1)...(19): siRNA sense strand
aggaaaucguagaggaaga

SEQ ID NO: 2318718 - RNA, 19 nt, Homo sapiens
  misc_RNA (1)...(19): siRNA sense strand
agaaaagaugggagagaaa

SEQ ID NO: 2318719 - RNA, 19 nt, Homo sapiens
  misc_RNA (1)...(19): siRNA sense strand
ggaauaaacugcaggugga

SEQ ID NO: 2318720 - RNA, 19 nt, Homo sapiens
  misc_RNA (1)...(19): siRNA sense strand
ugaugaagacggugaagaa

SEQ ID NO: 2318721 - RNA, 19 nt, Homo sapiens
  misc_RNA (1)...(19): siRNA sense strand
ggaucguaauaauggcaaa

SEQ ID NO: 2318722 - RNA, 19 nt, Homo sapiens
  misc_RNA (1)...(19): siRNA sense strand
aagaggaaacagagaagaa

SEQ ID NO: 2318723 - RNA, 19 nt, Homo sapiens
  misc_RNA (1)...(19): siRNA sense strand
uagaagcagaagaggauaa

SEQ ID NO: 2318724 - RNA, 19 nt, Homo sapiens
  misc_RNA (1)...(19): siRNA sense strand
gguuagaagcagaagagga

SEQ ID NO: 2318725 - RNA, 19 nt, Homo sapiens
  misc_RNA (1)...(19): siRNA sense strand
gaggauaaugauacugaaa

SEQ ID NO: 2318726 - RNA, 19 nt, Homo sapiens
  misc_RNA (1)...(19): siRNA sense strand
gcgaauauuuugucagcua

SEQ ID NO: 2318727 - RNA, 19 nt, Homo sapiens
  misc_RNA (1)...(19): siRNA sense strand
ggaaggaaaucguagagga

SEQ ID NO: 2318728 - RNA, 19 nt, Homo sapiens
  misc_RNA (1)...(19): siRNA sense strand
guuagaagcagaagaggau

SEQ ID NO: 2318729 - RNA, 19 nt, Homo sapiens
  misc_RNA (1)...(19): siRNA sense strand
cggugaagaauuagauaca

SEQ ID NO: 2318730 - RNA, 19 nt, Homo sapiens
  misc_RNA (1)...(19): siRNA sense strand
gaaacagagaagaaagaca

SEQ ID NO: 2318731 - RNA, 19 nt, Homo sapiens
  misc_RNA (1)...(19): siRNA sense strand
aggaaacagagaagaaaga

SEQ ID NO: 2318732 - RNA, 19 nt, Homo sapiens
  misc_RNA (1)...(19): siRNA sense strand
gggagaugaagaagcaaau

SEQ ID NO: 2318733 - RNA, 19 nt, Homo sapiens
  misc_RNA (1)...(19): siRNA sense strand
cggaguauuaguagcuuaa

SEQ ID NO: 2318734 - RNA, 19 nt, Homo sapiens
  misc_RNA (1)...(19): siRNA sense strand
uggaaaaucaggugaagaa

SEQ ID NO: 2318735 - RNA, 19 nt, Homo sapiens
  misc_RNA (1)...(19): siRNA sense strand
ucguagaggaagaagaaaa

SEQ ID NO: 2318736 - RNA, 19 nt, Homo sapiens
  misc_RNA (1)...(19): siRNA sense strand
ccuguaggccaaagauuaa

SEQ ID NO: 2318737 - RNA, 19 nt, Homo sapiens
  misc_RNA (1)...(19): siRNA sense strand
agauacagaagaugaagaa

SEQ ID NO: 2318738 - RNA, 19 nt, Homo sapiens
  misc_RNA (1)...(19): siRNA sense strand
cagaugauucuuugggauu

SEQ ID NO: 2318739 - RNA, 19 nt, Homo sapiens
  misc_RNA (1)...(19): siRNA sense strand
gaggagaagcucaggaacu

SEQ ID NO: 2318740 - RNA, 19 nt, Homo sapiens
  misc_RNA (1)...(19): siRNA sense strand
agggagaugaagaagcaaa

SEQ ID NO: 2318741 - RNA, 19 nt, Homo sapiens
  misc_RNA (1)...(19): siRNA sense strand
uugaagaggcagaugaaga

SEQ ID NO: 2318742 - RNA, 19 nt, Homo sapiens
  misc_RNA (1)...(19): siRNA sense strand
ucgcagaauucaaugccaa

SEQ ID NO: 2318743 - RNA, 19 nt, Homo sapiens
  misc_RNA (1)...(19): siRNA sense strand
ugaaauggacagaaggcau

SEQ ID NO: 2318744 - RNA, 19 nt, Homo sapiens
  misc_RNA (1)...(19): siRNA sense strand
cugacuaucccgaagcaaa

SEQ ID NO: 2318745 - RNA, 19 nt, Homo sapiens
  misc_RNA (1)...(19): siRNA sense strand
aagaugagcaacuggaauu

SEQ ID NO: 2318746 - RNA, 19 nt, Homo sapiens
  misc_RNA (1)...(19): siRNA sense strand
cugagaaaggggauagaaa

SEQ ID NO: 2318747 - RNA, 19 nt, Homo sapiens
  misc_RNA (1)...(19): siRNA sense strand
cuucaaggugggaucguaa

SEQ ID NO: 2318748 - RNA, 19 nt, Homo sapiens
  misc_RNA (1)...(19): siRNA sense strand
gaaggugauaaguggcuaa

SEQ ID NO: 2318749 - RNA, 19 nt, Homo sapiens
  misc_RNA (1)...(19): siRNA sense strand
uauaaauggcccagcaaaa

SEQ ID NO: 2318750 - RNA, 19 nt, Homo sapiens
  misc_RNA (1)...(19): siRNA sense strand
uggaacaggaaaugaaaca

SEQ ID NO: 2318751 - RNA, 19 nt, Homo sapiens
  misc_RNA (1)...(19): siRNA sense strand
guguaacagcuguggacau

SEQ ID NO: 2318752 - RNA, 19 nt, Homo sapiens
  misc_RNA (1)...(19): siRNA sense strand
cauucaaacuuauggaaac

SEQ ID NO: 2318753 - RNA, 19 nt, Homo sapiens
  misc_RNA (1)...(19): siRNA sense strand
ucaaacuggcagauauaaa

SEQ ID NO: 2318754 - RNA, 19 nt, Homo sapiens
  misc_RNA (1)...(19): siRNA sense strand
aagaaagacagcagaaaau

SEQ ID NO: 2318755 - RNA, 19 nt, Homo sapiens
  misc_RNA (1)...(19): siRNA sense strand
agaagaaagacagcagaaa

SEQ ID NO: 2318756 - RNA, 19 nt, Homo sapiens
  misc_RNA (1)...(19): siRNA sense strand
ggcacagagugaacagcaa

SEQ ID NO: 2318757 - RNA, 19 nt, Homo sapiens
  misc_RNA (1)...(19): siRNA sense strand
augaagacggugaagaauu

SEQ ID NO: 2318758 - RNA, 19 nt, Homo sapiens
  misc_RNA (1)...(19): siRNA sense strand
acaagauauggaaggaaau

SEQ ID NO: 2318759 - RNA, 19 nt, Homo sapiens
  misc_RNA (1)...(19): siRNA sense strand
agguaauugaagaggcaga

SEQ ID NO: 2318760 - RNA, 19 nt, Homo sapiens
  misc_RNA (1)...(19): siRNA sense strand
uggaaauggaguugaucuu

SEQ ID NO: 2318761 - RNA, 19 nt, Homo sapiens
  misc_RNA (1)...(19): siRNA sense strand
ugagaaaggggauagaaaa

SEQ ID NO: 2318762 - RNA, 19 nt, Homo sapiens
  misc_RNA (1)...(19): siRNA sense strand
aaucguagaggaagaagaa

SEQ ID NO: 2318763 - RNA, 19 nt, Homo sapiens
  misc_RNA (1)...(19): siRNA sense strand
aauguaaagcugaugggaa

SEQ ID NO: 2318764 - RNA, 19 nt, Homo sapiens
  misc_RNA (1)...(19): siRNA sense strand
acggaguauuaguagcuua

SEQ ID NO: 2318765 - RNA, 19 nt, Homo sapiens
  misc_RNA (1)...(19): siRNA sense strand
agagugaacagcaaacaaa

SEQ ID NO: 2318766 - RNA, 19 nt, Homo sapiens
  misc_RNA (1)...(19): siRNA sense strand
agugaacagcaaacaaaua

SEQ ID NO: 2318767 - RNA, 19 nt, Homo sapiens
  misc_RNA (1)...(19): siRNA sense strand
auaaacugcagguggagaa

SEQ ID NO: 2318768 - RNA, 19 nt, Homo sapiens
  misc_RNA (1)...(19): siRNA sense strand
cagucugaguccugugaau

SEQ ID NO: 2318769 - RNA, 19 nt, Homo sapiens
  misc_RNA (1)...(19): siRNA sense strand
aagaagaggaaacagagaa

SEQ ID NO: 2318770 - RNA, 19 nt, Homo sapiens
  misc_RNA (1)...(19): siRNA sense strand
caagaagaggaaacagaga

SEQ ID NO: 2318771 - RNA, 19 nt, Homo sapiens
  misc_RNA (1)...(19): siRNA sense strand
acacugguuuauuggaaau

SEQ ID NO: 2318772 - RNA, 19 nt, Homo sapiens
  misc_RNA (1)...(19): siRNA sense strand
gcucaggaacuucaggauu

SEQ ID NO: 2318773 - RNA, 19 nt, Homo sapiens
  misc_RNA (1)...(19): siRNA sense strand
ggaccugauuuuaguagaa

SEQ ID NO: 2318774 - RNA, 19 nt, Homo sapiens
  misc_RNA (1)...(19): siRNA sense strand
cauuagaauugauggcucu

SEQ ID NO: 2318775 - RNA, 19 nt, Homo sapiens
  misc_RNA (1)...(19): siRNA sense strand
auuucaagacacugguuua

SEQ ID NO: 2318776 - RNA, 19 nt, Homo sapiens
  misc_RNA (1)...(19): siRNA sense strand
ggaugaaacucuagggaca

SEQ ID NO: 2318777 - RNA, 19 nt, Homo sapiens
  misc_RNA (1)...(19): siRNA sense strand
gguugaaagcauugaauau

SEQ ID NO: 2318778 - RNA, 19 nt, Homo sapiens
  misc_RNA (1)...(19): siRNA sense strand
ccacaauggaggaagaauu

SEQ ID NO: 2318779 - RNA, 19 nt, Homo sapiens
  misc_RNA (1)...(19): siRNA sense strand
cugaugaauuugagcgaau

SEQ ID NO: 2318780 - RNA, 19 nt, Homo sapiens
  misc_RNA (1)...(19): siRNA sense strand
acauaaacccuguguggaa

SEQ ID NO: 2318781 - RNA, 19 nt, Homo sapiens
  misc_RNA (1)...(19): siRNA sense strand
cugaaaugguucuagaaau

SEQ ID NO: 2318782 - RNA, 19 nt, Homo sapiens
  misc_RNA (1)...(19): siRNA sense strand
cugagcaguuugaaggaaa

SEQ ID NO: 2318783 - RNA, 19 nt, Homo sapiens
  misc_RNA (1)...(19): siRNA sense strand
aggaagagaacaagacauu

SEQ ID NO: 2318784 - RNA, 19 nt, Homo sapiens
  misc_RNA (1)...(19): siRNA sense strand
gaagaaaagcucuggacaa

SEQ ID NO: 2318785 - RNA, 19 nt, Homo sapiens
  misc_RNA (1)...(19): siRNA sense strand
agaaagggccagaggagau

SEQ ID NO: 2318786 - RNA, 19 nt, Homo sapiens
  misc_RNA (1)...(19): siRNA sense strand
cguuaagaaguaugaagaa

SEQ ID NO: 2318787 - RNA, 19 nt, Homo sapiens
  misc_RNA (1)...(19): siRNA sense strand
ggaggaagaauuagaaaau

SEQ ID NO: 2318788 - RNA, 19 nt, Homo sapiens
  misc_RNA (1)...(19): siRNA sense strand
gggaaacugaggaagagaa

SEQ ID NO: 2318789 - RNA, 19 nt, Homo sapiens
  misc_RNA (1)...(19): siRNA sense strand
cgaaauuggcauggcuaaa

SEQ ID NO: 2318790 - RNA, 19 nt, Homo sapiens
  misc_RNA (1)...(19): siRNA sense strand
ccugauauggagaaagauu

SEQ ID NO: 2318791 - RNA, 19 nt, Homo sapiens
  misc_RNA (1)...(19): siRNA sense strand
agaggagauuaaugaagaa

SEQ ID NO: 2318792 - RNA, 19 nt, Homo sapiens
  misc_RNA (1)...(19): siRNA sense strand
ccaacaucaacuucagaaa

SEQ ID NO: 2318793 - RNA, 19 nt, Homo sapiens
  misc_RNA (1)...(19): siRNA sense strand
gggagagcaugaagaaacu

SEQ ID NO: 2318794 - RNA, 19 nt, Homo sapiens
  misc_RNA (1)...(19): siRNA sense strand
acgaaauuggcauggcuaa

SEQ ID NO: 2318795 - RNA, 19 nt, Homo sapiens
  misc_RNA (1)...(19): siRNA sense strand
ccuuaguaauguugaggca

SEQ ID NO: 2318796 - RNA, 19 nt, Homo sapiens
  misc_RNA (1)...(19): siRNA sense strand
acugaggaagagaaagaaa

SEQ ID NO: 2318797 - RNA, 19 nt, Homo sapiens
  misc_RNA (1)...(19): siRNA sense strand
auucaauaccagagaagga

SEQ ID NO: 2318798 - RNA, 19 nt, Homo sapiens
  misc_RNA (1)...(19): siRNA sense strand
cgggaagggcugaaggagu

SEQ ID NO: 2318799 - RNA, 19 nt, Homo sapiens
  misc_RNA (1)...(19): siRNA sense strand
cugaggaagagaaagaaau

SEQ ID NO: 2318800 - RNA, 19 nt, Homo sapiens
  misc_RNA (1)...(19): siRNA sense strand
aggagaagacuuucagaca

SEQ ID NO: 2318801 - RNA, 19 nt, Homo sapiens
  misc_RNA (1)...(19): siRNA sense strand
cauuauacgaaucaggaau

SEQ ID NO: 2318802 - RNA, 19 nt, Homo sapiens
  misc_RNA (1)...(19): siRNA sense strand
gacagcaggaagagaacaa

SEQ ID NO: 2318803 - RNA, 19 nt, Homo sapiens
  misc_RNA (1)...(19): siRNA sense strand
caguauucccacaaguuua

SEQ ID NO: 2318804 - RNA, 19 nt, Homo sapiens
  misc_RNA (1)...(19): siRNA sense strand
gggaagggcugaaggagug

SEQ ID NO: 2318805 - RNA, 19 nt, Homo sapiens
  misc_RNA (1)...(19): siRNA sense strand
aaagaacacauaagggaga

SEQ ID NO: 2318806 - RNA, 19 nt, Homo sapiens
  misc_RNA (1)...(19): siRNA sense strand
acauuauaguggagcacca

SEQ ID NO: 2318807 - RNA, 19 nt, Homo sapiens
  misc_RNA (1)...(19): siRNA sense strand
ucuaugaaggugggagaaa

SEQ ID NO: 2318808 - RNA, 19 nt, Homo sapiens
  misc_RNA (1)...(19): siRNA sense strand
aagccaugguugaaagcau

SEQ ID NO: 2318809 - RNA, 19 nt, Homo sapiens
  misc_RNA (1)...(19): siRNA sense strand
ugggaacagucguuaagaa

SEQ ID NO: 2318810 - RNA, 19 nt, Homo sapiens
  misc_RNA (1)...(19): siRNA sense strand
gguccaaagaauagugaag

SEQ ID NO: 2318811 - RNA, 19 nt, Homo sapiens
  misc_RNA (1)...(19): siRNA sense strand
gagaaggacgugcugggaa

SEQ ID NO: 2318812 - RNA, 19 nt, Homo sapiens
  misc_RNA (1)...(19): siRNA sense strand
cuaaguaaacccaaagcau

SEQ ID NO: 2318813 - RNA, 19 nt, Homo sapiens
  misc_RNA (1)...(19): siRNA sense strand
gggcguuucugguucacaa

SEQ ID NO: 2318814 - RNA, 19 nt, Homo sapiens
  misc_RNA (1)...(19): siRNA sense strand
acugaaaugguucuagaaa

SEQ ID NO: 2318815 - RNA, 19 nt, Homo sapiens
  misc_RNA (1)...(19): siRNA sense strand
aagaaaaccccuugcauuu

SEQ ID NO: 2318816 - RNA, 19 nt, Homo sapiens
  misc_RNA (1)...(19): siRNA sense strand
cuaugaaggugggagaaaa

SEQ ID NO: 2318817 - RNA, 19 nt, Homo sapiens
  misc_RNA (1)...(19): siRNA sense strand
cacauaagggagagcauga

SEQ ID NO: 2318818 - RNA, 19 nt, Homo sapiens
  misc_RNA (1)...(19): siRNA sense strand
gcauuauacgaaucaggaa

SEQ ID NO: 2318819 - RNA, 19 nt, Homo sapiens
  misc_RNA (1)...(19): siRNA sense strand
uccaaagaauagugaagga

SEQ ID NO: 2318820 - RNA, 19 nt, Homo sapiens
  misc_RNA (1)...(19): siRNA sense strand
gagaaagggccagaggaga

SEQ ID NO: 2318821 - RNA, 19 nt, Homo sapiens
  misc_RNA (1)...(19): siRNA sense strand
uggaggaagaauuagaaaa

SEQ ID NO: 2318822 - RNA, 19 nt, Homo sapiens
  misc_RNA (1)...(19): siRNA sense strand
agaaggacgugcugggaag

SEQ ID NO: 2318823 - RNA, 19 nt, Homo sapiens
  misc_RNA (1)...(19): siRNA sense strand
acccaaaggcacugaaaau

SEQ ID NO: 2318824 - RNA, 19 nt, Homo sapiens
  misc_RNA (1)...(19): siRNA sense strand
gaaaagaacacauaaggga

SEQ ID NO: 2318825 - RNA, 19 nt, Homo sapiens
  misc_RNA (1)...(19): siRNA sense strand
gaauagugaaggauugcau

SEQ ID NO: 2318826 - RNA, 19 nt, Homo sapiens
  misc_RNA (1)...(19): siRNA sense strand
ugggauguuaauaggagaa

SEQ ID NO: 2318827 - RNA, 19 nt, Homo sapiens
  misc_RNA (1)...(19): siRNA sense strand
cagaaaagugggcuaaaau

SEQ ID NO: 2318828 - RNA, 19 nt, Homo sapiens
  misc_RNA (1)...(19): siRNA sense strand
gaauccugauauggagaaa

SEQ ID NO: 2318829 - RNA, 19 nt, Homo sapiens
  misc_RNA (1)...(19): siRNA sense strand
uaaaagaagccaugguuga

SEQ ID NO: 2318830 - RNA, 19 nt, Homo sapiens
  misc_RNA (1)...(19): siRNA sense strand
gaaggugggagaaaagaaa

SEQ ID NO: 2318831 - RNA, 19 nt, Homo sapiens
  misc_RNA (1)...(19): siRNA sense strand
gggagaaaagaaagaaguu

SEQ ID NO: 2318832 - RNA, 19 nt, Homo sapiens
  misc_RNA (1)...(19): siRNA sense strand
gugaucaggagaagacuuu

SEQ ID NO: 2318833 - RNA, 19 nt, Homo sapiens
  misc_RNA (1)...(19): siRNA sense strand
agggagagcaugaagaaac

SEQ ID NO: 2318834 - RNA, 19 nt, Homo sapiens
  misc_RNA (1)...(19): siRNA sense strand
ucguuaagaaguaugaaga

SEQ ID NO: 2318835 - RNA, 19 nt, Homo sapiens
  misc_RNA (1)...(19): siRNA sense strand
caauggaggaagaauuaga

SEQ ID NO: 2318836 - RNA, 19 nt, Homo sapiens
  misc_RNA (1)...(19): siRNA sense strand
cugggaagguacacaacuu

SEQ ID NO: 2318837 - RNA, 19 nt, Homo sapiens
  misc_RNA (1)...(19): siRNA sense strand
gcaagaagcaucagcggaa

SEQ ID NO: 2318838 - RNA, 19 nt, Homo sapiens
  misc_RNA (1)...(19): siRNA sense strand
gagaugaacgagagggaga

SEQ ID NO: 2318839 - RNA, 19 nt, Homo sapiens
  misc_RNA (1)...(19): siRNA sense strand
cggaacugacggagauuaa

SEQ ID NO: 2318840 - RNA, 19 nt, Homo sapiens
  misc_RNA (1)...(19): siRNA sense strand
aggaggaagaugaggaaga

SEQ ID NO: 2318841 - RNA, 19 nt, Homo sapiens
  misc_RNA (1)...(19): siRNA sense strand
uggcagaagaggagcccaa

SEQ ID NO: 2318842 - RNA, 19 nt, Homo sapiens
  misc_RNA (1)...(19): siRNA sense strand
cggagagccaggaggagaa

SEQ ID NO: 2318843 - RNA, 19 nt, Homo sapiens
  misc_RNA (1)...(19): siRNA sense strand
agauaggcgccaagggcaa

SEQ ID NO: 2318844 - RNA, 19 nt, Homo sapiens
  misc_RNA (1)...(19): siRNA sense strand
agaugagggacaagcauaa

SEQ ID NO: 2318845 - RNA, 19 nt, Homo sapiens
  misc_RNA (1)...(19): siRNA sense strand
gugaggaugaggaggaaga

SEQ ID NO: 2318846 - RNA, 19 nt, Homo sapiens
  misc_RNA (1)...(19): siRNA sense strand
cugaaagagaugaacgaga

SEQ ID NO: 2318847 - RNA, 19 nt, Homo sapiens
  misc_RNA (1)...(19): siRNA sense strand
cguccuuuguggagaccaa

SEQ ID NO: 2318848 - RNA, 19 nt, Homo sapiens
  misc_RNA (1)...(19): siRNA sense strand
gcaucuacguggaggugga

SEQ ID NO: 2318849 - RNA, 19 nt, Homo sapiens
  misc_RNA (1)...(19): siRNA sense strand
uggaaaucuuugagcgguu

SEQ ID NO: 2318850 - RNA, 19 nt, Homo sapiens
  misc_RNA (1)...(19): siRNA sense strand
augaggaagaggaggaaca

SEQ ID NO: 2318851 - RNA, 19 nt, Homo sapiens
  misc_RNA (1)...(19): siRNA sense strand
ccauggagcaacugaccaa

SEQ ID NO: 2318852 - RNA, 19 nt, Homo sapiens
  misc_RNA (1)...(19): siRNA sense strand
aggacgaggcaaagcggua

SEQ ID NO: 2318853 - RNA, 19 nt, Homo sapiens
  misc_RNA (1)...(19): siRNA sense strand
ucaucgagccucuggacaa

SEQ ID NO: 2318854 - RNA, 19 nt, Homo sapiens
  misc_RNA (1)...(19): siRNA sense strand
ggguaaauucguagggcac

SEQ ID NO: 2318855 - RNA, 19 nt, Homo sapiens
  misc_RNA (1)...(19): siRNA sense strand
gagauuaaccgucggcaca

SEQ ID NO: 2318856 - RNA, 19 nt, Homo sapiens
  misc_RNA (1)...(19): siRNA sense strand
guauccuggugaagaacaa

SEQ ID NO: 2318857 - RNA, 19 nt, Homo sapiens
  misc_RNA (1)...(19): siRNA sense strand
gccaaugccuugcggguca

SEQ ID NO: 2318858 - RNA, 19 nt, Homo sapiens
  misc_RNA (1)...(19): siRNA sense strand
gggagaagaaggagcugca

SEQ ID NO: 2318859 - RNA, 19 nt, Homo sapiens
  misc_RNA (1)...(19): siRNA sense strand
ccuuugaggcugcucgaaa

SEQ ID NO: 2318860 - RNA, 19 nt, Homo sapiens
  misc_RNA (1)...(19): siRNA sense strand
ucgaaaaguaugagcccaa

SEQ ID NO: 2318861 - RNA, 19 nt, Homo sapiens
  misc_RNA (1)...(19): siRNA sense strand
aagaugaggaagaggagga

SEQ ID NO: 2318862 - RNA, 19 nt, Homo sapiens
  misc_RNA (1)...(19): siRNA sense strand
cugacgaccaccaggacua

SEQ ID NO: 2318863 - RNA, 19 nt, Homo sapiens
  misc_RNA (1)...(19): siRNA sense strand
ccgacaggaaggugggcau

SEQ ID NO: 2318864 - RNA, 19 nt, Homo sapiens
  misc_RNA (1)...(19): siRNA sense strand
aggccaagaugagggacaa

SEQ ID NO: 2318865 - RNA, 19 nt, Homo sapiens
  misc_RNA (1)...(19): siRNA sense strand
agaccaaggccauggagca

SEQ ID NO: 2318866 - RNA, 19 nt, Homo sapiens
  misc_RNA (1)...(19): siRNA sense strand
caagagacgugccaggaca

SEQ ID NO: 2318867 - RNA, 19 nt, Homo sapiens
  misc_RNA (1)...(19): siRNA sense strand
cugcugaccgugaggauga

SEQ ID NO: 2318868 - RNA, 19 nt, Homo sapiens
  misc_RNA (1)...(19): siRNA sense strand
aggaagaugaggaagagga

SEQ ID NO: 2318869 - RNA, 19 nt, Homo sapiens
  misc_RNA (1)...(19): siRNA sense strand
aagaggaggaacagacaga

SEQ ID NO: 2318870 - RNA, 19 nt, Homo sapiens
  misc_RNA (1)...(19): siRNA sense strand
gagaagaaggagcugcaga

SEQ ID NO: 2318871 - RNA, 19 nt, Homo sapiens
  misc_RNA (1)...(19): siRNA sense strand
gaggccaagaugagggaca

SEQ ID NO: 2318872 - RNA, 19 nt, Homo sapiens
  misc_RNA (1)...(19): siRNA sense strand
cuaugaacauccuggcuca

SEQ ID NO: 2318873 - RNA, 19 nt, Homo sapiens
  misc_RNA (1)...(19): siRNA sense strand
gucacaaggcucuggucaa

SEQ ID NO: 2318874 - RNA, 19 nt, Homo sapiens
  misc_RNA (1)...(19): siRNA sense strand
gaccaaggccauggagcaa

SEQ ID NO: 2318875 - RNA, 19 nt, Homo sapiens
  misc_RNA (1)...(19): siRNA sense strand
ggcuggaacaccugagaca

SEQ ID NO: 2318876 - RNA, 19 nt, Homo sapiens
  misc_RNA (1)...(19): siRNA sense strand
ucaucaacuccucgcauaa

SEQ ID NO: 2318877 - RNA, 19 nt, Homo sapiens
  misc_RNA (1)...(19): siRNA sense strand
augcggaggcccugaucaa

SEQ ID NO: 2318878 - RNA, 19 nt, Homo sapiens
  misc_RNA (1)...(19): siRNA sense strand
caucagggacacacggaca

SEQ ID NO: 2318879 - RNA, 19 nt, Homo sapiens
  misc_RNA (1)...(19): siRNA sense strand
aggaacaaaugcuucgaga

SEQ ID NO: 2318880 - RNA, 19 nt, Homo sapiens
  misc_RNA (1)...(19): siRNA sense strand
gcaaagcgguaucaggagu

SEQ ID NO: 2318881 - RNA, 19 nt, Homo sapiens
  misc_RNA (1)...(19): siRNA sense strand
aggucguccuugaugcaaa

SEQ ID NO: 2318882 - RNA, 19 nt, Homo sapiens
  misc_RNA (1)...(19): siRNA sense strand
aagagaugaacgagaggga

SEQ ID NO: 2318883 - RNA, 19 nt, Homo sapiens
  misc_RNA (1)...(19): siRNA sense strand
aagaaggagcugcagaaga

SEQ ID NO: 2318884 - RNA, 19 nt, Homo sapiens
  misc_RNA (1)...(19): siRNA sense strand
ugaggaggaagaugaggaa

SEQ ID NO: 2318885 - RNA, 19 nt, Homo sapiens
  misc_RNA (1)...(19): siRNA sense strand
ccgcugauguggaggacac

SEQ ID NO: 2318886 - RNA, 19 nt, Homo sapiens
  misc_RNA (1)...(19): siRNA sense strand
uggaggaggcccagaagca

SEQ ID NO: 2318887 - RNA, 19 nt, Homo sapiens
  misc_RNA (1)...(19): siRNA sense strand
ggcugaaagagaugaacga

SEQ ID NO: 2318888 - RNA, 19 nt, Homo sapiens
  misc_RNA (1)...(19): siRNA sense strand
auaagaaggaggcggaacu

SEQ ID NO: 2318889 - RNA, 19 nt, Homo sapiens
  misc_RNA (1)...(19): siRNA sense strand
ccgugaggaugaggaggaa

SEQ ID NO: 2318890 - RNA, 19 nt, Homo sapiens
  misc_RNA (1)...(19): siRNA sense strand
aggcaaagcgguaucagga

SEQ ID NO: 2318891 - RNA, 19 nt, Homo sapiens
  misc_RNA (1)...(19): siRNA sense strand
ucaaaugggacgaggagac

SEQ ID NO: 2318892 - RNA, 19 nt, Homo sapiens
  misc_RNA (1)...(19): siRNA sense strand
ggaccucgucgguggagau

SEQ ID NO: 2318893 - RNA, 19 nt, Homo sapiens
  misc_RNA (1)...(19): siRNA sense strand
uggaauacaacaagcagca

SEQ ID NO: 2318894 - RNA, 19 nt, Homo sapiens
  misc_RNA (1)...(19): siRNA sense strand
cugcagaagauccuggaca

SEQ ID NO: 2318895 - RNA, 19 nt, Homo sapiens
  misc_RNA (1)...(19): siRNA sense strand
aaacaaaugaugugggcca

SEQ ID NO: 2318896 - RNA, 19 nt, Homo sapiens
  misc_RNA (1)...(19): siRNA sense strand
caaauggaggaguggaaau

SEQ ID NO: 2318897 - RNA, 19 nt, Homo sapiens
  misc_RNA (1)...(19): siRNA sense strand
gauucauagacaagggaga

SEQ ID NO: 2318898 - RNA, 19 nt, Homo sapiens
  misc_RNA (1)...(19): siRNA sense strand
ccuauauacuaaugagaac

SEQ ID NO: 2318899 - RNA, 19 nt, Homo sapiens
  misc_RNA (1)...(19): siRNA sense strand
gggagcaguagcaggaaaa

SEQ ID NO: 2318900 - RNA, 19 nt, Homo sapiens
  misc_RNA (1)...(19): siRNA sense strand
uguucaagguggaaagugu

SEQ ID NO: 2318901 - RNA, 19 nt, Homo sapiens
  misc_RNA (1)...(19): siRNA sense strand
ugggagcaguagcaggaaa

SEQ ID NO: 2318902 - RNA, 19 nt, Homo sapiens
  misc_RNA (1)...(19): siRNA sense strand
uggucaggaauuacggaaa

SEQ ID NO: 2318903 - RNA, 19 nt, Homo sapiens
  misc_RNA (1)...(19): siRNA sense strand
cauagacaagggagaagaa

SEQ ID NO: 2318904 - RNA, 19 nt, Homo sapiens
  misc_RNA (1)...(19): siRNA sense strand
uagacaagggagaagaaaa

SEQ ID NO: 2318905 - RNA, 19 nt, Homo sapiens
  misc_RNA (1)...(19): siRNA sense strand
augccaaauuuguggaugu

SEQ ID NO: 2318906 - RNA, 19 nt, Homo sapiens
  misc_RNA (1)...(19): siRNA sense strand
ugggagcagaaguggcaua

SEQ ID NO: 2318907 - RNA, 19 nt, Homo sapiens
  misc_RNA (1)...(19): siRNA sense strand
uggagacaaauguuggaaa

SEQ ID NO: 2318908 - RNA, 19 nt, Homo sapiens
  misc_RNA (1)...(19): siRNA sense strand
cggaaauaaaggaaacucu

SEQ ID NO: 2318909 - RNA, 19 nt, Homo sapiens
  misc_RNA (1)...(19): siRNA sense strand
ggccaaugugugcaagaau

SEQ ID NO: 2318910 - RNA, 19 nt, Homo sapiens
  misc_RNA (1)...(19): siRNA sense strand
ggauguaauucacacggau

SEQ ID NO: 2318911 - RNA, 19 nt, Homo sapiens
  misc_RNA (1)...(19): siRNA sense strand
ucucucagauuguggacau

SEQ ID NO: 2318912 - RNA, 19 nt, Homo sapiens
  misc_RNA (1)...(19): siRNA sense strand
guauaagguaucugucaca

SEQ ID NO: 2318913 - RNA, 19 nt, Homo sapiens
  misc_RNA (1)...(19): siRNA sense strand
uuguggacauagacggaau

SEQ ID NO: 2318914 - RNA, 19 nt, Homo sapiens
  misc_RNA (1)...(19): siRNA sense strand
caggaaaagaaguuugcua

SEQ ID NO: 2318915 - RNA, 19 nt, Homo sapiens
  misc_RNA (1)...(19): siRNA sense strand
auucauagacaagggagaa

SEQ ID NO: 2318916 - RNA, 19 nt, Homo sapiens
  misc_RNA (1)...(19): siRNA sense strand
agguuaaagugguggccaa

SEQ ID NO: 2318917 - RNA, 19 nt, Homo sapiens
  misc_RNA (1)...(19): siRNA sense strand
gcguuuagagaaaggguga

SEQ ID NO: 2318918 - RNA, 19 nt, Homo sapiens
  misc_RNA (1)...(19): siRNA sense strand
gguuaaagugguggccaaa

SEQ ID NO: 2318919 - RNA, 19 nt, Homo sapiens
  misc_RNA (1)...(19): siRNA sense strand
ucugagaagcccaggguga

SEQ ID NO: 2318920 - RNA, 19 nt, Homo sapiens
  misc_RNA (1)...(19): siRNA sense strand
gaacaaaacccaagggcac

SEQ ID NO: 2318921 - RNA, 19 nt, Homo sapiens
  misc_RNA (1)...(19): siRNA sense strand
gggagauguuccuggcguu

SEQ ID NO: 2318922 - RNA, 19 nt, Homo sapiens
  misc_RNA (1)...(19): siRNA sense strand
cgccagaugaaccaggaaa

SEQ ID NO: 2318923 - RNA, 19 nt, Homo sapiens
  misc_RNA (1)...(19): siRNA sense strand
guuuagagaaagggugaau

SEQ ID NO: 2318924 - RNA, 19 nt, Homo sapiens
  misc_RNA (1)...(19): siRNA sense strand
ugggcaccuuaguggauaa

SEQ ID NO: 2318925 - RNA, 19 nt, Homo sapiens
  misc_RNA (1)...(19): siRNA sense strand
gccagaugaaccaggaaaa

SEQ ID NO: 2318926 - RNA, 19 nt, Homo sapiens
  misc_RNA (1)...(19): siRNA sense strand
guggaaaagaugaagaaaa

SEQ ID NO: 2318927 - RNA, 19 nt, Homo sapiens
  misc_RNA (1)...(19): siRNA sense strand
ugggcaaguacguggacaa

SEQ ID NO: 2318928 - RNA, 19 nt, Homo sapiens
  misc_RNA (1)...(19): siRNA sense strand
aagaaaacggggaggaaca

SEQ ID NO: 2318929 - RNA, 19 nt, Homo sapiens
  misc_RNA (1)...(19): siRNA sense strand
ggaacaagaccuacgagca

SEQ ID NO: 2318930 - RNA, 19 nt, Homo sapiens
  misc_RNA (1)...(19): siRNA sense strand
ccgacaaugcccaggacuu

SEQ ID NO: 2318931 - RNA, 19 nt, Homo sapiens
  misc_RNA (1)...(19): siRNA sense strand
cugcagaggaguuugccaa

SEQ ID NO: 2318932 - RNA, 19 nt, Homo sapiens
  misc_RNA (1)...(19): siRNA sense strand
aguacgagcuuguggucca

SEQ ID NO: 2318933 - RNA, 19 nt, Homo sapiens
  misc_RNA (1)...(19): siRNA sense strand
ugaacaaccuggaugagga

SEQ ID NO: 2318934 - RNA, 19 nt, Homo sapiens
  misc_RNA (1)...(19): siRNA sense strand
agagcagcuuuguggaaaa

SEQ ID NO: 2318935 - RNA, 19 nt, Homo sapiens
  misc_RNA (1)...(19): siRNA sense strand
gguguuuggucuugggaac

SEQ ID NO: 2318936 - RNA, 19 nt, Homo sapiens
  misc_RNA (1)...(19): siRNA sense strand
ccgacauagaugcggccaa

SEQ ID NO: 2318937 - RNA, 19 nt, Homo sapiens
  misc_RNA (1)...(19): siRNA sense strand
ucgucaaccagcugggcaa

SEQ ID NO: 2318938 - RNA, 19 nt, Homo sapiens
  misc_RNA (1)...(19): siRNA sense strand
cggaugaggacuaccugua

SEQ ID NO: 2318939 - RNA, 19 nt, Homo sapiens
  misc_RNA (1)...(19): siRNA sense strand
uggccagggaugugcagaa

SEQ ID NO: 2318940 - RNA, 19 nt, Homo sapiens
  misc_RNA (1)...(19): siRNA sense strand
uuguggaguacgagaccaa

SEQ ID NO: 2318941 - RNA, 19 nt, Homo sapiens
  misc_RNA (1)...(19): siRNA sense strand
gaacaagaccuacgagcac

SEQ ID NO: 2318942 - RNA, 19 nt, Homo sapiens
  misc_RNA (1)...(19): siRNA sense strand
cggcugaagagcuacgaga

SEQ ID NO: 2318943 - RNA, 19 nt, Homo sapiens
  misc_RNA (1)...(19): siRNA sense strand
ggcugaagagcuacgagaa

SEQ ID NO: 2318944 - RNA, 19 nt, Homo sapiens
  misc_RNA (1)...(19): siRNA sense strand
cugaagaagcagaagaccu

SEQ ID NO: 2318945 - RNA, 19 nt, Homo sapiens
  misc_RNA (1)...(19): siRNA sense strand
ccaugagugucgagcgcua

SEQ ID NO: 2318946 - RNA, 19 nt, Homo sapiens
  misc_RNA (1)...(19): siRNA sense strand
aagcaauagagaagaucaa

SEQ ID NO: 2318947 - RNA, 19 nt, Homo sapiens
  misc_RNA (1)...(19): siRNA sense strand
cugccagaccucagugaaa

SEQ ID NO: 2318948 - RNA, 19 nt, Homo sapiens
  misc_RNA (1)...(19): siRNA sense strand
ccacguacaugaagggcca

SEQ ID NO: 2318949 - RNA, 19 nt, Homo sapiens
  misc_RNA (1)...(19): siRNA sense strand
ccaucguggugcugugcaa

SEQ ID NO: 2318950 - RNA, 19 nt, Homo sapiens
  misc_RNA (1)...(19): siRNA sense strand
cgcaaggagcagaaggaga

SEQ ID NO: 2318951 - RNA, 19 nt, Homo sapiens
  misc_RNA (1)...(19): siRNA sense strand
gcaaggagcagaaggagac

SEQ ID NO: 2318952 - RNA, 19 nt, Homo sapiens
  misc_RNA (1)...(19): siRNA sense strand
agacagaaguccaaggcau

SEQ ID NO: 2318953 - RNA, 19 nt, Homo sapiens
  misc_RNA (1)...(19): siRNA sense strand
ccgaauggcaacauggaau

SEQ ID NO: 2318954 - RNA, 19 nt, Homo sapiens
  misc_RNA (1)...(19): siRNA sense strand
cauccaaacaugugaaaau

SEQ ID NO: 2318955 - RNA, 19 nt, Homo sapiens
  misc_RNA (1)...(19): siRNA sense strand
caaugcaaucacaggaauu

SEQ ID NO: 2318956 - RNA, 19 nt, Homo sapiens
  misc_RNA (1)...(19): siRNA sense strand
aaggcauaucagagauuua

SEQ ID NO: 2318957 - RNA, 19 nt, Homo sapiens
  misc_RNA (1)...(19): siRNA sense strand
ucuucaugacagugggaau

SEQ ID NO: 2318958 - RNA, 19 nt, Homo sapiens
  misc_RNA (1)...(19): siRNA sense strand
acaaccugccagacggaaa

SEQ ID NO: 2318959 - RNA, 19 nt, Homo sapiens
  misc_RNA (1)...(19): siRNA sense strand
caguaaucuucaugacagu

SEQ ID NO: 2318960 - RNA, 19 nt, Homo sapiens
  misc_RNA (1)...(19): siRNA sense strand
aagacugggaagauagauu

SEQ ID NO: 2318961 - RNA, 19 nt, Homo sapiens
  misc_RNA (1)...(19): siRNA sense strand
guguuucauuguugugcaa

SEQ ID NO: 2318962 - RNA, 19 nt, Homo sapiens
  misc_RNA (1)...(19): siRNA sense strand
cagacaaggcagaucucau

SEQ ID NO: 2318963 - RNA, 19 nt, Homo sapiens
  misc_RNA (1)...(19): siRNA sense strand
aggugcagcccgagaacaa

SEQ ID NO: 2318964 - RNA, 19 nt, Homo sapiens
  misc_RNA (1)...(19): siRNA sense strand
ucacgagagcagcgggauu

SEQ ID NO: 2318965 - RNA, 19 nt, Homo sapiens
  misc_RNA (1)...(19): siRNA sense strand
ucgcaguggaccuggccaa

SEQ ID NO: 2318966 - RNA, 19 nt, Homo sapiens
  misc_RNA (1)...(19): siRNA sense strand
ccugaagcgacaccggaaa

SEQ ID NO: 2318967 - RNA, 19 nt, Homo sapiens
  misc_RNA (1)...(19): siRNA sense strand
cacagaaggagcuggccua

SEQ ID NO: 2318968 - RNA, 19 nt, Homo sapiens
  misc_RNA (1)...(19): siRNA sense strand
ucuucaaaggcguuggcua

SEQ ID NO: 2318969 - RNA, 19 nt, Homo sapiens
  misc_RNA (1)...(19): siRNA sense strand
ccucaauggcuccgugcuu

SEQ ID NO: 2318970 - RNA, 19 nt, Homo sapiens
  misc_RNA (1)...(19): siRNA sense strand
uugaaagaggccacgguau

SEQ ID NO: 2318971 - RNA, 19 nt, Homo sapiens
  misc_RNA (1)...(19): siRNA sense strand
gaauuuacgucuugacccu

SEQ ID NO: 2318972 - RNA, 19 nt, Homo sapiens
  misc_RNA (1)...(19): siRNA sense strand
cagaaaaccaggagauacu

SEQ ID NO: 2318973 - RNA, 19 nt, Homo sapiens
  misc_RNA (1)...(19): siRNA sense strand
gaggaaagccuaugccacu

SEQ ID NO: 2318974 - RNA, 19 nt, Homo sapiens
  misc_RNA (1)...(19): siRNA sense strand
agcagauacuugagccauu

SEQ ID NO: 2318975 - RNA, 19 nt, Homo sapiens
  misc_RNA (1)...(19): siRNA sense strand
ugguagagcaaaagagcau

SEQ ID NO: 2318976 - RNA, 19 nt, Homo sapiens
  misc_RNA (1)...(19): siRNA sense strand
gagaaaucauggaguggug

SEQ ID NO: 2318977 - RNA, 19 nt, Homo sapiens
  misc_RNA (1)...(19): siRNA sense strand
gagugguaccuccggaaau

SEQ ID NO: 2318978 - RNA, 19 nt, Homo sapiens
  misc_RNA (1)...(19): siRNA sense strand
aggaagaugaccuggcaaa

SEQ ID NO: 2318979 - RNA, 19 nt, Homo sapiens
  misc_RNA (1)...(19): siRNA sense strand
ugacgggaaagcaggaaga

SEQ ID NO: 2318980 - RNA, 19 nt, Homo sapiens
  misc_RNA (1)...(19): siRNA sense strand
cugcauggcuguuagggaa

SEQ ID NO: 2318981 - RNA, 19 nt, Homo sapiens
  misc_RNA (1)...(19): siRNA sense strand
cugaggaagcugagguuca

SEQ ID NO: 2318982 - RNA, 19 nt, Homo sapiens
  misc_RNA (1)...(19): siRNA sense strand
acgagagccaccugaacaa

SEQ ID NO: 2318983 - RNA, 19 nt, Homo sapiens
  misc_RNA (1)...(19): siRNA sense strand
ggaaauguuuauuggcguu

SEQ ID NO: 2318984 - RNA, 19 nt, Homo sapiens
  misc_RNA (1)...(19): siRNA sense strand
aggcaggagaggagggaag

SEQ ID NO: 2318985 - RNA, 19 nt, Homo sapiens
  misc_RNA (1)...(19): siRNA sense strand
agaggagggaagcaggaua

SEQ ID NO: 2318986 - RNA, 19 nt, Homo sapiens
  misc_RNA (1)...(19): siRNA sense strand
gaacaaacaaucugugcgu

SEQ ID NO: 2318987 - RNA, 19 nt, Homo sapiens
  misc_RNA (1)...(19): siRNA sense strand
acaaacaaucugugcgugu

SEQ ID NO: 2318988 - RNA, 19 nt, Homo sapiens
  misc_RNA (1)...(19): siRNA sense strand
gcacaaagacacugggaga

SEQ ID NO: 2318989 - RNA, 19 nt, Homo sapiens
  misc_RNA (1)...(19): siRNA sense strand
guacgaacuuccaggccua

SEQ ID NO: 2318990 - RNA, 19 nt, Homo sapiens
  misc_RNA (1)...(19): siRNA sense strand
cgaaagaacuacagagugc

SEQ ID NO: 2318991 - RNA, 19 nt, Homo sapiens
  misc_RNA (1)...(19): siRNA sense strand
gaagauggaucgugugcca

SEQ ID NO: 2318992 - RNA, 19 nt, Homo sapiens
  misc_RNA (1)...(19): siRNA sense strand
cuagaagacuguugggaug

SEQ ID NO: 2318993 - RNA, 19 nt, Homo sapiens
  misc_RNA (1)...(19): siRNA sense strand
gcugcuagauacaggcaca

SEQ ID NO: 2318994 - RNA, 19 nt, Homo sapiens
  misc_RNA (1)...(19): siRNA sense strand
ccuagaagacuguugggau

SEQ ID NO: 2318995 - RNA, 19 nt, Homo sapiens
  misc_RNA (1)...(19): siRNA sense strand
uggcccugcuacagcgaaa

SEQ ID NO: 2318996 - RNA, 19 nt, Homo sapiens
  misc_RNA (1)...(19): siRNA sense strand
gggagagcugcuagauaca

SEQ ID NO: 2318997 - RNA, 19 nt, Homo sapiens
  misc_RNA (1)...(19): siRNA sense strand
ccgagacagugaugagcca

SEQ ID NO: 2318998 - RNA, 19 nt, Homo sapiens
  misc_RNA (1)...(19): siRNA sense strand
gaggugagccagugccaga

SEQ ID NO: 2318999 - RNA, 19 nt, Homo sapiens
  misc_RNA (1)...(19): siRNA sense strand
gcaccagagcucuuggaca

SEQ ID NO: 2319000 - RNA, 19 nt, Homo sapiens
  misc_RNA (1)...(19): siRNA sense strand
ggaaggaggucaugcagug

SEQ ID NO: 2319001 - RNA, 19 nt, Homo sapiens
  misc_RNA (1)...(19): siRNA sense strand
guacauggcaccagagcuc

SEQ ID NO: 2319002 - RNA, 19 nt, Homo sapiens
  misc_RNA (1)...(19): siRNA sense strand
cugggagagcugcuagaua

SEQ ID NO: 2319003 - RNA, 19 nt, Homo sapiens
  misc_RNA (1)...(19): siRNA sense strand
ggaaaugcaaggaugccga

SEQ ID NO: 2319004 - RNA, 19 nt, Homo sapiens
  misc_RNA (1)...(19): siRNA sense strand
ccuccgacgagcugauauu

SEQ ID NO: 2319005 - RNA, 19 nt, Homo sapiens
  misc_RNA (1)...(19): siRNA sense strand
cugaaagagcugcaggaaa

SEQ ID NO: 2319006 - RNA, 19 nt, Homo sapiens
  misc_RNA (1)...(19): siRNA sense strand
gugaaaguggauaaagcaa

SEQ ID NO: 2319007 - RNA, 19 nt, Homo sapiens
  misc_RNA (1)...(19): siRNA sense strand
aggaaauggacaaagauga

SEQ ID NO: 2319008 - RNA, 19 nt, Homo sapiens
  misc_RNA (1)...(19): siRNA sense strand
agaaaacgcugcugggaga

SEQ ID NO: 2319009 - RNA, 19 nt, Homo sapiens
  misc_RNA (1)...(19): siRNA sense strand
ccgacgaugacaagcaaga

SEQ ID NO: 2319010 - RNA, 19 nt, Homo sapiens
  misc_RNA (1)...(19): siRNA sense strand
ccauggaccuuacuggaga

SEQ ID NO: 2319011 - RNA, 19 nt, Homo sapiens
  misc_RNA (1)...(19): siRNA sense strand
aggaggaugacgaugauga

SEQ ID NO: 2319012 - RNA, 19 nt, Homo sapiens
  misc_RNA (1)...(19): siRNA sense strand
cggcaguggacgagguguu

SEQ ID NO: 2319013 - RNA, 19 nt, Homo sapiens
  misc_RNA (1)...(19): siRNA sense strand
aggcuuaccuggaggagga

SEQ ID NO: 2319014 - RNA, 19 nt, Homo sapiens
  misc_RNA (1)...(19): siRNA sense strand
gaggacaucuuuauggaga

SEQ ID NO: 2319015 - RNA, 19 nt, Homo sapiens
  misc_RNA (1)...(19): siRNA sense strand
agaagaaacugaagugccu

SEQ ID NO: 2319016 - RNA, 19 nt, Homo sapiens
  misc_RNA (1)...(19): siRNA sense strand
acuaugauggaaaggacua

SEQ ID NO: 2319017 - RNA, 19 nt, Homo sapiens
  misc_RNA (1)...(19): siRNA sense strand
auggagacccugaaagaca

SEQ ID NO: 2319018 - RNA, 19 nt, Homo sapiens
  misc_RNA (1)...(19): siRNA sense strand
ugcggaaauaccugaaaua

SEQ ID NO: 2319019 - RNA, 19 nt, Homo sapiens
  misc_RNA (1)...(19): siRNA sense strand
gaggauuggaagcaggaca

SEQ ID NO: 2319020 - RNA, 19 nt, Homo sapiens
  misc_RNA (1)...(19): siRNA sense strand
aaggaauggaggauuggaa

SEQ ID NO: 2319021 - RNA, 19 nt, Homo sapiens
  misc_RNA (1)...(19): siRNA sense strand
auggaaaggacuacauuga

SEQ ID NO: 2319022 - RNA, 19 nt, Homo sapiens
  misc_RNA (1)...(19): siRNA sense strand
ggaaauggcacuuaccagu

SEQ ID NO: 2319023 - RNA, 19 nt, Homo sapiens
  misc_RNA (1)...(19): siRNA sense strand
gcaucuagugauaggagua

SEQ ID NO: 2319024 - RNA, 19 nt, Homo sapiens
  misc_RNA (1)...(19): siRNA sense strand
ggaguaguguggagcgaga

SEQ ID NO: 2319025 - RNA, 19 nt, Homo sapiens
  misc_RNA (1)...(19): siRNA sense strand
ccaugauauucgaagaaga

SEQ ID NO: 2319026 - RNA, 19 nt, Homo sapiens
  misc_RNA (1)...(19): siRNA sense strand
aacaagaaugugagguaaa

SEQ ID NO: 2319027 - RNA, 19 nt, Homo sapiens
  misc_RNA (1)...(19): siRNA sense strand
uggcagaacaccuagcaaa

SEQ ID NO: 2319028 - RNA, 19 nt, Homo sapiens
  misc_RNA (1)...(19): siRNA sense strand
auucaaugcacaacggaua

SEQ ID NO: 2319029 - RNA, 19 nt, Homo sapiens
  misc_RNA (1)...(19): siRNA sense strand
ccaucuuuguggagggaca

SEQ ID NO: 2319030 - RNA, 19 nt, Homo sapiens
  misc_RNA (1)...(19): siRNA sense strand
ggaucuagaaacugaugaa

SEQ ID NO: 2319031 - RNA, 19 nt, Homo sapiens
  misc_RNA (1)...(19): siRNA sense strand
agaacagaucucacagaaa

SEQ ID NO: 2319032 - RNA, 19 nt, Homo sapiens
  misc_RNA (1)...(19): siRNA sense strand
uguucaagcaauuuggaaa

SEQ ID NO: 2319033 - RNA, 19 nt, Homo sapiens
  misc_RNA (1)...(19): siRNA sense strand
cuuaaugaccagcggaaga

SEQ ID NO: 2319034 - RNA, 19 nt, Homo sapiens
  misc_RNA (1)...(19): siRNA sense strand
agaaagaugugcugugcga

SEQ ID NO: 2319035 - RNA, 19 nt, Homo sapiens
  misc_RNA (1)...(19): siRNA sense strand
ugguuagguaucaggauua

SEQ ID NO: 2319036 - RNA, 19 nt, Homo sapiens
  misc_RNA (1)...(19): siRNA sense strand
guguaaacuccgcagguau

SEQ ID NO: 2319037 - RNA, 19 nt, Homo sapiens
  misc_RNA (1)...(19): siRNA sense strand
agacagugccagucagaca

SEQ ID NO: 2319038 - RNA, 19 nt, Homo sapiens
  misc_RNA (1)...(19): siRNA sense strand
guaucaaggaaaugcaaaa

SEQ ID NO: 2319039 - RNA, 19 nt, Homo sapiens
  misc_RNA (1)...(19): siRNA sense strand
gguaucaggauuagugaga

SEQ ID NO: 2319040 - RNA, 19 nt, Homo sapiens
  misc_RNA (1)...(19): siRNA sense strand
ggaagauaguaguguugca

SEQ ID NO: 2319041 - RNA, 19 nt, Homo sapiens
  misc_RNA (1)...(19): siRNA sense strand
uggugaaagucaggauuua

SEQ ID NO: 2319042 - RNA, 19 nt, Homo sapiens
  misc_RNA (1)...(19): siRNA sense strand
ggaaauuggaaacgaugau

SEQ ID NO: 2319043 - RNA, 19 nt, Homo sapiens
  misc_RNA (1)...(19): siRNA sense strand
caacucugggugagacaaa

SEQ ID NO: 2319044 - RNA, 19 nt, Homo sapiens
  misc_RNA (1)...(19): siRNA sense strand
acucaagaaucguaggcca

SEQ ID NO: 2319045 - RNA, 19 nt, Homo sapiens
  misc_RNA (1)...(19): siRNA sense strand
gguacagacguccaagaaa

SEQ ID NO: 2319046 - RNA, 19 nt, Homo sapiens
  misc_RNA (1)...(19): siRNA sense strand
gaaccaggucaaaggacuu

SEQ ID NO: 2319047 - RNA, 19 nt, Homo sapiens
  misc_RNA (1)...(19): siRNA sense strand
cagcagauguccacagcca

SEQ ID NO: 2319048 - RNA, 19 nt, Homo sapiens
  misc_RNA (1)...(19): siRNA sense strand
aguuaaaggauuugaaccu

SEQ ID NO: 2319049 - RNA, 19 nt, Homo sapiens
  misc_RNA (1)...(19): siRNA sense strand
agaagaggugacaguuaaa

SEQ ID NO: 2319050 - RNA, 19 nt, Homo sapiens
  misc_RNA (1)...(19): siRNA sense strand
guagagauuugcaggugau

SEQ ID NO: 2319051 - RNA, 19 nt, Homo sapiens
  misc_RNA (1)...(19): siRNA sense strand
agacggacaccgaaggaga

SEQ ID NO: 2319052 - RNA, 19 nt, Homo sapiens
  misc_RNA (1)...(19): siRNA sense strand
gucccggaguguagagauu

SEQ ID NO: 2319053 - RNA, 19 nt, Homo sapiens
  misc_RNA (1)...(19): siRNA sense strand
cuaugaaucuucugugcau

SEQ ID NO: 2319054 - RNA, 19 nt, Homo sapiens
  misc_RNA (1)...(19): siRNA sense strand
guggaugaagugugcaaau

SEQ ID NO: 2319055 - RNA, 19 nt, Homo sapiens
  misc_RNA (1)...(19): siRNA sense strand
ccaugugcuuagagaagga

SEQ ID NO: 2319056 - RNA, 19 nt, Homo sapiens
  misc_RNA (1)...(19): siRNA sense strand
ggcagaacaccuagcaaaa

SEQ ID NO: 2319057 - RNA, 19 nt, Homo sapiens
  misc_RNA (1)...(19): siRNA sense strand
gcuuguugaaggaaagaga

SEQ ID NO: 2319058 - RNA, 19 nt, Homo sapiens
  misc_RNA (1)...(19): siRNA sense strand
gacgaaaguaaauuagcaa

SEQ ID NO: 2319059 - RNA, 19 nt, Homo sapiens
  misc_RNA (1)...(19): siRNA sense strand
gguaucaaggaaaugcaaa

SEQ ID NO: 2319060 - RNA, 19 nt, Homo sapiens
  misc_RNA (1)...(19): siRNA sense strand
cgaaaguaaauuagcaaug

SEQ ID NO: 2319061 - RNA, 19 nt, Homo sapiens
  misc_RNA (1)...(19): siRNA sense strand
aggugacaguuaaaggauu

SEQ ID NO: 2319062 - RNA, 19 nt, Homo sapiens
  misc_RNA (1)...(19): siRNA sense strand
agcucugagucaagaacaa

SEQ ID NO: 2319063 - RNA, 19 nt, Homo sapiens
  misc_RNA (1)...(19): siRNA sense strand
agcaauggaaccugaagaa

SEQ ID NO: 2319064 - RNA, 19 nt, Homo sapiens
  misc_RNA (1)...(19): siRNA sense strand
caauggaaccugaagaaac

SEQ ID NO: 2319065 - RNA, 19 nt, Homo sapiens
  misc_RNA (1)...(19): siRNA sense strand
aaguaaagagaauguggau

SEQ ID NO: 2319066 - RNA, 19 nt, Homo sapiens
  misc_RNA (1)...(19): siRNA sense strand
guuaaaaugugacgaaagu

SEQ ID NO: 2319067 - RNA, 19 nt, Homo sapiens
  misc_RNA (1)...(19): siRNA sense strand
aaacauuuggugaaaguca

SEQ ID NO: 2319068 - RNA, 19 nt, Homo sapiens
  misc_RNA (1)...(19): siRNA sense strand
agcaagaaugcccaagaaa

SEQ ID NO: 2319069 - RNA, 19 nt, Homo sapiens
  misc_RNA (1)...(19): siRNA sense strand
caauauggugacuugaauu

SEQ ID NO: 2319070 - RNA, 19 nt, Homo sapiens
  misc_RNA (1)...(19): siRNA sense strand
gagcccagaaccaggucaa

SEQ ID NO: 2319071 - RNA, 19 nt, Homo sapiens
  misc_RNA (1)...(19): siRNA sense strand
acaccgaaggagacaguga

SEQ ID NO: 2319072 - RNA, 19 nt, Homo sapiens
  misc_RNA (1)...(19): siRNA sense strand
cauaugaguccaugugcuu

SEQ ID NO: 2319073 - RNA, 19 nt, Homo sapiens
  misc_RNA (1)...(19): siRNA sense strand
gcaucuagugauaggagua

SEQ ID NO: 2319074 - RNA, 19 nt, Homo sapiens
  misc_RNA (1)...(19): siRNA sense strand
ggaguaguguggagcgaga

SEQ ID NO: 2319075 - RNA, 19 nt, Homo sapiens
  misc_RNA (1)...(19): siRNA sense strand
ccaugauauucgaagaaga

SEQ ID NO: 2319076 - RNA, 19 nt, Homo sapiens
  misc_RNA (1)...(19): siRNA sense strand
aacaagaaugugagguaaa

SEQ ID NO: 2319077 - RNA, 19 nt, Homo sapiens
  misc_RNA (1)...(19): siRNA sense strand
uggcagaacaccuagcaaa

SEQ ID NO: 2319078 - RNA, 19 nt, Homo sapiens
  misc_RNA (1)...(19): siRNA sense strand
auucaaugcacaacggaua

SEQ ID NO: 2319079 - RNA, 19 nt, Homo sapiens
  misc_RNA (1)...(19): siRNA sense strand
ccaucuuuguggagggaca

SEQ ID NO: 2319080 - RNA, 19 nt, Homo sapiens
  misc_RNA (1)...(19): siRNA sense strand
ggaucuagaaacugaugaa

SEQ ID NO: 2319081 - RNA, 19 nt, Homo sapiens
  misc_RNA (1)...(19): siRNA sense strand
agaacagaucucacagaaa

SEQ ID NO: 2319082 - RNA, 19 nt, Homo sapiens
  misc_RNA (1)...(19): siRNA sense strand
uguucaagcaauuuggaaa

SEQ ID NO: 2319083 - RNA, 19 nt, Homo sapiens
  misc_RNA (1)...(19): siRNA sense strand
cuuaaugaccagcggaaga

SEQ ID NO: 2319084 - RNA, 19 nt, Homo sapiens
  misc_RNA (1)...(19): siRNA sense strand
agaaagaugugcugugcga

SEQ ID NO: 2319085 - RNA, 19 nt, Homo sapiens
  misc_RNA (1)...(19): siRNA sense strand
ugguuagguaucaggauua

SEQ ID NO: 2319086 - RNA, 19 nt, Homo sapiens
  misc_RNA (1)...(19): siRNA sense strand
guguaaacuccgcagguau

SEQ ID NO: 2319087 - RNA, 19 nt, Homo sapiens
  misc_RNA (1)...(19): siRNA sense strand
agacagugccagucagaca

SEQ ID NO: 2319088 - RNA, 19 nt, Homo sapiens
  misc_RNA (1)...(19): siRNA sense strand
guaucaaggaaaugcaaaa

SEQ ID NO: 2319089 - RNA, 19 nt, Homo sapiens
  misc_RNA (1)...(19): siRNA sense strand
gguaucaggauuagugaga

SEQ ID NO: 2319090 - RNA, 19 nt, Homo sapiens
  misc_RNA (1)...(19): siRNA sense strand
ggaagauaguaguguugca

SEQ ID NO: 2319091 - RNA, 19 nt, Homo sapiens
  misc_RNA (1)...(19): siRNA sense strand
uggugaaagucaggauuua

SEQ ID NO: 2319092 - RNA, 19 nt, Homo sapiens
  misc_RNA (1)...(19): siRNA sense strand
ggaaauuggaaacgaugau

SEQ ID NO: 2319093 - RNA, 19 nt, Homo sapiens
  misc_RNA (1)...(19): siRNA sense strand
caacucugggugagacaaa

SEQ ID NO: 2319094 - RNA, 19 nt, Homo sapiens
  misc_RNA (1)...(19): siRNA sense strand
acucaagaaucguaggcca

SEQ ID NO: 2319095 - RNA, 19 nt, Homo sapiens
  misc_RNA (1)...(19): siRNA sense strand
gguacagacguccaagaaa

SEQ ID NO: 2319096 - RNA, 19 nt, Homo sapiens
  misc_RNA (1)...(19): siRNA sense strand
gaaccaggucaaaggacuu

SEQ ID NO: 2319097 - RNA, 19 nt, Homo sapiens
  misc_RNA (1)...(19): siRNA sense strand
cagcagauguccacagcca

SEQ ID NO: 2319098 - RNA, 19 nt, Homo sapiens
  misc_RNA (1)...(19): siRNA sense strand
aguuaaaggauuugaaccu

SEQ ID NO: 2319099 - RNA, 19 nt, Homo sapiens
  misc_RNA (1)...(19): siRNA sense strand
agaagaggugacaguuaaa

SEQ ID NO: 2319100 - RNA, 19 nt, Homo sapiens
  misc_RNA (1)...(19): siRNA sense strand
guagagauuugcaggugau

SEQ ID NO: 2319101 - RNA, 19 nt, Homo sapiens
  misc_RNA (1)...(19): siRNA sense strand
agacggacaccgaaggaga

SEQ ID NO: 2319102 - RNA, 19 nt, Homo sapiens
  misc_RNA (1)...(19): siRNA sense strand
gucccggaguguagagauu

SEQ ID NO: 2319103 - RNA, 19 nt, Homo sapiens
  misc_RNA (1)...(19): siRNA sense strand
cuaugaaucuucugugcau

SEQ ID NO: 2319104 - RNA, 19 nt, Homo sapiens
  misc_RNA (1)...(19): siRNA sense strand
guggaugaagugugcaaau

SEQ ID NO: 2319105 - RNA, 19 nt, Homo sapiens
  misc_RNA (1)...(19): siRNA sense strand
ccaugugcuuagagaagga

SEQ ID NO: 2319106 - RNA, 19 nt, Homo sapiens
  misc_RNA (1)...(19): siRNA sense strand
ggcagaacaccuagcaaaa

SEQ ID NO: 2319107 - RNA, 19 nt, Homo sapiens
  misc_RNA (1)...(19): siRNA sense strand
gcuuguugaaggaaagaga

SEQ ID NO: 2319108 - RNA, 19 nt, Homo sapiens
  misc_RNA (1)...(19): siRNA sense strand
gacgaaaguaaauuagcaa

SEQ ID NO: 2319109 - RNA, 19 nt, Homo sapiens
  misc_RNA (1)...(19): siRNA sense strand
gguaucaaggaaaugcaaa

SEQ ID NO: 2319110 - RNA, 19 nt, Homo sapiens
  misc_RNA (1)...(19): siRNA sense strand
cgaaaguaaauuagcaaug

SEQ ID NO: 2319111 - RNA, 19 nt, Homo sapiens
  misc_RNA (1)...(19): siRNA sense strand
aggugacaguuaaaggauu

SEQ ID NO: 2319112 - RNA, 19 nt, Homo sapiens
  misc_RNA (1)...(19): siRNA sense strand
agcucugagucaagaacaa

SEQ ID NO: 2319113 - RNA, 19 nt, Homo sapiens
  misc_RNA (1)...(19): siRNA sense strand
agcaauggaaccugaagaa

SEQ ID NO: 2319114 - RNA, 19 nt, Homo sapiens
  misc_RNA (1)...(19): siRNA sense strand
caauggaaccugaagaaac

SEQ ID NO: 2319115 - RNA, 19 nt, Homo sapiens
  misc_RNA (1)...(19): siRNA sense strand
aaguaaagagaauguggau

SEQ ID NO: 2319116 - RNA, 19 nt, Homo sapiens
  misc_RNA (1)...(19): siRNA sense strand
guuaaaaugugacgaaagu

SEQ ID NO: 2319117 - RNA, 19 nt, Homo sapiens
  misc_RNA (1)...(19): siRNA sense strand
aaacauuuggugaaaguca

SEQ ID NO: 2319118 - RNA, 19 nt, Homo sapiens
  misc_RNA (1)...(19): siRNA sense strand
agcaagaaugcccaagaaa

SEQ ID NO: 2319119 - RNA, 19 nt, Homo sapiens
  misc_RNA (1)...(19): siRNA sense strand
caauauggugacuugaauu

SEQ ID NO: 2319120 - RNA, 19 nt, Homo sapiens
  misc_RNA (1)...(19): siRNA sense strand
gagcccagaaccaggucaa

SEQ ID NO: 2319121 - RNA, 19 nt, Homo sapiens
  misc_RNA (1)...(19): siRNA sense strand
acaccgaaggagacaguga

SEQ ID NO: 2319122 - RNA, 19 nt, Homo sapiens
  misc_RNA (1)...(19): siRNA sense strand
cauaugaguccaugugcuu

SEQ ID NO: 2319123 - RNA, 19 nt, Homo sapiens
  misc_RNA (1)...(19): siRNA sense strand
gugcaguaccugaaggaua

SEQ ID NO: 2319124 - RNA, 19 nt, Homo sapiens
  misc_RNA (1)...(19): siRNA sense strand
aggaaagcgucaaaagcaa

SEQ ID NO: 2319125 - RNA, 19 nt, Homo sapiens
  misc_RNA (1)...(19): siRNA sense strand
aggaaaugaaggccgaauu

SEQ ID NO: 2319126 - RNA, 19 nt, Homo sapiens
  misc_RNA (1)...(19): siRNA sense strand
gcucuacccuggacggaga

SEQ ID NO: 2319127 - RNA, 19 nt, Homo sapiens
  misc_RNA (1)...(19): siRNA sense strand
ucaaggaaaugaaggccga

SEQ ID NO: 2319128 - RNA, 19 nt, Homo sapiens
  misc_RNA (1)...(19): siRNA sense strand
cccuggacggagagacaaa

SEQ ID NO: 2319129 - RNA, 19 nt, Homo sapiens
  misc_RNA (1)...(19): siRNA sense strand
guaagcuggugaugggcau

SEQ ID NO: 2319130 - RNA, 19 nt, Homo sapiens
  misc_RNA (1)...(19): siRNA sense strand
ggguaggauacgacgacca

SEQ ID NO: 2319131 - RNA, 19 nt, Homo sapiens
  misc_RNA (1)...(19): siRNA sense strand
cagcaaaucaucagggaga

SEQ ID NO: 2319132 - RNA, 19 nt, Homo sapiens
  misc_RNA (1)...(19): siRNA sense strand
gcacaaaauaagcuggaaa

SEQ ID NO: 2319133 - RNA, 19 nt, Homo sapiens
  misc_RNA (1)...(19): siRNA sense strand
gggaaugguauuggagaca

SEQ ID NO: 2319134 - RNA, 19 nt, Homo sapiens
  misc_RNA (1)...(19): siRNA sense strand
cacaaaauaagcuggaaaa

SEQ ID NO: 2319135 - RNA, 19 nt, Homo sapiens
  misc_RNA (1)...(19): siRNA sense strand
cuguaucagcuguaaagaa

SEQ ID NO: 2319136 - RNA, 19 nt, Homo sapiens
  misc_RNA (1)...(19): siRNA sense strand
uuacacaaauugaugcaca

SEQ ID NO: 2319137 - RNA, 19 nt, Homo sapiens
  misc_RNA (1)...(19): siRNA sense strand
ggacgaggacgaaaggcua

SEQ ID NO: 2319138 - RNA, 19 nt, Homo sapiens
  misc_RNA (1)...(19): siRNA sense strand
gcauggacgacgaggagga

SEQ ID NO: 2319139 - RNA, 19 nt, Homo sapiens
  misc_RNA (1)...(19): siRNA sense strand
ggaagauggaccaaagcga

SEQ ID NO: 2319140 - RNA, 19 nt, Homo sapiens
  misc_RNA (1)...(19): siRNA sense strand
gguauguacagaaggcaga

SEQ ID NO: 2319141 - RNA, 19 nt, Homo sapiens
  misc_RNA (1)...(19): siRNA sense strand
acgaggaggacuucaacaa

SEQ ID NO: 2319142 - RNA, 19 nt, Homo sapiens
  misc_RNA (1)...(19): siRNA sense strand
cauacaugguacagccaga

SEQ ID NO: 2319143 - RNA, 19 nt, Homo sapiens
  misc_RNA (1)...(19): siRNA sense strand
ccauuuuauaggaggcaua

SEQ ID NO: 2319144 - RNA, 19 nt, Homo sapiens
  misc_RNA (1)...(19): siRNA sense strand
augugauggugguaggaga

SEQ ID NO: 2319145 - RNA, 19 nt, Homo sapiens
  misc_RNA (1)...(19): siRNA sense strand
uggacgacgaggaggacuu

SEQ ID NO: 2319146 - RNA, 19 nt, Homo sapiens
  misc_RNA (1)...(19): siRNA sense strand
ucgaaagagucauaccaca

SEQ ID NO: 2319147 - RNA, 19 nt, Homo sapiens
  misc_RNA (1)...(19): siRNA sense strand
ccauuagacaauaccgaga

SEQ ID NO: 2319148 - RNA, 19 nt, Homo sapiens
  misc_RNA (1)...(19): siRNA sense strand
cuaacaaacuucacccuca

SEQ ID NO: 2319149 - RNA, 19 nt, Homo sapiens
  misc_RNA (1)...(19): siRNA sense strand
cugaugaagaagaggaaga

SEQ ID NO: 2319150 - RNA, 19 nt, Homo sapiens
  misc_RNA (1)...(19): siRNA sense strand
uggagagauuagaaggaau

SEQ ID NO: 2319151 - RNA, 19 nt, Homo sapiens
  misc_RNA (1)...(19): siRNA sense strand
augccaaauuugaagaaga

SEQ ID NO: 2319152 - RNA, 19 nt, Homo sapiens
  misc_RNA (1)...(19): siRNA sense strand
auuugugccuagugauaaa

SEQ ID NO: 2319153 - RNA, 19 nt, Homo sapiens
  misc_RNA (1)...(19): siRNA sense strand
acaccuaugaagaaggauu

SEQ ID NO: 2319154 - RNA, 19 nt, Homo sapiens
  misc_RNA (1)...(19): siRNA sense strand
ucuaacagcagaaggccaa

SEQ ID NO: 2319155 - RNA, 19 nt, Homo sapiens
  misc_RNA (1)...(19): siRNA sense strand
acuacgauggagaagaaua

SEQ ID NO: 2319156 - RNA, 19 nt, Homo sapiens
  misc_RNA (1)...(19): siRNA sense strand
gagaagaauaugaugugga

SEQ ID NO: 2319157 - RNA, 19 nt, Homo sapiens
  misc_RNA (1)...(19): siRNA sense strand
aggcugugcugaacgggaa

SEQ ID NO: 2319158 - RNA, 19 nt, Homo sapiens
  misc_RNA (1)...(19): siRNA sense strand
gagauuaugaagaugggau

SEQ ID NO: 2319159 - RNA, 19 nt, Homo sapiens
  misc_RNA (1)...(19): siRNA sense strand
cagaugacuacgauggaga

SEQ ID NO: 2319160 - RNA, 19 nt, Homo sapiens
  misc_RNA (1)...(19): siRNA sense strand
agaggaagacagugaugau

SEQ ID NO: 2319161 - RNA, 19 nt, Homo sapiens
  misc_RNA (1)...(19): siRNA sense strand
ccaaauuugaagaagaauc

SEQ ID NO: 2319162 - RNA, 19 nt, Homo sapiens
  misc_RNA (1)...(19): siRNA sense strand
caaaagaaccuguugcuga

SEQ ID NO: 2319163 - RNA, 19 nt, Homo sapiens
  misc_RNA (1)...(19): siRNA sense strand
aggacagaagauucaauaa

SEQ ID NO: 2319164 - RNA, 19 nt, Homo sapiens
  misc_RNA (1)...(19): siRNA sense strand
uguuauggugaaugccaaa

SEQ ID NO: 2319165 - RNA, 19 nt, Homo sapiens
  misc_RNA (1)...(19): siRNA sense strand
aggcaauguucacugcaau

SEQ ID NO: 2319166 - RNA, 19 nt, Homo sapiens
  misc_RNA (1)...(19): siRNA sense strand
gggcagaguuccaggccaa

SEQ ID NO: 2319167 - RNA, 19 nt, Homo sapiens
  misc_RNA (1)...(19): siRNA sense strand
ccgugaaagaugaggagua

SEQ ID NO: 2319168 - RNA, 19 nt, Homo sapiens
  misc_RNA (1)...(19): siRNA sense strand
gagcaaggcuuaaugguca

SEQ ID NO: 2319169 - RNA, 19 nt, Homo sapiens
  misc_RNA (1)...(19): siRNA sense strand
cagacaagcugaaggcuga

SEQ ID NO: 2319170 - RNA, 19 nt, Homo sapiens
  misc_RNA (1)...(19): siRNA sense strand
gaggagaagaagacgaaaa

SEQ ID NO: 2319171 - RNA, 19 nt, Homo sapiens
  misc_RNA (1)...(19): siRNA sense strand
gguaaagaccucagaccga

SEQ ID NO: 2319172 - RNA, 19 nt, Homo sapiens
  misc_RNA (1)...(19): siRNA sense strand
cugcaagaagggagauauu

SEQ ID NO: 2319173 - RNA, 19 nt, Homo sapiens
  misc_RNA (1)...(19): siRNA sense strand
ggagauauugggaaggaga

SEQ ID NO: 2319174 - RNA, 19 nt, Homo sapiens
  misc_RNA (1)...(19): siRNA sense strand
gcaacaacacggaggagga

SEQ ID NO: 2319175 - RNA, 19 nt, Homo sapiens
  misc_RNA (1)...(19): siRNA sense strand
ccaagaaggcccuggagga

SEQ ID NO: 2319176 - RNA, 19 nt, Homo sapiens
  misc_RNA (1)...(19): siRNA sense strand
guucauugguuuugggaca

SEQ ID NO: 2319177 - RNA, 19 nt, Homo sapiens
  misc_RNA (1)...(19): siRNA sense strand
acaacacggaggaggagaa

SEQ ID NO: 2319178 - RNA, 19 nt, Homo sapiens
  misc_RNA (1)...(19): siRNA sense strand
aggaggagaagaagacgaa

SEQ ID NO: 2319179 - RNA, 19 nt, Homo sapiens
  misc_RNA (1)...(19): siRNA sense strand
acaucaucaacgagggcaa

SEQ ID NO: 2319180 - RNA, 19 nt, Homo sapiens
  misc_RNA (1)...(19): siRNA sense strand
gaagggagauauugggaag

SEQ ID NO: 2319181 - RNA, 19 nt, Homo sapiens
  misc_RNA (1)...(19): siRNA sense strand
aggagaaaguggagcagcu

SEQ ID NO: 2319182 - RNA, 19 nt, Homo sapiens
  misc_RNA (1)...(19): siRNA sense strand
gagccgagcuuaaggaggu

SEQ ID NO: 2319183 - RNA, 19 nt, Homo sapiens
  misc_RNA (1)...(19): siRNA sense strand
cagcauuacaagacgacca

SEQ ID NO: 2319184 - RNA, 19 nt, Homo sapiens
  misc_RNA (1)...(19): siRNA sense strand
gccagcagacagagggaga

SEQ ID NO: 2319185 - RNA, 19 nt, Homo sapiens
  misc_RNA (1)...(19): siRNA sense strand
cgucaagugaggagacauc

SEQ ID NO: 2319186 - RNA, 19 nt, Homo sapiens
  misc_RNA (1)...(19): siRNA sense strand
agacgguggaugagaagga

SEQ ID NO: 2319187 - RNA, 19 nt, Homo sapiens
  misc_RNA (1)...(19): siRNA sense strand
ucucaaaggacgaucucau

SEQ ID NO: 2319188 - RNA, 19 nt, Homo sapiens
  misc_RNA (1)...(19): siRNA sense strand
gaggaggagaagaagacga

SEQ ID NO: 2319189 - RNA, 19 nt, Homo sapiens
  misc_RNA (1)...(19): siRNA sense strand
gacuuggagacgcggguua

SEQ ID NO: 2319190 - RNA, 19 nt, Homo sapiens
  misc_RNA (1)...(19): siRNA sense strand
uggccaaaugcaacacuaa

SEQ ID NO: 2319191 - RNA, 19 nt, Homo sapiens
  misc_RNA (1)...(19): siRNA sense strand
uguccagccaagaaagcaa

SEQ ID NO: 2319192 - RNA, 19 nt, Homo sapiens
  misc_RNA (1)...(19): siRNA sense strand
gauauaaggaacugcggaa

SEQ ID NO: 2319193 - RNA, 19 nt, Homo sapiens
  misc_RNA (1)...(19): siRNA sense strand
ccaagaagggcaaagggaa

SEQ ID NO: 2319194 - RNA, 19 nt, Homo sapiens
  misc_RNA (1)...(19): siRNA sense strand
caucuggagcacugagaaa

SEQ ID NO: 2319195 - RNA, 19 nt, Homo sapiens
  misc_RNA (1)...(19): siRNA sense strand
gggcagaaggauucagaca

SEQ ID NO: 2319196 - RNA, 19 nt, Homo sapiens
  misc_RNA (1)...(19): siRNA sense strand
ccuccaugcagaagauuua

SEQ ID NO: 2319197 - RNA, 19 nt, Homo sapiens
  misc_RNA (1)...(19): siRNA sense strand
cagcaagcuuguagagaac

SEQ ID NO: 2319198 - RNA, 19 nt, Homo sapiens
  misc_RNA (1)...(19): siRNA sense strand
augacaaggugaagacuga

SEQ ID NO: 2319199 - RNA, 19 nt, Homo sapiens
  misc_RNA (1)...(19): siRNA sense strand
ugaccuugaaagacagaaa

SEQ ID NO: 2319200 - RNA, 19 nt, Homo sapiens
  misc_RNA (1)...(19): siRNA sense strand
ggcagauuguggagaccua

SEQ ID NO: 2319201 - RNA, 19 nt, Homo sapiens
  misc_RNA (1)...(19): siRNA sense strand
cuauagaggauccagcaaa

SEQ ID NO: 2319202 - RNA, 19 nt, Homo sapiens
  misc_RNA (1)...(19): siRNA sense strand
aaauggagauuguggacca

SEQ ID NO: 2319203 - RNA, 19 nt, Homo sapiens
  misc_RNA (1)...(19): siRNA sense strand
agaaggauucagacagcaa

SEQ ID NO: 2319204 - RNA, 19 nt, Homo sapiens
  misc_RNA (1)...(19): siRNA sense strand
gaucaauacuacugggcuc

SEQ ID NO: 2319205 - RNA, 19 nt, Homo sapiens
  misc_RNA (1)...(19): siRNA sense strand
cuguggagcucucaagaau

SEQ ID NO: 2319206 - RNA, 19 nt, Homo sapiens
  misc_RNA (1)...(19): siRNA sense strand
ucccacaggcagagcguua

SEQ ID NO: 2319207 - RNA, 19 nt, Homo sapiens
  misc_RNA (1)...(19): siRNA sense strand
cggucaagaaaguagugaa

SEQ ID NO: 2319208 - RNA, 19 nt, Homo sapiens
  misc_RNA (1)...(19): siRNA sense strand
augcugaccuugaaagaca

SEQ ID NO: 2319209 - RNA, 19 nt, Homo sapiens
  misc_RNA (1)...(19): siRNA sense strand
ggucaagaaaguagugaag

SEQ ID NO: 2319210 - RNA, 19 nt, Homo sapiens
  misc_RNA (1)...(19): siRNA sense strand
ccuccugacuaaugaacau

SEQ ID NO: 2319211 - RNA, 19 nt, Homo sapiens
  misc_RNA (1)...(19): siRNA sense strand
agaagcugguguugaucaa

SEQ ID NO: 2319212 - RNA, 19 nt, Homo sapiens
  misc_RNA (1)...(19): siRNA sense strand
gagcgaggaaguuuagcaa

SEQ ID NO: 2319213 - RNA, 19 nt, Homo sapiens
  misc_RNA (1)...(19): siRNA sense strand
aggcagagcguuaccaaga

SEQ ID NO: 2319214 - RNA, 19 nt, Homo sapiens
  misc_RNA (1)...(19): siRNA sense strand
cugcggaagccacuggaaa

SEQ ID NO: 2319215 - RNA, 19 nt, Homo sapiens
  misc_RNA (1)...(19): siRNA sense strand
ggugaaagcugcaucugga

SEQ ID NO: 2319216 - RNA, 19 nt, Homo sapiens
  misc_RNA (1)...(19): siRNA sense strand
agacaugauuggugaggag

SEQ ID NO: 2319217 - RNA, 19 nt, Homo sapiens
  misc_RNA (1)...(19): siRNA sense strand
cuaacuugguaaagaaucu

SEQ ID NO: 2319218 - RNA, 19 nt, Homo sapiens
  misc_RNA (1)...(19): siRNA sense strand
gagcaagacuccugccauc

SEQ ID NO: 2319219 - RNA, 19 nt, Homo sapiens
  misc_RNA (1)...(19): siRNA sense strand
augaagacaugauugguga

SEQ ID NO: 2319220 - RNA, 19 nt, Homo sapiens
  misc_RNA (1)...(19): siRNA sense strand
ugaaggaacaagaggccca

SEQ ID NO: 2319221 - RNA, 19 nt, Homo sapiens
  misc_RNA (1)...(19): siRNA sense strand
acacuaucaacgagguuau

SEQ ID NO: 2319222 - RNA, 19 nt, Homo sapiens
  misc_RNA (1)...(19): siRNA sense strand
agaccuacacggaggagga

SEQ ID NO: 2319223 - RNA, 19 nt, Homo sapiens
  misc_RNA (1)...(19): siRNA sense strand
gcuuucauccagagccuua

SEQ ID NO: 2319224 - RNA, 19 nt, Homo sapiens
  misc_RNA (1)...(19): siRNA sense strand
agguuaucgcugagaacuu

SEQ ID NO: 2319225 - RNA, 19 nt, Homo sapiens
  misc_RNA (1)...(19): siRNA sense strand
ugcggaagcucaagggcau

SEQ ID NO: 2319226 - RNA, 19 nt, Homo sapiens
  misc_RNA (1)...(19): siRNA sense strand
aggcugagauugggcagaa

SEQ ID NO: 2319227 - RNA, 19 nt, Homo sapiens
  misc_RNA (1)...(19): siRNA sense strand
caguacagccagucgcuau

SEQ ID NO: 2319228 - RNA, 19 nt, Homo sapiens
  misc_RNA (1)...(19): siRNA sense strand
gcgaggaaguuuagcaagc

SEQ ID NO: 2319229 - RNA, 19 nt, Homo sapiens
  misc_RNA (1)...(19): siRNA sense strand
ccuagaagccucagcugga

SEQ ID NO: 2319230 - RNA, 19 nt, Homo sapiens
  misc_RNA (1)...(19): siRNA sense strand
gaucaacaaaucagggaac

SEQ ID NO: 2319231 - RNA, 19 nt, Homo sapiens
  misc_RNA (1)...(19): siRNA sense strand
aaaagaaguucgagcagca

SEQ ID NO: 2319232 - RNA, 19 nt, Homo sapiens
  misc_RNA (1)...(19): siRNA sense strand
cgccggaaacuucgggaau

SEQ ID NO: 2319233 - RNA, 19 nt, Homo sapiens
  misc_RNA (1)...(19): siRNA sense strand
gggcaagcuggcacugcua

SEQ ID NO: 2319234 - RNA, 19 nt, Homo sapiens
  misc_RNA (1)...(19): siRNA sense strand
caggauaacaagauugcca

SEQ ID NO: 2319235 - RNA, 19 nt, Homo sapiens
  misc_RNA (1)...(19): siRNA sense strand
ccggaaacuucgggaaugu

SEQ ID NO: 2319236 - RNA, 19 nt, Homo sapiens
  misc_RNA (1)...(19): siRNA sense strand
aaaagaaggauggaagaaa

SEQ ID NO: 2319237 - RNA, 19 nt, Homo sapiens
  misc_RNA (1)...(19): siRNA sense strand
ggauggaagaaaucagacu

SEQ ID NO: 2319238 - RNA, 19 nt, Homo sapiens
  misc_RNA (1)...(19): siRNA sense strand
uggaggaagaguuggaugu

SEQ ID NO: 2319239 - RNA, 19 nt, Homo sapiens
  misc_RNA (1)...(19): siRNA sense strand
acaaaguagaagagcuaaa

SEQ ID NO: 2319240 - RNA, 19 nt, Homo sapiens
  misc_RNA (1)...(19): siRNA sense strand
ugagaaagcugcagaggag

SEQ ID NO: 2319241 - RNA, 19 nt, Homo sapiens
  misc_RNA (1)...(19): siRNA sense strand
gcacugggacagaggcuga

SEQ ID NO: 2319242 - RNA, 19 nt, Homo sapiens
  misc_RNA (1)...(19): siRNA sense strand
uggaaugagcugaaaggga

SEQ ID NO: 2319243 - RNA, 19 nt, Homo sapiens
  misc_RNA (1)...(19): siRNA sense strand
ggaaugagcugaaagggac

SEQ ID NO: 2319244 - RNA, 19 nt, Homo sapiens
  misc_RNA (1)...(19): siRNA sense strand
cugcagaggagguuaggca

SEQ ID NO: 2319245 - RNA, 19 nt, Homo sapiens
  misc_RNA (1)...(19): siRNA sense strand
uguuggacuucacgggcaa

SEQ ID NO: 2319246 - RNA, 19 nt, Homo sapiens
  misc_RNA (1)...(19): siRNA sense strand
aggcugaguuugagaaagc

SEQ ID NO: 2319247 - RNA, 19 nt, Homo sapiens
  misc_RNA (1)...(19): siRNA sense strand
gcuauuaauuggugaacaa

SEQ ID NO: 2319248 - RNA, 19 nt, Homo sapiens
  misc_RNA (1)...(19): siRNA sense strand
guaaagaacuggaagcgaa

SEQ ID NO: 2319249 - RNA, 19 nt, Homo sapiens
  misc_RNA (1)...(19): siRNA sense strand
cagaagaagcccuuagaaa

SEQ ID NO: 2319250 - RNA, 19 nt, Homo sapiens
  misc_RNA (1)...(19): siRNA sense strand
ccacggaacgagugaaaua

SEQ ID NO: 2319251 - RNA, 19 nt, Homo sapiens
  misc_RNA (1)...(19): siRNA sense strand
ggacauaaucauagaaacu

SEQ ID NO: 2319252 - RNA, 19 nt, Homo sapiens
  misc_RNA (1)...(19): siRNA sense strand
ccugaaaacuugaagauua

SEQ ID NO: 2319253 - RNA, 19 nt, Homo sapiens
  misc_RNA (1)...(19): siRNA sense strand
ugaagauguuggagaggaa

SEQ ID NO: 2319254 - RNA, 19 nt, Homo sapiens
  misc_RNA (1)...(19): siRNA sense strand
cgaaugagauagugcgaca

SEQ ID NO: 2319255 - RNA, 19 nt, Homo sapiens
  misc_RNA (1)...(19): siRNA sense strand
ucacagacaaugagauuaa

SEQ ID NO: 2319256 - RNA, 19 nt, Homo sapiens
  misc_RNA (1)...(19): siRNA sense strand
cuacaugauaggagagauu

SEQ ID NO: 2319257 - RNA, 19 nt, Homo sapiens
  misc_RNA (1)...(19): siRNA sense strand
ggugaaagagagagacauu

SEQ ID NO: 2319258 - RNA, 19 nt, Homo sapiens
  misc_RNA (1)...(19): siRNA sense strand
aggaaaacauuaagagcaa

SEQ ID NO: 2319259 - RNA, 19 nt, Homo sapiens
  misc_RNA (1)...(19): siRNA sense strand
agacaaagccauugcugaa

SEQ ID NO: 2319260 - RNA, 19 nt, Homo sapiens
  misc_RNA (1)...(19): siRNA sense strand
agagagagacauugagcaa

SEQ ID NO: 2319261 - RNA, 19 nt, Homo sapiens
  misc_RNA (1)...(19): siRNA sense strand
cggaaauacaucacauaua

SEQ ID NO: 2319262 - RNA, 19 nt, Homo sapiens
  misc_RNA (1)...(19): siRNA sense strand
cuaaugaagcaaaggacaa

SEQ ID NO: 2319263 - RNA, 19 nt, Homo sapiens
  misc_RNA (1)...(19): siRNA sense strand
cugaaaguuacaaggaaua

SEQ ID NO: 2319264 - RNA, 19 nt, Homo sapiens
  misc_RNA (1)...(19): siRNA sense strand
ccuauuugcucgagaugaa

SEQ ID NO: 2319265 - RNA, 19 nt, Homo sapiens
  misc_RNA (1)...(19): siRNA sense strand
agauguaacugcaaacaaa

SEQ ID NO: 2319266 - RNA, 19 nt, Homo sapiens
  misc_RNA (1)...(19): siRNA sense strand
caguuuaccucguggguuu

SEQ ID NO: 2319267 - RNA, 19 nt, Homo sapiens
  misc_RNA (1)...(19): siRNA sense strand
ccaaauggaugaaggacga

SEQ ID NO: 2319268 - RNA, 19 nt, Homo sapiens
  misc_RNA (1)...(19): siRNA sense strand
agaaagauggacagagcaa

SEQ ID NO: 2319269 - RNA, 19 nt, Homo sapiens
  misc_RNA (1)...(19): siRNA sense strand
gcaaaagggaaaagaagaa

SEQ ID NO: 2319270 - RNA, 19 nt, Homo sapiens
  misc_RNA (1)...(19): siRNA sense strand
aaauaagggaggagcaaau

SEQ ID NO: 2319271 - RNA, 19 nt, Homo sapiens
  misc_RNA (1)...(19): siRNA sense strand
gugcaaaaccuguggauuu

SEQ ID NO: 2319272 - RNA, 19 nt, Homo sapiens
  misc_RNA (1)...(19): siRNA sense strand
guacagaaggugaaggaca

SEQ ID NO: 2319273 - RNA, 19 nt, Homo sapiens
  misc_RNA (1)...(19): siRNA sense strand
gggacgaugccucgggaaa

SEQ ID NO: 2319274 - RNA, 19 nt, Homo sapiens
  misc_RNA (1)...(19): siRNA sense strand
gguugaagaagcugguuua

SEQ ID NO: 2319275 - RNA, 19 nt, Homo sapiens
  misc_RNA (1)...(19): siRNA sense strand
ucacagagaagcaggaauu

SEQ ID NO: 2319276 - RNA, 19 nt, Homo sapiens
  misc_RNA (1)...(19): siRNA sense strand
agucaagcaugaagaguuu

SEQ ID NO: 2319277 - RNA, 19 nt, Homo sapiens
  misc_RNA (1)...(19): siRNA sense strand
agaaagaaacugagauguu

SEQ ID NO: 2319278 - RNA, 19 nt, Homo sapiens
  misc_RNA (1)...(19): siRNA sense strand
cgcaaauauucaagaaaca

SEQ ID NO: 2319279 - RNA, 19 nt, Homo sapiens
  misc_RNA (1)...(19): siRNA sense strand
ggugaaggcuccaggcaca

SEQ ID NO: 2319280 - RNA, 19 nt, Homo sapiens
  misc_RNA (1)...(19): siRNA sense strand
agaagaagcccuuagaaau

SEQ ID NO: 2319281 - RNA, 19 nt, Homo sapiens
  misc_RNA (1)...(19): siRNA sense strand
ggaaaugaaagcccggaaa

SEQ ID NO: 2319282 - RNA, 19 nt, Homo sapiens
  misc_RNA (1)...(19): siRNA sense strand
cugaagacuuggcgggaga

SEQ ID NO: 2319283 - RNA, 19 nt, Homo sapiens
  misc_RNA (1)...(19): siRNA sense strand
gauagcaagggaagagaua

SEQ ID NO: 2319284 - RNA, 19 nt, Homo sapiens
  misc_RNA (1)...(19): siRNA sense strand
agagagacauugagcaaaa

SEQ ID NO: 2319285 - RNA, 19 nt, Homo sapiens
  misc_RNA (1)...(19): siRNA sense strand
augaagaggugauagaauu

SEQ ID NO: 2319286 - RNA, 19 nt, Homo sapiens
  misc_RNA (1)...(19): siRNA sense strand
gcuugaagaugcagagcga

SEQ ID NO: 2319287 - RNA, 19 nt, Homo sapiens
  misc_RNA (1)...(19): siRNA sense strand
uguggaagcaugaguguaa

SEQ ID NO: 2319288 - RNA, 19 nt, Homo sapiens
  misc_RNA (1)...(19): siRNA sense strand
gaacuggaagcgaaagaaa

SEQ ID NO: 2319289 - RNA, 19 nt, Homo sapiens
  misc_RNA (1)...(19): siRNA sense strand
cuacuugacucuagcaaau

SEQ ID NO: 2319290 - RNA, 19 nt, Homo sapiens
  misc_RNA (1)...(19): siRNA sense strand
ucugaaaguuacaaggaau

SEQ ID NO: 2319291 - RNA, 19 nt, Homo sapiens
  misc_RNA (1)...(19): siRNA sense strand
ugaacaaggaacagccaaa

SEQ ID NO: 2319292 - RNA, 19 nt, Homo sapiens
  misc_RNA (1)...(19): siRNA sense strand
ugagagauucugugacaaa

SEQ ID NO: 2319293 - RNA, 19 nt, Homo sapiens
  misc_RNA (1)...(19): siRNA sense strand
agauugacauccagaggaa

SEQ ID NO: 2319294 - RNA, 19 nt, Homo sapiens
  misc_RNA (1)...(19): siRNA sense strand
ccucuaacaugaagcagaa

SEQ ID NO: 2319295 - RNA, 19 nt, Homo sapiens
  misc_RNA (1)...(19): siRNA sense strand
aagaggaaauagaggacau

SEQ ID NO: 2319296 - RNA, 19 nt, Homo sapiens
  misc_RNA (1)...(19): siRNA sense strand
gcaugaaaguauggaucaa

SEQ ID NO: 2319297 - RNA, 19 nt, Homo sapiens
  misc_RNA (1)...(19): siRNA sense strand
ccacuaaauaccagggcau

SEQ ID NO: 2319298 - RNA, 19 nt, Homo sapiens
  misc_RNA (1)...(19): siRNA sense strand
gcuccaaacugcaagauca

SEQ ID NO: 2319299 - RNA, 19 nt, Homo sapiens
  misc_RNA (1)...(19): siRNA sense strand
ggugaaaguuggugacaag

SEQ ID NO: 2319300 - RNA, 19 nt, Homo sapiens
  misc_RNA (1)...(19): siRNA sense strand
ggaagcagaaacaggacaa

SEQ ID NO: 2319301 - RNA, 19 nt, Homo sapiens
  misc_RNA (1)...(19): siRNA sense strand
ggaauacacuagaggccau

SEQ ID NO: 2319302 - RNA, 19 nt, Homo sapiens
  misc_RNA (1)...(19): siRNA sense strand
acaauuaacuuccgggaca

SEQ ID NO: 2319303 - RNA, 19 nt, Homo sapiens
  misc_RNA (1)...(19): siRNA sense strand
agaagaagccauuaagaca

SEQ ID NO: 2319304 - RNA, 19 nt, Homo sapiens
  misc_RNA (1)...(19): siRNA sense strand
caugacagauuguggaaaa

SEQ ID NO: 2319305 - RNA, 19 nt, Homo sapiens
  misc_RNA (1)...(19): siRNA sense strand
cugaaaaggucaaggcuga

SEQ ID NO: 2319306 - RNA, 19 nt, Homo sapiens
  misc_RNA (1)...(19): siRNA sense strand
agagcaaagccaagaguuu

SEQ ID NO: 2319307 - RNA, 19 nt, Homo sapiens
  misc_RNA (1)...(19): siRNA sense strand
cugcaaugcgacaggaaau

SEQ ID NO: 2319308 - RNA, 19 nt, Homo sapiens
  misc_RNA (1)...(19): siRNA sense strand
ggacaagaggaacaugaaa

SEQ ID NO: 2319309 - RNA, 19 nt, Homo sapiens
  misc_RNA (1)...(19): siRNA sense strand
gaggauugcaugaaaguau

SEQ ID NO: 2319310 - RNA, 19 nt, Homo sapiens
  misc_RNA (1)...(19): siRNA sense strand
gugaagaguuucuccaaau

SEQ ID NO: 2319311 - RNA, 19 nt, Homo sapiens
  misc_RNA (1)...(19): siRNA sense strand
cggcacugggaaaggauaa

SEQ ID NO: 2319312 - RNA, 19 nt, Homo sapiens
  misc_RNA (1)...(19): siRNA sense strand
caggaauuggagaaagaaa

SEQ ID NO: 2319313 - RNA, 19 nt, Homo sapiens
  misc_RNA (1)...(19): siRNA sense strand
ggcaggaaauagacagaau

SEQ ID NO: 2319314 - RNA, 19 nt, Homo sapiens
  misc_RNA (1)...(19): siRNA sense strand
caggagagucugaaggaga

SEQ ID NO: 2319315 - RNA, 19 nt, Homo sapiens
  misc_RNA (1)...(19): siRNA sense strand
ggaugaaggaacuagaaga

SEQ ID NO: 2319316 - RNA, 19 nt, Homo sapiens
  misc_RNA (1)...(19): siRNA sense strand
gagaagacgugggaggaau

SEQ ID NO: 2319317 - RNA, 19 nt, Homo sapiens
  misc_RNA (1)...(19): siRNA sense strand
gauucaauauggaggcaga

SEQ ID NO: 2319318 - RNA, 19 nt, Homo sapiens
  misc_RNA (1)...(19): siRNA sense strand
agaugaugcuagcugaaua

SEQ ID NO: 2319319 - RNA, 19 nt, Homo sapiens
  misc_RNA (1)...(19): siRNA sense strand
uagcaagggaagagauaga

SEQ ID NO: 2319320 - RNA, 19 nt, Homo sapiens
  misc_RNA (1)...(19): siRNA sense strand
guucagaccagauggauuu

SEQ ID NO: 2319321 - RNA, 19 nt, Homo sapiens
  misc_RNA (1)...(19): siRNA sense strand
gaacaguaguuuugggaaa

SEQ ID NO: 2319322 - RNA, 19 nt, Homo sapiens
  misc_RNA (1)...(19): siRNA sense strand
uggauaaaguacaggcaaa

SEQ ID NO: 2319323 - RNA, 19 nt, Homo sapiens
  misc_RNA (1)...(19): siRNA sense strand
gcuuaaagaucaaugggaa

SEQ ID NO: 2319324 - RNA, 19 nt, Homo sapiens
  misc_RNA (1)...(19): siRNA sense strand
aaacagagacacugggaua

SEQ ID NO: 2319325 - RNA, 19 nt, Homo sapiens
  misc_RNA (1)...(19): siRNA sense strand
cugaagauaugcugaguaa

SEQ ID NO: 2319326 - RNA, 19 nt, Homo sapiens
  misc_RNA (1)...(19): siRNA sense strand
aaucaaugguuuagaggua

SEQ ID NO: 2319327 - RNA, 19 nt, Homo sapiens
  misc_RNA (1)...(19): siRNA sense strand
cuuaaagaucaaugggaaa

SEQ ID NO: 2319328 - RNA, 19 nt, Homo sapiens
  misc_RNA (1)...(19): siRNA sense strand
gaauuagaaagcagagaaa

SEQ ID NO: 2319329 - RNA, 19 nt, Homo sapiens
  misc_RNA (1)...(19): siRNA sense strand
ccguaaugauguugcuaua

SEQ ID NO: 2319330 - RNA, 19 nt, Homo sapiens
  misc_RNA (1)...(19): siRNA sense strand
guacaugaucggagaagua

SEQ ID NO: 2319331 - RNA, 19 nt, Homo sapiens
  misc_RNA (1)...(19): siRNA sense strand
cagaagaggcuuuacguaa

SEQ ID NO: 2319332 - RNA, 19 nt, Homo sapiens
  misc_RNA (1)...(19): siRNA sense strand
agauagaggguuugauuaa

SEQ ID NO: 2319333 - RNA, 19 nt, Homo sapiens
  misc_RNA (1)...(19): siRNA sense strand
gcaaaagacuggagaagau

SEQ ID NO: 2319334 - RNA, 19 nt, Homo sapiens
  misc_RNA (1)...(19): siRNA sense strand
ccaauaaggccaugaaaca

SEQ ID NO: 2319335 - RNA, 19 nt, Homo sapiens
  misc_RNA (1)...(19): siRNA sense strand
ggugauaaggaaugugaua

SEQ ID NO: 2319336 - RNA, 19 nt, Homo sapiens
  misc_RNA (1)...(19): siRNA sense strand
cugcagaaacugagaucaa

SEQ ID NO: 2319337 - RNA, 19 nt, Homo sapiens
  misc_RNA (1)...(19): siRNA sense strand
cuaaagaauuggcgugauu

SEQ ID NO: 2319338 - RNA, 19 nt, Homo sapiens
  misc_RNA (1)...(19): siRNA sense strand
ccauuaaggagaaggauau

SEQ ID NO: 2319339 - RNA, 19 nt, Homo sapiens
  misc_RNA (1)...(19): siRNA sense strand
cagaacaggcaaagagauu

SEQ ID NO: 2319340 - RNA, 19 nt, Homo sapiens
  misc_RNA (1)...(19): siRNA sense strand
accagaagauagugaauua

SEQ ID NO: 2319341 - RNA, 19 nt, Homo sapiens
  misc_RNA (1)...(19): siRNA sense strand
agaaauaccuaaaggcuca

SEQ ID NO: 2319342 - RNA, 19 nt, Homo sapiens
  misc_RNA (1)...(19): siRNA sense strand
cccacaaacucaaggcaaa

SEQ ID NO: 2319343 - RNA, 19 nt, Homo sapiens
  misc_RNA (1)...(19): siRNA sense strand
aaugaaaggacuugagaau

SEQ ID NO: 2319344 - RNA, 19 nt, Homo sapiens
  misc_RNA (1)...(19): siRNA sense strand
gagcaguauuagugguuau

SEQ ID NO: 2319345 - RNA, 19 nt, Homo sapiens
  misc_RNA (1)...(19): siRNA sense strand
ugaaguaaccaaagaagaa

SEQ ID NO: 2319346 - RNA, 19 nt, Homo sapiens
  misc_RNA (1)...(19): siRNA sense strand
cuuuguagguggagauauu

SEQ ID NO: 2319347 - RNA, 19 nt, Homo sapiens
  misc_RNA (1)...(19): siRNA sense strand
ccuggaaauucuuggacaa

SEQ ID NO: 2319348 - RNA, 19 nt, Homo sapiens
  misc_RNA (1)...(19): siRNA sense strand
gcaaaagaugacaggaaaa

SEQ ID NO: 2319349 - RNA, 19 nt, Homo sapiens
  misc_RNA (1)...(19): siRNA sense strand
gugagaugauugugaauuu

SEQ ID NO: 2319350 - RNA, 19 nt, Homo sapiens
  misc_RNA (1)...(19): siRNA sense strand
cagugaaguuaaagacaau

SEQ ID NO: 2319351 - RNA, 19 nt, Homo sapiens
  misc_RNA (1)...(19): siRNA sense strand
cuggagaagauuacagaaa

SEQ ID NO: 2319352 - RNA, 19 nt, Homo sapiens
  misc_RNA (1)...(19): siRNA sense strand
aaugauaacuguugugcaa

SEQ ID NO: 2319353 - RNA, 19 nt, Homo sapiens
  misc_RNA (1)...(19): siRNA sense strand
gcgaggaagcugaagaauu

SEQ ID NO: 2319354 - RNA, 19 nt, Homo sapiens
  misc_RNA (1)...(19): siRNA sense strand
augaaguacaggagguaaa

SEQ ID NO: 2319355 - RNA, 19 nt, Homo sapiens
  misc_RNA (1)...(19): siRNA sense strand
uggaaaagcugguuugaua

SEQ ID NO: 2319356 - RNA, 19 nt, Homo sapiens
  misc_RNA (1)...(19): siRNA sense strand
acaaugaaguucugagaca

SEQ ID NO: 2319357 - RNA, 19 nt, Homo sapiens
  misc_RNA (1)...(19): siRNA sense strand
agagugagcagaugagaaa

SEQ ID NO: 2319358 - RNA, 19 nt, Homo sapiens
  misc_RNA (1)...(19): siRNA sense strand
ccuaugugcugguggaauu

SEQ ID NO: 2319359 - RNA, 19 nt, Homo sapiens
  misc_RNA (1)...(19): siRNA sense strand
augugaaagugaaggaauu

SEQ ID NO: 2319360 - RNA, 19 nt, Homo sapiens
  misc_RNA (1)...(19): siRNA sense strand
ugaaaucauuagaggaaca

SEQ ID NO: 2319361 - RNA, 19 nt, Homo sapiens
  misc_RNA (1)...(19): siRNA sense strand
ggucuuacaaugugacuaa

SEQ ID NO: 2319362 - RNA, 19 nt, Homo sapiens
  misc_RNA (1)...(19): siRNA sense strand
cagggaaguugcugguuaa

SEQ ID NO: 2319363 - RNA, 19 nt, Homo sapiens
  misc_RNA (1)...(19): siRNA sense strand
gguuaaggccuauuugaaa

SEQ ID NO: 2319364 - RNA, 19 nt, Homo sapiens
  misc_RNA (1)...(19): siRNA sense strand
cuucagagagggacaguua

SEQ ID NO: 2319365 - RNA, 19 nt, Homo sapiens
  misc_RNA (1)...(19): siRNA sense strand
cuguaaauucccuaagaaa

SEQ ID NO: 2319366 - RNA, 19 nt, Homo sapiens
  misc_RNA (1)...(19): siRNA sense strand
gcaagugaccaaucagaaa

SEQ ID NO: 2319367 - RNA, 19 nt, Homo sapiens
  misc_RNA (1)...(19): siRNA sense strand
cuaaugagauugugcgaca

SEQ ID NO: 2319368 - RNA, 19 nt, Homo sapiens
  misc_RNA (1)...(19): siRNA sense strand
ggaugaaauugauagugaa

SEQ ID NO: 2319369 - RNA, 19 nt, Homo sapiens
  misc_RNA (1)...(19): siRNA sense strand
caggaaaacugcugaagaa

SEQ ID NO: 2319370 - RNA, 19 nt, Homo sapiens
  misc_RNA (1)...(19): siRNA sense strand
gcucucagcuggaggccaa

SEQ ID NO: 2319371 - RNA, 19 nt, Homo sapiens
  misc_RNA (1)...(19): siRNA sense strand
ugauggaaauggaaggaau

SEQ ID NO: 2319372 - RNA, 19 nt, Homo sapiens
  misc_RNA (1)...(19): siRNA sense strand
gguaaaggacaaagcccaa

SEQ ID NO: 2319373 - RNA, 19 nt, Homo sapiens
  misc_RNA (1)...(19): siRNA sense strand
ccucaugaccuuaaagauu

SEQ ID NO: 2319374 - RNA, 19 nt, Homo sapiens
  misc_RNA (1)...(19): siRNA sense strand
gcaaggacucacaguguua

SEQ ID NO: 2319375 - RNA, 19 nt, Homo sapiens
  misc_RNA (1)...(19): siRNA sense strand
gugaaacagaagaggguga

SEQ ID NO: 2319376 - RNA, 19 nt, Homo sapiens
  misc_RNA (1)...(19): siRNA sense strand
ggagaaaacuugggaagaa

SEQ ID NO: 2319377 - RNA, 19 nt, Homo sapiens
  misc_RNA (1)...(19): siRNA sense strand
cgugauaaacuuugcagaa

SEQ ID NO: 2319378 - RNA, 19 nt, Homo sapiens
  misc_RNA (1)...(19): siRNA sense strand
acacaaaaccagaaaagaa

SEQ ID NO: 2319379 - RNA, 19 nt, Homo sapiens
  misc_RNA (1)...(19): siRNA sense strand
guaaagaauucaaagcuca

SEQ ID NO: 2319380 - RNA, 19 nt, Homo sapiens
  misc_RNA (1)...(19): siRNA sense strand
uggaagaagcugucagaga

SEQ ID NO: 2319381 - RNA, 19 nt, Homo sapiens
  misc_RNA (1)...(19): siRNA sense strand
cagcaagaaaagaaagaaa

SEQ ID NO: 2319382 - RNA, 19 nt, Homo sapiens
  misc_RNA (1)...(19): siRNA sense strand
cagaguaauugcagacaga

SEQ ID NO: 2319383 - RNA, 19 nt, Homo sapiens
  misc_RNA (1)...(19): siRNA sense strand
aagugaaagcugaaagcaa

SEQ ID NO: 2319384 - RNA, 19 nt, Homo sapiens
  misc_RNA (1)...(19): siRNA sense strand
gaugaaagaacuugaagau

SEQ ID NO: 2319385 - RNA, 19 nt, Homo sapiens
  misc_RNA (1)...(19): siRNA sense strand
uauuacugauggaggauua

SEQ ID NO: 2319386 - RNA, 19 nt, Homo sapiens
  misc_RNA (1)...(19): siRNA sense strand
gauccaagaaggacagaau

SEQ ID NO: 2319387 - RNA, 19 nt, Homo sapiens
  misc_RNA (1)...(19): siRNA sense strand
ccaucaaaacacaggaaaa

SEQ ID NO: 2319388 - RNA, 19 nt, Homo sapiens
  misc_RNA (1)...(19): siRNA sense strand
gccauuaaggagaaggaua

SEQ ID NO: 2319389 - RNA, 19 nt, Homo sapiens
  misc_RNA (1)...(19): siRNA sense strand
caggguauuuggagaagaa

SEQ ID NO: 2319390 - RNA, 19 nt, Homo sapiens
  misc_RNA (1)...(19): siRNA sense strand
ggaaggccucauagagaaa

SEQ ID NO: 2319391 - RNA, 19 nt, Homo sapiens
  misc_RNA (1)...(19): siRNA sense strand
agacgaaguauuagcagaa

SEQ ID NO: 2319392 - RNA, 19 nt, Homo sapiens
  misc_RNA (1)...(19): siRNA sense strand
ucaccauggagaagggaaa

SEQ ID NO: 2319393 - RNA, 19 nt, Homo sapiens
  misc_RNA (1)...(19): siRNA sense strand
gcacaaaacuguaggcauc

SEQ ID NO: 2319394 - RNA, 19 nt, Homo sapiens
  misc_RNA (1)...(19): siRNA sense strand
ggaucuuugcccaggaauu

SEQ ID NO: 2319395 - RNA, 19 nt, Homo sapiens
  misc_RNA (1)...(19): siRNA sense strand
agaauguggucaagggcca

SEQ ID NO: 2319396 - RNA, 19 nt, Homo sapiens
  misc_RNA (1)...(19): siRNA sense strand
ccgcuguaccggagcaaca

SEQ ID NO: 2319397 - RNA, 19 nt, Homo sapiens
  misc_RNA (1)...(19): siRNA sense strand
acuuggagaauguggucaa

SEQ ID NO: 2319398 - RNA, 19 nt, Homo sapiens
  misc_RNA (1)...(19): siRNA sense strand
ccucuaacugcucggauau

SEQ ID NO: 2319399 - RNA, 19 nt, Homo sapiens
  misc_RNA (1)...(19): siRNA sense strand
aguacaaguaucuggacga

SEQ ID NO: 2319400 - RNA, 19 nt, Homo sapiens
  misc_RNA (1)...(19): siRNA sense strand
agccaagaacccuggaaca

SEQ ID NO: 2319401 - RNA, 19 nt, Homo sapiens
  misc_RNA (1)...(19): siRNA sense strand
acaaagaaggagagauuca

SEQ ID NO: 2319402 - RNA, 19 nt, Homo sapiens
  misc_RNA (1)...(19): siRNA sense strand
ggcccaaaucagagaggaa

SEQ ID NO: 2319403 - RNA, 19 nt, Homo sapiens
  misc_RNA (1)...(19): siRNA sense strand
gagaggaaaagaagagaaa

SEQ ID NO: 2319404 - RNA, 19 nt, Homo sapiens
  misc_RNA (1)...(19): siRNA sense strand
acaguaaagcuuuggacaa

SEQ ID NO: 2319405 - RNA, 19 nt, Homo sapiens
  misc_RNA (1)...(19): siRNA sense strand
aagugaagcuggaagccaa

SEQ ID NO: 2319406 - RNA, 19 nt, Homo sapiens
  misc_RNA (1)...(19): siRNA sense strand
ggaaaagaagagaaaagaa

SEQ ID NO: 2319407 - RNA, 19 nt, Homo sapiens
  misc_RNA (1)...(19): siRNA sense strand
aagaaacagaccagaagaa

SEQ ID NO: 2319408 - RNA, 19 nt, Homo sapiens
  misc_RNA (1)...(19): siRNA sense strand
uggaagacaaagaaggaga

SEQ ID NO: 2319409 - RNA, 19 nt, Homo sapiens
  misc_RNA (1)...(19): siRNA sense strand
gagagauugcuguggguga

SEQ ID NO: 2319410 - RNA, 19 nt, Homo sapiens
  misc_RNA (1)...(19): siRNA sense strand
augaagaggaagaugauga

SEQ ID NO: 2319411 - RNA, 19 nt, Homo sapiens
  misc_RNA (1)...(19): siRNA sense strand
guguaaauguuguuggaac

SEQ ID NO: 2319412 - RNA, 19 nt, Homo sapiens
  misc_RNA (1)...(19): siRNA sense strand
aauuaaaggcugaguugga

SEQ ID NO: 2319413 - RNA, 19 nt, Homo sapiens
  misc_RNA (1)...(19): siRNA sense strand
aagaugaagaggaagauga

SEQ ID NO: 2319414 - RNA, 19 nt, Homo sapiens
  misc_RNA (1)...(19): siRNA sense strand
ccgcaaugaugaaugggca

SEQ ID NO: 2319415 - RNA, 19 nt, Homo sapiens
  misc_RNA (1)...(19): siRNA sense strand
gagcugaugcagaggagga

SEQ ID NO: 2319416 - RNA, 19 nt, Homo sapiens
  misc_RNA (1)...(19): siRNA sense strand
gaggaaaagaagagaaaag

SEQ ID NO: 2319417 - RNA, 19 nt, Homo sapiens
  misc_RNA (1)...(19): siRNA sense strand
ugaaccugaagaagagaaa

SEQ ID NO: 2319418 - RNA, 19 nt, Homo sapiens
  misc_RNA (1)...(19): siRNA sense strand
cuuuggacaacuaagaaua

SEQ ID NO: 2319419 - RNA, 19 nt, Homo sapiens
  misc_RNA (1)...(19): siRNA sense strand
ugguacauauucaggccaa

SEQ ID NO: 2319420 - RNA, 19 nt, Homo sapiens
  misc_RNA (1)...(19): siRNA sense strand
agaaagaugaggaaaauga

SEQ ID NO: 2319421 - RNA, 19 nt, Homo sapiens
  misc_RNA (1)...(19): siRNA sense strand
ccuauaacaacaaugaaga

SEQ ID NO: 2319422 - RNA, 19 nt, Homo sapiens
  misc_RNA (1)...(19): siRNA sense strand
cccaaaucagagaggaaaa

SEQ ID NO: 2319423 - RNA, 19 nt, Homo sapiens
  misc_RNA (1)...(19): siRNA sense strand
agaaauuaaugcaaaccga

SEQ ID NO: 2319424 - RNA, 19 nt, Homo sapiens
  misc_RNA (1)...(19): siRNA sense strand
cugaagaagaaaagcaaca

SEQ ID NO: 2319425 - RNA, 19 nt, Homo sapiens
  misc_RNA (1)...(19): siRNA sense strand
aaagugaauuaaaggcuga

SEQ ID NO: 2319426 - RNA, 19 nt, Homo sapiens
  misc_RNA (1)...(19): siRNA sense strand
uggccgaacacuugcagaa

SEQ ID NO: 2319427 - RNA, 19 nt, Homo sapiens
  misc_RNA (1)...(19): siRNA sense strand
gugggagagauuuggaaga

SEQ ID NO: 2319428 - RNA, 19 nt, Homo sapiens
  misc_RNA (1)...(19): siRNA sense strand
gggagagauuuggaagaca

SEQ ID NO: 2319429 - RNA, 19 nt, Homo sapiens
  misc_RNA (1)...(19): siRNA sense strand
cuucaaagcauggggcuaa

SEQ ID NO: 2319430 - RNA, 19 nt, Homo sapiens
  misc_RNA (1)...(19): siRNA sense strand
ggaucuaggacgcugcauu

SEQ ID NO: 2319431 - RNA, 19 nt, Homo sapiens
  misc_RNA (1)...(19): siRNA sense strand
gguacauauucaggccaaa

SEQ ID NO: 2319432 - RNA, 19 nt, Homo sapiens
  misc_RNA (1)...(19): siRNA sense strand
gcccaaaucagagaggaaa

SEQ ID NO: 2319433 - RNA, 19 nt, Homo sapiens
  misc_RNA (1)...(19): siRNA sense strand
agaugaagaggaagaugau

SEQ ID NO: 2319434 - RNA, 19 nt, Homo sapiens
  misc_RNA (1)...(19): siRNA sense strand
guucauggagucuggacau

SEQ ID NO: 2319435 - RNA, 19 nt, Homo sapiens
  misc_RNA (1)...(19): siRNA sense strand
uguuguugggagugaagaa

SEQ ID NO: 2319436 - RNA, 19 nt, Homo sapiens
  misc_RNA (1)...(19): siRNA sense strand
aagccaagacucuggagau

SEQ ID NO: 2319437 - RNA, 19 nt, Homo sapiens
  misc_RNA (1)...(19): siRNA sense strand
aggacgcugcauugggaua

SEQ ID NO: 2319438 - RNA, 19 nt, Homo sapiens
  misc_RNA (1)...(19): siRNA sense strand
ggaaaaugauaguaaagcu

SEQ ID NO: 2319439 - RNA, 19 nt, Homo sapiens
  misc_RNA (1)...(19): siRNA sense strand
ccuuguauggaauaugaaa

SEQ ID NO: 2319440 - RNA, 19 nt, Homo sapiens
  misc_RNA (1)...(19): siRNA sense strand
gcuuuggacaacuaagaau

SEQ ID NO: 2319441 - RNA, 19 nt, Homo sapiens
  misc_RNA (1)...(19): siRNA sense strand
gaagaagaaaagcaacaaa

SEQ ID NO: 2319442 - RNA, 19 nt, Homo sapiens
  misc_RNA (1)...(19): siRNA sense strand
ccaaagagguggaggccgu

SEQ ID NO: 2319443 - RNA, 19 nt, Homo sapiens
  misc_RNA (1)...(19): siRNA sense strand
aagugauggugauggguga

SEQ ID NO: 2319444 - RNA, 19 nt, Homo sapiens
  misc_RNA (1)...(19): siRNA sense strand
ccaagaagccauagccacu

SEQ ID NO: 2319445 - RNA, 19 nt, Homo sapiens
  misc_RNA (1)...(19): siRNA sense strand
ccagagaacacuaugacca

SEQ ID NO: 2319446 - RNA, 19 nt, Homo sapiens
  misc_RNA (1)...(19): siRNA sense strand
aggccgaagugauggugau

SEQ ID NO: 2319447 - RNA, 19 nt, Homo sapiens
  misc_RNA (1)...(19): siRNA sense strand
cugacuucuuggugcacua

SEQ ID NO: 2319448 - RNA, 19 nt, Homo sapiens
  misc_RNA (1)...(19): siRNA sense strand
guggaugacuucacagcga

SEQ ID NO: 2319449 - RNA, 19 nt, Homo sapiens
  misc_RNA (1)...(19): siRNA sense strand
gggcuugcuguguggauga

SEQ ID NO: 2319450 - RNA, 19 nt, Homo sapiens
  misc_RNA (1)...(19): siRNA sense strand
uagcaaaguccuauccaga

SEQ ID NO: 2319451 - RNA, 19 nt, Homo sapiens
  misc_RNA (1)...(19): siRNA sense strand
gagcugacuucuuggugca

SEQ ID NO: 2319452 - RNA, 19 nt, Homo sapiens
  misc_RNA (1)...(19): siRNA sense strand
uggauaucuuggaaagguu

SEQ ID NO: 2319453 - RNA, 19 nt, Homo sapiens
  misc_RNA (1)...(19): siRNA sense strand
caguaaugucagcgagaau

SEQ ID NO: 2319454 - RNA, 19 nt, Homo sapiens
  misc_RNA (1)...(19): siRNA sense strand
ccauucacgccgaggagau

SEQ ID NO: 2319455 - RNA, 19 nt, Homo sapiens
  misc_RNA (1)...(19): siRNA sense strand
gcuuugaggaugaggguga

SEQ ID NO: 2319456 - RNA, 19 nt, Homo sapiens
  misc_RNA (1)...(19): siRNA sense strand
aggaugagggugaggacaa

SEQ ID NO: 2319457 - RNA, 19 nt, Homo sapiens
  misc_RNA (1)...(19): siRNA sense strand
cgucagagcuggaggaacc

SEQ ID NO: 2319458 - RNA, 19 nt, Homo sapiens
  misc_RNA (1)...(19): siRNA sense strand
agaucaagguggagcccau

SEQ ID NO: 2319459 - RNA, 19 nt, Homo sapiens
  misc_RNA (1)...(19): siRNA sense strand
gcacaagaccaaggggaaa

SEQ ID NO: 2319460 - RNA, 19 nt, Homo sapiens
  misc_RNA (1)...(19): siRNA sense strand
uggaggaaccgcugggaga

SEQ ID NO: 2319461 - RNA, 19 nt, Homo sapiens
  misc_RNA (1)...(19): siRNA sense strand
ugacaagagcgguggcagu

SEQ ID NO: 2319462 - RNA, 19 nt, Homo sapiens
  misc_RNA (1)...(19): siRNA sense strand
gcgagucggaggagguaga

SEQ ID NO: 2319463 - RNA, 19 nt, Homo sapiens
  misc_RNA (1)...(19): siRNA sense strand
cggaggagguagaggugac

SEQ ID NO: 2319464 - RNA, 19 nt, Homo sapiens
  misc_RNA (1)...(19): siRNA sense strand
agguagaggugacugacau

SEQ ID NO: 2319465 - RNA, 19 nt, Homo sapiens
  misc_RNA (1)...(19): siRNA sense strand
cagugaugaggaugaggaa

SEQ ID NO: 2319466 - RNA, 19 nt, Homo sapiens
  misc_RNA (1)...(19): siRNA sense strand
cugaggacaugaaacggua

SEQ ID NO: 2319467 - RNA, 19 nt, Homo sapiens
  misc_RNA (1)...(19): siRNA sense strand
cauucaaguuuaagcucca

SEQ ID NO: 2319468 - RNA, 19 nt, Homo sapiens
  misc_RNA (1)...(19): siRNA sense strand
gcauucugcacaagaccaa

SEQ ID NO: 2319469 - RNA, 19 nt, Homo sapiens
  misc_RNA (1)...(19): siRNA sense strand
ccaaauguguuguggccaa

SEQ ID NO: 2319470 - RNA, 19 nt, Homo sapiens
  misc_RNA (1)...(19): siRNA sense strand
cggcagaccacaagcccaa

SEQ ID NO: 2319471 - RNA, 19 nt, Homo sapiens
  misc_RNA (1)...(19): siRNA sense strand
ccgacaaggaguugguaca

SEQ ID NO: 2319472 - RNA, 19 nt, Homo sapiens
  misc_RNA (1)...(19): siRNA sense strand
gugugaagcaagaucgcua

SEQ ID NO: 2319473 - RNA, 19 nt, Homo sapiens
  misc_RNA (1)...(19): siRNA sense strand
acgucaggcaugcgaguaa

SEQ ID NO: 2319474 - RNA, 19 nt, Homo sapiens
  misc_RNA (1)...(19): siRNA sense strand
aguguuacgaagugggaau

SEQ ID NO: 2319475 - RNA, 19 nt, Homo sapiens
  misc_RNA (1)...(19): siRNA sense strand
guucaaagagggaugcuca

SEQ ID NO: 2319476 - RNA, 19 nt, Homo sapiens
  misc_RNA (1)...(19): siRNA sense strand
aaggaagguuagugggaac

SEQ ID NO: 2319477 - RNA, 19 nt, Homo sapiens
  misc_RNA (1)...(19): siRNA sense strand
acacugaaaaggaagguua

SEQ ID NO: 2319478 - RNA, 19 nt, Homo sapiens
  misc_RNA (1)...(19): siRNA sense strand
aagaagcauucaaggacau

SEQ ID NO: 2319479 - RNA, 19 nt, Homo sapiens
  misc_RNA (1)...(19): siRNA sense strand
ccaagaagauucccggcuu

SEQ ID NO: 2319480 - RNA, 19 nt, Homo sapiens
  misc_RNA (1)...(19): siRNA sense strand
gagagagagauguggguac

SEQ ID NO: 2319481 - RNA, 19 nt, Homo sapiens
  misc_RNA (1)...(19): siRNA sense strand
aaagaagcauucaaggaca

SEQ ID NO: 2319482 - RNA, 19 nt, Homo sapiens
  misc_RNA (1)...(19): siRNA sense strand
acuucaagguuucgagagu

SEQ ID NO: 2319483 - RNA, 19 nt, Homo sapiens
  misc_RNA (1)...(19): siRNA sense strand
aaucaguguacaaucgaua

SEQ ID NO: 2319484 - RNA, 19 nt, Homo sapiens
  misc_RNA (1)...(19): siRNA sense strand
ggggaaaugcguagaagga

SEQ ID NO: 2319485 - RNA, 19 nt, Homo sapiens
  misc_RNA (1)...(19): siRNA sense strand
acgaagugggaauggugaa

SEQ ID NO: 2319486 - RNA, 19 nt, Homo sapiens
  misc_RNA (1)...(19): siRNA sense strand
ccuccuauguagacagcca

SEQ ID NO: 2319487 - RNA, 19 nt, Homo sapiens
  misc_RNA (1)...(19): siRNA sense strand
aagcaagaucgcuagaaca

SEQ ID NO: 2319488 - RNA, 19 nt, Homo sapiens
  misc_RNA (1)...(19): siRNA sense strand
ccggcaaggccaagagaag

SEQ ID NO: 2319489 - RNA, 19 nt, Homo sapiens
  misc_RNA (1)...(19): siRNA sense strand
uggacagggaugaggggaa

SEQ ID NO: 2319490 - RNA, 19 nt, Homo sapiens
  misc_RNA (1)...(19): siRNA sense strand
aggccaugauccugcucaa

SEQ ID NO: 2319491 - RNA, 19 nt, Homo sapiens
  misc_RNA (1)...(19): siRNA sense strand
cgggauaucacuauggagu

SEQ ID NO: 2319492 - RNA, 19 nt, Homo sapiens
  misc_RNA (1)...(19): siRNA sense strand
ugaugaugucccugaccaa

SEQ ID NO: 2319493 - RNA, 19 nt, Homo sapiens
  misc_RNA (1)...(19): siRNA sense strand
cugcaaacuuccugggaga

SEQ ID NO: 2319494 - RNA, 19 nt, Homo sapiens
  misc_RNA (1)...(19): siRNA sense strand
aaauaaaaucccagggcaa

SEQ ID NO: 2319495 - RNA, 19 nt, Homo sapiens
  misc_RNA (1)...(19): siRNA sense strand
guguuaaagaagacaagau

SEQ ID NO: 2319496 - RNA, 19 nt, Homo sapiens
  misc_RNA (1)...(19): siRNA sense strand
acagcaaacaggaugagaa

SEQ ID NO: 2319497 - RNA, 19 nt, Homo sapiens
  misc_RNA (1)...(19): siRNA sense strand
gcucauguugcguagggaa

SEQ ID NO: 2319498 - RNA, 19 nt, Homo sapiens
  misc_RNA (1)...(19): siRNA sense strand
augcaguguugaugguaga

SEQ ID NO: 2319499 - RNA, 19 nt, Homo sapiens
  misc_RNA (1)...(19): siRNA sense strand
uguugaugguagaugauga

SEQ ID NO: 2319500 - RNA, 19 nt, Homo sapiens
  misc_RNA (1)...(19): siRNA sense strand
ggauauuugugaagccugu

SEQ ID NO: 2319501 - RNA, 19 nt, Homo sapiens
  misc_RNA (1)...(19): siRNA sense strand
cucauguugcguagggaaa

SEQ ID NO: 2319502 - RNA, 19 nt, Homo sapiens
  misc_RNA (1)...(19): siRNA sense strand
acauggacaauuuggaaaa

SEQ ID NO: 2319503 - RNA, 19 nt, Homo sapiens
  misc_RNA (1)...(19): siRNA sense strand
cuuacuucccaguguuaaa

SEQ ID NO: 2319504 - RNA, 19 nt, Homo sapiens
  misc_RNA (1)...(19): siRNA sense strand
acgugauacuagugggaga

SEQ ID NO: 2319505 - RNA, 19 nt, Homo sapiens
  misc_RNA (1)...(19): siRNA sense strand
ucgugaagguguacggcua

SEQ ID NO: 2319506 - RNA, 19 nt, Homo sapiens
  misc_RNA (1)...(19): siRNA sense strand
aagaggaaauggagggcga

SEQ ID NO: 2319507 - RNA, 19 nt, Homo sapiens
  misc_RNA (1)...(19): siRNA sense strand
ggaugaggcugaugaggca

SEQ ID NO: 2319508 - RNA, 19 nt, Homo sapiens
  misc_RNA (1)...(19): siRNA sense strand
aggacaugcugcaguggaa

SEQ ID NO: 2319509 - RNA, 19 nt, Homo sapiens
  misc_RNA (1)...(19): siRNA sense strand
gggacuggcuuucggccua

SEQ ID NO: 2319510 - RNA, 19 nt, Homo sapiens
  misc_RNA (1)...(19): siRNA sense strand
cuggaaugaaauugagaca

SEQ ID NO: 2319511 - RNA, 19 nt, Homo sapiens
  misc_RNA (1)...(19): siRNA sense strand
aggucguggugguguggaa

SEQ ID NO: 2319512 - RNA, 19 nt, Homo sapiens
  misc_RNA (1)...(19): siRNA sense strand
cuggagaagcaguuguauu

SEQ ID NO: 2319513 - RNA, 19 nt, Homo sapiens
  misc_RNA (1)...(19): siRNA sense strand
ugaacaaggucgugguggu

SEQ ID NO: 2319514 - RNA, 19 nt, Homo sapiens
  misc_RNA (1)...(19): siRNA sense strand
acaaggagcucauggccca

SEQ ID NO: 2319515 - RNA, 19 nt, Homo sapiens
  misc_RNA (1)...(19): siRNA sense strand
cuuaugagcgggaggaagu

SEQ ID NO: 2319516 - RNA, 19 nt, Homo sapiens
  misc_RNA (1)...(19): siRNA sense strand
agcccaacuucauggaaau

SEQ ID NO: 2319517 - RNA, 19 nt, Homo sapiens
  misc_RNA (1)...(19): siRNA sense strand
cgggaggaccgcuuggaau

SEQ ID NO: 2319518 - RNA, 19 nt, Homo sapiens
  misc_RNA (1)...(19): siRNA sense strand
aaauugagacagaggccau

SEQ ID NO: 2319519 - RNA, 19 nt, Homo sapiens
  misc_RNA (1)...(19): siRNA sense strand
aggcggugcaggacagcaa

SEQ ID NO: 2319520 - RNA, 19 nt, Homo sapiens
  misc_RNA (1)...(19): siRNA sense strand
gaacugugcuccagggccu

SEQ ID NO: 2319521 - RNA, 19 nt, Homo sapiens
  misc_RNA (1)...(19): siRNA sense strand
gguuauuuccucugggugu

SEQ ID NO: 2319522 - RNA, 19 nt, Homo sapiens
  misc_RNA (1)...(19): siRNA sense strand
acaucaacugugaggacau

SEQ ID NO: 2319523 - RNA, 19 nt, Homo sapiens
  misc_RNA (1)...(19): siRNA sense strand
uaagaagagcauugagaac

SEQ ID NO: 2319524 - RNA, 19 nt, Homo sapiens
  misc_RNA (1)...(19): siRNA sense strand
gcuauaccaugcugcggaa

SEQ ID NO: 2319525 - RNA, 19 nt, Homo sapiens
  misc_RNA (1)...(19): siRNA sense strand
acgaaaucauguuuggguu

SEQ ID NO: 2319526 - RNA, 19 nt, Homo sapiens
  misc_RNA (1)...(19): siRNA sense strand
aggcaaggcggcuggaacu

SEQ ID NO: 2319527 - RNA, 19 nt, Homo sapiens
  misc_RNA (1)...(19): siRNA sense strand
ccuucuuucacaaguauua

SEQ ID NO: 2319528 - RNA, 19 nt, Homo sapiens
  misc_RNA (1)...(19): siRNA sense strand
agcaagagauggaggaaaa

SEQ ID NO: 2319529 - RNA, 19 nt, Homo sapiens
  misc_RNA (1)...(19): siRNA sense strand
cuaucaaggaggaagaaau

SEQ ID NO: 2319530 - RNA, 19 nt, Homo sapiens
  misc_RNA (1)...(19): siRNA sense strand
ccuccaaggaaguggcaga

SEQ ID NO: 2319531 - RNA, 19 nt, Homo sapiens
  misc_RNA (1)...(19): siRNA sense strand
aggaaguggcagaguccaa

SEQ ID NO: 2319532 - RNA, 19 nt, Homo sapiens
  misc_RNA (1)...(19): siRNA sense strand
ccugaauccuggaggcuca

SEQ ID NO: 2319533 - RNA, 19 nt, Homo sapiens
  misc_RNA (1)...(19): siRNA sense strand
ucaacagcacugagaggaa

SEQ ID NO: 2319534 - RNA, 19 nt, Homo sapiens
  misc_RNA (1)...(19): siRNA sense strand
cagggaaagaggagaaacu

SEQ ID NO: 2319535 - RNA, 19 nt, Homo sapiens
  misc_RNA (1)...(19): siRNA sense strand
agacuaucaaggaggaaga

SEQ ID NO: 2319536 - RNA, 19 nt, Homo sapiens
  misc_RNA (1)...(19): siRNA sense strand
aagcaagagauggaggaaa

SEQ ID NO: 2319537 - RNA, 19 nt, Homo sapiens
  misc_RNA (1)...(19): siRNA sense strand
gugaaacaucagaggagga

SEQ ID NO: 2319538 - RNA, 19 nt, Homo sapiens
  misc_RNA (1)...(19): siRNA sense strand
gcacugagaggaagcgcau

SEQ ID NO: 2319539 - RNA, 19 nt, Homo sapiens
  misc_RNA (1)...(19): siRNA sense strand
gggaaaagagaguggcagu

SEQ ID NO: 2319540 - RNA, 19 nt, Homo sapiens
  misc_RNA (1)...(19): siRNA sense strand
aggaggaaccuaagagauc

SEQ ID NO: 2319541 - RNA, 19 nt, Homo sapiens
  misc_RNA (1)...(19): siRNA sense strand
gcacugacugccaagggaa

SEQ ID NO: 2319542 - RNA, 19 nt, Homo sapiens
  misc_RNA (1)...(19): siRNA sense strand
auacguggauugaggacca

SEQ ID NO: 2319543 - RNA, 19 nt, Homo sapiens
  misc_RNA (1)...(19): siRNA sense strand
ugacauuggaccagguguu

SEQ ID NO: 2319544 - RNA, 19 nt, Homo sapiens
  misc_RNA (1)...(19): siRNA sense strand
ccuguuuggagaaggguuu

SEQ ID NO: 2319545 - RNA, 19 nt, Homo sapiens
  misc_RNA (1)...(19): siRNA sense strand
agauggaggaaaaggagaa

SEQ ID NO: 2319546 - RNA, 19 nt, Homo sapiens
  misc_RNA (1)...(19): siRNA sense strand
ccaucagcguccuggcaga

SEQ ID NO: 2319547 - RNA, 19 nt, Homo sapiens
  misc_RNA (1)...(19): siRNA sense strand
cagcuagggaugugaaucu

SEQ ID NO: 2319548 - RNA, 19 nt, Homo sapiens
  misc_RNA (1)...(19): siRNA sense strand
uggagcagcgacagguuaa

SEQ ID NO: 2319549 - RNA, 19 nt, Homo sapiens
  misc_RNA (1)...(19): siRNA sense strand
acacgcaaguaguggccau

SEQ ID NO: 2319550 - RNA, 19 nt, Homo sapiens
  misc_RNA (1)...(19): siRNA sense strand
ggacagaagugacccugga

SEQ ID NO: 2319551 - RNA, 19 nt, Homo sapiens
  misc_RNA (1)...(19): siRNA sense strand
cacagggagaggagggaga

SEQ ID NO: 2319552 - RNA, 19 nt, Homo sapiens
  misc_RNA (1)...(19): siRNA sense strand
cugcccaacaggagucuaa

SEQ ID NO: 2319553 - RNA, 19 nt, Homo sapiens
  misc_RNA (1)...(19): siRNA sense strand
ccaucaaaguggagagccc

SEQ ID NO: 2319554 - RNA, 19 nt, Homo sapiens
  misc_RNA (1)...(19): siRNA sense strand
acugagaggaagcgcauga

SEQ ID NO: 2319555 - RNA, 19 nt, Homo sapiens
  misc_RNA (1)...(19): siRNA sense strand
cugcaggaccagggaaaga

SEQ ID NO: 2319556 - RNA, 19 nt, Homo sapiens
  misc_RNA (1)...(19): siRNA sense strand
gugauucaacacagggaga

SEQ ID NO: 2319557 - RNA, 19 nt, Homo sapiens
  misc_RNA (1)...(19): siRNA sense strand
gagccggucucggaggaaa

SEQ ID NO: 2319558 - RNA, 19 nt, Homo sapiens
  misc_RNA (1)...(19): siRNA sense strand
aagacacccauuaaggaaa

SEQ ID NO: 2319559 - RNA, 19 nt, Homo sapiens
  misc_RNA (1)...(19): siRNA sense strand
agcaagagauggaggaaaa

SEQ ID NO: 2319560 - RNA, 19 nt, Homo sapiens
  misc_RNA (1)...(19): siRNA sense strand
cuaucaaggaggaagaaau

SEQ ID NO: 2319561 - RNA, 19 nt, Homo sapiens
  misc_RNA (1)...(19): siRNA sense strand
ccuccaaggaaguggcaga

SEQ ID NO: 2319562 - RNA, 19 nt, Homo sapiens
  misc_RNA (1)...(19): siRNA sense strand
aggaaguggcagaguccaa

SEQ ID NO: 2319563 - RNA, 19 nt, Homo sapiens
  misc_RNA (1)...(19): siRNA sense strand
ccugaauccuggaggcuca

SEQ ID NO: 2319564 - RNA, 19 nt, Homo sapiens
  misc_RNA (1)...(19): siRNA sense strand
ucaacagcacugagaggaa

SEQ ID NO: 2319565 - RNA, 19 nt, Homo sapiens
  misc_RNA (1)...(19): siRNA sense strand
cagggaaagaggagaaacu

SEQ ID NO: 2319566 - RNA, 19 nt, Homo sapiens
  misc_RNA (1)...(19): siRNA sense strand
agacuaucaaggaggaaga

SEQ ID NO: 2319567 - RNA, 19 nt, Homo sapiens
  misc_RNA (1)...(19): siRNA sense strand
aagcaagagauggaggaaa

SEQ ID NO: 2319568 - RNA, 19 nt, Homo sapiens
  misc_RNA (1)...(19): siRNA sense strand
gugaaacaucagaggagga

SEQ ID NO: 2319569 - RNA, 19 nt, Homo sapiens
  misc_RNA (1)...(19): siRNA sense strand
gcacugagaggaagcgcau

SEQ ID NO: 2319570 - RNA, 19 nt, Homo sapiens
  misc_RNA (1)...(19): siRNA sense strand
gggaaaagagaguggcagu

SEQ ID NO: 2319571 - RNA, 19 nt, Homo sapiens
  misc_RNA (1)...(19): siRNA sense strand
aggaggaaccuaagagauc

SEQ ID NO: 2319572 - RNA, 19 nt, Homo sapiens
  misc_RNA (1)...(19): siRNA sense strand
gcacugacugccaagggaa

SEQ ID NO: 2319573 - RNA, 19 nt, Homo sapiens
  misc_RNA (1)...(19): siRNA sense strand
auacguggauugaggacca

SEQ ID NO: 2319574 - RNA, 19 nt, Homo sapiens
  misc_RNA (1)...(19): siRNA sense strand
ugacauuggaccagguguu

SEQ ID NO: 2319575 - RNA, 19 nt, Homo sapiens
  misc_RNA (1)...(19): siRNA sense strand
ccuguuuggagaaggguuu

SEQ ID NO: 2319576 - RNA, 19 nt, Homo sapiens
  misc_RNA (1)...(19): siRNA sense strand
agauggaggaaaaggagaa

SEQ ID NO: 2319577 - RNA, 19 nt, Homo sapiens
  misc_RNA (1)...(19): siRNA sense strand
ccaucagcguccuggcaga

SEQ ID NO: 2319578 - RNA, 19 nt, Homo sapiens
  misc_RNA (1)...(19): siRNA sense strand
cagcuagggaugugaaucu

SEQ ID NO: 2319579 - RNA, 19 nt, Homo sapiens
  misc_RNA (1)...(19): siRNA sense strand
uggagcagcgacagguuaa

SEQ ID NO: 2319580 - RNA, 19 nt, Homo sapiens
  misc_RNA (1)...(19): siRNA sense strand
acacgcaaguaguggccau

SEQ ID NO: 2319581 - RNA, 19 nt, Homo sapiens
  misc_RNA (1)...(19): siRNA sense strand
ggacagaagugacccugga

SEQ ID NO: 2319582 - RNA, 19 nt, Homo sapiens
  misc_RNA (1)...(19): siRNA sense strand
cacagggagaggagggaga

SEQ ID NO: 2319583 - RNA, 19 nt, Homo sapiens
  misc_RNA (1)...(19): siRNA sense strand
cugcccaacaggagucuaa

SEQ ID NO: 2319584 - RNA, 19 nt, Homo sapiens
  misc_RNA (1)...(19): siRNA sense strand
ccaucaaaguggagagccc

SEQ ID NO: 2319585 - RNA, 19 nt, Homo sapiens
  misc_RNA (1)...(19): siRNA sense strand
acugagaggaagcgcauga

SEQ ID NO: 2319586 - RNA, 19 nt, Homo sapiens
  misc_RNA (1)...(19): siRNA sense strand
cugcaggaccagggaaaga

SEQ ID NO: 2319587 - RNA, 19 nt, Homo sapiens
  misc_RNA (1)...(19): siRNA sense strand
gugauucaacacagggaga

SEQ ID NO: 2319588 - RNA, 19 nt, Homo sapiens
  misc_RNA (1)...(19): siRNA sense strand
gagccggucucggaggaaa

SEQ ID NO: 2319589 - RNA, 19 nt, Homo sapiens
  misc_RNA (1)...(19): siRNA sense strand
aagacacccauuaaggaaa

SEQ ID NO: 2319590 - RNA, 19 nt, Homo sapiens
  misc_RNA (1)...(19): siRNA sense strand
agcaagagauggaggaaaa

SEQ ID NO: 2319591 - RNA, 19 nt, Homo sapiens
  misc_RNA (1)...(19): siRNA sense strand
cuaucaaggaggaagaaau

SEQ ID NO: 2319592 - RNA, 19 nt, Homo sapiens
  misc_RNA (1)...(19): siRNA sense strand
ccuccaaggaaguggcaga

SEQ ID NO: 2319593 - RNA, 19 nt, Homo sapiens
  misc_RNA (1)...(19): siRNA sense strand
aggaaguggcagaguccaa

SEQ ID NO: 2319594 - RNA, 19 nt, Homo sapiens
  misc_RNA (1)...(19): siRNA sense strand
ccugaauccuggaggcuca

SEQ ID NO: 2319595 - RNA, 19 nt, Homo sapiens
  misc_RNA (1)...(19): siRNA sense strand
ucaacagcacugagaggaa

SEQ ID NO: 2319596 - RNA, 19 nt, Homo sapiens
  misc_RNA (1)...(19): siRNA sense strand
cagggaaagaggagaaacu

SEQ ID NO: 2319597 - RNA, 19 nt, Homo sapiens
  misc_RNA (1)...(19): siRNA sense strand
agacuaucaaggaggaaga

SEQ ID NO: 2319598 - RNA, 19 nt, Homo sapiens
  misc_RNA (1)...(19): siRNA sense strand
aagcaagagauggaggaaa

SEQ ID NO: 2319599 - RNA, 19 nt, Homo sapiens
  misc_RNA (1)...(19): siRNA sense strand
gugaaacaucagaggagga

SEQ ID NO: 2319600 - RNA, 19 nt, Homo sapiens
  misc_RNA (1)...(19): siRNA sense strand
gcacugagaggaagcgcau

SEQ ID NO: 2319601 - RNA, 19 nt, Homo sapiens
  misc_RNA (1)...(19): siRNA sense strand
gggaaaagagaguggcagu

SEQ ID NO: 2319602 - RNA, 19 nt, Homo sapiens
  misc_RNA (1)...(19): siRNA sense strand
aggaggaaccuaagagauc

SEQ ID NO: 2319603 - RNA, 19 nt, Homo sapiens
  misc_RNA (1)...(19): siRNA sense strand
gcacugacugccaagggaa

SEQ ID NO: 2319604 - RNA, 19 nt, Homo sapiens
  misc_RNA (1)...(19): siRNA sense strand
auacguggauugaggacca

SEQ ID NO: 2319605 - RNA, 19 nt, Homo sapiens
  misc_RNA (1)...(19): siRNA sense strand
ugacauuggaccagguguu

SEQ ID NO: 2319606 - RNA, 19 nt, Homo sapiens
  misc_RNA (1)...(19): siRNA sense strand
ccuguuuggagaaggguuu

SEQ ID NO: 2319607 - RNA, 19 nt, Homo sapiens
  misc_RNA (1)...(19): siRNA sense strand
agauggaggaaaaggagaa

SEQ ID NO: 2319608 - RNA, 19 nt, Homo sapiens
  misc_RNA (1)...(19): siRNA sense strand
ccaucagcguccuggcaga

SEQ ID NO: 2319609 - RNA, 19 nt, Homo sapiens
  misc_RNA (1)...(19): siRNA sense strand
cagcuagggaugugaaucu

SEQ ID NO: 2319610 - RNA, 19 nt, Homo sapiens
  misc_RNA (1)...(19): siRNA sense strand
uggagcagcgacagguuaa

SEQ ID NO: 2319611 - RNA, 19 nt, Homo sapiens
  misc_RNA (1)...(19): siRNA sense strand
acacgcaaguaguggccau

SEQ ID NO: 2319612 - RNA, 19 nt, Homo sapiens
  misc_RNA (1)...(19): siRNA sense strand
ggacagaagugacccugga

SEQ ID NO: 2319613 - RNA, 19 nt, Homo sapiens
  misc_RNA (1)...(19): siRNA sense strand
cacagggagaggagggaga

SEQ ID NO: 2319614 - RNA, 19 nt, Homo sapiens
  misc_RNA (1)...(19): siRNA sense strand
cugcccaacaggagucuaa

SEQ ID NO: 2319615 - RNA, 19 nt, Homo sapiens
  misc_RNA (1)...(19): siRNA sense strand
ccaucaaaguggagagccc

SEQ ID NO: 2319616 - RNA, 19 nt, Homo sapiens
  misc_RNA (1)...(19): siRNA sense strand
acugagaggaagcgcauga

SEQ ID NO: 2319617 - RNA, 19 nt, Homo sapiens
  misc_RNA (1)...(19): siRNA sense strand
cugcaggaccagggaaaga

SEQ ID NO: 2319618 - RNA, 19 nt, Homo sapiens
  misc_RNA (1)...(19): siRNA sense strand
gugauucaacacagggaga

SEQ ID NO: 2319619 - RNA, 19 nt, Homo sapiens
  misc_RNA (1)...(19): siRNA sense strand
gagccggucucggaggaaa

SEQ ID NO: 2319620 - RNA, 19 nt, Homo sapiens
  misc_RNA (1)...(19): siRNA sense strand
aagacacccauuaaggaaa

SEQ ID NO: 2319621 - RNA, 19 nt, Homo sapiens
  misc_RNA (1)...(19): siRNA sense strand
gggacgaggaggaggauga

SEQ ID NO: 2319622 - RNA, 19 nt, Homo sapiens
  misc_RNA (1)...(19): siRNA sense strand
ccagcaaggugguggccaa

SEQ ID NO: 2319623 - RNA, 19 nt, Homo sapiens
  misc_RNA (1)...(19): siRNA sense strand
agucagggcuaaaggucaa

SEQ ID NO: 2319624 - RNA, 19 nt, Homo sapiens
  misc_RNA (1)...(19): siRNA sense strand
cagaaauugaccaagauaa

SEQ ID NO: 2319625 - RNA, 19 nt, Homo sapiens
  misc_RNA (1)...(19): siRNA sense strand
aggcguuggucaaggacaa

SEQ ID NO: 2319626 - RNA, 19 nt, Homo sapiens
  misc_RNA (1)...(19): siRNA sense strand
acuucaagguguacacaaa

SEQ ID NO: 2319627 - RNA, 19 nt, Homo sapiens
  misc_RNA (1)...(19): siRNA sense strand
agaagaagaugcaccgcaa

SEQ ID NO: 2319628 - RNA, 19 nt, Homo sapiens
  misc_RNA (1)...(19): siRNA sense strand
gcauguacaaaguggagua

SEQ ID NO: 2319629 - RNA, 19 nt, Homo sapiens
  misc_RNA (1)...(19): siRNA sense strand
gcucagagguggaugugga

SEQ ID NO: 2319630 - RNA, 19 nt, Homo sapiens
  misc_RNA (1)...(19): siRNA sense strand
cagcaaagugacagcccaa

SEQ ID NO: 2319631 - RNA, 19 nt, Homo sapiens
  misc_RNA (1)...(19): siRNA sense strand
gcacguauacaguggccua

SEQ ID NO: 2319632 - RNA, 19 nt, Homo sapiens
  misc_RNA (1)...(19): siRNA sense strand
caguggacgugguagacaa

SEQ ID NO: 2319633 - RNA, 19 nt, Homo sapiens
  misc_RNA (1)...(19): siRNA sense strand
gugaucagccagucggaaa

SEQ ID NO: 2319634 - RNA, 19 nt, Homo sapiens
  misc_RNA (1)...(19): siRNA sense strand
acacuaaggcggcaggcaa

SEQ ID NO: 2319635 - RNA, 19 nt, Homo sapiens
  misc_RNA (1)...(19): siRNA sense strand
uggacgugguggagaauga

SEQ ID NO: 2319636 - RNA, 19 nt, Homo sapiens
  misc_RNA (1)...(19): siRNA sense strand
ggucaaggacaacggcaau

SEQ ID NO: 2319637 - RNA, 19 nt, Homo sapiens
  misc_RNA (1)...(19): siRNA sense strand
cccauggaguagugaacaa

SEQ ID NO: 2319638 - RNA, 19 nt, Homo sapiens
  misc_RNA (1)...(19): siRNA sense strand
cagcagacuuuguggugga

SEQ ID NO: 2319639 - RNA, 19 nt, Homo sapiens
  misc_RNA (1)...(19): siRNA sense strand
ccaguaaggugaaggccga

SEQ ID NO: 2319640 - RNA, 19 nt, Homo sapiens
  misc_RNA (1)...(19): siRNA sense strand
aaucggaggucacgggcua

SEQ ID NO: 2319641 - RNA, 19 nt, Homo sapiens
  misc_RNA (1)...(19): siRNA sense strand
gugcuaugucacagaaauu

SEQ ID NO: 2319642 - RNA, 19 nt, Homo sapiens
  misc_RNA (1)...(19): siRNA sense strand
ucgagguguacguggauaa

SEQ ID NO: 2319643 - RNA, 19 nt, Homo sapiens
  misc_RNA (1)...(19): siRNA sense strand
auguggacgugguggagaa

SEQ ID NO: 2319644 - RNA, 19 nt, Homo sapiens
  misc_RNA (1)...(19): siRNA sense strand
acacagaggaccuggagga

SEQ ID NO: 2319645 - RNA, 19 nt, Homo sapiens
  misc_RNA (1)...(19): siRNA sense strand
aggaggaugaggaggccaa

SEQ ID NO: 2319646 - RNA, 19 nt, Homo sapiens
  misc_RNA (1)...(19): siRNA sense strand
ccugaaaaucccugaaauu

SEQ ID NO: 2319647 - RNA, 19 nt, Homo sapiens
  misc_RNA (1)...(19): siRNA sense strand
cacuaaggcggcaggcaaa

SEQ ID NO: 2319648 - RNA, 19 nt, Homo sapiens
  misc_RNA (1)...(19): siRNA sense strand
gcauucuagucaaguacaa

SEQ ID NO: 2319649 - RNA, 19 nt, Homo sapiens
  misc_RNA (1)...(19): siRNA sense strand
ccuaccugcucaaggacaa

SEQ ID NO: 2319650 - RNA, 19 nt, Homo sapiens
  misc_RNA (1)...(19): siRNA sense strand
aguacacacugguggucaa

SEQ ID NO: 2319651 - RNA, 19 nt, Homo sapiens
  misc_RNA (1)...(19): siRNA sense strand
cuguggaggcguuggucaa

SEQ ID NO: 2319652 - RNA, 19 nt, Homo sapiens
  misc_RNA (1)...(19): siRNA sense strand
cuuugagccugcagaguuu

SEQ ID NO: 2319653 - RNA, 19 nt, Homo sapiens
  misc_RNA (1)...(19): siRNA sense strand
gaagaaagcccgugccuac

SEQ ID NO: 2319654 - RNA, 19 nt, Homo sapiens
  misc_RNA (1)...(19): siRNA sense strand
ucacggaucccgaaggcaa

SEQ ID NO: 2319655 - RNA, 19 nt, Homo sapiens
  misc_RNA (1)...(19): siRNA sense strand
ggauuucauucgugcccaa

SEQ ID NO: 2319656 - RNA, 19 nt, Homo sapiens
  misc_RNA (1)...(19): siRNA sense strand
ccgccaauaacgacaagaa

SEQ ID NO: 2319657 - RNA, 19 nt, Homo sapiens
  misc_RNA (1)...(19): siRNA sense strand
acuuugugguggaggcuau

SEQ ID NO: 2319658 - RNA, 19 nt, Homo sapiens
  misc_RNA (1)...(19): siRNA sense strand
aggccaucguggacgggaa

SEQ ID NO: 2319659 - RNA, 19 nt, Homo sapiens
  misc_RNA (1)...(19): siRNA sense strand
ccagcaagcccguuaccaa

SEQ ID NO: 2319660 - RNA, 19 nt, Homo sapiens
  misc_RNA (1)...(19): siRNA sense strand
gcaucgagcccacaggcaa

SEQ ID NO: 2319661 - RNA, 19 nt, Homo sapiens
  misc_RNA (1)...(19): siRNA sense strand
gacaccaggaggaggcaaa

SEQ ID NO: 2319662 - RNA, 19 nt, Homo sapiens
  misc_RNA (1)...(19): siRNA sense strand
uggucaaggacaacggcaa

SEQ ID NO: 2319663 - RNA, 19 nt, Homo sapiens
  misc_RNA (1)...(19): siRNA sense strand
aaagggugcugguggucaa

SEQ ID NO: 2319664 - RNA, 19 nt, Homo sapiens
  misc_RNA (1)...(19): siRNA sense strand
aguacuguauggagaugaa

SEQ ID NO: 2319665 - RNA, 19 nt, Homo sapiens
  misc_RNA (1)...(19): siRNA sense strand
ccacaggcaacauggugaa

SEQ ID NO: 2319666 - RNA, 19 nt, Homo sapiens
  misc_RNA (1)...(19): siRNA sense strand
cgguagagccucagcugga

SEQ ID NO: 2319667 - RNA, 19 nt, Homo sapiens
  misc_RNA (1)...(19): siRNA sense strand
ccaugugggacgaggagga

SEQ ID NO: 2319668 - RNA, 19 nt, Homo sapiens
  misc_RNA (1)...(19): siRNA sense strand
cuucacaguaaaugccaaa

SEQ ID NO: 2319669 - RNA, 19 nt, Homo sapiens
  misc_RNA (1)...(19): siRNA sense strand
agaagguggacguuggcaa

SEQ ID NO: 2319670 - RNA, 19 nt, Homo sapiens
  misc_RNA (1)...(19): siRNA sense strand
cuagcaaggugaaggcguu

SEQ ID NO: 2319671 - RNA, 19 nt, Homo sapiens
  misc_RNA (1)...(19): siRNA sense strand
ccaccaucacugacaacaa

SEQ ID NO: 2319672 - RNA, 19 nt, Homo sapiens
  misc_RNA (1)...(19): siRNA sense strand
acaccaaggaugcaggaga

SEQ ID NO: 2319673 - RNA, 19 nt, Homo sapiens
  misc_RNA (1)...(19): siRNA sense strand
aggucgagguugugaucca

SEQ ID NO: 2319674 - RNA, 19 nt, Homo sapiens
  misc_RNA (1)...(19): siRNA sense strand
agaaggaccuggcggagga

SEQ ID NO: 2319675 - RNA, 19 nt, Homo sapiens
  misc_RNA (1)...(19): siRNA sense strand
aggcgcagcucgagugcuu

SEQ ID NO: 2319676 - RNA, 19 nt, Homo sapiens
  misc_RNA (1)...(19): siRNA sense strand
ggacagaagggcacgguag

SEQ ID NO: 2319677 - RNA, 19 nt, Homo sapiens
  misc_RNA (1)...(19): siRNA sense strand
ggacaacggcaauggcacu

SEQ ID NO: 2319678 - RNA, 19 nt, Homo sapiens
  misc_RNA (1)...(19): siRNA sense strand
agucaaguucaacgaggaa

SEQ ID NO: 2319679 - RNA, 19 nt, Homo sapiens
  misc_RNA (1)...(19): siRNA sense strand
acagaaauugaccaagaua

SEQ ID NO: 2319680 - RNA, 19 nt, Homo sapiens
  misc_RNA (1)...(19): siRNA sense strand
cuucaaggccaaagucaca

SEQ ID NO: 2319681 - RNA, 19 nt, Homo sapiens
  misc_RNA (1)...(19): siRNA sense strand
gggauggcguguauggcuu

SEQ ID NO: 2319682 - RNA, 19 nt, Homo sapiens
  misc_RNA (1)...(19): siRNA sense strand
agaucgaaugugacgacaa

SEQ ID NO: 2319683 - RNA, 19 nt, Homo sapiens
  misc_RNA (1)...(19): siRNA sense strand
gcaaccugacggagaccua

SEQ ID NO: 2319684 - RNA, 19 nt, Homo sapiens
  misc_RNA (1)...(19): siRNA sense strand
gugcucagccagaagaaga

SEQ ID NO: 2319685 - RNA, 19 nt, Homo sapiens
  misc_RNA (1)...(19): siRNA sense strand
gccaaaugcagcuugagaa

SEQ ID NO: 2319686 - RNA, 19 nt, Homo sapiens
  misc_RNA (1)...(19): siRNA sense strand
cagaagugcuggccaggga

SEQ ID NO: 2319687 - RNA, 19 nt, Homo sapiens
  misc_RNA (1)...(19): siRNA sense strand
gcgugaagcagaaggaccu

SEQ ID NO: 2319688 - RNA, 19 nt, Homo sapiens
  misc_RNA (1)...(19): siRNA sense strand
ccuaugagguggaggugac

SEQ ID NO: 2319689 - RNA, 19 nt, Homo sapiens
  misc_RNA (1)...(19): siRNA sense strand
agauguuguucuauggcaa

SEQ ID NO: 2319690 - RNA, 19 nt, Homo sapiens
  misc_RNA (1)...(19): siRNA sense strand
gagacugaguuacaggcaa

SEQ ID NO: 2319691 - RNA, 19 nt, Homo sapiens
  misc_RNA (1)...(19): siRNA sense strand
gggcaaugggcuugugauc

SEQ ID NO: 2319692 - RNA, 19 nt, Homo sapiens
  misc_RNA (1)...(19): siRNA sense strand
ccuaugagucugcuggcua

SEQ ID NO: 2319693 - RNA, 19 nt, Homo sapiens
  misc_RNA (1)...(19): siRNA sense strand
gguccugggcaaugggcuu

SEQ ID NO: 2319694 - RNA, 19 nt, Homo sapiens
  misc_RNA (1)...(19): siRNA sense strand
aauaugaagaaguguccua

SEQ ID NO: 2319695 - RNA, 19 nt, Homo sapiens
  misc_RNA (1)...(19): siRNA sense strand
acaucgugguggacaucaa

SEQ ID NO: 2319696 - RNA, 19 nt, Homo sapiens
  misc_RNA (1)...(19): siRNA sense strand
ccuacaugaaccagagaaa

SEQ ID NO: 2319697 - RNA, 19 nt, Homo sapiens
  misc_RNA (1)...(19): siRNA sense strand
cgcaaggagcugcaggaaa

SEQ ID NO: 2319698 - RNA, 19 nt, Homo sapiens
  misc_RNA (1)...(19): siRNA sense strand
ugacagaagcuuuggugga

SEQ ID NO: 2319699 - RNA, 19 nt, Homo sapiens
  misc_RNA (1)...(19): siRNA sense strand
uaaaagaacaccaggccaa

SEQ ID NO: 2319700 - RNA, 19 nt, Homo sapiens
  misc_RNA (1)...(19): siRNA sense strand
ccaagcagaaugaacgcaa

SEQ ID NO: 2319701 - RNA, 19 nt, Homo sapiens
  misc_RNA (1)...(19): siRNA sense strand
agaggaggcgagaggcuau

SEQ ID NO: 2319702 - RNA, 19 nt, Homo sapiens
  misc_RNA (1)...(19): siRNA sense strand
agagagggcuccagaggca

SEQ ID NO: 2319703 - RNA, 19 nt, Homo sapiens
  misc_RNA (1)...(19): siRNA sense strand
gcaucagcuuugaccgcua

SEQ ID NO: 2319704 - RNA, 19 nt, Homo sapiens
  misc_RNA (1)...(19): siRNA sense strand
ggagaaaacgagagugacu

SEQ ID NO: 2319705 - RNA, 19 nt, Homo sapiens
  misc_RNA (1)...(19): siRNA sense strand
gcaggguagacguggccaa

SEQ ID NO: 2319706 - RNA, 19 nt, Homo sapiens
  misc_RNA (1)...(19): siRNA sense strand
uccuaugacuauggagaaa

SEQ ID NO: 2319707 - RNA, 19 nt, Homo sapiens
  misc_RNA (1)...(19): siRNA sense strand
ugguggugcugguggacau

SEQ ID NO: 2319708 - RNA, 19 nt, Homo sapiens
  misc_RNA (1)...(19): siRNA sense strand
ccaccuagcuguagcagac

SEQ ID NO: 2319709 - RNA, 19 nt, Homo sapiens
  misc_RNA (1)...(19): siRNA sense strand
gugaccaccaagugcuaaa

SEQ ID NO: 2319710 - RNA, 19 nt, Homo sapiens
  misc_RNA (1)...(19): siRNA sense strand
ggggagaccuucagggaca

SEQ ID NO: 2319711 - RNA, 19 nt, Homo sapiens
  misc_RNA (1)...(19): siRNA sense strand
ccaucggcuuugugggcaa

SEQ ID NO: 2319712 - RNA, 19 nt, Homo sapiens
  misc_RNA (1)...(19): siRNA sense strand
ggaugagcuucgaccgcua

SEQ ID NO: 2319713 - RNA, 19 nt, Homo sapiens
  misc_RNA (1)...(19): siRNA sense strand
acauagagacgcugggaaa

SEQ ID NO: 2319714 - RNA, 19 nt, Homo sapiens
  misc_RNA (1)...(19): siRNA sense strand
cggcaguaccaaagagaga

SEQ ID NO: 2319715 - RNA, 19 nt, Homo sapiens
  misc_RNA (1)...(19): siRNA sense strand
aagaagaucaagagaaaga

SEQ ID NO: 2319716 - RNA, 19 nt, Homo sapiens
  misc_RNA (1)...(19): siRNA sense strand
uggcuaugaaugugggaaa

SEQ ID NO: 2319717 - RNA, 19 nt, Homo sapiens
  misc_RNA (1)...(19): siRNA sense strand
agagaaagaagaaaggaga

SEQ ID NO: 2319718 - RNA, 19 nt, Homo sapiens
  misc_RNA (1)...(19): siRNA sense strand
aggcagaagaagacaguca

SEQ ID NO: 2319719 - RNA, 19 nt, Homo sapiens
  misc_RNA (1)...(19): siRNA sense strand
aggaaggucucuugcgauu

SEQ ID NO: 2319720 - RNA, 19 nt, Homo sapiens
  misc_RNA (1)...(19): siRNA sense strand
aagaagacagucaaggaaa

SEQ ID NO: 2319721 - RNA, 19 nt, Homo sapiens
  misc_RNA (1)...(19): siRNA sense strand
agaagacagucaaggaaaa

SEQ ID NO: 2319722 - RNA, 19 nt, Homo sapiens
  misc_RNA (1)...(19): siRNA sense strand
ccgagguguaccaggauaa

SEQ ID NO: 2319723 - RNA, 19 nt, Homo sapiens
  misc_RNA (1)...(19): siRNA sense strand
cagcucaggccaagacaaa

SEQ ID NO: 2319724 - RNA, 19 nt, Homo sapiens
  misc_RNA (1)...(19): siRNA sense strand
gaaucgaagaggugacuau

SEQ ID NO: 2319725 - RNA, 19 nt, Homo sapiens
  misc_RNA (1)...(19): siRNA sense strand
agaucaagagaaagaagaa

SEQ ID NO: 2319726 - RNA, 19 nt, Homo sapiens
  misc_RNA (1)...(19): siRNA sense strand
aggaagaccaagagggugu

SEQ ID NO: 2319727 - RNA, 19 nt, Homo sapiens
  misc_RNA (1)...(19): siRNA sense strand
cgggaaagggacugugaga

SEQ ID NO: 2319728 - RNA, 19 nt, Homo sapiens
  misc_RNA (1)...(19): siRNA sense strand
ccagcaacaccguggagaa

SEQ ID NO: 2319729 - RNA, 19 nt, Homo sapiens
  misc_RNA (1)...(19): siRNA sense strand
cagugaacggagaacgaua

SEQ ID NO: 2319730 - RNA, 19 nt, Homo sapiens
  misc_RNA (1)...(19): siRNA sense strand
aggcagagggucccagaaa

SEQ ID NO: 2319731 - RNA, 19 nt, Homo sapiens
  misc_RNA (1)...(19): siRNA sense strand
cuucagaggcugugcuaca

SEQ ID NO: 2319732 - RNA, 19 nt, Homo sapiens
  misc_RNA (1)...(19): siRNA sense strand
agcacaaccuggagcgcaa

SEQ ID NO: 2319733 - RNA, 19 nt, Homo sapiens
  misc_RNA (1)...(19): siRNA sense strand
guacaaugguggaacccuu

SEQ ID NO: 2319734 - RNA, 19 nt, Homo sapiens
  misc_RNA (1)...(19): siRNA sense strand
gagagugaggggugggaaa

SEQ ID NO: 2319735 - RNA, 19 nt, Homo sapiens
  misc_RNA (1)...(19): siRNA sense strand
ggaaaagccagaagcggaa

SEQ ID NO: 2319736 - RNA, 19 nt, Homo sapiens
  misc_RNA (1)...(19): siRNA sense strand
gaucaagagaaagaagaaa

SEQ ID NO: 2319737 - RNA, 19 nt, Homo sapiens
  misc_RNA (1)...(19): siRNA sense strand
guggacaggaggagcaaau

SEQ ID NO: 2319738 - RNA, 19 nt, Homo sapiens
  misc_RNA (1)...(19): siRNA sense strand
cggacuaaccacauagaga

SEQ ID NO: 2319739 - RNA, 19 nt, Homo sapiens
  misc_RNA (1)...(19): siRNA sense strand
ugaaggaauuuaaacggaa

SEQ ID NO: 2319740 - RNA, 19 nt, Homo sapiens
  misc_RNA (1)...(19): siRNA sense strand
gggaaaacuagaagcaaga

SEQ ID NO: 2319741 - RNA, 19 nt, Homo sapiens
  misc_RNA (1)...(19): siRNA sense strand
ccaaaggagaguagcaguu

SEQ ID NO: 2319742 - RNA, 19 nt, Homo sapiens
  misc_RNA (1)...(19): siRNA sense strand
ucauagaagcugucaccaa

SEQ ID NO: 2319743 - RNA, 19 nt, Homo sapiens
  misc_RNA (1)...(19): siRNA sense strand
gcgccauggacaagcacaa

SEQ ID NO: 2319744 - RNA, 19 nt, Homo sapiens
  misc_RNA (1)...(19): siRNA sense strand
cagaagaggagcuugguca

SEQ ID NO: 2319745 - RNA, 19 nt, Homo sapiens
  misc_RNA (1)...(19): siRNA sense strand
gcuacuuuaaggagaggaa

SEQ ID NO: 2319746 - RNA, 19 nt, Homo sapiens
  misc_RNA (1)...(19): siRNA sense strand
cagcaagcggagaggcaga

SEQ ID NO: 2319747 - RNA, 19 nt, Homo sapiens
  misc_RNA (1)...(19): siRNA sense strand
caggaaagaggaugaacuu

SEQ ID NO: 2319748 - RNA, 19 nt, Homo sapiens
  misc_RNA (1)...(19): siRNA sense strand
ggagaguucccaggagaaa

SEQ ID NO: 2319749 - RNA, 19 nt, Homo sapiens
  misc_RNA (1)...(19): siRNA sense strand
gccaacgaguuuaaagaau

SEQ ID NO: 2319750 - RNA, 19 nt, Homo sapiens
  misc_RNA (1)...(19): siRNA sense strand
gcugaaagacagagaagac

SEQ ID NO: 2319751 - RNA, 19 nt, Homo sapiens
  misc_RNA (1)...(19): siRNA sense strand
acgacauccucauggagaa

SEQ ID NO: 2319752 - RNA, 19 nt, Homo sapiens
  misc_RNA (1)...(19): siRNA sense strand
uggagaagcuuucggucau

SEQ ID NO: 2319753 - RNA, 19 nt, Homo sapiens
  misc_RNA (1)...(19): siRNA sense strand
caaugcaggauguggaaaa

SEQ ID NO: 2319754 - RNA, 19 nt, Homo sapiens
  misc_RNA (1)...(19): siRNA sense strand
aguuugagguggaccgaga

SEQ ID NO: 2319755 - RNA, 19 nt, Homo sapiens
  misc_RNA (1)...(19): siRNA sense strand
acgccgacauccagagaga

SEQ ID NO: 2319756 - RNA, 19 nt, Homo sapiens
  misc_RNA (1)...(19): siRNA sense strand
ccuugaaaucccagacaca

SEQ ID NO: 2319757 - RNA, 19 nt, Homo sapiens
  misc_RNA (1)...(19): siRNA sense strand
uggaggaugacgaggauga

SEQ ID NO: 2319758 - RNA, 19 nt, Homo sapiens
  misc_RNA (1)...(19): siRNA sense strand
gagcuggggcugugcgaaa

SEQ ID NO: 2319759 - RNA, 19 nt, Homo sapiens
  misc_RNA (1)...(19): siRNA sense strand
caguuuggucccacggaaa

SEQ ID NO: 2319760 - RNA, 19 nt, Homo sapiens
  misc_RNA (1)...(19): siRNA sense strand
acgaggaugaagaggauga

SEQ ID NO: 2319761 - RNA, 19 nt, Homo sapiens
  misc_RNA (1)...(19): siRNA sense strand
ucaagggauucauggaaga

SEQ ID NO: 2319762 - RNA, 19 nt, Homo sapiens
  misc_RNA (1)...(19): siRNA sense strand
cagaaagacacaagagccu

SEQ ID NO: 2319763 - RNA, 19 nt, Homo sapiens
  misc_RNA (1)...(19): siRNA sense strand
agggacagccucuuagaua

SEQ ID NO: 2319764 - RNA, 19 nt, Homo sapiens
  misc_RNA (1)...(19): siRNA sense strand
cugaagacugggaggcaca

SEQ ID NO: 2319765 - RNA, 19 nt, Homo sapiens
  misc_RNA (1)...(19): siRNA sense strand
aggagagcgccauggacaa

SEQ ID NO: 2319766 - RNA, 19 nt, Homo sapiens
  misc_RNA (1)...(19): siRNA sense strand
aaaccaggaaagaggauga

SEQ ID NO: 2319767 - RNA, 19 nt, Homo sapiens
  misc_RNA (1)...(19): siRNA sense strand
acgacagcauuguggucaa

SEQ ID NO: 2319768 - RNA, 19 nt, Homo sapiens
  misc_RNA (1)...(19): siRNA sense strand
agacaaaccacacgaaacu

SEQ ID NO: 2319769 - RNA, 19 nt, Homo sapiens
  misc_RNA (1)...(19): siRNA sense strand
acggacaccucaagcgcaa

SEQ ID NO: 2319770 - RNA, 19 nt, Homo sapiens
  misc_RNA (1)...(19): siRNA sense strand
gggaaaagccagaagcgga

SEQ ID NO: 2319771 - RNA, 19 nt, Homo sapiens
  misc_RNA (1)...(19): siRNA sense strand
caaacgacaugguggccuu

SEQ ID NO: 2319772 - RNA, 19 nt, Homo sapiens
  misc_RNA (1)...(19): siRNA sense strand
ggacauucgcagauugcau

SEQ ID NO: 2319773 - RNA, 19 nt, Homo sapiens
  misc_RNA (1)...(19): siRNA sense strand
cugaaauccgaguggcuau

SEQ ID NO: 2319774 - RNA, 19 nt, Homo sapiens
  misc_RNA (1)...(19): siRNA sense strand
ggagaacgauaaagcagga

SEQ ID NO: 2319775 - RNA, 19 nt, Homo sapiens
  misc_RNA (1)...(19): siRNA sense strand
gagaagacgccgacaucca

SEQ ID NO: 2319776 - RNA, 19 nt, Homo sapiens
  misc_RNA (1)...(19): siRNA sense strand
cugugaggacuguggauaa

SEQ ID NO: 2319777 - RNA, 19 nt, Homo sapiens
  misc_RNA (1)...(19): siRNA sense strand
agggcaaguuccaggcauu

SEQ ID NO: 2319778 - RNA, 19 nt, Homo sapiens
  misc_RNA (1)...(19): siRNA sense strand
gagaaggccuccugccaga

SEQ ID NO: 2319779 - RNA, 19 nt, Homo sapiens
  misc_RNA (1)...(19): siRNA sense strand
acacagaggucaaugaggu

SEQ ID NO: 2319780 - RNA, 19 nt, Homo sapiens
  misc_RNA (1)...(19): siRNA sense strand
ggaacuugauggagggaga

SEQ ID NO: 2319781 - RNA, 19 nt, Homo sapiens
  misc_RNA (1)...(19): siRNA sense strand
aaaucaagggagaaagaaa

SEQ ID NO: 2319782 - RNA, 19 nt, Homo sapiens
  misc_RNA (1)...(19): siRNA sense strand
uugaagaagccuuggagaa

SEQ ID NO: 2319783 - RNA, 19 nt, Homo sapiens
  misc_RNA (1)...(19): siRNA sense strand
gguuaaaguguggaggaaa

SEQ ID NO: 2319784 - RNA, 19 nt, Homo sapiens
  misc_RNA (1)...(19): siRNA sense strand
cgguuaaaguguggaggaa

SEQ ID NO: 2319785 - RNA, 19 nt, Homo sapiens
  misc_RNA (1)...(19): siRNA sense strand
gggugcugcuauagggcaa

SEQ ID NO: 2319786 - RNA, 19 nt, Homo sapiens
  misc_RNA (1)...(19): siRNA sense strand
aaccagaaaucaagggaga

SEQ ID NO: 2319787 - RNA, 19 nt, Homo sapiens
  misc_RNA (1)...(19): siRNA sense strand
ucauaagaugcgugaagaa

SEQ ID NO: 2319788 - RNA, 19 nt, Homo sapiens
  misc_RNA (1)...(19): siRNA sense strand
aauaagaauuccuuggaga

SEQ ID NO: 2319789 - RNA, 19 nt, Homo sapiens
  misc_RNA (1)...(19): siRNA sense strand
gggagaaagaaaagaugaa

SEQ ID NO: 2319790 - RNA, 19 nt, Homo sapiens
  misc_RNA (1)...(19): siRNA sense strand
aaaugaagugugaagacaa

SEQ ID NO: 2319791 - RNA, 19 nt, Homo sapiens
  misc_RNA (1)...(19): siRNA sense strand
gaagaaaagaugagccaga

SEQ ID NO: 2319792 - RNA, 19 nt, Homo sapiens
  misc_RNA (1)...(19): siRNA sense strand
gugaagaaggugaagagga

SEQ ID NO: 2319793 - RNA, 19 nt, Homo sapiens
  misc_RNA (1)...(19): siRNA sense strand
ggagagcagccuacggcaa

SEQ ID NO: 2319794 - RNA, 19 nt, Homo sapiens
  misc_RNA (1)...(19): siRNA sense strand
agagaaguuaguugaagaa

SEQ ID NO: 2319795 - RNA, 19 nt, Homo sapiens
  misc_RNA (1)...(19): siRNA sense strand
uugagaaggcucuggaaaa

SEQ ID NO: 2319796 - RNA, 19 nt, Homo sapiens
  misc_RNA (1)...(19): siRNA sense strand
aaucaagggagaaagaaaa

SEQ ID NO: 2319797 - RNA, 19 nt, Homo sapiens
  misc_RNA (1)...(19): siRNA sense strand
ccuggaaugcuuacguaaa

SEQ ID NO: 2319798 - RNA, 19 nt, Homo sapiens
  misc_RNA (1)...(19): siRNA sense strand
ugaaagacaaacugcaaaa

SEQ ID NO: 2319799 - RNA, 19 nt, Homo sapiens
  misc_RNA (1)...(19): siRNA sense strand
aauugagaguccagagcuu

SEQ ID NO: 2319800 - RNA, 19 nt, Homo sapiens
  misc_RNA (1)...(19): siRNA sense strand
ggaaggugaaggagagaag

SEQ ID NO: 2319801 - RNA, 19 nt, Homo sapiens
  misc_RNA (1)...(19): siRNA sense strand
aggugaagaggaaggugaa

SEQ ID NO: 2319802 - RNA, 19 nt, Homo sapiens
  misc_RNA (1)...(19): siRNA sense strand
agaaagcugaugaggccaa

SEQ ID NO: 2319803 - RNA, 19 nt, Homo sapiens
  misc_RNA (1)...(19): siRNA sense strand
aagaggaaggugaaggaga

SEQ ID NO: 2319804 - RNA, 19 nt, Homo sapiens
  misc_RNA (1)...(19): siRNA sense strand
gagugagaacaauaagaau

SEQ ID NO: 2319805 - RNA, 19 nt, Homo sapiens
  misc_RNA (1)...(19): siRNA sense strand
ugaugaggccaaugauaau

SEQ ID NO: 2319806 - RNA, 19 nt, Homo sapiens
  misc_RNA (1)...(19): siRNA sense strand
agagcuugacugugaggaa

SEQ ID NO: 2319807 - RNA, 19 nt, Homo sapiens
  misc_RNA (1)...(19): siRNA sense strand
ccaaaaggaauucaguaaa

SEQ ID NO: 2319808 - RNA, 19 nt, Homo sapiens
  misc_RNA (1)...(19): siRNA sense strand
gggaauggagaauagagau

SEQ ID NO: 2319809 - RNA, 19 nt, Homo sapiens
  misc_RNA (1)...(19): siRNA sense strand
aaucuaagagagaauggaa

SEQ ID NO: 2319810 - RNA, 19 nt, Homo sapiens
  misc_RNA (1)...(19): siRNA sense strand
gaagaaagcugaugaggcc

SEQ ID NO: 2319811 - RNA, 19 nt, Homo sapiens
  misc_RNA (1)...(19): siRNA sense strand
uccaaaaggaauucaguaa

SEQ ID NO: 2319812 - RNA, 19 nt, Homo sapiens
  misc_RNA (1)...(19): siRNA sense strand
cugacaaccaguaccuuaa

SEQ ID NO: 2319813 - RNA, 19 nt, Homo sapiens
  misc_RNA (1)...(19): siRNA sense strand
ugugcaaccuacuggccua

SEQ ID NO: 2319814 - RNA, 19 nt, Homo sapiens
  misc_RNA (1)...(19): siRNA sense strand
aggugaaggagagaaguua

SEQ ID NO: 2319815 - RNA, 19 nt, Homo sapiens
  misc_RNA (1)...(19): siRNA sense strand
augaaagacaaacugcaaa

SEQ ID NO: 2319816 - RNA, 19 nt, Homo sapiens
  misc_RNA (1)...(19): siRNA sense strand
uggaugauuuugaagacaa

SEQ ID NO: 2319817 - RNA, 19 nt, Homo sapiens
  misc_RNA (1)...(19): siRNA sense strand
cugacaaggacgaggguga

SEQ ID NO: 2319818 - RNA, 19 nt, Homo sapiens
  misc_RNA (1)...(19): siRNA sense strand
ggggcaagaugaaggucaa

SEQ ID NO: 2319819 - RNA, 19 nt, Homo sapiens
  misc_RNA (1)...(19): siRNA sense strand
ggaagauaugaaagaggaa

SEQ ID NO: 2319820 - RNA, 19 nt, Homo sapiens
  misc_RNA (1)...(19): siRNA sense strand
ucacagaggagguggacau

SEQ ID NO: 2319821 - RNA, 19 nt, Homo sapiens
  misc_RNA (1)...(19): siRNA sense strand
ugaagaggcacaagggcaa

SEQ ID NO: 2319822 - RNA, 19 nt, Homo sapiens
  misc_RNA (1)...(19): siRNA sense strand
acaugaaggagauggagaa

SEQ ID NO: 2319823 - RNA, 19 nt, Homo sapiens
  misc_RNA (1)...(19): siRNA sense strand
aggcagaugugaagggcca

SEQ ID NO: 2319824 - RNA, 19 nt, Homo sapiens
  misc_RNA (1)...(19): siRNA sense strand
gggacuacaucuucgggaa

SEQ ID NO: 2319825 - RNA, 19 nt, Homo sapiens
  misc_RNA (1)...(19): siRNA sense strand
gcuuuaaggcagaugugaa

SEQ ID NO: 2319826 - RNA, 19 nt, Homo sapiens
  misc_RNA (1)...(19): siRNA sense strand
cugggaaugucaaggagaa

SEQ ID NO: 2319827 - RNA, 19 nt, Homo sapiens
  misc_RNA (1)...(19): siRNA sense strand
acuuugagaucgagguaga

SEQ ID NO: 2319828 - RNA, 19 nt, Homo sapiens
  misc_RNA (1)...(19): siRNA sense strand
ccacauggaaagagcacuu

SEQ ID NO: 2319829 - RNA, 19 nt, Homo sapiens
  misc_RNA (1)...(19): siRNA sense strand
ggaaagagcacuuagucca

SEQ ID NO: 2319830 - RNA, 19 nt, Homo sapiens
  misc_RNA (1)...(19): siRNA sense strand
auaugaaagaggaagacua

SEQ ID NO: 2319831 - RNA, 19 nt, Homo sapiens
  misc_RNA (1)...(19): siRNA sense strand
gaacaaggcccgagaggag

SEQ ID NO: 2319832 - RNA, 19 nt, Homo sapiens
  misc_RNA (1)...(19): siRNA sense strand
aggauaaaggaaugaccaa

SEQ ID NO: 2319833 - RNA, 19 nt, Homo sapiens
  misc_RNA (1)...(19): siRNA sense strand
agaacauggcccuggagaa

SEQ ID NO: 2319834 - RNA, 19 nt, Homo sapiens
  misc_RNA (1)...(19): siRNA sense strand
aagauaugaaagaggaaga

SEQ ID NO: 2319835 - RNA, 19 nt, Homo sapiens
  misc_RNA (1)...(19): siRNA sense strand
auuauaacuuccuggagaa

SEQ ID NO: 2319836 - RNA, 19 nt, Homo sapiens
  misc_RNA (1)...(19): siRNA sense strand
ggaauuacauugagcggcu

SEQ ID NO: 2319837 - RNA, 19 nt, Homo sapiens
  misc_RNA (1)...(19): siRNA sense strand
aauuauaacuuccuggaga

SEQ ID NO: 2319838 - RNA, 19 nt, Homo sapiens
  misc_RNA (1)...(19): siRNA sense strand
ucuaugaggagguggccaa

SEQ ID NO: 2319839 - RNA, 19 nt, Homo sapiens
  misc_RNA (1)...(19): siRNA sense strand
ggaagaugcagaagccaca

SEQ ID NO: 2319840 - RNA, 19 nt, Homo sapiens
  misc_RNA (1)...(19): siRNA sense strand
aggagaaggaaguugccaa

SEQ ID NO: 2319841 - RNA, 19 nt, Homo sapiens
  misc_RNA (1)...(19): siRNA sense strand
agggcaaguacgagaugua

SEQ ID NO: 2319842 - RNA, 19 nt, Homo sapiens
  misc_RNA (1)...(19): siRNA sense strand
ucuucgagccucagggaau

SEQ ID NO: 2319843 - RNA, 19 nt, Homo sapiens
  misc_RNA (1)...(19): siRNA sense strand
cugaggacaacgaggauga

SEQ ID NO: 2319844 - RNA, 19 nt, Homo sapiens
  misc_RNA (1)...(19): siRNA sense strand
ggaagaacaugguggucuc

SEQ ID NO: 2319845 - RNA, 19 nt, Homo sapiens
  misc_RNA (1)...(19): siRNA sense strand
aggcugugucccagggcaa

SEQ ID NO: 2319846 - RNA, 19 nt, Homo sapiens
  misc_RNA (1)...(19): siRNA sense strand
caacagcguucaugcccaa

SEQ ID NO: 2319847 - RNA, 19 nt, Homo sapiens
  misc_RNA (1)...(19): siRNA sense strand
uccaagagaaugugcggaa

SEQ ID NO: 2319848 - RNA, 19 nt, Homo sapiens
  misc_RNA (1)...(19): siRNA sense strand
auaacuuccuggagaacau

SEQ ID NO: 2319849 - RNA, 19 nt, Homo sapiens
  misc_RNA (1)...(19): siRNA sense strand
cugaagaggcacaagggca

SEQ ID NO: 2319850 - RNA, 19 nt, Homo sapiens
  misc_RNA (1)...(19): siRNA sense strand
gcacagaaucccagagagg

SEQ ID NO: 2319851 - RNA, 19 nt, Homo sapiens
  misc_RNA (1)...(19): siRNA sense strand
uccaaauuccggagaaaga

SEQ ID NO: 2319852 - RNA, 19 nt, Homo sapiens
  misc_RNA (1)...(19): siRNA sense strand
ggaaugucaaggagaagga

SEQ ID NO: 2319853 - RNA, 19 nt, Homo sapiens
  misc_RNA (1)...(19): siRNA sense strand
ccaacgaccuccugggaag

SEQ ID NO: 2319854 - RNA, 19 nt, Homo sapiens
  misc_RNA (1)...(19): siRNA sense strand
cggaaauuagagcagacaa

SEQ ID NO: 2319855 - RNA, 19 nt, Homo sapiens
  misc_RNA (1)...(19): siRNA sense strand
gcgaggagaaggagaaccu

SEQ ID NO: 2319856 - RNA, 19 nt, Homo sapiens
  misc_RNA (1)...(19): siRNA sense strand
uggaagauaugaaagagga

SEQ ID NO: 2319857 - RNA, 19 nt, Homo sapiens
  misc_RNA (1)...(19): siRNA sense strand
cgaugaagccccaggcaca

SEQ ID NO: 2319858 - RNA, 19 nt, Homo sapiens
  misc_RNA (1)...(19): siRNA sense strand
agguggacaugaaggagau

SEQ ID NO: 2319859 - RNA, 19 nt, Homo sapiens
  misc_RNA (1)...(19): siRNA sense strand
gugaagaaccaucagcuga

SEQ ID NO: 2319860 - RNA, 19 nt, Homo sapiens
  misc_RNA (1)...(19): siRNA sense strand
ugaacagcuuuaaggcaga

SEQ ID NO: 2319861 - RNA, 19 nt, Homo sapiens
  misc_RNA (1)...(19): siRNA sense strand
gugacaacggagaagauca

SEQ ID NO: 2319862 - RNA, 19 nt, Homo sapiens
  misc_RNA (1)...(19): siRNA sense strand
ccacaaagccagaugccac

SEQ ID NO: 2319863 - RNA, 19 nt, Homo sapiens
  misc_RNA (1)...(19): siRNA sense strand
gcagauagucaauggcuac

SEQ ID NO: 2319864 - RNA, 19 nt, Homo sapiens
  misc_RNA (1)...(19): siRNA sense strand
acuacaucuucgggaauua

SEQ ID NO: 2319865 - RNA, 19 nt, Homo sapiens
  misc_RNA (1)...(19): siRNA sense strand
gggcagaucacuggcgaca

SEQ ID NO: 2319866 - RNA, 19 nt, Homo sapiens
  misc_RNA (1)...(19): siRNA sense strand
ccuacgaggagcugcugaa

SEQ ID NO: 2319867 - RNA, 19 nt, Homo sapiens
  misc_RNA (1)...(19): siRNA sense strand
gagguggacaugaaggaga

SEQ ID NO: 2319868 - RNA, 19 nt, Homo sapiens
  misc_RNA (1)...(19): siRNA sense strand
agccuaagcaacuggucaa

SEQ ID NO: 2319869 - RNA, 19 nt, Homo sapiens
  misc_RNA (1)...(19): siRNA sense strand
cccgagaggagcacagaau

SEQ ID NO: 2319870 - RNA, 19 nt, Homo sapiens
  misc_RNA (1)...(19): siRNA sense strand
cggguguggagauggagua

SEQ ID NO: 2319871 - RNA, 19 nt, Homo sapiens
  misc_RNA (1)...(19): siRNA sense strand
gcaacgugcagauagucaa

SEQ ID NO: 2319872 - RNA, 19 nt, Homo sapiens
  misc_RNA (1)...(19): siRNA sense strand
ccaagagaaugugcggaau

SEQ ID NO: 2319873 - RNA, 19 nt, Homo sapiens
  misc_RNA (1)...(19): siRNA sense strand
gcugguucguccacaacaa

SEQ ID NO: 2319874 - RNA, 19 nt, Homo sapiens
  misc_RNA (1)...(19): siRNA sense strand
aggaaguugccaagaagca

SEQ ID NO: 2319875 - RNA, 19 nt, Homo sapiens
  misc_RNA (1)...(19): siRNA sense strand
gagaaugugcggaaugcca

SEQ ID NO: 2319876 - RNA, 19 nt, Homo sapiens
  misc_RNA (1)...(19): siRNA sense strand
ccaccaacgaccugaccuu

SEQ ID NO: 2319877 - RNA, 19 nt, Homo sapiens
  misc_RNA (1)...(19): siRNA sense strand
gacaugaaggagauggaga

SEQ ID NO: 2319878 - RNA, 19 nt, Homo sapiens
  misc_RNA (1)...(19): siRNA sense strand
cgaaaggagaagagaauaa

SEQ ID NO: 2319879 - RNA, 19 nt, Homo sapiens
  misc_RNA (1)...(19): siRNA sense strand
ugucaaggcagaagggaaa

SEQ ID NO: 2319880 - RNA, 19 nt, Homo sapiens
  misc_RNA (1)...(19): siRNA sense strand
cagcaagacuacaggaaga

SEQ ID NO: 2319881 - RNA, 19 nt, Homo sapiens
  misc_RNA (1)...(19): siRNA sense strand
gcugaagaucauugagaua

SEQ ID NO: 2319882 - RNA, 19 nt, Homo sapiens
  misc_RNA (1)...(19): siRNA sense strand
gcugaaaccugguggccaa

SEQ ID NO: 2319883 - RNA, 19 nt, Homo sapiens
  misc_RNA (1)...(19): siRNA sense strand
agauaagaagucagagaaa

SEQ ID NO: 2319884 - RNA, 19 nt, Homo sapiens
  misc_RNA (1)...(19): siRNA sense strand
ccgaaaucgucaugaguau

SEQ ID NO: 2319885 - RNA, 19 nt, Homo sapiens
  misc_RNA (1)...(19): siRNA sense strand
caaaggaagcagaaacaaa

SEQ ID NO: 2319886 - RNA, 19 nt, Homo sapiens
  misc_RNA (1)...(19): siRNA sense strand
caggagaagacgaggaaga

SEQ ID NO: 2319887 - RNA, 19 nt, Homo sapiens
  misc_RNA (1)...(19): siRNA sense strand
ccuaagaaauucagagacu

SEQ ID NO: 2319888 - RNA, 19 nt, Homo sapiens
  misc_RNA (1)...(19): siRNA sense strand
ggcgaaaggagaagagaau

SEQ ID NO: 2319889 - RNA, 19 nt, Homo sapiens
  misc_RNA (1)...(19): siRNA sense strand
agaaagacgaugagguaga

SEQ ID NO: 2319890 - RNA, 19 nt, Homo sapiens
  misc_RNA (1)...(19): siRNA sense strand
aagcagaaugagacagaaa

SEQ ID NO: 2319891 - RNA, 19 nt, Homo sapiens
  misc_RNA (1)...(19): siRNA sense strand
agaaaacggaggagggaaa

SEQ ID NO: 2319892 - RNA, 19 nt, Homo sapiens
  misc_RNA (1)...(19): siRNA sense strand
ccaagaugcaagagauaau

SEQ ID NO: 2319893 - RNA, 19 nt, Homo sapiens
  misc_RNA (1)...(19): siRNA sense strand
gaagauaagaagucagaga

SEQ ID NO: 2319894 - RNA, 19 nt, Homo sapiens
  misc_RNA (1)...(19): siRNA sense strand
gcaagaaaucaaagcaaca

SEQ ID NO: 2319895 - RNA, 19 nt, Homo sapiens
  misc_RNA (1)...(19): siRNA sense strand
ggacagcaacaaagagauu

SEQ ID NO: 2319896 - RNA, 19 nt, Homo sapiens
  misc_RNA (1)...(19): siRNA sense strand
gcuacagggugcugagaca

SEQ ID NO: 2319897 - RNA, 19 nt, Homo sapiens
  misc_RNA (1)...(19): siRNA sense strand
auacugggccugagaguua

SEQ ID NO: 2319898 - RNA, 19 nt, Homo sapiens
  misc_RNA (1)...(19): siRNA sense strand
ggagcaggguauuggaaca

SEQ ID NO: 2319899 - RNA, 19 nt, Homo sapiens
  misc_RNA (1)...(19): siRNA sense strand
auaucaauccuuugggaaa

SEQ ID NO: 2319900 - RNA, 19 nt, Homo sapiens
  misc_RNA (1)...(19): siRNA sense strand
gccagaaggaaaugugaaa

SEQ ID NO: 2319901 - RNA, 19 nt, Homo sapiens
  misc_RNA (1)...(19): siRNA sense strand
ccuacauauuggagacauu

SEQ ID NO: 2319902 - RNA, 19 nt, Homo sapiens
  misc_RNA (1)...(19): siRNA sense strand
ggguggaguaggagaugua

SEQ ID NO: 2319903 - RNA, 19 nt, Homo sapiens
  misc_RNA (1)...(19): siRNA sense strand
aaucaaagcaacagugaca

SEQ ID NO: 2319904 - RNA, 19 nt, Homo sapiens
  misc_RNA (1)...(19): siRNA sense strand
cagaaaugaucaaggaaag

SEQ ID NO: 2319905 - RNA, 19 nt, Homo sapiens
  misc_RNA (1)...(19): siRNA sense strand
caacagagaacggcagaaa

SEQ ID NO: 2319906 - RNA, 19 nt, Homo sapiens
  misc_RNA (1)...(19): siRNA sense strand
cagcaagaaaucaaagcaa

SEQ ID NO: 2319907 - RNA, 19 nt, Homo sapiens
  misc_RNA (1)...(19): siRNA sense strand
cugcaauacaagcuggaaa

SEQ ID NO: 2319908 - RNA, 19 nt, Homo sapiens
  misc_RNA (1)...(19): siRNA sense strand
acaccaagcugaagaucau

SEQ ID NO: 2319909 - RNA, 19 nt, Homo sapiens
  misc_RNA (1)...(19): siRNA sense strand
cggaauguccaguauauaa

SEQ ID NO: 2319910 - RNA, 19 nt, Homo sapiens
  misc_RNA (1)...(19): siRNA sense strand
caugcaaggugaaguggaa

SEQ ID NO: 2319911 - RNA, 19 nt, Homo sapiens
  misc_RNA (1)...(19): siRNA sense strand
agcaagagugugagggaau

SEQ ID NO: 2319912 - RNA, 19 nt, Homo sapiens
  misc_RNA (1)...(19): siRNA sense strand
ggucaauucgggagaggau

SEQ ID NO: 2319913 - RNA, 19 nt, Homo sapiens
  misc_RNA (1)...(19): siRNA sense strand
ccaaguggacggagaugaa

SEQ ID NO: 2319914 - RNA, 19 nt, Homo sapiens
  misc_RNA (1)...(19): siRNA sense strand
ccggaauaucauugagaga

SEQ ID NO: 2319915 - RNA, 19 nt, Homo sapiens
  misc_RNA (1)...(19): siRNA sense strand
uaacaauccaccuaagaaa

SEQ ID NO: 2319916 - RNA, 19 nt, Homo sapiens
  misc_RNA (1)...(19): siRNA sense strand
aaugaaaggaggucuguaa

SEQ ID NO: 2319917 - RNA, 19 nt, Homo sapiens
  misc_RNA (1)...(19): siRNA sense strand
gcaagauggcgaaaggaga

SEQ ID NO: 2319918 - RNA, 19 nt, Homo sapiens
  misc_RNA (1)...(19): siRNA sense strand
guggaaauuguuugagaau

SEQ ID NO: 2319919 - RNA, 19 nt, Homo sapiens
  misc_RNA (1)...(19): siRNA sense strand
caacacuagugacaggaaa

SEQ ID NO: 2319920 - RNA, 19 nt, Homo sapiens
  misc_RNA (1)...(19): siRNA sense strand
ccgaacaauggaacagaua

SEQ ID NO: 2319921 - RNA, 19 nt, Homo sapiens
  misc_RNA (1)...(19): siRNA sense strand
ccauggaguuuguggagga

SEQ ID NO: 2319922 - RNA, 19 nt, Homo sapiens
  misc_RNA (1)...(19): siRNA sense strand
caagauggcgaaaggagaa

SEQ ID NO: 2319923 - RNA, 19 nt, Homo sapiens
  misc_RNA (1)...(19): siRNA sense strand
gugaaaacgcagagaggau

SEQ ID NO: 2319924 - RNA, 19 nt, Homo sapiens
  misc_RNA (1)...(19): siRNA sense strand
gaaaagaagcagaaugaga

SEQ ID NO: 2319925 - RNA, 19 nt, Homo sapiens
  misc_RNA (1)...(19): siRNA sense strand
cagcagagguggacccuga

SEQ ID NO: 2319926 - RNA, 19 nt, Homo sapiens
  misc_RNA (1)...(19): siRNA sense strand
acaccagugacuugggaaa

SEQ ID NO: 2319927 - RNA, 19 nt, Homo sapiens
  misc_RNA (1)...(19): siRNA sense strand
ccgacaaggccaaggacga

SEQ ID NO: 2319928 - RNA, 19 nt, Homo sapiens
  misc_RNA (1)...(19): siRNA sense strand
gaacaauggaacagauagu

SEQ ID NO: 2319929 - RNA, 19 nt, Homo sapiens
  misc_RNA (1)...(19): siRNA sense strand
aagaaugccaugagaguca

SEQ ID NO: 2319930 - RNA, 19 nt, Homo sapiens
  misc_RNA (1)...(19): siRNA sense strand
uggaguuuguggaggagua

SEQ ID NO: 2319931 - RNA, 19 nt, Homo sapiens
  misc_RNA (1)...(19): siRNA sense strand
uuacuauacuacagagaga

SEQ ID NO: 2319932 - RNA, 19 nt, Homo sapiens
  misc_RNA (1)...(19): siRNA sense strand
ugaaauggagugauaacaa

SEQ ID NO: 2319933 - RNA, 19 nt, Homo sapiens
  misc_RNA (1)...(19): siRNA sense strand
cagaguggucaaagagauu

SEQ ID NO: 2319934 - RNA, 19 nt, Homo sapiens
  misc_RNA (1)...(19): siRNA sense strand
cagaagagguccgggauca

SEQ ID NO: 2319935 - RNA, 19 nt, Homo sapiens
  misc_RNA (1)...(19): siRNA sense strand
ggaauuugaggauggagaa

SEQ ID NO: 2319936 - RNA, 19 nt, Homo sapiens
  misc_RNA (1)...(19): siRNA sense strand
ggaucagaugacagaacaa

SEQ ID NO: 2319937 - RNA, 19 nt, Homo sapiens
  misc_RNA (1)...(19): siRNA sense strand
cuaaagaagggcagaagga

SEQ ID NO: 2319938 - RNA, 19 nt, Homo sapiens
  misc_RNA (1)...(19): siRNA sense strand
cuggaaagucugaccgaau

SEQ ID NO: 2319939 - RNA, 19 nt, Homo sapiens
  misc_RNA (1)...(19): siRNA sense strand
gaacaaaggaagcagaaac

SEQ ID NO: 2319940 - RNA, 19 nt, Homo sapiens
  misc_RNA (1)...(19): siRNA sense strand
gcuaugauguguuggcuga

SEQ ID NO: 2319941 - RNA, 19 nt, Homo sapiens
  misc_RNA (1)...(19): siRNA sense strand
ccaagaagggccaaguaau

SEQ ID NO: 2319942 - RNA, 19 nt, Homo sapiens
  misc_RNA (1)...(19): siRNA sense strand
ugaacacauugaagaacaa

SEQ ID NO: 2319943 - RNA, 19 nt, Homo sapiens
  misc_RNA (1)...(19): siRNA sense strand
agucaaagauaccggagga

SEQ ID NO: 2319944 - RNA, 19 nt, Homo sapiens
  misc_RNA (1)...(19): siRNA sense strand
gaaauaugccaaaggagga

SEQ ID NO: 2319945 - RNA, 19 nt, Homo sapiens
  misc_RNA (1)...(19): siRNA sense strand
uaucaaaucaagauggaga

SEQ ID NO: 2319946 - RNA, 19 nt, Homo sapiens
  misc_RNA (1)...(19): siRNA sense strand
cagcaaugcaggagggcac

SEQ ID NO: 2319947 - RNA, 19 nt, Homo sapiens
  misc_RNA (1)...(19): siRNA sense strand
uggcugagaugaaugguga

SEQ ID NO: 2319948 - RNA, 19 nt, Homo sapiens
  misc_RNA (1)...(19): siRNA sense strand
ccaucaaguccucuggcua

SEQ ID NO: 2319949 - RNA, 19 nt, Homo sapiens
  misc_RNA (1)...(19): siRNA sense strand
aggaaagagaaaauggcaa

SEQ ID NO: 2319950 - RNA, 19 nt, Homo sapiens
  misc_RNA (1)...(19): siRNA sense strand
ggggaauccuaauggacau

SEQ ID NO: 2319951 - RNA, 19 nt, Homo sapiens
  misc_RNA (1)...(19): siRNA sense strand
ggugacuguccaagugcaa

SEQ ID NO: 2319952 - RNA, 19 nt, Homo sapiens
  misc_RNA (1)...(19): siRNA sense strand
cuaucaggaaagagaaaau

SEQ ID NO: 2319953 - RNA, 19 nt, Homo sapiens
  misc_RNA (1)...(19): siRNA sense strand
ccuauuaagaagggagaaa

SEQ ID NO: 2319954 - RNA, 19 nt, Homo sapiens
  misc_RNA (1)...(19): siRNA sense strand
cuggaaugauugugggcca

SEQ ID NO: 2319955 - RNA, 19 nt, Homo sapiens
  misc_RNA (1)...(19): siRNA sense strand
aggagaaaccuuaucaaaa

SEQ ID NO: 2319956 - RNA, 19 nt, Homo sapiens
  misc_RNA (1)...(19): siRNA sense strand
ccaauuaaguauaaagguc

SEQ ID NO: 2319957 - RNA, 19 nt, Homo sapiens
  misc_RNA (1)...(19): siRNA sense strand
ucgaauaucuggaagaggu

SEQ ID NO: 2319958 - RNA, 19 nt, Homo sapiens
  misc_RNA (1)...(19): siRNA sense strand
cgaauaucuggaagagguu

SEQ ID NO: 2319959 - RNA, 19 nt, Homo sapiens
  misc_RNA (1)...(19): siRNA sense strand
ugauugugggccaggagaa

SEQ ID NO: 2319960 - RNA, 19 nt, Homo sapiens
  misc_RNA (1)...(19): siRNA sense strand
caaagaagucagaggccuc

SEQ ID NO: 2319961 - RNA, 19 nt, Homo sapiens
  misc_RNA (1)...(19): siRNA sense strand
ccgaaagguccgagagaca

SEQ ID NO: 2319962 - RNA, 19 nt, Homo sapiens
  misc_RNA (1)...(19): siRNA sense strand
ccgugaagagcgaggauga

SEQ ID NO: 2319963 - RNA, 19 nt, Homo sapiens
  misc_RNA (1)...(19): siRNA sense strand
gugacuacgagaaggagaa

SEQ ID NO: 2319964 - RNA, 19 nt, Homo sapiens
  misc_RNA (1)...(19): siRNA sense strand
accaaagagcaaagaugaa

SEQ ID NO: 2319965 - RNA, 19 nt, Homo sapiens
  misc_RNA (1)...(19): siRNA sense strand
acuacgagaaggagaagga

SEQ ID NO: 2319966 - RNA, 19 nt, Homo sapiens
  misc_RNA (1)...(19): siRNA sense strand
agaucguggccauggaaca

SEQ ID NO: 2319967 - RNA, 19 nt, Homo sapiens
  misc_RNA (1)...(19): siRNA sense strand
caggacaacuacugcguga

SEQ ID NO: 2319968 - RNA, 19 nt, Homo sapiens
  misc_RNA (1)...(19): siRNA sense strand
cgucaauguugguguggcu

SEQ ID NO: 2319969 - RNA, 19 nt, Homo sapiens
  misc_RNA (1)...(19): siRNA sense strand
uguucaacuuacagggaaa

SEQ ID NO: 2319970 - RNA, 19 nt, Homo sapiens
  misc_RNA (1)...(19): siRNA sense strand
ggauaugagaagcuggaca

SEQ ID NO: 2319971 - RNA, 19 nt, Homo sapiens
  misc_RNA (1)...(19): siRNA sense strand
ggaagagagcucagccaca

SEQ ID NO: 2319972 - RNA, 19 nt, Homo sapiens
  misc_RNA (1)...(19): siRNA sense strand
gauaugagguguuugacca

SEQ ID NO: 2319973 - RNA, 19 nt, Homo sapiens
  misc_RNA (1)...(19): siRNA sense strand
caacaguggugucagggau

SEQ ID NO: 2319974 - RNA, 19 nt, Homo sapiens
  misc_RNA (1)...(19): siRNA sense strand
ggaagaagcagcaacggca

SEQ ID NO: 2319975 - RNA, 19 nt, Homo sapiens
  misc_RNA (1)...(19): siRNA sense strand
cucaguagacacagagauu

SEQ ID NO: 2319976 - RNA, 19 nt, Homo sapiens
  misc_RNA (1)...(19): siRNA sense strand
ugaaggugucugagaacuu

SEQ ID NO: 2319977 - RNA, 19 nt, Homo sapiens
  misc_RNA (1)...(19): siRNA sense strand
ccaugaagucugugaaggu

SEQ ID NO: 2319978 - RNA, 19 nt, Homo sapiens
  misc_RNA (1)...(19): siRNA sense strand
auggagaagcagugaaaau

SEQ ID NO: 2319979 - RNA, 19 nt, Homo sapiens
  misc_RNA (1)...(19): siRNA sense strand
guggaagauaugagguguu

SEQ ID NO: 2319980 - RNA, 19 nt, Homo sapiens
  misc_RNA (1)...(19): siRNA sense strand
caacugaggaggaugagga

SEQ ID NO: 2319981 - RNA, 19 nt, Homo sapiens
  misc_RNA (1)...(19): siRNA sense strand
ugguagggguccugggaga

SEQ ID NO: 2319982 - RNA, 19 nt, Homo sapiens
  misc_RNA (1)...(19): siRNA sense strand
ccuuacaagaacagggugu

SEQ ID NO: 2319983 - RNA, 19 nt, Homo sapiens
  misc_RNA (1)...(19): siRNA sense strand
ggugcauuuggaagcgaaa

SEQ ID NO: 2319984 - RNA, 19 nt, Homo sapiens
  misc_RNA (1)...(19): siRNA sense strand
ggguuguuccugaugguuu

SEQ ID NO: 2319985 - RNA, 19 nt, Homo sapiens
  misc_RNA (1)...(19): siRNA sense strand
ucagaggccuccagcguca

SEQ ID NO: 2319986 - RNA, 19 nt, Homo sapiens
  misc_RNA (1)...(19): siRNA sense strand
caguacgacacgaggagaa

SEQ ID NO: 2319987 - RNA, 19 nt, Homo sapiens
  misc_RNA (1)...(19): siRNA sense strand
gagaagaagacaaagagca

SEQ ID NO: 2319988 - RNA, 19 nt, Homo sapiens
  misc_RNA (1)...(19): siRNA sense strand
caacaaagguacuggugag

SEQ ID NO: 2319989 - RNA, 19 nt, Homo sapiens
  misc_RNA (1)...(19): siRNA sense strand
acaugaaggugcacagcca

SEQ ID NO: 2319990 - RNA, 19 nt, Homo sapiens
  misc_RNA (1)...(19): siRNA sense strand
uuggagaagaagacaaaga

SEQ ID NO: 2319991 - RNA, 19 nt, Homo sapiens
  misc_RNA (1)...(19): siRNA sense strand
cggcuuauauuucggacca

SEQ ID NO: 2319992 - RNA, 19 nt, Homo sapiens
  misc_RNA (1)...(19): siRNA sense strand
gcaacaaagguacugguga

SEQ ID NO: 2319993 - RNA, 19 nt, Homo sapiens
  misc_RNA (1)...(19): siRNA sense strand
gcgcugugcacaagcccua

SEQ ID NO: 2319994 - RNA, 19 nt, Homo sapiens
  misc_RNA (1)...(19): siRNA sense strand
ccuucaaaugugagaaaug

SEQ ID NO: 2319995 - RNA, 19 nt, Homo sapiens
  misc_RNA (1)...(19): siRNA sense strand
aagaguucauagacgacaa

SEQ ID NO: 2319996 - RNA, 19 nt, Homo sapiens
  misc_RNA (1)...(19): siRNA sense strand
cuuuagaaguggaacgaca

SEQ ID NO: 2319997 - RNA, 19 nt, Homo sapiens
  misc_RNA (1)...(19): siRNA sense strand
gagauauaccaaaaggaaa

SEQ ID NO: 2319998 - RNA, 19 nt, Homo sapiens
  misc_RNA (1)...(19): siRNA sense strand
acaauguggauuuggacaa

SEQ ID NO: 2319999 - RNA, 19 nt, Homo sapiens
  misc_RNA (1)...(19): siRNA sense strand
caauaaaagggaagaagau

SEQ ID NO: 2320000 - RNA, 19 nt, Homo sapiens
  misc_RNA (1)...(19): siRNA sense strand
gcuugagaugcuaggaaga

SEQ ID NO: 2320001 - RNA, 19 nt, Homo sapiens
  misc_RNA (1)...(19): siRNA sense strand
uuuccuagucuaagagaau

SEQ ID NO: 2320002 - RNA, 19 nt, Homo sapiens
  misc_RNA (1)...(19): siRNA sense strand
aauuaaagcugacucgaga

SEQ ID NO: 2320003 - RNA, 19 nt, Homo sapiens
  misc_RNA (1)...(19): siRNA sense strand
aggaagaacuggaagaagc

SEQ ID NO: 2320004 - RNA, 19 nt, Homo sapiens
  misc_RNA (1)...(19): siRNA sense strand
gagguugagaucaggaaaa

SEQ ID NO: 2320005 - RNA, 19 nt, Homo sapiens
  misc_RNA (1)...(19): siRNA sense strand
gauagagacauauggacca

SEQ ID NO: 2320006 - RNA, 19 nt, Homo sapiens
  misc_RNA (1)...(19): siRNA sense strand
aaguggaacgacaggaaaa

SEQ ID NO: 2320007 - RNA, 19 nt, Homo sapiens
  misc_RNA (1)...(19): siRNA sense strand
cuguaaaaccagugacguu

SEQ ID NO: 2320008 - RNA, 19 nt, Homo sapiens
  misc_RNA (1)...(19): siRNA sense strand
aagaagaacaacugcagca

SEQ ID NO: 2320009 - RNA, 19 nt, Homo sapiens
  misc_RNA (1)...(19): siRNA sense strand
ggaugcauucagugggcuu

SEQ ID NO: 2320010 - RNA, 19 nt, Homo sapiens
  misc_RNA (1)...(19): siRNA sense strand
ggauagaggcaauuguaaa

SEQ ID NO: 2320011 - RNA, 19 nt, Homo sapiens
  misc_RNA (1)...(19): siRNA sense strand
agcuaaggauauugaagaa

SEQ ID NO: 2320012 - RNA, 19 nt, Homo sapiens
  misc_RNA (1)...(19): siRNA sense strand
ggagacuacaccugacaaa

SEQ ID NO: 2320013 - RNA, 19 nt, Homo sapiens
  misc_RNA (1)...(19): siRNA sense strand
gauuugacagcuaaggaua

SEQ ID NO: 2320014 - RNA, 19 nt, Homo sapiens
  misc_RNA (1)...(19): siRNA sense strand
aucgaaagccaguuggaaa

SEQ ID NO: 2320015 - RNA, 19 nt, Homo sapiens
  misc_RNA (1)...(19): siRNA sense strand
ccagaaaacuauaagagga

SEQ ID NO: 2320016 - RNA, 19 nt, Homo sapiens
  misc_RNA (1)...(19): siRNA sense strand
cagcuaaggauauugaaga

SEQ ID NO: 2320017 - RNA, 19 nt, Homo sapiens
  misc_RNA (1)...(19): siRNA sense strand
gcuaaggauauugaagaaa

SEQ ID NO: 2320018 - RNA, 19 nt, Homo sapiens
  misc_RNA (1)...(19): siRNA sense strand
gauagaggcaauuguaaaa

SEQ ID NO: 2320019 - RNA, 19 nt, Homo sapiens
  misc_RNA (1)...(19): siRNA sense strand
cagaaaacuauaagaggau

SEQ ID NO: 2320020 - RNA, 19 nt, Homo sapiens
  misc_RNA (1)...(19): siRNA sense strand
ggggaagacauguaaggaa

SEQ ID NO: 2320021 - RNA, 19 nt, Homo sapiens
  misc_RNA (1)...(19): siRNA sense strand
uuauuugugcacagagaua

SEQ ID NO: 2320022 - RNA, 19 nt, Homo sapiens
  misc_RNA (1)...(19): siRNA sense strand
agaaauuauugaugagcuc

SEQ ID NO: 2320023 - RNA, 19 nt, Homo sapiens
  misc_RNA (1)...(19): siRNA sense strand
cuuuauuugugcacagaga

SEQ ID NO: 2320024 - RNA, 19 nt, Homo sapiens
  misc_RNA (1)...(19): siRNA sense strand
gcaaaauggagcuggagga

SEQ ID NO: 2320025 - RNA, 19 nt, Homo sapiens
  misc_RNA (1)...(19): siRNA sense strand
acuggaggccauucagaaa

SEQ ID NO: 2320026 - RNA, 19 nt, Homo sapiens
  misc_RNA (1)...(19): siRNA sense strand
aggauagaggcaauuguaa

SEQ ID NO: 2320027 - RNA, 19 nt, Homo sapiens
  misc_RNA (1)...(19): siRNA sense strand
aguccuggauuuagcccaa

SEQ ID NO: 2320028 - RNA, 19 nt, Homo sapiens
  misc_RNA (1)...(19): siRNA sense strand
acagcauacuggaggccau

SEQ ID NO: 2320029 - RNA, 19 nt, Homo sapiens
  misc_RNA (1)...(19): siRNA sense strand
acccaagggaccuggauuu

SEQ ID NO: 2320030 - RNA, 19 nt, Homo sapiens
  misc_RNA (1)...(19): siRNA sense strand
gauuuagcccaaaggcaga

SEQ ID NO: 2320031 - RNA, 19 nt, Homo sapiens
  misc_RNA (1)...(19): siRNA sense strand
ggaauaaagguuggggaga

SEQ ID NO: 2320032 - RNA, 19 nt, Homo sapiens
  misc_RNA (1)...(19): siRNA sense strand
cggugaaagccgugaugga

SEQ ID NO: 2320033 - RNA, 19 nt, Homo sapiens
  misc_RNA (1)...(19): siRNA sense strand
cgggagaggaaggcgaaua

SEQ ID NO: 2320034 - RNA, 19 nt, Homo sapiens
  misc_RNA (1)...(19): siRNA sense strand
cgagaaaucccacaagcga

SEQ ID NO: 2320035 - RNA, 19 nt, Homo sapiens
  misc_RNA (1)...(19): siRNA sense strand
gcagcagaagcgaggaaaa

SEQ ID NO: 2320036 - RNA, 19 nt, Homo sapiens
  misc_RNA (1)...(19): siRNA sense strand
gugaaauacaucaagcaga

SEQ ID NO: 2320037 - RNA, 19 nt, Homo sapiens
  misc_RNA (1)...(19): siRNA sense strand
agguggaccaagaaggcaa

SEQ ID NO: 2320038 - RNA, 19 nt, Homo sapiens
  misc_RNA (1)...(19): siRNA sense strand
cgugaagcguccgcggaaa

SEQ ID NO: 2320039 - RNA, 19 nt, Homo sapiens
  misc_RNA (1)...(19): siRNA sense strand
gagaagagaggcugcagca

SEQ ID NO: 2320040 - RNA, 19 nt, Homo sapiens
  misc_RNA (1)...(19): siRNA sense strand
ugaaauacaucaagcagac

SEQ ID NO: 2320041 - RNA, 19 nt, Homo sapiens
  misc_RNA (1)...(19): siRNA sense strand
gccaacaggcugaggugga

SEQ ID NO: 2320042 - RNA, 19 nt, Homo sapiens
  misc_RNA (1)...(19): siRNA sense strand
uggucacgguggugggaaa

SEQ ID NO: 2320043 - RNA, 19 nt, Homo sapiens
  misc_RNA (1)...(19): siRNA sense strand
ccuugguggcccuggacaa

SEQ ID NO: 2320044 - RNA, 19 nt, Homo sapiens
  misc_RNA (1)...(19): siRNA sense strand
ccuuuggauucgugaucau

SEQ ID NO: 2320045 - RNA, 19 nt, Homo sapiens
  misc_RNA (1)...(19): siRNA sense strand
cagaagagaugcagccagu

SEQ ID NO: 2320046 - RNA, 19 nt, Homo sapiens
  misc_RNA (1)...(19): siRNA sense strand
aggcuucagacaaggauaa

SEQ ID NO: 2320047 - RNA, 19 nt, Homo sapiens
  misc_RNA (1)...(19): siRNA sense strand
ucuacugggccuagugcaa

SEQ ID NO: 2320048 - RNA, 19 nt, Homo sapiens
  misc_RNA (1)...(19): siRNA sense strand
agaaacucauggagccaga

SEQ ID NO: 2320049 - RNA, 19 nt, Homo sapiens
  misc_RNA (1)...(19): siRNA sense strand
ccucuuaucuacagccuca

SEQ ID NO: 2320050 - RNA, 19 nt, Homo sapiens
  misc_RNA (1)...(19): siRNA sense strand
cagggugcucuguggcaaa

SEQ ID NO: 2320051 - RNA, 19 nt, Homo sapiens
  misc_RNA (1)...(19): siRNA sense strand
ucgacagaacaaauggaaa

SEQ ID NO: 2320052 - RNA, 19 nt, Homo sapiens
  misc_RNA (1)...(19): siRNA sense strand
ccuucgggaugcugagaca

SEQ ID NO: 2320053 - RNA, 19 nt, Homo sapiens
  misc_RNA (1)...(19): siRNA sense strand
gggaagauacucuggcaag

SEQ ID NO: 2320054 - RNA, 19 nt, Homo sapiens
  misc_RNA (1)...(19): siRNA sense strand
gggcuuauugagagaauca

SEQ ID NO: 2320055 - RNA, 19 nt, Homo sapiens
  misc_RNA (1)...(19): siRNA sense strand
ucuguaacuccuugggaua

SEQ ID NO: 2320056 - RNA, 19 nt, Homo sapiens
  misc_RNA (1)...(19): siRNA sense strand
gggauaucuugcugagcuu

SEQ ID NO: 2320057 - RNA, 19 nt, Homo sapiens
  misc_RNA (1)...(19): siRNA sense strand
ccauuuggauagaggugau

SEQ ID NO: 2320058 - RNA, 19 nt, Homo sapiens
  misc_RNA (1)...(19): siRNA sense strand
aaggaauaucagaaggcua

SEQ ID NO: 2320059 - RNA, 19 nt, Homo sapiens
  misc_RNA (1)...(19): siRNA sense strand
ccaugucggacgugggaau

SEQ ID NO: 2320060 - RNA, 19 nt, Homo sapiens
  misc_RNA (1)...(19): siRNA sense strand
cuuccaucaaggagauaua

SEQ ID NO: 2320061 - RNA, 19 nt, Homo sapiens
  misc_RNA (1)...(19): siRNA sense strand
cuagaagacaccagacaca

SEQ ID NO: 2320062 - RNA, 19 nt, Homo sapiens
  misc_RNA (1)...(19): siRNA sense strand
ccucaguacuggaaaauca

SEQ ID NO: 2320063 - RNA, 19 nt, Homo sapiens
  misc_RNA (1)...(19): siRNA sense strand
uacuaaguuuccagcgaua

SEQ ID NO: 2320064 - RNA, 19 nt, Homo sapiens
  misc_RNA (1)...(19): siRNA sense strand
gaaucagaaagaagagguu

SEQ ID NO: 2320065 - RNA, 19 nt, Homo sapiens
  misc_RNA (1)...(19): siRNA sense strand
gccaaguguaugcuggaaa

SEQ ID NO: 2320066 - RNA, 19 nt, Homo sapiens
  misc_RNA (1)...(19): siRNA sense strand
ggagaucugcagugggcuu

SEQ ID NO: 2320067 - RNA, 19 nt, Homo sapiens
  misc_RNA (1)...(19): siRNA sense strand
cagugggcuuauugagaga

SEQ ID NO: 2320068 - RNA, 19 nt, Homo sapiens
  misc_RNA (1)...(19): siRNA sense strand
gcuacuaaguuuccagcga

SEQ ID NO: 2320069 - RNA, 19 nt, Homo sapiens
  misc_RNA (1)...(19): siRNA sense strand
agucaaaauccuuaccaua

SEQ ID NO: 2320070 - RNA, 19 nt, Homo sapiens
  misc_RNA (1)...(19): siRNA sense strand
ucguaugcuaggagaugua

SEQ ID NO: 2320071 - RNA, 19 nt, Homo sapiens
  misc_RNA (1)...(19): siRNA sense strand
gccauuagaaagcaggcaa

SEQ ID NO: 2320072 - RNA, 19 nt, Homo sapiens
  misc_RNA (1)...(19): siRNA sense strand
gggcuuauugagagaauca

SEQ ID NO: 2320073 - RNA, 19 nt, Homo sapiens
  misc_RNA (1)...(19): siRNA sense strand
ucuguaacuccuugggaua

SEQ ID NO: 2320074 - RNA, 19 nt, Homo sapiens
  misc_RNA (1)...(19): siRNA sense strand
gggauaucuugcugagcuu

SEQ ID NO: 2320075 - RNA, 19 nt, Homo sapiens
  misc_RNA (1)...(19): siRNA sense strand
ccauuuggauagaggugau

SEQ ID NO: 2320076 - RNA, 19 nt, Homo sapiens
  misc_RNA (1)...(19): siRNA sense strand
aaggaauaucagaaggcua

SEQ ID NO: 2320077 - RNA, 19 nt, Homo sapiens
  misc_RNA (1)...(19): siRNA sense strand
ccaugucggacgugggaau

SEQ ID NO: 2320078 - RNA, 19 nt, Homo sapiens
  misc_RNA (1)...(19): siRNA sense strand
cuuccaucaaggagauaua

SEQ ID NO: 2320079 - RNA, 19 nt, Homo sapiens
  misc_RNA (1)...(19): siRNA sense strand
cuagaagacaccagacaca

SEQ ID NO: 2320080 - RNA, 19 nt, Homo sapiens
  misc_RNA (1)...(19): siRNA sense strand
ccucaguacuggaaaauca

SEQ ID NO: 2320081 - RNA, 19 nt, Homo sapiens
  misc_RNA (1)...(19): siRNA sense strand
uacuaaguuuccagcgaua

SEQ ID NO: 2320082 - RNA, 19 nt, Homo sapiens
  misc_RNA (1)...(19): siRNA sense strand
gaaucagaaagaagagguu

SEQ ID NO: 2320083 - RNA, 19 nt, Homo sapiens
  misc_RNA (1)...(19): siRNA sense strand
gccaaguguaugcuggaaa

SEQ ID NO: 2320084 - RNA, 19 nt, Homo sapiens
  misc_RNA (1)...(19): siRNA sense strand
ggagaucugcagugggcuu

SEQ ID NO: 2320085 - RNA, 19 nt, Homo sapiens
  misc_RNA (1)...(19): siRNA sense strand
cagugggcuuauugagaga

SEQ ID NO: 2320086 - RNA, 19 nt, Homo sapiens
  misc_RNA (1)...(19): siRNA sense strand
gcuacuaaguuuccagcga

SEQ ID NO: 2320087 - RNA, 19 nt, Homo sapiens
  misc_RNA (1)...(19): siRNA sense strand
agucaaaauccuuaccaua

SEQ ID NO: 2320088 - RNA, 19 nt, Homo sapiens
  misc_RNA (1)...(19): siRNA sense strand
ucguaugcuaggagaugua

SEQ ID NO: 2320089 - RNA, 19 nt, Homo sapiens
  misc_RNA (1)...(19): siRNA sense strand
gccauuagaaagcaggcaa

SEQ ID NO: 2320090 - RNA, 19 nt, Homo sapiens
  misc_RNA (1)...(19): siRNA sense strand
gcgaagacuaucagggaau

SEQ ID NO: 2320091 - RNA, 19 nt, Homo sapiens
  misc_RNA (1)...(19): siRNA sense strand
aaacauaaagacaggagaa

SEQ ID NO: 2320092 - RNA, 19 nt, Homo sapiens
  misc_RNA (1)...(19): siRNA sense strand
acaauaaggcugagaaaau

SEQ ID NO: 2320093 - RNA, 19 nt, Homo sapiens
  misc_RNA (1)...(19): siRNA sense strand
aaggagaggauaaaggaaa

SEQ ID NO: 2320094 - RNA, 19 nt, Homo sapiens
  misc_RNA (1)...(19): siRNA sense strand
cggagauaauauacaacaa

SEQ ID NO: 2320095 - RNA, 19 nt, Homo sapiens
  misc_RNA (1)...(19): siRNA sense strand
ccauggaaaaugaggaaua

SEQ ID NO: 2320096 - RNA, 19 nt, Homo sapiens
  misc_RNA (1)...(19): siRNA sense strand
gcuuaaugucugaugguuu

SEQ ID NO: 2320097 - RNA, 19 nt, Homo sapiens
  misc_RNA (1)...(19): siRNA sense strand
cggcaagaagguagcagua

SEQ ID NO: 2320098 - RNA, 19 nt, Homo sapiens
  misc_RNA (1)...(19): siRNA sense strand
aguuauuguugguguagua

SEQ ID NO: 2320099 - RNA, 19 nt, Homo sapiens
  misc_RNA (1)...(19): siRNA sense strand
gcuuaggacuccagagaac

SEQ ID NO: 2320100 - RNA, 19 nt, Homo sapiens
  misc_RNA (1)...(19): siRNA sense strand
uggcaacacuagaagaaaa

SEQ ID NO: 2320101 - RNA, 19 nt, Homo sapiens
  misc_RNA (1)...(19): siRNA sense strand
ugccaguguuugacagaaa

SEQ ID NO: 2320102 - RNA, 19 nt, Homo sapiens
  misc_RNA (1)...(19): siRNA sense strand
agauaaucagacaggcaaa

SEQ ID NO: 2320103 - RNA, 19 nt, Homo sapiens
  misc_RNA (1)...(19): siRNA sense strand
cuaucagucaggugaauua

SEQ ID NO: 2320104 - RNA, 19 nt, Homo sapiens
  misc_RNA (1)...(19): siRNA sense strand
gcaaggaguggcaaggaau

SEQ ID NO: 2320105 - RNA, 19 nt, Homo sapiens
  misc_RNA (1)...(19): siRNA sense strand
cgacauggucuuagccaca

SEQ ID NO: 2320106 - RNA, 19 nt, Homo sapiens
  misc_RNA (1)...(19): siRNA sense strand
gugaagaugcaauugaaau

SEQ ID NO: 2320107 - RNA, 19 nt, Homo sapiens
  misc_RNA (1)...(19): siRNA sense strand
agggaaggaguuaggagaa

SEQ ID NO: 2320108 - RNA, 19 nt, Homo sapiens
  misc_RNA (1)...(19): siRNA sense strand
gaggaaugauuaucggaca

SEQ ID NO: 2320109 - RNA, 19 nt, Homo sapiens
  misc_RNA (1)...(19): siRNA sense strand
cagaaaugacaaagcacuu

SEQ ID NO: 2320110 - RNA, 19 nt, Homo sapiens
  misc_RNA (1)...(19): siRNA sense strand
acgaaaugaagcugcggaa

SEQ ID NO: 2320111 - RNA, 19 nt, Homo sapiens
  misc_RNA (1)...(19): siRNA sense strand
ggauacauuccaugacaau

SEQ ID NO: 2320112 - RNA, 19 nt, Homo sapiens
  misc_RNA (1)...(19): siRNA sense strand
acaaauuaucgaagccaau

SEQ ID NO: 2320113 - RNA, 19 nt, Homo sapiens
  misc_RNA (1)...(19): siRNA sense strand
auuaauagggaaggaguua

SEQ ID NO: 2320114 - RNA, 19 nt, Homo sapiens
  misc_RNA (1)...(19): siRNA sense strand
cugcugugcuggagagcca

SEQ ID NO: 2320115 - RNA, 19 nt, Homo sapiens
  misc_RNA (1)...(19): siRNA sense strand
cucaaaugguuucaagcaa

SEQ ID NO: 2320116 - RNA, 19 nt, Homo sapiens
  misc_RNA (1)...(19): siRNA sense strand
ucaucauagaccacagaaa

SEQ ID NO: 2320117 - RNA, 19 nt, Homo sapiens
  misc_RNA (1)...(19): siRNA sense strand
caggugaauuaauagggaa

SEQ ID NO: 2320118 - RNA, 19 nt, Homo sapiens
  misc_RNA (1)...(19): siRNA sense strand
cggauacauuccaugacaa

SEQ ID NO: 2320119 - RNA, 19 nt, Homo sapiens
  misc_RNA (1)...(19): siRNA sense strand
gagucaacgcuaagaucau

SEQ ID NO: 2320120 - RNA, 19 nt, Homo sapiens
  misc_RNA (1)...(19): siRNA sense strand
acgcauuucggaagaauau

SEQ ID NO: 2320121 - RNA, 19 nt, Homo sapiens
  misc_RNA (1)...(19): siRNA sense strand
ucagacaggcaaacauaaa

SEQ ID NO: 2320122 - RNA, 19 nt, Homo sapiens
  misc_RNA (1)...(19): siRNA sense strand
ccacaauaggccuuugauu

SEQ ID NO: 2320123 - RNA, 19 nt, Homo sapiens
  misc_RNA (1)...(19): siRNA sense strand
aggagaggauaaaggaaac

SEQ ID NO: 2320124 - RNA, 19 nt, Homo sapiens
  misc_RNA (1)...(19): siRNA sense strand
uugaaacaacaaugggcua

SEQ ID NO: 2320125 - RNA, 19 nt, Homo sapiens
  misc_RNA (1)...(19): siRNA sense strand
acauaaagacaggagaaaa

SEQ ID NO: 2320126 - RNA, 19 nt, Homo sapiens
  misc_RNA (1)...(19): siRNA sense strand
uggaaaggacuggacgaaa

SEQ ID NO: 2320127 - RNA, 19 nt, Homo sapiens
  misc_RNA (1)...(19): siRNA sense strand
cauuggacagggaggaaaa

SEQ ID NO: 2320128 - RNA, 19 nt, Homo sapiens
  misc_RNA (1)...(19): siRNA sense strand
ucauacagauaaucagaca

SEQ ID NO: 2320129 - RNA, 19 nt, Homo sapiens
  misc_RNA (1)...(19): siRNA sense strand
ugacacucauacagauaau

SEQ ID NO: 2320130 - RNA, 19 nt, Homo sapiens
  misc_RNA (1)...(19): siRNA sense strand
cagauaaucagacaggcaa

SEQ ID NO: 2320131 - RNA, 19 nt, Homo sapiens
  misc_RNA (1)...(19): siRNA sense strand
agacugaugaagagaagca

SEQ ID NO: 2320132 - RNA, 19 nt, Homo sapiens
  misc_RNA (1)...(19): siRNA sense strand
ccaaggaggcucaggcugu

SEQ ID NO: 2320133 - RNA, 19 nt, Homo sapiens
  misc_RNA (1)...(19): siRNA sense strand
cugacuugcucgauacuau

SEQ ID NO: 2320134 - RNA, 19 nt, Homo sapiens
  misc_RNA (1)...(19): siRNA sense strand
acagauaaucagacaggca

SEQ ID NO: 2320135 - RNA, 19 nt, Homo sapiens
  misc_RNA (1)...(19): siRNA sense strand
gaccacuggagaugauaaa

SEQ ID NO: 2320136 - RNA, 19 nt, Homo sapiens
  misc_RNA (1)...(19): siRNA sense strand
gugaauuaauagggaagga

SEQ ID NO: 2320137 - RNA, 19 nt, Homo sapiens
  misc_RNA (1)...(19): siRNA sense strand
aauuaauagggaaggaguu

SEQ ID NO: 2320138 - RNA, 19 nt, Homo sapiens
  misc_RNA (1)...(19): siRNA sense strand
ggauaggcaaggaguggca

SEQ ID NO: 2320139 - RNA, 19 nt, Homo sapiens
  misc_RNA (1)...(19): siRNA sense strand
gauuuaucuuggucucaaa

SEQ ID NO: 2320140 - RNA, 19 nt, Homo sapiens
  misc_RNA (1)...(19): siRNA sense strand
ccuccaaucccuaccacaa

SEQ ID NO: 2320141 - RNA, 19 nt, Homo sapiens
  misc_RNA (1)...(19): siRNA sense strand
caaggagaggauaaaggaa

SEQ ID NO: 2320142 - RNA, 19 nt, Homo sapiens
  misc_RNA (1)...(19): siRNA sense strand
agugaagaugcaauugaaa

SEQ ID NO: 2320143 - RNA, 19 nt, Homo sapiens
  misc_RNA (1)...(19): siRNA sense strand
gggaaggaguuaggagaag

SEQ ID NO: 2320144 - RNA, 19 nt, Homo sapiens
  misc_RNA (1)...(19): siRNA sense strand
cauaaagacaggagaaaag

SEQ ID NO: 2320145 - RNA, 19 nt, Homo sapiens
  misc_RNA (1)...(19): siRNA sense strand
gcgcccaucaccaagguaa

SEQ ID NO: 2320146 - RNA, 19 nt, Homo sapiens
  misc_RNA (1)...(19): siRNA sense strand
ggauuuacaaggagguaug

SEQ ID NO: 2320147 - RNA, 19 nt, Homo sapiens
  misc_RNA (1)...(19): siRNA sense strand
ugucaaaauucuuggcaaa

SEQ ID NO: 2320148 - RNA, 19 nt, Homo sapiens
  misc_RNA (1)...(19): siRNA sense strand
caaaagaaaagguaggaaa

SEQ ID NO: 2320149 - RNA, 19 nt, Homo sapiens
  misc_RNA (1)...(19): siRNA sense strand
cauugaaaguauugugcau

SEQ ID NO: 2320150 - RNA, 19 nt, Homo sapiens
  misc_RNA (1)...(19): siRNA sense strand
gauauaaugggcugggcua

SEQ ID NO: 2320151 - RNA, 19 nt, Homo sapiens
  misc_RNA (1)...(19): siRNA sense strand
cuguauuggauguagcaaa

SEQ ID NO: 2320152 - RNA, 19 nt, Homo sapiens
  misc_RNA (1)...(19): siRNA sense strand
gggcagagagugaaggaac

SEQ ID NO: 2320153 - RNA, 19 nt, Homo sapiens
  misc_RNA (1)...(19): siRNA sense strand
uguaguugccagagcagaa

SEQ ID NO: 2320154 - RNA, 19 nt, Homo sapiens
  misc_RNA (1)...(19): siRNA sense strand
ucaaagaacaacaacccaa

SEQ ID NO: 2320155 - RNA, 19 nt, Homo sapiens
  misc_RNA (1)...(19): siRNA sense strand
uggccaaacaacaggacuu

SEQ ID NO: 2320156 - RNA, 19 nt, Homo sapiens
  misc_RNA (1)...(19): siRNA sense strand
ggcagagagugaaggaacu

SEQ ID NO: 2320157 - RNA, 19 nt, Homo sapiens
  misc_RNA (1)...(19): siRNA sense strand
ugggaaagauggagaaaag

SEQ ID NO: 2320158 - RNA, 19 nt, Homo sapiens
  misc_RNA (1)...(19): siRNA sense strand
gaaagauggagaaaagcaa

SEQ ID NO: 2320159 - RNA, 19 nt, Homo sapiens
  misc_RNA (1)...(19): siRNA sense strand
aaugacaagaccuggacaa

SEQ ID NO: 2320160 - RNA, 19 nt, Homo sapiens
  misc_RNA (1)...(19): siRNA sense strand
ccguaucugaagaagaaau

SEQ ID NO: 2320161 - RNA, 19 nt, Homo sapiens
  misc_RNA (1)...(19): siRNA sense strand
ccaucacagcagacaggaa

SEQ ID NO: 2320162 - RNA, 19 nt, Homo sapiens
  misc_RNA (1)...(19): siRNA sense strand
caaagugcgugguuggcuu

SEQ ID NO: 2320163 - RNA, 19 nt, Homo sapiens
  misc_RNA (1)...(19): siRNA sense strand
cguaucugaagaagaaauu

SEQ ID NO: 2320164 - RNA, 19 nt, Homo sapiens
  misc_RNA (1)...(19): siRNA sense strand
aggaaguagcagugugaac

SEQ ID NO: 2320165 - RNA, 19 nt, Homo sapiens
  misc_RNA (1)...(19): siRNA sense strand
auauggugccuauggaaau

SEQ ID NO: 2320166 - RNA, 19 nt, Homo sapiens
  misc_RNA (1)...(19): siRNA sense strand
gagugaaggaacuguggca

SEQ ID NO: 2320167 - RNA, 19 nt, Homo sapiens
  misc_RNA (1)...(19): siRNA sense strand
cugggcaaguggugaggau

SEQ ID NO: 2320168 - RNA, 19 nt, Homo sapiens
  misc_RNA (1)...(19): siRNA sense strand
ccgaaauugcugugggcca

SEQ ID NO: 2320169 - RNA, 19 nt, Homo sapiens
  misc_RNA (1)...(19): siRNA sense strand
guguauaaucagccaguau

SEQ ID NO: 2320170 - RNA, 19 nt, Homo sapiens
  misc_RNA (1)...(19): siRNA sense strand
cgaaauugcugugggccau

SEQ ID NO: 2320171 - RNA, 19 nt, Homo sapiens
  misc_RNA (1)...(19): siRNA sense strand
ccacuaagauguagcagcu

SEQ ID NO: 2320172 - RNA, 19 nt, Homo sapiens
  misc_RNA (1)...(19): siRNA sense strand
ugauaauaugggucaagaa

SEQ ID NO: 2320173 - RNA, 19 nt, Homo sapiens
  misc_RNA (1)...(19): siRNA sense strand
aguuggagcugcaggggua

SEQ ID NO: 2320174 - RNA, 19 nt, Homo sapiens
  misc_RNA (1)...(19): siRNA sense strand
gguuuacuuugcagcggaa

SEQ ID NO: 2320175 - RNA, 19 nt, Homo sapiens
  misc_RNA (1)...(19): siRNA sense strand
guuugaucacgaugggaaa

SEQ ID NO: 2320176 - RNA, 19 nt, Homo sapiens
  misc_RNA (1)...(19): siRNA sense strand
gaucuaaagcuuaaggacu

SEQ ID NO: 2320177 - RNA, 19 nt, Homo sapiens
  misc_RNA (1)...(19): siRNA sense strand
ggguagaagaagaaaacuu

SEQ ID NO: 2320178 - RNA, 19 nt, Homo sapiens
  misc_RNA (1)...(19): siRNA sense strand
aagaaaacuucgaaggcuu

SEQ ID NO: 2320179 - RNA, 19 nt, Homo sapiens
  misc_RNA (1)...(19): siRNA sense strand
ugggaaaaucaucaagaaa

SEQ ID NO: 2320180 - RNA, 19 nt, Homo sapiens
  misc_RNA (1)...(19): siRNA sense strand
aguuggaagacgagggaag

SEQ ID NO: 2320181 - RNA, 19 nt, Homo sapiens
  misc_RNA (1)...(19): siRNA sense strand
ggaagacgagggaaggcau

SEQ ID NO: 2320182 - RNA, 19 nt, Homo sapiens
  misc_RNA (1)...(19): siRNA sense strand
ccgccuaccgagagaagaa

SEQ ID NO: 2320183 - RNA, 19 nt, Homo sapiens
  misc_RNA (1)...(19): siRNA sense strand
gcagcgaacggaagcgcaa

SEQ ID NO: 2320184 - RNA, 19 nt, Homo sapiens
  misc_RNA (1)...(19): siRNA sense strand
cugcaaccagagacagaaa

SEQ ID NO: 2320185 - RNA, 19 nt, Homo sapiens
  misc_RNA (1)...(19): siRNA sense strand
cggccaucgcugagaaacu

SEQ ID NO: 2320186 - RNA, 19 nt, Homo sapiens
  misc_RNA (1)...(19): siRNA sense strand
ggugauaugcugaaggaca

SEQ ID NO: 2320187 - RNA, 19 nt, Homo sapiens
  misc_RNA (1)...(19): siRNA sense strand
cugcagaccguuuggaaca

SEQ ID NO: 2320188 - RNA, 19 nt, Homo sapiens
  misc_RNA (1)...(19): siRNA sense strand
gcaaggagauaguggacuc

SEQ ID NO: 2320189 - RNA, 19 nt, Homo sapiens
  misc_RNA (1)...(19): siRNA sense strand
ccgacauaugcaagaacua

SEQ ID NO: 2320190 - RNA, 19 nt, Homo sapiens
  misc_RNA (1)...(19): siRNA sense strand
aacaagacugagaaagaaa

SEQ ID NO: 2320191 - RNA, 19 nt, Homo sapiens
  misc_RNA (1)...(19): siRNA sense strand
gugaucaguuuguggcaga

SEQ ID NO: 2320192 - RNA, 19 nt, Homo sapiens
  misc_RNA (1)...(19): siRNA sense strand
cauaagcccuuguugggaa

SEQ ID NO: 2320193 - RNA, 19 nt, Homo sapiens
  misc_RNA (1)...(19): siRNA sense strand
gugccagaacacagagaca

SEQ ID NO: 2320194 - RNA, 19 nt, Homo sapiens
  misc_RNA (1)...(19): siRNA sense strand
ggacaaugccacugaggag

SEQ ID NO: 2320195 - RNA, 19 nt, Homo sapiens
  misc_RNA (1)...(19): siRNA sense strand
uggaacaugucaaggagga

SEQ ID NO: 2320196 - RNA, 19 nt, Homo sapiens
  misc_RNA (1)...(19): siRNA sense strand
augucaaggaggaguguga

SEQ ID NO: 2320197 - RNA, 19 nt, Homo sapiens
  misc_RNA (1)...(19): siRNA sense strand
gguucugugaugaggugaa

SEQ ID NO: 2320198 - RNA, 19 nt, Homo sapiens
  misc_RNA (1)...(19): siRNA sense strand
gacauaugcaagaacuaua

SEQ ID NO: 2320199 - RNA, 19 nt, Homo sapiens
  misc_RNA (1)...(19): siRNA sense strand
cggaagagugccaggaggu

SEQ ID NO: 2320200 - RNA, 19 nt, Homo sapiens
  misc_RNA (1)...(19): siRNA sense strand
ugugaugaggugaaagaga

SEQ ID NO: 2320201 - RNA, 19 nt, Homo sapiens
  misc_RNA (1)...(19): siRNA sense strand
uagcagagcugaaucacca

SEQ ID NO: 2320202 - RNA, 19 nt, Homo sapiens
  misc_RNA (1)...(19): siRNA sense strand
uggacaucauuaaaggaga

SEQ ID NO: 2320203 - RNA, 19 nt, Homo sapiens
  misc_RNA (1)...(19): siRNA sense strand
uggaacugguggagcccau

SEQ ID NO: 2320204 - RNA, 19 nt, Homo sapiens
  misc_RNA (1)...(19): siRNA sense strand
aggaggaggaggaggaaga

SEQ ID NO: 2320205 - RNA, 19 nt, Homo sapiens
  misc_RNA (1)...(19): siRNA sense strand
aggaggaggaggaagagaa

SEQ ID NO: 2320206 - RNA, 19 nt, Homo sapiens
  misc_RNA (1)...(19): siRNA sense strand
ggcaagacacagaggcaga

SEQ ID NO: 2320207 - RNA, 19 nt, Homo sapiens
  misc_RNA (1)...(19): siRNA sense strand
gcaaggaugaggaggagga

SEQ ID NO: 2320208 - RNA, 19 nt, Homo sapiens
  misc_RNA (1)...(19): siRNA sense strand
ggcuaugacuggagcacga

SEQ ID NO: 2320209 - RNA, 19 nt, Homo sapiens
  misc_RNA (1)...(19): siRNA sense strand
acacagaggcagagcucca

SEQ ID NO: 2320210 - RNA, 19 nt, Homo sapiens
  misc_RNA (1)...(19): siRNA sense strand
aggaugaggaggaggagga

SEQ ID NO: 2320211 - RNA, 19 nt, Homo sapiens
  misc_RNA (1)...(19): siRNA sense strand
aaguggagcaugagagcuu

SEQ ID NO: 2320212 - RNA, 19 nt, Homo sapiens
  misc_RNA (1)...(19): siRNA sense strand
aggaggaggaggaggagga

SEQ ID NO: 2320213 - RNA, 19 nt, Homo sapiens
  misc_RNA (1)...(19): siRNA sense strand
caagcagagcacugggcaa

SEQ ID NO: 2320214 - RNA, 19 nt, Homo sapiens
  misc_RNA (1)...(19): siRNA sense strand
aggaggaagagaaggcaga

SEQ ID NO: 2320215 - RNA, 19 nt, Homo sapiens
  misc_RNA (1)...(19): siRNA sense strand
uggaggagcaggaggagga

SEQ ID NO: 2320216 - RNA, 19 nt, Homo sapiens
  misc_RNA (1)...(19): siRNA sense strand
gaggaagagcccuggagga

SEQ ID NO: 2320217 - RNA, 19 nt, Homo sapiens
  misc_RNA (1)...(19): siRNA sense strand
gaagagcccuggaggagca

SEQ ID NO: 2320218 - RNA, 19 nt, Homo sapiens
  misc_RNA (1)...(19): siRNA sense strand
gagucauagccaagcccaa

SEQ ID NO: 2320219 - RNA, 19 nt, Homo sapiens
  misc_RNA (1)...(19): siRNA sense strand
cugggaagccaaagagacu

SEQ ID NO: 2320220 - RNA, 19 nt, Homo sapiens
  misc_RNA (1)...(19): siRNA sense strand
gggaagccaaagagacuca

SEQ ID NO: 2320221 - RNA, 19 nt, Homo sapiens
  misc_RNA (1)...(19): siRNA sense strand
cugcugagggugaggagga

SEQ ID NO: 2320222 - RNA, 19 nt, Homo sapiens
  misc_RNA (1)...(19): siRNA sense strand
gcucagagucauagccaag

SEQ ID NO: 2320223 - RNA, 19 nt, Homo sapiens
  misc_RNA (1)...(19): siRNA sense strand
gcugaggcccagaagguca

SEQ ID NO: 2320224 - RNA, 19 nt, Homo sapiens
  misc_RNA (1)...(19): siRNA sense strand
augaggaggaggaggagga

SEQ ID NO: 2320225 - RNA, 19 nt, Homo sapiens
  misc_RNA (1)...(19): siRNA sense strand
ccaaagagacucagguguc

SEQ ID NO: 2320226 - RNA, 19 nt, Homo sapiens
  misc_RNA (1)...(19): siRNA sense strand
agggugaggaggaggagga

SEQ ID NO: 2320227 - RNA, 19 nt, Homo sapiens
  misc_RNA (1)...(19): siRNA sense strand
cggaagaagagcugaccaa

SEQ ID NO: 2320228 - RNA, 19 nt, Homo sapiens
  misc_RNA (1)...(19): siRNA sense strand
gcuacaagauuuaggccau

SEQ ID NO: 2320229 - RNA, 19 nt, Homo sapiens
  misc_RNA (1)...(19): siRNA sense strand
cugaaggagaucacagaaa

SEQ ID NO: 2320230 - RNA, 19 nt, Homo sapiens
  misc_RNA (1)...(19): siRNA sense strand
aggaguuggcugaggaaga

SEQ ID NO: 2320231 - RNA, 19 nt, Homo sapiens
  misc_RNA (1)...(19): siRNA sense strand
ggacgaaggggauggggaa

SEQ ID NO: 2320232 - RNA, 19 nt, Homo sapiens
  misc_RNA (1)...(19): siRNA sense strand
caaugaaggaguuggcuga

SEQ ID NO: 2320233 - RNA, 19 nt, Homo sapiens
  misc_RNA (1)...(19): siRNA sense strand
caaaagagcuggcuggaga

SEQ ID NO: 2320234 - RNA, 19 nt, Homo sapiens
  misc_RNA (1)...(19): siRNA sense strand
gugagcaguuugaggcaga

SEQ ID NO: 2320235 - RNA, 19 nt, Homo sapiens
  misc_RNA (1)...(19): siRNA sense strand
uugcagagucaucgggaau

SEQ ID NO: 2320236 - RNA, 19 nt, Homo sapiens
  misc_RNA (1)...(19): siRNA sense strand
gggaauuggaggagcuucu

SEQ ID NO: 2320237 - RNA, 19 nt, Homo sapiens
  misc_RNA (1)...(19): siRNA sense strand
ccuccagagcaguuugaaa

SEQ ID NO: 2320238 - RNA, 19 nt, Homo sapiens
  misc_RNA (1)...(19): siRNA sense strand
aggaacuauucgacaguga

SEQ ID NO: 2320239 - RNA, 19 nt, Homo sapiens
  misc_RNA (1)...(19): siRNA sense strand
acuucuugccuaaaggaaa

SEQ ID NO: 2320240 - RNA, 19 nt, Homo sapiens
  misc_RNA (1)...(19): siRNA sense strand
acagaaaaguauccagaau

SEQ ID NO: 2320241 - RNA, 19 nt, Homo sapiens
  misc_RNA (1)...(19): siRNA sense strand
cucagaggcugcagggaga

SEQ ID NO: 2320242 - RNA, 19 nt, Homo sapiens
  misc_RNA (1)...(19): siRNA sense strand
ucuccaaggaugugcugua

SEQ ID NO: 2320243 - RNA, 19 nt, Homo sapiens
  misc_RNA (1)...(19): siRNA sense strand
gcaaaauaugugagcaguu

SEQ ID NO: 2320244 - RNA, 19 nt, Homo sapiens
  misc_RNA (1)...(19): siRNA sense strand
cggacagggaauuggagga

SEQ ID NO: 2320245 - RNA, 19 nt, Homo sapiens
  misc_RNA (1)...(19): siRNA sense strand
gagaaggcaaugaaggagu

SEQ ID NO: 2320246 - RNA, 19 nt, Homo sapiens
  misc_RNA (1)...(19): siRNA sense strand
ccagcaugucggaagaaga

SEQ ID NO: 2320247 - RNA, 19 nt, Homo sapiens
  misc_RNA (1)...(19): siRNA sense strand
gccgaagcggacagggaau

SEQ ID NO: 2320248 - RNA, 19 nt, Homo sapiens
  misc_RNA (1)...(19): siRNA sense strand
guauacagcuugauggaga

SEQ ID NO: 2320249 - RNA, 19 nt, Homo sapiens
  misc_RNA (1)...(19): siRNA sense strand
ggacaagagcgcaggcagu

SEQ ID NO: 2320250 - RNA, 19 nt, Homo sapiens
  misc_RNA (1)...(19): siRNA sense strand
agaaaaggguauacagcuu

SEQ ID NO: 2320251 - RNA, 19 nt, Homo sapiens
  misc_RNA (1)...(19): siRNA sense strand
cagaauucuaccaggacuu

SEQ ID NO: 2320252 - RNA, 19 nt, Homo sapiens
  misc_RNA (1)...(19): siRNA sense strand
agcgaggagaagcgagaaa

SEQ ID NO: 2320253 - RNA, 19 nt, Homo sapiens
  misc_RNA (1)...(19): siRNA sense strand
ccucaaaagcaaggaaaau

SEQ ID NO: 2320254 - RNA, 19 nt, Homo sapiens
  misc_RNA (1)...(19): siRNA sense strand
agucagaauucuaccagga

SEQ ID NO: 2320255 - RNA, 19 nt, Homo sapiens
  misc_RNA (1)...(19): siRNA sense strand
caaauauggucuugcugca

SEQ ID NO: 2320256 - RNA, 19 nt, Homo sapiens
  misc_RNA (1)...(19): siRNA sense strand
agagcgaggagaagcgaga

SEQ ID NO: 2320257 - RNA, 19 nt, Homo sapiens
  misc_RNA (1)...(19): siRNA sense strand
caacacgacugcagaccca

SEQ ID NO: 2320258 - RNA, 19 nt, Homo sapiens
  misc_RNA (1)...(19): siRNA sense strand
agaaaaggaagcuccaaaa

SEQ ID NO: 2320259 - RNA, 19 nt, Homo sapiens
  misc_RNA (1)...(19): siRNA sense strand
ggaagcuccaaaagagaua

SEQ ID NO: 2320260 - RNA, 19 nt, Homo sapiens
  misc_RNA (1)...(19): siRNA sense strand
ucuaccaggacuuguguaa

SEQ ID NO: 2320261 - RNA, 19 nt, Homo sapiens
  misc_RNA (1)...(19): siRNA sense strand
gacaagaaucggaggcgaa

SEQ ID NO: 2320262 - RNA, 19 nt, Homo sapiens
  misc_RNA (1)...(19): siRNA sense strand
cagggaaagaggugaucaa

SEQ ID NO: 2320263 - RNA, 19 nt, Homo sapiens
  misc_RNA (1)...(19): siRNA sense strand
agccagagaaggagcuaaa

SEQ ID NO: 2320264 - RNA, 19 nt, Homo sapiens
  misc_RNA (1)...(19): siRNA sense strand
gagcacagguggaccgguu

SEQ ID NO: 2320265 - RNA, 19 nt, Homo sapiens
  misc_RNA (1)...(19): siRNA sense strand
ggaaguuucagaagggcau

SEQ ID NO: 2320266 - RNA, 19 nt, Homo sapiens
  misc_RNA (1)...(19): siRNA sense strand
ggacaagaaucggaggcga

SEQ ID NO: 2320267 - RNA, 19 nt, Homo sapiens
  misc_RNA (1)...(19): siRNA sense strand
gugcagggaaagaggugau

SEQ ID NO: 2320268 - RNA, 19 nt, Homo sapiens
  misc_RNA (1)...(19): siRNA sense strand
ugaucaacaaagaggacuu

SEQ ID NO: 2320269 - RNA, 19 nt, Homo sapiens
  misc_RNA (1)...(19): siRNA sense strand
ccacagaggaugaggccug

SEQ ID NO: 2320270 - RNA, 19 nt, Homo sapiens
  misc_RNA (1)...(19): siRNA sense strand
augaaagcgcagagccgua

SEQ ID NO: 2320271 - RNA, 19 nt, Homo sapiens
  misc_RNA (1)...(19): siRNA sense strand
agacaagugcagggaaaga

SEQ ID NO: 2320272 - RNA, 19 nt, Homo sapiens
  misc_RNA (1)...(19): siRNA sense strand
ugguauaacuaacuggguu

SEQ ID NO: 2320273 - RNA, 19 nt, Homo sapiens
  misc_RNA (1)...(19): siRNA sense strand
ugaaaaucaacauggacaa

SEQ ID NO: 2320274 - RNA, 19 nt, Homo sapiens
  misc_RNA (1)...(19): siRNA sense strand
aggccauccuuuaaaugua

SEQ ID NO: 2320275 - RNA, 19 nt, Homo sapiens
  misc_RNA (1)...(19): siRNA sense strand
gacaaaccaaagagcggaa

SEQ ID NO: 2320276 - RNA, 19 nt, Homo sapiens
  misc_RNA (1)...(19): siRNA sense strand
caaaccaaagagcggaaau

SEQ ID NO: 2320277 - RNA, 19 nt, Homo sapiens
  misc_RNA (1)...(19): siRNA sense strand
gguauaacuaacuggguuc

SEQ ID NO: 2320278 - RNA, 19 nt, Homo sapiens
  misc_RNA (1)...(19): siRNA sense strand
augaauacauggaagaaca

SEQ ID NO: 2320279 - RNA, 19 nt, Homo sapiens
  misc_RNA (1)...(19): siRNA sense strand
aggcuuuggcauaggauca

SEQ ID NO: 2320280 - RNA, 19 nt, Homo sapiens
  misc_RNA (1)...(19): siRNA sense strand
cagugaagaggguuggaga

SEQ ID NO: 2320281 - RNA, 19 nt, Homo sapiens
  misc_RNA (1)...(19): siRNA sense strand
gcaaugaggugucgcugca

SEQ ID NO: 2320282 - RNA, 19 nt, Homo sapiens
  misc_RNA (1)...(19): siRNA sense strand
ugaauacauggaagaacaa

SEQ ID NO: 2320283 - RNA, 19 nt, Homo sapiens
  misc_RNA (1)...(19): siRNA sense strand
auacauggaagaacaagua

SEQ ID NO: 2320284 - RNA, 19 nt, Homo sapiens
  misc_RNA (1)...(19): siRNA sense strand
acauggaagaacaaguaau

SEQ ID NO: 2320285 - RNA, 19 nt, Homo sapiens
  misc_RNA (1)...(19): siRNA sense strand
cagaagugccgaaagagca

SEQ ID NO: 2320286 - RNA, 19 nt, Homo sapiens
  misc_RNA (1)...(19): siRNA sense strand
ccgaaagagcacuggacuc

SEQ ID NO: 2320287 - RNA, 19 nt, Homo sapiens
  misc_RNA (1)...(19): siRNA sense strand
cuugguagcagaauggaau

SEQ ID NO: 2320288 - RNA, 19 nt, Homo sapiens
  misc_RNA (1)...(19): siRNA sense strand
ccaacaagcucuucggaga

SEQ ID NO: 2320289 - RNA, 19 nt, Homo sapiens
  misc_RNA (1)...(19): siRNA sense strand
gcagaauaugagagagaca

SEQ ID NO: 2320290 - RNA, 19 nt, Homo sapiens
  misc_RNA (1)...(19): siRNA sense strand
uugcagaauaugagagaga

SEQ ID NO: 2320291 - RNA, 19 nt, Homo sapiens
  misc_RNA (1)...(19): siRNA sense strand
ucaaaauggaagagagcua

SEQ ID NO: 2320292 - RNA, 19 nt, Homo sapiens
  misc_RNA (1)...(19): siRNA sense strand
cuguaguaguagucgaauu

SEQ ID NO: 2320293 - RNA, 19 nt, Homo sapiens
  misc_RNA (1)...(19): siRNA sense strand
gggcagugggagaauaaau

SEQ ID NO: 2320294 - RNA, 19 nt, Homo sapiens
  misc_RNA (1)...(19): siRNA sense strand
cguugagaaccaugggaau

SEQ ID NO: 2320295 - RNA, 19 nt, Homo sapiens
  misc_RNA (1)...(19): siRNA sense strand
caaaugaaaucgauggucu

SEQ ID NO: 2320296 - RNA, 19 nt, Homo sapiens
  misc_RNA (1)...(19): siRNA sense strand
uggaggauguacaggccaa

SEQ ID NO: 2320297 - RNA, 19 nt, Homo sapiens
  misc_RNA (1)...(19): siRNA sense strand
aggaauauuuagaugccau

SEQ ID NO: 2320298 - RNA, 19 nt, Homo sapiens
  misc_RNA (1)...(19): siRNA sense strand
ccaaacaagaauacauaca

SEQ ID NO: 2320299 - RNA, 19 nt, Homo sapiens
  misc_RNA (1)...(19): siRNA sense strand
aggcaaagaucuaagcaug

SEQ ID NO: 2320300 - RNA, 19 nt, Homo sapiens
  misc_RNA (1)...(19): siRNA sense strand
aggcaauacaauuccuuua

SEQ ID NO: 2320301 - RNA, 19 nt, Homo sapiens
  misc_RNA (1)...(19): siRNA sense strand
ccuggaaauaccauacaaa

SEQ ID NO: 2320302 - RNA, 19 nt, Homo sapiens
  misc_RNA (1)...(19): siRNA sense strand
ggagaaaagacguaucaau

SEQ ID NO: 2320303 - RNA, 19 nt, Homo sapiens
  misc_RNA (1)...(19): siRNA sense strand
uucaaagggcagugggaga

SEQ ID NO: 2320304 - RNA, 19 nt, Homo sapiens
  misc_RNA (1)...(19): siRNA sense strand
cugcacaacaaauuagcaa

SEQ ID NO: 2320305 - RNA, 19 nt, Homo sapiens
  misc_RNA (1)...(19): siRNA sense strand
acuccuggguggaaaguca

SEQ ID NO: 2320306 - RNA, 19 nt, Homo sapiens
  misc_RNA (1)...(19): siRNA sense strand
cagugggagaauaaauuua

SEQ ID NO: 2320307 - RNA, 19 nt, Homo sapiens
  misc_RNA (1)...(19): siRNA sense strand
cuguacagaugaugaggca

SEQ ID NO: 2320308 - RNA, 19 nt, Homo sapiens
  misc_RNA (1)...(19): siRNA sense strand
cagaaaaucaaaagagaac

SEQ ID NO: 2320309 - RNA, 19 nt, Homo sapiens
  misc_RNA (1)...(19): siRNA sense strand
aaggacacguugagaacca

SEQ ID NO: 2320310 - RNA, 19 nt, Homo sapiens
  misc_RNA (1)...(19): siRNA sense strand
uguugauaggucaggaaau

SEQ ID NO: 2320311 - RNA, 19 nt, Homo sapiens
  misc_RNA (1)...(19): siRNA sense strand
aagggcagugggagaauaa

SEQ ID NO: 2320312 - RNA, 19 nt, Homo sapiens
  misc_RNA (1)...(19): siRNA sense strand
gcuaugaccucaaggacac

SEQ ID NO: 2320313 - RNA, 19 nt, Homo sapiens
  misc_RNA (1)...(19): siRNA sense strand
aagaaagucgaaagaagau

SEQ ID NO: 2320314 - RNA, 19 nt, Homo sapiens
  misc_RNA (1)...(19): siRNA sense strand
aaauugauggaauggacaa

SEQ ID NO: 2320315 - RNA, 19 nt, Homo sapiens
  misc_RNA (1)...(19): siRNA sense strand
ugaucaagucacagagaac

SEQ ID NO: 2320316 - RNA, 19 nt, Homo sapiens
  misc_RNA (1)...(19): siRNA sense strand
augcauaugagcugaagau

SEQ ID NO: 2320317 - RNA, 19 nt, Homo sapiens
  misc_RNA (1)...(19): siRNA sense strand
caacaaauuagcaagguuc

SEQ ID NO: 2320318 - RNA, 19 nt, Homo sapiens
  misc_RNA (1)...(19): siRNA sense strand
gguucuucacuuugaucaa

SEQ ID NO: 2320319 - RNA, 19 nt, Homo sapiens
  misc_RNA (1)...(19): siRNA sense strand
uuaccagaccaguguggaa

SEQ ID NO: 2320320 - RNA, 19 nt, Homo sapiens
  misc_RNA (1)...(19): siRNA sense strand
ccuauuuccugaugggacu

SEQ ID NO: 2320321 - RNA, 19 nt, Homo sapiens
  misc_RNA (1)...(19): siRNA sense strand
cugcagaagcuugaagaga

SEQ ID NO: 2320322 - RNA, 19 nt, Homo sapiens
  misc_RNA (1)...(19): siRNA sense strand
gaaauugauggaauggaca

SEQ ID NO: 2320323 - RNA, 19 nt, Homo sapiens
  misc_RNA (1)...(19): siRNA sense strand
aggcaaaauaagaccaaca

SEQ ID NO: 2320324 - RNA, 19 nt, Homo sapiens
  misc_RNA (1)...(19): siRNA sense strand
ccacaagccacauggguga

SEQ ID NO: 2320325 - RNA, 19 nt, Homo sapiens
  misc_RNA (1)...(19): siRNA sense strand
agaaauaacaugauccaga

SEQ ID NO: 2320326 - RNA, 19 nt, Homo sapiens
  misc_RNA (1)...(19): siRNA sense strand
uguggaagguguagggagu

SEQ ID NO: 2320327 - RNA, 19 nt, Homo sapiens
  misc_RNA (1)...(19): siRNA sense strand
auaacaugauccagaccaa

SEQ ID NO: 2320328 - RNA, 19 nt, Homo sapiens
  misc_RNA (1)...(19): siRNA sense strand
ccuaaaagucugugcugau

SEQ ID NO: 2320329 - RNA, 19 nt, Homo sapiens
  misc_RNA (1)...(19): siRNA sense strand
aggaaauccaacaccagaa

SEQ ID NO: 2320330 - RNA, 19 nt, Homo sapiens
  misc_RNA (1)...(19): siRNA sense strand
cagaccaagccaacaggaa

SEQ ID NO: 2320331 - RNA, 19 nt, Homo sapiens
  misc_RNA (1)...(19): siRNA sense strand
cugcauacauuguggaagg

SEQ ID NO: 2320332 - RNA, 19 nt, Homo sapiens
  misc_RNA (1)...(19): siRNA sense strand
ugacaaagaucuuagggaa

SEQ ID NO: 2320333 - RNA, 19 nt, Homo sapiens
  misc_RNA (1)...(19): siRNA sense strand
gggaacugucggaggucaa

SEQ ID NO: 2320334 - RNA, 19 nt, Homo sapiens
  misc_RNA (1)...(19): siRNA sense strand
ccaucaauuauguggaaau

SEQ ID NO: 2320335 - RNA, 19 nt, Homo sapiens
  misc_RNA (1)...(19): siRNA sense strand
caaauuuggaagagagcuu

SEQ ID NO: 2320336 - RNA, 19 nt, Homo sapiens
  misc_RNA (1)...(19): siRNA sense strand
agaagaaacgacaaggcaa

SEQ ID NO: 2320337 - RNA, 19 nt, Homo sapiens
  misc_RNA (1)...(19): siRNA sense strand
uggaagagagcuuggagau

SEQ ID NO: 2320338 - RNA, 19 nt, Homo sapiens
  misc_RNA (1)...(19): siRNA sense strand
uugaugagucuaaggaaau

SEQ ID NO: 2320339 - RNA, 19 nt, Homo sapiens
  misc_RNA (1)...(19): siRNA sense strand
uggaaaggaaaguggaugu

SEQ ID NO: 2320340 - RNA, 19 nt, Homo sapiens
  misc_RNA (1)...(19): siRNA sense strand
uggaagaaagaauaagaca

SEQ ID NO: 2320341 - RNA, 19 nt, Homo sapiens
  misc_RNA (1)...(19): siRNA sense strand
gcucaaauuuggaagagag

SEQ ID NO: 2320342 - RNA, 19 nt, Homo sapiens
  misc_RNA (1)...(19): siRNA sense strand
gaagaaacgacaaggcaag

SEQ ID NO: 2320343 - RNA, 19 nt, Homo sapiens
  misc_RNA (1)...(19): siRNA sense strand
ugaucaacaccaugucaaa

SEQ ID NO: 2320344 - RNA, 19 nt, Homo sapiens
  misc_RNA (1)...(19): siRNA sense strand
gguuggaggagcugaagga

SEQ ID NO: 2320345 - RNA, 19 nt, Homo sapiens
  misc_RNA (1)...(19): siRNA sense strand
ucagaaagugagugagaag

SEQ ID NO: 2320346 - RNA, 19 nt, Homo sapiens
  misc_RNA (1)...(19): siRNA sense strand
ugagaagguuggaggagcu

SEQ ID NO: 2320347 - RNA, 19 nt, Homo sapiens
  misc_RNA (1)...(19): siRNA sense strand
cucaagaagcaguuccaua

SEQ ID NO: 2320348 - RNA, 19 nt, Homo sapiens
  misc_RNA (1)...(19): siRNA sense strand
ggaagaaagaauaagacag

SEQ ID NO: 2320349 - RNA, 19 nt, Homo sapiens
  misc_RNA (1)...(19): siRNA sense strand
acgaaugagccuggaguuu

SEQ ID NO: 2320350 - RNA, 19 nt, Homo sapiens
  misc_RNA (1)...(19): siRNA sense strand
cugaaggaaccaagcuaga

SEQ ID NO: 2320351 - RNA, 19 nt, Homo sapiens
  misc_RNA (1)...(19): siRNA sense strand
aggcaagauuccggaugaa

SEQ ID NO: 2320352 - RNA, 19 nt, Homo sapiens
  misc_RNA (1)...(19): siRNA sense strand
cuuuggacauagaagugaa

SEQ ID NO: 2320353 - RNA, 19 nt, Homo sapiens
  misc_RNA (1)...(19): siRNA sense strand
auauugaacaagugagcca

SEQ ID NO: 2320354 - RNA, 19 nt, Homo sapiens
  misc_RNA (1)...(19): siRNA sense strand
cggucagacuggaagaaag

SEQ ID NO: 2320355 - RNA, 19 nt, Homo sapiens
  misc_RNA (1)...(19): siRNA sense strand
gggaguugggauuuaaaga

SEQ ID NO: 2320356 - RNA, 19 nt, Homo sapiens
  misc_RNA (1)...(19): siRNA sense strand
ggagaaggggccaggcuau

SEQ ID NO: 2320357 - RNA, 19 nt, Homo sapiens
  misc_RNA (1)...(19): siRNA sense strand
aagagagcuuggagaugau

SEQ ID NO: 2320358 - RNA, 19 nt, Homo sapiens
  misc_RNA (1)...(19): siRNA sense strand
agaaagaauaagacaggcu

SEQ ID NO: 2320359 - RNA, 19 nt, Homo sapiens
  misc_RNA (1)...(19): siRNA sense strand
gccuagaagggaauaucaa

SEQ ID NO: 2320360 - RNA, 19 nt, Homo sapiens
  misc_RNA (1)...(19): siRNA sense strand
uaaagaaguuggagggucg

SEQ ID NO: 2320361 - RNA, 19 nt, Homo sapiens
  misc_RNA (1)...(19): siRNA sense strand
cgacuuugaaccugaaaau

SEQ ID NO: 2320362 - RNA, 19 nt, Homo sapiens
  misc_RNA (1)...(19): siRNA sense strand
gcuaaauggucauaggcga

SEQ ID NO: 2320363 - RNA, 19 nt, Homo sapiens
  misc_RNA (1)...(19): siRNA sense strand
cuauggagaaaguggcuaa

SEQ ID NO: 2320364 - RNA, 19 nt, Homo sapiens
  misc_RNA (1)...(19): siRNA sense strand
ucuuagagaaacaggaaaa

SEQ ID NO: 2320365 - RNA, 19 nt, Homo sapiens
  misc_RNA (1)...(19): siRNA sense strand
aggaauugcaacagccauu

SEQ ID NO: 2320366 - RNA, 19 nt, Homo sapiens
  misc_RNA (1)...(19): siRNA sense strand
gugaaauaacucugccaca

SEQ ID NO: 2320367 - RNA, 19 nt, Homo sapiens
  misc_RNA (1)...(19): siRNA sense strand
agucuuagagaaacaggaa

SEQ ID NO: 2320368 - RNA, 19 nt, Homo sapiens
  misc_RNA (1)...(19): siRNA sense strand
ucauggaggaauugcaaca

SEQ ID NO: 2320369 - RNA, 19 nt, Homo sapiens
  misc_RNA (1)...(19): siRNA sense strand
cguacagcugauaggaaca

SEQ ID NO: 2320370 - RNA, 19 nt, Homo sapiens
  misc_RNA (1)...(19): siRNA sense strand
gacuugagcuaaaugguca

SEQ ID NO: 2320371 - RNA, 19 nt, Homo sapiens
  misc_RNA (1)...(19): siRNA sense strand
ggaggauagaccugagcaa

SEQ ID NO: 2320372 - RNA, 19 nt, Homo sapiens
  misc_RNA (1)...(19): siRNA sense strand
cggcugaagcggaggaagu

SEQ ID NO: 2320373 - RNA, 19 nt, Homo sapiens
  misc_RNA (1)...(19): siRNA sense strand
cccaggacauggagggcaa

SEQ ID NO: 2320374 - RNA, 19 nt, Homo sapiens
  misc_RNA (1)...(19): siRNA sense strand
ccaagaaguuugaaugcca

SEQ ID NO: 2320375 - RNA, 19 nt, Homo sapiens
  misc_RNA (1)...(19): siRNA sense strand
gggaaaggccugugagcag

SEQ ID NO: 2320376 - RNA, 19 nt, Homo sapiens
  misc_RNA (1)...(19): siRNA sense strand
cggcagaggacaaugggau

SEQ ID NO: 2320377 - RNA, 19 nt, Homo sapiens
  misc_RNA (1)...(19): siRNA sense strand
ccagauuggagcaguggaa

SEQ ID NO: 2320378 - RNA, 19 nt, Homo sapiens
  misc_RNA (1)...(19): siRNA sense strand
gggcgagcugugugagcaa

SEQ ID NO: 2320379 - RNA, 19 nt, Homo sapiens
  misc_RNA (1)...(19): siRNA sense strand
aggauagaccugagcaaca

SEQ ID NO: 2320380 - RNA, 19 nt, Homo sapiens
  misc_RNA (1)...(19): siRNA sense strand
ggaucaugccugugccaau

SEQ ID NO: 2320381 - RNA, 19 nt, Homo sapiens
  misc_RNA (1)...(19): siRNA sense strand
guguggauggugugggcaa

SEQ ID NO: 2320382 - RNA, 19 nt, Homo sapiens
  misc_RNA (1)...(19): siRNA sense strand
aagaauauaccucggaaca

SEQ ID NO: 2320383 - RNA, 19 nt, Homo sapiens
  misc_RNA (1)...(19): siRNA sense strand
ccaagaucccugagcgcau

SEQ ID NO: 2320384 - RNA, 19 nt, Homo sapiens
  misc_RNA (1)...(19): siRNA sense strand
gccuggaacucaauggcaa

SEQ ID NO: 2320385 - RNA, 19 nt, Homo sapiens
  misc_RNA (1)...(19): siRNA sense strand
gcuacaaggaaccgggcau

SEQ ID NO: 2320386 - RNA, 19 nt, Homo sapiens
  misc_RNA (1)...(19): siRNA sense strand
acaacaagauccagagccu

SEQ ID NO: 2320387 - RNA, 19 nt, Homo sapiens
  misc_RNA (1)...(19): siRNA sense strand
cagaaagcuacggaggaua

SEQ ID NO: 2320388 - RNA, 19 nt, Homo sapiens
  misc_RNA (1)...(19): siRNA sense strand
cugaacagcgagugcaaca

SEQ ID NO: 2320389 - RNA, 19 nt, Homo sapiens
  misc_RNA (1)...(19): siRNA sense strand
agaaaaucaaucugagcaa

SEQ ID NO: 2320390 - RNA, 19 nt, Homo sapiens
  misc_RNA (1)...(19): siRNA sense strand
agauacgccuggagcugaa

SEQ ID NO: 2320391 - RNA, 19 nt, Homo sapiens
  misc_RNA (1)...(19): siRNA sense strand
agaucaagagcaagaaguu

SEQ ID NO: 2320392 - RNA, 19 nt, Homo sapiens
  misc_RNA (1)...(19): siRNA sense strand
cagccaaagagcaguacuu

SEQ ID NO: 2320393 - RNA, 19 nt, Homo sapiens
  misc_RNA (1)...(19): siRNA sense strand
caagaaguuugaaugccaa

SEQ ID NO: 2320394 - RNA, 19 nt, Homo sapiens
  misc_RNA (1)...(19): siRNA sense strand
ucgggcagaucaagagcaa

SEQ ID NO: 2320395 - RNA, 19 nt, Homo sapiens
  misc_RNA (1)...(19): siRNA sense strand
caaguguguccaugggcaa

SEQ ID NO: 2320396 - RNA, 19 nt, Homo sapiens
  misc_RNA (1)...(19): siRNA sense strand
ugaaggagcuggagcggcu

SEQ ID NO: 2320397 - RNA, 19 nt, Homo sapiens
  misc_RNA (1)...(19): siRNA sense strand
cagaugacuguguggauca

SEQ ID NO: 2320398 - RNA, 19 nt, Homo sapiens
  misc_RNA (1)...(19): siRNA sense strand
aacaacaaggugucagaaa

SEQ ID NO: 2320399 - RNA, 19 nt, Homo sapiens
  misc_RNA (1)...(19): siRNA sense strand
gcaagaucgugacggggaa

SEQ ID NO: 2320400 - RNA, 19 nt, Homo sapiens
  misc_RNA (1)...(19): siRNA sense strand
gggccaacuguguggacca

SEQ ID NO: 2320401 - RNA, 19 nt, Homo sapiens
  misc_RNA (1)...(19): siRNA sense strand
ucuccacggcagaggacaa

SEQ ID NO: 2320402 - RNA, 19 nt, Homo sapiens
  misc_RNA (1)...(19): siRNA sense strand
cgcugguccucuauggaaa

SEQ ID NO: 2320403 - RNA, 19 nt, Homo sapiens
  misc_RNA (1)...(19): siRNA sense strand
uugccgaggagguggaaaa

SEQ ID NO: 2320404 - RNA, 19 nt, Homo sapiens
  misc_RNA (1)...(19): siRNA sense strand
ggacccuaaugcugcggaa

SEQ ID NO: 2320405 - RNA, 19 nt, Homo sapiens
  misc_RNA (1)...(19): siRNA sense strand
ccauggacaacuuuggcaa

SEQ ID NO: 2320406 - RNA, 19 nt, Homo sapiens
  misc_RNA (1)...(19): siRNA sense strand
gcuucaaccauaugcccaa

SEQ ID NO: 2320407 - RNA, 19 nt, Homo sapiens
  misc_RNA (1)...(19): siRNA sense strand
cguggacugucguggaaaa

SEQ ID NO: 2320408 - RNA, 19 nt, Homo sapiens
  misc_RNA (1)...(19): siRNA sense strand
cccuaaugcugcggaacaa

SEQ ID NO: 2320409 - RNA, 19 nt, Homo sapiens
  misc_RNA (1)...(19): siRNA sense strand
ugacuucaggugugaggaa

SEQ ID NO: 2320410 - RNA, 19 nt, Homo sapiens
  misc_RNA (1)...(19): siRNA sense strand
auuuacggcuggacaagaa

SEQ ID NO: 2320411 - RNA, 19 nt, Homo sapiens
  misc_RNA (1)...(19): siRNA sense strand
cagagguccagaagaguga

SEQ ID NO: 2320412 - RNA, 19 nt, Homo sapiens
  misc_RNA (1)...(19): siRNA sense strand
ugguguguuuggaggccua

SEQ ID NO: 2320413 - RNA, 19 nt, Homo sapiens
  misc_RNA (1)...(19): siRNA sense strand
cacugaaucuccuggccaa

SEQ ID NO: 2320414 - RNA, 19 nt, Homo sapiens
  misc_RNA (1)...(19): siRNA sense strand
ccguugagcugguugccuu

SEQ ID NO: 2320415 - RNA, 19 nt, Homo sapiens
  misc_RNA (1)...(19): siRNA sense strand
ccaagaauauaccucggaa

SEQ ID NO: 2320416 - RNA, 19 nt, Homo sapiens
  misc_RNA (1)...(19): siRNA sense strand
gugaggaaggccaggagga

SEQ ID NO: 2320417 - RNA, 19 nt, Homo sapiens
  misc_RNA (1)...(19): siRNA sense strand
cggaagcgcaagaucguga

SEQ ID NO: 2320418 - RNA, 19 nt, Homo sapiens
  misc_RNA (1)...(19): siRNA sense strand
ccacauugcaguugagcug

SEQ ID NO: 2320419 - RNA, 19 nt, Homo sapiens
  misc_RNA (1)...(19): siRNA sense strand
uuccaggcacggaggauua

SEQ ID NO: 2320420 - RNA, 19 nt, Homo sapiens
  misc_RNA (1)...(19): siRNA sense strand
cggaggauuaccagcugaa

SEQ ID NO: 2320421 - RNA, 19 nt, Homo sapiens
  misc_RNA (1)...(19): siRNA sense strand
gaggauuaccagcugaaca

SEQ ID NO: 2320422 - RNA, 19 nt, Homo sapiens
  misc_RNA (1)...(19): siRNA sense strand
gagggaugcccguggaugu

SEQ ID NO: 2320423 - RNA, 19 nt, Homo sapiens
  misc_RNA (1)...(19): siRNA sense strand
ggaaagggcuugauggaga

SEQ ID NO: 2320424 - RNA, 19 nt, Homo sapiens
  misc_RNA (1)...(19): siRNA sense strand
gcaagugugccgagggcua

SEQ ID NO: 2320425 - RNA, 19 nt, Homo sapiens
  misc_RNA (1)...(19): siRNA sense strand
cugucaacuucgugggcaa

SEQ ID NO: 2320426 - RNA, 19 nt, Homo sapiens
  misc_RNA (1)...(19): siRNA sense strand
gugcaagaauaacgggaca

SEQ ID NO: 2320427 - RNA, 19 nt, Homo sapiens
  misc_RNA (1)...(19): siRNA sense strand
agaucaaggaggugcgaga

SEQ ID NO: 2320428 - RNA, 19 nt, Homo sapiens
  misc_RNA (1)...(19): siRNA sense strand
acaucaacauuguggccaa

SEQ ID NO: 2320429 - RNA, 19 nt, Homo sapiens
  misc_RNA (1)...(19): siRNA sense strand
agcuguaccuggaaggaaa

SEQ ID NO: 2320430 - RNA, 19 nt, Homo sapiens
  misc_RNA (1)...(19): siRNA sense strand
cagaugacugugaggacaa

SEQ ID NO: 2320431 - RNA, 19 nt, Homo sapiens
  misc_RNA (1)...(19): siRNA sense strand
cgggaagcucugugagaca

SEQ ID NO: 2320432 - RNA, 19 nt, Homo sapiens
  misc_RNA (1)...(19): siRNA sense strand
aggaagaggcggaucguca

SEQ ID NO: 2320433 - RNA, 19 nt, Homo sapiens
  misc_RNA (1)...(19): siRNA sense strand
gaggacaacgacugcgaaa

SEQ ID NO: 2320434 - RNA, 19 nt, Homo sapiens
  misc_RNA (1)...(19): siRNA sense strand
guguggagacagugaauga

SEQ ID NO: 2320435 - RNA, 19 nt, Homo sapiens
  misc_RNA (1)...(19): siRNA sense strand
ccuugaugcugaggaguaa

SEQ ID NO: 2320436 - RNA, 19 nt, Homo sapiens
  misc_RNA (1)...(19): siRNA sense strand
gcaauaacaucguggacug

SEQ ID NO: 2320437 - RNA, 19 nt, Homo sapiens
  misc_RNA (1)...(19): siRNA sense strand
acaauaagaucaaggaggu

SEQ ID NO: 2320438 - RNA, 19 nt, Homo sapiens
  misc_RNA (1)...(19): siRNA sense strand
ugaaccuaguaguggacaa

SEQ ID NO: 2320439 - RNA, 19 nt, Homo sapiens
  misc_RNA (1)...(19): siRNA sense strand
acugaaugacaaugaggua

SEQ ID NO: 2320440 - RNA, 19 nt, Homo sapiens
  misc_RNA (1)...(19): siRNA sense strand
gggaacaagaucaccgaga

SEQ ID NO: 2320441 - RNA, 19 nt, Homo sapiens
  misc_RNA (1)...(19): siRNA sense strand
acagaugccaccauggaaa

SEQ ID NO: 2320442 - RNA, 19 nt, Homo sapiens
  misc_RNA (1)...(19): siRNA sense strand
ccuacagcuacaagggcaa

SEQ ID NO: 2320443 - RNA, 19 nt, Homo sapiens
  misc_RNA (1)...(19): siRNA sense strand
cugaguaacaauaagauca

SEQ ID NO: 2320444 - RNA, 19 nt, Homo sapiens
  misc_RNA (1)...(19): siRNA sense strand
cuuauugaccugagcaaca

SEQ ID NO: 2320445 - RNA, 19 nt, Homo sapiens
  misc_RNA (1)...(19): siRNA sense strand
cggagggcaucgucgaaau

SEQ ID NO: 2320446 - RNA, 19 nt, Homo sapiens
  misc_RNA (1)...(19): siRNA sense strand
ucaacaacuacguguguau

SEQ ID NO: 2320447 - RNA, 19 nt, Homo sapiens
  misc_RNA (1)...(19): siRNA sense strand
ggucagcgucaucgagaga

SEQ ID NO: 2320448 - RNA, 19 nt, Homo sapiens
  misc_RNA (1)...(19): siRNA sense strand
gcuucaacguggcggaugu

SEQ ID NO: 2320449 - RNA, 19 nt, Homo sapiens
  misc_RNA (1)...(19): siRNA sense strand
ucagccagaucaagagcaa

SEQ ID NO: 2320450 - RNA, 19 nt, Homo sapiens
  misc_RNA (1)...(19): siRNA sense strand
caagaaugacucugccaau

SEQ ID NO: 2320451 - RNA, 19 nt, Homo sapiens
  misc_RNA (1)...(19): siRNA sense strand
ugaagcagcuagagcgacu

SEQ ID NO: 2320452 - RNA, 19 nt, Homo sapiens
  misc_RNA (1)...(19): siRNA sense strand
agaucaagagcaagaaguu

SEQ ID NO: 2320453 - RNA, 19 nt, Homo sapiens
  misc_RNA (1)...(19): siRNA sense strand
ggaaccagcuggagaccgu

SEQ ID NO: 2320454 - RNA, 19 nt, Homo sapiens
  misc_RNA (1)...(19): siRNA sense strand
gguuaugcaucaugugcca

SEQ ID NO: 2320455 - RNA, 19 nt, Homo sapiens
  misc_RNA (1)...(19): siRNA sense strand
ccagacuagauuugaguga

SEQ ID NO: 2320456 - RNA, 19 nt, Homo sapiens
  misc_RNA (1)...(19): siRNA sense strand
gcgacgaggugauugacca

SEQ ID NO: 2320457 - RNA, 19 nt, Homo sapiens
  misc_RNA (1)...(19): siRNA sense strand
gcaaagacuccuacgugga

SEQ ID NO: 2320458 - RNA, 19 nt, Homo sapiens
  misc_RNA (1)...(19): siRNA sense strand
agccagaucaagagcaaga

SEQ ID NO: 2320459 - RNA, 19 nt, Homo sapiens
  misc_RNA (1)...(19): siRNA sense strand
gugcaggagcugaugcuga

SEQ ID NO: 2320460 - RNA, 19 nt, Homo sapiens
  misc_RNA (1)...(19): siRNA sense strand
cugacaaggacaacggcau

SEQ ID NO: 2320461 - RNA, 19 nt, Homo sapiens
  misc_RNA (1)...(19): siRNA sense strand
cggaugugcagaagaagga

SEQ ID NO: 2320462 - RNA, 19 nt, Homo sapiens
  misc_RNA (1)...(19): siRNA sense strand
cagaagaaggaguacgugu

SEQ ID NO: 2320463 - RNA, 19 nt, Homo sapiens
  misc_RNA (1)...(19): siRNA sense strand
ugaucggcugugugaguaa

SEQ ID NO: 2320464 - RNA, 19 nt, Homo sapiens
  misc_RNA (1)...(19): siRNA sense strand
caucaacauuguggccaaa

SEQ ID NO: 2320465 - RNA, 19 nt, Homo sapiens
  misc_RNA (1)...(19): siRNA sense strand
ucuacaaaggagacaauga

SEQ ID NO: 2320466 - RNA, 19 nt, Homo sapiens
  misc_RNA (1)...(19): siRNA sense strand
cuguaugggaacaagauca

SEQ ID NO: 2320467 - RNA, 19 nt, Homo sapiens
  misc_RNA (1)...(19): siRNA sense strand
agaaauaauaucaccagga

SEQ ID NO: 2320468 - RNA, 19 nt, Homo sapiens
  misc_RNA (1)...(19): siRNA sense strand
ucggcaagugguugaggaa

SEQ ID NO: 2320469 - RNA, 19 nt, Homo sapiens
  misc_RNA (1)...(19): siRNA sense strand
ucgaaauacgccuagaaca

SEQ ID NO: 2320470 - RNA, 19 nt, Homo sapiens
  misc_RNA (1)...(19): siRNA sense strand
aggaugugaccgagcugua

SEQ ID NO: 2320471 - RNA, 19 nt, Homo sapiens
  misc_RNA (1)...(19): siRNA sense strand
cugcaaguccuuccagaau

SEQ ID NO: 2320472 - RNA, 19 nt, Homo sapiens
  misc_RNA (1)...(19): siRNA sense strand
gcuucaaccacaugccgaa

SEQ ID NO: 2320473 - RNA, 19 nt, Homo sapiens
  misc_RNA (1)...(19): siRNA sense strand
ccagaugacugugaggaca

SEQ ID NO: 2320474 - RNA, 19 nt, Homo sapiens
  misc_RNA (1)...(19): siRNA sense strand
gcaucguggugcagcagga

SEQ ID NO: 2320475 - RNA, 19 nt, Homo sapiens
  misc_RNA (1)...(19): siRNA sense strand
ccuccagauugguggugaa

SEQ ID NO: 2320476 - RNA, 19 nt, Homo sapiens
  misc_RNA (1)...(19): siRNA sense strand
agucacaugccauaggaaa

SEQ ID NO: 2320477 - RNA, 19 nt, Homo sapiens
  misc_RNA (1)...(19): siRNA sense strand
agagauuugagcagaacua

SEQ ID NO: 2320478 - RNA, 19 nt, Homo sapiens
  misc_RNA (1)...(19): siRNA sense strand
acuaugauucagaaggcaa

SEQ ID NO: 2320479 - RNA, 19 nt, Homo sapiens
  misc_RNA (1)...(19): siRNA sense strand
ccuugaggacggugaggau

SEQ ID NO: 2320480 - RNA, 19 nt, Homo sapiens
  misc_RNA (1)...(19): siRNA sense strand
agaucgagccugcagacaa

SEQ ID NO: 2320481 - RNA, 19 nt, Homo sapiens
  misc_RNA (1)...(19): siRNA sense strand
ccuucaaugacuuguguau

SEQ ID NO: 2320482 - RNA, 19 nt, Homo sapiens
  misc_RNA (1)...(19): siRNA sense strand
ugcagagauuugagcagaa

SEQ ID NO: 2320483 - RNA, 19 nt, Homo sapiens
  misc_RNA (1)...(19): siRNA sense strand
aagcauuggcuauggacca

SEQ ID NO: 2320484 - RNA, 19 nt, Homo sapiens
  misc_RNA (1)...(19): siRNA sense strand
cgggaagaaaccauuacaa

SEQ ID NO: 2320485 - RNA, 19 nt, Homo sapiens
  misc_RNA (1)...(19): siRNA sense strand
gucacaugccauaggaaaa

SEQ ID NO: 2320486 - RNA, 19 nt, Homo sapiens
  misc_RNA (1)...(19): siRNA sense strand
aucaagaagcauuggcuau

SEQ ID NO: 2320487 - RNA, 19 nt, Homo sapiens
  misc_RNA (1)...(19): siRNA sense strand
cagccagaugggugacgaa

SEQ ID NO: 2320488 - RNA, 19 nt, Homo sapiens
  misc_RNA (1)...(19): siRNA sense strand
aucuacaaaugaaggguaa

SEQ ID NO: 2320489 - RNA, 19 nt, Homo sapiens
  misc_RNA (1)...(19): siRNA sense strand
cuuuaagccagguguauau

SEQ ID NO: 2320490 - RNA, 19 nt, Homo sapiens
  misc_RNA (1)...(19): siRNA sense strand
gcugaaaagucgaggagug

SEQ ID NO: 2320491 - RNA, 19 nt, Homo sapiens
  misc_RNA (1)...(19): siRNA sense strand
auccagagacacagcuaua

SEQ ID NO: 2320492 - RNA, 19 nt, Homo sapiens
  misc_RNA (1)...(19): siRNA sense strand
cccaaggaaucgugcggga

SEQ ID NO: 2320493 - RNA, 19 nt, Homo sapiens
  misc_RNA (1)...(19): siRNA sense strand
gagcaaaggucguagcuga

SEQ ID NO: 2320494 - RNA, 19 nt, Homo sapiens
  misc_RNA (1)...(19): siRNA sense strand
aagaagaagaagaggaaaa

SEQ ID NO: 2320495 - RNA, 19 nt, Homo sapiens
  misc_RNA (1)...(19): siRNA sense strand
ggaaagaagaagaagagga

SEQ ID NO: 2320496 - RNA, 19 nt, Homo sapiens
  misc_RNA (1)...(19): siRNA sense strand
augaaggaaaugagagcaa

SEQ ID NO: 2320497 - RNA, 19 nt, Homo sapiens
  misc_RNA (1)...(19): siRNA sense strand
aggaagaagaaaagaagaa

SEQ ID NO: 2320498 - RNA, 19 nt, Homo sapiens
  misc_RNA (1)...(19): siRNA sense strand
ccuucaaagacgagggcga

SEQ ID NO: 2320499 - RNA, 19 nt, Homo sapiens
  misc_RNA (1)...(19): siRNA sense strand
gcgcuuuggccuugaucaa

SEQ ID NO: 2320500 - RNA, 19 nt, Homo sapiens
  misc_RNA (1)...(19): siRNA sense strand
gggauuuagcugaugucaa

SEQ ID NO: 2320501 - RNA, 19 nt, Homo sapiens
  misc_RNA (1)...(19): siRNA sense strand
agggcgaacaggaggagaa

SEQ ID NO: 2320502 - RNA, 19 nt, Homo sapiens
  misc_RNA (1)...(19): siRNA sense strand
ccagagaagagcaagcgaa

SEQ ID NO: 2320503 - RNA, 19 nt, Homo sapiens
  misc_RNA (1)...(19): siRNA sense strand
aagaagaggaaaagggaca

SEQ ID NO: 2320504 - RNA, 19 nt, Homo sapiens
  misc_RNA (1)...(19): siRNA sense strand
cgacaggaggauucagaca

SEQ ID NO: 2320505 - RNA, 19 nt, Homo sapiens
  misc_RNA (1)...(19): siRNA sense strand
aggaaucgucccagaguga

SEQ ID NO: 2320506 - RNA, 19 nt, Homo sapiens
  misc_RNA (1)...(19): siRNA sense strand
guucaaagcaucaggacuc

SEQ ID NO: 2320507 - RNA, 19 nt, Homo sapiens
  misc_RNA (1)...(19): siRNA sense strand
gaggcaagauggagggcuc

SEQ ID NO: 2320508 - RNA, 19 nt, Homo sapiens
  misc_RNA (1)...(19): siRNA sense strand
agucacaccaacagucaaa

SEQ ID NO: 2320509 - RNA, 19 nt, Homo sapiens
  misc_RNA (1)...(19): siRNA sense strand
acaaagugccaguggugca

SEQ ID NO: 2320510 - RNA, 19 nt, Homo sapiens
  misc_RNA (1)...(19): siRNA sense strand
acuauggaaagaagaagaa

SEQ ID NO: 2320511 - RNA, 19 nt, Homo sapiens
  misc_RNA (1)...(19): siRNA sense strand
uauggaaagaagaagaaga

SEQ ID NO: 2320512 - RNA, 19 nt, Homo sapiens
  misc_RNA (1)...(19): siRNA sense strand
uggccuugaucaacagaau

SEQ ID NO: 2320513 - RNA, 19 nt, Homo sapiens
  misc_RNA (1)...(19): siRNA sense strand
ccagagugaugucggcuca

SEQ ID NO: 2320514 - RNA, 19 nt, Homo sapiens
  misc_RNA (1)...(19): siRNA sense strand
ggccauagucacaccaaca

SEQ ID NO: 2320515 - RNA, 19 nt, Homo sapiens
  misc_RNA (1)...(19): siRNA sense strand
cuucaaagacgagggcgaa

SEQ ID NO: 2320516 - RNA, 19 nt, Homo sapiens
  misc_RNA (1)...(19): siRNA sense strand
gggaaaguuuggaagaagc

SEQ ID NO: 2320517 - RNA, 19 nt, Homo sapiens
  misc_RNA (1)...(19): siRNA sense strand
accaaugaacacagcgaau

SEQ ID NO: 2320518 - RNA, 19 nt, Homo sapiens
  misc_RNA (1)...(19): siRNA sense strand
aaacaggaaucgucccaga

SEQ ID NO: 2320519 - RNA, 19 nt, Homo sapiens
  misc_RNA (1)...(19): siRNA sense strand
acuccauaguucaaagcau

SEQ ID NO: 2320520 - RNA, 19 nt, Homo sapiens
  misc_RNA (1)...(19): siRNA sense strand
ccggaaggagcgacagcuu

SEQ ID NO: 2320521 - RNA, 19 nt, Homo sapiens
  misc_RNA (1)...(19): siRNA sense strand
gugguaacaaacagggaua

SEQ ID NO: 2320522 - RNA, 19 nt, Homo sapiens
  misc_RNA (1)...(19): siRNA sense strand
ccaugugggaggaggaaaa

SEQ ID NO: 2320523 - RNA, 19 nt, Homo sapiens
  misc_RNA (1)...(19): siRNA sense strand
cugcaauauucaagaugau

SEQ ID NO: 2320524 - RNA, 19 nt, Homo sapiens
  misc_RNA (1)...(19): siRNA sense strand
aggaaugaauugauagcca

SEQ ID NO: 2320525 - RNA, 19 nt, Homo sapiens
  misc_RNA (1)...(19): siRNA sense strand
aacacuuaccagagaaaua

SEQ ID NO: 2320526 - RNA, 19 nt, Homo sapiens
  misc_RNA (1)...(19): siRNA sense strand
cuaaaggaucagacugcaa

SEQ ID NO: 2320527 - RNA, 19 nt, Homo sapiens
  misc_RNA (1)...(19): siRNA sense strand
cuuaucagacgaaggcaaa

SEQ ID NO: 2320528 - RNA, 19 nt, Homo sapiens
  misc_RNA (1)...(19): siRNA sense strand
guaugcaagguuugagaau

SEQ ID NO: 2320529 - RNA, 19 nt, Homo sapiens
  misc_RNA (1)...(19): siRNA sense strand
uagugaacacggagcacaa

SEQ ID NO: 2320530 - RNA, 19 nt, Homo sapiens
  misc_RNA (1)...(19): siRNA sense strand
ucuuaucagacgaaggcaa

SEQ ID NO: 2320531 - RNA, 19 nt, Homo sapiens
  misc_RNA (1)...(19): siRNA sense strand
gagcaaagcuuucaggagg

SEQ ID NO: 2320532 - RNA, 19 nt, Homo sapiens
  misc_RNA (1)...(19): siRNA sense strand
cugcaaaggauaaggcccu

SEQ ID NO: 2320533 - RNA, 19 nt, Homo sapiens
  misc_RNA (1)...(19): siRNA sense strand
gguaacaaacagggauaca

SEQ ID NO: 2320534 - RNA, 19 nt, Homo sapiens
  misc_RNA (1)...(19): siRNA sense strand
gaaugaauugauagccaga

SEQ ID NO: 2320535 - RNA, 19 nt, Homo sapiens
  misc_RNA (1)...(19): siRNA sense strand
aggauaaggcccugcagca

SEQ ID NO: 2320536 - RNA, 19 nt, Homo sapiens
  misc_RNA (1)...(19): siRNA sense strand
caguacgagaguucugaaa

SEQ ID NO: 2320537 - RNA, 19 nt, Homo sapiens
  misc_RNA (1)...(19): siRNA sense strand
ccgauuuguauaccgaaua

SEQ ID NO: 2320538 - RNA, 19 nt, Homo sapiens
  misc_RNA (1)...(19): siRNA sense strand
auguaugguaggaaugaau

SEQ ID NO: 2320539 - RNA, 19 nt, Homo sapiens
  misc_RNA (1)...(19): siRNA sense strand
uggacauucgucagauuua

SEQ ID NO: 2320540 - RNA, 19 nt, Homo sapiens
  misc_RNA (1)...(19): siRNA sense strand
ugggaagcaaguaguagaa

SEQ ID NO: 2320541 - RNA, 19 nt, Homo sapiens
  misc_RNA (1)...(19): siRNA sense strand
cggaagaaggugcgggagu

SEQ ID NO: 2320542 - RNA, 19 nt, Homo sapiens
  misc_RNA (1)...(19): siRNA sense strand
ucauggaggugcagcgaga

SEQ ID NO: 2320543 - RNA, 19 nt, Homo sapiens
  misc_RNA (1)...(19): siRNA sense strand
ugacaaauuccccgagaaa

SEQ ID NO: 2320544 - RNA, 19 nt, Homo sapiens
  misc_RNA (1)...(19): siRNA sense strand
ggacaaagcccuucagagc

SEQ ID NO: 2320545 - RNA, 19 nt, Homo sapiens
  misc_RNA (1)...(19): siRNA sense strand
gggaguaccagguuggcau

SEQ ID NO: 2320546 - RNA, 19 nt, Homo sapiens
  misc_RNA (1)...(19): siRNA sense strand
cgaaaugaguugauugcac

SEQ ID NO: 2320547 - RNA, 19 nt, Homo sapiens
  misc_RNA (1)...(19): siRNA sense strand
gcaucaaggccaugaaccu

SEQ ID NO: 2320548 - RNA, 19 nt, Homo sapiens
  misc_RNA (1)...(19): siRNA sense strand
cggacaucgagcagagcuu

SEQ ID NO: 2320549 - RNA, 19 nt, Homo sapiens
  misc_RNA (1)...(19): siRNA sense strand
aaacagguguccagccaca

SEQ ID NO: 2320550 - RNA, 19 nt, Homo sapiens
  misc_RNA (1)...(19): siRNA sense strand
aggcaguagaugugcgcca

SEQ ID NO: 2320551 - RNA, 19 nt, Homo sapiens
  misc_RNA (1)...(19): siRNA sense strand
gcaagauguacggccgaaa

SEQ ID NO: 2320552 - RNA, 19 nt, Homo sapiens
  misc_RNA (1)...(19): siRNA sense strand
gggcagaggacaaggacga

SEQ ID NO: 2320553 - RNA, 19 nt, Homo sapiens
  misc_RNA (1)...(19): siRNA sense strand
aggagaagcuggagcggga

SEQ ID NO: 2320554 - RNA, 19 nt, Homo sapiens
  misc_RNA (1)...(19): siRNA sense strand
acacacagcucaagcgcuu

SEQ ID NO: 2320555 - RNA, 19 nt, Homo sapiens
  misc_RNA (1)...(19): siRNA sense strand
aggacaaggacgaaggcau

SEQ ID NO: 2320556 - RNA, 19 nt, Homo sapiens
  misc_RNA (1)...(19): siRNA sense strand
gggagaucgccaacagcaa

SEQ ID NO: 2320557 - RNA, 19 nt, Homo sapiens
  misc_RNA (1)...(19): siRNA sense strand
acaccaucgugcaggcaau

SEQ ID NO: 2320558 - RNA, 19 nt, Homo sapiens
  misc_RNA (1)...(19): siRNA sense strand
agcaggagcuggaggagga

SEQ ID NO: 2320559 - RNA, 19 nt, Homo sapiens
  misc_RNA (1)...(19): siRNA sense strand
acgagaaggcggaggaccu

SEQ ID NO: 2320560 - RNA, 19 nt, Homo sapiens
  misc_RNA (1)...(19): siRNA sense strand
ccggaaaagcucaagguga

SEQ ID NO: 2320561 - RNA, 19 nt, Homo sapiens
  misc_RNA (1)...(19): siRNA sense strand
acggagagaagcucagcaa

SEQ ID NO: 2320562 - RNA, 19 nt, Homo sapiens
  misc_RNA (1)...(19): siRNA sense strand
ucaggaaaacagagaaaga

SEQ ID NO: 2320563 - RNA, 19 nt, Homo sapiens
  misc_RNA (1)...(19): siRNA sense strand
aggaaaagcaggagcugga

SEQ ID NO: 2320564 - RNA, 19 nt, Homo sapiens
  misc_RNA (1)...(19): siRNA sense strand
agaaagaagugauaggagg

SEQ ID NO: 2320565 - RNA, 19 nt, Homo sapiens
  misc_RNA (1)...(19): siRNA sense strand
agaccaggcucuugcagca

SEQ ID NO: 2320566 - RNA, 19 nt, Homo sapiens
  misc_RNA (1)...(19): siRNA sense strand
cgaagaagcugguucacga

SEQ ID NO: 2320567 - RNA, 19 nt, Homo sapiens
  misc_RNA (1)...(19): siRNA sense strand
gggcauauugcgagggcug

SEQ ID NO: 2320568 - RNA, 19 nt, Homo sapiens
  misc_RNA (1)...(19): siRNA sense strand
ggccauaaugccugagcca

SEQ ID NO: 2320569 - RNA, 19 nt, Homo sapiens
  misc_RNA (1)...(19): siRNA sense strand
gugugguggcugcggagaa

SEQ ID NO: 2320570 - RNA, 19 nt, Homo sapiens
  misc_RNA (1)...(19): siRNA sense strand
gagaagaugugguugggga

SEQ ID NO: 2320571 - RNA, 19 nt, Homo sapiens
  misc_RNA (1)...(19): siRNA sense strand
aggaagaggaggcgagcac

SEQ ID NO: 2320572 - RNA, 19 nt, Homo sapiens
  misc_RNA (1)...(19): siRNA sense strand
gccuggacgccgagauaga

SEQ ID NO: 2320573 - RNA, 19 nt, Homo sapiens
  misc_RNA (1)...(19): siRNA sense strand
auuaugaaguggaggccua

SEQ ID NO: 2320574 - RNA, 19 nt, Homo sapiens
  misc_RNA (1)...(19): siRNA sense strand
caauacuacaagaggauga

SEQ ID NO: 2320575 - RNA, 19 nt, Homo sapiens
  misc_RNA (1)...(19): siRNA sense strand
acauaauggcggaggugga

SEQ ID NO: 2320576 - RNA, 19 nt, Homo sapiens
  misc_RNA (1)...(19): siRNA sense strand
aagugauuaccaaggaaua

SEQ ID NO: 2320577 - RNA, 19 nt, Homo sapiens
  misc_RNA (1)...(19): siRNA sense strand
gggaaaagauggagcggag

SEQ ID NO: 2320578 - RNA, 19 nt, Homo sapiens
  misc_RNA (1)...(19): siRNA sense strand
cugcaauacuacaagagga

SEQ ID NO: 2320579 - RNA, 19 nt, Homo sapiens
  misc_RNA (1)...(19): siRNA sense strand
agguggaagaagagaagca

SEQ ID NO: 2320580 - RNA, 19 nt, Homo sapiens
  misc_RNA (1)...(19): siRNA sense strand
guaaggaccuguggcgcaa

SEQ ID NO: 2320581 - RNA, 19 nt, Homo sapiens
  misc_RNA (1)...(19): siRNA sense strand
cugacgaagaugaagacau

SEQ ID NO: 2320582 - RNA, 19 nt, Homo sapiens
  misc_RNA (1)...(19): siRNA sense strand
ccugaagagggaacagaga

SEQ ID NO: 2320583 - RNA, 19 nt, Homo sapiens
  misc_RNA (1)...(19): siRNA sense strand
uggagguggaagaagagaa

SEQ ID NO: 2320584 - RNA, 19 nt, Homo sapiens
  misc_RNA (1)...(19): siRNA sense strand
augcugagcuacaugguca

SEQ ID NO: 2320585 - RNA, 19 nt, Homo sapiens
  misc_RNA (1)...(19): siRNA sense strand
ggucggaugucuacagcga

SEQ ID NO: 2320586 - RNA, 19 nt, Homo sapiens
  misc_RNA (1)...(19): siRNA sense strand
cagggaucgugaugggaga

SEQ ID NO: 2320587 - RNA, 19 nt, Homo sapiens
  misc_RNA (1)...(19): siRNA sense strand
aucaggagcuccaggguca

SEQ ID NO: 2320588 - RNA, 19 nt, Homo sapiens
  misc_RNA (1)...(19): siRNA sense strand
ggucggaugucuacagcga

SEQ ID NO: 2320589 - RNA, 19 nt, Homo sapiens
  misc_RNA (1)...(19): siRNA sense strand
cagggaucgugaugggaga

SEQ ID NO: 2320590 - RNA, 19 nt, Homo sapiens
  misc_RNA (1)...(19): siRNA sense strand
aucaggagcuccaggguca

SEQ ID NO: 2320591 - RNA, 19 nt, Homo sapiens
  misc_RNA (1)...(19): siRNA sense strand
aaauagucuuugaggacaa

SEQ ID NO: 2320592 - RNA, 19 nt, Homo sapiens
  misc_RNA (1)...(19): siRNA sense strand
agaccaaggcgguggguga

SEQ ID NO: 2320593 - RNA, 19 nt, Homo sapiens
  misc_RNA (1)...(19): siRNA sense strand
agguagacuuaaugaaaga

SEQ ID NO: 2320594 - RNA, 19 nt, Homo sapiens
  misc_RNA (1)...(19): siRNA sense strand
gggaaauagucuuugagga

SEQ ID NO: 2320595 - RNA, 19 nt, Homo sapiens
  misc_RNA (1)...(19): siRNA sense strand
cccuauaaauguauggaau

SEQ ID NO: 2320596 - RNA, 19 nt, Homo sapiens
  misc_RNA (1)...(19): siRNA sense strand
ggaccaggaucuuugggaa

SEQ ID NO: 2320597 - RNA, 19 nt, Homo sapiens
  misc_RNA (1)...(19): siRNA sense strand
ggaaauagucuuugaggac

SEQ ID NO: 2320598 - RNA, 19 nt, Homo sapiens
  misc_RNA (1)...(19): siRNA sense strand
ugacacaggcugagagaac

SEQ ID NO: 2320599 - RNA, 19 nt, Homo sapiens
  misc_RNA (1)...(19): siRNA sense strand
ugaaagaagauuugguacu

SEQ ID NO: 2320600 - RNA, 19 nt, Homo sapiens
  misc_RNA (1)...(19): siRNA sense strand
ccguggaaccagaggacca

SEQ ID NO: 2320601 - RNA, 19 nt, Homo sapiens
  misc_RNA (1)...(19): siRNA sense strand
gacucacacaggagagaaa

SEQ ID NO: 2320602 - RNA, 19 nt, Homo sapiens
  misc_RNA (1)...(19): siRNA sense strand
ggcaaaagcuucagccaga

SEQ ID NO: 2320603 - RNA, 19 nt, Homo sapiens
  misc_RNA (1)...(19): siRNA sense strand
agggaauucugauggugaa

SEQ ID NO: 2320604 - RNA, 19 nt, Homo sapiens
  misc_RNA (1)...(19): siRNA sense strand
agaccagagaggcggacaa

SEQ ID NO: 2320605 - RNA, 19 nt, Homo sapiens
  misc_RNA (1)...(19): siRNA sense strand
acacaggagauaggaguaa

SEQ ID NO: 2320606 - RNA, 19 nt, Homo sapiens
  misc_RNA (1)...(19): siRNA sense strand
cucccagguuagagaggaa

SEQ ID NO: 2320607 - RNA, 19 nt, Homo sapiens
  misc_RNA (1)...(19): siRNA sense strand
auguauggaauguggaaaa

SEQ ID NO: 2320608 - RNA, 19 nt, Homo sapiens
  misc_RNA (1)...(19): siRNA sense strand
gcagaaacaacccaggaga

SEQ ID NO: 2320609 - RNA, 19 nt, Homo sapiens
  misc_RNA (1)...(19): siRNA sense strand
uuugggaagaagagggaau

SEQ ID NO: 2320610 - RNA, 19 nt, Homo sapiens
  misc_RNA (1)...(19): siRNA sense strand
ggugaaacuggaagaugau

SEQ ID NO: 2320611 - RNA, 19 nt, Homo sapiens
  misc_RNA (1)...(19): siRNA sense strand
gguuagagaggaagagccu

SEQ ID NO: 2320612 - RNA, 19 nt, Homo sapiens
  misc_RNA (1)...(19): siRNA sense strand
ugggagaaccagaaauuca

SEQ ID NO: 2320613 - RNA, 19 nt, Homo sapiens
  misc_RNA (1)...(19): siRNA sense strand
ggaagaauuuggaagagac

SEQ ID NO: 2320614 - RNA, 19 nt, Homo sapiens
  misc_RNA (1)...(19): siRNA sense strand
uuugugaaccuucgggaaa

SEQ ID NO: 2320615 - RNA, 19 nt, Homo sapiens
  misc_RNA (1)...(19): siRNA sense strand
gggaauucugauggugaaa

SEQ ID NO: 2320616 - RNA, 19 nt, Homo sapiens
  misc_RNA (1)...(19): siRNA sense strand
aagcuucagcagaggauau

SEQ ID NO: 2320617 - RNA, 19 nt, Homo sapiens
  misc_RNA (1)...(19): siRNA sense strand
aggaagagugucuggagca

SEQ ID NO: 2320618 - RNA, 19 nt, Homo sapiens
  misc_RNA (1)...(19): siRNA sense strand
ugaaacuggaagaugauuu

SEQ ID NO: 2320619 - RNA, 19 nt, Homo sapiens
  misc_RNA (1)...(19): siRNA sense strand
ugguaacguucaaggaugu

SEQ ID NO: 2320620 - RNA, 19 nt, Homo sapiens
  misc_RNA (1)...(19): siRNA sense strand
ucaggagacucaagagcca

SEQ ID NO: 2320621 - RNA, 19 nt, Homo sapiens
  misc_RNA (1)...(19): siRNA sense strand
acaagaugaacgcgccuua

SEQ ID NO: 2320622 - RNA, 19 nt, Homo sapiens
  misc_RNA (1)...(19): siRNA sense strand
gagggaauucugaugguga

SEQ ID NO: 2320623 - RNA, 19 nt, Homo sapiens
  misc_RNA (1)...(19): siRNA sense strand
gagaguguggugaggacuu

SEQ ID NO: 2320624 - RNA, 19 nt, Homo sapiens
  misc_RNA (1)...(19): siRNA sense strand
acgaaugugggaagagcuu

SEQ ID NO: 2320625 - RNA, 19 nt, Homo sapiens
  misc_RNA (1)...(19): siRNA sense strand
cuggagaacuacagagcug

SEQ ID NO: 2320626 - RNA, 19 nt, Homo sapiens
  misc_RNA (1)...(19): siRNA sense strand
uaggaguaaagaugaggaa

SEQ ID NO: 2320627 - RNA, 19 nt, Homo sapiens
  misc_RNA (1)...(19): siRNA sense strand
ugguggaggguuugcagaa

SEQ ID NO: 2320628 - RNA, 19 nt, Homo sapiens
  misc_RNA (1)...(19): siRNA sense strand
uggaagaagacuguggaau

SEQ ID NO: 2320629 - RNA, 19 nt, Homo sapiens
  misc_RNA (1)...(19): siRNA sense strand
agcaggaagaucugaguuu

SEQ ID NO: 2320630 - RNA, 19 nt, Homo sapiens
  misc_RNA (1)...(19): siRNA sense strand
cagacuccagauugggaaa

SEQ ID NO: 2320631 - RNA, 19 nt, Homo sapiens
  misc_RNA (1)...(19): siRNA sense strand
gcuuaguguaccacaucaa

SEQ ID NO: 2320632 - RNA, 19 nt, Homo sapiens
  misc_RNA (1)...(19): siRNA sense strand
uguauuuggacgagaagca

SEQ ID NO: 2320633 - RNA, 19 nt, Homo sapiens
  misc_RNA (1)...(19): siRNA sense strand
gggaagaguccuauggaga

SEQ ID NO: 2320634 - RNA, 19 nt, Homo sapiens
  misc_RNA (1)...(19): siRNA sense strand
uggucacggugcugggaaa

SEQ ID NO: 2320635 - RNA, 19 nt, Homo sapiens
  misc_RNA (1)...(19): siRNA sense strand
ccuuggugacccuggacaa

SEQ ID NO: 2320636 - RNA, 19 nt, Homo sapiens
  misc_RNA (1)...(19): siRNA sense strand
uggucacggugcugggaaa

SEQ ID NO: 2320637 - RNA, 19 nt, Homo sapiens
  misc_RNA (1)...(19): siRNA sense strand
ccuuggugacccuggacaa

SEQ ID NO: 2320638 - RNA, 19 nt, Homo sapiens
  misc_RNA (1)...(19): siRNA sense strand
cgaguuaaugaauggguga

SEQ ID NO: 2320639 - RNA, 19 nt, Homo sapiens
  misc_RNA (1)...(19): siRNA sense strand
aguuaaugaaugggugaua

SEQ ID NO: 2320640 - RNA, 19 nt, Homo sapiens
  misc_RNA (1)...(19): siRNA sense strand
gagucauucaucagaagaa

SEQ ID NO: 2320641 - RNA, 19 nt, Homo sapiens
  misc_RNA (1)...(19): siRNA sense strand
agccugaggaacagagaca

SEQ ID NO: 2320642 - RNA, 19 nt, Homo sapiens
  misc_RNA (1)...(19): siRNA sense strand
ggucauuuguaaaaggaaa

SEQ ID NO: 2320643 - RNA, 19 nt, Homo sapiens
  misc_RNA (1)...(19): siRNA sense strand
cgaguuaaugaauggguga

SEQ ID NO: 2320644 - RNA, 19 nt, Homo sapiens
  misc_RNA (1)...(19): siRNA sense strand
aguuaaugaaugggugaua

SEQ ID NO: 2320645 - RNA, 19 nt, Homo sapiens
  misc_RNA (1)...(19): siRNA sense strand
agccugaggaacagagaca

SEQ ID NO: 2320646 - RNA, 19 nt, Homo sapiens
  misc_RNA (1)...(19): siRNA sense strand
gaaauaaagucuucccuga

SEQ ID NO: 2320647 - RNA, 19 nt, Homo sapiens
  misc_RNA (1)...(19): siRNA sense strand
aguuugaggaaccaagaaa

SEQ ID NO: 2320648 - RNA, 19 nt, Homo sapiens
  misc_RNA (1)...(19): siRNA sense strand
cugagcagcuggaggagca

SEQ ID NO: 2320649 - RNA, 19 nt, Homo sapiens
  misc_RNA (1)...(19): siRNA sense strand
guuugaggaaccaagaaau

SEQ ID NO: 2320650 - RNA, 19 nt, Homo sapiens
  misc_RNA (1)...(19): siRNA sense strand
ccguaaagagagagagaaa

SEQ ID NO: 2320651 - RNA, 19 nt, Homo sapiens
  misc_RNA (1)...(19): siRNA sense strand
cugcaaucauauagguuaa

SEQ ID NO: 2320652 - RNA, 19 nt, Homo sapiens
  misc_RNA (1)...(19): siRNA sense strand
uaggauacacaguggguaa

SEQ ID NO: 2320653 - RNA, 19 nt, Homo sapiens
  misc_RNA (1)...(19): siRNA sense strand
acguauaagcgaagagcau

SEQ ID NO: 2320654 - RNA, 19 nt, Homo sapiens
  misc_RNA (1)...(19): siRNA sense strand
ucaaagagaaagaggagga

SEQ ID NO: 2320655 - RNA, 19 nt, Homo sapiens
  misc_RNA (1)...(19): siRNA sense strand
aggaauggaaggaugagaa

SEQ ID NO: 2320656 - RNA, 19 nt, Homo sapiens
  misc_RNA (1)...(19): siRNA sense strand
uggaagugcaggaugacaa

SEQ ID NO: 2320657 - RNA, 19 nt, Homo sapiens
  misc_RNA (1)...(19): siRNA sense strand
gguuaaugaagaaguuaga

SEQ ID NO: 2320658 - RNA, 19 nt, Homo sapiens
  misc_RNA (1)...(19): siRNA sense strand
aggcauuaauaucaggauu

SEQ ID NO: 2320659 - RNA, 19 nt, Homo sapiens
  misc_RNA (1)...(19): siRNA sense strand
acuuagauuuccugcaaga

SEQ ID NO: 2320660 - RNA, 19 nt, Homo sapiens
  misc_RNA (1)...(19): siRNA sense strand
uagaaagcuucaagaucau

SEQ ID NO: 2320661 - RNA, 19 nt, Homo sapiens
  misc_RNA (1)...(19): siRNA sense strand
cuuccaagccagaacgaga

SEQ ID NO: 2320662 - RNA, 19 nt, Homo sapiens
  misc_RNA (1)...(19): siRNA sense strand
ccuuauacgucaaugagca

SEQ ID NO: 2320663 - RNA, 19 nt, Homo sapiens
  misc_RNA (1)...(19): siRNA sense strand
ccgauauuucagagaacuu

SEQ ID NO: 2320664 - RNA, 19 nt, Homo sapiens
  misc_RNA (1)...(19): siRNA sense strand
ucaaaacaguucagcacaa

SEQ ID NO: 2320665 - RNA, 19 nt, Homo sapiens
  misc_RNA (1)...(19): siRNA sense strand
aaggaugagaagcgggauu

SEQ ID NO: 2320666 - RNA, 19 nt, Homo sapiens
  misc_RNA (1)...(19): siRNA sense strand
acgagauguucuuaugcaa

SEQ ID NO: 2320667 - RNA, 19 nt, Homo sapiens
  misc_RNA (1)...(19): siRNA sense strand
uucaaacagcaaaggguua

SEQ ID NO: 2320668 - RNA, 19 nt, Homo sapiens
  misc_RNA (1)...(19): siRNA sense strand
gaucauggauuauagccuu

SEQ ID NO: 2320669 - RNA, 19 nt, Homo sapiens
  misc_RNA (1)...(19): siRNA sense strand
ggaaggaugagaagcggga

SEQ ID NO: 2320670 - RNA, 19 nt, Homo sapiens
  misc_RNA (1)...(19): siRNA sense strand
augaagaagcccugggauc

SEQ ID NO: 2320671 - RNA, 19 nt, Homo sapiens
  misc_RNA (1)...(19): siRNA sense strand
ugggauaaucacagagaac

SEQ ID NO: 2320672 - RNA, 19 nt, Homo sapiens
  misc_RNA (1)...(19): siRNA sense strand
acauaugacuugaaaggcu

SEQ ID NO: 2320673 - RNA, 19 nt, Homo sapiens
  misc_RNA (1)...(19): siRNA sense strand
gcuaaaagccauaggggag

SEQ ID NO: 2320674 - RNA, 19 nt, Homo sapiens
  misc_RNA (1)...(19): siRNA sense strand
cuucugugcuugacgucua

SEQ ID NO: 2320675 - RNA, 19 nt, Homo sapiens
  misc_RNA (1)...(19): siRNA sense strand
cggacuguauuguaugcaa

SEQ ID NO: 2320676 - RNA, 19 nt, Homo sapiens
  misc_RNA (1)...(19): siRNA sense strand
ucaggauuguggugaugaa

SEQ ID NO: 2320677 - RNA, 19 nt, Homo sapiens
  misc_RNA (1)...(19): siRNA sense strand
cguaaagagagagagaaau

SEQ ID NO: 2320678 - RNA, 19 nt, Homo sapiens
  misc_RNA (1)...(19): siRNA sense strand
ggcucaacguauaagcgaa

SEQ ID NO: 2320679 - RNA, 19 nt, Homo sapiens
  misc_RNA (1)...(19): siRNA sense strand
cauuauugacauucugcaa

SEQ ID NO: 2320680 - RNA, 19 nt, Homo sapiens
  misc_RNA (1)...(19): siRNA sense strand
guucauagaccaagcuuuu

SEQ ID NO: 2320681 - RNA, 19 nt, Homo sapiens
  misc_RNA (1)...(19): siRNA sense strand
cucuggaagugcaggauga

SEQ ID NO: 2320682 - RNA, 19 nt, Homo sapiens
  misc_RNA (1)...(19): siRNA sense strand
uucaugaauuccagaguuu

SEQ ID NO: 2320683 - RNA, 19 nt, Homo sapiens
  misc_RNA (1)...(19): siRNA sense strand
cugcagugaaccucuaaua

SEQ ID NO: 2320684 - RNA, 19 nt, Homo sapiens
  misc_RNA (1)...(19): siRNA sense strand
ccugaugauuacuuguauu

SEQ ID NO: 2320685 - RNA, 19 nt, Homo sapiens
  misc_RNA (1)...(19): siRNA sense strand
cuccauuagcauuccgaua

SEQ ID NO: 2320686 - RNA, 19 nt, Homo sapiens
  misc_RNA (1)...(19): siRNA sense strand
uuugcugacugaaggacaa

SEQ ID NO: 2320687 - RNA, 19 nt, Homo sapiens
  misc_RNA (1)...(19): siRNA sense strand
gggccaaggaacugggcaa

SEQ ID NO: 2320688 - RNA, 19 nt, Homo sapiens
  misc_RNA (1)...(19): siRNA sense strand
aggccaacaaggugaagaa

SEQ ID NO: 2320689 - RNA, 19 nt, Homo sapiens
  misc_RNA (1)...(19): siRNA sense strand
ccgagauccaugaguacaa

SEQ ID NO: 2320690 - RNA, 19 nt, Homo sapiens
  misc_RNA (1)...(19): siRNA sense strand
gggugaaggagguggcugu

SEQ ID NO: 2320691 - RNA, 19 nt, Homo sapiens
  misc_RNA (1)...(19): siRNA sense strand
gcaagauggugguggacug

SEQ ID NO: 2320692 - RNA, 19 nt, Homo sapiens
  misc_RNA (1)...(19): siRNA sense strand
ccauagugcugcugaccca

SEQ ID NO: 2320693 - RNA, 19 nt, Homo sapiens
  misc_RNA (1)...(19): siRNA sense strand
gugccuggauggaggagga

SEQ ID NO: 2320694 - RNA, 19 nt, Homo sapiens
  misc_RNA (1)...(19): siRNA sense strand
acaguaaguccauggccua

SEQ ID NO: 2320695 - RNA, 19 nt, Homo sapiens
  misc_RNA (1)...(19): siRNA sense strand
ggucaggccaacaagguga

SEQ ID NO: 2320696 - RNA, 19 nt, Homo sapiens
  misc_RNA (1)...(19): siRNA sense strand
ggugcgagauggucggcau

SEQ ID NO: 2320697 - RNA, 19 nt, Homo sapiens
  misc_RNA (1)...(19): siRNA sense strand
gggagauccugguggagcu

SEQ ID NO: 2320698 - RNA, 19 nt, Homo sapiens
  misc_RNA (1)...(19): siRNA sense strand
gugaauaaccaagggcuga

SEQ ID NO: 2320699 - RNA, 19 nt, Homo sapiens
  misc_RNA (1)...(19): siRNA sense strand
ggugaugcugacagggaca

SEQ ID NO: 2320700 - RNA, 19 nt, Homo sapiens
  misc_RNA (1)...(19): siRNA sense strand
acacugagguccugcagca

SEQ ID NO: 2320701 - RNA, 19 nt, Homo sapiens
  misc_RNA (1)...(19): siRNA sense strand
gggccaagaacgcagagau

SEQ ID NO: 2320702 - RNA, 19 nt, Homo sapiens
  misc_RNA (1)...(19): siRNA sense strand
ccgaaugacuuuggggaga

SEQ ID NO: 2320703 - RNA, 19 nt, Homo sapiens
  misc_RNA (1)...(19): siRNA sense strand
accuagaacuacaggaucu

SEQ ID NO: 2320704 - RNA, 19 nt, Homo sapiens
  misc_RNA (1)...(19): siRNA sense strand
gcuccaugagggacgagaa

SEQ ID NO: 2320705 - RNA, 19 nt, Homo sapiens
  misc_RNA (1)...(19): siRNA sense strand
gugccaauugcgcggagaa

SEQ ID NO: 2320706 - RNA, 19 nt, Homo sapiens
  misc_RNA (1)...(19): siRNA sense strand
acaacguggagaugaucaa

SEQ ID NO: 2320707 - RNA, 19 nt, Homo sapiens
  misc_RNA (1)...(19): siRNA sense strand
gcgugcugcugcugugcaa

SEQ ID NO: 2320708 - RNA, 19 nt, Homo sapiens
  misc_RNA (1)...(19): siRNA sense strand
caucguguucggagcagaa

SEQ ID NO: 2320709 - RNA, 19 nt, Homo sapiens
  misc_RNA (1)...(19): siRNA sense strand
ggacggacaucaugcugga

SEQ ID NO: 2320710 - RNA, 19 nt, Homo sapiens
  misc_RNA (1)...(19): siRNA sense strand
gcuuagaggaagagggaga

SEQ ID NO: 2320711 - RNA, 19 nt, Homo sapiens
  misc_RNA (1)...(19): siRNA sense strand
aaguaaacgcuuagaggaa

SEQ ID NO: 2320712 - RNA, 19 nt, Homo sapiens
  misc_RNA (1)...(19): siRNA sense strand
gguuaaugcaggaaagaga

SEQ ID NO: 2320713 - RNA, 19 nt, Homo sapiens
  misc_RNA (1)...(19): siRNA sense strand
cuauauggagagagacaaa

SEQ ID NO: 2320714 - RNA, 19 nt, Homo sapiens
  misc_RNA (1)...(19): siRNA sense strand
agaaacagcuauuaggaga

SEQ ID NO: 2320715 - RNA, 19 nt, Homo sapiens
  misc_RNA (1)...(19): siRNA sense strand
aggaaguauuuaaggcauu

SEQ ID NO: 2320716 - RNA, 19 nt, Homo sapiens
  misc_RNA (1)...(19): siRNA sense strand
gggauagaggauagugaau

SEQ ID NO: 2320717 - RNA, 19 nt, Homo sapiens
  misc_RNA (1)...(19): siRNA sense strand
agacaaagacaauccgaau

SEQ ID NO: 2320718 - RNA, 19 nt, Homo sapiens
  misc_RNA (1)...(19): siRNA sense strand
caucaagacuuuuggaaca

SEQ ID NO: 2320719 - RNA, 19 nt, Homo sapiens
  misc_RNA (1)...(19): siRNA sense strand
aaagaagggaagaaggaau

SEQ ID NO: 2320720 - RNA, 19 nt, Homo sapiens
  misc_RNA (1)...(19): siRNA sense strand
auggagaguucaagcacaa

SEQ ID NO: 2320721 - RNA, 19 nt, Homo sapiens
  misc_RNA (1)...(19): siRNA sense strand
ggaccacagcacacagaaa

SEQ ID NO: 2320722 - RNA, 19 nt, Homo sapiens
  misc_RNA (1)...(19): siRNA sense strand
gccgaaggccaaagguuaa

SEQ ID NO: 2320723 - RNA, 19 nt, Homo sapiens
  misc_RNA (1)...(19): siRNA sense strand
aagaagggaagaaggaauu

SEQ ID NO: 2320724 - RNA, 19 nt, Homo sapiens
  misc_RNA (1)...(19): siRNA sense strand
cugcagguguauaaagauu

SEQ ID NO: 2320725 - RNA, 19 nt, Homo sapiens
  misc_RNA (1)...(19): siRNA sense strand
gacuauauggagagagaca

SEQ ID NO: 2320726 - RNA, 19 nt, Homo sapiens
  misc_RNA (1)...(19): siRNA sense strand
uguuggacuucaaggacaa

SEQ ID NO: 2320727 - RNA, 19 nt, Homo sapiens
  misc_RNA (1)...(19): siRNA sense strand
aggaaguggaagauggaga

SEQ ID NO: 2320728 - RNA, 19 nt, Homo sapiens
  misc_RNA (1)...(19): siRNA sense strand
gguuagcaccacugagaga

SEQ ID NO: 2320729 - RNA, 19 nt, Homo sapiens
  misc_RNA (1)...(19): siRNA sense strand
acaaugggcuacuggccaa

SEQ ID NO: 2320730 - RNA, 19 nt, Homo sapiens
  misc_RNA (1)...(19): siRNA sense strand
aggaagagggagacagagu

SEQ ID NO: 2320731 - RNA, 19 nt, Homo sapiens
  misc_RNA (1)...(19): siRNA sense strand
ggacguuggacaagaucau

SEQ ID NO: 2320732 - RNA, 19 nt, Homo sapiens
  misc_RNA (1)...(19): siRNA sense strand
guuucaggauagacaauau

SEQ ID NO: 2320733 - RNA, 19 nt, Homo sapiens
  misc_RNA (1)...(19): siRNA sense strand
ugccgaaggccaaagguua

SEQ ID NO: 2320734 - RNA, 19 nt, Homo sapiens
  misc_RNA (1)...(19): siRNA sense strand
cgaaaacuucaguggcaaa

SEQ ID NO: 2320735 - RNA, 19 nt, Homo sapiens
  misc_RNA (1)...(19): siRNA sense strand
gcuucagcuuugaggagau

SEQ ID NO: 2320736 - RNA, 19 nt, Homo sapiens
  misc_RNA (1)...(19): siRNA sense strand
agaggaagagggagacaga

SEQ ID NO: 2320737 - RNA, 19 nt, Homo sapiens
  misc_RNA (1)...(19): siRNA sense strand
gauucaaaguuaagagcag

SEQ ID NO: 2320738 - RNA, 19 nt, Homo sapiens
  misc_RNA (1)...(19): siRNA sense strand
ccacagacgaggagcugga

SEQ ID NO: 2320739 - RNA, 19 nt, Homo sapiens
  misc_RNA (1)...(19): siRNA sense strand
aagacuccuuguugggaaa

SEQ ID NO: 2320740 - RNA, 19 nt, Homo sapiens
  misc_RNA (1)...(19): siRNA sense strand
ggauaugggauuagaacug

SEQ ID NO: 2320741 - RNA, 19 nt, Homo sapiens
  misc_RNA (1)...(19): siRNA sense strand
uuaaagaagggaagaagga

SEQ ID NO: 2320742 - RNA, 19 nt, Homo sapiens
  misc_RNA (1)...(19): siRNA sense strand
gcaacaaagaagccacaga

SEQ ID NO: 2320743 - RNA, 19 nt, Homo sapiens
  misc_RNA (1)...(19): siRNA sense strand
gacagagacuauauggaga

SEQ ID NO: 2320744 - RNA, 19 nt, Homo sapiens
  misc_RNA (1)...(19): siRNA sense strand
caggaaguauuuaaggcau

SEQ ID NO: 2320745 - RNA, 19 nt, Homo sapiens
  misc_RNA (1)...(19): siRNA sense strand
uggagagagacaaagacaa

SEQ ID NO: 2320746 - RNA, 19 nt, Homo sapiens
  misc_RNA (1)...(19): siRNA sense strand
aguuuaaagaagggaagaa

SEQ ID NO: 2320747 - RNA, 19 nt, Homo sapiens
  misc_RNA (1)...(19): siRNA sense strand
uugcuuguguggagaaaca

SEQ ID NO: 2320748 - RNA, 19 nt, Homo sapiens
  misc_RNA (1)...(19): siRNA sense strand
cugcagcacuggagcgagu

SEQ ID NO: 2320749 - RNA, 19 nt, Homo sapiens
  misc_RNA (1)...(19): siRNA sense strand
augcagaaucagagugacu

SEQ ID NO: 2320750 - RNA, 19 nt, Homo sapiens
  misc_RNA (1)...(19): siRNA sense strand
cggaguuuaaagaagggaa

SEQ ID NO: 2320751 - RNA, 19 nt, Homo sapiens
  misc_RNA (1)...(19): siRNA sense strand
gagacaaagacaauccgaa

SEQ ID NO: 2320752 - RNA, 19 nt, Homo sapiens
  misc_RNA (1)...(19): siRNA sense strand
caaagguuaaugcaggaaa

SEQ ID NO: 2320753 - RNA, 19 nt, Homo sapiens
  misc_RNA (1)...(19): siRNA sense strand
ccaacaagccugcagaacu

SEQ ID NO: 2320754 - RNA, 19 nt, Homo sapiens
  misc_RNA (1)...(19): siRNA sense strand
gccaaagguuaaugcagga

SEQ ID NO: 2320755 - RNA, 19 nt, Homo sapiens
  misc_RNA (1)...(19): siRNA sense strand
agaaugagcgguucgucaa

SEQ ID NO: 2320756 - RNA, 19 nt, Homo sapiens
  misc_RNA (1)...(19): siRNA sense strand
guucauuucaagcagcaua

SEQ ID NO: 2320757 - RNA, 19 nt, Homo sapiens
  misc_RNA (1)...(19): siRNA sense strand
cugaagaaggagaaggaaa

SEQ ID NO: 2320758 - RNA, 19 nt, Homo sapiens
  misc_RNA (1)...(19): siRNA sense strand
cgucaaaacuggaaggaau

SEQ ID NO: 2320759 - RNA, 19 nt, Homo sapiens
  misc_RNA (1)...(19): siRNA sense strand
cgacagaaaacaugagaua

SEQ ID NO: 2320760 - RNA, 19 nt, Homo sapiens
  misc_RNA (1)...(19): siRNA sense strand
cggcaaacucuauuggaua

SEQ ID NO: 2320761 - RNA, 19 nt, Homo sapiens
  misc_RNA (1)...(19): siRNA sense strand
cggaagaaccaauuguaaa

SEQ ID NO: 2320762 - RNA, 19 nt, Homo sapiens
  misc_RNA (1)...(19): siRNA sense strand
ggacuuauugagagagaau

SEQ ID NO: 2320763 - RNA, 19 nt, Homo sapiens
  misc_RNA (1)...(19): siRNA sense strand
aaguagacgacgacagaaa

SEQ ID NO: 2320764 - RNA, 19 nt, Homo sapiens
  misc_RNA (1)...(19): siRNA sense strand
agaacaagaaguagaaaca

SEQ ID NO: 2320765 - RNA, 19 nt, Homo sapiens
  misc_RNA (1)...(19): siRNA sense strand
ggaaauucagcaagagaca

SEQ ID NO: 2320766 - RNA, 19 nt, Homo sapiens
  misc_RNA (1)...(19): siRNA sense strand
agaaggagaaggaaagaau

SEQ ID NO: 2320767 - RNA, 19 nt, Homo sapiens
  misc_RNA (1)...(19): siRNA sense strand
uucaagaaauccagcguaa

SEQ ID NO: 2320768 - RNA, 19 nt, Homo sapiens
  misc_RNA (1)...(19): siRNA sense strand
gcauaaacauggagaaaag

SEQ ID NO: 2320769 - RNA, 19 nt, Homo sapiens
  misc_RNA (1)...(19): siRNA sense strand
agucaaagggcuaacagaa

SEQ ID NO: 2320770 - RNA, 19 nt, Homo sapiens
  misc_RNA (1)...(19): siRNA sense strand
aagacaugcuuuugagaua

SEQ ID NO: 2320771 - RNA, 19 nt, Homo sapiens
  misc_RNA (1)...(19): siRNA sense strand
aggagaagucguagacaga

SEQ ID NO: 2320772 - RNA, 19 nt, Homo sapiens
  misc_RNA (1)...(19): siRNA sense strand
aaacaaugugugaguguau

SEQ ID NO: 2320773 - RNA, 19 nt, Homo sapiens
  misc_RNA (1)...(19): siRNA sense strand
ggaaaggagaagucguaga

SEQ ID NO: 2320774 - RNA, 19 nt, Homo sapiens
  misc_RNA (1)...(19): siRNA sense strand
ucauaaauaaggugcgaga

SEQ ID NO: 2320775 - RNA, 19 nt, Homo sapiens
  misc_RNA (1)...(19): siRNA sense strand
cuauaguagaaauggagaa

SEQ ID NO: 2320776 - RNA, 19 nt, Homo sapiens
  misc_RNA (1)...(19): siRNA sense strand
uugcauaaacauggagaaa

SEQ ID NO: 2320777 - RNA, 19 nt, Homo sapiens
  misc_RNA (1)...(19): siRNA sense strand
aggaaagaaacaaggcaga

SEQ ID NO: 2320778 - RNA, 19 nt, Homo sapiens
  misc_RNA (1)...(19): siRNA sense strand
caagagagcggaaaggaga

SEQ ID NO: 2320779 - RNA, 19 nt, Homo sapiens
  misc_RNA (1)...(19): siRNA sense strand
gacccagagaggaaagaaa

SEQ ID NO: 2320780 - RNA, 19 nt, Homo sapiens
  misc_RNA (1)...(19): siRNA sense strand
acagaaaacaugagauaga

SEQ ID NO: 2320781 - RNA, 19 nt, Homo sapiens
  misc_RNA (1)...(19): siRNA sense strand
aaauaaggugcgagaagau

SEQ ID NO: 2320782 - RNA, 19 nt, Homo sapiens
  misc_RNA (1)...(19): siRNA sense strand
agaucaaguuguacguuau

SEQ ID NO: 2320783 - RNA, 19 nt, Homo sapiens
  misc_RNA (1)...(19): siRNA sense strand
agguaaagcucuuguuucu

SEQ ID NO: 2320784 - RNA, 19 nt, Homo sapiens
  misc_RNA (1)...(19): siRNA sense strand
ggaaauagaaaauggucau

SEQ ID NO: 2320785 - RNA, 19 nt, Homo sapiens
  misc_RNA (1)...(19): siRNA sense strand
aauccgacccagagaggaa

SEQ ID NO: 2320786 - RNA, 19 nt, Homo sapiens
  misc_RNA (1)...(19): siRNA sense strand
ggcagaaaguagacgacga

SEQ ID NO: 2320787 - RNA, 19 nt, Homo sapiens
  misc_RNA (1)...(19): siRNA sense strand
cgaaggaagaucagucuau

SEQ ID NO: 2320788 - RNA, 19 nt, Homo sapiens
  misc_RNA (1)...(19): siRNA sense strand
agauggaaagccagaaauu

SEQ ID NO: 2320789 - RNA, 19 nt, Homo sapiens
  misc_RNA (1)...(19): siRNA sense strand
aaagaaaguagaagcuaga

SEQ ID NO: 2320790 - RNA, 19 nt, Homo sapiens
  misc_RNA (1)...(19): siRNA sense strand
agaaaguagaagcuagaau

SEQ ID NO: 2320791 - RNA, 19 nt, Homo sapiens
  misc_RNA (1)...(19): siRNA sense strand
caucaaacagcuaugguga

SEQ ID NO: 2320792 - RNA, 19 nt, Homo sapiens
  misc_RNA (1)...(19): siRNA sense strand
aaagggagucaaagggcua

SEQ ID NO: 2320793 - RNA, 19 nt, Homo sapiens
  misc_RNA (1)...(19): siRNA sense strand
cagauaucccugaaagaga

SEQ ID NO: 2320794 - RNA, 19 nt, Homo sapiens
  misc_RNA (1)...(19): siRNA sense strand
gcuaaaucaagcuuggaau

SEQ ID NO: 2320795 - RNA, 19 nt, Homo sapiens
  misc_RNA (1)...(19): siRNA sense strand
cguagacagaggcgcaaua

SEQ ID NO: 2320796 - RNA, 19 nt, Homo sapiens
  misc_RNA (1)...(19): siRNA sense strand
uggaaaugucugcagaauu

SEQ ID NO: 2320797 - RNA, 19 nt, Homo sapiens
  misc_RNA (1)...(19): siRNA sense strand
augaagaaauagaacgagu

SEQ ID NO: 2320798 - RNA, 19 nt, Homo sapiens
  misc_RNA (1)...(19): siRNA sense strand
gaggaaauucagcaagaga

SEQ ID NO: 2320799 - RNA, 19 nt, Homo sapiens
  misc_RNA (1)...(19): siRNA sense strand
agaaagaagaugcagcaca

SEQ ID NO: 2320800 - RNA, 19 nt, Homo sapiens
  misc_RNA (1)...(19): siRNA sense strand
gcucuauagaaaugcauau

SEQ ID NO: 2320801 - RNA, 19 nt, Homo sapiens
  misc_RNA (1)...(19): siRNA sense strand
acagaggcgcaauaagaaa

SEQ ID NO: 2320802 - RNA, 19 nt, Homo sapiens
  misc_RNA (1)...(19): siRNA sense strand
aaauccagcguaagaauaa

SEQ ID NO: 2320803 - RNA, 19 nt, Homo sapiens
  misc_RNA (1)...(19): siRNA sense strand
uggaaagacagaagaccuu

SEQ ID NO: 2320804 - RNA, 19 nt, Homo sapiens
  misc_RNA (1)...(19): siRNA sense strand
ugaagaaggagaaggaaag

SEQ ID NO: 2320805 - RNA, 19 nt, Homo sapiens
  misc_RNA (1)...(19): siRNA sense strand
gaucagucuaugaagaaga

SEQ ID NO: 2320806 - RNA, 19 nt, Homo sapiens
  misc_RNA (1)...(19): siRNA sense strand
ccaaaucaaaggaaauaga

SEQ ID NO: 2320807 - RNA, 19 nt, Homo sapiens
  misc_RNA (1)...(19): siRNA sense strand
cauccaaacuacacagagu

SEQ ID NO: 2320808 - RNA, 19 nt, Homo sapiens
  misc_RNA (1)...(19): siRNA sense strand
ucauauggguucugcagau

SEQ ID NO: 2320809 - RNA, 19 nt, Homo sapiens
  misc_RNA (1)...(19): siRNA sense strand
ugacaaaucaacggaagaa

SEQ ID NO: 2320810 - RNA, 19 nt, Homo sapiens
  misc_RNA (1)...(19): siRNA sense strand
caaagggcuaacagaacaa

SEQ ID NO: 2320811 - RNA, 19 nt, Homo sapiens
  misc_RNA (1)...(19): siRNA sense strand
ucagauggaaagccagaaa

SEQ ID NO: 2320812 - RNA, 19 nt, Homo sapiens
  misc_RNA (1)...(19): siRNA sense strand
guuaaagacugaaugugga

SEQ ID NO: 2320813 - RNA, 19 nt, Homo sapiens
  misc_RNA (1)...(19): siRNA sense strand
uugaggaaauucagcaaga

SEQ ID NO: 2320814 - RNA, 19 nt, Homo sapiens
  misc_RNA (1)...(19): siRNA sense strand
cugaagaaggagaaggaaa

SEQ ID NO: 2320815 - RNA, 19 nt, Homo sapiens
  misc_RNA (1)...(19): siRNA sense strand
cgucaaaacuggaaggaau

SEQ ID NO: 2320816 - RNA, 19 nt, Homo sapiens
  misc_RNA (1)...(19): siRNA sense strand
cgacagaaaacaugagaua

SEQ ID NO: 2320817 - RNA, 19 nt, Homo sapiens
  misc_RNA (1)...(19): siRNA sense strand
cggcaaacucuauuggaua

SEQ ID NO: 2320818 - RNA, 19 nt, Homo sapiens
  misc_RNA (1)...(19): siRNA sense strand
cggaagaaccaauuguaaa

SEQ ID NO: 2320819 - RNA, 19 nt, Homo sapiens
  misc_RNA (1)...(19): siRNA sense strand
ggacuuauugagagagaau

SEQ ID NO: 2320820 - RNA, 19 nt, Homo sapiens
  misc_RNA (1)...(19): siRNA sense strand
aaguagacgacgacagaaa

SEQ ID NO: 2320821 - RNA, 19 nt, Homo sapiens
  misc_RNA (1)...(19): siRNA sense strand
agaacaagaaguagaaaca

SEQ ID NO: 2320822 - RNA, 19 nt, Homo sapiens
  misc_RNA (1)...(19): siRNA sense strand
ggaaauucagcaagagaca

SEQ ID NO: 2320823 - RNA, 19 nt, Homo sapiens
  misc_RNA (1)...(19): siRNA sense strand
agaaggagaaggaaagaau

SEQ ID NO: 2320824 - RNA, 19 nt, Homo sapiens
  misc_RNA (1)...(19): siRNA sense strand
uucaagaaauccagcguaa

SEQ ID NO: 2320825 - RNA, 19 nt, Homo sapiens
  misc_RNA (1)...(19): siRNA sense strand
gcauaaacauggagaaaag

SEQ ID NO: 2320826 - RNA, 19 nt, Homo sapiens
  misc_RNA (1)...(19): siRNA sense strand
agucaaagggcuaacagaa

SEQ ID NO: 2320827 - RNA, 19 nt, Homo sapiens
  misc_RNA (1)...(19): siRNA sense strand
aagacaugcuuuugagaua

SEQ ID NO: 2320828 - RNA, 19 nt, Homo sapiens
  misc_RNA (1)...(19): siRNA sense strand
aggagaagucguagacaga

SEQ ID NO: 2320829 - RNA, 19 nt, Homo sapiens
  misc_RNA (1)...(19): siRNA sense strand
aaacaaugugugaguguau

SEQ ID NO: 2320830 - RNA, 19 nt, Homo sapiens
  misc_RNA (1)...(19): siRNA sense strand
ggaaaggagaagucguaga

SEQ ID NO: 2320831 - RNA, 19 nt, Homo sapiens
  misc_RNA (1)...(19): siRNA sense strand
ucauaaauaaggugcgaga

SEQ ID NO: 2320832 - RNA, 19 nt, Homo sapiens
  misc_RNA (1)...(19): siRNA sense strand
cuauaguagaaauggagaa

SEQ ID NO: 2320833 - RNA, 19 nt, Homo sapiens
  misc_RNA (1)...(19): siRNA sense strand
uugcauaaacauggagaaa

SEQ ID NO: 2320834 - RNA, 19 nt, Homo sapiens
  misc_RNA (1)...(19): siRNA sense strand
aggaaagaaacaaggcaga

SEQ ID NO: 2320835 - RNA, 19 nt, Homo sapiens
  misc_RNA (1)...(19): siRNA sense strand
caagagagcggaaaggaga

SEQ ID NO: 2320836 - RNA, 19 nt, Homo sapiens
  misc_RNA (1)...(19): siRNA sense strand
gacccagagaggaaagaaa

SEQ ID NO: 2320837 - RNA, 19 nt, Homo sapiens
  misc_RNA (1)...(19): siRNA sense strand
acagaaaacaugagauaga

SEQ ID NO: 2320838 - RNA, 19 nt, Homo sapiens
  misc_RNA (1)...(19): siRNA sense strand
aaauaaggugcgagaagau

SEQ ID NO: 2320839 - RNA, 19 nt, Homo sapiens
  misc_RNA (1)...(19): siRNA sense strand
agaucaaguuguacguuau

SEQ ID NO: 2320840 - RNA, 19 nt, Homo sapiens
  misc_RNA (1)...(19): siRNA sense strand
agguaaagcucuuguuucu

SEQ ID NO: 2320841 - RNA, 19 nt, Homo sapiens
  misc_RNA (1)...(19): siRNA sense strand
ggaaauagaaaauggucau

SEQ ID NO: 2320842 - RNA, 19 nt, Homo sapiens
  misc_RNA (1)...(19): siRNA sense strand
aauccgacccagagaggaa

SEQ ID NO: 2320843 - RNA, 19 nt, Homo sapiens
  misc_RNA (1)...(19): siRNA sense strand
ggcagaaaguagacgacga

SEQ ID NO: 2320844 - RNA, 19 nt, Homo sapiens
  misc_RNA (1)...(19): siRNA sense strand
cgaaggaagaucagucuau

SEQ ID NO: 2320845 - RNA, 19 nt, Homo sapiens
  misc_RNA (1)...(19): siRNA sense strand
agauggaaagccagaaauu

SEQ ID NO: 2320846 - RNA, 19 nt, Homo sapiens
  misc_RNA (1)...(19): siRNA sense strand
aaagaaaguagaagcuaga

SEQ ID NO: 2320847 - RNA, 19 nt, Homo sapiens
  misc_RNA (1)...(19): siRNA sense strand
agaaaguagaagcuagaau

SEQ ID NO: 2320848 - RNA, 19 nt, Homo sapiens
  misc_RNA (1)...(19): siRNA sense strand
caucaaacagcuaugguga

SEQ ID NO: 2320849 - RNA, 19 nt, Homo sapiens
  misc_RNA (1)...(19): siRNA sense strand
aaagggagucaaagggcua

SEQ ID NO: 2320850 - RNA, 19 nt, Homo sapiens
  misc_RNA (1)...(19): siRNA sense strand
cagauaucccugaaagaga

SEQ ID NO: 2320851 - RNA, 19 nt, Homo sapiens
  misc_RNA (1)...(19): siRNA sense strand
gcuaaaucaagcuuggaau

SEQ ID NO: 2320852 - RNA, 19 nt, Homo sapiens
  misc_RNA (1)...(19): siRNA sense strand
cguagacagaggcgcaaua

SEQ ID NO: 2320853 - RNA, 19 nt, Homo sapiens
  misc_RNA (1)...(19): siRNA sense strand
uggaaaugucugcagaauu

SEQ ID NO: 2320854 - RNA, 19 nt, Homo sapiens
  misc_RNA (1)...(19): siRNA sense strand
augaagaaauagaacgagu

SEQ ID NO: 2320855 - RNA, 19 nt, Homo sapiens
  misc_RNA (1)...(19): siRNA sense strand
gaggaaauucagcaagaga

SEQ ID NO: 2320856 - RNA, 19 nt, Homo sapiens
  misc_RNA (1)...(19): siRNA sense strand
agaaagaagaugcagcaca

SEQ ID NO: 2320857 - RNA, 19 nt, Homo sapiens
  misc_RNA (1)...(19): siRNA sense strand
gcucuauagaaaugcauau

SEQ ID NO: 2320858 - RNA, 19 nt, Homo sapiens
  misc_RNA (1)...(19): siRNA sense strand
acagaggcgcaauaagaaa

SEQ ID NO: 2320859 - RNA, 19 nt, Homo sapiens
  misc_RNA (1)...(19): siRNA sense strand
uggaaagacagaagaccuu

SEQ ID NO: 2320860 - RNA, 19 nt, Homo sapiens
  misc_RNA (1)...(19): siRNA sense strand
ugaagaaggagaaggaaag

SEQ ID NO: 2320861 - RNA, 19 nt, Homo sapiens
  misc_RNA (1)...(19): siRNA sense strand
aaauccagcguaagaauaa

SEQ ID NO: 2320862 - RNA, 19 nt, Homo sapiens
  misc_RNA (1)...(19): siRNA sense strand
gaucagucuaugaagaaga

SEQ ID NO: 2320863 - RNA, 19 nt, Homo sapiens
  misc_RNA (1)...(19): siRNA sense strand
ccaaaucaaaggaaauaga

SEQ ID NO: 2320864 - RNA, 19 nt, Homo sapiens
  misc_RNA (1)...(19): siRNA sense strand
cauccaaacuacacagagu

SEQ ID NO: 2320865 - RNA, 19 nt, Homo sapiens
  misc_RNA (1)...(19): siRNA sense strand
ucauauggguucugcagau

SEQ ID NO: 2320866 - RNA, 19 nt, Homo sapiens
  misc_RNA (1)...(19): siRNA sense strand
ugacaaaucaacggaagaa

SEQ ID NO: 2320867 - RNA, 19 nt, Homo sapiens
  misc_RNA (1)...(19): siRNA sense strand
caaagggcuaacagaacaa

SEQ ID NO: 2320868 - RNA, 19 nt, Homo sapiens
  misc_RNA (1)...(19): siRNA sense strand
ucagauggaaagccagaaa

SEQ ID NO: 2320869 - RNA, 19 nt, Homo sapiens
  misc_RNA (1)...(19): siRNA sense strand
guuaaagacugaaugugga

SEQ ID NO: 2320870 - RNA, 19 nt, Homo sapiens
  misc_RNA (1)...(19): siRNA sense strand
uugaggaaauucagcaaga

SEQ ID NO: 2320871 - RNA, 19 nt, Homo sapiens
  misc_RNA (1)...(19): siRNA sense strand
uggagaagguggagacgga

SEQ ID NO: 2320872 - RNA, 19 nt, Homo sapiens
  misc_RNA (1)...(19): siRNA sense strand
gguuuuggcccgaaggaaa

SEQ ID NO: 2320873 - RNA, 19 nt, Homo sapiens
  misc_RNA (1)...(19): siRNA sense strand
ccgaaggaaaucaagggaa

SEQ ID NO: 2320874 - RNA, 19 nt, Homo sapiens
  misc_RNA (1)...(19): siRNA sense strand
uggugaauuucuugcacaa

SEQ ID NO: 2320875 - RNA, 19 nt, Homo sapiens
  misc_RNA (1)...(19): siRNA sense strand
ugaacagcguccuggaaaa

SEQ ID NO: 2320876 - RNA, 19 nt, Homo sapiens
  misc_RNA (1)...(19): siRNA sense strand
cuggacgggcagugaggaa

SEQ ID NO: 2320877 - RNA, 19 nt, Homo sapiens
  misc_RNA (1)...(19): siRNA sense strand
aguaugagagccuggaaca

SEQ ID NO: 2320878 - RNA, 19 nt, Homo sapiens
  misc_RNA (1)...(19): siRNA sense strand
cggagugagcagccaguau

SEQ ID NO: 2320879 - RNA, 19 nt, Homo sapiens
  misc_RNA (1)...(19): siRNA sense strand
cuacugaccucccagggua

SEQ ID NO: 2320880 - RNA, 19 nt, Homo sapiens
  misc_RNA (1)...(19): siRNA sense strand
uuuccaaggacaaggcuuu

SEQ ID NO: 2320881 - RNA, 19 nt, Homo sapiens
  misc_RNA (1)...(19): siRNA sense strand
cugagaaggcaaagcaaau

SEQ ID NO: 2320882 - RNA, 19 nt, Homo sapiens
  misc_RNA (1)...(19): siRNA sense strand
uggaaagggccaaggagau

SEQ ID NO: 2320883 - RNA, 19 nt, Homo sapiens
  misc_RNA (1)...(19): siRNA sense strand
cuggaaagggccaaggaga

SEQ ID NO: 2320884 - RNA, 19 nt, Homo sapiens
  misc_RNA (1)...(19): siRNA sense strand
cuccuaaagaggugaauau

SEQ ID NO: 2320885 - RNA, 19 nt, Homo sapiens
  misc_RNA (1)...(19): siRNA sense strand
aggauuacaagaagaucaa

SEQ ID NO: 2320886 - RNA, 19 nt, Homo sapiens
  misc_RNA (1)...(19): siRNA sense strand
cuggauugccugugaggau

SEQ ID NO: 2320887 - RNA, 19 nt, Homo sapiens
  misc_RNA (1)...(19): siRNA sense strand
auuaagaucaaguugggaa

SEQ ID NO: 2320888 - RNA, 19 nt, Homo sapiens
  misc_RNA (1)...(19): siRNA sense strand
cguacaaugagaagccaga

SEQ ID NO: 2320889 - RNA, 19 nt, Homo sapiens
  misc_RNA (1)...(19): siRNA sense strand
aggacaucacaaugaagaa

SEQ ID NO: 2320890 - RNA, 19 nt, Homo sapiens
  misc_RNA (1)...(19): siRNA sense strand
ugugaggauuacaagaaga

SEQ ID NO: 2320891 - RNA, 19 nt, Homo sapiens
  misc_RNA (1)...(19): siRNA sense strand
uuaagaucaaguugggaau

SEQ ID NO: 2320892 - RNA, 19 nt, Homo sapiens
  misc_RNA (1)...(19): siRNA sense strand
gugaggauuacaagaagau

SEQ ID NO: 2320893 - RNA, 19 nt, Homo sapiens
  misc_RNA (1)...(19): siRNA sense strand
caaugaagaaccuggugga

SEQ ID NO: 2320894 - RNA, 19 nt, Homo sapiens
  misc_RNA (1)...(19): siRNA sense strand
ccgaugaggaggaggcaga

SEQ ID NO: 2320895 - RNA, 19 nt, Homo sapiens
  misc_RNA (1)...(19): siRNA sense strand
ccaucaacaaggagaucaa

SEQ ID NO: 2320896 - RNA, 19 nt, Homo sapiens
  misc_RNA (1)...(19): siRNA sense strand
uggcagugcucgaggagga

SEQ ID NO: 2320897 - RNA, 19 nt, Homo sapiens
  misc_RNA (1)...(19): siRNA sense strand
gcacaggacggguuggcua

SEQ ID NO: 2320898 - RNA, 19 nt, Homo sapiens
  misc_RNA (1)...(19): siRNA sense strand
uggacaagcugcugagcga

SEQ ID NO: 2320899 - RNA, 19 nt, Homo sapiens
  misc_RNA (1)...(19): siRNA sense strand
uggagaaggaauucagcaa

SEQ ID NO: 2320900 - RNA, 19 nt, Homo sapiens
  misc_RNA (1)...(19): siRNA sense strand
cccaagaagaagagcauca

SEQ ID NO: 2320901 - RNA, 19 nt, Homo sapiens
  misc_RNA (1)...(19): siRNA sense strand
gaagaaagucagacccaga

SEQ ID NO: 2320902 - RNA, 19 nt, Homo sapiens
  misc_RNA (1)...(19): siRNA sense strand
gggaagaaagucagaccca

SEQ ID NO: 2320903 - RNA, 19 nt, Homo sapiens
  misc_RNA (1)...(19): siRNA sense strand
gggcgcuggaggagaagaa

SEQ ID NO: 2320904 - RNA, 19 nt, Homo sapiens
  misc_RNA (1)...(19): siRNA sense strand
agaccuugcccgagauaga

SEQ ID NO: 2320905 - RNA, 19 nt, Homo sapiens
  misc_RNA (1)...(19): siRNA sense strand
caacacuggagaagcgcua

SEQ ID NO: 2320906 - RNA, 19 nt, Homo sapiens
  misc_RNA (1)...(19): siRNA sense strand
ggaugacacacgaggagau

SEQ ID NO: 2320907 - RNA, 19 nt, Homo sapiens
  misc_RNA (1)...(19): siRNA sense strand
ggauuacaacacuggagaa

SEQ ID NO: 2320908 - RNA, 19 nt, Homo sapiens
  misc_RNA (1)...(19): siRNA sense strand
ccaacgacaaacuggagaa

SEQ ID NO: 2320909 - RNA, 19 nt, Homo sapiens
  misc_RNA (1)...(19): siRNA sense strand
agacaaggaccgaaggaac

SEQ ID NO: 2320910 - RNA, 19 nt, Homo sapiens
  misc_RNA (1)...(19): siRNA sense strand
cuggagaacgaguuagcua

SEQ ID NO: 2320911 - RNA, 19 nt, Homo sapiens
  misc_RNA (1)...(19): siRNA sense strand
gagcggaugcagauggaga

SEQ ID NO: 2320912 - RNA, 19 nt, Homo sapiens
  misc_RNA (1)...(19): siRNA sense strand
uggccgaaauggagcggau

SEQ ID NO: 2320913 - RNA, 19 nt, Homo sapiens
  misc_RNA (1)...(19): siRNA sense strand
ggucaggggucaaggagga

SEQ ID NO: 2320914 - RNA, 19 nt, Homo sapiens
  misc_RNA (1)...(19): siRNA sense strand
acuccaagcugcagcgcga

SEQ ID NO: 2320915 - RNA, 19 nt, Homo sapiens
  misc_RNA (1)...(19): siRNA sense strand
agaugaacgaugaccacaa

SEQ ID NO: 2320916 - RNA, 19 nt, Homo sapiens
  misc_RNA (1)...(19): siRNA sense strand
aggagcagcuggaggccau

SEQ ID NO: 2320917 - RNA, 19 nt, Homo sapiens
  misc_RNA (1)...(19): siRNA sense strand
uugcagagcugaaggcgga

SEQ ID NO: 2320918 - RNA, 19 nt, Homo sapiens
  misc_RNA (1)...(19): siRNA sense strand
ggaagagauugcagagcug

SEQ ID NO: 2320919 - RNA, 19 nt, Homo sapiens
  misc_RNA (1)...(19): siRNA sense strand
cggagguagaagugcucaa

SEQ ID NO: 2320920 - RNA, 19 nt, Homo sapiens
  misc_RNA (1)...(19): siRNA sense strand
ccgaggaacgucaugggaa

SEQ ID NO: 2320921 - RNA, 19 nt, Homo sapiens
  misc_RNA (1)...(19): siRNA sense strand
acacggagauccagcgcga

SEQ ID NO: 2320922 - RNA, 19 nt, Homo sapiens
  misc_RNA (1)...(19): siRNA sense strand
uggcauauggcgacaugaa

SEQ ID NO: 2320923 - RNA, 19 nt, Homo sapiens
  misc_RNA (1)...(19): siRNA sense strand
cguuguaucggcagaguga

SEQ ID NO: 2320924 - RNA, 19 nt, Homo sapiens
  misc_RNA (1)...(19): siRNA sense strand
agaagaacucccugagcga

SEQ ID NO: 2320925 - RNA, 19 nt, Homo sapiens
  misc_RNA (1)...(19): siRNA sense strand
gaaauggagcggaugcaga

SEQ ID NO: 2320926 - RNA, 19 nt, Homo sapiens
  misc_RNA (1)...(19): siRNA sense strand
aagaagagcaucaagucau

SEQ ID NO: 2320927 - RNA, 19 nt, Homo sapiens
  misc_RNA (1)...(19): siRNA sense strand
acgaaggagcugaacuuau

SEQ ID NO: 2320928 - RNA, 19 nt, Homo sapiens
  misc_RNA (1)...(19): siRNA sense strand
caacagaacagagggcaga

SEQ ID NO: 2320929 - RNA, 19 nt, Homo sapiens
  misc_RNA (1)...(19): siRNA sense strand
cgaaggaacaagaggaagc

SEQ ID NO: 2320930 - RNA, 19 nt, Homo sapiens
  misc_RNA (1)...(19): siRNA sense strand
augaguugcugcuaaacaa

SEQ ID NO: 2320931 - RNA, 19 nt, Homo sapiens
  misc_RNA (1)...(19): siRNA sense strand
gcaagaaagagaagggacg

SEQ ID NO: 2320932 - RNA, 19 nt, Homo sapiens
  misc_RNA (1)...(19): siRNA sense strand
agaaagagaagggacgaau

SEQ ID NO: 2320933 - RNA, 19 nt, Homo sapiens
  misc_RNA (1)...(19): siRNA sense strand
gggaggaagagauugcaga

SEQ ID NO: 2320934 - RNA, 19 nt, Homo sapiens
  misc_RNA (1)...(19): siRNA sense strand
aagauauggaggagcggau

SEQ ID NO: 2320935 - RNA, 19 nt, Homo sapiens
  misc_RNA (1)...(19): siRNA sense strand
uggacgacgccaagcagaa

SEQ ID NO: 2320936 - RNA, 19 nt, Homo sapiens
  misc_RNA (1)...(19): siRNA sense strand
cagaggagcuggagagucg

SEQ ID NO: 2320937 - RNA, 19 nt, Homo sapiens
  misc_RNA (1)...(19): siRNA sense strand
cugcccgucuugagagaau

SEQ ID NO: 2320938 - RNA, 19 nt, Homo sapiens
  misc_RNA (1)...(19): siRNA sense strand
cggcagcgggagaagauga

SEQ ID NO: 2320939 - RNA, 19 nt, Homo sapiens
  misc_RNA (1)...(19): siRNA sense strand
agagaagaaucaagagcug

SEQ ID NO: 2320940 - RNA, 19 nt, Homo sapiens
  misc_RNA (1)...(19): siRNA sense strand
aggaggaggcagaggggau

SEQ ID NO: 2320941 - RNA, 19 nt, Homo sapiens
  misc_RNA (1)...(19): siRNA sense strand
gagaaggagacaacagaac

SEQ ID NO: 2320942 - RNA, 19 nt, Homo sapiens
  misc_RNA (1)...(19): siRNA sense strand
agagaaugacccaggccuu

SEQ ID NO: 2320943 - RNA, 19 nt, Homo sapiens
  misc_RNA (1)...(19): siRNA sense strand
aagaaagagaagggacgaa

SEQ ID NO: 2320944 - RNA, 19 nt, Homo sapiens
  misc_RNA (1)...(19): siRNA sense strand
uggacgagaccuucgacua

SEQ ID NO: 2320945 - RNA, 19 nt, Homo sapiens
  misc_RNA (1)...(19): siRNA sense strand
gcaaggcagaggaagccaa

SEQ ID NO: 2320946 - RNA, 19 nt, Homo sapiens
  misc_RNA (1)...(19): siRNA sense strand
accgaaggaacaagaggaa

SEQ ID NO: 2320947 - RNA, 19 nt, Homo sapiens
  misc_RNA (1)...(19): siRNA sense strand
aggagauagccaacaugaa

SEQ ID NO: 2320948 - RNA, 19 nt, Homo sapiens
  misc_RNA (1)...(19): siRNA sense strand
cuggagaagcccugggaau

SEQ ID NO: 2320949 - RNA, 19 nt, Homo sapiens
  misc_RNA (1)...(19): siRNA sense strand
ccggagaagcauuggcaga

SEQ ID NO: 2320950 - RNA, 19 nt, Homo sapiens
  misc_RNA (1)...(19): siRNA sense strand
ugaauuuaaaggagguaga

SEQ ID NO: 2320951 - RNA, 19 nt, Homo sapiens
  misc_RNA (1)...(19): siRNA sense strand
gcucagagaagauggugga

SEQ ID NO: 2320952 - RNA, 19 nt, Homo sapiens
  misc_RNA (1)...(19): siRNA sense strand
ggaacugaaaagugaagaa

SEQ ID NO: 2320953 - RNA, 19 nt, Homo sapiens
  misc_RNA (1)...(19): siRNA sense strand
gaagaaaucccuaaaccca

SEQ ID NO: 2320954 - RNA, 19 nt, Homo sapiens
  misc_RNA (1)...(19): siRNA sense strand
auuuaaaggagguagacca

SEQ ID NO: 2320955 - RNA, 19 nt, Homo sapiens
  misc_RNA (1)...(19): siRNA sense strand
acugaaaagugaagaaauc

SEQ ID NO: 2320956 - RNA, 19 nt, Homo sapiens
  misc_RNA (1)...(19): siRNA sense strand
cccuaaacccaguaaggau

SEQ ID NO: 2320957 - RNA, 19 nt, Homo sapiens
  misc_RNA (1)...(19): siRNA sense strand
uaaaggagguagaccagga

SEQ ID NO: 2320958 - RNA, 19 nt, Homo sapiens
  misc_RNA (1)...(19): siRNA sense strand
ggguccuccaagaaaguua

SEQ ID NO: 2320959 - RNA, 19 nt, Homo sapiens
  misc_RNA (1)...(19): siRNA sense strand
caaccuuauauuuggacuu

SEQ ID NO: 2320960 - RNA, 19 nt, Homo sapiens
  misc_RNA (1)...(19): siRNA sense strand
ccaaacaagaagcuggaau

SEQ ID NO: 2320961 - RNA, 19 nt, Homo sapiens
  misc_RNA (1)...(19): siRNA sense strand
aaauuaucauucagggaga

SEQ ID NO: 2320962 - RNA, 19 nt, Homo sapiens
  misc_RNA (1)...(19): siRNA sense strand
gccaaaauucccagagcaa

SEQ ID NO: 2320963 - RNA, 19 nt, Homo sapiens
  misc_RNA (1)...(19): siRNA sense strand
agguagaugaugacagcau

SEQ ID NO: 2320964 - RNA, 19 nt, Homo sapiens
  misc_RNA (1)...(19): siRNA sense strand
uggaauuagugagggucaa

SEQ ID NO: 2320965 - RNA, 19 nt, Homo sapiens
  misc_RNA (1)...(19): siRNA sense strand
gacaagaguauguggccuu

SEQ ID NO: 2320966 - RNA, 19 nt, Homo sapiens
  misc_RNA (1)...(19): siRNA sense strand
gcaucgaagaucuuggaga

SEQ ID NO: 2320967 - RNA, 19 nt, Homo sapiens
  misc_RNA (1)...(19): siRNA sense strand
agaagaaauaugugacaag

SEQ ID NO: 2320968 - RNA, 19 nt, Homo sapiens
  misc_RNA (1)...(19): siRNA sense strand
ucaaggaacagcaggggaa

SEQ ID NO: 2320969 - RNA, 19 nt, Homo sapiens
  misc_RNA (1)...(19): siRNA sense strand
caggggaagaagaggagaa

SEQ ID NO: 2320970 - RNA, 19 nt, Homo sapiens
  misc_RNA (1)...(19): siRNA sense strand
gugccaaguuagaugccga

SEQ ID NO: 2320971 - RNA, 19 nt, Homo sapiens
  misc_RNA (1)...(19): siRNA sense strand
gggcugacugcaaaggaga

SEQ ID NO: 2320972 - RNA, 19 nt, Homo sapiens
  misc_RNA (1)...(19): siRNA sense strand
cuggaauuagugaggguca

SEQ ID NO: 2320973 - RNA, 19 nt, Homo sapiens
  misc_RNA (1)...(19): siRNA sense strand
agagaaacuccuagugcaa

SEQ ID NO: 2320974 - RNA, 19 nt, Homo sapiens
  misc_RNA (1)...(19): siRNA sense strand
cagcguuggcauuggcaaa

SEQ ID NO: 2320975 - RNA, 19 nt, Homo sapiens
  misc_RNA (1)...(19): siRNA sense strand
gguauucccaugagagcaa

SEQ ID NO: 2320976 - RNA, 19 nt, Homo sapiens
  misc_RNA (1)...(19): siRNA sense strand
gguacauggaguugacuau

SEQ ID NO: 2320977 - RNA, 19 nt, Homo sapiens
  misc_RNA (1)...(19): siRNA sense strand
ggaagauacucgaguggcu

SEQ ID NO: 2320978 - RNA, 19 nt, Homo sapiens
  misc_RNA (1)...(19): siRNA sense strand
auugacugcugcugagaaa

SEQ ID NO: 2320979 - RNA, 19 nt, Homo sapiens
  misc_RNA (1)...(19): siRNA sense strand
ccaguaaugaugugguaga

SEQ ID NO: 2320980 - RNA, 19 nt, Homo sapiens
  misc_RNA (1)...(19): siRNA sense strand
agaaacuccuagugcaaga

SEQ ID NO: 2320981 - RNA, 19 nt, Homo sapiens
  misc_RNA (1)...(19): siRNA sense strand
aggaugugauggagccuau

SEQ ID NO: 2320982 - RNA, 19 nt, Homo sapiens
  misc_RNA (1)...(19): siRNA sense strand
cuuccuaacaugaacaaau

SEQ ID NO: 2320983 - RNA, 19 nt, Homo sapiens
  misc_RNA (1)...(19): siRNA sense strand
gagagaaacuccuagugca

SEQ ID NO: 2320984 - RNA, 19 nt, Homo sapiens
  misc_RNA (1)...(19): siRNA sense strand
aggaaugaucacagugcuu

SEQ ID NO: 2320985 - RNA, 19 nt, Homo sapiens
  misc_RNA (1)...(19): siRNA sense strand
accuaagaacggagauuau

SEQ ID NO: 2320986 - RNA, 19 nt, Homo sapiens
  misc_RNA (1)...(19): siRNA sense strand
gcagagaaaaucuaaacaa

SEQ ID NO: 2320987 - RNA, 19 nt, Homo sapiens
  misc_RNA (1)...(19): siRNA sense strand
ggguacauggaguugacua

SEQ ID NO: 2320988 - RNA, 19 nt, Homo sapiens
  misc_RNA (1)...(19): siRNA sense strand
ggugauaaacaaaggacuc

SEQ ID NO: 2320989 - RNA, 19 nt, Homo sapiens
  misc_RNA (1)...(19): siRNA sense strand
ccaccuaagaacggagauu

SEQ ID NO: 2320990 - RNA, 19 nt, Homo sapiens
  misc_RNA (1)...(19): siRNA sense strand
guauaugaagcuagggaag

SEQ ID NO: 2320991 - RNA, 19 nt, Homo sapiens
  misc_RNA (1)...(19): siRNA sense strand
uuucagaagaacauggaga

SEQ ID NO: 2320992 - RNA, 19 nt, Homo sapiens
  misc_RNA (1)...(19): siRNA sense strand
cauuguaggaugugaugga

SEQ ID NO: 2320993 - RNA, 19 nt, Homo sapiens
  misc_RNA (1)...(19): siRNA sense strand
ccuuugaagaguuugaaaa

SEQ ID NO: 2320994 - RNA, 19 nt, Homo sapiens
  misc_RNA (1)...(19): siRNA sense strand
auaugaagcuagggaagau

SEQ ID NO: 2320995 - RNA, 19 nt, Homo sapiens
  misc_RNA (1)...(19): siRNA sense strand
agaaauaccccaaugugaa

SEQ ID NO: 2320996 - RNA, 19 nt, Homo sapiens
  misc_RNA (1)...(19): siRNA sense strand
uugaagacugcuugguauu

SEQ ID NO: 2320997 - RNA, 19 nt, Homo sapiens
  misc_RNA (1)...(19): siRNA sense strand
ugagaaucccagaugauca

SEQ ID NO: 2320998 - RNA, 19 nt, Homo sapiens
  misc_RNA (1)...(19): siRNA sense strand
cuggaagaucagauuguau

SEQ ID NO: 2320999 - RNA, 19 nt, Homo sapiens
  misc_RNA (1)...(19): siRNA sense strand
cauagagaugcgagcacau

SEQ ID NO: 2321000 - RNA, 19 nt, Homo sapiens
  misc_RNA (1)...(19): siRNA sense strand
ccauggaacuggauagcuc

SEQ ID NO: 2321001 - RNA, 19 nt, Homo sapiens
  misc_RNA (1)...(19): siRNA sense strand
cguggacucccuagaacaa

SEQ ID NO: 2321002 - RNA, 19 nt, Homo sapiens
  misc_RNA (1)...(19): siRNA sense strand
gggugagagaagugaucaa

SEQ ID NO: 2321003 - RNA, 19 nt, Homo sapiens
  misc_RNA (1)...(19): siRNA sense strand
cagaauucagugaggaaaa

SEQ ID NO: 2321004 - RNA, 19 nt, Homo sapiens
  misc_RNA (1)...(19): siRNA sense strand
ggaucagagcggauggaga

SEQ ID NO: 2321005 - RNA, 19 nt, Homo sapiens
  misc_RNA (1)...(19): siRNA sense strand
ccacgaacucagagcagau

SEQ ID NO: 2321006 - RNA, 19 nt, Homo sapiens
  misc_RNA (1)...(19): siRNA sense strand
cuguuagaaaccaggaaga

SEQ ID NO: 2321007 - RNA, 19 nt, Homo sapiens
  misc_RNA (1)...(19): siRNA sense strand
aacagaauucagugaggaa

SEQ ID NO: 2321008 - RNA, 19 nt, Homo sapiens
  misc_RNA (1)...(19): siRNA sense strand
cuucaguccuuaucggaga

SEQ ID NO: 2321009 - RNA, 19 nt, Homo sapiens
  misc_RNA (1)...(19): siRNA sense strand
caggaagaucagaggccca

SEQ ID NO: 2321010 - RNA, 19 nt, Homo sapiens
  misc_RNA (1)...(19): siRNA sense strand
ccugaugcacagagacuca

SEQ ID NO: 2321011 - RNA, 19 nt, Homo sapiens
  misc_RNA (1)...(19): siRNA sense strand
gggugagagaagugaucaa

SEQ ID NO: 2321012 - RNA, 19 nt, Homo sapiens
  misc_RNA (1)...(19): siRNA sense strand
cagaauucagugaggaaaa

SEQ ID NO: 2321013 - RNA, 19 nt, Homo sapiens
  misc_RNA (1)...(19): siRNA sense strand
ggaucagagcggauggaga

SEQ ID NO: 2321014 - RNA, 19 nt, Homo sapiens
  misc_RNA (1)...(19): siRNA sense strand
ccacgaacucagagcagau

SEQ ID NO: 2321015 - RNA, 19 nt, Homo sapiens
  misc_RNA (1)...(19): siRNA sense strand
cuguuagaaaccaggaaga

SEQ ID NO: 2321016 - RNA, 19 nt, Homo sapiens
  misc_RNA (1)...(19): siRNA sense strand
aacagaauucagugaggaa

SEQ ID NO: 2321017 - RNA, 19 nt, Homo sapiens
  misc_RNA (1)...(19): siRNA sense strand
cuucaguccuuaucggaga

SEQ ID NO: 2321018 - RNA, 19 nt, Homo sapiens
  misc_RNA (1)...(19): siRNA sense strand
caggaagaucagaggccca

SEQ ID NO: 2321019 - RNA, 19 nt, Homo sapiens
  misc_RNA (1)...(19): siRNA sense strand
ccugaugcacagagacuca

SEQ ID NO: 2321020 - RNA, 19 nt, Homo sapiens
  misc_RNA (1)...(19): siRNA sense strand
aagccaaagaagacagaaa

SEQ ID NO: 2321021 - RNA, 19 nt, Homo sapiens
  misc_RNA (1)...(19): siRNA sense strand
aggacagcauugagaaaga

SEQ ID NO: 2321022 - RNA, 19 nt, Homo sapiens
  misc_RNA (1)...(19): siRNA sense strand
cgaagagaucagugaacuu

SEQ ID NO: 2321023 - RNA, 19 nt, Homo sapiens
  misc_RNA (1)...(19): siRNA sense strand
ugauuuacauugaagccaa

SEQ ID NO: 2321024 - RNA, 19 nt, Homo sapiens
  misc_RNA (1)...(19): siRNA sense strand
caaaaggggaugugcacaa

SEQ ID NO: 2321025 - RNA, 19 nt, Homo sapiens
  misc_RNA (1)...(19): siRNA sense strand
agauuaauaagguggugaa

SEQ ID NO: 2321026 - RNA, 19 nt, Homo sapiens
  misc_RNA (1)...(19): siRNA sense strand
cagcauugagaaagagcau

SEQ ID NO: 2321027 - RNA, 19 nt, Homo sapiens
  misc_RNA (1)...(19): siRNA sense strand
gcgucauaguagaauuaau

SEQ ID NO: 2321028 - RNA, 19 nt, Homo sapiens
  misc_RNA (1)...(19): siRNA sense strand
gaggaggugaagagcacua

SEQ ID NO: 2321029 - RNA, 19 nt, Homo sapiens
  misc_RNA (1)...(19): siRNA sense strand
cuacgaagacgcagcgcau

SEQ ID NO: 2321030 - RNA, 19 nt, Homo sapiens
  misc_RNA (1)...(19): siRNA sense strand
augacuuggauguggcuaa

SEQ ID NO: 2321031 - RNA, 19 nt, Homo sapiens
  misc_RNA (1)...(19): siRNA sense strand
gcuaacuccgugugagaca

SEQ ID NO: 2321032 - RNA, 19 nt, Homo sapiens
  misc_RNA (1)...(19): siRNA sense strand
caagaaaauggcuggaaga

SEQ ID NO: 2321033 - RNA, 19 nt, Homo sapiens
  misc_RNA (1)...(19): siRNA sense strand
gugaggaggcacugaacca

SEQ ID NO: 2321034 - RNA, 19 nt, Homo sapiens
  misc_RNA (1)...(19): siRNA sense strand
aggaaguuuaugaagguga

SEQ ID NO: 2321035 - RNA, 19 nt, Homo sapiens
  misc_RNA (1)...(19): siRNA sense strand
gugcccagacggaaggaau

SEQ ID NO: 2321036 - RNA, 19 nt, Homo sapiens
  misc_RNA (1)...(19): siRNA sense strand
cagaaaucacagacaaacu

SEQ ID NO: 2321037 - RNA, 19 nt, Homo sapiens
  misc_RNA (1)...(19): siRNA sense strand
ccauuagccaugugaucau

SEQ ID NO: 2321038 - RNA, 19 nt, Homo sapiens
  misc_RNA (1)...(19): siRNA sense strand
agacaaacuucgaggggag

SEQ ID NO: 2321039 - RNA, 19 nt, Homo sapiens
  misc_RNA (1)...(19): siRNA sense strand
gagcccagcaguagggaga

SEQ ID NO: 2321040 - RNA, 19 nt, Homo sapiens
  misc_RNA (1)...(19): siRNA sense strand
gcgagugggaagacgaaca

SEQ ID NO: 2321041 - RNA, 19 nt, Homo sapiens
  misc_RNA (1)...(19): siRNA sense strand
gcucagggaccuuccggaa

SEQ ID NO: 2321042 - RNA, 19 nt, Homo sapiens
  misc_RNA (1)...(19): siRNA sense strand
ggaagcagcgagugggaag

SEQ ID NO: 2321043 - RNA, 19 nt, Homo sapiens
  misc_RNA (1)...(19): siRNA sense strand
gccaagggugagcgaggua

SEQ ID NO: 2321044 - RNA, 19 nt, Homo sapiens
  misc_RNA (1)...(19): siRNA sense strand
ucgaaaggaugaugggcua

SEQ ID NO: 2321045 - RNA, 19 nt, Homo sapiens
  misc_RNA (1)...(19): siRNA sense strand
cuuggaaaggaaagaguaa

SEQ ID NO: 2321046 - RNA, 19 nt, Homo sapiens
  misc_RNA (1)...(19): siRNA sense strand
aggaaagaguaaagggaag

SEQ ID NO: 2321047 - RNA, 19 nt, Homo sapiens
  misc_RNA (1)...(19): siRNA sense strand
agauauaagaacaggagga

SEQ ID NO: 2321048 - RNA, 19 nt, Homo sapiens
  misc_RNA (1)...(19): siRNA sense strand
cugaugaagagaagagaca

SEQ ID NO: 2321049 - RNA, 19 nt, Homo sapiens
  misc_RNA (1)...(19): siRNA sense strand
uuacuaugccagacggaaa

SEQ ID NO: 2321050 - RNA, 19 nt, Homo sapiens
  misc_RNA (1)...(19): siRNA sense strand
uugcaaaggaagauaguca

SEQ ID NO: 2321051 - RNA, 19 nt, Homo sapiens
  misc_RNA (1)...(19): siRNA sense strand
uggcaacagagaugacaaa

SEQ ID NO: 2321052 - RNA, 19 nt, Homo sapiens
  misc_RNA (1)...(19): siRNA sense strand
ggaggaucucugaggagua

SEQ ID NO: 2321053 - RNA, 19 nt, Homo sapiens
  misc_RNA (1)...(19): siRNA sense strand
gaagauagucagagcgaug

SEQ ID NO: 2321054 - RNA, 19 nt, Homo sapiens
  misc_RNA (1)...(19): siRNA sense strand
ucaaauagaacauggggaa

SEQ ID NO: 2321055 - RNA, 19 nt, Homo sapiens
  misc_RNA (1)...(19): siRNA sense strand
auggagaauagcagcauaa

SEQ ID NO: 2321056 - RNA, 19 nt, Homo sapiens
  misc_RNA (1)...(19): siRNA sense strand
ugucaugaagccauagaaa

SEQ ID NO: 2321057 - RNA, 19 nt, Homo sapiens
  misc_RNA (1)...(19): siRNA sense strand
ccauagaaauaacaagcga

SEQ ID NO: 2321058 - RNA, 19 nt, Homo sapiens
  misc_RNA (1)...(19): siRNA sense strand
acaggagauuuauggagaa

SEQ ID NO: 2321059 - RNA, 19 nt, Homo sapiens
  misc_RNA (1)...(19): siRNA sense strand
aaggaaagaguaaagggaa

SEQ ID NO: 2321060 - RNA, 19 nt, Homo sapiens
  misc_RNA (1)...(19): siRNA sense strand
ggcuucaacaggagauuua

SEQ ID NO: 2321061 - RNA, 19 nt, Homo sapiens
  misc_RNA (1)...(19): siRNA sense strand
gauuggccaaggagggaaa

SEQ ID NO: 2321062 - RNA, 19 nt, Homo sapiens
  misc_RNA (1)...(19): siRNA sense strand
cugcuguucuggagaguca

SEQ ID NO: 2321063 - RNA, 19 nt, Homo sapiens
  misc_RNA (1)...(19): siRNA sense strand
agaaugugcaccagaguca

SEQ ID NO: 2321064 - RNA, 19 nt, Homo sapiens
  misc_RNA (1)...(19): siRNA sense strand
caugcaucaagaagggaaa

SEQ ID NO: 2321065 - RNA, 19 nt, Homo sapiens
  misc_RNA (1)...(19): siRNA sense strand
caggagauuuauggagaau

SEQ ID NO: 2321066 - RNA, 19 nt, Homo sapiens
  misc_RNA (1)...(19): siRNA sense strand
uugagaagacugucaggaa

SEQ ID NO: 2321067 - RNA, 19 nt, Homo sapiens
  misc_RNA (1)...(19): siRNA sense strand
caaugcaggcagugagcuu

SEQ ID NO: 2321068 - RNA, 19 nt, Homo sapiens
  misc_RNA (1)...(19): siRNA sense strand
ggaugaugggcuaccacaa

SEQ ID NO: 2321069 - RNA, 19 nt, Homo sapiens
  misc_RNA (1)...(19): siRNA sense strand
auauaagaacaggaggaaa

SEQ ID NO: 2321070 - RNA, 19 nt, Homo sapiens
  misc_RNA (1)...(19): siRNA sense strand
gagaagacugucaggaaac

SEQ ID NO: 2321071 - RNA, 19 nt, Homo sapiens
  misc_RNA (1)...(19): siRNA sense strand
gcugguuauagaugcaaua

SEQ ID NO: 2321072 - RNA, 19 nt, Homo sapiens
  misc_RNA (1)...(19): siRNA sense strand
ggaaagaguccauugacgu

SEQ ID NO: 2321073 - RNA, 19 nt, Homo sapiens
  misc_RNA (1)...(19): siRNA sense strand
agacacuagaugaccuaaa

SEQ ID NO: 2321074 - RNA, 19 nt, Homo sapiens
  misc_RNA (1)...(19): siRNA sense strand
aggaagauagucagagcga

SEQ ID NO: 2321075 - RNA, 19 nt, Homo sapiens
  misc_RNA (1)...(19): siRNA sense strand
cggaauaccuguagcaucc

SEQ ID NO: 2321076 - RNA, 19 nt, Homo sapiens
  misc_RNA (1)...(19): siRNA sense strand
ggccaaggagggaaaauua

SEQ ID NO: 2321077 - RNA, 19 nt, Homo sapiens
  misc_RNA (1)...(19): siRNA sense strand
aagaacaggaggaaagagu

SEQ ID NO: 2321078 - RNA, 19 nt, Homo sapiens
  misc_RNA (1)...(19): siRNA sense strand
cucaagaaacuguguugua

SEQ ID NO: 2321079 - RNA, 19 nt, Homo sapiens
  misc_RNA (1)...(19): siRNA sense strand
cuacaaacacuggaagaca

SEQ ID NO: 2321080 - RNA, 19 nt, Homo sapiens
  misc_RNA (1)...(19): siRNA sense strand
gauaucaucucgaggcagu

SEQ ID NO: 2321081 - RNA, 19 nt, Homo sapiens
  misc_RNA (1)...(19): siRNA sense strand
uggaaaggaaagaguaaag

SEQ ID NO: 2321082 - RNA, 19 nt, Homo sapiens
  misc_RNA (1)...(19): siRNA sense strand
uauaaucaaugcagcccaa

SEQ ID NO: 2321083 - RNA, 19 nt, Homo sapiens
  misc_RNA (1)...(19): siRNA sense strand
gcuggguaccaaagaugaa

SEQ ID NO: 2321084 - RNA, 19 nt, Homo sapiens
  misc_RNA (1)...(19): siRNA sense strand
agagaagagacagggacua

SEQ ID NO: 2321085 - RNA, 19 nt, Homo sapiens
  misc_RNA (1)...(19): siRNA sense strand
acacuuugaacaugugaau

SEQ ID NO: 2321086 - RNA, 19 nt, Homo sapiens
  misc_RNA (1)...(19): siRNA sense strand
ccacaaaucccuccgagca

SEQ ID NO: 2321087 - RNA, 19 nt, Homo sapiens
  misc_RNA (1)...(19): siRNA sense strand
ggagggaaaauuaggcauu

SEQ ID NO: 2321088 - RNA, 19 nt, Homo sapiens
  misc_RNA (1)...(19): siRNA sense strand
ccaucacaaagguuauaaa

SEQ ID NO: 2321089 - RNA, 19 nt, Homo sapiens
  misc_RNA (1)...(19): siRNA sense strand
uccaagugaucgaagccaa

SEQ ID NO: 2321090 - RNA, 19 nt, Homo sapiens
  misc_RNA (1)...(19): siRNA sense strand
aagagaagagacagggacu

SEQ ID NO: 2321091 - RNA, 19 nt, Homo sapiens
  misc_RNA (1)...(19): siRNA sense strand
uggaaaaccauguggcaaa

SEQ ID NO: 2321092 - RNA, 19 nt, Homo sapiens
  misc_RNA (1)...(19): siRNA sense strand
caacuaagcugaagagccu

SEQ ID NO: 2321093 - RNA, 19 nt, Homo sapiens
  misc_RNA (1)...(19): siRNA sense strand
gagaaaauccggaggacca

SEQ ID NO: 2321094 - RNA, 19 nt, Homo sapiens
  misc_RNA (1)...(19): siRNA sense strand
cugcggugguccuggaaau

SEQ ID NO: 2321095 - RNA, 19 nt, Homo sapiens
  misc_RNA (1)...(19): siRNA sense strand
agguggagcugguggcguu

SEQ ID NO: 2321096 - RNA, 19 nt, Homo sapiens
  misc_RNA (1)...(19): siRNA sense strand
acaaagauguucugaggcu

SEQ ID NO: 2321097 - RNA, 19 nt, Homo sapiens
  misc_RNA (1)...(19): siRNA sense strand
gaagaagaaaggagaggcu

SEQ ID NO: 2321098 - RNA, 19 nt, Homo sapiens
  misc_RNA (1)...(19): siRNA sense strand
uggaggaguuucugaggca

SEQ ID NO: 2321099 - RNA, 19 nt, Homo sapiens
  misc_RNA (1)...(19): siRNA sense strand
ggaagguuaaagagaaaau

SEQ ID NO: 2321100 - RNA, 19 nt, Homo sapiens
  misc_RNA (1)...(19): siRNA sense strand
ucaacguggcagaagggua

SEQ ID NO: 2321101 - RNA, 19 nt, Homo sapiens
  misc_RNA (1)...(19): siRNA sense strand
gaaggguacagaugggaca

SEQ ID NO: 2321102 - RNA, 19 nt, Homo sapiens
  misc_RNA (1)...(19): siRNA sense strand
cugcagagaaauuucguga

SEQ ID NO: 2321103 - RNA, 19 nt, Homo sapiens
  misc_RNA (1)...(19): siRNA sense strand
ugcuaugacaacagggaga

SEQ ID NO: 2321104 - RNA, 19 nt, Homo sapiens
  misc_RNA (1)...(19): siRNA sense strand
uggaaaaccauguggcaaa

SEQ ID NO: 2321105 - RNA, 19 nt, Homo sapiens
  misc_RNA (1)...(19): siRNA sense strand
caacuaagcugaagagccu

SEQ ID NO: 2321106 - RNA, 19 nt, Homo sapiens
  misc_RNA (1)...(19): siRNA sense strand
cugcggugguccuggaaau

SEQ ID NO: 2321107 - RNA, 19 nt, Homo sapiens
  misc_RNA (1)...(19): siRNA sense strand
agguggagcugguggcguu

SEQ ID NO: 2321108 - RNA, 19 nt, Homo sapiens
  misc_RNA (1)...(19): siRNA sense strand
acaaagauguucugaggcu

SEQ ID NO: 2321109 - RNA, 19 nt, Homo sapiens
  misc_RNA (1)...(19): siRNA sense strand
uggaggaguuucugaggca

SEQ ID NO: 2321110 - RNA, 19 nt, Homo sapiens
  misc_RNA (1)...(19): siRNA sense strand
ucaacguggcagaagggua

SEQ ID NO: 2321111 - RNA, 19 nt, Homo sapiens
  misc_RNA (1)...(19): siRNA sense strand
gaaggguacagaugggaca

SEQ ID NO: 2321112 - RNA, 19 nt, Homo sapiens
  misc_RNA (1)...(19): siRNA sense strand
cugcagagaaauuucguga

SEQ ID NO: 2321113 - RNA, 19 nt, Homo sapiens
  misc_RNA (1)...(19): siRNA sense strand
agaagaaacgggaggacaa

SEQ ID NO: 2321114 - RNA, 19 nt, Homo sapiens
  misc_RNA (1)...(19): siRNA sense strand
gggaagaagaagaugaaca

SEQ ID NO: 2321115 - RNA, 19 nt, Homo sapiens
  misc_RNA (1)...(19): siRNA sense strand
gggaagauaaggaagggaa

SEQ ID NO: 2321116 - RNA, 19 nt, Homo sapiens
  misc_RNA (1)...(19): siRNA sense strand
aggacaaagcuaagaagaa

SEQ ID NO: 2321117 - RNA, 19 nt, Homo sapiens
  misc_RNA (1)...(19): siRNA sense strand
gcacgaggcaagaagggaa

SEQ ID NO: 2321118 - RNA, 19 nt, Homo sapiens
  misc_RNA (1)...(19): siRNA sense strand
ugagaagaugaaugggaaa

SEQ ID NO: 2321119 - RNA, 19 nt, Homo sapiens
  misc_RNA (1)...(19): siRNA sense strand
agaagaugaacaagaacaa

SEQ ID NO: 2321120 - RNA, 19 nt, Homo sapiens
  misc_RNA (1)...(19): siRNA sense strand
cagaggaggaagaagggaa

SEQ ID NO: 2321121 - RNA, 19 nt, Homo sapiens
  misc_RNA (1)...(19): siRNA sense strand
agaggaggaagaagggaaa

SEQ ID NO: 2321122 - RNA, 19 nt, Homo sapiens
  misc_RNA (1)...(19): siRNA sense strand
augaggaggaggaggacaa

SEQ ID NO: 2321123 - RNA, 19 nt, Homo sapiens
  misc_RNA (1)...(19): siRNA sense strand
ccaaggagcuucugggcca

SEQ ID NO: 2321124 - RNA, 19 nt, Homo sapiens
  misc_RNA (1)...(19): siRNA sense strand
gcaaguacaucuacgccaa

SEQ ID NO: 2321125 - RNA, 19 nt, Homo sapiens
  misc_RNA (1)...(19): siRNA sense strand
ugguuaaggagaagccaaa

SEQ ID NO: 2321126 - RNA, 19 nt, Homo sapiens
  misc_RNA (1)...(19): siRNA sense strand
aagaagaagaugaacaaga

SEQ ID NO: 2321127 - RNA, 19 nt, Homo sapiens
  misc_RNA (1)...(19): siRNA sense strand
ccaccacagaugaggacaa

SEQ ID NO: 2321128 - RNA, 19 nt, Homo sapiens
  misc_RNA (1)...(19): siRNA sense strand
gguucagauugcagcggaa

SEQ ID NO: 2321129 - RNA, 19 nt, Homo sapiens
  misc_RNA (1)...(19): siRNA sense strand
gcgucauugucaagaucaa

SEQ ID NO: 2321130 - RNA, 19 nt, Homo sapiens
  misc_RNA (1)...(19): siRNA sense strand
gguuugaggagcugaccaa

SEQ ID NO: 2321131 - RNA, 19 nt, Homo sapiens
  misc_RNA (1)...(19): siRNA sense strand
augagaagaugaaugggaa

SEQ ID NO: 2321132 - RNA, 19 nt, Homo sapiens
  misc_RNA (1)...(19): siRNA sense strand
gugccaaggacaagagguu

SEQ ID NO: 2321133 - RNA, 19 nt, Homo sapiens
  misc_RNA (1)...(19): siRNA sense strand
gcuaagaagaagcacgaca

SEQ ID NO: 2321134 - RNA, 19 nt, Homo sapiens
  misc_RNA (1)...(19): siRNA sense strand
cggaaaacaaccugggaga

SEQ ID NO: 2321135 - RNA, 19 nt, Homo sapiens
  misc_RNA (1)...(19): siRNA sense strand
gggaaaagcauaugggaag

SEQ ID NO: 2321136 - RNA, 19 nt, Homo sapiens
  misc_RNA (1)...(19): siRNA sense strand
auaaggaagggaagaagaa

SEQ ID NO: 2321137 - RNA, 19 nt, Homo sapiens
  misc_RNA (1)...(19): siRNA sense strand
ccuccaaggccaugaagau

SEQ ID NO: 2321138 - RNA, 19 nt, Homo sapiens
  misc_RNA (1)...(19): siRNA sense strand
agaaggcagccgagaagaa

SEQ ID NO: 2321139 - RNA, 19 nt, Homo sapiens
  misc_RNA (1)...(19): siRNA sense strand
aagcauaugggaaggccaa

SEQ ID NO: 2321140 - RNA, 19 nt, Homo sapiens
  misc_RNA (1)...(19): siRNA sense strand
acaagaaggcagccgagaa

SEQ ID NO: 2321141 - RNA, 19 nt, Homo sapiens
  misc_RNA (1)...(19): siRNA sense strand
gcaucuaccugcugcgcau

SEQ ID NO: 2321142 - RNA, 19 nt, Homo sapiens
  misc_RNA (1)...(19): siRNA sense strand
cgucagaagauccgaaaau

SEQ ID NO: 2321143 - RNA, 19 nt, Homo sapiens
  misc_RNA (1)...(19): siRNA sense strand
aggaugaagaagauaccaa

SEQ ID NO: 2321144 - RNA, 19 nt, Homo sapiens
  misc_RNA (1)...(19): siRNA sense strand
aagaagauaccaagagagu

SEQ ID NO: 2321145 - RNA, 19 nt, Homo sapiens
  misc_RNA (1)...(19): siRNA sense strand
aaggaagggaagaagaaga

SEQ ID NO: 2321146 - RNA, 19 nt, Homo sapiens
  misc_RNA (1)...(19): siRNA sense strand
aggaagggaagaagaagau

SEQ ID NO: 2321147 - RNA, 19 nt, Homo sapiens
  misc_RNA (1)...(19): siRNA sense strand
cggaugaagaugcugagaa

SEQ ID NO: 2321148 - RNA, 19 nt, Homo sapiens
  misc_RNA (1)...(19): siRNA sense strand
uggaugaggaggaggagga

SEQ ID NO: 2321149 - RNA, 19 nt, Homo sapiens
  misc_RNA (1)...(19): siRNA sense strand
aggaggaggaggacaauga

SEQ ID NO: 2321150 - RNA, 19 nt, Homo sapiens
  misc_RNA (1)...(19): siRNA sense strand
aagauaaggaagggaagaa

SEQ ID NO: 2321151 - RNA, 19 nt, Homo sapiens
  misc_RNA (1)...(19): siRNA sense strand
gagaagaaacgggaggaca

SEQ ID NO: 2321152 - RNA, 19 nt, Homo sapiens
  misc_RNA (1)...(19): siRNA sense strand
ucacaagcuacaagcagaa

SEQ ID NO: 2321153 - RNA, 19 nt, Homo sapiens
  misc_RNA (1)...(19): siRNA sense strand
gcucuucagaugaggauga

SEQ ID NO: 2321154 - RNA, 19 nt, Homo sapiens
  misc_RNA (1)...(19): siRNA sense strand
caaccuacaugaagccaga

SEQ ID NO: 2321155 - RNA, 19 nt, Homo sapiens
  misc_RNA (1)...(19): siRNA sense strand
aagaagaugaacaagaaca

SEQ ID NO: 2321156 - RNA, 19 nt, Homo sapiens
  misc_RNA (1)...(19): siRNA sense strand
ccgacucagaggaggaaga

SEQ ID NO: 2321157 - RNA, 19 nt, Homo sapiens
  misc_RNA (1)...(19): siRNA sense strand
uggaacgaauggaugaaga

SEQ ID NO: 2321158 - RNA, 19 nt, Homo sapiens
  misc_RNA (1)...(19): siRNA sense strand
aggcagaaaaugagggcga

SEQ ID NO: 2321159 - RNA, 19 nt, Homo sapiens
  misc_RNA (1)...(19): siRNA sense strand
cuguguugauggagagacu

SEQ ID NO: 2321160 - RNA, 19 nt, Homo sapiens
  misc_RNA (1)...(19): siRNA sense strand
ggacaagagguuugaggag

SEQ ID NO: 2321161 - RNA, 19 nt, Homo sapiens
  misc_RNA (1)...(19): siRNA sense strand
cuuaaugagcuuugggaag

SEQ ID NO: 2321162 - RNA, 19 nt, Homo sapiens
  misc_RNA (1)...(19): siRNA sense strand
ugggcagccugguggagaa

SEQ ID NO: 2321163 - RNA, 19 nt, Homo sapiens
  misc_RNA (1)...(19): siRNA sense strand
ucaccaagugccuggaaga

SEQ ID NO: 2321164 - RNA, 19 nt, Homo sapiens
  misc_RNA (1)...(19): siRNA sense strand
uggaagaguuugagcuccu

SEQ ID NO: 2321165 - RNA, 19 nt, Homo sapiens
  misc_RNA (1)...(19): siRNA sense strand
aagggaagaagaagaugaa

SEQ ID NO: 2321166 - RNA, 19 nt, Homo sapiens
  misc_RNA (1)...(19): siRNA sense strand
uugucaagaucaaguucaa

SEQ ID NO: 2321167 - RNA, 19 nt, Homo sapiens
  misc_RNA (1)...(19): siRNA sense strand
cggaggcaacuauggcaaa

SEQ ID NO: 2321168 - RNA, 19 nt, Homo sapiens
  misc_RNA (1)...(19): siRNA sense strand
gagaccagaaggacggcua

SEQ ID NO: 2321169 - RNA, 19 nt, Homo sapiens
  misc_RNA (1)...(19): siRNA sense strand
ugaacaagaacaaugccaa

SEQ ID NO: 2321170 - RNA, 19 nt, Homo sapiens
  misc_RNA (1)...(19): siRNA sense strand
gaugaugaagacugggaca

SEQ ID NO: 2321171 - RNA, 19 nt, Homo sapiens
  misc_RNA (1)...(19): siRNA sense strand
aagaagcacgacaggaaau

SEQ ID NO: 2321172 - RNA, 19 nt, Homo sapiens
  misc_RNA (1)...(19): siRNA sense strand
gaauauucuggaagagagu

SEQ ID NO: 2321173 - RNA, 19 nt, Homo sapiens
  misc_RNA (1)...(19): siRNA sense strand
ccagagacgugguggcaaa

SEQ ID NO: 2321174 - RNA, 19 nt, Homo sapiens
  misc_RNA (1)...(19): siRNA sense strand
ccaaacugguagagagauu

SEQ ID NO: 2321175 - RNA, 19 nt, Homo sapiens
  misc_RNA (1)...(19): siRNA sense strand
uggcagagauagagcacaa

SEQ ID NO: 2321176 - RNA, 19 nt, Homo sapiens
  misc_RNA (1)...(19): siRNA sense strand
gaagaugagcugagggcua

SEQ ID NO: 2321177 - RNA, 19 nt, Homo sapiens
  misc_RNA (1)...(19): siRNA sense strand
cuaaagucuucaugggaaa

SEQ ID NO: 2321178 - RNA, 19 nt, Homo sapiens
  misc_RNA (1)...(19): siRNA sense strand
agacaaacugauagacaaa

SEQ ID NO: 2321179 - RNA, 19 nt, Homo sapiens
  misc_RNA (1)...(19): siRNA sense strand
gcgaugaagauguggacaa

SEQ ID NO: 2321180 - RNA, 19 nt, Homo sapiens
  misc_RNA (1)...(19): siRNA sense strand
ggaagaaagcugagaccau

SEQ ID NO: 2321181 - RNA, 19 nt, Homo sapiens
  misc_RNA (1)...(19): siRNA sense strand
gguuaaauucagugccaua

SEQ ID NO: 2321182 - RNA, 19 nt, Homo sapiens
  misc_RNA (1)...(19): siRNA sense strand
agaugaaagcagugaaauu

SEQ ID NO: 2321183 - RNA, 19 nt, Homo sapiens
  misc_RNA (1)...(19): siRNA sense strand
acaacuacuuagaggcaaa

SEQ ID NO: 2321184 - RNA, 19 nt, Homo sapiens
  misc_RNA (1)...(19): siRNA sense strand
uggaugaugaggagagaaa

SEQ ID NO: 2321185 - RNA, 19 nt, Homo sapiens
  misc_RNA (1)...(19): siRNA sense strand
ccucaagaauggaagaaga

SEQ ID NO: 2321186 - RNA, 19 nt, Homo sapiens
  misc_RNA (1)...(19): siRNA sense strand
uggcagagguugucaguau

SEQ ID NO: 2321187 - RNA, 19 nt, Homo sapiens
  misc_RNA (1)...(19): siRNA sense strand
guugagaaagaaagagaua

SEQ ID NO: 2321188 - RNA, 19 nt, Homo sapiens
  misc_RNA (1)...(19): siRNA sense strand
cugaauaccuggaaaccaa

SEQ ID NO: 2321189 - RNA, 19 nt, Homo sapiens
  misc_RNA (1)...(19): siRNA sense strand
guucagagcaaauggacua

SEQ ID NO: 2321190 - RNA, 19 nt, Homo sapiens
  misc_RNA (1)...(19): siRNA sense strand
cuacaaauccauaggcaau

SEQ ID NO: 2321191 - RNA, 19 nt, Homo sapiens
  misc_RNA (1)...(19): siRNA sense strand
ucugaaacgaggagauaaa

SEQ ID NO: 2321192 - RNA, 19 nt, Homo sapiens
  misc_RNA (1)...(19): siRNA sense strand
ggauaauacuucaugcaau

SEQ ID NO: 2321193 - RNA, 19 nt, Homo sapiens
  misc_RNA (1)...(19): siRNA sense strand
gggagaaauagaagaguca

SEQ ID NO: 2321194 - RNA, 19 nt, Homo sapiens
  misc_RNA (1)...(19): siRNA sense strand
gguuuuauuuggagaguua

SEQ ID NO: 2321195 - RNA, 19 nt, Homo sapiens
  misc_RNA (1)...(19): siRNA sense strand
ggaauguacagcaaagaaa

SEQ ID NO: 2321196 - RNA, 19 nt, Homo sapiens
  misc_RNA (1)...(19): siRNA sense strand
gugaagaacuuauggaacu

SEQ ID NO: 2321197 - RNA, 19 nt, Homo sapiens
  misc_RNA (1)...(19): siRNA sense strand
ugagaaaccccuagagaaa

SEQ ID NO: 2321198 - RNA, 19 nt, Homo sapiens
  misc_RNA (1)...(19): siRNA sense strand
gagaaagugagccgggaaa

SEQ ID NO: 2321199 - RNA, 19 nt, Homo sapiens
  misc_RNA (1)...(19): siRNA sense strand
cgagaugagugaagaacuu

SEQ ID NO: 2321200 - RNA, 19 nt, Homo sapiens
  misc_RNA (1)...(19): siRNA sense strand
acuaaagucugaugaacaa

SEQ ID NO: 2321201 - RNA, 19 nt, Homo sapiens
  misc_RNA (1)...(19): siRNA sense strand
ggucgcacgcugagaguua

SEQ ID NO: 2321202 - RNA, 19 nt, Homo sapiens
  misc_RNA (1)...(19): siRNA sense strand
gaauugagccagugcacaa

SEQ ID NO: 2321203 - RNA, 19 nt, Homo sapiens
  misc_RNA (1)...(19): siRNA sense strand
aguuaaagcauucgaagaa

SEQ ID NO: 2321204 - RNA, 19 nt, Homo sapiens
  misc_RNA (1)...(19): siRNA sense strand
caaggaagccacagagauu

SEQ ID NO: 2321205 - RNA, 19 nt, Homo sapiens
  misc_RNA (1)...(19): siRNA sense strand
ggcaaaaugucuagaagaa

SEQ ID NO: 2321206 - RNA, 19 nt, Homo sapiens
  misc_RNA (1)...(19): siRNA sense strand
ugagaaagaaagagauaga

SEQ ID NO: 2321207 - RNA, 19 nt, Homo sapiens
  misc_RNA (1)...(19): siRNA sense strand
ugaagaaauucccgaacaa

SEQ ID NO: 2321208 - RNA, 19 nt, Homo sapiens
  misc_RNA (1)...(19): siRNA sense strand
gagaauggaaagauggcaa

SEQ ID NO: 2321209 - RNA, 19 nt, Homo sapiens
  misc_RNA (1)...(19): siRNA sense strand
cuucacaagauauggaaua

SEQ ID NO: 2321210 - RNA, 19 nt, Homo sapiens
  misc_RNA (1)...(19): siRNA sense strand
ccgucaaaugaaaggauaa

SEQ ID NO: 2321211 - RNA, 19 nt, Homo sapiens
  misc_RNA (1)...(19): siRNA sense strand
acaacuuggucgaggaaaa

SEQ ID NO: 2321212 - RNA, 19 nt, Homo sapiens
  misc_RNA (1)...(19): siRNA sense strand
ucgaagaagcauugauaau

SEQ ID NO: 2321213 - RNA, 19 nt, Homo sapiens
  misc_RNA (1)...(19): siRNA sense strand
cucuaaugcuaguaggaaa

SEQ ID NO: 2321214 - RNA, 19 nt, Homo sapiens
  misc_RNA (1)...(19): siRNA sense strand
agggaaaacuguuggaaau

SEQ ID NO: 2321215 - RNA, 19 nt, Homo sapiens
  misc_RNA (1)...(19): siRNA sense strand
gcuaaagucuucaugggaa

SEQ ID NO: 2321216 - RNA, 19 nt, Homo sapiens
  misc_RNA (1)...(19): siRNA sense strand
uguaagaagccgacagaga

SEQ ID NO: 2321217 - RNA, 19 nt, Homo sapiens
  misc_RNA (1)...(19): siRNA sense strand
agacagaaggugaugcuua

SEQ ID NO: 2321218 - RNA, 19 nt, Homo sapiens
  misc_RNA (1)...(19): siRNA sense strand
gggaagugcugaagacgau

SEQ ID NO: 2321219 - RNA, 19 nt, Homo sapiens
  misc_RNA (1)...(19): siRNA sense strand
cagaaacguuagacaacua

SEQ ID NO: 2321220 - RNA, 19 nt, Homo sapiens
  misc_RNA (1)...(19): siRNA sense strand
ugacagaaggcuugggaca

SEQ ID NO: 2321221 - RNA, 19 nt, Homo sapiens
  misc_RNA (1)...(19): siRNA sense strand
augaagagcuugaggccuu

SEQ ID NO: 2321222 - RNA, 19 nt, Homo sapiens
  misc_RNA (1)...(19): siRNA sense strand
uggacaaggcggugaaaga

SEQ ID NO: 2321223 - RNA, 19 nt, Homo sapiens
  misc_RNA (1)...(19): siRNA sense strand
gaaacaggaagaagagauu

SEQ ID NO: 2321224 - RNA, 19 nt, Homo sapiens
  misc_RNA (1)...(19): siRNA sense strand
ggguguauuuagaagaauu

SEQ ID NO: 2321225 - RNA, 19 nt, Homo sapiens
  misc_RNA (1)...(19): siRNA sense strand
gcuugaggccuuagaagaa

SEQ ID NO: 2321226 - RNA, 19 nt, Homo sapiens
  misc_RNA (1)...(19): siRNA sense strand
agacagaagaucaugacaa

SEQ ID NO: 2321227 - RNA, 19 nt, Homo sapiens
  misc_RNA (1)...(19): siRNA sense strand
uuggauaaacugagaacaa

SEQ ID NO: 2321228 - RNA, 19 nt, Homo sapiens
  misc_RNA (1)...(19): siRNA sense strand
ggagauaaagaaugugaau

SEQ ID NO: 2321229 - RNA, 19 nt, Homo sapiens
  misc_RNA (1)...(19): siRNA sense strand
gaaugugagaggaugaaua

SEQ ID NO: 2321230 - RNA, 19 nt, Homo sapiens
  misc_RNA (1)...(19): siRNA sense strand
acguauaucacuugaacaa

SEQ ID NO: 2321231 - RNA, 19 nt, Homo sapiens
  misc_RNA (1)...(19): siRNA sense strand
caacagggaugcuggccaa

SEQ ID NO: 2321232 - RNA, 19 nt, Homo sapiens
  misc_RNA (1)...(19): siRNA sense strand
aaacagugucgcaaagaaa

SEQ ID NO: 2321233 - RNA, 19 nt, Homo sapiens
  misc_RNA (1)...(19): siRNA sense strand
gaaaugcaggagugggaaa

SEQ ID NO: 2321234 - RNA, 19 nt, Homo sapiens
  misc_RNA (1)...(19): siRNA sense strand
cagagaagaaugcuggaaa

SEQ ID NO: 2321235 - RNA, 19 nt, Homo sapiens
  misc_RNA (1)...(19): siRNA sense strand
cagaaguggcccuggagaa

SEQ ID NO: 2321236 - RNA, 19 nt, Homo sapiens
  misc_RNA (1)...(19): siRNA sense strand
ggacagacaagaaaccaaa

SEQ ID NO: 2321237 - RNA, 19 nt, Homo sapiens
  misc_RNA (1)...(19): siRNA sense strand
gagaauuaaaugaagguga

SEQ ID NO: 2321238 - RNA, 19 nt, Homo sapiens
  misc_RNA (1)...(19): siRNA sense strand
augguagacuccagggaaa

SEQ ID NO: 2321239 - RNA, 19 nt, Homo sapiens
  misc_RNA (1)...(19): siRNA sense strand
uggcagagauaaugcaaaa

SEQ ID NO: 2321240 - RNA, 19 nt, Homo sapiens
  misc_RNA (1)...(19): siRNA sense strand
guugaagaaacaagacaua

SEQ ID NO: 2321241 - RNA, 19 nt, Homo sapiens
  misc_RNA (1)...(19): siRNA sense strand
ugaagaauacagagaaaca

SEQ ID NO: 2321242 - RNA, 19 nt, Homo sapiens
  misc_RNA (1)...(19): siRNA sense strand
gcauuaagggauuucaaua

SEQ ID NO: 2321243 - RNA, 19 nt, Homo sapiens
  misc_RNA (1)...(19): siRNA sense strand
ccguguuuauggagacaaa

SEQ ID NO: 2321244 - RNA, 19 nt, Homo sapiens
  misc_RNA (1)...(19): siRNA sense strand
cuacagaagaaaagguuaa

SEQ ID NO: 2321245 - RNA, 19 nt, Homo sapiens
  misc_RNA (1)...(19): siRNA sense strand
guucaacauggcagagaua

SEQ ID NO: 2321246 - RNA, 19 nt, Homo sapiens
  misc_RNA (1)...(19): siRNA sense strand
aguucaagauagagaagaa

SEQ ID NO: 2321247 - RNA, 19 nt, Homo sapiens
  misc_RNA (1)...(19): siRNA sense strand
caaucaaggaaauggaaau

SEQ ID NO: 2321248 - RNA, 19 nt, Homo sapiens
  misc_RNA (1)...(19): siRNA sense strand
cuguaauggugcuggugaa

SEQ ID NO: 2321249 - RNA, 19 nt, Homo sapiens
  misc_RNA (1)...(19): siRNA sense strand
caucuuauucaguggcaaa

SEQ ID NO: 2321250 - RNA, 19 nt, Homo sapiens
  misc_RNA (1)...(19): siRNA sense strand
gauuggugaagguggcaua

SEQ ID NO: 2321251 - RNA, 19 nt, Homo sapiens
  misc_RNA (1)...(19): siRNA sense strand
uggaugacaaucaaggaaa

SEQ ID NO: 2321252 - RNA, 19 nt, Homo sapiens
  misc_RNA (1)...(19): siRNA sense strand
augccaaaguggagcgagu

SEQ ID NO: 2321253 - RNA, 19 nt, Homo sapiens
  misc_RNA (1)...(19): siRNA sense strand
cuguguacuucaaaggcaa

SEQ ID NO: 2321254 - RNA, 19 nt, Homo sapiens
  misc_RNA (1)...(19): siRNA sense strand
ucaagaacgugauugguga

SEQ ID NO: 2321255 - RNA, 19 nt, Homo sapiens
  misc_RNA (1)...(19): siRNA sense strand
acaaucaaggaaauggaaa

SEQ ID NO: 2321256 - RNA, 19 nt, Homo sapiens
  misc_RNA (1)...(19): siRNA sense strand
cucuaaguauguugaggua

SEQ ID NO: 2321257 - RNA, 19 nt, Homo sapiens
  misc_RNA (1)...(19): siRNA sense strand
ccucaguucaagauagaga

SEQ ID NO: 2321258 - RNA, 19 nt, Homo sapiens
  misc_RNA (1)...(19): siRNA sense strand
cuacauugagugugccgaa

SEQ ID NO: 2321259 - RNA, 19 nt, Homo sapiens
  misc_RNA (1)...(19): siRNA sense strand
gcgaguugacuuuacgaau

SEQ ID NO: 2321260 - RNA, 19 nt, Homo sapiens
  misc_RNA (1)...(19): siRNA sense strand
cuucaaaggcaaguggcaa

SEQ ID NO: 2321261 - RNA, 19 nt, Homo sapiens
  misc_RNA (1)...(19): siRNA sense strand
gccuucaccaagagcgaaa

SEQ ID NO: 2321262 - RNA, 19 nt, Homo sapiens
  misc_RNA (1)...(19): siRNA sense strand
ggaccaauccaaggcgaau

SEQ ID NO: 2321263 - RNA, 19 nt, Homo sapiens
  misc_RNA (1)...(19): siRNA sense strand
cagagagauggaugacaau

SEQ ID NO: 2321264 - RNA, 19 nt, Homo sapiens
  misc_RNA (1)...(19): siRNA sense strand
acauagaggucacugagga

SEQ ID NO: 2321265 - RNA, 19 nt, Homo sapiens
  misc_RNA (1)...(19): siRNA sense strand
agacacuagacguaauauu

SEQ ID NO: 2321266 - RNA, 19 nt, Homo sapiens
  misc_RNA (1)...(19): siRNA sense strand
caagaacgugauuggugaa

SEQ ID NO: 2321267 - RNA, 19 nt, Homo sapiens
  misc_RNA (1)...(19): siRNA sense strand
cuuucagaaucuaauggaa

SEQ ID NO: 2321268 - RNA, 19 nt, Homo sapiens
  misc_RNA (1)...(19): siRNA sense strand
agacaaaacaggagugaua

SEQ ID NO: 2321269 - RNA, 19 nt, Homo sapiens
  misc_RNA (1)...(19): siRNA sense strand
uauggaaagacuagagaaa

SEQ ID NO: 2321270 - RNA, 19 nt, Homo sapiens
  misc_RNA (1)...(19): siRNA sense strand
gcucaaagcaagaaaacaa

SEQ ID NO: 2321271 - RNA, 19 nt, Homo sapiens
  misc_RNA (1)...(19): siRNA sense strand
aggagaagcuauagccaau

SEQ ID NO: 2321272 - RNA, 19 nt, Homo sapiens
  misc_RNA (1)...(19): siRNA sense strand
gagcaagccaagauagcaa

SEQ ID NO: 2321273 - RNA, 19 nt, Homo sapiens
  misc_RNA (1)...(19): siRNA sense strand
gaggagagaaguauggcua

SEQ ID NO: 2321274 - RNA, 19 nt, Homo sapiens
  misc_RNA (1)...(19): siRNA sense strand
ccaaugaagaauaaugcaa

SEQ ID NO: 2321275 - RNA, 19 nt, Homo sapiens
  misc_RNA (1)...(19): siRNA sense strand
ucaacacugcugagagaaa

SEQ ID NO: 2321276 - RNA, 19 nt, Homo sapiens
  misc_RNA (1)...(19): siRNA sense strand
acucgggacuggagaucaa

SEQ ID NO: 2321277 - RNA, 19 nt, Homo sapiens
  misc_RNA (1)...(19): siRNA sense strand
agaaacaauugcagcacuu

SEQ ID NO: 2321278 - RNA, 19 nt, Homo sapiens
  misc_RNA (1)...(19): siRNA sense strand
ggauucaagcucaaagcaa

SEQ ID NO: 2321279 - RNA, 19 nt, Homo sapiens
  misc_RNA (1)...(19): siRNA sense strand
aggaagacgaggagagaag

SEQ ID NO: 2321280 - RNA, 19 nt, Homo sapiens
  misc_RNA (1)...(19): siRNA sense strand
aauucagcguguaggacaa

SEQ ID NO: 2321281 - RNA, 19 nt, Homo sapiens
  misc_RNA (1)...(19): siRNA sense strand
ggugacuggccaacagaua

SEQ ID NO: 2321282 - RNA, 19 nt, Homo sapiens
  misc_RNA (1)...(19): siRNA sense strand
gaagacgaggagagaagua

SEQ ID NO: 2321283 - RNA, 19 nt, Homo sapiens
  misc_RNA (1)...(19): siRNA sense strand
ggagaaugagauuguucaa

SEQ ID NO: 2321284 - RNA, 19 nt, Homo sapiens
  misc_RNA (1)...(19): siRNA sense strand
uuccaaagccaaugaagaa

SEQ ID NO: 2321285 - RNA, 19 nt, Homo sapiens
  misc_RNA (1)...(19): siRNA sense strand
cugaguggagauagacaaa

SEQ ID NO: 2321286 - RNA, 19 nt, Homo sapiens
  misc_RNA (1)...(19): siRNA sense strand
gauaaaacucugcaagcaa

SEQ ID NO: 2321287 - RNA, 19 nt, Homo sapiens
  misc_RNA (1)...(19): siRNA sense strand
gcuaaacaagcaggagaaa

SEQ ID NO: 2321288 - RNA, 19 nt, Homo sapiens
  misc_RNA (1)...(19): siRNA sense strand
acaaaacaggagugauaaa

SEQ ID NO: 2321289 - RNA, 19 nt, Homo sapiens
  misc_RNA (1)...(19): siRNA sense strand
gaguggagauagacaaaau

SEQ ID NO: 2321290 - RNA, 19 nt, Homo sapiens
  misc_RNA (1)...(19): siRNA sense strand
aguauuugaccguaugaaa

SEQ ID NO: 2321291 - RNA, 19 nt, Homo sapiens
  misc_RNA (1)...(19): siRNA sense strand
agcuaaacaagcaggagaa

SEQ ID NO: 2321292 - RNA, 19 nt, Homo sapiens
  misc_RNA (1)...(19): siRNA sense strand
gaugaauauugaagcucuu

SEQ ID NO: 2321293 - RNA, 19 nt, Homo sapiens
  misc_RNA (1)...(19): siRNA sense strand
gaaauugagaagugggaag

SEQ ID NO: 2321294 - RNA, 19 nt, Homo sapiens
  misc_RNA (1)...(19): siRNA sense strand
cuugaaaaguguacaauga

SEQ ID NO: 2321295 - RNA, 19 nt, Homo sapiens
  misc_RNA (1)...(19): siRNA sense strand
cugcugaaacauugacauu

SEQ ID NO: 2321296 - RNA, 19 nt, Homo sapiens
  misc_RNA (1)...(19): siRNA sense strand
agugggaagaucaggagaa

SEQ ID NO: 2321297 - RNA, 19 nt, Homo sapiens
  misc_RNA (1)...(19): siRNA sense strand
uguuaaaguaggagaagcu

SEQ ID NO: 2321298 - RNA, 19 nt, Homo sapiens
  misc_RNA (1)...(19): siRNA sense strand
auuuagaagcuuuggcuga

SEQ ID NO: 2321299 - RNA, 19 nt, Homo sapiens
  misc_RNA (1)...(19): siRNA sense strand
gaggagacauuucagguga

SEQ ID NO: 2321300 - RNA, 19 nt, Homo sapiens
  misc_RNA (1)...(19): siRNA sense strand
gugggaagaucaggagaau

SEQ ID NO: 2321301 - RNA, 19 nt, Homo sapiens
  misc_RNA (1)...(19): siRNA sense strand
cuggaaauaaacaagcuaa

SEQ ID NO: 2321302 - RNA, 19 nt, Homo sapiens
  misc_RNA (1)...(19): siRNA sense strand
gaaauaagguucucgcaac

SEQ ID NO: 2321303 - RNA, 19 nt, Homo sapiens
  misc_RNA (1)...(19): siRNA sense strand
gaaaauaacggaugggucu

SEQ ID NO: 2321304 - RNA, 19 nt, Homo sapiens
  misc_RNA (1)...(19): siRNA sense strand
ugaaaucauuaaagccaga

SEQ ID NO: 2321305 - RNA, 19 nt, Homo sapiens
  misc_RNA (1)...(19): siRNA sense strand
gcgaaauugagaaguggga

SEQ ID NO: 2321306 - RNA, 19 nt, Homo sapiens
  misc_RNA (1)...(19): siRNA sense strand
uggcauuggauaaggucau

SEQ ID NO: 2321307 - RNA, 19 nt, Homo sapiens
  misc_RNA (1)...(19): siRNA sense strand
ucacagucuuaaugaacuu

SEQ ID NO: 2321308 - RNA, 19 nt, Homo sapiens
  misc_RNA (1)...(19): siRNA sense strand
uguuauaaacugcugaaga

SEQ ID NO: 2321309 - RNA, 19 nt, Homo sapiens
  misc_RNA (1)...(19): siRNA sense strand
aagaagcuucagauggaaa

SEQ ID NO: 2321310 - RNA, 19 nt, Homo sapiens
  misc_RNA (1)...(19): siRNA sense strand
aagcuaaacaagcaggaga

SEQ ID NO: 2321311 - RNA, 19 nt, Homo sapiens
  misc_RNA (1)...(19): siRNA sense strand
augaaaguggcauuggaua

SEQ ID NO: 2321312 - RNA, 19 nt, Homo sapiens
  misc_RNA (1)...(19): siRNA sense strand
ccugaaaucauuaaagcca

SEQ ID NO: 2321313 - RNA, 19 nt, Homo sapiens
  misc_RNA (1)...(19): siRNA sense strand
aagacuagagaaagugaau

SEQ ID NO: 2321314 - RNA, 19 nt, Homo sapiens
  misc_RNA (1)...(19): siRNA sense strand
aagucaucuuggagcguau

SEQ ID NO: 2321315 - RNA, 19 nt, Homo sapiens
  misc_RNA (1)...(19): siRNA sense strand
acuucauaguacagcgaca

SEQ ID NO: 2321316 - RNA, 19 nt, Homo sapiens
  misc_RNA (1)...(19): siRNA sense strand
agaucaggagaaugagauu

SEQ ID NO: 2321317 - RNA, 19 nt, Homo sapiens
  misc_RNA (1)...(19): siRNA sense strand
ccgaauggagagacugaca

SEQ ID NO: 2321318 - RNA, 19 nt, Homo sapiens
  misc_RNA (1)...(19): siRNA sense strand
agcugaaagacgaugacaa

SEQ ID NO: 2321319 - RNA, 19 nt, Homo sapiens
  misc_RNA (1)...(19): siRNA sense strand
cagaccgaguagucauuaa

SEQ ID NO: 2321320 - RNA, 19 nt, Homo sapiens
  misc_RNA (1)...(19): siRNA sense strand
uuggauaaggucauugaaa

SEQ ID NO: 2321321 - RNA, 19 nt, Homo sapiens
  misc_RNA (1)...(19): siRNA sense strand
aagguugacaaguguauua

SEQ ID NO: 2321322 - RNA, 19 nt, Homo sapiens
  misc_RNA (1)...(19): siRNA sense strand
aggagaaacaauugcagca

SEQ ID NO: 2321323 - RNA, 19 nt, Homo sapiens
  misc_RNA (1)...(19): siRNA sense strand
agugauaaaggcugcaaga

SEQ ID NO: 2321324 - RNA, 19 nt, Homo sapiens
  misc_RNA (1)...(19): siRNA sense strand
aaggaguauuugaccguau

SEQ ID NO: 2321325 - RNA, 19 nt, Homo sapiens
  misc_RNA (1)...(19): siRNA sense strand
gaaggaagacgaggagaga

SEQ ID NO: 2321326 - RNA, 19 nt, Homo sapiens
  misc_RNA (1)...(19): siRNA sense strand
aaguguauuacgaagacaa

SEQ ID NO: 2321327 - RNA, 19 nt, Homo sapiens
  misc_RNA (1)...(19): siRNA sense strand
aaauugugacugacuguaa

SEQ ID NO: 2321328 - RNA, 19 nt, Homo sapiens
  misc_RNA (1)...(19): siRNA sense strand
agaagaagauggagggaga

SEQ ID NO: 2321329 - RNA, 19 nt, Homo sapiens
  misc_RNA (1)...(19): siRNA sense strand
ccuuagagcaggagaagaa

SEQ ID NO: 2321330 - RNA, 19 nt, Homo sapiens
  misc_RNA (1)...(19): siRNA sense strand
gcagcaaauagaagagaaa

SEQ ID NO: 2321331 - RNA, 19 nt, Homo sapiens
  misc_RNA (1)...(19): siRNA sense strand
ggaggaaauugaagcggaa

SEQ ID NO: 2321332 - RNA, 19 nt, Homo sapiens
  misc_RNA (1)...(19): siRNA sense strand
ccaagaagcuaguggagca

SEQ ID NO: 2321333 - RNA, 19 nt, Homo sapiens
  misc_RNA (1)...(19): siRNA sense strand
uggaaagggcgaagaggaa

SEQ ID NO: 2321334 - RNA, 19 nt, Homo sapiens
  misc_RNA (1)...(19): siRNA sense strand
agauaaagucaauggucua

SEQ ID NO: 2321335 - RNA, 19 nt, Homo sapiens
  misc_RNA (1)...(19): siRNA sense strand
uagaagagcuggaggagga

SEQ ID NO: 2321336 - RNA, 19 nt, Homo sapiens
  misc_RNA (1)...(19): siRNA sense strand
gugcagaggccgagaagga

SEQ ID NO: 2321337 - RNA, 19 nt, Homo sapiens
  misc_RNA (1)...(19): siRNA sense strand
agucaauggucuaaucaaa

SEQ ID NO: 2321338 - RNA, 19 nt, Homo sapiens
  misc_RNA (1)...(19): siRNA sense strand
agaggaagcuggaaggaga

SEQ ID NO: 2321339 - RNA, 19 nt, Homo sapiens
  misc_RNA (1)...(19): siRNA sense strand
uggaagaggaagaggagau

SEQ ID NO: 2321340 - RNA, 19 nt, Homo sapiens
  misc_RNA (1)...(19): siRNA sense strand
ucuccaagucaaagaguaa

SEQ ID NO: 2321341 - RNA, 19 nt, Homo sapiens
  misc_RNA (1)...(19): siRNA sense strand
ccaggaacgcagaggagaa

SEQ ID NO: 2321342 - RNA, 19 nt, Homo sapiens
  misc_RNA (1)...(19): siRNA sense strand
uggacaagcugcaggccaa

SEQ ID NO: 2321343 - RNA, 19 nt, Homo sapiens
  misc_RNA (1)...(19): siRNA sense strand
uagaagaaguggaggguuc

SEQ ID NO: 2321344 - RNA, 19 nt, Homo sapiens
  misc_RNA (1)...(19): siRNA sense strand
ggguggaguucaagaagau

SEQ ID NO: 2321345 - RNA, 19 nt, Homo sapiens
  misc_RNA (1)...(19): siRNA sense strand
aagaagaaaccaaggccaa

SEQ ID NO: 2321346 - RNA, 19 nt, Homo sapiens
  misc_RNA (1)...(19): siRNA sense strand
ggagagauuggaagaggaa

SEQ ID NO: 2321347 - RNA, 19 nt, Homo sapiens
  misc_RNA (1)...(19): siRNA sense strand
agagauuggaagaggaaga

SEQ ID NO: 2321348 - RNA, 19 nt, Homo sapiens
  misc_RNA (1)...(19): siRNA sense strand
agaacaagguaaagaaucu

SEQ ID NO: 2321349 - RNA, 19 nt, Homo sapiens
  misc_RNA (1)...(19): siRNA sense strand
gcacagaagagcuggagga

SEQ ID NO: 2321350 - RNA, 19 nt, Homo sapiens
  misc_RNA (1)...(19): siRNA sense strand
uggaacacgaggagagcaa

SEQ ID NO: 2321351 - RNA, 19 nt, Homo sapiens
  misc_RNA (1)...(19): siRNA sense strand
acgcagaggagaaggccaa

SEQ ID NO: 2321352 - RNA, 19 nt, Homo sapiens
  misc_RNA (1)...(19): siRNA sense strand
agggagagguggaggaucu

SEQ ID NO: 2321353 - RNA, 19 nt, Homo sapiens
  misc_RNA (1)...(19): siRNA sense strand
aaacaagaagccagaacua

SEQ ID NO: 2321354 - RNA, 19 nt, Homo sapiens
  misc_RNA (1)...(19): siRNA sense strand
gggaagaagcagauccaga

SEQ ID NO: 2321355 - RNA, 19 nt, Homo sapiens
  misc_RNA (1)...(19): siRNA sense strand
acaagaagaaggagacaca

SEQ ID NO: 2321356 - RNA, 19 nt, Homo sapiens
  misc_RNA (1)...(19): siRNA sense strand
ccaaauugaccaaagaaaa

SEQ ID NO: 2321357 - RNA, 19 nt, Homo sapiens
  misc_RNA (1)...(19): siRNA sense strand
gcauagaagagcuggagga

SEQ ID NO: 2321358 - RNA, 19 nt, Homo sapiens
  misc_RNA (1)...(19): siRNA sense strand
gggaacaguaugaggagga

SEQ ID NO: 2321359 - RNA, 19 nt, Homo sapiens
  misc_RNA (1)...(19): siRNA sense strand
uggacaagaagcagaggaa

SEQ ID NO: 2321360 - RNA, 19 nt, Homo sapiens
  misc_RNA (1)...(19): siRNA sense strand
aggcagagguggagaacuc

SEQ ID NO: 2321361 - RNA, 19 nt, Homo sapiens
  misc_RNA (1)...(19): siRNA sense strand
aaccagagaaggagagaau

SEQ ID NO: 2321362 - RNA, 19 nt, Homo sapiens
  misc_RNA (1)...(19): siRNA sense strand
uugacaagaucgaggacau

SEQ ID NO: 2321363 - RNA, 19 nt, Homo sapiens
  misc_RNA (1)...(19): siRNA sense strand
ucaauuauccagugagaga

SEQ ID NO: 2321364 - RNA, 19 nt, Homo sapiens
  misc_RNA (1)...(19): siRNA sense strand
cagaaaugcugaagggccu

SEQ ID NO: 2321365 - RNA, 19 nt, Homo sapiens
  misc_RNA (1)...(19): siRNA sense strand
gcuuuguagcggauaauaa

SEQ ID NO: 2321366 - RNA, 19 nt, Homo sapiens
  misc_RNA (1)...(19): siRNA sense strand
aagaggaagaggagaugaa

SEQ ID NO: 2321367 - RNA, 19 nt, Homo sapiens
  misc_RNA (1)...(19): siRNA sense strand
uggaagaagauaaagucaa

SEQ ID NO: 2321368 - RNA, 19 nt, Homo sapiens
  misc_RNA (1)...(19): siRNA sense strand
gacaagaagcagaggaacu

SEQ ID NO: 2321369 - RNA, 19 nt, Homo sapiens
  misc_RNA (1)...(19): siRNA sense strand
augccaagacugugaggaa

SEQ ID NO: 2321370 - RNA, 19 nt, Homo sapiens
  misc_RNA (1)...(19): siRNA sense strand
aggagaaagucgggaucua

SEQ ID NO: 2321371 - RNA, 19 nt, Homo sapiens
  misc_RNA (1)...(19): siRNA sense strand
aagaaaucgagcagcuaaa

SEQ ID NO: 2321372 - RNA, 19 nt, Homo sapiens
  misc_RNA (1)...(19): siRNA sense strand
aggaagaguacaagaagga

SEQ ID NO: 2321373 - RNA, 19 nt, Homo sapiens
  misc_RNA (1)...(19): siRNA sense strand
ccagaauagaugacgaaca

SEQ ID NO: 2321374 - RNA, 19 nt, Homo sapiens
  misc_RNA (1)...(19): siRNA sense strand
ccacaaguacgaacgcaaa

SEQ ID NO: 2321375 - RNA, 19 nt, Homo sapiens
  misc_RNA (1)...(19): siRNA sense strand
acaagaagccagaacuaau

SEQ ID NO: 2321376 - RNA, 19 nt, Homo sapiens
  misc_RNA (1)...(19): siRNA sense strand
ccggauaccugaugggacu

SEQ ID NO: 2321377 - RNA, 19 nt, Homo sapiens
  misc_RNA (1)...(19): siRNA sense strand
cagcccagauugagaugaa

SEQ ID NO: 2321378 - RNA, 19 nt, Homo sapiens
  misc_RNA (1)...(19): siRNA sense strand
gcagaggagaagacggaga

SEQ ID NO: 2321379 - RNA, 19 nt, Homo sapiens
  misc_RNA (1)...(19): siRNA sense strand
uugagaaggaugaagaaau

SEQ ID NO: 2321380 - RNA, 19 nt, Homo sapiens
  misc_RNA (1)...(19): siRNA sense strand
agaacaagcuguaugacca

SEQ ID NO: 2321381 - RNA, 19 nt, Homo sapiens
  misc_RNA (1)...(19): siRNA sense strand
gaggaagaggagaugaauu

SEQ ID NO: 2321382 - RNA, 19 nt, Homo sapiens
  misc_RNA (1)...(19): siRNA sense strand
aggagagaaucgaggcuca

SEQ ID NO: 2321383 - RNA, 19 nt, Homo sapiens
  misc_RNA (1)...(19): siRNA sense strand
aagccaaggacgagcaaca

SEQ ID NO: 2321384 - RNA, 19 nt, Homo sapiens
  misc_RNA (1)...(19): siRNA sense strand
cugaacaugcagaaagcaa

SEQ ID NO: 2321385 - RNA, 19 nt, Homo sapiens
  misc_RNA (1)...(19): siRNA sense strand
uggaggagcuuaagaggca

SEQ ID NO: 2321386 - RNA, 19 nt, Homo sapiens
  misc_RNA (1)...(19): siRNA sense strand
ccagaagauggaagaauga

SEQ ID NO: 2321387 - RNA, 19 nt, Homo sapiens
  misc_RNA (1)...(19): siRNA sense strand
ggagacacagccaggcaaa

SEQ ID NO: 2321388 - RNA, 19 nt, Homo sapiens
  misc_RNA (1)...(19): siRNA sense strand
cagagaacaagguaaagaa

SEQ ID NO: 2321389 - RNA, 19 nt, Homo sapiens
  misc_RNA (1)...(19): siRNA sense strand
uggagaaggagaagagcga

SEQ ID NO: 2321390 - RNA, 19 nt, Homo sapiens
  misc_RNA (1)...(19): siRNA sense strand
gaggcaaauggaagaagaa

SEQ ID NO: 2321391 - RNA, 19 nt, Homo sapiens
  misc_RNA (1)...(19): siRNA sense strand
acaagaagagggaggcuga

SEQ ID NO: 2321392 - RNA, 19 nt, Homo sapiens
  misc_RNA (1)...(19): siRNA sense strand
aggaagaagcaagcagaua

SEQ ID NO: 2321393 - RNA, 19 nt, Homo sapiens
  misc_RNA (1)...(19): siRNA sense strand
cggauaauaaggaaaugua

SEQ ID NO: 2321394 - RNA, 19 nt, Homo sapiens
  misc_RNA (1)...(19): siRNA sense strand
ucgagaagccuaugggcau

SEQ ID NO: 2321395 - RNA, 19 nt, Homo sapiens
  misc_RNA (1)...(19): siRNA sense strand
gcuggaaggagaucugaaa

SEQ ID NO: 2321396 - RNA, 19 nt, Homo sapiens
  misc_RNA (1)...(19): siRNA sense strand
ggacaagguucaaggcugu

SEQ ID NO: 2321397 - RNA, 19 nt, Homo sapiens
  misc_RNA (1)...(19): siRNA sense strand
agaaagaaggacaaagaca

SEQ ID NO: 2321398 - RNA, 19 nt, Homo sapiens
  misc_RNA (1)...(19): siRNA sense strand
aaagugaaauccugggcua

SEQ ID NO: 2321399 - RNA, 19 nt, Homo sapiens
  misc_RNA (1)...(19): siRNA sense strand
augaaguucuggagacaau

SEQ ID NO: 2321400 - RNA, 19 nt, Homo sapiens
  misc_RNA (1)...(19): siRNA sense strand
ccucagagcucaaggcuuc

SEQ ID NO: 2321401 - RNA, 19 nt, Homo sapiens
  misc_RNA (1)...(19): siRNA sense strand
cagaagugauccugggcca

SEQ ID NO: 2321402 - RNA, 19 nt, Homo sapiens
  misc_RNA (1)...(19): siRNA sense strand
gggagaaugagguggagca

SEQ ID NO: 2321403 - RNA, 19 nt, Homo sapiens
  misc_RNA (1)...(19): siRNA sense strand
ccaaagaagcaaaagguga

SEQ ID NO: 2321404 - RNA, 19 nt, Homo sapiens
  misc_RNA (1)...(19): siRNA sense strand
uuguaugaguugaugaaga

SEQ ID NO: 2321405 - RNA, 19 nt, Homo sapiens
  misc_RNA (1)...(19): siRNA sense strand
cuaugaaguucuggagaca

SEQ ID NO: 2321406 - RNA, 19 nt, Homo sapiens
  misc_RNA (1)...(19): siRNA sense strand
gcagaaaagcagaugagau

SEQ ID NO: 2321407 - RNA, 19 nt, Homo sapiens
  misc_RNA (1)...(19): siRNA sense strand
gaugagaucaccaaagaga

SEQ ID NO: 2321408 - RNA, 19 nt, Homo sapiens
  misc_RNA (1)...(19): siRNA sense strand
cagaaaagcagaugagauc

SEQ ID NO: 2321409 - RNA, 19 nt, Homo sapiens
  misc_RNA (1)...(19): siRNA sense strand
agaaugagguggagcagcu

SEQ ID NO: 2321410 - RNA, 19 nt, Homo sapiens
  misc_RNA (1)...(19): siRNA sense strand
aucccaaggcagaggagaa

SEQ ID NO: 2321411 - RNA, 19 nt, Homo sapiens
  misc_RNA (1)...(19): siRNA sense strand
aggacaaagacaacaccua

SEQ ID NO: 2321412 - RNA, 19 nt, Homo sapiens
  misc_RNA (1)...(19): siRNA sense strand
ccccagacccugaggaaau

SEQ ID NO: 2321413 - RNA, 19 nt, Homo sapiens
  misc_RNA (1)...(19): siRNA sense strand
cagaugagaucaccaaaga

SEQ ID NO: 2321414 - RNA, 19 nt, Homo sapiens
  misc_RNA (1)...(19): siRNA sense strand
gcccgaaaauauagugcua

SEQ ID NO: 2321415 - RNA, 19 nt, Homo sapiens
  misc_RNA (1)...(19): siRNA sense strand
cggaguuguacacgggcua

SEQ ID NO: 2321416 - RNA, 19 nt, Homo sapiens
  misc_RNA (1)...(19): siRNA sense strand
cuggaagcucucagaaaga

SEQ ID NO: 2321417 - RNA, 19 nt, Homo sapiens
  misc_RNA (1)...(19): siRNA sense strand
gcuaugaaguucuggagac

SEQ ID NO: 2321418 - RNA, 19 nt, Homo sapiens
  misc_RNA (1)...(19): siRNA sense strand
gcucucagaaagaaggaca

SEQ ID NO: 2321419 - RNA, 19 nt, Homo sapiens
  misc_RNA (1)...(19): siRNA sense strand
aggagaagucaccaaagaa

SEQ ID NO: 2321420 - RNA, 19 nt, Homo sapiens
  misc_RNA (1)...(19): siRNA sense strand
ucauggaggugcugggucu

SEQ ID NO: 2321421 - RNA, 19 nt, Homo sapiens
  misc_RNA (1)...(19): siRNA sense strand
accaaagagacuacagaga

SEQ ID NO: 2321422 - RNA, 19 nt, Homo sapiens
  misc_RNA (1)...(19): siRNA sense strand
acaaugagcugguggcccu

SEQ ID NO: 2321423 - RNA, 19 nt, Homo sapiens
  misc_RNA (1)...(19): siRNA sense strand
auaacaacuuucaaggcuu

SEQ ID NO: 2321424 - RNA, 19 nt, Homo sapiens
  misc_RNA (1)...(19): siRNA sense strand
aggaacaagaagagguuuc

SEQ ID NO: 2321425 - RNA, 19 nt, Homo sapiens
  misc_RNA (1)...(19): siRNA sense strand
gauauuuguuagagcccaa

SEQ ID NO: 2321426 - RNA, 19 nt, Homo sapiens
  misc_RNA (1)...(19): siRNA sense strand
gugacagggcaaagaaaga

SEQ ID NO: 2321427 - RNA, 19 nt, Homo sapiens
  misc_RNA (1)...(19): siRNA sense strand
caacaaagagaaauggcga

SEQ ID NO: 2321428 - RNA, 19 nt, Homo sapiens
  misc_RNA (1)...(19): siRNA sense strand
gguacaugcuauacaggca

SEQ ID NO: 2321429 - RNA, 19 nt, Homo sapiens
  misc_RNA (1)...(19): siRNA sense strand
cagggcaaagaaagagaaa

SEQ ID NO: 2321430 - RNA, 19 nt, Homo sapiens
  misc_RNA (1)...(19): siRNA sense strand
guuacaugugacagggcaa

SEQ ID NO: 2321431 - RNA, 19 nt, Homo sapiens
  misc_RNA (1)...(19): siRNA sense strand
cauuggacuuggaggucuu

SEQ ID NO: 2321432 - RNA, 19 nt, Homo sapiens
  misc_RNA (1)...(19): siRNA sense strand
ggcaaagagaaggugguaa

SEQ ID NO: 2321433 - RNA, 19 nt, Homo sapiens
  misc_RNA (1)...(19): siRNA sense strand
gcugaggaggaaacagaau

SEQ ID NO: 2321434 - RNA, 19 nt, Homo sapiens
  misc_RNA (1)...(19): siRNA sense strand
aagaaagagaaaucagcau

SEQ ID NO: 2321435 - RNA, 19 nt, Homo sapiens
  misc_RNA (1)...(19): siRNA sense strand
ugguaaugaagcucaagaa

SEQ ID NO: 2321436 - RNA, 19 nt, Homo sapiens
  misc_RNA (1)...(19): siRNA sense strand
aggugguaaugaagcucaa

SEQ ID NO: 2321437 - RNA, 19 nt, Homo sapiens
  misc_RNA (1)...(19): siRNA sense strand
guacaugcuauacaggcaa

SEQ ID NO: 2321438 - RNA, 19 nt, Homo sapiens
  misc_RNA (1)...(19): siRNA sense strand
acauaggacuagaugggaa

SEQ ID NO: 2321439 - RNA, 19 nt, Homo sapiens
  misc_RNA (1)...(19): siRNA sense strand
acgacaaaucagagaauga

SEQ ID NO: 2321440 - RNA, 19 nt, Homo sapiens
  misc_RNA (1)...(19): siRNA sense strand
cuaaacagaugauugggua

SEQ ID NO: 2321441 - RNA, 19 nt, Homo sapiens
  misc_RNA (1)...(19): siRNA sense strand
agagaaaccuaccuggcaa

SEQ ID NO: 2321442 - RNA, 19 nt, Homo sapiens
  misc_RNA (1)...(19): siRNA sense strand
ggaucuuggagguggugua

SEQ ID NO: 2321443 - RNA, 19 nt, Homo sapiens
  misc_RNA (1)...(19): siRNA sense strand
cuucaaacccggagcucau

SEQ ID NO: 2321444 - RNA, 19 nt, Homo sapiens
  misc_RNA (1)...(19): siRNA sense strand
acccuaauguugugggaca

SEQ ID NO: 2321445 - RNA, 19 nt, Homo sapiens
  misc_RNA (1)...(19): siRNA sense strand
cugccaaauaugaucuaaa

SEQ ID NO: 2321446 - RNA, 19 nt, Homo sapiens
  misc_RNA (1)...(19): siRNA sense strand
uccaaaagaaggugugaaa

SEQ ID NO: 2321447 - RNA, 19 nt, Homo sapiens
  misc_RNA (1)...(19): siRNA sense strand
uugcugaagccuuggauau

SEQ ID NO: 2321448 - RNA, 19 nt, Homo sapiens
  misc_RNA (1)...(19): siRNA sense strand
gugaaacuccagaaggaca

SEQ ID NO: 2321449 - RNA, 19 nt, Homo sapiens
  misc_RNA (1)...(19): siRNA sense strand
ugaaacuccagaaggacaa

SEQ ID NO: 2321450 - RNA, 19 nt, Homo sapiens
  misc_RNA (1)...(19): siRNA sense strand
aaucagagaaugagcccau

SEQ ID NO: 2321451 - RNA, 19 nt, Homo sapiens
  misc_RNA (1)...(19): siRNA sense strand
cgacaaaacaaacuccaaa

SEQ ID NO: 2321452 - RNA, 19 nt, Homo sapiens
  misc_RNA (1)...(19): siRNA sense strand
agugaaucccuuuggugaa

SEQ ID NO: 2321453 - RNA, 19 nt, Homo sapiens
  misc_RNA (1)...(19): siRNA sense strand
gugaaaguuaacaagguga

SEQ ID NO: 2321454 - RNA, 19 nt, Homo sapiens
  misc_RNA (1)...(19): siRNA sense strand
ugaaaaugaagcugccaaa

SEQ ID NO: 2321455 - RNA, 19 nt, Homo sapiens
  misc_RNA (1)...(19): siRNA sense strand
uccaagaggcccagaagau

SEQ ID NO: 2321456 - RNA, 19 nt, Homo sapiens
  misc_RNA (1)...(19): siRNA sense strand
agcuggaggaagaggaaaa

SEQ ID NO: 2321457 - RNA, 19 nt, Homo sapiens
  misc_RNA (1)...(19): siRNA sense strand
gagaaaccuaccuggcaau

SEQ ID NO: 2321458 - RNA, 19 nt, Homo sapiens
  misc_RNA (1)...(19): siRNA sense strand
gaucaaauuacgaagcugu

SEQ ID NO: 2321459 - RNA, 19 nt, Homo sapiens
  misc_RNA (1)...(19): siRNA sense strand
gaggcugcuaagagacuaa

SEQ ID NO: 2321460 - RNA, 19 nt, Homo sapiens
  misc_RNA (1)...(19): siRNA sense strand
cggagugagaguucaaaga

SEQ ID NO: 2321461 - RNA, 19 nt, Homo sapiens
  misc_RNA (1)...(19): siRNA sense strand
guuuugaugccaagauaaa

SEQ ID NO: 2321462 - RNA, 19 nt, Homo sapiens
  misc_RNA (1)...(19): siRNA sense strand
ggaauaaaggacagccaag

SEQ ID NO: 2321463 - RNA, 19 nt, Homo sapiens
  misc_RNA (1)...(19): siRNA sense strand
cugacaacggagugagagu

SEQ ID NO: 2321464 - RNA, 19 nt, Homo sapiens
  misc_RNA (1)...(19): siRNA sense strand
aggaauaaaggacagccaa

SEQ ID NO: 2321465 - RNA, 19 nt, Homo sapiens
  misc_RNA (1)...(19): siRNA sense strand
ccaagaaggcuguggccag

SEQ ID NO: 2321466 - RNA, 19 nt, Homo sapiens
  misc_RNA (1)...(19): siRNA sense strand
ucaaauugcucacagcuga

SEQ ID NO: 2321467 - RNA, 19 nt, Homo sapiens
  misc_RNA (1)...(19): siRNA sense strand
aauuauugcuggaggaaaa

SEQ ID NO: 2321468 - RNA, 19 nt, Homo sapiens
  misc_RNA (1)...(19): siRNA sense strand
ugguaaugcagaagagaau

SEQ ID NO: 2321469 - RNA, 19 nt, Homo sapiens
  misc_RNA (1)...(19): siRNA sense strand
uggugaaauuggugguaau

SEQ ID NO: 2321470 - RNA, 19 nt, Homo sapiens
  misc_RNA (1)...(19): siRNA sense strand
cuacacagcuucucggcaa

SEQ ID NO: 2321471 - RNA, 19 nt, Homo sapiens
  misc_RNA (1)...(19): siRNA sense strand
uaaugaagcuauugaggca

SEQ ID NO: 2321472 - RNA, 19 nt, Homo sapiens
  misc_RNA (1)...(19): siRNA sense strand
ccacgaucuacaaggaauu

SEQ ID NO: 2321473 - RNA, 19 nt, Homo sapiens
  misc_RNA (1)...(19): siRNA sense strand
gcaacauaauucaggucca

SEQ ID NO: 2321474 - RNA, 19 nt, Homo sapiens
  misc_RNA (1)...(19): siRNA sense strand
ugguacgagucaagcacaa

SEQ ID NO: 2321475 - RNA, 19 nt, Homo sapiens
  misc_RNA (1)...(19): siRNA sense strand
gugguaaugcagaagagaa

SEQ ID NO: 2321476 - RNA, 19 nt, Homo sapiens
  misc_RNA (1)...(19): siRNA sense strand
agggaaaggaggccagaca

SEQ ID NO: 2321477 - RNA, 19 nt, Homo sapiens
  misc_RNA (1)...(19): siRNA sense strand
agguggagcuaaagagaag

SEQ ID NO: 2321478 - RNA, 19 nt, Homo sapiens
  misc_RNA (1)...(19): siRNA sense strand
ccuucagagugcaggaguu

SEQ ID NO: 2321479 - RNA, 19 nt, Homo sapiens
  misc_RNA (1)...(19): siRNA sense strand
cagaagagaaugcugcaga

SEQ ID NO: 2321480 - RNA, 19 nt, Homo sapiens
  misc_RNA (1)...(19): siRNA sense strand
gaauuugaaaagaggaaga

SEQ ID NO: 2321481 - RNA, 19 nt, Homo sapiens
  misc_RNA (1)...(19): siRNA sense strand
aggaauuugaaaagaggaa

SEQ ID NO: 2321482 - RNA, 19 nt, Homo sapiens
  misc_RNA (1)...(19): siRNA sense strand
gggcagucuuugugcguug

SEQ ID NO: 2321483 - RNA, 19 nt, Homo sapiens
  misc_RNA (1)...(19): siRNA sense strand
acauaauucagguccaaau

SEQ ID NO: 2321484 - RNA, 19 nt, Homo sapiens
  misc_RNA (1)...(19): siRNA sense strand
caaagaacagacaggagca

SEQ ID NO: 2321485 - RNA, 19 nt, Homo sapiens
  misc_RNA (1)...(19): siRNA sense strand
auacugugaaggaggccaa

SEQ ID NO: 2321486 - RNA, 19 nt, Homo sapiens
  misc_RNA (1)...(19): siRNA sense strand
cugugaaggaggccaaaga

SEQ ID NO: 2321487 - RNA, 19 nt, Homo sapiens
  misc_RNA (1)...(19): siRNA sense strand
aauuggugguaaugcagaa

SEQ ID NO: 2321488 - RNA, 19 nt, Homo sapiens
  misc_RNA (1)...(19): siRNA sense strand
ccaaaggauauguggcaaa

SEQ ID NO: 2321489 - RNA, 19 nt, Homo sapiens
  misc_RNA (1)...(19): siRNA sense strand
caguaaaagacuuggaaau

SEQ ID NO: 2321490 - RNA, 19 nt, Homo sapiens
  misc_RNA (1)...(19): siRNA sense strand
gguuuuagcuggugguaga

SEQ ID NO: 2321491 - RNA, 19 nt, Homo sapiens
  misc_RNA (1)...(19): siRNA sense strand
ggaagaugaaagggacaaa

SEQ ID NO: 2321492 - RNA, 19 nt, Homo sapiens
  misc_RNA (1)...(19): siRNA sense strand
aaauaucccaggagagaau

SEQ ID NO: 2321493 - RNA, 19 nt, Homo sapiens
  misc_RNA (1)...(19): siRNA sense strand
ugauaaaggcacagguuuu

SEQ ID NO: 2321494 - RNA, 19 nt, Homo sapiens
  misc_RNA (1)...(19): siRNA sense strand
guauggaugcaaagaucaa

SEQ ID NO: 2321495 - RNA, 19 nt, Homo sapiens
  misc_RNA (1)...(19): siRNA sense strand
ggguauagucauggcagua

SEQ ID NO: 2321496 - RNA, 19 nt, Homo sapiens
  misc_RNA (1)...(19): siRNA sense strand
caggaagaugaaagggaca

SEQ ID NO: 2321497 - RNA, 19 nt, Homo sapiens
  misc_RNA (1)...(19): siRNA sense strand
ucaaaggaggagugaagau

SEQ ID NO: 2321498 - RNA, 19 nt, Homo sapiens
  misc_RNA (1)...(19): siRNA sense strand
cuucacaaaugauugggaa

SEQ ID NO: 2321499 - RNA, 19 nt, Homo sapiens
  misc_RNA (1)...(19): siRNA sense strand
cagcagaaaacauggucaa

SEQ ID NO: 2321500 - RNA, 19 nt, Homo sapiens
  misc_RNA (1)...(19): siRNA sense strand
gcgaaaauaucccaggaga

SEQ ID NO: 2321501 - RNA, 19 nt, Homo sapiens
  misc_RNA (1)...(19): siRNA sense strand
ccaucaaguaacagaagca

SEQ ID NO: 2321502 - RNA, 19 nt, Homo sapiens
  misc_RNA (1)...(19): siRNA sense strand
ugguagaggaaaaggaaca

SEQ ID NO: 2321503 - RNA, 19 nt, Homo sapiens
  misc_RNA (1)...(19): siRNA sense strand
uggaugaagcugcuagaau

SEQ ID NO: 2321504 - RNA, 19 nt, Homo sapiens
  misc_RNA (1)...(19): siRNA sense strand
ucacaaaugauugggaaaa

SEQ ID NO: 2321505 - RNA, 19 nt, Homo sapiens
  misc_RNA (1)...(19): siRNA sense strand
uggcaaagucaccagauga

SEQ ID NO: 2321506 - RNA, 19 nt, Homo sapiens
  misc_RNA (1)...(19): siRNA sense strand
caaagaugcugcuaaggca

SEQ ID NO: 2321507 - RNA, 19 nt, Homo sapiens
  misc_RNA (1)...(19): siRNA sense strand
ucucugaaauagugaccuu

SEQ ID NO: 2321508 - RNA, 19 nt, Homo sapiens
  misc_RNA (1)...(19): siRNA sense strand
gcagcaacagcaaaggaau

SEQ ID NO: 2321509 - RNA, 19 nt, Homo sapiens
  misc_RNA (1)...(19): siRNA sense strand
aggaagaugaaagggacaa

SEQ ID NO: 2321510 - RNA, 19 nt, Homo sapiens
  misc_RNA (1)...(19): siRNA sense strand
uucacaaaugauugggaaa

SEQ ID NO: 2321511 - RNA, 19 nt, Homo sapiens
  misc_RNA (1)...(19): siRNA sense strand
uugcacagaagaugggauu

SEQ ID NO: 2321512 - RNA, 19 nt, Homo sapiens
  misc_RNA (1)...(19): siRNA sense strand
cagcaacagcaaaggaauc

SEQ ID NO: 2321513 - RNA, 19 nt, Homo sapiens
  misc_RNA (1)...(19): siRNA sense strand
agcuggugguagaggaaaa

SEQ ID NO: 2321514 - RNA, 19 nt, Homo sapiens
  misc_RNA (1)...(19): siRNA sense strand
aguauuggucugugagcga

SEQ ID NO: 2321515 - RNA, 19 nt, Homo sapiens
  misc_RNA (1)...(19): siRNA sense strand
aagaugaaagggacaaaga

SEQ ID NO: 2321516 - RNA, 19 nt, Homo sapiens
  misc_RNA (1)...(19): siRNA sense strand
cugcuaaggcaaaucucaa

SEQ ID NO: 2321517 - RNA, 19 nt, Homo sapiens
  misc_RNA (1)...(19): siRNA sense strand
agauguugcugcugagucu

SEQ ID NO: 2321518 - RNA, 19 nt, Homo sapiens
  misc_RNA (1)...(19): siRNA sense strand
gcaguaaaagacuuggaaa

SEQ ID NO: 2321519 - RNA, 19 nt, Homo sapiens
  misc_RNA (1)...(19): siRNA sense strand
ccagaugaagcuuaugcaa

SEQ ID NO: 2321520 - RNA, 19 nt, Homo sapiens
  misc_RNA (1)...(19): siRNA sense strand
aaggaggagugaagauagu

SEQ ID NO: 2321521 - RNA, 19 nt, Homo sapiens
  misc_RNA (1)...(19): siRNA sense strand
gagagaaagcccaggaaau

SEQ ID NO: 2321522 - RNA, 19 nt, Homo sapiens
  misc_RNA (1)...(19): siRNA sense strand
cagcuaaacuugagggagu

SEQ ID NO: 2321523 - RNA, 19 nt, Homo sapiens
  misc_RNA (1)...(19): siRNA sense strand
ggaaauuauggaugacaaa

SEQ ID NO: 2321524 - RNA, 19 nt, Homo sapiens
  misc_RNA (1)...(19): siRNA sense strand
ggaugaaggugaugcccaa

SEQ ID NO: 2321525 - RNA, 19 nt, Homo sapiens
  misc_RNA (1)...(19): siRNA sense strand
gcgacaaaguccugaacau

SEQ ID NO: 2321526 - RNA, 19 nt, Homo sapiens
  misc_RNA (1)...(19): siRNA sense strand
aggcacaugcagagaauaa

SEQ ID NO: 2321527 - RNA, 19 nt, Homo sapiens
  misc_RNA (1)...(19): siRNA sense strand
cagaaguggcccagcauua

SEQ ID NO: 2321528 - RNA, 19 nt, Homo sapiens
  misc_RNA (1)...(19): siRNA sense strand
gcgaagagguggauggaag

SEQ ID NO: 2321529 - RNA, 19 nt, Homo sapiens
  misc_RNA (1)...(19): siRNA sense strand
ggagauggaugaaaggaga

SEQ ID NO: 2321530 - RNA, 19 nt, Homo sapiens
  misc_RNA (1)...(19): siRNA sense strand
cagaagaagaaaucaacaa

SEQ ID NO: 2321531 - RNA, 19 nt, Homo sapiens
  misc_RNA (1)...(19): siRNA sense strand
cagaaaacucagagagaga

SEQ ID NO: 2321532 - RNA, 19 nt, Homo sapiens
  misc_RNA (1)...(19): siRNA sense strand
cagcaauaucagagaagau

SEQ ID NO: 2321533 - RNA, 19 nt, Homo sapiens
  misc_RNA (1)...(19): siRNA sense strand
aggaaauuauggaugacaa

SEQ ID NO: 2321534 - RNA, 19 nt, Homo sapiens
  misc_RNA (1)...(19): siRNA sense strand
ucacagaagaagaaaucaa

SEQ ID NO: 2321535 - RNA, 19 nt, Homo sapiens
  misc_RNA (1)...(19): siRNA sense strand
agaucagauucaagagauu

SEQ ID NO: 2321536 - RNA, 19 nt, Homo sapiens
  misc_RNA (1)...(19): siRNA sense strand
cagcaagacuacaugaaaa

SEQ ID NO: 2321537 - RNA, 19 nt, Homo sapiens
  misc_RNA (1)...(19): siRNA sense strand
gaggauacaagcagaagaa

SEQ ID NO: 2321538 - RNA, 19 nt, Homo sapiens
  misc_RNA (1)...(19): siRNA sense strand
aguagaaaguggugauguu

SEQ ID NO: 2321539 - RNA, 19 nt, Homo sapiens
  misc_RNA (1)...(19): siRNA sense strand
auacuuaguucgacaggaa

SEQ ID NO: 2321540 - RNA, 19 nt, Homo sapiens
  misc_RNA (1)...(19): siRNA sense strand
cugcagaggagauggauga

SEQ ID NO: 2321541 - RNA, 19 nt, Homo sapiens
  misc_RNA (1)...(19): siRNA sense strand
ugaugaaacugaaggcuca

SEQ ID NO: 2321542 - RNA, 19 nt, Homo sapiens
  misc_RNA (1)...(19): siRNA sense strand
cagaaugcccugagacaga

SEQ ID NO: 2321543 - RNA, 19 nt, Homo sapiens
  misc_RNA (1)...(19): siRNA sense strand
ccagaaauucagacgguuu

SEQ ID NO: 2321544 - RNA, 19 nt, Homo sapiens
  misc_RNA (1)...(19): siRNA sense strand
uguuaugguuggaugaaau

SEQ ID NO: 2321545 - RNA, 19 nt, Homo sapiens
  misc_RNA (1)...(19): siRNA sense strand
gggugaagcacuggguaaa

SEQ ID NO: 2321546 - RNA, 19 nt, Homo sapiens
  misc_RNA (1)...(19): siRNA sense strand
uuaccaauauugaggaaga

SEQ ID NO: 2321547 - RNA, 19 nt, Homo sapiens
  misc_RNA (1)...(19): siRNA sense strand
acagauuccugcagcuaaa

SEQ ID NO: 2321548 - RNA, 19 nt, Homo sapiens
  misc_RNA (1)...(19): siRNA sense strand
cuggauaaugaaagacuua

SEQ ID NO: 2321549 - RNA, 19 nt, Homo sapiens
  misc_RNA (1)...(19): siRNA sense strand
uggcaguaggagauaauaa

SEQ ID NO: 2321550 - RNA, 19 nt, Homo sapiens
  misc_RNA (1)...(19): siRNA sense strand
aggaugagcugcugaagau

SEQ ID NO: 2321551 - RNA, 19 nt, Homo sapiens
  misc_RNA (1)...(19): siRNA sense strand
aagagaagaaagagaagau

SEQ ID NO: 2321552 - RNA, 19 nt, Homo sapiens
  misc_RNA (1)...(19): siRNA sense strand
ccguggacccaaagaacaa

SEQ ID NO: 2321553 - RNA, 19 nt, Homo sapiens
  misc_RNA (1)...(19): siRNA sense strand
gguugaaugccauggauga

SEQ ID NO: 2321554 - RNA, 19 nt, Homo sapiens
  misc_RNA (1)...(19): siRNA sense strand
auaaacagcagaagagaca

SEQ ID NO: 2321555 - RNA, 19 nt, Homo sapiens
  misc_RNA (1)...(19): siRNA sense strand
ggagaggauacaagcagaa

SEQ ID NO: 2321556 - RNA, 19 nt, Homo sapiens
  misc_RNA (1)...(19): siRNA sense strand
ccaucuuacugaauacaaa

SEQ ID NO: 2321557 - RNA, 19 nt, Homo sapiens
  misc_RNA (1)...(19): siRNA sense strand
aauaacagcaaguggguga

SEQ ID NO: 2321558 - RNA, 19 nt, Homo sapiens
  misc_RNA (1)...(19): siRNA sense strand
ugggugaagcacuggguaa

SEQ ID NO: 2321559 - RNA, 19 nt, Homo sapiens
  misc_RNA (1)...(19): siRNA sense strand
ggagaaaggccgaacuagu

SEQ ID NO: 2321560 - RNA, 19 nt, Homo sapiens
  misc_RNA (1)...(19): siRNA sense strand
gcucugaacucuaaggcca

SEQ ID NO: 2321561 - RNA, 19 nt, Homo sapiens
  misc_RNA (1)...(19): siRNA sense strand
uucaagaccuauauggaaa

SEQ ID NO: 2321562 - RNA, 19 nt, Homo sapiens
  misc_RNA (1)...(19): siRNA sense strand
acucagagagagaaagaga

SEQ ID NO: 2321563 - RNA, 19 nt, Homo sapiens
  misc_RNA (1)...(19): siRNA sense strand
agagagaaagagauguuua

SEQ ID NO: 2321564 - RNA, 19 nt, Homo sapiens
  misc_RNA (1)...(19): siRNA sense strand
gagagaaagagauguuuau

SEQ ID NO: 2321565 - RNA, 19 nt, Homo sapiens
  misc_RNA (1)...(19): siRNA sense strand
ggaaucaggagaugugaau

SEQ ID NO: 2321566 - RNA, 19 nt, Homo sapiens
  misc_RNA (1)...(19): siRNA sense strand
ugauuagagcgaagagaga

SEQ ID NO: 2321567 - RNA, 19 nt, Homo sapiens
  misc_RNA (1)...(19): siRNA sense strand
ugagcaaggagaagagaga

SEQ ID NO: 2321568 - RNA, 19 nt, Homo sapiens
  misc_RNA (1)...(19): siRNA sense strand
ugaaacugcaacagacaua

SEQ ID NO: 2321569 - RNA, 19 nt, Homo sapiens
  misc_RNA (1)...(19): siRNA sense strand
aagaggaacaugagaggau

SEQ ID NO: 2321570 - RNA, 19 nt, Homo sapiens
  misc_RNA (1)...(19): siRNA sense strand
ggagauaauaacagcaagu

SEQ ID NO: 2321571 - RNA, 19 nt, Homo sapiens
  misc_RNA (1)...(19): siRNA sense strand
auaaggaggcacuggcuaa

SEQ ID NO: 2321572 - RNA, 19 nt, Homo sapiens
  misc_RNA (1)...(19): siRNA sense strand
gagaagauuggcagcagua

SEQ ID NO: 2321573 - RNA, 19 nt, Homo sapiens
  misc_RNA (1)...(19): siRNA sense strand
aggagaagagagagaaguu

SEQ ID NO: 2321574 - RNA, 19 nt, Homo sapiens
  misc_RNA (1)...(19): siRNA sense strand
ccaaccagcgagaggagua

SEQ ID NO: 2321575 - RNA, 19 nt, Homo sapiens
  misc_RNA (1)...(19): siRNA sense strand
agaagaaggcauaucaaga

SEQ ID NO: 2321576 - RNA, 19 nt, Homo sapiens
  misc_RNA (1)...(19): siRNA sense strand
aggccgaacuagugaaacu

SEQ ID NO: 2321577 - RNA, 19 nt, Homo sapiens
  misc_RNA (1)...(19): siRNA sense strand
gauuuuagccauugguuua

SEQ ID NO: 2321578 - RNA, 19 nt, Homo sapiens
  misc_RNA (1)...(19): siRNA sense strand
agcaaggagaagagagaga

SEQ ID NO: 2321579 - RNA, 19 nt, Homo sapiens
  misc_RNA (1)...(19): siRNA sense strand
auaagauguuucugggaga

SEQ ID NO: 2321580 - RNA, 19 nt, Homo sapiens
  misc_RNA (1)...(19): siRNA sense strand
gcaauuuaaaugacccaaa

SEQ ID NO: 2321581 - RNA, 19 nt, Homo sapiens
  misc_RNA (1)...(19): siRNA sense strand
cgacauugccagggauauu

SEQ ID NO: 2321582 - RNA, 19 nt, Homo sapiens
  misc_RNA (1)...(19): siRNA sense strand
agagagagaaagagauguu

SEQ ID NO: 2321583 - RNA, 19 nt, Homo sapiens
  misc_RNA (1)...(19): siRNA sense strand
gggcauuggaaucaggaga

SEQ ID NO: 2321584 - RNA, 19 nt, Homo sapiens
  misc_RNA (1)...(19): siRNA sense strand
ggaaggaggaugggaugaa

SEQ ID NO: 2321585 - RNA, 19 nt, Homo sapiens
  misc_RNA (1)...(19): siRNA sense strand
agacaggagaggcaagcaa

SEQ ID NO: 2321586 - RNA, 19 nt, Homo sapiens
  misc_RNA (1)...(19): siRNA sense strand
gacugaaauccuagaaaca

SEQ ID NO: 2321587 - RNA, 19 nt, Homo sapiens
  misc_RNA (1)...(19): siRNA sense strand
aaguggugauguuggcaaa

SEQ ID NO: 2321588 - RNA, 19 nt, Homo sapiens
  misc_RNA (1)...(19): siRNA sense strand
ccaaagugcugaaggacuc

SEQ ID NO: 2321589 - RNA, 19 nt, Homo sapiens
  misc_RNA (1)...(19): siRNA sense strand
gaaaacucagagagagaaa

SEQ ID NO: 2321590 - RNA, 19 nt, Homo sapiens
  misc_RNA (1)...(19): siRNA sense strand
acuacaaagcagacauaaa

SEQ ID NO: 2321591 - RNA, 19 nt, Homo sapiens
  misc_RNA (1)...(19): siRNA sense strand
caguaaaccuccugggacu

SEQ ID NO: 2321592 - RNA, 19 nt, Homo sapiens
  misc_RNA (1)...(19): siRNA sense strand
acacagaguuuaauggcau

SEQ ID NO: 2321593 - RNA, 19 nt, Homo sapiens
  misc_RNA (1)...(19): siRNA sense strand
cuguagagaaagaagaaaa

SEQ ID NO: 2321594 - RNA, 19 nt, Homo sapiens
  misc_RNA (1)...(19): siRNA sense strand
ggauggaagacgcaggaga

SEQ ID NO: 2321595 - RNA, 19 nt, Homo sapiens
  misc_RNA (1)...(19): siRNA sense strand
acauaaauacacaggcuga

SEQ ID NO: 2321596 - RNA, 19 nt, Homo sapiens
  misc_RNA (1)...(19): siRNA sense strand
guucaagagaagacaagau

SEQ ID NO: 2321597 - RNA, 19 nt, Homo sapiens
  misc_RNA (1)...(19): siRNA sense strand
ccagaaucuaugaugaaau

SEQ ID NO: 2321598 - RNA, 19 nt, Homo sapiens
  misc_RNA (1)...(19): siRNA sense strand
uguaaauauccaagaacca

SEQ ID NO: 2321599 - RNA, 19 nt, Homo sapiens
  misc_RNA (1)...(19): siRNA sense strand
aggaagagccagugaacac

SEQ ID NO: 2321600 - RNA, 19 nt, Homo sapiens
  misc_RNA (1)...(19): siRNA sense strand
ggccggaagcagcuggaaa

SEQ ID NO: 2321601 - RNA, 19 nt, Homo sapiens
  misc_RNA (1)...(19): siRNA sense strand
augaaauccugcaguccaa

SEQ ID NO: 2321602 - RNA, 19 nt, Homo sapiens
  misc_RNA (1)...(19): siRNA sense strand
gcaaaucuaucgucggcuu

SEQ ID NO: 2321603 - RNA, 19 nt, Homo sapiens
  misc_RNA (1)...(19): siRNA sense strand
gaacacaguuuauuccgaa

SEQ ID NO: 2321604 - RNA, 19 nt, Homo sapiens
  misc_RNA (1)...(19): siRNA sense strand
agacauaaauacacaggcu

SEQ ID NO: 2321605 - RNA, 19 nt, Homo sapiens
  misc_RNA (1)...(19): siRNA sense strand
cuaucgucggcuugggaaa

SEQ ID NO: 2321606 - RNA, 19 nt, Homo sapiens
  misc_RNA (1)...(19): siRNA sense strand
cccagaacccugucagcaa

SEQ ID NO: 2321607 - RNA, 19 nt, Homo sapiens
  misc_RNA (1)...(19): siRNA sense strand
agaugcugccucaaagaaa

SEQ ID NO: 2321608 - RNA, 19 nt, Homo sapiens
  misc_RNA (1)...(19): siRNA sense strand
aggaccaagagcugacuua

SEQ ID NO: 2321609 - RNA, 19 nt, Homo sapiens
  misc_RNA (1)...(19): siRNA sense strand
uggaaaagacucagaaauc

SEQ ID NO: 2321610 - RNA, 19 nt, Homo sapiens
  misc_RNA (1)...(19): siRNA sense strand
ggguaauguccuucaaauc

SEQ ID NO: 2321611 - RNA, 19 nt, Homo sapiens
  misc_RNA (1)...(19): siRNA sense strand
cugcaaaccuggccggaag

SEQ ID NO: 2321612 - RNA, 19 nt, Homo sapiens
  misc_RNA (1)...(19): siRNA sense strand
acacauauaucauggcuuc

SEQ ID NO: 2321613 - RNA, 19 nt, Homo sapiens
  misc_RNA (1)...(19): siRNA sense strand
uauccaagaaccacggcaa

SEQ ID NO: 2321614 - RNA, 19 nt, Homo sapiens
  misc_RNA (1)...(19): siRNA sense strand
acaccaggagacucagaaa

SEQ ID NO: 2321615 - RNA, 19 nt, Homo sapiens
  misc_RNA (1)...(19): siRNA sense strand
aagacaagaugcugccuca

SEQ ID NO: 2321616 - RNA, 19 nt, Homo sapiens
  misc_RNA (1)...(19): siRNA sense strand
ccuccaaggaagagccagu

SEQ ID NO: 2321617 - RNA, 19 nt, Homo sapiens
  misc_RNA (1)...(19): siRNA sense strand
cgaacuacaaucuggucau

SEQ ID NO: 2321618 - RNA, 19 nt, Homo sapiens
  misc_RNA (1)...(19): siRNA sense strand
gccggaagcagcuggaaaa

SEQ ID NO: 2321619 - RNA, 19 nt, Homo sapiens
  misc_RNA (1)...(19): siRNA sense strand
gugcugugguggaggaaga

SEQ ID NO: 2321620 - RNA, 19 nt, Homo sapiens
  misc_RNA (1)...(19): siRNA sense strand
acagaaaucaaguggaaaa

SEQ ID NO: 2321621 - RNA, 19 nt, Homo sapiens
  misc_RNA (1)...(19): siRNA sense strand
gcggagaggaggugcucaa

SEQ ID NO: 2321622 - RNA, 19 nt, Homo sapiens
  misc_RNA (1)...(19): siRNA sense strand
gggugaagcaggaggccau

SEQ ID NO: 2321623 - RNA, 19 nt, Homo sapiens
  misc_RNA (1)...(19): siRNA sense strand
aggaagaggccaaggagga

SEQ ID NO: 2321624 - RNA, 19 nt, Homo sapiens
  misc_RNA (1)...(19): siRNA sense strand
ucacaaauuucaagcggau

SEQ ID NO: 2321625 - RNA, 19 nt, Homo sapiens
  misc_RNA (1)...(19): siRNA sense strand
ccuguuugcuggaggaaaa

SEQ ID NO: 2321626 - RNA, 19 nt, Homo sapiens
  misc_RNA (1)...(19): siRNA sense strand
gcagagaggccaagccaca

SEQ ID NO: 2321627 - RNA, 19 nt, Homo sapiens
  misc_RNA (1)...(19): siRNA sense strand
ccaacuucguggagacaga

SEQ ID NO: 2321628 - RNA, 19 nt, Homo sapiens
  misc_RNA (1)...(19): siRNA sense strand
ugauaaaacagcuggagaa

SEQ ID NO: 2321629 - RNA, 19 nt, Homo sapiens
  misc_RNA (1)...(19): siRNA sense strand
cuacgauacaagcgacaaa

SEQ ID NO: 2321630 - RNA, 19 nt, Homo sapiens
  misc_RNA (1)...(19): siRNA sense strand
uugaauaacacuuggcuuu

SEQ ID NO: 2321631 - RNA, 19 nt, Homo sapiens
  misc_RNA (1)...(19): siRNA sense strand
ggugacaaucagugaccaa

SEQ ID NO: 2321632 - RNA, 19 nt, Homo sapiens
  misc_RNA (1)...(19): siRNA sense strand
aggugggaagcuagagaaa

SEQ ID NO: 2321633 - RNA, 19 nt, Homo sapiens
  misc_RNA (1)...(19): siRNA sense strand
aagacuacuugguggauga

SEQ ID NO: 2321634 - RNA, 19 nt, Homo sapiens
  misc_RNA (1)...(19): siRNA sense strand
gggcagaauuccagaugcu

SEQ ID NO: 2321635 - RNA, 19 nt, Homo sapiens
  misc_RNA (1)...(19): siRNA sense strand
uugaagacgaugaagacua

SEQ ID NO: 2321636 - RNA, 19 nt, Homo sapiens
  misc_RNA (1)...(19): siRNA sense strand
agucauuaaaggacaguau

SEQ ID NO: 2321637 - RNA, 19 nt, Homo sapiens
  misc_RNA (1)...(19): siRNA sense strand
gagacagagcagaugauuu

SEQ ID NO: 2321638 - RNA, 19 nt, Homo sapiens
  misc_RNA (1)...(19): siRNA sense strand
agauuagaccgaagaccaa

SEQ ID NO: 2321639 - RNA, 19 nt, Homo sapiens
  misc_RNA (1)...(19): siRNA sense strand
gagaggagaucauucggaa

SEQ ID NO: 2321640 - RNA, 19 nt, Homo sapiens
  misc_RNA (1)...(19): siRNA sense strand
aaugaagacuacaaggaga

SEQ ID NO: 2321641 - RNA, 19 nt, Homo sapiens
  misc_RNA (1)...(19): siRNA sense strand
cgaggagguggcagacaaa

SEQ ID NO: 2321642 - RNA, 19 nt, Homo sapiens
  misc_RNA (1)...(19): siRNA sense strand
agguggaaguucaggaagu

SEQ ID NO: 2321643 - RNA, 19 nt, Homo sapiens
  misc_RNA (1)...(19): siRNA sense strand
acuacuugguggaugaauu

SEQ ID NO: 2321644 - RNA, 19 nt, Homo sapiens
  misc_RNA (1)...(19): siRNA sense strand
cuuauaaugucaagcagau

SEQ ID NO: 2321645 - RNA, 19 nt, Homo sapiens
  misc_RNA (1)...(19): siRNA sense strand
aggaagucauuaaaggaca

SEQ ID NO: 2321646 - RNA, 19 nt, Homo sapiens
  misc_RNA (1)...(19): siRNA sense strand
ucaacuacagcuacagaaa

SEQ ID NO: 2321647 - RNA, 19 nt, Homo sapiens
  misc_RNA (1)...(19): siRNA sense strand
ccaaagcgaugaagccaga

SEQ ID NO: 2321648 - RNA, 19 nt, Homo sapiens
  misc_RNA (1)...(19): siRNA sense strand
uuaaaggacaguauggcaa

SEQ ID NO: 2321649 - RNA, 19 nt, Homo sapiens
  misc_RNA (1)...(19): siRNA sense strand
cggaagaacaguuugagca

SEQ ID NO: 2321650 - RNA, 19 nt, Homo sapiens
  misc_RNA (1)...(19): siRNA sense strand
aguuaaagcugcacuggga

SEQ ID NO: 2321651 - RNA, 19 nt, Homo sapiens
  misc_RNA (1)...(19): siRNA sense strand
cgccaagacuggaagaaac

SEQ ID NO: 2321652 - RNA, 19 nt, Homo sapiens
  misc_RNA (1)...(19): siRNA sense strand
gguaugaaggugaaaggca

SEQ ID NO: 2321653 - RNA, 19 nt, Homo sapiens
  misc_RNA (1)...(19): siRNA sense strand
agaggagaucauucggaaa

SEQ ID NO: 2321654 - RNA, 19 nt, Homo sapiens
  misc_RNA (1)...(19): siRNA sense strand
ugccaaaggugggaagcua

SEQ ID NO: 2321655 - RNA, 19 nt, Homo sapiens
  misc_RNA (1)...(19): siRNA sense strand
acagaggccuggaagccaa

SEQ ID NO: 2321656 - RNA, 19 nt, Homo sapiens
  misc_RNA (1)...(19): siRNA sense strand
cggaccugguggagcucaa

SEQ ID NO: 2321657 - RNA, 19 nt, Homo sapiens
  misc_RNA (1)...(19): siRNA sense strand
gcgacacgccuaugaucaa

SEQ ID NO: 2321658 - RNA, 19 nt, Homo sapiens
  misc_RNA (1)...(19): siRNA sense strand
acgccaagacuggaagaaa

SEQ ID NO: 2321659 - RNA, 19 nt, Homo sapiens
  misc_RNA (1)...(19): siRNA sense strand
ggugaaaggcagagcagug

SEQ ID NO: 2321660 - RNA, 19 nt, Homo sapiens
  misc_RNA (1)...(19): siRNA sense strand
aagcagaggcggagaggag

SEQ ID NO: 2321661 - RNA, 19 nt, Homo sapiens
  misc_RNA (1)...(19): siRNA sense strand
ggaacgugaacggaggaaa

SEQ ID NO: 2321662 - RNA, 19 nt, Homo sapiens
  misc_RNA (1)...(19): siRNA sense strand
gcagugaagauuagaccga

SEQ ID NO: 2321663 - RNA, 19 nt, Homo sapiens
  misc_RNA (1)...(19): siRNA sense strand
ccacaggaagccagcauca

SEQ ID NO: 2321664 - RNA, 19 nt, Homo sapiens
  misc_RNA (1)...(19): siRNA sense strand
cagaauuccagaugcugaa

SEQ ID NO: 2321665 - RNA, 19 nt, Homo sapiens
  misc_RNA (1)...(19): siRNA sense strand
ccuuauaaugucaagcaga

SEQ ID NO: 2321666 - RNA, 19 nt, Homo sapiens
  misc_RNA (1)...(19): siRNA sense strand
ccaacacugugcagagcuu

SEQ ID NO: 2321667 - RNA, 19 nt, Homo sapiens
  misc_RNA (1)...(19): siRNA sense strand
gcgcagggaauauugucaa

SEQ ID NO: 2321668 - RNA, 19 nt, Homo sapiens
  misc_RNA (1)...(19): siRNA sense strand
augaagacuacaaggagau

SEQ ID NO: 2321669 - RNA, 19 nt, Homo sapiens
  misc_RNA (1)...(19): siRNA sense strand
ucguggagguggaaguuca

SEQ ID NO: 2321670 - RNA, 19 nt, Homo sapiens
  misc_RNA (1)...(19): siRNA sense strand
ggcugaaagguuugcgaga

SEQ ID NO: 2321671 - RNA, 19 nt, Homo sapiens
  misc_RNA (1)...(19): siRNA sense strand
gccucauagcuuugaagaa

SEQ ID NO: 2321672 - RNA, 19 nt, Homo sapiens
  misc_RNA (1)...(19): siRNA sense strand
ucuugaggccacaguuaaa

SEQ ID NO: 2321673 - RNA, 19 nt, Homo sapiens
  misc_RNA (1)...(19): siRNA sense strand
cugaauggccacagccuga

SEQ ID NO: 2321674 - RNA, 19 nt, Homo sapiens
  misc_RNA (1)...(19): siRNA sense strand
aggcagagcagugaagauu

SEQ ID NO: 2321675 - RNA, 19 nt, Homo sapiens
  misc_RNA (1)...(19): siRNA sense strand
guacaaagaugacgcggac

SEQ ID NO: 2321676 - RNA, 19 nt, Homo sapiens
  misc_RNA (1)...(19): siRNA sense strand
ugggaaagcugcagagagg

SEQ ID NO: 2321677 - RNA, 19 nt, Homo sapiens
  misc_RNA (1)...(19): siRNA sense strand
gcagaauuccagaugcuga

SEQ ID NO: 2321678 - RNA, 19 nt, Homo sapiens
  misc_RNA (1)...(19): siRNA sense strand
ugguggagcucaagcggga

SEQ ID NO: 2321679 - RNA, 19 nt, Homo sapiens
  misc_RNA (1)...(19): siRNA sense strand
caccagaucaugaacacaa

SEQ ID NO: 2321680 - RNA, 19 nt, Homo sapiens
  misc_RNA (1)...(19): siRNA sense strand
ucaacagagccuucaagaa

SEQ ID NO: 2321681 - RNA, 19 nt, Homo sapiens
  misc_RNA (1)...(19): siRNA sense strand
cuaccgacucccaggauga

SEQ ID NO: 2321682 - RNA, 19 nt, Homo sapiens
  misc_RNA (1)...(19): siRNA sense strand
aagauuagaccgaagacca

SEQ ID NO: 2321683 - RNA, 19 nt, Homo sapiens
  misc_RNA (1)...(19): siRNA sense strand
gcucagacccuuuggacuc

SEQ ID NO: 2321684 - RNA, 19 nt, Homo sapiens
  misc_RNA (1)...(19): siRNA sense strand
ccaaaggugggaagcuaga

SEQ ID NO: 2321685 - RNA, 19 nt, Homo sapiens
  misc_RNA (1)...(19): siRNA sense strand
uagagaaauuggagacccu

SEQ ID NO: 2321686 - RNA, 19 nt, Homo sapiens
  misc_RNA (1)...(19): siRNA sense strand
uggaauugagcgcagggaa

SEQ ID NO: 2321687 - RNA, 19 nt, Homo sapiens
  misc_RNA (1)...(19): siRNA sense strand
gcagagacaaggaggccau

SEQ ID NO: 2321688 - RNA, 19 nt, Homo sapiens
  misc_RNA (1)...(19): siRNA sense strand
aggcucaggugcagcggua

SEQ ID NO: 2321689 - RNA, 19 nt, Homo sapiens
  misc_RNA (1)...(19): siRNA sense strand
aggaguaucccaugagcau

SEQ ID NO: 2321690 - RNA, 19 nt, Homo sapiens
  misc_RNA (1)...(19): siRNA sense strand
gcuuuuaauucauuggcaa

SEQ ID NO: 2321691 - RNA, 19 nt, Homo sapiens
  misc_RNA (1)...(19): siRNA sense strand
ggagaaggcugcugugcuc

SEQ ID NO: 2321692 - RNA, 19 nt, Homo sapiens
  misc_RNA (1)...(19): siRNA sense strand
ucgcguauuaccaggagua

SEQ ID NO: 2321693 - RNA, 19 nt, Homo sapiens
  misc_RNA (1)...(19): siRNA sense strand
aggacaaagugaagaugaa

SEQ ID NO: 2321694 - RNA, 19 nt, Homo sapiens
  misc_RNA (1)...(19): siRNA sense strand
ugaaagugaaagugagcaa

SEQ ID NO: 2321695 - RNA, 19 nt, Homo sapiens
  misc_RNA (1)...(19): siRNA sense strand
acguaacagcuaaggaaua

SEQ ID NO: 2321696 - RNA, 19 nt, Homo sapiens
  misc_RNA (1)...(19): siRNA sense strand
gaacacagguugagacgga

SEQ ID NO: 2321697 - RNA, 19 nt, Homo sapiens
  misc_RNA (1)...(19): siRNA sense strand
acauggaagaagagaguga

SEQ ID NO: 2321698 - RNA, 19 nt, Homo sapiens
  misc_RNA (1)...(19): siRNA sense strand
agaucaacauggaagaaga

SEQ ID NO: 2321699 - RNA, 19 nt, Homo sapiens
  misc_RNA (1)...(19): siRNA sense strand
ugguucagccaaagagaua

SEQ ID NO: 2321700 - RNA, 19 nt, Homo sapiens
  misc_RNA (1)...(19): siRNA sense strand
auggaagaagagagugaaa

SEQ ID NO: 2321701 - RNA, 19 nt, Homo sapiens
  misc_RNA (1)...(19): siRNA sense strand
augcagaggaagaugaaga

SEQ ID NO: 2321702 - RNA, 19 nt, Homo sapiens
  misc_RNA (1)...(19): siRNA sense strand
gugaaagugagcaaaguau

SEQ ID NO: 2321703 - RNA, 19 nt, Homo sapiens
  misc_RNA (1)...(19): siRNA sense strand
acaucaaaguguuccagaa

SEQ ID NO: 2321704 - RNA, 19 nt, Homo sapiens
  misc_RNA (1)...(19): siRNA sense strand
cuccagaugcagaggaaga

SEQ ID NO: 2321705 - RNA, 19 nt, Homo sapiens
  misc_RNA (1)...(19): siRNA sense strand
ucucaaugugguucgaaua

SEQ ID NO: 2321706 - RNA, 19 nt, Homo sapiens
  misc_RNA (1)...(19): siRNA sense strand
caucagagcucuaucgauc

SEQ ID NO: 2321707 - RNA, 19 nt, Homo sapiens
  misc_RNA (1)...(19): siRNA sense strand
cuggaaagcugcaggcaug

SEQ ID NO: 2321708 - RNA, 19 nt, Homo sapiens
  misc_RNA (1)...(19): siRNA sense strand
uggaggaagaggaggaacu

SEQ ID NO: 2321709 - RNA, 19 nt, Homo sapiens
  misc_RNA (1)...(19): siRNA sense strand
acauggaggaagaggagga

SEQ ID NO: 2321710 - RNA, 19 nt, Homo sapiens
  misc_RNA (1)...(19): siRNA sense strand
cgaccauuuggaagcguua

SEQ ID NO: 2321711 - RNA, 19 nt, Homo sapiens
  misc_RNA (1)...(19): siRNA sense strand
gugauaacguggugcugga

SEQ ID NO: 2321712 - RNA, 19 nt, Homo sapiens
  misc_RNA (1)...(19): siRNA sense strand
ggcaaagaggagaacauuu

SEQ ID NO: 2321713 - RNA, 19 nt, Homo sapiens
  misc_RNA (1)...(19): siRNA sense strand
cuaccaaacucgagaugac

SEQ ID NO: 2321714 - RNA, 19 nt, Homo sapiens
  misc_RNA (1)...(19): siRNA sense strand
aagaaaaggacaaagugaa

SEQ ID NO: 2321715 - RNA, 19 nt, Homo sapiens
  misc_RNA (1)...(19): siRNA sense strand
ggggcaaagaggagaacau

SEQ ID NO: 2321716 - RNA, 19 nt, Homo sapiens
  misc_RNA (1)...(19): siRNA sense strand
gcgaggucucuuagugaau

SEQ ID NO: 2321717 - RNA, 19 nt, Homo sapiens
  misc_RNA (1)...(19): siRNA sense strand
agugaaagugagcaaagua

SEQ ID NO: 2321718 - RNA, 19 nt, Homo sapiens
  misc_RNA (1)...(19): siRNA sense strand
gggcaguagugauggagug

SEQ ID NO: 2321719 - RNA, 19 nt, Homo sapiens
  misc_RNA (1)...(19): siRNA sense strand
ucuuagugaaugaggagau

SEQ ID NO: 2321720 - RNA, 19 nt, Homo sapiens
  misc_RNA (1)...(19): siRNA sense strand
acgaagacaaugugguagu

SEQ ID NO: 2321721 - RNA, 19 nt, Homo sapiens
  misc_RNA (1)...(19): siRNA sense strand
gucuaaaggaggugaugca

SEQ ID NO: 2321722 - RNA, 19 nt, Homo sapiens
  misc_RNA (1)...(19): siRNA sense strand
caagaaaaggacaaaguga

SEQ ID NO: 2321723 - RNA, 19 nt, Homo sapiens
  misc_RNA (1)...(19): siRNA sense strand
agagagugaaagugaaagu

SEQ ID NO: 2321724 - RNA, 19 nt, Homo sapiens
  misc_RNA (1)...(19): siRNA sense strand
agguuacaauccagcagaa

SEQ ID NO: 2321725 - RNA, 19 nt, Homo sapiens
  misc_RNA (1)...(19): siRNA sense strand
agguucauccaguggcuaa

SEQ ID NO: 2321726 - RNA, 19 nt, Homo sapiens
  misc_RNA (1)...(19): siRNA sense strand
aggcagaagaggagucauc

SEQ ID NO: 2321727 - RNA, 19 nt, Homo sapiens
  misc_RNA (1)...(19): siRNA sense strand
aaguaggagcugcuggcaa

SEQ ID NO: 2321728 - RNA, 19 nt, Homo sapiens
  misc_RNA (1)...(19): siRNA sense strand
agagugaaagugaaaguga

SEQ ID NO: 2321729 - RNA, 19 nt, Homo sapiens
  misc_RNA (1)...(19): siRNA sense strand
ggacuucuuccuagagcau

SEQ ID NO: 2321730 - RNA, 19 nt, Homo sapiens
  misc_RNA (1)...(19): siRNA sense strand
caauaucaccagagcccuu

SEQ ID NO: 2321731 - RNA, 19 nt, Homo sapiens
  misc_RNA (1)...(19): siRNA sense strand
acaaucucguccuggaaau

SEQ ID NO: 2321732 - RNA, 19 nt, Homo sapiens
  misc_RNA (1)...(19): siRNA sense strand
gcgcaagaaucaacagcug

SEQ ID NO: 2321733 - RNA, 19 nt, Homo sapiens
  misc_RNA (1)...(19): siRNA sense strand
guuggagagccgugugaaa

SEQ ID NO: 2321734 - RNA, 19 nt, Homo sapiens
  misc_RNA (1)...(19): siRNA sense strand
ccaucgaagagaaggugaa

SEQ ID NO: 2321735 - RNA, 19 nt, Homo sapiens
  misc_RNA (1)...(19): siRNA sense strand
aggagaagcuggaccgguu

SEQ ID NO: 2321736 - RNA, 19 nt, Homo sapiens
  misc_RNA (1)...(19): siRNA sense strand
ggacggucuaccagaacaa

SEQ ID NO: 2321737 - RNA, 19 nt, Homo sapiens
  misc_RNA (1)...(19): siRNA sense strand
cgugauaacgugugaccca

SEQ ID NO: 2321738 - RNA, 19 nt, Homo sapiens
  misc_RNA (1)...(19): siRNA sense strand
aguaguaacacgauguaca

SEQ ID NO: 2321739 - RNA, 19 nt, Homo sapiens
  misc_RNA (1)...(19): siRNA sense strand
agacacaggcugacgagga

SEQ ID NO: 2321740 - RNA, 19 nt, Homo sapiens
  misc_RNA (1)...(19): siRNA sense strand
ccgaggaagagaggaggaa

SEQ ID NO: 2321741 - RNA, 19 nt, Homo sapiens
  misc_RNA (1)...(19): siRNA sense strand
ggaauugagccccgaggaa

SEQ ID NO: 2321742 - RNA, 19 nt, Homo sapiens
  misc_RNA (1)...(19): siRNA sense strand
cugaggagacacaggcuga

SEQ ID NO: 2321743 - RNA, 19 nt, Homo sapiens
  misc_RNA (1)...(19): siRNA sense strand
aagaauagagagauagcau

SEQ ID NO: 2321744 - RNA, 19 nt, Homo sapiens
  misc_RNA (1)...(19): siRNA sense strand
ccagugagguucuuggaga

SEQ ID NO: 2321745 - RNA, 19 nt, Homo sapiens
  misc_RNA (1)...(19): siRNA sense strand
cgauauauccaaaggacac

SEQ ID NO: 2321746 - RNA, 19 nt, Homo sapiens
  misc_RNA (1)...(19): siRNA sense strand
ccuggauggcuucgauaua

SEQ ID NO: 2321747 - RNA, 19 nt, Homo sapiens
  misc_RNA (1)...(19): siRNA sense strand
cagcugaaaauguggggaa

SEQ ID NO: 2321748 - RNA, 19 nt, Homo sapiens
  misc_RNA (1)...(19): siRNA sense strand
ccauuaaugaccugaagga

SEQ ID NO: 2321749 - RNA, 19 nt, Homo sapiens
  misc_RNA (1)...(19): siRNA sense strand
ggaagugauucguggagag

SEQ ID NO: 2321750 - RNA, 19 nt, Homo sapiens
  misc_RNA (1)...(19): siRNA sense strand
aguugaaaauccacagaau

SEQ ID NO: 2321751 - RNA, 19 nt, Homo sapiens
  misc_RNA (1)...(19): siRNA sense strand
gucaagaaauggagccugu

SEQ ID NO: 2321752 - RNA, 19 nt, Homo sapiens
  misc_RNA (1)...(19): siRNA sense strand
gcaaaauuucauugguuga

SEQ ID NO: 2321753 - RNA, 19 nt, Homo sapiens
  misc_RNA (1)...(19): siRNA sense strand
uuugaaaagcagagacuau

SEQ ID NO: 2321754 - RNA, 19 nt, Homo sapiens
  misc_RNA (1)...(19): siRNA sense strand
ggaaaagagaaacaugcaa

SEQ ID NO: 2321755 - RNA, 19 nt, Homo sapiens
  misc_RNA (1)...(19): siRNA sense strand
aguaaugaucccauaacau

SEQ ID NO: 2321756 - RNA, 19 nt, Homo sapiens
  misc_RNA (1)...(19): siRNA sense strand
auauaaugucugcagaaga

SEQ ID NO: 2321757 - RNA, 19 nt, Homo sapiens
  misc_RNA (1)...(19): siRNA sense strand
cuuuacacacagacaacua

SEQ ID NO: 2321758 - RNA, 19 nt, Homo sapiens
  misc_RNA (1)...(19): siRNA sense strand
cuuugagacugcaaggcau

SEQ ID NO: 2321759 - RNA, 19 nt, Homo sapiens
  misc_RNA (1)...(19): siRNA sense strand
gguccaucacagugcuauu

SEQ ID NO: 2321760 - RNA, 19 nt, Homo sapiens
  misc_RNA (1)...(19): siRNA sense strand
uggagaagacgcugggcaa

SEQ ID NO: 2321761 - RNA, 19 nt, Homo sapiens
  misc_RNA (1)...(19): siRNA sense strand
ugaugaagguggagcggga

SEQ ID NO: 2321762 - RNA, 19 nt, Homo sapiens
  misc_RNA (1)...(19): siRNA sense strand
aggaggagaaccaggagaa

SEQ ID NO: 2321763 - RNA, 19 nt, Homo sapiens
  misc_RNA (1)...(19): siRNA sense strand
aggagaaccaggagaagau

SEQ ID NO: 2321764 - RNA, 19 nt, Homo sapiens
  misc_RNA (1)...(19): siRNA sense strand
uggagaaggaggagcagau

SEQ ID NO: 2321765 - RNA, 19 nt, Homo sapiens
  misc_RNA (1)...(19): siRNA sense strand
gugaagaaggggaggcuga

SEQ ID NO: 2321766 - RNA, 19 nt, Homo sapiens
  misc_RNA (1)...(19): siRNA sense strand
gcgcagaaggagaacggca

SEQ ID NO: 2321767 - RNA, 19 nt, Homo sapiens
  misc_RNA (1)...(19): siRNA sense strand
agaaugagcccgaaccaga

SEQ ID NO: 2321768 - RNA, 19 nt, Homo sapiens
  misc_RNA (1)...(19): siRNA sense strand
cuccuggaccggaaagaaa

SEQ ID NO: 2321769 - RNA, 19 nt, Homo sapiens
  misc_RNA (1)...(19): siRNA sense strand
uguccgaggaggagaacca

SEQ ID NO: 2321770 - RNA, 19 nt, Homo sapiens
  misc_RNA (1)...(19): siRNA sense strand
gcgcuggacuucugccaca

SEQ ID NO: 2321771 - RNA, 19 nt, Homo sapiens
  misc_RNA (1)...(19): siRNA sense strand
gaggagauguccaaccuga

SEQ ID NO: 2321772 - RNA, 19 nt, Homo sapiens
  misc_RNA (1)...(19): siRNA sense strand
cguggucaucaaagacaaa

SEQ ID NO: 2321773 - RNA, 19 nt, Homo sapiens
  misc_RNA (1)...(19): siRNA sense strand
uguugaagcuauagugaaa

SEQ ID NO: 2321774 - RNA, 19 nt, Homo sapiens
  misc_RNA (1)...(19): siRNA sense strand
ugacauggguuuaggaaaa

SEQ ID NO: 2321775 - RNA, 19 nt, Homo sapiens
  misc_RNA (1)...(19): siRNA sense strand
ugggaaaaguggugguaaa

SEQ ID NO: 2321776 - RNA, 19 nt, Homo sapiens
  misc_RNA (1)...(19): siRNA sense strand
ccuuaauugaagagacaaa

SEQ ID NO: 2321777 - RNA, 19 nt, Homo sapiens
  misc_RNA (1)...(19): siRNA sense strand
uggaaugaguacugaagaa

SEQ ID NO: 2321778 - RNA, 19 nt, Homo sapiens
  misc_RNA (1)...(19): siRNA sense strand
gaagaaaagagacggaaaa

SEQ ID NO: 2321779 - RNA, 19 nt, Homo sapiens
  misc_RNA (1)...(19): siRNA sense strand
ugggaaagcaaguaugaaa

SEQ ID NO: 2321780 - RNA, 19 nt, Homo sapiens
  misc_RNA (1)...(19): siRNA sense strand
agacagacagugugagauu

SEQ ID NO: 2321781 - RNA, 19 nt, Homo sapiens
  misc_RNA (1)...(19): siRNA sense strand
aggaaguaguggaaauauu

SEQ ID NO: 2321782 - RNA, 19 nt, Homo sapiens
  misc_RNA (1)...(19): siRNA sense strand
gugaaauggcagugaaguu

SEQ ID NO: 2321783 - RNA, 19 nt, Homo sapiens
  misc_RNA (1)...(19): siRNA sense strand
ggcagaaacgugugguuaa

SEQ ID NO: 2321784 - RNA, 19 nt, Homo sapiens
  misc_RNA (1)...(19): siRNA sense strand
gcagaaugaauguaaacaa

SEQ ID NO: 2321785 - RNA, 19 nt, Homo sapiens
  misc_RNA (1)...(19): siRNA sense strand
guguaggugucaugagcaa

SEQ ID NO: 2321786 - RNA, 19 nt, Homo sapiens
  misc_RNA (1)...(19): siRNA sense strand
gcaauuguuagaugggaaa

SEQ ID NO: 2321787 - RNA, 19 nt, Homo sapiens
  misc_RNA (1)...(19): siRNA sense strand
uguuauuagccaagagaau

SEQ ID NO: 2321788 - RNA, 19 nt, Homo sapiens
  misc_RNA (1)...(19): siRNA sense strand
aaacuaaugagaagagcaa

SEQ ID NO: 2321789 - RNA, 19 nt, Homo sapiens
  misc_RNA (1)...(19): siRNA sense strand
augaugaggauuuggauua

SEQ ID NO: 2321790 - RNA, 19 nt, Homo sapiens
  misc_RNA (1)...(19): siRNA sense strand
gagaagaaugaaagaagau

SEQ ID NO: 2321791 - RNA, 19 nt, Homo sapiens
  misc_RNA (1)...(19): siRNA sense strand
cgagcaggaaugagcaaua

SEQ ID NO: 2321792 - RNA, 19 nt, Homo sapiens
  misc_RNA (1)...(19): siRNA sense strand
agagaauacacuagugcaa

SEQ ID NO: 2321793 - RNA, 19 nt, Homo sapiens
  misc_RNA (1)...(19): siRNA sense strand
acacaaaguggccaggaaa

SEQ ID NO: 2321794 - RNA, 19 nt, Homo sapiens
  misc_RNA (1)...(19): siRNA sense strand
ggguggaugaaguagguaa

SEQ ID NO: 2321795 - RNA, 19 nt, Homo sapiens
  misc_RNA (1)...(19): siRNA sense strand
ggcacuggacuuagggaaa

SEQ ID NO: 2321796 - RNA, 19 nt, Homo sapiens
  misc_RNA (1)...(19): siRNA sense strand
gaggaauacaaucgacaua

SEQ ID NO: 2321797 - RNA, 19 nt, Homo sapiens
  misc_RNA (1)...(19): siRNA sense strand
gguggaugaaguagguaaa

SEQ ID NO: 2321798 - RNA, 19 nt, Homo sapiens
  misc_RNA (1)...(19): siRNA sense strand
auugauaaccagaggaaca

SEQ ID NO: 2321799 - RNA, 19 nt, Homo sapiens
  misc_RNA (1)...(19): siRNA sense strand
gggaaagcaaguaugaaau

SEQ ID NO: 2321800 - RNA, 19 nt, Homo sapiens
  misc_RNA (1)...(19): siRNA sense strand
caaacaagagggugcaauu

SEQ ID NO: 2321801 - RNA, 19 nt, Homo sapiens
  misc_RNA (1)...(19): siRNA sense strand
ccggauugcagcaggacaa

SEQ ID NO: 2321802 - RNA, 19 nt, Homo sapiens
  misc_RNA (1)...(19): siRNA sense strand
ucgugaaacuugugcucaa

SEQ ID NO: 2321803 - RNA, 19 nt, Homo sapiens
  misc_RNA (1)...(19): siRNA sense strand
gaauaagguuacagcacca

SEQ ID NO: 2321804 - RNA, 19 nt, Homo sapiens
  misc_RNA (1)...(19): siRNA sense strand
caagaugaacauagcgaau

SEQ ID NO: 2321805 - RNA, 19 nt, Homo sapiens
  misc_RNA (1)...(19): siRNA sense strand
agacaaaagaacaaagcua

SEQ ID NO: 2321806 - RNA, 19 nt, Homo sapiens
  misc_RNA (1)...(19): siRNA sense strand
guguaaaugugguaacuca

SEQ ID NO: 2321807 - RNA, 19 nt, Homo sapiens
  misc_RNA (1)...(19): siRNA sense strand
ccauggaaacaaugaauau

SEQ ID NO: 2321808 - RNA, 19 nt, Homo sapiens
  misc_RNA (1)...(19): siRNA sense strand
gggaaauucuuaaagcuca

SEQ ID NO: 2321809 - RNA, 19 nt, Homo sapiens
  misc_RNA (1)...(19): siRNA sense strand
ggaaauucuuaaagcucau

SEQ ID NO: 2321810 - RNA, 19 nt, Homo sapiens
  misc_RNA (1)...(19): siRNA sense strand
caccaagcacagagguaua

SEQ ID NO: 2321811 - RNA, 19 nt, Homo sapiens
  misc_RNA (1)...(19): siRNA sense strand
ugcaggaaguaguggaaau

SEQ ID NO: 2321812 - RNA, 19 nt, Homo sapiens
  misc_RNA (1)...(19): siRNA sense strand
gauuauucuuucuggaaca

SEQ ID NO: 2321813 - RNA, 19 nt, Homo sapiens
  misc_RNA (1)...(19): siRNA sense strand
ccgaaaguucuauggaaga

SEQ ID NO: 2321814 - RNA, 19 nt, Homo sapiens
  misc_RNA (1)...(19): siRNA sense strand
uggccaaguuauuugcaaa

SEQ ID NO: 2321815 - RNA, 19 nt, Homo sapiens
  misc_RNA (1)...(19): siRNA sense strand
aaugaauggccuuuggaaa

SEQ ID NO: 2321816 - RNA, 19 nt, Homo sapiens
  misc_RNA (1)...(19): siRNA sense strand
gguuggaagacuugguuau

SEQ ID NO: 2321817 - RNA, 19 nt, Homo sapiens
  misc_RNA (1)...(19): siRNA sense strand
gucauagggcccaggaaua

SEQ ID NO: 2321818 - RNA, 19 nt, Homo sapiens
  misc_RNA (1)...(19): siRNA sense strand
cgauugauaaccagaggaa

SEQ ID NO: 2321819 - RNA, 19 nt, Homo sapiens
  misc_RNA (1)...(19): siRNA sense strand
aggaaugagcaauagacaa

SEQ ID NO: 2321820 - RNA, 19 nt, Homo sapiens
  misc_RNA (1)...(19): siRNA sense strand
gcaauagacaaaagaacaa

SEQ ID NO: 2321821 - RNA, 19 nt, Homo sapiens
  misc_RNA (1)...(19): siRNA sense strand
auaaauacauugugggaug

SEQ ID NO: 2321822 - RNA, 19 nt, Homo sapiens
  misc_RNA (1)...(19): siRNA sense strand
gggcagaaacgugugguua

SEQ ID NO: 2321823 - RNA, 19 nt, Homo sapiens
  misc_RNA (1)...(19): siRNA sense strand
gggagaagcaauuggaaug

SEQ ID NO: 2321824 - RNA, 19 nt, Homo sapiens
  misc_RNA (1)...(19): siRNA sense strand
gaggaacauuggaagaaaa

SEQ ID NO: 2321825 - RNA, 19 nt, Homo sapiens
  misc_RNA (1)...(19): siRNA sense strand
aagccagaauaaagaagua

SEQ ID NO: 2321826 - RNA, 19 nt, Homo sapiens
  misc_RNA (1)...(19): siRNA sense strand
gcuuugacaacuauaguaa

SEQ ID NO: 2321827 - RNA, 19 nt, Homo sapiens
  misc_RNA (1)...(19): siRNA sense strand
agaagaaaagagacggaaa

SEQ ID NO: 2321828 - RNA, 19 nt, Homo sapiens
  misc_RNA (1)...(19): siRNA sense strand
aagaaugagugaucagaca

SEQ ID NO: 2321829 - RNA, 19 nt, Homo sapiens
  misc_RNA (1)...(19): siRNA sense strand
ggaauaugcaagaucaaaa

SEQ ID NO: 2321830 - RNA, 19 nt, Homo sapiens
  misc_RNA (1)...(19): siRNA sense strand
ccagaggaacauuggaaga

SEQ ID NO: 2321831 - RNA, 19 nt, Homo sapiens
  misc_RNA (1)...(19): siRNA sense strand
guuacaacauggugcauca

SEQ ID NO: 2321832 - RNA, 19 nt, Homo sapiens
  misc_RNA (1)...(19): siRNA sense strand
agaauacacuagugcaaaa

SEQ ID NO: 2321833 - RNA, 19 nt, Homo sapiens
  misc_RNA (1)...(19): siRNA sense strand
acggagaggagcugaauuu

SEQ ID NO: 2321834 - RNA, 19 nt, Homo sapiens
  misc_RNA (1)...(19): siRNA sense strand
cacugaaagaauaagguua

SEQ ID NO: 2321835 - RNA, 19 nt, Homo sapiens
  misc_RNA (1)...(19): siRNA sense strand
ggauagcacgccaacgaaa

SEQ ID NO: 2321836 - RNA, 19 nt, Homo sapiens
  misc_RNA (1)...(19): siRNA sense strand
aggagugcaaauugggaua

SEQ ID NO: 2321837 - RNA, 19 nt, Homo sapiens
  misc_RNA (1)...(19): siRNA sense strand
caguaguauuuguggagca

SEQ ID NO: 2321838 - RNA, 19 nt, Homo sapiens
  misc_RNA (1)...(19): siRNA sense strand
uaauaugggagaagcaauu

SEQ ID NO: 2321839 - RNA, 19 nt, Homo sapiens
  misc_RNA (1)...(19): siRNA sense strand
ggaaagcuuuugugaagaa

SEQ ID NO: 2321840 - RNA, 19 nt, Homo sapiens
  misc_RNA (1)...(19): siRNA sense strand
gaaguugguaaucgaguaa

SEQ ID NO: 2321841 - RNA, 19 nt, Homo sapiens
  misc_RNA (1)...(19): siRNA sense strand
ggugugaacugguuagcau

SEQ ID NO: 2321842 - RNA, 19 nt, Homo sapiens
  misc_RNA (1)...(19): siRNA sense strand
aaugagaagagcaaugaua

SEQ ID NO: 2321843 - RNA, 19 nt, Homo sapiens
  misc_RNA (1)...(19): siRNA sense strand
auuccaaagucuugauuga

SEQ ID NO: 2321844 - RNA, 19 nt, Homo sapiens
  misc_RNA (1)...(19): siRNA sense strand
gcacuuuagaagagaugau

SEQ ID NO: 2321845 - RNA, 19 nt, Homo sapiens
  misc_RNA (1)...(19): siRNA sense strand
agacuuuguuucugaugaa

SEQ ID NO: 2321846 - RNA, 19 nt, Homo sapiens
  misc_RNA (1)...(19): siRNA sense strand
uggaaagcagccaggaaau

SEQ ID NO: 2321847 - RNA, 19 nt, Homo sapiens
  misc_RNA (1)...(19): siRNA sense strand
uggcagcggacgugggaaa

SEQ ID NO: 2321848 - RNA, 19 nt, Homo sapiens
  misc_RNA (1)...(19): siRNA sense strand
aaggauaaguacaagcaga

SEQ ID NO: 2321849 - RNA, 19 nt, Homo sapiens
  misc_RNA (1)...(19): siRNA sense strand
aggauaaguacaagcagau

SEQ ID NO: 2321850 - RNA, 19 nt, Homo sapiens
  misc_RNA (1)...(19): siRNA sense strand
gggucaagcugcugcugca

SEQ ID NO: 2321851 - RNA, 19 nt, Homo sapiens
  misc_RNA (1)...(19): siRNA sense strand
gcguguacgauacggccaa

SEQ ID NO: 2321852 - RNA, 19 nt, Homo sapiens
  misc_RNA (1)...(19): siRNA sense strand
aggaagaugaagaggaaga

SEQ ID NO: 2321853 - RNA, 19 nt, Homo sapiens
  misc_RNA (1)...(19): siRNA sense strand
gggaggaagugguggagga

SEQ ID NO: 2321854 - RNA, 19 nt, Homo sapiens
  misc_RNA (1)...(19): siRNA sense strand
aggaagaggaagaugaaga

SEQ ID NO: 2321855 - RNA, 19 nt, Homo sapiens
  misc_RNA (1)...(19): siRNA sense strand
aggaaugggaagaggcaga

SEQ ID NO: 2321856 - RNA, 19 nt, Homo sapiens
  misc_RNA (1)...(19): siRNA sense strand
aggaagacuaugauguuua

SEQ ID NO: 2321857 - RNA, 19 nt, Homo sapiens
  misc_RNA (1)...(19): siRNA sense strand
gguaaagaaggaaugggaa

SEQ ID NO: 2321858 - RNA, 19 nt, Homo sapiens
  misc_RNA (1)...(19): siRNA sense strand
augaugaggaugaggaaga

SEQ ID NO: 2321859 - RNA, 19 nt, Homo sapiens
  misc_RNA (1)...(19): siRNA sense strand
caguaagaauaaaguggau

SEQ ID NO: 2321860 - RNA, 19 nt, Homo sapiens
  misc_RNA (1)...(19): siRNA sense strand
ggguaaagaaggaauggga

SEQ ID NO: 2321861 - RNA, 19 nt, Homo sapiens
  misc_RNA (1)...(19): siRNA sense strand
aagaugaagaggaagacua

SEQ ID NO: 2321862 - RNA, 19 nt, Homo sapiens
  misc_RNA (1)...(19): siRNA sense strand
guaaagaaggaaugggaag

SEQ ID NO: 2321863 - RNA, 19 nt, Homo sapiens
  misc_RNA (1)...(19): siRNA sense strand
ucaagugucucguggguga

SEQ ID NO: 2321864 - RNA, 19 nt, Homo sapiens
  misc_RNA (1)...(19): siRNA sense strand
agaugaagaggaagacuau

SEQ ID NO: 2321865 - RNA, 19 nt, Homo sapiens
  misc_RNA (1)...(19): siRNA sense strand
gcuaaggagcagcuggaga

SEQ ID NO: 2321866 - RNA, 19 nt, Homo sapiens
  misc_RNA (1)...(19): siRNA sense strand
gauggaggugugugagaau

SEQ ID NO: 2321867 - RNA, 19 nt, Homo sapiens
  misc_RNA (1)...(19): siRNA sense strand
aguuggaggccucgaggaa

SEQ ID NO: 2321868 - RNA, 19 nt, Homo sapiens
  misc_RNA (1)...(19): siRNA sense strand
augacuacaaugaggagaa

SEQ ID NO: 2321869 - RNA, 19 nt, Homo sapiens
  misc_RNA (1)...(19): siRNA sense strand
cgagagaguuggaggccuc

SEQ ID NO: 2321870 - RNA, 19 nt, Homo sapiens
  misc_RNA (1)...(19): siRNA sense strand
guuccauggcacugaauau

SEQ ID NO: 2321871 - RNA, 19 nt, Homo sapiens
  misc_RNA (1)...(19): siRNA sense strand
gauuauuggaucuguguca

SEQ ID NO: 2321872 - RNA, 19 nt, Homo sapiens
  misc_RNA (1)...(19): siRNA sense strand
agggaaagugcgugcgcuu

SEQ ID NO: 2321873 - RNA, 19 nt, Homo sapiens
  misc_RNA (1)...(19): siRNA sense strand
uuggaggccucgaggaaga

SEQ ID NO: 2321874 - RNA, 19 nt, Homo sapiens
  misc_RNA (1)...(19): siRNA sense strand
agaggaagaggaagaugaa

SEQ ID NO: 2321875 - RNA, 19 nt, Homo sapiens
  misc_RNA (1)...(19): siRNA sense strand
gaguggaagcuaugcugaa

SEQ ID NO: 2321876 - RNA, 19 nt, Homo sapiens
  misc_RNA (1)...(19): siRNA sense strand
caagaaauucaagaggaaa

SEQ ID NO: 2321877 - RNA, 19 nt, Homo sapiens
  misc_RNA (1)...(19): siRNA sense strand
cuucaguacugucaggaga

SEQ ID NO: 2321878 - RNA, 19 nt, Homo sapiens
  misc_RNA (1)...(19): siRNA sense strand
uggacaggguaaagaagga

SEQ ID NO: 2321879 - RNA, 19 nt, Homo sapiens
  misc_RNA (1)...(19): siRNA sense strand
gggugaauuuguaagugau

SEQ ID NO: 2321880 - RNA, 19 nt, Homo sapiens
  misc_RNA (1)...(19): siRNA sense strand
agaugaaaucccaggugau

SEQ ID NO: 2321881 - RNA, 19 nt, Homo sapiens
  misc_RNA (1)...(19): siRNA sense strand
cugaggagagugaggagau

SEQ ID NO: 2321882 - RNA, 19 nt, Homo sapiens
  misc_RNA (1)...(19): siRNA sense strand
cuggugaugcugaggaaga

SEQ ID NO: 2321883 - RNA, 19 nt, Homo sapiens
  misc_RNA (1)...(19): siRNA sense strand
augaagaggaagacuauga

SEQ ID NO: 2321884 - RNA, 19 nt, Homo sapiens
  misc_RNA (1)...(19): siRNA sense strand
cggauggaggugugugaga

SEQ ID NO: 2321885 - RNA, 19 nt, Homo sapiens
  misc_RNA (1)...(19): siRNA sense strand
aggaagaaggggaggaagu

SEQ ID NO: 2321886 - RNA, 19 nt, Homo sapiens
  misc_RNA (1)...(19): siRNA sense strand
auuuugagucugaggauua

SEQ ID NO: 2321887 - RNA, 19 nt, Homo sapiens
  misc_RNA (1)...(19): siRNA sense strand
auuguauggcuguguguaa

SEQ ID NO: 2321888 - RNA, 19 nt, Homo sapiens
  misc_RNA (1)...(19): siRNA sense strand
cagaugaaaucccagguga

SEQ ID NO: 2321889 - RNA, 19 nt, Homo sapiens
  misc_RNA (1)...(19): siRNA sense strand
gaaccauggcuaugagaac

SEQ ID NO: 2321890 - RNA, 19 nt, Homo sapiens
  misc_RNA (1)...(19): siRNA sense strand
cuucaaaggagaugacuac

SEQ ID NO: 2321891 - RNA, 19 nt, Homo sapiens
  misc_RNA (1)...(19): siRNA sense strand
agaaggaagcagccaguga

SEQ ID NO: 2321892 - RNA, 19 nt, Homo sapiens
  misc_RNA (1)...(19): siRNA sense strand
cccaagaaauucaagagga

SEQ ID NO: 2321893 - RNA, 19 nt, Homo sapiens
  misc_RNA (1)...(19): siRNA sense strand
aggaagaggcaguauggca

SEQ ID NO: 2321894 - RNA, 19 nt, Homo sapiens
  misc_RNA (1)...(19): siRNA sense strand
cugaagcagaucuggaaga

SEQ ID NO: 2321895 - RNA, 19 nt, Homo sapiens
  misc_RNA (1)...(19): siRNA sense strand
cucuggauguuaaggaaau

SEQ ID NO: 2321896 - RNA, 19 nt, Homo sapiens
  misc_RNA (1)...(19): siRNA sense strand
aaccgaauggacaggguaa

SEQ ID NO: 2321897 - RNA, 19 nt, Homo sapiens
  misc_RNA (1)...(19): siRNA sense strand
acucuggauguuaaggaaa

SEQ ID NO: 2321898 - RNA, 19 nt, Homo sapiens
  misc_RNA (1)...(19): siRNA sense strand
uaaagaaggaaugggaaga

SEQ ID NO: 2321899 - RNA, 19 nt, Homo sapiens
  misc_RNA (1)...(19): siRNA sense strand
gaauaaaguggaugaaaac

SEQ ID NO: 2321900 - RNA, 19 nt, Homo sapiens
  misc_RNA (1)...(19): siRNA sense strand
ccuacaaauaccuggagca

SEQ ID NO: 2321901 - RNA, 19 nt, Homo sapiens
  misc_RNA (1)...(19): siRNA sense strand
gccuggugaugcugaggaa

SEQ ID NO: 2321902 - RNA, 19 nt, Homo sapiens
  misc_RNA (1)...(19): siRNA sense strand
ccuuauauagcuacggcau

SEQ ID NO: 2321903 - RNA, 19 nt, Homo sapiens
  misc_RNA (1)...(19): siRNA sense strand
acaaagagcggauggaggu

SEQ ID NO: 2321904 - RNA, 19 nt, Homo sapiens
  misc_RNA (1)...(19): siRNA sense strand
agucugaggauuauuguau

SEQ ID NO: 2321905 - RNA, 19 nt, Homo sapiens
  misc_RNA (1)...(19): siRNA sense strand
cuuauguagcccaagaaau

SEQ ID NO: 2321906 - RNA, 19 nt, Homo sapiens
  misc_RNA (1)...(19): siRNA sense strand
acgggaucguggagguuga

SEQ ID NO: 2321907 - RNA, 19 nt, Homo sapiens
  misc_RNA (1)...(19): siRNA sense strand
agucagacgucuaugccua

SEQ ID NO: 2321908 - RNA, 19 nt, Homo sapiens
  misc_RNA (1)...(19): siRNA sense strand
cgguaguagaggagguagu

SEQ ID NO: 2321909 - RNA, 19 nt, Homo sapiens
  misc_RNA (1)...(19): siRNA sense strand
uggccgaugacaagaagaa

SEQ ID NO: 2321910 - RNA, 19 nt, Homo sapiens
  misc_RNA (1)...(19): siRNA sense strand
aguccuuggccgaugacaa

SEQ ID NO: 2321911 - RNA, 19 nt, Homo sapiens
  misc_RNA (1)...(19): siRNA sense strand
cgggauggcaugagugucu

SEQ ID NO: 2321912 - RNA, 19 nt, Homo sapiens
  misc_RNA (1)...(19): siRNA sense strand
gcgaggagcucauugucga

SEQ ID NO: 2321913 - RNA, 19 nt, Homo sapiens
  misc_RNA (1)...(19): siRNA sense strand
ccgaugacaagaagaaagu

SEQ ID NO: 2321914 - RNA, 19 nt, Homo sapiens
  misc_RNA (1)...(19): siRNA sense strand
augcaggugcucaggaaga

SEQ ID NO: 2321915 - RNA, 19 nt, Homo sapiens
  misc_RNA (1)...(19): siRNA sense strand
gcuacaaguuccaccagca

SEQ ID NO: 2321916 - RNA, 19 nt, Homo sapiens
  misc_RNA (1)...(19): siRNA sense strand
ggaaagacaugcuugcuca

SEQ ID NO: 2321917 - RNA, 19 nt, Homo sapiens
  misc_RNA (1)...(19): siRNA sense strand
uggcagauaucgaggugga

SEQ ID NO: 2321918 - RNA, 19 nt, Homo sapiens
  misc_RNA (1)...(19): siRNA sense strand
gaguuggcuuugugggaca

SEQ ID NO: 2321919 - RNA, 19 nt, Homo sapiens
  misc_RNA (1)...(19): siRNA sense strand
ccaucauccugguugggaa

SEQ ID NO: 2321920 - RNA, 19 nt, Homo sapiens
  misc_RNA (1)...(19): siRNA sense strand
agauggagugagagagguu

SEQ ID NO: 2321921 - RNA, 19 nt, Homo sapiens
  misc_RNA (1)...(19): siRNA sense strand
agcuagacgugggaagaaa

SEQ ID NO: 2321922 - RNA, 19 nt, Homo sapiens
  misc_RNA (1)...(19): siRNA sense strand
gggagcuagccaagaugaa

SEQ ID NO: 2321923 - RNA, 19 nt, Homo sapiens
  misc_RNA (1)...(19): siRNA sense strand
cggaaugaugagcacacaa

SEQ ID NO: 2321924 - RNA, 19 nt, Homo sapiens
  misc_RNA (1)...(19): siRNA sense strand
auggaaagcagguagaguu

SEQ ID NO: 2321925 - RNA, 19 nt, Homo sapiens
  misc_RNA (1)...(19): siRNA sense strand
uagccaagaugaagcagga

SEQ ID NO: 2321926 - RNA, 19 nt, Homo sapiens
  misc_RNA (1)...(19): siRNA sense strand
caucauccugguugggaau

SEQ ID NO: 2321927 - RNA, 19 nt, Homo sapiens
  misc_RNA (1)...(19): siRNA sense strand
aaggcagagauauggcaaa

SEQ ID NO: 2321928 - RNA, 19 nt, Homo sapiens
  misc_RNA (1)...(19): siRNA sense strand
gggacauuguggaggucaa

SEQ ID NO: 2321929 - RNA, 19 nt, Homo sapiens
  misc_RNA (1)...(19): siRNA sense strand
aggaaaacccggaggaauu

SEQ ID NO: 2321930 - RNA, 19 nt, Homo sapiens
  misc_RNA (1)...(19): siRNA sense strand
cuuauuaccaagaggcaaa

SEQ ID NO: 2321931 - RNA, 19 nt, Homo sapiens
  misc_RNA (1)...(19): siRNA sense strand
ggacaagguaccagaggga

SEQ ID NO: 2321932 - RNA, 19 nt, Homo sapiens
  misc_RNA (1)...(19): siRNA sense strand
ggguagaaugggagaagga

SEQ ID NO: 2321933 - RNA, 19 nt, Homo sapiens
  misc_RNA (1)...(19): siRNA sense strand
gggagaaggacuacgugaa

SEQ ID NO: 2321934 - RNA, 19 nt, Homo sapiens
  misc_RNA (1)...(19): siRNA sense strand
uagaaugggagaaggacua

SEQ ID NO: 2321935 - RNA, 19 nt, Homo sapiens
  misc_RNA (1)...(19): siRNA sense strand
acaagguaccagagggaau

SEQ ID NO: 2321936 - RNA, 19 nt, Homo sapiens
  misc_RNA (1)...(19): siRNA sense strand
acgagaaagcugaaaguga

SEQ ID NO: 2321937 - RNA, 19 nt, Homo sapiens
  misc_RNA (1)...(19): siRNA sense strand
gugaaacaguggaagacau

SEQ ID NO: 2321938 - RNA, 19 nt, Homo sapiens
  misc_RNA (1)...(19): siRNA sense strand
gggauggcaaggagaagua

SEQ ID NO: 2321939 - RNA, 19 nt, Homo sapiens
  misc_RNA (1)...(19): siRNA sense strand
guucaagccaggacaggaa

SEQ ID NO: 2321940 - RNA, 19 nt, Homo sapiens
  misc_RNA (1)...(19): siRNA sense strand
caacagugaaacaguggaa

SEQ ID NO: 2321941 - RNA, 19 nt, Homo sapiens
  misc_RNA (1)...(19): siRNA sense strand
aaaccaagucuuugaccaa

SEQ ID NO: 2321942 - RNA, 19 nt, Homo sapiens
  misc_RNA (1)...(19): siRNA sense strand
ccgcaaaguagcugaaauc

SEQ ID NO: 2321943 - RNA, 19 nt, Homo sapiens
  misc_RNA (1)...(19): siRNA sense strand
ucagaaaaccccagaaauu

SEQ ID NO: 2321944 - RNA, 19 nt, Homo sapiens
  misc_RNA (1)...(19): siRNA sense strand
aaacucagcaauagggaau

SEQ ID NO: 2321945 - RNA, 19 nt, Homo sapiens
  misc_RNA (1)...(19): siRNA sense strand
ugaagaaccuggaggcugu

SEQ ID NO: 2321946 - RNA, 19 nt, Homo sapiens
  misc_RNA (1)...(19): siRNA sense strand
agaaggacuacgugaauga

SEQ ID NO: 2321947 - RNA, 19 nt, Homo sapiens
  misc_RNA (1)...(19): siRNA sense strand
ggaagagaaauauggcaca

SEQ ID NO: 2321948 - RNA, 19 nt, Homo sapiens
  misc_RNA (1)...(19): siRNA sense strand
gagaaauauggcacagaca

SEQ ID NO: 2321949 - RNA, 19 nt, Homo sapiens
  misc_RNA (1)...(19): siRNA sense strand
auucaguacuccagcgaca

SEQ ID NO: 2321950 - RNA, 19 nt, Homo sapiens
  misc_RNA (1)...(19): siRNA sense strand
cagcaaaacggauggccaa

SEQ ID NO: 2321951 - RNA, 19 nt, Homo sapiens
  misc_RNA (1)...(19): siRNA sense strand
aagaagaacugccugguga

SEQ ID NO: 2321952 - RNA, 19 nt, Homo sapiens
  misc_RNA (1)...(19): siRNA sense strand
acagugaaacaguggaaga

SEQ ID NO: 2321953 - RNA, 19 nt, Homo sapiens
  misc_RNA (1)...(19): siRNA sense strand
ggaaaugagaagacgccca

SEQ ID NO: 2321954 - RNA, 19 nt, Homo sapiens
  misc_RNA (1)...(19): siRNA sense strand
cuagagaaaugcagcacca

SEQ ID NO: 2321955 - RNA, 19 nt, Homo sapiens
  misc_RNA (1)...(19): siRNA sense strand
uggaugagaucuuagccaa

SEQ ID NO: 2321956 - RNA, 19 nt, Homo sapiens
  misc_RNA (1)...(19): siRNA sense strand
auagggaauuggaagagaa

SEQ ID NO: 2321957 - RNA, 19 nt, Homo sapiens
  misc_RNA (1)...(19): siRNA sense strand
gagaaagcugaaagugaca

SEQ ID NO: 2321958 - RNA, 19 nt, Homo sapiens
  misc_RNA (1)...(19): siRNA sense strand
acgugaaugacuugaaaga

SEQ ID NO: 2321959 - RNA, 19 nt, Homo sapiens
  misc_RNA (1)...(19): siRNA sense strand
gggaauaccuagaauggac

SEQ ID NO: 2321960 - RNA, 19 nt, Homo sapiens
  misc_RNA (1)...(19): siRNA sense strand
uagggaauuggaagagaaa

SEQ ID NO: 2321961 - RNA, 19 nt, Homo sapiens
  misc_RNA (1)...(19): siRNA sense strand
ggacaugagcucagaacag

SEQ ID NO: 2321962 - RNA, 19 nt, Homo sapiens
  misc_RNA (1)...(19): siRNA sense strand
ugggugaugugauggaaau

SEQ ID NO: 2321963 - RNA, 19 nt, Homo sapiens
  misc_RNA (1)...(19): siRNA sense strand
uggucuugcuggacgacaa

SEQ ID NO: 2321964 - RNA, 19 nt, Homo sapiens
  misc_RNA (1)...(19): siRNA sense strand
cgagauuccgagaagaaga

SEQ ID NO: 2321965 - RNA, 19 nt, Homo sapiens
  misc_RNA (1)...(19): siRNA sense strand
cuguggagcaaguuaacaa

SEQ ID NO: 2321966 - RNA, 19 nt, Homo sapiens
  misc_RNA (1)...(19): siRNA sense strand
ucuaaagaaggcagacauu

SEQ ID NO: 2321967 - RNA, 19 nt, Homo sapiens
  misc_RNA (1)...(19): siRNA sense strand
caugaagaaagcugugauu

SEQ ID NO: 2321968 - RNA, 19 nt, Homo sapiens
  misc_RNA (1)...(19): siRNA sense strand
gcauccuaguccagcaaau

SEQ ID NO: 2321969 - RNA, 19 nt, Homo sapiens
  misc_RNA (1)...(19): siRNA sense strand
ccaacuaccaggagauugu

SEQ ID NO: 2321970 - RNA, 19 nt, Homo sapiens
  misc_RNA (1)...(19): siRNA sense strand
gcuuauucccugaccaaga

SEQ ID NO: 2321971 - RNA, 19 nt, Homo sapiens
  misc_RNA (1)...(19): siRNA sense strand
uguaugaugaggugcggaa

SEQ ID NO: 2321972 - RNA, 19 nt, Homo sapiens
  misc_RNA (1)...(19): siRNA sense strand
ggaacuaaggacaucguga

SEQ ID NO: 2321973 - RNA, 19 nt, Homo sapiens
  misc_RNA (1)...(19): siRNA sense strand
cgagaaagcugaaagugac

SEQ ID NO: 2321974 - RNA, 19 nt, Homo sapiens
  misc_RNA (1)...(19): siRNA sense strand
gugacaucaugaacaggaa

SEQ ID NO: 2321975 - RNA, 19 nt, Homo sapiens
  misc_RNA (1)...(19): siRNA sense strand
guacuugggcugugugcuu

SEQ ID NO: 2321976 - RNA, 19 nt, Homo sapiens
  misc_RNA (1)...(19): siRNA sense strand
agaagaacugccuggugaa

SEQ ID NO: 2321977 - RNA, 19 nt, Homo sapiens
  misc_RNA (1)...(19): siRNA sense strand
cagccaaagcuauugccaa

SEQ ID NO: 2321978 - RNA, 19 nt, Homo sapiens
  misc_RNA (1)...(19): siRNA sense strand
ugggauaagaacauguauu

SEQ ID NO: 2321979 - RNA, 19 nt, Homo sapiens
  misc_RNA (1)...(19): siRNA sense strand
uuggauugcauaugggauu

SEQ ID NO: 2321980 - RNA, 19 nt, Homo sapiens
  misc_RNA (1)...(19): siRNA sense strand
ggccucaggaguuggaaau

SEQ ID NO: 2321981 - RNA, 19 nt, Homo sapiens
  misc_RNA (1)...(19): siRNA sense strand
ggacaagagcacugccaag

SEQ ID NO: 2321982 - RNA, 19 nt, Homo sapiens
  misc_RNA (1)...(19): siRNA sense strand
guagaaugggagaaggacu

SEQ ID NO: 2321983 - RNA, 19 nt, Homo sapiens
  misc_RNA (1)...(19): siRNA sense strand
ggacauuguggaggucaaa

SEQ ID NO: 2321984 - RNA, 19 nt, Homo sapiens
  misc_RNA (1)...(19): siRNA sense strand
ugacuggcauggagcugaa

SEQ ID NO: 2321985 - RNA, 19 nt, Homo sapiens
  misc_RNA (1)...(19): siRNA sense strand
agaaaaccccagaaauuua

SEQ ID NO: 2321986 - RNA, 19 nt, Homo sapiens
  misc_RNA (1)...(19): siRNA sense strand
gugucacagccuugaguuu

SEQ ID NO: 2321987 - RNA, 19 nt, Homo sapiens
  misc_RNA (1)...(19): siRNA sense strand
gagaagaagaccaucccuu

SEQ ID NO: 2321988 - RNA, 19 nt, Homo sapiens
  misc_RNA (1)...(19): siRNA sense strand
aacuaaggacaucgugaaa

SEQ ID NO: 2321989 - RNA, 19 nt, Homo sapiens
  misc_RNA (1)...(19): siRNA sense strand
agugcagggaucaagguua

SEQ ID NO: 2321990 - RNA, 19 nt, Homo sapiens
  misc_RNA (1)...(19): siRNA sense strand
gcugaaagugacaucauga

SEQ ID NO: 2321991 - RNA, 19 nt, Homo sapiens
  misc_RNA (1)...(19): siRNA sense strand
aggacuacgugaaugacuu

SEQ ID NO: 2321992 - RNA, 19 nt, Homo sapiens
  misc_RNA (1)...(19): siRNA sense strand
gauggcaaggagaaguaua

SEQ ID NO: 2321993 - RNA, 19 nt, Homo sapiens
  misc_RNA (1)...(19): siRNA sense strand
agaaagcugugauuggaga

SEQ ID NO: 2321994 - RNA, 19 nt, Homo sapiens
  misc_RNA (1)...(19): siRNA sense strand
gauuaaagccugaaggagu

SEQ ID NO: 2321995 - RNA, 19 nt, Homo sapiens
  misc_RNA (1)...(19): siRNA sense strand
cuuuagaagaacagaagaa

SEQ ID NO: 2321996 - RNA, 19 nt, Homo sapiens
  misc_RNA (1)...(19): siRNA sense strand
aaguaacaguugagugcaa

SEQ ID NO: 2321997 - RNA, 19 nt, Homo sapiens
  misc_RNA (1)...(19): siRNA sense strand
ugaaggagugccaaggaua

SEQ ID NO: 2321998 - RNA, 19 nt, Homo sapiens
  misc_RNA (1)...(19): siRNA sense strand
aaggauagauuguguuuca

SEQ ID NO: 2321999 - RNA, 19 nt, Homo sapiens
  misc_RNA (1)...(19): siRNA sense strand
ccgcauuggaauauacauu

SEQ ID NO: 2322000 - RNA, 19 nt, Homo sapiens
  misc_RNA (1)...(19): siRNA sense strand
cagugaccgcauuggaaua

SEQ ID NO: 2322001 - RNA, 19 nt, Homo sapiens
  misc_RNA (1)...(19): siRNA sense strand
acgaagaacgagaagaagu

SEQ ID NO: 2322002 - RNA, 19 nt, Homo sapiens
  misc_RNA (1)...(19): siRNA sense strand
cccuuguauucuugugaaa

SEQ ID NO: 2322003 - RNA, 19 nt, Homo sapiens
  misc_RNA (1)...(19): siRNA sense strand
gguacauugaagaccuuaa

SEQ ID NO: 2322004 - RNA, 19 nt, Homo sapiens
  misc_RNA (1)...(19): siRNA sense strand
ccaaggauagauuguguuu

SEQ ID NO: 2322005 - RNA, 19 nt, Homo sapiens
  misc_RNA (1)...(19): siRNA sense strand
uccuaacaacacugggaaa

SEQ ID NO: 2322006 - RNA, 19 nt, Homo sapiens
  misc_RNA (1)...(19): siRNA sense strand
caguugagugcaagauuga

SEQ ID NO: 2322007 - RNA, 19 nt, Homo sapiens
  misc_RNA (1)...(19): siRNA sense strand
agauauaccaaauguagca

SEQ ID NO: 2322008 - RNA, 19 nt, Homo sapiens
  misc_RNA (1)...(19): siRNA sense strand
agaaugaggucguggguga

SEQ ID NO: 2322009 - RNA, 19 nt, Homo sapiens
  misc_RNA (1)...(19): siRNA sense strand
gugcagauguuguggguga

SEQ ID NO: 2322010 - RNA, 19 nt, Homo sapiens
  misc_RNA (1)...(19): siRNA sense strand
gcgcagaagaugagggcga

SEQ ID NO: 2322011 - RNA, 19 nt, Homo sapiens
  misc_RNA (1)...(19): siRNA sense strand
gagcagaaguucacgguca

SEQ ID NO: 2322012 - RNA, 19 nt, Homo sapiens
  misc_RNA (1)...(19): siRNA sense strand
agaaagauaagaaaggcaa

SEQ ID NO: 2322013 - RNA, 19 nt, Homo sapiens
  misc_RNA (1)...(19): siRNA sense strand
aggaggaagagaagaaaga

SEQ ID NO: 2322014 - RNA, 19 nt, Homo sapiens
  misc_RNA (1)...(19): siRNA sense strand
gggagaagaagaaagccaa

SEQ ID NO: 2322015 - RNA, 19 nt, Homo sapiens
  misc_RNA (1)...(19): siRNA sense strand
gcauagcugucgugggcau

SEQ ID NO: 2322016 - RNA, 19 nt, Homo sapiens
  misc_RNA (1)...(19): siRNA sense strand
agauggagguagugaguac

SEQ ID NO: 2322017 - RNA, 19 nt, Homo sapiens
  misc_RNA (1)...(19): siRNA sense strand
cgccaggagaggagaguga

SEQ ID NO: 2322018 - RNA, 19 nt, Homo sapiens
  misc_RNA (1)...(19): siRNA sense strand
cgggagaagaagaaagcca

SEQ ID NO: 2322019 - RNA, 19 nt, Homo sapiens
  misc_RNA (1)...(19): siRNA sense strand
augagaaaggcgagauaga

SEQ ID NO: 2322020 - RNA, 19 nt, Homo sapiens
  misc_RNA (1)...(19): siRNA sense strand
agaccaaagcuaagaagca

SEQ ID NO: 2322021 - RNA, 19 nt, Homo sapiens
  misc_RNA (1)...(19): siRNA sense strand
ccaacaucuugaacagcaa

SEQ ID NO: 2322022 - RNA, 19 nt, Homo sapiens
  misc_RNA (1)...(19): siRNA sense strand
agaagaucgaggaggccua

SEQ ID NO: 2322023 - RNA, 19 nt, Homo sapiens
  misc_RNA (1)...(19): siRNA sense strand
gggacauugcccaggucaa

SEQ ID NO: 2322024 - RNA, 19 nt, Homo sapiens
  misc_RNA (1)...(19): siRNA sense strand
uggccgaaggcgaggaaga

SEQ ID NO: 2322025 - RNA, 19 nt, Homo sapiens
  misc_RNA (1)...(19): siRNA sense strand
acaacaaccuggugcgcca

SEQ ID NO: 2322026 - RNA, 19 nt, Homo sapiens
  misc_RNA (1)...(19): siRNA sense strand
acaccaaugaccuggagaa

SEQ ID NO: 2322027 - RNA, 19 nt, Homo sapiens
  misc_RNA (1)...(19): siRNA sense strand
cuggagaagcgcaggcaga

SEQ ID NO: 2322028 - RNA, 19 nt, Homo sapiens
  misc_RNA (1)...(19): siRNA sense strand
gaacaggagcggcuggaca

SEQ ID NO: 2322029 - RNA, 19 nt, Homo sapiens
  misc_RNA (1)...(19): siRNA sense strand
ugaagaacauccugggcca

SEQ ID NO: 2322030 - RNA, 19 nt, Homo sapiens
  misc_RNA (1)...(19): siRNA sense strand
agucugaccacgugcgcaa

SEQ ID NO: 2322031 - RNA, 19 nt, Homo sapiens
  misc_RNA (1)...(19): siRNA sense strand
gugcaguggccauggagau

SEQ ID NO: 2322032 - RNA, 19 nt, Homo sapiens
  misc_RNA (1)...(19): siRNA sense strand
ccugcgagaccaugggcaa

SEQ ID NO: 2322033 - RNA, 19 nt, Homo sapiens
  misc_RNA (1)...(19): siRNA sense strand
uagaagggaaggaguucaa

SEQ ID NO: 2322034 - RNA, 19 nt, Homo sapiens
  misc_RNA (1)...(19): siRNA sense strand
cggucaaugugguggcugu

SEQ ID NO: 2322035 - RNA, 19 nt, Homo sapiens
  misc_RNA (1)...(19): siRNA sense strand
ucacaaagcuagccgugca

SEQ ID NO: 2322036 - RNA, 19 nt, Homo sapiens
  misc_RNA (1)...(19): siRNA sense strand
agauagaacaggagcggcu

SEQ ID NO: 2322037 - RNA, 19 nt, Homo sapiens
  misc_RNA (1)...(19): siRNA sense strand
gccaauaguucaaucgagu

SEQ ID NO: 2322038 - RNA, 19 nt, Homo sapiens
  misc_RNA (1)...(19): siRNA sense strand
gagauggaggagcgggaga

SEQ ID NO: 2322039 - RNA, 19 nt, Homo sapiens
  misc_RNA (1)...(19): siRNA sense strand
gccuagaagggaaggaguu

SEQ ID NO: 2322040 - RNA, 19 nt, Homo sapiens
  misc_RNA (1)...(19): siRNA sense strand
aagaaagauaagaaaggca

SEQ ID NO: 2322041 - RNA, 19 nt, Homo sapiens
  misc_RNA (1)...(19): siRNA sense strand
ccgaaggcgaggaagagau

SEQ ID NO: 2322042 - RNA, 19 nt, Homo sapiens
  misc_RNA (1)...(19): siRNA sense strand
cgggaggcgcagaagauga

SEQ ID NO: 2322043 - RNA, 19 nt, Homo sapiens
  misc_RNA (1)...(19): siRNA sense strand
ggaaggacgagaugaccga

SEQ ID NO: 2322044 - RNA, 19 nt, Homo sapiens
  misc_RNA (1)...(19): siRNA sense strand
agaaaggcgagauagaaca

SEQ ID NO: 2322045 - RNA, 19 nt, Homo sapiens
  misc_RNA (1)...(19): siRNA sense strand
agauccacggcgagaggaa

SEQ ID NO: 2322046 - RNA, 19 nt, Homo sapiens
  misc_RNA (1)...(19): siRNA sense strand
ccgacugggacaacgagaa

SEQ ID NO: 2322047 - RNA, 19 nt, Homo sapiens
  misc_RNA (1)...(19): siRNA sense strand
acacacuggucaaagggau

SEQ ID NO: 2322048 - RNA, 19 nt, Homo sapiens
  misc_RNA (1)...(19): siRNA sense strand
gggaaagcagggcugguga

SEQ ID NO: 2322049 - RNA, 19 nt, Homo sapiens
  misc_RNA (1)...(19): siRNA sense strand
gugaauucccagacaggca

SEQ ID NO: 2322050 - RNA, 19 nt, Homo sapiens
  misc_RNA (1)...(19): siRNA sense strand
guagagaaaucuugggaca

SEQ ID NO: 2322051 - RNA, 19 nt, Homo sapiens
  misc_RNA (1)...(19): siRNA sense strand
cagcagaugcagaggccua

SEQ ID NO: 2322052 - RNA, 19 nt, Homo sapiens
  misc_RNA (1)...(19): siRNA sense strand
gcaaagaagugaaagugga

SEQ ID NO: 2322053 - RNA, 19 nt, Homo sapiens
  misc_RNA (1)...(19): siRNA sense strand
agacauaaaugaaugcaca

SEQ ID NO: 2322054 - RNA, 19 nt, Homo sapiens
  misc_RNA (1)...(19): siRNA sense strand
ugaaagacccagugaaaau

SEQ ID NO: 2322055 - RNA, 19 nt, Homo sapiens
  misc_RNA (1)...(19): siRNA sense strand
aagaagugaaaguggagaa

SEQ ID NO: 2322056 - RNA, 19 nt, Homo sapiens
  misc_RNA (1)...(19): siRNA sense strand
ugguaaaguugaagaccca

SEQ ID NO: 2322057 - RNA, 19 nt, Homo sapiens
  misc_RNA (1)...(19): siRNA sense strand
cucauguuguggagggaaa

SEQ ID NO: 2322058 - RNA, 19 nt, Homo sapiens
  misc_RNA (1)...(19): siRNA sense strand
cgaacagagaagagagauc

SEQ ID NO: 2322059 - RNA, 19 nt, Homo sapiens
  misc_RNA (1)...(19): siRNA sense strand
augaagacuaugcaggaaa

SEQ ID NO: 2322060 - RNA, 19 nt, Homo sapiens
  misc_RNA (1)...(19): siRNA sense strand
gguaacgggagcuggguga

SEQ ID NO: 2322061 - RNA, 19 nt, Homo sapiens
  misc_RNA (1)...(19): siRNA sense strand
ggcauaucccagugaggua

SEQ ID NO: 2322062 - RNA, 19 nt, Homo sapiens
  misc_RNA (1)...(19): siRNA sense strand
ucccagugagguagagaaa

SEQ ID NO: 2322063 - RNA, 19 nt, Homo sapiens
  misc_RNA (1)...(19): siRNA sense strand
agcaauggaaaguggagua

SEQ ID NO: 2322064 - RNA, 19 nt, Homo sapiens
  misc_RNA (1)...(19): siRNA sense strand
agaagugaaaguggagaaa

SEQ ID NO: 2322065 - RNA, 19 nt, Homo sapiens
  misc_RNA (1)...(19): siRNA sense strand
uagaaguuccugaagggua

SEQ ID NO: 2322066 - RNA, 19 nt, Homo sapiens
  misc_RNA (1)...(19): siRNA sense strand
ggcaagucuucuuugacaa

SEQ ID NO: 2322067 - RNA, 19 nt, Homo sapiens
  misc_RNA (1)...(19): siRNA sense strand
gggcucuacacacggguaa

SEQ ID NO: 2322068 - RNA, 19 nt, Homo sapiens
  misc_RNA (1)...(19): siRNA sense strand
gagaacucaaggugugaau

SEQ ID NO: 2322069 - RNA, 19 nt, Homo sapiens
  misc_RNA (1)...(19): siRNA sense strand
cuguagcuccuuuaagaaa

SEQ ID NO: 2322070 - RNA, 19 nt, Homo sapiens
  misc_RNA (1)...(19): siRNA sense strand
ggagggacguguuggugca

SEQ ID NO: 2322071 - RNA, 19 nt, Homo sapiens
  misc_RNA (1)...(19): siRNA sense strand
ccagagaacucaaggugug

SEQ ID NO: 2322072 - RNA, 19 nt, Homo sapiens
  misc_RNA (1)...(19): siRNA sense strand
aagugaaaguggagaaacc

SEQ ID NO: 2322073 - RNA, 19 nt, Homo sapiens
  misc_RNA (1)...(19): siRNA sense strand
cuggaggagagaagggcau

SEQ ID NO: 2322074 - RNA, 19 nt, Homo sapiens
  misc_RNA (1)...(19): siRNA sense strand
guacaggaucccaaugaca

SEQ ID NO: 2322075 - RNA, 19 nt, Homo sapiens
  misc_RNA (1)...(19): siRNA sense strand
cccaaugacaagaccaaau

SEQ ID NO: 2322076 - RNA, 19 nt, Homo sapiens
  misc_RNA (1)...(19): siRNA sense strand
acagaggagcaguaacaau

SEQ ID NO: 2322077 - RNA, 19 nt, Homo sapiens
  misc_RNA (1)...(19): siRNA sense strand
gauccaaugcccugcccua

SEQ ID NO: 2322078 - RNA, 19 nt, Homo sapiens
  misc_RNA (1)...(19): siRNA sense strand
ugaagacuaugcaggaaaa

SEQ ID NO: 2322079 - RNA, 19 nt, Homo sapiens
  misc_RNA (1)...(19): siRNA sense strand
cguaugacucagugcagau

SEQ ID NO: 2322080 - RNA, 19 nt, Homo sapiens
  misc_RNA (1)...(19): siRNA sense strand
agagauguggugcagauaa

SEQ ID NO: 2322081 - RNA, 19 nt, Homo sapiens
  misc_RNA (1)...(19): siRNA sense strand
ugucaaagcaauggaaagu

SEQ ID NO: 2322082 - RNA, 19 nt, Homo sapiens
  misc_RNA (1)...(19): siRNA sense strand
gagaacccuuugaagaaaa

SEQ ID NO: 2322083 - RNA, 19 nt, Homo sapiens
  misc_RNA (1)...(19): siRNA sense strand
gccgaacagagaagagaga

SEQ ID NO: 2322084 - RNA, 19 nt, Homo sapiens
  misc_RNA (1)...(19): siRNA sense strand
acuggauaaugaagacuau

SEQ ID NO: 2322085 - RNA, 19 nt, Homo sapiens
  misc_RNA (1)...(19): siRNA sense strand
auuccaaacugaaauguca

SEQ ID NO: 2322086 - RNA, 19 nt, Homo sapiens
  misc_RNA (1)...(19): siRNA sense strand
gaaaaugcaaagaagugaa

SEQ ID NO: 2322087 - RNA, 19 nt, Homo sapiens
  misc_RNA (1)...(19): siRNA sense strand
guagagaaaucuugggaca

SEQ ID NO: 2322088 - RNA, 19 nt, Homo sapiens
  misc_RNA (1)...(19): siRNA sense strand
cagcagaugcagaggccua

SEQ ID NO: 2322089 - RNA, 19 nt, Homo sapiens
  misc_RNA (1)...(19): siRNA sense strand
gcaaagaagugaaagugga

SEQ ID NO: 2322090 - RNA, 19 nt, Homo sapiens
  misc_RNA (1)...(19): siRNA sense strand
agacauaaaugaaugcaca

SEQ ID NO: 2322091 - RNA, 19 nt, Homo sapiens
  misc_RNA (1)...(19): siRNA sense strand
ugaaagacccagugaaaau

SEQ ID NO: 2322092 - RNA, 19 nt, Homo sapiens
  misc_RNA (1)...(19): siRNA sense strand
aagaagugaaaguggagaa

SEQ ID NO: 2322093 - RNA, 19 nt, Homo sapiens
  misc_RNA (1)...(19): siRNA sense strand
ugguaaaguugaagaccca

SEQ ID NO: 2322094 - RNA, 19 nt, Homo sapiens
  misc_RNA (1)...(19): siRNA sense strand
cucauguuguggagggaaa

SEQ ID NO: 2322095 - RNA, 19 nt, Homo sapiens
  misc_RNA (1)...(19): siRNA sense strand
cgaacagagaagagagauc

SEQ ID NO: 2322096 - RNA, 19 nt, Homo sapiens
  misc_RNA (1)...(19): siRNA sense strand
augaagacuaugcaggaaa

SEQ ID NO: 2322097 - RNA, 19 nt, Homo sapiens
  misc_RNA (1)...(19): siRNA sense strand
gguaacgggagcuggguga

SEQ ID NO: 2322098 - RNA, 19 nt, Homo sapiens
  misc_RNA (1)...(19): siRNA sense strand
ggcauaucccagugaggua

SEQ ID NO: 2322099 - RNA, 19 nt, Homo sapiens
  misc_RNA (1)...(19): siRNA sense strand
ucccagugagguagagaaa

SEQ ID NO: 2322100 - RNA, 19 nt, Homo sapiens
  misc_RNA (1)...(19): siRNA sense strand
agcaauggaaaguggagua

SEQ ID NO: 2322101 - RNA, 19 nt, Homo sapiens
  misc_RNA (1)...(19): siRNA sense strand
agaagugaaaguggagaaa

SEQ ID NO: 2322102 - RNA, 19 nt, Homo sapiens
  misc_RNA (1)...(19): siRNA sense strand
uagaaguuccugaagggua

SEQ ID NO: 2322103 - RNA, 19 nt, Homo sapiens
  misc_RNA (1)...(19): siRNA sense strand
ggcaagucuucuuugacaa

SEQ ID NO: 2322104 - RNA, 19 nt, Homo sapiens
  misc_RNA (1)...(19): siRNA sense strand
gggcucuacacacggguaa

SEQ ID NO: 2322105 - RNA, 19 nt, Homo sapiens
  misc_RNA (1)...(19): siRNA sense strand
gagaacucaaggugugaau

SEQ ID NO: 2322106 - RNA, 19 nt, Homo sapiens
  misc_RNA (1)...(19): siRNA sense strand
cuguagcuccuuuaagaaa

SEQ ID NO: 2322107 - RNA, 19 nt, Homo sapiens
  misc_RNA (1)...(19): siRNA sense strand
ggagggacguguuggugca

SEQ ID NO: 2322108 - RNA, 19 nt, Homo sapiens
  misc_RNA (1)...(19): siRNA sense strand
ccagagaacucaaggugug

SEQ ID NO: 2322109 - RNA, 19 nt, Homo sapiens
  misc_RNA (1)...(19): siRNA sense strand
aagugaaaguggagaaacc

SEQ ID NO: 2322110 - RNA, 19 nt, Homo sapiens
  misc_RNA (1)...(19): siRNA sense strand
cuggaggagagaagggcau

SEQ ID NO: 2322111 - RNA, 19 nt, Homo sapiens
  misc_RNA (1)...(19): siRNA sense strand
guacaggaucccaaugaca

SEQ ID NO: 2322112 - RNA, 19 nt, Homo sapiens
  misc_RNA (1)...(19): siRNA sense strand
cccaaugacaagaccaaau

SEQ ID NO: 2322113 - RNA, 19 nt, Homo sapiens
  misc_RNA (1)...(19): siRNA sense strand
acagaggagcaguaacaau

SEQ ID NO: 2322114 - RNA, 19 nt, Homo sapiens
  misc_RNA (1)...(19): siRNA sense strand
gauccaaugcccugcccua

SEQ ID NO: 2322115 - RNA, 19 nt, Homo sapiens
  misc_RNA (1)...(19): siRNA sense strand
ugaagacuaugcaggaaaa

SEQ ID NO: 2322116 - RNA, 19 nt, Homo sapiens
  misc_RNA (1)...(19): siRNA sense strand
cguaugacucagugcagau

SEQ ID NO: 2322117 - RNA, 19 nt, Homo sapiens
  misc_RNA (1)...(19): siRNA sense strand
agagauguggugcagauaa

SEQ ID NO: 2322118 - RNA, 19 nt, Homo sapiens
  misc_RNA (1)...(19): siRNA sense strand
ugucaaagcaauggaaagu

SEQ ID NO: 2322119 - RNA, 19 nt, Homo sapiens
  misc_RNA (1)...(19): siRNA sense strand
gagaacccuuugaagaaaa

SEQ ID NO: 2322120 - RNA, 19 nt, Homo sapiens
  misc_RNA (1)...(19): siRNA sense strand
gccgaacagagaagagaga

SEQ ID NO: 2322121 - RNA, 19 nt, Homo sapiens
  misc_RNA (1)...(19): siRNA sense strand
acuggauaaugaagacuau

SEQ ID NO: 2322122 - RNA, 19 nt, Homo sapiens
  misc_RNA (1)...(19): siRNA sense strand
auuccaaacugaaauguca

SEQ ID NO: 2322123 - RNA, 19 nt, Homo sapiens
  misc_RNA (1)...(19): siRNA sense strand
gaaaaugcaaagaagugaa

SEQ ID NO: 2322124 - RNA, 19 nt, Homo sapiens
  misc_RNA (1)...(19): siRNA sense strand
uggugggagugcugggcaa

SEQ ID NO: 2322125 - RNA, 19 nt, Homo sapiens
  misc_RNA (1)...(19): siRNA sense strand
ugacggcauucgaggccaa

SEQ ID NO: 2322126 - RNA, 19 nt, Homo sapiens
  misc_RNA (1)...(19): siRNA sense strand
cugaagaguccgugguuag

SEQ ID NO: 2322127 - RNA, 19 nt, Homo sapiens
  misc_RNA (1)...(19): siRNA sense strand
cguccauuguacagcauca

SEQ ID NO: 2322128 - RNA, 19 nt, Homo sapiens
  misc_RNA (1)...(19): siRNA sense strand
cacuaugaugacaaggaua

SEQ ID NO: 2322129 - RNA, 19 nt, Homo sapiens
  misc_RNA (1)...(19): siRNA sense strand
ccgugguuagggagagcaa

SEQ ID NO: 2322130 - RNA, 19 nt, Homo sapiens
  misc_RNA (1)...(19): siRNA sense strand
agggagagcaagucauuca

SEQ ID NO: 2322131 - RNA, 19 nt, Homo sapiens
  misc_RNA (1)...(19): siRNA sense strand
cggcaagggagaaggcaaa

SEQ ID NO: 2322132 - RNA, 19 nt, Homo sapiens
  misc_RNA (1)...(19): siRNA sense strand
cgaugugcaugcaggacaa

SEQ ID NO: 2322133 - RNA, 19 nt, Homo sapiens
  misc_RNA (1)...(19): siRNA sense strand
gcggcaagggagaaggcaa

SEQ ID NO: 2322134 - RNA, 19 nt, Homo sapiens
  misc_RNA (1)...(19): siRNA sense strand
accaaauacuccaaggcaa

SEQ ID NO: 2322135 - RNA, 19 nt, Homo sapiens
  misc_RNA (1)...(19): siRNA sense strand
acuccaaggcaaagguauu

SEQ ID NO: 2322136 - RNA, 19 nt, Homo sapiens
  misc_RNA (1)...(19): siRNA sense strand
agagaauuccugagagagu

SEQ ID NO: 2322137 - RNA, 19 nt, Homo sapiens
  misc_RNA (1)...(19): siRNA sense strand
caugaauggauauggauca

SEQ ID NO: 2322138 - RNA, 19 nt, Homo sapiens
  misc_RNA (1)...(19): siRNA sense strand
aggaaacgucugugugaga

SEQ ID NO: 2322139 - RNA, 19 nt, Homo sapiens
  misc_RNA (1)...(19): siRNA sense strand
cuggagaagugcggagauu

SEQ ID NO: 2322140 - RNA, 19 nt, Homo sapiens
  misc_RNA (1)...(19): siRNA sense strand
uaacccaguaggagacaaa

SEQ ID NO: 2322141 - RNA, 19 nt, Homo sapiens
  misc_RNA (1)...(19): siRNA sense strand
caguaggagacaaacuuaa

SEQ ID NO: 2322142 - RNA, 19 nt, Homo sapiens
  misc_RNA (1)...(19): siRNA sense strand
augugaacgugcugaauga

SEQ ID NO: 2322143 - RNA, 19 nt, Homo sapiens
  misc_RNA (1)...(19): siRNA sense strand
gagaguugugcaugcuaaa

SEQ ID NO: 2322144 - RNA, 19 nt, Homo sapiens
  misc_RNA (1)...(19): siRNA sense strand
ucucaucccaguugguaaa

SEQ ID NO: 2322145 - RNA, 19 nt, Homo sapiens
  misc_RNA (1)...(19): siRNA sense strand
acauuuaaucaggcagaaa

SEQ ID NO: 2322146 - RNA, 19 nt, Homo sapiens
  misc_RNA (1)...(19): siRNA sense strand
ucguggguuugcagugaaa

SEQ ID NO: 2322147 - RNA, 19 nt, Homo sapiens
  misc_RNA (1)...(19): siRNA sense strand
gaggcaguuuauugcaaau

SEQ ID NO: 2322148 - RNA, 19 nt, Homo sapiens
  misc_RNA (1)...(19): siRNA sense strand
ugcugagguugaacagaua

SEQ ID NO: 2322149 - RNA, 19 nt, Homo sapiens
  misc_RNA (1)...(19): siRNA sense strand
gagcaggggccuuuggcua

SEQ ID NO: 2322150 - RNA, 19 nt, Homo sapiens
  misc_RNA (1)...(19): siRNA sense strand
gggcauucuaugugaacgu

SEQ ID NO: 2322151 - RNA, 19 nt, Homo sapiens
  misc_RNA (1)...(19): siRNA sense strand
gcagaaagcugauguccug

SEQ ID NO: 2322152 - RNA, 19 nt, Homo sapiens
  misc_RNA (1)...(19): siRNA sense strand
guggguuugcagugaaauu

SEQ ID NO: 2322153 - RNA, 19 nt, Homo sapiens
  misc_RNA (1)...(19): siRNA sense strand
ugacauuuaaucaggcaga

SEQ ID NO: 2322154 - RNA, 19 nt, Homo sapiens
  misc_RNA (1)...(19): siRNA sense strand
caaucaggguggugcucca

SEQ ID NO: 2322155 - RNA, 19 nt, Homo sapiens
  misc_RNA (1)...(19): siRNA sense strand
cagcuuuggugcuccggaa

SEQ ID NO: 2322156 - RNA, 19 nt, Homo sapiens
  misc_RNA (1)...(19): siRNA sense strand
cggacauggucugggacuu

SEQ ID NO: 2322157 - RNA, 19 nt, Homo sapiens
  misc_RNA (1)...(19): siRNA sense strand
gcacaaauuuucauccaga

SEQ ID NO: 2322158 - RNA, 19 nt, Homo sapiens
  misc_RNA (1)...(19): siRNA sense strand
ucugauaggucuugcgcuu

SEQ ID NO: 2322159 - RNA, 19 nt, Homo sapiens
  misc_RNA (1)...(19): siRNA sense strand
gaguggaaggaacuggaaa

SEQ ID NO: 2322160 - RNA, 19 nt, Homo sapiens
  misc_RNA (1)...(19): siRNA sense strand
ccaaagcccguguggguga

SEQ ID NO: 2322161 - RNA, 19 nt, Homo sapiens
  misc_RNA (1)...(19): siRNA sense strand
ucagcaaugaggaguggaa

SEQ ID NO: 2322162 - RNA, 19 nt, Homo sapiens
  misc_RNA (1)...(19): siRNA sense strand
cuggaaaggucucaggaag

SEQ ID NO: 2322163 - RNA, 19 nt, Homo sapiens
  misc_RNA (1)...(19): siRNA sense strand
uggccaagcauuucugcaa

SEQ ID NO: 2322164 - RNA, 19 nt, Homo sapiens
  misc_RNA (1)...(19): siRNA sense strand
gucuagagggccaggacau

SEQ ID NO: 2322165 - RNA, 19 nt, Homo sapiens
  misc_RNA (1)...(19): siRNA sense strand
ccgugugggugauguggau

SEQ ID NO: 2322166 - RNA, 19 nt, Homo sapiens
  misc_RNA (1)...(19): siRNA sense strand
aggcaagucaugagagagu

SEQ ID NO: 2322167 - RNA, 19 nt, Homo sapiens
  misc_RNA (1)...(19): siRNA sense strand
uacaaggauuucagggcaa

SEQ ID NO: 2322168 - RNA, 19 nt, Homo sapiens
  misc_RNA (1)...(19): siRNA sense strand
guacaaggauuucagggca

SEQ ID NO: 2322169 - RNA, 19 nt, Homo sapiens
  misc_RNA (1)...(19): siRNA sense strand
gggagaaucuucaaagggu

SEQ ID NO: 2322170 - RNA, 19 nt, Homo sapiens
  misc_RNA (1)...(19): siRNA sense strand
ugggcuaugugcuggacaa

SEQ ID NO: 2322171 - RNA, 19 nt, Homo sapiens
  misc_RNA (1)...(19): siRNA sense strand
agaagaaacagcagcagca

SEQ ID NO: 2322172 - RNA, 19 nt, Homo sapiens
  misc_RNA (1)...(19): siRNA sense strand
aagugaacaagaagaaaca

SEQ ID NO: 2322173 - RNA, 19 nt, Homo sapiens
  misc_RNA (1)...(19): siRNA sense strand
agacucggaccaaggacaa

SEQ ID NO: 2322174 - RNA, 19 nt, Homo sapiens
  misc_RNA (1)...(19): siRNA sense strand
cugaacggcaggugaagau

SEQ ID NO: 2322175 - RNA, 19 nt, Homo sapiens
  misc_RNA (1)...(19): siRNA sense strand
acaagaagaaacagcagca

SEQ ID NO: 2322176 - RNA, 19 nt, Homo sapiens
  misc_RNA (1)...(19): siRNA sense strand
ggaaccagugggugggcua

SEQ ID NO: 2322177 - RNA, 19 nt, Homo sapiens
  misc_RNA (1)...(19): siRNA sense strand
agguuaucaucaaggacaa

SEQ ID NO: 2322178 - RNA, 19 nt, Homo sapiens
  misc_RNA (1)...(19): siRNA sense strand
uggaauaugcuguggggua

SEQ ID NO: 2322179 - RNA, 19 nt, Homo sapiens
  misc_RNA (1)...(19): siRNA sense strand
agaagguggucaugggcau

SEQ ID NO: 2322180 - RNA, 19 nt, Homo sapiens
  misc_RNA (1)...(19): siRNA sense strand
uggcaaaagaucuggauuu

SEQ ID NO: 2322181 - RNA, 19 nt, Homo sapiens
  misc_RNA (1)...(19): siRNA sense strand
acaaaauccaccaaggaaa

SEQ ID NO: 2322182 - RNA, 19 nt, Homo sapiens
  misc_RNA (1)...(19): siRNA sense strand
acaacagcccucugagcaa

SEQ ID NO: 2322183 - RNA, 19 nt, Homo sapiens
  misc_RNA (1)...(19): siRNA sense strand
guaucugcagggaggcaaa

SEQ ID NO: 2322184 - RNA, 19 nt, Homo sapiens
  misc_RNA (1)...(19): siRNA sense strand
acuggauacauaagggaau

SEQ ID NO: 2322185 - RNA, 19 nt, Homo sapiens
  misc_RNA (1)...(19): siRNA sense strand
gaugugaagaguauggaga

SEQ ID NO: 2322186 - RNA, 19 nt, Homo sapiens
  misc_RNA (1)...(19): siRNA sense strand
ggaugacuucacuggcaaa

SEQ ID NO: 2322187 - RNA, 19 nt, Homo sapiens
  misc_RNA (1)...(19): siRNA sense strand
gauucaugaguuagcagaa

SEQ ID NO: 2322188 - RNA, 19 nt, Homo sapiens
  misc_RNA (1)...(19): siRNA sense strand
cugaaaggagccaagauca

SEQ ID NO: 2322189 - RNA, 19 nt, Homo sapiens
  misc_RNA (1)...(19): siRNA sense strand
ucgaaaacaacaagguuau

SEQ ID NO: 2322190 - RNA, 19 nt, Homo sapiens
  misc_RNA (1)...(19): siRNA sense strand
agggaaugccaucagagaa

SEQ ID NO: 2322191 - RNA, 19 nt, Homo sapiens
  misc_RNA (1)...(19): siRNA sense strand
ucacagagucuucaggcuu

SEQ ID NO: 2322192 - RNA, 19 nt, Homo sapiens
  misc_RNA (1)...(19): siRNA sense strand
cagcaugggaaaugacaaa

SEQ ID NO: 2322193 - RNA, 19 nt, Homo sapiens
  misc_RNA (1)...(19): siRNA sense strand
acauuugaagagagggaua

SEQ ID NO: 2322194 - RNA, 19 nt, Homo sapiens
  misc_RNA (1)...(19): siRNA sense strand
agguuugaguuuaggaaaa

SEQ ID NO: 2322195 - RNA, 19 nt, Homo sapiens
  misc_RNA (1)...(19): siRNA sense strand
uuuccaaaguauagcacaa

SEQ ID NO: 2322196 - RNA, 19 nt, Homo sapiens
  misc_RNA (1)...(19): siRNA sense strand
ccaucaauccauuugguaa

SEQ ID NO: 2322197 - RNA, 19 nt, Homo sapiens
  misc_RNA (1)...(19): siRNA sense strand
cagaauuaaucauagguca

SEQ ID NO: 2322198 - RNA, 19 nt, Homo sapiens
  misc_RNA (1)...(19): siRNA sense strand
caguauaacaagugcaagu

SEQ ID NO: 2322199 - RNA, 19 nt, Homo sapiens
  misc_RNA (1)...(19): siRNA sense strand
gaaagaaucagcaugggaa

SEQ ID NO: 2322200 - RNA, 19 nt, Homo sapiens
  misc_RNA (1)...(19): siRNA sense strand
agagaaaggcauagacgga

SEQ ID NO: 2322201 - RNA, 19 nt, Homo sapiens
  misc_RNA (1)...(19): siRNA sense strand
augcuuagguggugugaca

SEQ ID NO: 2322202 - RNA, 19 nt, Homo sapiens
  misc_RNA (1)...(19): siRNA sense strand
aaagaaucagcaugggaaa

SEQ ID NO: 2322203 - RNA, 19 nt, Homo sapiens
  misc_RNA (1)...(19): siRNA sense strand
agaccugacaauugcaaua

SEQ ID NO: 2322204 - RNA, 19 nt, Homo sapiens
  misc_RNA (1)...(19): siRNA sense strand
aggcauagacggaucaaca

SEQ ID NO: 2322205 - RNA, 19 nt, Homo sapiens
  misc_RNA (1)...(19): siRNA sense strand
caacauuugaagagaggga

SEQ ID NO: 2322206 - RNA, 19 nt, Homo sapiens
  misc_RNA (1)...(19): siRNA sense strand
ugcaaguagugaugaggaa

SEQ ID NO: 2322207 - RNA, 19 nt, Homo sapiens
  misc_RNA (1)...(19): siRNA sense strand
acaauaugacaguggauga

SEQ ID NO: 2322208 - RNA, 19 nt, Homo sapiens
  misc_RNA (1)...(19): siRNA sense strand
cauuauuguugcagccauu

SEQ ID NO: 2322209 - RNA, 19 nt, Homo sapiens
  misc_RNA (1)...(19): siRNA sense strand
caguaaauggguuggagau

SEQ ID NO: 2322210 - RNA, 19 nt, Homo sapiens
  misc_RNA (1)...(19): siRNA sense strand
auagaaagugccaggaaaa

SEQ ID NO: 2322211 - RNA, 19 nt, Homo sapiens
  misc_RNA (1)...(19): siRNA sense strand
ggacaauaugacaguggau

SEQ ID NO: 2322212 - RNA, 19 nt, Homo sapiens
  misc_RNA (1)...(19): siRNA sense strand
gcagaaaguccucggccau

SEQ ID NO: 2322213 - RNA, 19 nt, Homo sapiens
  misc_RNA (1)...(19): siRNA sense strand
ucagagguuacuugggaaa

SEQ ID NO: 2322214 - RNA, 19 nt, Homo sapiens
  misc_RNA (1)...(19): siRNA sense strand
aauccauacacuaggcuaa

SEQ ID NO: 2322215 - RNA, 19 nt, Homo sapiens
  misc_RNA (1)...(19): siRNA sense strand
auugauugggugcgagaaa

SEQ ID NO: 2322216 - RNA, 19 nt, Homo sapiens
  misc_RNA (1)...(19): siRNA sense strand
cucagagauuagugggauu

SEQ ID NO: 2322217 - RNA, 19 nt, Homo sapiens
  misc_RNA (1)...(19): siRNA sense strand
cugacaauugcaauagaaa

SEQ ID NO: 2322218 - RNA, 19 nt, Homo sapiens
  misc_RNA (1)...(19): siRNA sense strand
agauggagcagguguuauu

SEQ ID NO: 2322219 - RNA, 19 nt, Homo sapiens
  misc_RNA (1)...(19): siRNA sense strand
uuacuggaggcuuggaaua

SEQ ID NO: 2322220 - RNA, 19 nt, Homo sapiens
  misc_RNA (1)...(19): siRNA sense strand
gacaauugcaauagaaagu

SEQ ID NO: 2322221 - RNA, 19 nt, Homo sapiens
  misc_RNA (1)...(19): siRNA sense strand
ugacaguggaugauauaga

SEQ ID NO: 2322222 - RNA, 19 nt, Homo sapiens
  misc_RNA (1)...(19): siRNA sense strand
guaaagacagagaaaggca

SEQ ID NO: 2322223 - RNA, 19 nt, Homo sapiens
  misc_RNA (1)...(19): siRNA sense strand
gguaaagguauuugcucca

SEQ ID NO: 2322224 - RNA, 19 nt, Homo sapiens
  misc_RNA (1)...(19): siRNA sense strand
caggaaggauuguggggau

SEQ ID NO: 2322225 - RNA, 19 nt, Homo sapiens
  misc_RNA (1)...(19): siRNA sense strand
cauuugaagagagggauaa

SEQ ID NO: 2322226 - RNA, 19 nt, Homo sapiens
  misc_RNA (1)...(19): siRNA sense strand
cugcagucaugaccaguaa

SEQ ID NO: 2322227 - RNA, 19 nt, Homo sapiens
  misc_RNA (1)...(19): siRNA sense strand
cuuagugcguugugguaca

SEQ ID NO: 2322228 - RNA, 19 nt, Homo sapiens
  misc_RNA (1)...(19): siRNA sense strand
uggcaucagguuugaguuu

SEQ ID NO: 2322229 - RNA, 19 nt, Homo sapiens
  misc_RNA (1)...(19): siRNA sense strand
agaaaugacaugaaugcca

SEQ ID NO: 2322230 - RNA, 19 nt, Homo sapiens
  misc_RNA (1)...(19): siRNA sense strand
ccaguaaauggguuggaga

SEQ ID NO: 2322231 - RNA, 19 nt, Homo sapiens
  misc_RNA (1)...(19): siRNA sense strand
ucacauuaguccuggcugu

SEQ ID NO: 2322232 - RNA, 19 nt, Homo sapiens
  misc_RNA (1)...(19): siRNA sense strand
cuggaagagguuagcuauu

SEQ ID NO: 2322233 - RNA, 19 nt, Homo sapiens
  misc_RNA (1)...(19): siRNA sense strand
cauauggcccagacggcaa

SEQ ID NO: 2322234 - RNA, 19 nt, Homo sapiens
  misc_RNA (1)...(19): siRNA sense strand
agaaaggcauagacggauc

SEQ ID NO: 2322235 - RNA, 19 nt, Homo sapiens
  misc_RNA (1)...(19): siRNA sense strand
cagggaaggcauuuaugaa

SEQ ID NO: 2322236 - RNA, 19 nt, Homo sapiens
  misc_RNA (1)...(19): siRNA sense strand
agacggaucaacagcaaaa

SEQ ID NO: 2322237 - RNA, 19 nt, Homo sapiens
  misc_RNA (1)...(19): siRNA sense strand
aaucauaggucaagcagag

SEQ ID NO: 2322238 - RNA, 19 nt, Homo sapiens
  misc_RNA (1)...(19): siRNA sense strand
cagguuugaguuuaggaaa

SEQ ID NO: 2322239 - RNA, 19 nt, Homo sapiens
  misc_RNA (1)...(19): siRNA sense strand
gcuacuauagaaacagcua

SEQ ID NO: 2322240 - RNA, 19 nt, Homo sapiens
  misc_RNA (1)...(19): siRNA sense strand
ggaucuaaugaaacaacau

SEQ ID NO: 2322241 - RNA, 19 nt, Homo sapiens
  misc_RNA (1)...(19): siRNA sense strand
ugaacugaucaaagagcuu

SEQ ID NO: 2322242 - RNA, 19 nt, Homo sapiens
  misc_RNA (1)...(19): siRNA sense strand
agaggcuacuauagaaaca

SEQ ID NO: 2322243 - RNA, 19 nt, Homo sapiens
  misc_RNA (1)...(19): siRNA sense strand
gccuggaagagguuagcua

SEQ ID NO: 2322244 - RNA, 19 nt, Homo sapiens
  misc_RNA (1)...(19): siRNA sense strand
caugaaugccaguaaaauu

SEQ ID NO: 2322245 - RNA, 19 nt, Homo sapiens
  misc_RNA (1)...(19): siRNA sense strand
aggcauuggaguauauuca

SEQ ID NO: 2322246 - RNA, 19 nt, Homo sapiens
  misc_RNA (1)...(19): siRNA sense strand
uugcaguuucccugguaaa

SEQ ID NO: 2322247 - RNA, 19 nt, Homo sapiens
  misc_RNA (1)...(19): siRNA sense strand
aggcuaaacaccagugaac

SEQ ID NO: 2322248 - RNA, 19 nt, Homo sapiens
  misc_RNA (1)...(19): siRNA sense strand
ugguuuaucuuuaaggagu

SEQ ID NO: 2322249 - RNA, 19 nt, Homo sapiens
  misc_RNA (1)...(19): siRNA sense strand
agaagaaacggaagaggaa

SEQ ID NO: 2322250 - RNA, 19 nt, Homo sapiens
  misc_RNA (1)...(19): siRNA sense strand
cagcaugggaaaugacaaa

SEQ ID NO: 2322251 - RNA, 19 nt, Homo sapiens
  misc_RNA (1)...(19): siRNA sense strand
ucacagaugaggagagaga

SEQ ID NO: 2322252 - RNA, 19 nt, Homo sapiens
  misc_RNA (1)...(19): siRNA sense strand
acauuugaagagagggaua

SEQ ID NO: 2322253 - RNA, 19 nt, Homo sapiens
  misc_RNA (1)...(19): siRNA sense strand
gagaagaaacggaagagga

SEQ ID NO: 2322254 - RNA, 19 nt, Homo sapiens
  misc_RNA (1)...(19): siRNA sense strand
agguuugaguuuaggaaaa

SEQ ID NO: 2322255 - RNA, 19 nt, Homo sapiens
  misc_RNA (1)...(19): siRNA sense strand
cggaagaggaaguuuauuu

SEQ ID NO: 2322256 - RNA, 19 nt, Homo sapiens
  misc_RNA (1)...(19): siRNA sense strand
uuuccaaaguauagcacaa

SEQ ID NO: 2322257 - RNA, 19 nt, Homo sapiens
  misc_RNA (1)...(19): siRNA sense strand
ggagagagaagaaacggaa

SEQ ID NO: 2322258 - RNA, 19 nt, Homo sapiens
  misc_RNA (1)...(19): siRNA sense strand
ccaucaauccauuugguaa

SEQ ID NO: 2322259 - RNA, 19 nt, Homo sapiens
  misc_RNA (1)...(19): siRNA sense strand
cagaauuaaucauagguca

SEQ ID NO: 2322260 - RNA, 19 nt, Homo sapiens
  misc_RNA (1)...(19): siRNA sense strand
gaaagaaucagcaugggaa

SEQ ID NO: 2322261 - RNA, 19 nt, Homo sapiens
  misc_RNA (1)...(19): siRNA sense strand
uggagauugugguggauau

SEQ ID NO: 2322262 - RNA, 19 nt, Homo sapiens
  misc_RNA (1)...(19): siRNA sense strand
agagaaaggcauagacgga

SEQ ID NO: 2322263 - RNA, 19 nt, Homo sapiens
  misc_RNA (1)...(19): siRNA sense strand
augcuuagguggugugaca

SEQ ID NO: 2322264 - RNA, 19 nt, Homo sapiens
  misc_RNA (1)...(19): siRNA sense strand
aaagaaucagcaugggaaa

SEQ ID NO: 2322265 - RNA, 19 nt, Homo sapiens
  misc_RNA (1)...(19): siRNA sense strand
agaccugacaauugcaaua

SEQ ID NO: 2322266 - RNA, 19 nt, Homo sapiens
  misc_RNA (1)...(19): siRNA sense strand
aggcauagacggaucaaca

SEQ ID NO: 2322267 - RNA, 19 nt, Homo sapiens
  misc_RNA (1)...(19): siRNA sense strand
caacauuugaagagaggga

SEQ ID NO: 2322268 - RNA, 19 nt, Homo sapiens
  misc_RNA (1)...(19): siRNA sense strand
agaugaggagagagaagaa

SEQ ID NO: 2322269 - RNA, 19 nt, Homo sapiens
  misc_RNA (1)...(19): siRNA sense strand
acaauaugacaguggauga

SEQ ID NO: 2322270 - RNA, 19 nt, Homo sapiens
  misc_RNA (1)...(19): siRNA sense strand
cauuauuguugcagccauu

SEQ ID NO: 2322271 - RNA, 19 nt, Homo sapiens
  misc_RNA (1)...(19): siRNA sense strand
caguaaauggguuggagau

SEQ ID NO: 2322272 - RNA, 19 nt, Homo sapiens
  misc_RNA (1)...(19): siRNA sense strand
auagaaagugccaggaaaa

SEQ ID NO: 2322273 - RNA, 19 nt, Homo sapiens
  misc_RNA (1)...(19): siRNA sense strand
ggacaauaugacaguggau

SEQ ID NO: 2322274 - RNA, 19 nt, Homo sapiens
  misc_RNA (1)...(19): siRNA sense strand
gcagaaaguccucggccau

SEQ ID NO: 2322275 - RNA, 19 nt, Homo sapiens
  misc_RNA (1)...(19): siRNA sense strand
agagagaagaaacggaaga

SEQ ID NO: 2322276 - RNA, 19 nt, Homo sapiens
  misc_RNA (1)...(19): siRNA sense strand
ucagagguuacuugggaaa

SEQ ID NO: 2322277 - RNA, 19 nt, Homo sapiens
  misc_RNA (1)...(19): siRNA sense strand
aauccauacacuaggcuaa

SEQ ID NO: 2322278 - RNA, 19 nt, Homo sapiens
  misc_RNA (1)...(19): siRNA sense strand
auugauugggugcgagaaa

SEQ ID NO: 2322279 - RNA, 19 nt, Homo sapiens
  misc_RNA (1)...(19): siRNA sense strand
cucagagauuagugggauu

SEQ ID NO: 2322280 - RNA, 19 nt, Homo sapiens
  misc_RNA (1)...(19): siRNA sense strand
cugacaauugcaauagaaa

SEQ ID NO: 2322281 - RNA, 19 nt, Homo sapiens
  misc_RNA (1)...(19): siRNA sense strand
aagaaacggaagaggaagu

SEQ ID NO: 2322282 - RNA, 19 nt, Homo sapiens
  misc_RNA (1)...(19): siRNA sense strand
uuacuggaggcuuggaaua

SEQ ID NO: 2322283 - RNA, 19 nt, Homo sapiens
  misc_RNA (1)...(19): siRNA sense strand
gacaauugcaauagaaagu

SEQ ID NO: 2322284 - RNA, 19 nt, Homo sapiens
  misc_RNA (1)...(19): siRNA sense strand
ugacaguggaugauauaga

SEQ ID NO: 2322285 - RNA, 19 nt, Homo sapiens
  misc_RNA (1)...(19): siRNA sense strand
guaaagacagagaaaggca

SEQ ID NO: 2322286 - RNA, 19 nt, Homo sapiens
  misc_RNA (1)...(19): siRNA sense strand
gguaaagguauuugcucca

SEQ ID NO: 2322287 - RNA, 19 nt, Homo sapiens
  misc_RNA (1)...(19): siRNA sense strand
caggaaggauuguggggau

SEQ ID NO: 2322288 - RNA, 19 nt, Homo sapiens
  misc_RNA (1)...(19): siRNA sense strand
cauuugaagagagggauaa

SEQ ID NO: 2322289 - RNA, 19 nt, Homo sapiens
  misc_RNA (1)...(19): siRNA sense strand
cugcagucaugaccaguaa

SEQ ID NO: 2322290 - RNA, 19 nt, Homo sapiens
  misc_RNA (1)...(19): siRNA sense strand
cuuagugcguugugguaca

SEQ ID NO: 2322291 - RNA, 19 nt, Homo sapiens
  misc_RNA (1)...(19): siRNA sense strand
uggcaucagguuugaguuu

SEQ ID NO: 2322292 - RNA, 19 nt, Homo sapiens
  misc_RNA (1)...(19): siRNA sense strand
agaaaugacaugaaugcca

SEQ ID NO: 2322293 - RNA, 19 nt, Homo sapiens
  misc_RNA (1)...(19): siRNA sense strand
ccaguaaauggguuggaga

SEQ ID NO: 2322294 - RNA, 19 nt, Homo sapiens
  misc_RNA (1)...(19): siRNA sense strand
ucacauuaguccuggcugu

SEQ ID NO: 2322295 - RNA, 19 nt, Homo sapiens
  misc_RNA (1)...(19): siRNA sense strand
cuggaagagguuagcuauu

SEQ ID NO: 2322296 - RNA, 19 nt, Homo sapiens
  misc_RNA (1)...(19): siRNA sense strand
cauauggcccagacggcaa

SEQ ID NO: 2322297 - RNA, 19 nt, Homo sapiens
  misc_RNA (1)...(19): siRNA sense strand
agaaaggcauagacggauc

SEQ ID NO: 2322298 - RNA, 19 nt, Homo sapiens
  misc_RNA (1)...(19): siRNA sense strand
cagggaaggcauuuaugaa

SEQ ID NO: 2322299 - RNA, 19 nt, Homo sapiens
  misc_RNA (1)...(19): siRNA sense strand
agacggaucaacagcaaaa

SEQ ID NO: 2322300 - RNA, 19 nt, Homo sapiens
  misc_RNA (1)...(19): siRNA sense strand
aaucauaggucaagcagag

SEQ ID NO: 2322301 - RNA, 19 nt, Homo sapiens
  misc_RNA (1)...(19): siRNA sense strand
cagguuugaguuuaggaaa

SEQ ID NO: 2322302 - RNA, 19 nt, Homo sapiens
  misc_RNA (1)...(19): siRNA sense strand
ggaucuaaugaaacaacau

SEQ ID NO: 2322303 - RNA, 19 nt, Homo sapiens
  misc_RNA (1)...(19): siRNA sense strand
ugaacugaucaaagagcuu

SEQ ID NO: 2322304 - RNA, 19 nt, Homo sapiens
  misc_RNA (1)...(19): siRNA sense strand
gccuggaagagguuagcua

SEQ ID NO: 2322305 - RNA, 19 nt, Homo sapiens
  misc_RNA (1)...(19): siRNA sense strand
caugaaugccaguaaaauu

SEQ ID NO: 2322306 - RNA, 19 nt, Homo sapiens
  misc_RNA (1)...(19): siRNA sense strand
aggcauuggaguauauuca

SEQ ID NO: 2322307 - RNA, 19 nt, Homo sapiens
  misc_RNA (1)...(19): siRNA sense strand
uugcaguuucccugguaaa

SEQ ID NO: 2322308 - RNA, 19 nt, Homo sapiens
  misc_RNA (1)...(19): siRNA sense strand
aggcuaaacaccagugaac

SEQ ID NO: 2322309 - RNA, 19 nt, Homo sapiens
  misc_RNA (1)...(19): siRNA sense strand
ugguuuaucuuuaaggagu

SEQ ID NO: 2322310 - RNA, 19 nt, Homo sapiens
  misc_RNA (1)...(19): siRNA sense strand
acagaugaggagagagaag

SEQ ID NO: 2322311 - RNA, 19 nt, Homo sapiens
  misc_RNA (1)...(19): siRNA sense strand
acaggaagauguacggaga

SEQ ID NO: 2322312 - RNA, 19 nt, Homo sapiens
  misc_RNA (1)...(19): siRNA sense strand
agcuaaauucuguggagua

SEQ ID NO: 2322313 - RNA, 19 nt, Homo sapiens
  misc_RNA (1)...(19): siRNA sense strand
ccaacuaugauuagagcca

SEQ ID NO: 2322314 - RNA, 19 nt, Homo sapiens
  misc_RNA (1)...(19): siRNA sense strand
agaacauuaagaagggcaa

SEQ ID NO: 2322315 - RNA, 19 nt, Homo sapiens
  misc_RNA (1)...(19): siRNA sense strand
aggaagauguacggagaca

SEQ ID NO: 2322316 - RNA, 19 nt, Homo sapiens
  misc_RNA (1)...(19): siRNA sense strand
cggcuuaccgacuggaaga

SEQ ID NO: 2322317 - RNA, 19 nt, Homo sapiens
  misc_RNA (1)...(19): siRNA sense strand
gugacgagcccaaggacca

SEQ ID NO: 2322318 - RNA, 19 nt, Homo sapiens
  misc_RNA (1)...(19): siRNA sense strand
ccugcaggcuagagaagca

SEQ ID NO: 2322319 - RNA, 19 nt, Homo sapiens
  misc_RNA (1)...(19): siRNA sense strand
gggaaaugcugcgaggagu

SEQ ID NO: 2322320 - RNA, 19 nt, Homo sapiens
  misc_RNA (1)...(19): siRNA sense strand
gggugugugacgagcccaa

SEQ ID NO: 2322321 - RNA, 19 nt, Homo sapiens
  misc_RNA (1)...(19): siRNA sense strand
agacauuagaugagggcau

SEQ ID NO: 2322322 - RNA, 19 nt, Homo sapiens
  misc_RNA (1)...(19): siRNA sense strand
acaucaagaaggagcuaaa

SEQ ID NO: 2322323 - RNA, 19 nt, Homo sapiens
  misc_RNA (1)...(19): siRNA sense strand
cuuuaagucuggaggcauu

SEQ ID NO: 2322324 - RNA, 19 nt, Homo sapiens
  misc_RNA (1)...(19): siRNA sense strand
caacuaaacaggaagggau

SEQ ID NO: 2322325 - RNA, 19 nt, Homo sapiens
  misc_RNA (1)...(19): siRNA sense strand
cugccaagugggugguaua

SEQ ID NO: 2322326 - RNA, 19 nt, Homo sapiens
  misc_RNA (1)...(19): siRNA sense strand
gcuuauggcaaccaagaaa

SEQ ID NO: 2322327 - RNA, 19 nt, Homo sapiens
  misc_RNA (1)...(19): siRNA sense strand
aggaagaggauguggauac

SEQ ID NO: 2322328 - RNA, 19 nt, Homo sapiens
  misc_RNA (1)...(19): siRNA sense strand
agaacaaguagcugauauu

SEQ ID NO: 2322329 - RNA, 19 nt, Homo sapiens
  misc_RNA (1)...(19): siRNA sense strand
gggagaaccccuuggauau

SEQ ID NO: 2322330 - RNA, 19 nt, Homo sapiens
  misc_RNA (1)...(19): siRNA sense strand
gaaugaagguguggcgaca

SEQ ID NO: 2322331 - RNA, 19 nt, Homo sapiens
  misc_RNA (1)...(19): siRNA sense strand
ccacaagauuacaagaaac

SEQ ID NO: 2322332 - RNA, 19 nt, Homo sapiens
  misc_RNA (1)...(19): siRNA sense strand
cuaaaauggcagugcguuu

SEQ ID NO: 2322333 - RNA, 19 nt, Homo sapiens
  misc_RNA (1)...(19): siRNA sense strand
guaaauauaaugaggaccu

SEQ ID NO: 2322334 - RNA, 19 nt, Homo sapiens
  misc_RNA (1)...(19): siRNA sense strand
aagaaauaguugaagguug

SEQ ID NO: 2322335 - RNA, 19 nt, Homo sapiens
  misc_RNA (1)...(19): siRNA sense strand
gcguuuagcuggugggcug

SEQ ID NO: 2322336 - RNA, 19 nt, Homo sapiens
  misc_RNA (1)...(19): siRNA sense strand
ucugagugguaaaggcaau

SEQ ID NO: 2322337 - RNA, 19 nt, Homo sapiens
  misc_RNA (1)...(19): siRNA sense strand
aggaagggauggaaggucu

SEQ ID NO: 2322338 - RNA, 19 nt, Homo sapiens
  misc_RNA (1)...(19): siRNA sense strand
aauuguuaucagaggacua

SEQ ID NO: 2322339 - RNA, 19 nt, Homo sapiens
  misc_RNA (1)...(19): siRNA sense strand
cagcuggccugguuugaua

SEQ ID NO: 2322340 - RNA, 19 nt, Homo sapiens
  misc_RNA (1)...(19): siRNA sense strand
gguccgcauggaagaaaua

SEQ ID NO: 2322341 - RNA, 19 nt, Homo sapiens
  misc_RNA (1)...(19): siRNA sense strand
gugaacuugcucaggacaa

SEQ ID NO: 2322342 - RNA, 19 nt, Homo sapiens
  misc_RNA (1)...(19): siRNA sense strand
gccaggaugccuuggguau

SEQ ID NO: 2322343 - RNA, 19 nt, Homo sapiens
  misc_RNA (1)...(19): siRNA sense strand
augagugggaacagggauu

SEQ ID NO: 2322344 - RNA, 19 nt, Homo sapiens
  misc_RNA (1)...(19): siRNA sense strand
ggccauggaaccagacaga

SEQ ID NO: 2322345 - RNA, 19 nt, Homo sapiens
  misc_RNA (1)...(19): siRNA sense strand
agaagcugguggaaugcaa

SEQ ID NO: 2322346 - RNA, 19 nt, Homo sapiens
  misc_RNA (1)...(19): siRNA sense strand
cauggaagaaauaguugaa

SEQ ID NO: 2322347 - RNA, 19 nt, Homo sapiens
  misc_RNA (1)...(19): siRNA sense strand
cgacagacugccuucaaau

SEQ ID NO: 2322348 - RNA, 19 nt, Homo sapiens
  misc_RNA (1)...(19): siRNA sense strand
cauacuggcuaguggugga

SEQ ID NO: 2322349 - RNA, 19 nt, Homo sapiens
  misc_RNA (1)...(19): siRNA sense strand
gcuccuucucugaguggua

SEQ ID NO: 2322350 - RNA, 19 nt, Homo sapiens
  misc_RNA (1)...(19): siRNA sense strand
uagcugauauugauggaca

SEQ ID NO: 2322351 - RNA, 19 nt, Homo sapiens
  misc_RNA (1)...(19): siRNA sense strand
gcauggaagaaauaguuga

SEQ ID NO: 2322352 - RNA, 19 nt, Homo sapiens
  misc_RNA (1)...(19): siRNA sense strand
ccgaauuguuaucagagga

SEQ ID NO: 2322353 - RNA, 19 nt, Homo sapiens
  misc_RNA (1)...(19): siRNA sense strand
gguuaauaaggcugcaguu

SEQ ID NO: 2322354 - RNA, 19 nt, Homo sapiens
  misc_RNA (1)...(19): siRNA sense strand
cuguuggauugauucgaaa

SEQ ID NO: 2322355 - RNA, 19 nt, Homo sapiens
  misc_RNA (1)...(19): siRNA sense strand
ugaucuuggacuugauauu

SEQ ID NO: 2322356 - RNA, 19 nt, Homo sapiens
  misc_RNA (1)...(19): siRNA sense strand
ugguggaaugcaagcuuua

SEQ ID NO: 2322357 - RNA, 19 nt, Homo sapiens
  misc_RNA (1)...(19): siRNA sense strand
caggauacccagcgccgua

SEQ ID NO: 2322358 - RNA, 19 nt, Homo sapiens
  misc_RNA (1)...(19): siRNA sense strand
cuuuauucucccauugaaa

SEQ ID NO: 2322359 - RNA, 19 nt, Homo sapiens
  misc_RNA (1)...(19): siRNA sense strand
gaggaagaggauguggaua

SEQ ID NO: 2322360 - RNA, 19 nt, Homo sapiens
  misc_RNA (1)...(19): siRNA sense strand
acaccaagaagcagagaug

SEQ ID NO: 2322361 - RNA, 19 nt, Homo sapiens
  misc_RNA (1)...(19): siRNA sense strand
gauuacaagaaacggcuuu

SEQ ID NO: 2322362 - RNA, 19 nt, Homo sapiens
  misc_RNA (1)...(19): siRNA sense strand
cugcaauauuaaaggugaa

SEQ ID NO: 2322363 - RNA, 19 nt, Homo sapiens
  misc_RNA (1)...(19): siRNA sense strand
caaaguaaauggaaggcuu

SEQ ID NO: 2322364 - RNA, 19 nt, Homo sapiens
  misc_RNA (1)...(19): siRNA sense strand
gcaagaggguuaugaucau

SEQ ID NO: 2322365 - RNA, 19 nt, Homo sapiens
  misc_RNA (1)...(19): siRNA sense strand
acugaagauccuuggaaaa

SEQ ID NO: 2322366 - RNA, 19 nt, Homo sapiens
  misc_RNA (1)...(19): siRNA sense strand
gaagaugagagcugggacu

SEQ ID NO: 2322367 - RNA, 19 nt, Homo sapiens
  misc_RNA (1)...(19): siRNA sense strand
gcugcaauauuaaagguga

SEQ ID NO: 2322368 - RNA, 19 nt, Homo sapiens
  misc_RNA (1)...(19): siRNA sense strand
uucgauugcaagaggguua

SEQ ID NO: 2322369 - RNA, 19 nt, Homo sapiens
  misc_RNA (1)...(19): siRNA sense strand
augacaguguugaacuaaa

SEQ ID NO: 2322370 - RNA, 19 nt, Homo sapiens
  misc_RNA (1)...(19): siRNA sense strand
agaucaaaguaaauggaag

SEQ ID NO: 2322371 - RNA, 19 nt, Homo sapiens
  misc_RNA (1)...(19): siRNA sense strand
gaucaaaguaaauggaagg

SEQ ID NO: 2322372 - RNA, 19 nt, Homo sapiens
  misc_RNA (1)...(19): siRNA sense strand
cuaaauaccugaaugcaug

SEQ ID NO: 2322373 - RNA, 19 nt, Homo sapiens
  misc_RNA (1)...(19): siRNA sense strand
auauuugggaacagaucaa

SEQ ID NO: 2322374 - RNA, 19 nt, Homo sapiens
  misc_RNA (1)...(19): siRNA sense strand
cugagaaauuugaaggaga

SEQ ID NO: 2322375 - RNA, 19 nt, Homo sapiens
  misc_RNA (1)...(19): siRNA sense strand
cugcguugucccugagaaa

SEQ ID NO: 2322376 - RNA, 19 nt, Homo sapiens
  misc_RNA (1)...(19): siRNA sense strand
ggaauggaguucaagcuca

SEQ ID NO: 2322377 - RNA, 19 nt, Homo sapiens
  misc_RNA (1)...(19): siRNA sense strand
ggcaauuucugguggccuu

SEQ ID NO: 2322378 - RNA, 19 nt, Homo sapiens
  misc_RNA (1)...(19): siRNA sense strand
cagaagaaccggccagcca

SEQ ID NO: 2322379 - RNA, 19 nt, Homo sapiens
  misc_RNA (1)...(19): siRNA sense strand
gggucaaugggcacaggua

SEQ ID NO: 2322380 - RNA, 19 nt, Homo sapiens
  misc_RNA (1)...(19): siRNA sense strand
cagccaugaauuacgacaa

SEQ ID NO: 2322381 - RNA, 19 nt, Homo sapiens
  misc_RNA (1)...(19): siRNA sense strand
gaagguggcuggugagcgu

SEQ ID NO: 2322382 - RNA, 19 nt, Homo sapiens
  misc_RNA (1)...(19): siRNA sense strand
gcgagaaggagcacgccaa

SEQ ID NO: 2322383 - RNA, 19 nt, Homo sapiens
  misc_RNA (1)...(19): siRNA sense strand
ccaagaagauccugcugga

SEQ ID NO: 2322384 - RNA, 19 nt, Homo sapiens
  misc_RNA (1)...(19): siRNA sense strand
gaagacaguuacagccaca

SEQ ID NO: 2322385 - RNA, 19 nt, Homo sapiens
  misc_RNA (1)...(19): siRNA sense strand
gaauugauggcgagaagga

SEQ ID NO: 2322386 - RNA, 19 nt, Homo sapiens
  misc_RNA (1)...(19): siRNA sense strand
uggcaggaauugauggcga

SEQ ID NO: 2322387 - RNA, 19 nt, Homo sapiens
  misc_RNA (1)...(19): siRNA sense strand
gaacaguaccagauccuga

SEQ ID NO: 2322388 - RNA, 19 nt, Homo sapiens
  misc_RNA (1)...(19): siRNA sense strand
caaggaaacaggaugcuga

SEQ ID NO: 2322389 - RNA, 19 nt, Homo sapiens
  misc_RNA (1)...(19): siRNA sense strand
aagaagauccugcuggaga

SEQ ID NO: 2322390 - RNA, 19 nt, Homo sapiens
  misc_RNA (1)...(19): siRNA sense strand
gggacagaucugcugguau

SEQ ID NO: 2322391 - RNA, 19 nt, Homo sapiens
  misc_RNA (1)...(19): siRNA sense strand
acgccaaugccaagaagau

SEQ ID NO: 2322392 - RNA, 19 nt, Homo sapiens
  misc_RNA (1)...(19): siRNA sense strand
gggugcugacugaggauga

SEQ ID NO: 2322393 - RNA, 19 nt, Homo sapiens
  misc_RNA (1)...(19): siRNA sense strand
cugacauccaggacaacaa

SEQ ID NO: 2322394 - RNA, 19 nt, Homo sapiens
  misc_RNA (1)...(19): siRNA sense strand
gcacggagcugaaggcuuu

SEQ ID NO: 2322395 - RNA, 19 nt, Homo sapiens
  misc_RNA (1)...(19): siRNA sense strand
uggcagaagcccuggcaau

SEQ ID NO: 2322396 - RNA, 19 nt, Homo sapiens
  misc_RNA (1)...(19): siRNA sense strand
ccuguaaccugcuggauga

SEQ ID NO: 2322397 - RNA, 19 nt, Homo sapiens
  misc_RNA (1)...(19): siRNA sense strand
ggacacccuuggaagcaaa

SEQ ID NO: 2322398 - RNA, 19 nt, Homo sapiens
  misc_RNA (1)...(19): siRNA sense strand
cugaagaaggcauugggua

SEQ ID NO: 2322399 - RNA, 19 nt, Homo sapiens
  misc_RNA (1)...(19): siRNA sense strand
cuuccuauggugugaauga

SEQ ID NO: 2322400 - RNA, 19 nt, Homo sapiens
  misc_RNA (1)...(19): siRNA sense strand
ucuuguugccauuggguuu

SEQ ID NO: 2322401 - RNA, 19 nt, Homo sapiens
  misc_RNA (1)...(19): siRNA sense strand
aggcggaugcagugaucua

SEQ ID NO: 2322402 - RNA, 19 nt, Homo sapiens
  misc_RNA (1)...(19): siRNA sense strand
gggcagugucagcgaggaa

SEQ ID NO: 2322403 - RNA, 19 nt, Homo sapiens
  misc_RNA (1)...(19): siRNA sense strand
aaguauggcugcugcccaa

SEQ ID NO: 2322404 - RNA, 19 nt, Homo sapiens
  misc_RNA (1)...(19): siRNA sense strand
ggacguggaguguggggaa

SEQ ID NO: 2322405 - RNA, 19 nt, Homo sapiens
  misc_RNA (1)...(19): siRNA sense strand
cuaacagggcaguggccuu

SEQ ID NO: 2322406 - RNA, 19 nt, Homo sapiens
  misc_RNA (1)...(19): siRNA sense strand
cugaaacaugugagagaaa

SEQ ID NO: 2322407 - RNA, 19 nt, Homo sapiens
  misc_RNA (1)...(19): siRNA sense strand
caaaaggaaacaagggcaa

SEQ ID NO: 2322408 - RNA, 19 nt, Homo sapiens
  misc_RNA (1)...(19): siRNA sense strand
ggaaaacauuuaaacgcaa

SEQ ID NO: 2322409 - RNA, 19 nt, Homo sapiens
  misc_RNA (1)...(19): siRNA sense strand
agaagaaaaugaagcucaa

SEQ ID NO: 2322410 - RNA, 19 nt, Homo sapiens
  misc_RNA (1)...(19): siRNA sense strand
ggaaacaagggcaaggcuu

SEQ ID NO: 2322411 - RNA, 19 nt, Homo sapiens
  misc_RNA (1)...(19): siRNA sense strand
aguacuuacccuuggcuaa

SEQ ID NO: 2322412 - RNA, 19 nt, Homo sapiens
  misc_RNA (1)...(19): siRNA sense strand
acgcaaacaugaaaaucaa

SEQ ID NO: 2322413 - RNA, 19 nt, Homo sapiens
  misc_RNA (1)...(19): siRNA sense strand
augugaaguaugccggaaa

SEQ ID NO: 2322414 - RNA, 19 nt, Homo sapiens
  misc_RNA (1)...(19): siRNA sense strand
gauccugacaagaagaaaa

SEQ ID NO: 2322415 - RNA, 19 nt, Homo sapiens
  misc_RNA (1)...(19): siRNA sense strand
gugucaaaacggagaguca

SEQ ID NO: 2322416 - RNA, 19 nt, Homo sapiens
  misc_RNA (1)...(19): siRNA sense strand
acaugcuggcuguggcaaa

SEQ ID NO: 2322417 - RNA, 19 nt, Homo sapiens
  misc_RNA (1)...(19): siRNA sense strand
agaaacauuuugaacgcaa

SEQ ID NO: 2322418 - RNA, 19 nt, Homo sapiens
  misc_RNA (1)...(19): siRNA sense strand
agaggaaauacuaugugaa

SEQ ID NO: 2322419 - RNA, 19 nt, Homo sapiens
  misc_RNA (1)...(19): siRNA sense strand
ccuuaagcaacacaugaaa

SEQ ID NO: 2322420 - RNA, 19 nt, Homo sapiens
  misc_RNA (1)...(19): siRNA sense strand
aaugaagcucaaagucaaa

SEQ ID NO: 2322421 - RNA, 19 nt, Homo sapiens
  misc_RNA (1)...(19): siRNA sense strand
aaacccauaaagaggaaau

SEQ ID NO: 2322422 - RNA, 19 nt, Homo sapiens
  misc_RNA (1)...(19): siRNA sense strand
cggaaaacauuuaaacgca

SEQ ID NO: 2322423 - RNA, 19 nt, Homo sapiens
  misc_RNA (1)...(19): siRNA sense strand
gcauuaagguggacagcca

SEQ ID NO: 2322424 - RNA, 19 nt, Homo sapiens
  misc_RNA (1)...(19): siRNA sense strand
ggaaccaccucaaugcaaa

SEQ ID NO: 2322425 - RNA, 19 nt, Homo sapiens
  misc_RNA (1)...(19): siRNA sense strand
cccgagaaauuauggaaaa

SEQ ID NO: 2322426 - RNA, 19 nt, Homo sapiens
  misc_RNA (1)...(19): siRNA sense strand
guaaauauccaucugguga

SEQ ID NO: 2322427 - RNA, 19 nt, Homo sapiens
  misc_RNA (1)...(19): siRNA sense strand
aauucuaaucucacggaua

SEQ ID NO: 2322428 - RNA, 19 nt, Homo sapiens
  misc_RNA (1)...(19): siRNA sense strand
uagaaauggacaaugguca

SEQ ID NO: 2322429 - RNA, 19 nt, Homo sapiens
  misc_RNA (1)...(19): siRNA sense strand
ccgagaaauuauggaaaau

SEQ ID NO: 2322430 - RNA, 19 nt, Homo sapiens
  misc_RNA (1)...(19): siRNA sense strand
gaguauccaacuugugcaa

SEQ ID NO: 2322431 - RNA, 19 nt, Homo sapiens
  misc_RNA (1)...(19): siRNA sense strand
auauccaucuggugagaga

SEQ ID NO: 2322432 - RNA, 19 nt, Homo sapiens
  misc_RNA (1)...(19): siRNA sense strand
ggguaacaagcgaauaaca

SEQ ID NO: 2322433 - RNA, 19 nt, Homo sapiens
  misc_RNA (1)...(19): siRNA sense strand
ucgagacagaugaguaaau

SEQ ID NO: 2322434 - RNA, 19 nt, Homo sapiens
  misc_RNA (1)...(19): siRNA sense strand
gggugcaggcuguggucua

SEQ ID NO: 2322435 - RNA, 19 nt, Homo sapiens
  misc_RNA (1)...(19): siRNA sense strand
gaaaccagaucaagcccaa

SEQ ID NO: 2322436 - RNA, 19 nt, Homo sapiens
  misc_RNA (1)...(19): siRNA sense strand
ggcaagaucuguaccguga

SEQ ID NO: 2322437 - RNA, 19 nt, Homo sapiens
  misc_RNA (1)...(19): siRNA sense strand
cagaauacauccagccugu

SEQ ID NO: 2322438 - RNA, 19 nt, Homo sapiens
  misc_RNA (1)...(19): siRNA sense strand
ggcucauggucuuugacaa

SEQ ID NO: 2322439 - RNA, 19 nt, Homo sapiens
  misc_RNA (1)...(19): siRNA sense strand
cauaaagacucacuccgaa

SEQ ID NO: 2322440 - RNA, 19 nt, Homo sapiens
  misc_RNA (1)...(19): siRNA sense strand
gcugcgaggagaugggcuu

SEQ ID NO: 2322441 - RNA, 19 nt, Homo sapiens
  misc_RNA (1)...(19): siRNA sense strand
acagcgaggagaacagcaa

SEQ ID NO: 2322442 - RNA, 19 nt, Homo sapiens
  misc_RNA (1)...(19): siRNA sense strand
gggugcaggcuguggucua

SEQ ID NO: 2322443 - RNA, 19 nt, Homo sapiens
  misc_RNA (1)...(19): siRNA sense strand
gaaaccagaucaagcccaa

SEQ ID NO: 2322444 - RNA, 19 nt, Homo sapiens
  misc_RNA (1)...(19): siRNA sense strand
ggcaagaucuguaccguga

SEQ ID NO: 2322445 - RNA, 19 nt, Homo sapiens
  misc_RNA (1)...(19): siRNA sense strand
cagaauacauccagccugu

SEQ ID NO: 2322446 - RNA, 19 nt, Homo sapiens
  misc_RNA (1)...(19): siRNA sense strand
ggcucauggucuuugacaa

SEQ ID NO: 2322447 - RNA, 19 nt, Homo sapiens
  misc_RNA (1)...(19): siRNA sense strand
cauaaagacucacuccgaa

SEQ ID NO: 2322448 - RNA, 19 nt, Homo sapiens
  misc_RNA (1)...(19): siRNA sense strand
gcugcgaggagaugggcuu

SEQ ID NO: 2322449 - RNA, 19 nt, Homo sapiens
  misc_RNA (1)...(19): siRNA sense strand
acagcgaggagaacagcaa

SEQ ID NO: 2322450 - RNA, 19 nt, Homo sapiens
  misc_RNA (1)...(19): siRNA sense strand
cuauuacacgccagggaaa

SEQ ID NO: 2322451 - RNA, 19 nt, Homo sapiens
  misc_RNA (1)...(19): siRNA sense strand
gcaaauacaagaagagcuc

SEQ ID NO: 2322452 - RNA, 19 nt, Homo sapiens
  misc_RNA (1)...(19): siRNA sense strand
accagugacaagugggaaa

SEQ ID NO: 2322453 - RNA, 19 nt, Homo sapiens
  misc_RNA (1)...(19): siRNA sense strand
augccuaacuacaagaaaa

SEQ ID NO: 2322454 - RNA, 19 nt, Homo sapiens
  misc_RNA (1)...(19): siRNA sense strand
aagacuacggccaggacua

SEQ ID NO: 2322455 - RNA, 19 nt, Homo sapiens
  misc_RNA (1)...(19): siRNA sense strand
cugagguacaggaagacua

SEQ ID NO: 2322456 - RNA, 19 nt, Homo sapiens
  misc_RNA (1)...(19): siRNA sense strand
gcaaguaucuggaugagcu

SEQ ID NO: 2322457 - RNA, 19 nt, Homo sapiens
  misc_RNA (1)...(19): siRNA sense strand
cuguggagcuggauggucu

SEQ ID NO: 2322458 - RNA, 19 nt, Homo sapiens
  misc_RNA (1)...(19): siRNA sense strand
aauuguuaccuguggauca

SEQ ID NO: 2322459 - RNA, 19 nt, Homo sapiens
  misc_RNA (1)...(19): siRNA sense strand
gacugugggcugugaucaa

SEQ ID NO: 2322460 - RNA, 19 nt, Homo sapiens
  misc_RNA (1)...(19): siRNA sense strand
acaucuuagcacagcggaa

SEQ ID NO: 2322461 - RNA, 19 nt, Homo sapiens
  misc_RNA (1)...(19): siRNA sense strand
gguccuaagaaucguucaa

SEQ ID NO: 2322462 - RNA, 19 nt, Homo sapiens
  misc_RNA (1)...(19): siRNA sense strand
ugagcaggguacagacaca

SEQ ID NO: 2322463 - RNA, 19 nt, Homo sapiens
  misc_RNA (1)...(19): siRNA sense strand
ggauggacaaggagacaac

SEQ ID NO: 2322464 - RNA, 19 nt, Homo sapiens
  misc_RNA (1)...(19): siRNA sense strand
gguccuaagaaucguucaa

SEQ ID NO: 2322465 - RNA, 19 nt, Homo sapiens
  misc_RNA (1)...(19): siRNA sense strand
ugagcaggguacagacaca

SEQ ID NO: 2322466 - RNA, 19 nt, Homo sapiens
  misc_RNA (1)...(19): siRNA sense strand
ggauggacaaggagacaac

SEQ ID NO: 2322467 - RNA, 19 nt, Homo sapiens
  misc_RNA (1)...(19): siRNA sense strand
caagaaagauuaaggagga

SEQ ID NO: 2322468 - RNA, 19 nt, Homo sapiens
  misc_RNA (1)...(19): siRNA sense strand
agauuaaggaggaaggaau

SEQ ID NO: 2322469 - RNA, 19 nt, Homo sapiens
  misc_RNA (1)...(19): siRNA sense strand
aggaggaguuugauggcaa

SEQ ID NO: 2322470 - RNA, 19 nt, Homo sapiens
  misc_RNA (1)...(19): siRNA sense strand
gagaagaaauacagcccuu

SEQ ID NO: 2322471 - RNA, 19 nt, Homo sapiens
  misc_RNA (1)...(19): siRNA sense strand
cugaguaacaggaggacuu

SEQ ID NO: 2322472 - RNA, 19 nt, Homo sapiens
  misc_RNA (1)...(19): siRNA sense strand
aagaaagauuaaggaggaa

SEQ ID NO: 2322473 - RNA, 19 nt, Homo sapiens
  misc_RNA (1)...(19): siRNA sense strand
cuauccugacugugagaaa

SEQ ID NO: 2322474 - RNA, 19 nt, Homo sapiens
  misc_RNA (1)...(19): siRNA sense strand
gauaauggcacaaauggga

SEQ ID NO: 2322475 - RNA, 19 nt, Homo sapiens
  misc_RNA (1)...(19): siRNA sense strand
gagaagaaauacagcgacu

SEQ ID NO: 2322476 - RNA, 19 nt, Homo sapiens
  misc_RNA (1)...(19): siRNA sense strand
accugaaagagaagaaaua

SEQ ID NO: 2322477 - RNA, 19 nt, Homo sapiens
  misc_RNA (1)...(19): siRNA sense strand
cugaaagagaagaaauaca

SEQ ID NO: 2322478 - RNA, 19 nt, Homo sapiens
  misc_RNA (1)...(19): siRNA sense strand
agguagugggagaaggaga

SEQ ID NO: 2322479 - RNA, 19 nt, Homo sapiens
  misc_RNA (1)...(19): siRNA sense strand
aaguaaagauagagaccug

SEQ ID NO: 2322480 - RNA, 19 nt, Homo sapiens
  misc_RNA (1)...(19): siRNA sense strand
caaacaugcaagaaagacu

SEQ ID NO: 2322481 - RNA, 19 nt, Homo sapiens
  misc_RNA (1)...(19): siRNA sense strand
cagcagaucuucagccucu

SEQ ID NO: 2322482 - RNA, 19 nt, Homo sapiens
  misc_RNA (1)...(19): siRNA sense strand
ggaaauagcucaugggaac

SEQ ID NO: 2322483 - RNA, 19 nt, Homo sapiens
  misc_RNA (1)...(19): siRNA sense strand
ggacauggcucgagggaag

SEQ ID NO: 2322484 - RNA, 19 nt, Homo sapiens
  misc_RNA (1)...(19): siRNA sense strand
aggaaaugguggugggcca

SEQ ID NO: 2322485 - RNA, 19 nt, Homo sapiens
  misc_RNA (1)...(19): siRNA sense strand
cuuucaagcaucagguaaa

SEQ ID NO: 2322486 - RNA, 19 nt, Homo sapiens
  misc_RNA (1)...(19): siRNA sense strand
cuacaucaacagaggaaau

SEQ ID NO: 2322487 - RNA, 19 nt, Homo sapiens
  misc_RNA (1)...(19): siRNA sense strand
ccuccaaccuccaggccaa

SEQ ID NO: 2322488 - RNA, 19 nt, Homo sapiens
  misc_RNA (1)...(19): siRNA sense strand
cggaaagaccugccgggaa

SEQ ID NO: 2322489 - RNA, 19 nt, Homo sapiens
  misc_RNA (1)...(19): siRNA sense strand
ggaaagaccugccgggaag

SEQ ID NO: 2322490 - RNA, 19 nt, Homo sapiens
  misc_RNA (1)...(19): siRNA sense strand
gcgccaaggugaaggugga

SEQ ID NO: 2322491 - RNA, 19 nt, Homo sapiens
  misc_RNA (1)...(19): siRNA sense strand
agaaguacggagaggaaca

SEQ ID NO: 2322492 - RNA, 19 nt, Homo sapiens
  misc_RNA (1)...(19): siRNA sense strand
ggacaaaggcaucggcaag

SEQ ID NO: 2322493 - RNA, 19 nt, Homo sapiens
  misc_RNA (1)...(19): siRNA sense strand
agaucagggaugagggaca

SEQ ID NO: 2322494 - RNA, 19 nt, Homo sapiens
  misc_RNA (1)...(19): siRNA sense strand
uggaaauagcucaugggaa

SEQ ID NO: 2322495 - RNA, 19 nt, Homo sapiens
  misc_RNA (1)...(19): siRNA sense strand
uuaucgaagcugagaagaa

SEQ ID NO: 2322496 - RNA, 19 nt, Homo sapiens
  misc_RNA (1)...(19): siRNA sense strand
gcugcugaacacagaaaua

SEQ ID NO: 2322497 - RNA, 19 nt, Homo sapiens
  misc_RNA (1)...(19): siRNA sense strand
cuggagaggaggagaggga

SEQ ID NO: 2322498 - RNA, 19 nt, Homo sapiens
  misc_RNA (1)...(19): siRNA sense strand
ucaaaugcagcgugggauu

SEQ ID NO: 2322499 - RNA, 19 nt, Homo sapiens
  misc_RNA (1)...(19): siRNA sense strand
ucaguuuguuggugggaau

SEQ ID NO: 2322500 - RNA, 19 nt, Homo sapiens
  misc_RNA (1)...(19): siRNA sense strand
agaaggaggagaugggcau

SEQ ID NO: 2322501 - RNA, 19 nt, Homo sapiens
  misc_RNA (1)...(19): siRNA sense strand
aaguaugaauucagcguga

SEQ ID NO: 2322502 - RNA, 19 nt, Homo sapiens
  misc_RNA (1)...(19): siRNA sense strand
ggaaagagaaugaagacag

SEQ ID NO: 2322503 - RNA, 19 nt, Homo sapiens
  misc_RNA (1)...(19): siRNA sense strand
cggacaacaccuauuuaaa

SEQ ID NO: 2322504 - RNA, 19 nt, Homo sapiens
  misc_RNA (1)...(19): siRNA sense strand
ggagaggaggagagggaac

SEQ ID NO: 2322505 - RNA, 19 nt, Homo sapiens
  misc_RNA (1)...(19): siRNA sense strand
gugcugaaccuuacggaca

SEQ ID NO: 2322506 - RNA, 19 nt, Homo sapiens
  misc_RNA (1)...(19): siRNA sense strand
auaagaagaaguacggaga

SEQ ID NO: 2322507 - RNA, 19 nt, Homo sapiens
  misc_RNA (1)...(19): siRNA sense strand
ccuaagggugguggaaaua

SEQ ID NO: 2322508 - RNA, 19 nt, Homo sapiens
  misc_RNA (1)...(19): siRNA sense strand
gaugggugcuccaggguca

SEQ ID NO: 2322509 - RNA, 19 nt, Homo sapiens
  misc_RNA (1)...(19): siRNA sense strand
ccaucaaagugcugaaccu

SEQ ID NO: 2322510 - RNA, 19 nt, Homo sapiens
  misc_RNA (1)...(19): siRNA sense strand
aagaaauuaucgaagcuga

SEQ ID NO: 2322511 - RNA, 19 nt, Homo sapiens
  misc_RNA (1)...(19): siRNA sense strand
gaagauaaauccagugcuc

SEQ ID NO: 2322512 - RNA, 19 nt, Homo sapiens
  misc_RNA (1)...(19): siRNA sense strand
cuugcuaugaagaguauaa

SEQ ID NO: 2322513 - RNA, 19 nt, Homo sapiens
  misc_RNA (1)...(19): siRNA sense strand
aggacaaaggcaucggcaa

SEQ ID NO: 2322514 - RNA, 19 nt, Homo sapiens
  misc_RNA (1)...(19): siRNA sense strand
acacguuccagaagagauu

SEQ ID NO: 2322515 - RNA, 19 nt, Homo sapiens
  misc_RNA (1)...(19): siRNA sense strand
caccaaaggcagauuccaa

SEQ ID NO: 2322516 - RNA, 19 nt, Homo sapiens
  misc_RNA (1)...(19): siRNA sense strand
ugggccaagagaagggaaa

SEQ ID NO: 2322517 - RNA, 19 nt, Homo sapiens
  misc_RNA (1)...(19): siRNA sense strand
guccauaucgggaggcauu

SEQ ID NO: 2322518 - RNA, 19 nt, Homo sapiens
  misc_RNA (1)...(19): siRNA sense strand
uggcaaacacguuccagaa

SEQ ID NO: 2322519 - RNA, 19 nt, Homo sapiens
  misc_RNA (1)...(19): siRNA sense strand
acuuugugcugcugggaga

SEQ ID NO: 2322520 - RNA, 19 nt, Homo sapiens
  misc_RNA (1)...(19): siRNA sense strand
gcaugugacuggagaggag

SEQ ID NO: 2322521 - RNA, 19 nt, Homo sapiens
  misc_RNA (1)...(19): siRNA sense strand
aagagauuggccugaauua

SEQ ID NO: 2322522 - RNA, 19 nt, Homo sapiens
  misc_RNA (1)...(19): siRNA sense strand
ccucaaaugcagcguggga

SEQ ID NO: 2322523 - RNA, 19 nt, Homo sapiens
  misc_RNA (1)...(19): siRNA sense strand
aagucguacuauagacauu

SEQ ID NO: 2322524 - RNA, 19 nt, Homo sapiens
  misc_RNA (1)...(19): siRNA sense strand
ucaugaggucaaagucaaa

SEQ ID NO: 2322525 - RNA, 19 nt, Homo sapiens
  misc_RNA (1)...(19): siRNA sense strand
ggaaaugguggugggccaa

SEQ ID NO: 2322526 - RNA, 19 nt, Homo sapiens
  misc_RNA (1)...(19): siRNA sense strand
acgacgaagugaucaugaa

SEQ ID NO: 2322527 - RNA, 19 nt, Homo sapiens
  misc_RNA (1)...(19): siRNA sense strand
gcuucagcuuccauggcaa

SEQ ID NO: 2322528 - RNA, 19 nt, Homo sapiens
  misc_RNA (1)...(19): siRNA sense strand
ccucaguacucaaugaaac

SEQ ID NO: 2322529 - RNA, 19 nt, Homo sapiens
  misc_RNA (1)...(19): siRNA sense strand
cggaaagagaaugaagaca

SEQ ID NO: 2322530 - RNA, 19 nt, Homo sapiens
  misc_RNA (1)...(19): siRNA sense strand
cauugauauggauggaaau

SEQ ID NO: 2322531 - RNA, 19 nt, Homo sapiens
  misc_RNA (1)...(19): siRNA sense strand
agaagagauuggccugaau

SEQ ID NO: 2322532 - RNA, 19 nt, Homo sapiens
  misc_RNA (1)...(19): siRNA sense strand
acauuuacaugcugcugaa

SEQ ID NO: 2322533 - RNA, 19 nt, Homo sapiens
  misc_RNA (1)...(19): siRNA sense strand
caaugaaacugucugggca

SEQ ID NO: 2322534 - RNA, 19 nt, Homo sapiens
  misc_RNA (1)...(19): siRNA sense strand
cagaagaggugacgguggu

SEQ ID NO: 2322535 - RNA, 19 nt, Homo sapiens
  misc_RNA (1)...(19): siRNA sense strand
gaagaguauaagaagaagu

SEQ ID NO: 2322536 - RNA, 19 nt, Homo sapiens
  misc_RNA (1)...(19): siRNA sense strand
gaagguggauccugcccua

SEQ ID NO: 2322537 - RNA, 19 nt, Homo sapiens
  misc_RNA (1)...(19): siRNA sense strand
ggaucaucgccaucaguuu

SEQ ID NO: 2322538 - RNA, 19 nt, Homo sapiens
  misc_RNA (1)...(19): siRNA sense strand
ggacaaaagauugcccaaa

SEQ ID NO: 2322539 - RNA, 19 nt, Homo sapiens
  misc_RNA (1)...(19): siRNA sense strand
gcaucaaaguggagcgcaa

SEQ ID NO: 2322540 - RNA, 19 nt, Homo sapiens
  misc_RNA (1)...(19): siRNA sense strand
uggaagaccaagagcgcau

SEQ ID NO: 2322541 - RNA, 19 nt, Homo sapiens
  misc_RNA (1)...(19): siRNA sense strand
caucaacauggaagaccaa

SEQ ID NO: 2322542 - RNA, 19 nt, Homo sapiens
  misc_RNA (1)...(19): siRNA sense strand
agcggaagcuggagcgcau

SEQ ID NO: 2322543 - RNA, 19 nt, Homo sapiens
  misc_RNA (1)...(19): siRNA sense strand
ccaagugccggaagcggaa

SEQ ID NO: 2322544 - RNA, 19 nt, Homo sapiens
  misc_RNA (1)...(19): siRNA sense strand
gccuggaggacaaggugaa

SEQ ID NO: 2322545 - RNA, 19 nt, Homo sapiens
  misc_RNA (1)...(19): siRNA sense strand
cggagaagaacgugguuaa

SEQ ID NO: 2322546 - RNA, 19 nt, Homo sapiens
  misc_RNA (1)...(19): siRNA sense strand
gugcaaaaguggaggcauu

SEQ ID NO: 2322547 - RNA, 19 nt, Homo sapiens
  misc_RNA (1)...(19): siRNA sense strand
ugguggaacauuugggaaa

SEQ ID NO: 2322548 - RNA, 19 nt, Homo sapiens
  misc_RNA (1)...(19): siRNA sense strand
ggaauugacaagacagcaa

SEQ ID NO: 2322549 - RNA, 19 nt, Homo sapiens
  misc_RNA (1)...(19): siRNA sense strand
cagcaagaacugaacuaaa

SEQ ID NO: 2322550 - RNA, 19 nt, Homo sapiens
  misc_RNA (1)...(19): siRNA sense strand
cuucgaagcaucagcauaa

SEQ ID NO: 2322551 - RNA, 19 nt, Homo sapiens
  misc_RNA (1)...(19): siRNA sense strand
gugaaagagacacaggaaa

SEQ ID NO: 2322552 - RNA, 19 nt, Homo sapiens
  misc_RNA (1)...(19): siRNA sense strand
uuucagaguugguggaaca

SEQ ID NO: 2322553 - RNA, 19 nt, Homo sapiens
  misc_RNA (1)...(19): siRNA sense strand
cgauuauggaagugaguga

SEQ ID NO: 2322554 - RNA, 19 nt, Homo sapiens
  misc_RNA (1)...(19): siRNA sense strand
cuggauuuguggaggagaa

SEQ ID NO: 2322555 - RNA, 19 nt, Homo sapiens
  misc_RNA (1)...(19): siRNA sense strand
gggagugagaugaagaaau

SEQ ID NO: 2322556 - RNA, 19 nt, Homo sapiens
  misc_RNA (1)...(19): siRNA sense strand
gggagaggagagaggguga

SEQ ID NO: 2322557 - RNA, 19 nt, Homo sapiens
  misc_RNA (1)...(19): siRNA sense strand
gguuaaaaucugugacuuu

SEQ ID NO: 2322558 - RNA, 19 nt, Homo sapiens
  misc_RNA (1)...(19): siRNA sense strand
ugauguagaagaagaggaa

SEQ ID NO: 2322559 - RNA, 19 nt, Homo sapiens
  misc_RNA (1)...(19): siRNA sense strand
ucagaguggcagugagcaa

SEQ ID NO: 2322560 - RNA, 19 nt, Homo sapiens
  misc_RNA (1)...(19): siRNA sense strand
ccaaauuccauuaugacaa

SEQ ID NO: 2322561 - RNA, 19 nt, Homo sapiens
  misc_RNA (1)...(19): siRNA sense strand
cuuaaauuguacagcaaga

SEQ ID NO: 2322562 - RNA, 19 nt, Homo sapiens
  misc_RNA (1)...(19): siRNA sense strand
gaaaagacgaacuuggaaa

SEQ ID NO: 2322563 - RNA, 19 nt, Homo sapiens
  misc_RNA (1)...(19): siRNA sense strand
gauuauacuacaccagaaa

SEQ ID NO: 2322564 - RNA, 19 nt, Homo sapiens
  misc_RNA (1)...(19): siRNA sense strand
acucaaacgcugacaugua

SEQ ID NO: 2322565 - RNA, 19 nt, Homo sapiens
  misc_RNA (1)...(19): siRNA sense strand
uaucagagacuuugagcau

SEQ ID NO: 2322566 - RNA, 19 nt, Homo sapiens
  misc_RNA (1)...(19): siRNA sense strand
gcucaagacaggaagacca

SEQ ID NO: 2322567 - RNA, 19 nt, Homo sapiens
  misc_RNA (1)...(19): siRNA sense strand
cuggagaaucagacgacaa

SEQ ID NO: 2322568 - RNA, 19 nt, Homo sapiens
  misc_RNA (1)...(19): siRNA sense strand
cuuggauacucuuuggaaa

SEQ ID NO: 2322569 - RNA, 19 nt, Homo sapiens
  misc_RNA (1)...(19): siRNA sense strand
ucauggugauuguggaauu

SEQ ID NO: 2322570 - RNA, 19 nt, Homo sapiens
  misc_RNA (1)...(19): siRNA sense strand
guauggaggaggaggaagu

SEQ ID NO: 2322571 - RNA, 19 nt, Homo sapiens
  misc_RNA (1)...(19): siRNA sense strand
cugcagaacaguaagcgaa

SEQ ID NO: 2322572 - RNA, 19 nt, Homo sapiens
  misc_RNA (1)...(19): siRNA sense strand
acuuguaaaccgagaccua

SEQ ID NO: 2322573 - RNA, 19 nt, Homo sapiens
  misc_RNA (1)...(19): siRNA sense strand
cagaacaguaagcgaaaga

SEQ ID NO: 2322574 - RNA, 19 nt, Homo sapiens
  misc_RNA (1)...(19): siRNA sense strand
uguagaagacucaggcauu

SEQ ID NO: 2322575 - RNA, 19 nt, Homo sapiens
  misc_RNA (1)...(19): siRNA sense strand
agaagaaccagaaguaaaa

SEQ ID NO: 2322576 - RNA, 19 nt, Homo sapiens
  misc_RNA (1)...(19): siRNA sense strand
gucuuaaauuguacagcaa

SEQ ID NO: 2322577 - RNA, 19 nt, Homo sapiens
  misc_RNA (1)...(19): siRNA sense strand
cugcgaaguaccuugguua

SEQ ID NO: 2322578 - RNA, 19 nt, Homo sapiens
  misc_RNA (1)...(19): siRNA sense strand
ggacaguagcagucaaaau

SEQ ID NO: 2322579 - RNA, 19 nt, Homo sapiens
  misc_RNA (1)...(19): siRNA sense strand
ccugaugguaacagaauuu

SEQ ID NO: 2322580 - RNA, 19 nt, Homo sapiens
  misc_RNA (1)...(19): siRNA sense strand
gaagugagugaaagagaca

SEQ ID NO: 2322581 - RNA, 19 nt, Homo sapiens
  misc_RNA (1)...(19): siRNA sense strand
ggucaacaaagucgggaga

SEQ ID NO: 2322582 - RNA, 19 nt, Homo sapiens
  misc_RNA (1)...(19): siRNA sense strand
cagaaauguaccagaccau

SEQ ID NO: 2322583 - RNA, 19 nt, Homo sapiens
  misc_RNA (1)...(19): siRNA sense strand
agaagaacgugguuaaaau

SEQ ID NO: 2322584 - RNA, 19 nt, Homo sapiens
  misc_RNA (1)...(19): siRNA sense strand
aaguaaucccagaugacaa

SEQ ID NO: 2322585 - RNA, 19 nt, Homo sapiens
  misc_RNA (1)...(19): siRNA sense strand
caaaggagaagcagagcca

SEQ ID NO: 2322586 - RNA, 19 nt, Homo sapiens
  misc_RNA (1)...(19): siRNA sense strand
ccacugagcaggagagcgu

SEQ ID NO: 2322587 - RNA, 19 nt, Homo sapiens
  misc_RNA (1)...(19): siRNA sense strand
ucuaauagcacaaaugaca

SEQ ID NO: 2322588 - RNA, 19 nt, Homo sapiens
  misc_RNA (1)...(19): siRNA sense strand
agacgaacuuggaaaucau

SEQ ID NO: 2322589 - RNA, 19 nt, Homo sapiens
  misc_RNA (1)...(19): siRNA sense strand
aagcagaugccuuuggaau

SEQ ID NO: 2322590 - RNA, 19 nt, Homo sapiens
  misc_RNA (1)...(19): siRNA sense strand
gagcaaaggguggagguga

SEQ ID NO: 2322591 - RNA, 19 nt, Homo sapiens
  misc_RNA (1)...(19): siRNA sense strand
uguacauuacugagaacaa

SEQ ID NO: 2322592 - RNA, 19 nt, Homo sapiens
  misc_RNA (1)...(19): siRNA sense strand
gauuuguuccugaugguaa

SEQ ID NO: 2322593 - RNA, 19 nt, Homo sapiens
  misc_RNA (1)...(19): siRNA sense strand
guacaaaugugaagcgguc

SEQ ID NO: 2322594 - RNA, 19 nt, Homo sapiens
  misc_RNA (1)...(19): siRNA sense strand
ugaaagaaggaacuagaau

SEQ ID NO: 2322595 - RNA, 19 nt, Homo sapiens
  misc_RNA (1)...(19): siRNA sense strand
guggaauggugcccagcaa

SEQ ID NO: 2322596 - RNA, 19 nt, Homo sapiens
  misc_RNA (1)...(19): siRNA sense strand
agugaaagagacacaggaa

SEQ ID NO: 2322597 - RNA, 19 nt, Homo sapiens
  misc_RNA (1)...(19): siRNA sense strand
ccuuaugaugccagcaaau

SEQ ID NO: 2322598 - RNA, 19 nt, Homo sapiens
  misc_RNA (1)...(19): siRNA sense strand
gaugacaaccagacggaca

SEQ ID NO: 2322599 - RNA, 19 nt, Homo sapiens
  misc_RNA (1)...(19): siRNA sense strand
cguuguaggguauaggauu

SEQ ID NO: 2322600 - RNA, 19 nt, Homo sapiens
  misc_RNA (1)...(19): siRNA sense strand
uggaagugagugaaagaga

SEQ ID NO: 2322601 - RNA, 19 nt, Homo sapiens
  misc_RNA (1)...(19): siRNA sense strand
ggacagagggacuuggacu

SEQ ID NO: 2322602 - RNA, 19 nt, Homo sapiens
  misc_RNA (1)...(19): siRNA sense strand
acaaaugugaagcggucaa

SEQ ID NO: 2322603 - RNA, 19 nt, Homo sapiens
  misc_RNA (1)...(19): siRNA sense strand
guuuaaagauaaugagacc

SEQ ID NO: 2322604 - RNA, 19 nt, Homo sapiens
  misc_RNA (1)...(19): siRNA sense strand
gcucuggauuuguggagga

SEQ ID NO: 2322605 - RNA, 19 nt, Homo sapiens
  misc_RNA (1)...(19): siRNA sense strand
agacaggaagaccaagaaa

SEQ ID NO: 2322606 - RNA, 19 nt, Homo sapiens
  misc_RNA (1)...(19): siRNA sense strand
gagugaggaaggaggacga

SEQ ID NO: 2322607 - RNA, 19 nt, Homo sapiens
  misc_RNA (1)...(19): siRNA sense strand
cgggauauuuauaaagauc

SEQ ID NO: 2322608 - RNA, 19 nt, Homo sapiens
  misc_RNA (1)...(19): siRNA sense strand
gcauaagaaacuuguaaac

SEQ ID NO: 2322609 - RNA, 19 nt, Homo sapiens
  misc_RNA (1)...(19): siRNA sense strand
ccuggauauuaaaggaauu

SEQ ID NO: 2322610 - RNA, 19 nt, Homo sapiens
  misc_RNA (1)...(19): siRNA sense strand
aguaauaagcuuuggugca

SEQ ID NO: 2322611 - RNA, 19 nt, Homo sapiens
  misc_RNA (1)...(19): siRNA sense strand
aaacaaugaaagcacggaa

SEQ ID NO: 2322612 - RNA, 19 nt, Homo sapiens
  misc_RNA (1)...(19): siRNA sense strand
aagccauaguugaaaacaa

SEQ ID NO: 2322613 - RNA, 19 nt, Homo sapiens
  misc_RNA (1)...(19): siRNA sense strand
ccaucugggaagagguaua

SEQ ID NO: 2322614 - RNA, 19 nt, Homo sapiens
  misc_RNA (1)...(19): siRNA sense strand
uggaugaggacgagggcuu

SEQ ID NO: 2322615 - RNA, 19 nt, Homo sapiens
  misc_RNA (1)...(19): siRNA sense strand
accaagagucggugggaga

SEQ ID NO: 2322616 - RNA, 19 nt, Homo sapiens
  misc_RNA (1)...(19): siRNA sense strand
acgaaaaggaggacaguga

SEQ ID NO: 2322617 - RNA, 19 nt, Homo sapiens
  misc_RNA (1)...(19): siRNA sense strand
aguaacagugugaagaaau

SEQ ID NO: 2322618 - RNA, 19 nt, Homo sapiens
  misc_RNA (1)...(19): siRNA sense strand
gguauaaguuuguggccac

SEQ ID NO: 2322619 - RNA, 19 nt, Homo sapiens
  misc_RNA (1)...(19): siRNA sense strand
aggaggaacaggaggagca

SEQ ID NO: 2322620 - RNA, 19 nt, Homo sapiens
  misc_RNA (1)...(19): siRNA sense strand
ugaagaaaucccagccaga

SEQ ID NO: 2322621 - RNA, 19 nt, Homo sapiens
  misc_RNA (1)...(19): siRNA sense strand
gggagacgggugagguaca

SEQ ID NO: 2322622 - RNA, 19 nt, Homo sapiens
  misc_RNA (1)...(19): siRNA sense strand
aggaacaggaggagcacca

SEQ ID NO: 2322623 - RNA, 19 nt, Homo sapiens
  misc_RNA (1)...(19): siRNA sense strand
uggcuggagacaugagcaa

SEQ ID NO: 2322624 - RNA, 19 nt, Homo sapiens
  misc_RNA (1)...(19): siRNA sense strand
aggaguugagucugagcaa

SEQ ID NO: 2322625 - RNA, 19 nt, Homo sapiens
  misc_RNA (1)...(19): siRNA sense strand
gggcugaggaggaacagga

SEQ ID NO: 2322626 - RNA, 19 nt, Homo sapiens
  misc_RNA (1)...(19): siRNA sense strand
cugaacuggaugaggacga

SEQ ID NO: 2322627 - RNA, 19 nt, Homo sapiens
  misc_RNA (1)...(19): siRNA sense strand
cugaggaggaacaggagga

SEQ ID NO: 2322628 - RNA, 19 nt, Homo sapiens
  misc_RNA (1)...(19): siRNA sense strand
gaacaauacacccaggcca

SEQ ID NO: 2322629 - RNA, 19 nt, Homo sapiens
  misc_RNA (1)...(19): siRNA sense strand
caucaacaauuaagagcac

SEQ ID NO: 2322630 - RNA, 19 nt, Homo sapiens
  misc_RNA (1)...(19): siRNA sense strand
aguggagcguggaggacga

SEQ ID NO: 2322631 - RNA, 19 nt, Homo sapiens
  misc_RNA (1)...(19): siRNA sense strand
gcaaauaaguucucaccua

SEQ ID NO: 2322632 - RNA, 19 nt, Homo sapiens
  misc_RNA (1)...(19): siRNA sense strand
ugacuaaagaagaugguaa

SEQ ID NO: 2322633 - RNA, 19 nt, Homo sapiens
  misc_RNA (1)...(19): siRNA sense strand
gaugaaacucagagagaca

SEQ ID NO: 2322634 - RNA, 19 nt, Homo sapiens
  misc_RNA (1)...(19): siRNA sense strand
ggagaagauaauuggaaau

SEQ ID NO: 2322635 - RNA, 19 nt, Homo sapiens
  misc_RNA (1)...(19): siRNA sense strand
cugguuaauuugagaacaa

SEQ ID NO: 2322636 - RNA, 19 nt, Homo sapiens
  misc_RNA (1)...(19): siRNA sense strand
aguagaagauagcggaauu

SEQ ID NO: 2322637 - RNA, 19 nt, Homo sapiens
  misc_RNA (1)...(19): siRNA sense strand
gacuaaagaagaugguaaa

SEQ ID NO: 2322638 - RNA, 19 nt, Homo sapiens
  misc_RNA (1)...(19): siRNA sense strand
agggaaagauauugguaca

SEQ ID NO: 2322639 - RNA, 19 nt, Homo sapiens
  misc_RNA (1)...(19): siRNA sense strand
cguuaaugguuuuggagaa

SEQ ID NO: 2322640 - RNA, 19 nt, Homo sapiens
  misc_RNA (1)...(19): siRNA sense strand
cagaugaaacucagagaga

SEQ ID NO: 2322641 - RNA, 19 nt, Homo sapiens
  misc_RNA (1)...(19): siRNA sense strand
gggaauagaaggacagucu

SEQ ID NO: 2322642 - RNA, 19 nt, Homo sapiens
  misc_RNA (1)...(19): siRNA sense strand
gacagaagccagaaggaau

SEQ ID NO: 2322643 - RNA, 19 nt, Homo sapiens
  misc_RNA (1)...(19): siRNA sense strand
agguauaacacuagagaac

SEQ ID NO: 2322644 - RNA, 19 nt, Homo sapiens
  misc_RNA (1)...(19): siRNA sense strand
aguauauaaccgugagauu

SEQ ID NO: 2322645 - RNA, 19 nt, Homo sapiens
  misc_RNA (1)...(19): siRNA sense strand
agauauugguacagaaacu

SEQ ID NO: 2322646 - RNA, 19 nt, Homo sapiens
  misc_RNA (1)...(19): siRNA sense strand
cuagaaugacacugagcaa

SEQ ID NO: 2322647 - RNA, 19 nt, Homo sapiens
  misc_RNA (1)...(19): siRNA sense strand
ccaugaaguaaaugugcaa

SEQ ID NO: 2322648 - RNA, 19 nt, Homo sapiens
  misc_RNA (1)...(19): siRNA sense strand
ccuugauccuccacagaaa

SEQ ID NO: 2322649 - RNA, 19 nt, Homo sapiens
  misc_RNA (1)...(19): siRNA sense strand
agaaugacacugagcaaau

SEQ ID NO: 2322650 - RNA, 19 nt, Homo sapiens
  misc_RNA (1)...(19): siRNA sense strand
acugggugguuguggauua

SEQ ID NO: 2322651 - RNA, 19 nt, Homo sapiens
  misc_RNA (1)...(19): siRNA sense strand
uguuaauacggaagaagaa

SEQ ID NO: 2322652 - RNA, 19 nt, Homo sapiens
  misc_RNA (1)...(19): siRNA sense strand
acaaacgaauggacagaau

SEQ ID NO: 2322653 - RNA, 19 nt, Homo sapiens
  misc_RNA (1)...(19): siRNA sense strand
ccgugagauugcaaugaaa

SEQ ID NO: 2322654 - RNA, 19 nt, Homo sapiens
  misc_RNA (1)...(19): siRNA sense strand
aaacaauacauccuggaaa

SEQ ID NO: 2322655 - RNA, 19 nt, Homo sapiens
  misc_RNA (1)...(19): siRNA sense strand
aacaauacauccuggaaau

SEQ ID NO: 2322656 - RNA, 19 nt, Homo sapiens
  misc_RNA (1)...(19): siRNA sense strand
cuuuagaacaagaccgaau

SEQ ID NO: 2322657 - RNA, 19 nt, Homo sapiens
  misc_RNA (1)...(19): siRNA sense strand
gaauacacggaaugggauu

SEQ ID NO: 2322658 - RNA, 19 nt, Homo sapiens
  misc_RNA (1)...(19): siRNA sense strand
acagaagccagaaggaauu

SEQ ID NO: 2322659 - RNA, 19 nt, Homo sapiens
  misc_RNA (1)...(19): siRNA sense strand
ucucaauguugcaagaaaa

SEQ ID NO: 2322660 - RNA, 19 nt, Homo sapiens
  misc_RNA (1)...(19): siRNA sense strand
guuugcuagcugagaauaa

SEQ ID NO: 2322661 - RNA, 19 nt, Homo sapiens
  misc_RNA (1)...(19): siRNA sense strand
gauuaugguaccagacuuu

SEQ ID NO: 2322662 - RNA, 19 nt, Homo sapiens
  misc_RNA (1)...(19): siRNA sense strand
gaaucuaaugaaugggaca

SEQ ID NO: 2322663 - RNA, 19 nt, Homo sapiens
  misc_RNA (1)...(19): siRNA sense strand
gugacagguggcuggguua

SEQ ID NO: 2322664 - RNA, 19 nt, Homo sapiens
  misc_RNA (1)...(19): siRNA sense strand
cucaaauauuagagacuca

SEQ ID NO: 2322665 - RNA, 19 nt, Homo sapiens
  misc_RNA (1)...(19): siRNA sense strand
gggauuuacaguuuaagaa

SEQ ID NO: 2322666 - RNA, 19 nt, Homo sapiens
  misc_RNA (1)...(19): siRNA sense strand
aaaagaagucggucaguua

SEQ ID NO: 2322667 - RNA, 19 nt, Homo sapiens
  misc_RNA (1)...(19): siRNA sense strand
gaucauuacuggaguggcu

SEQ ID NO: 2322668 - RNA, 19 nt, Homo sapiens
  misc_RNA (1)...(19): siRNA sense strand
uggagauggauuugaaaca

SEQ ID NO: 2322669 - RNA, 19 nt, Homo sapiens
  misc_RNA (1)...(19): siRNA sense strand
uuugaauaguggucagauu

SEQ ID NO: 2322670 - RNA, 19 nt, Homo sapiens
  misc_RNA (1)...(19): siRNA sense strand
guauaacacuagagaacuc

SEQ ID NO: 2322671 - RNA, 19 nt, Homo sapiens
  misc_RNA (1)...(19): siRNA sense strand
ccagaaggaauuugggacu

SEQ ID NO: 2322672 - RNA, 19 nt, Homo sapiens
  misc_RNA (1)...(19): siRNA sense strand
augccaagccuuauguuua

SEQ ID NO: 2322673 - RNA, 19 nt, Homo sapiens
  misc_RNA (1)...(19): siRNA sense strand
gaagaaaagaagucgguca

SEQ ID NO: 2322674 - RNA, 19 nt, Homo sapiens
  misc_RNA (1)...(19): siRNA sense strand
agugacacauggaaggauu

SEQ ID NO: 2322675 - RNA, 19 nt, Homo sapiens
  misc_RNA (1)...(19): siRNA sense strand
guucuacuacucagggaaa

SEQ ID NO: 2322676 - RNA, 19 nt, Homo sapiens
  misc_RNA (1)...(19): siRNA sense strand
ucacaaaguggaagucaca

SEQ ID NO: 2322677 - RNA, 19 nt, Homo sapiens
  misc_RNA (1)...(19): siRNA sense strand
acaaaguggaagucacaau

SEQ ID NO: 2322678 - RNA, 19 nt, Homo sapiens
  misc_RNA (1)...(19): siRNA sense strand
aaugacuacuuuagagaca

SEQ ID NO: 2322679 - RNA, 19 nt, Homo sapiens
  misc_RNA (1)...(19): siRNA sense strand
guuaauacggaagaagaaa

SEQ ID NO: 2322680 - RNA, 19 nt, Homo sapiens
  misc_RNA (1)...(19): siRNA sense strand
ccagguugguugaagacuu

SEQ ID NO: 2322681 - RNA, 19 nt, Homo sapiens
  misc_RNA (1)...(19): siRNA sense strand
guuaagauacaguuuggaa

SEQ ID NO: 2322682 - RNA, 19 nt, Homo sapiens
  misc_RNA (1)...(19): siRNA sense strand
agaugauaaucguggccuu

SEQ ID NO: 2322683 - RNA, 19 nt, Homo sapiens
  misc_RNA (1)...(19): siRNA sense strand
cgaaaaguucacaaagcaa

SEQ ID NO: 2322684 - RNA, 19 nt, Homo sapiens
  misc_RNA (1)...(19): siRNA sense strand
ccgaaagaagucaaagcuu

SEQ ID NO: 2322685 - RNA, 19 nt, Homo sapiens
  misc_RNA (1)...(19): siRNA sense strand
ccacaauggccuauaucca

SEQ ID NO: 2322686 - RNA, 19 nt, Homo sapiens
  misc_RNA (1)...(19): siRNA sense strand
gugacauucaucugguuaa

SEQ ID NO: 2322687 - RNA, 19 nt, Homo sapiens
  misc_RNA (1)...(19): siRNA sense strand
uguggaggaugguccgaaa

SEQ ID NO: 2322688 - RNA, 19 nt, Homo sapiens
  misc_RNA (1)...(19): siRNA sense strand
gaaaauggucagcuugaaa

SEQ ID NO: 2322689 - RNA, 19 nt, Homo sapiens
  misc_RNA (1)...(19): siRNA sense strand
ggacagaaucauggaaucu

SEQ ID NO: 2322690 - RNA, 19 nt, Homo sapiens
  misc_RNA (1)...(19): siRNA sense strand
auacugaccuaaaugggua

SEQ ID NO: 2322691 - RNA, 19 nt, Homo sapiens
  misc_RNA (1)...(19): siRNA sense strand
ccuaaauggguaccagauu

SEQ ID NO: 2322692 - RNA, 19 nt, Homo sapiens
  misc_RNA (1)...(19): siRNA sense strand
uaaucguggccuugagcaa

SEQ ID NO: 2322693 - RNA, 19 nt, Homo sapiens
  misc_RNA (1)...(19): siRNA sense strand
cuguuaauacggaagaaga

SEQ ID NO: 2322694 - RNA, 19 nt, Homo sapiens
  misc_RNA (1)...(19): siRNA sense strand
cucucaauguugcaagaaa

SEQ ID NO: 2322695 - RNA, 19 nt, Homo sapiens
  misc_RNA (1)...(19): siRNA sense strand
auucagaugugcagauguu

SEQ ID NO: 2322696 - RNA, 19 nt, Homo sapiens
  misc_RNA (1)...(19): siRNA sense strand
aaacgaauggacagaauca

SEQ ID NO: 2322697 - RNA, 19 nt, Homo sapiens
  misc_RNA (1)...(19): siRNA sense strand
gaauaaaguagaagauagc

SEQ ID NO: 2322698 - RNA, 19 nt, Homo sapiens
  misc_RNA (1)...(19): siRNA sense strand
agaccaaagcaaaggccaa

SEQ ID NO: 2322699 - RNA, 19 nt, Homo sapiens
  misc_RNA (1)...(19): siRNA sense strand
aagcaaaggccaaagccaa

SEQ ID NO: 2322700 - RNA, 19 nt, Homo sapiens
  misc_RNA (1)...(19): siRNA sense strand
gccaagaaagggaagggaa

SEQ ID NO: 2322701 - RNA, 19 nt, Homo sapiens
  misc_RNA (1)...(19): siRNA sense strand
aagggaagggaaaggacua

SEQ ID NO: 2322702 - RNA, 19 nt, Homo sapiens
  misc_RNA (1)...(19): siRNA sense strand
aggauugcggcguggguuu

SEQ ID NO: 2322703 - RNA, 19 nt, Homo sapiens
  misc_RNA (1)...(19): siRNA sense strand
gcuacaaugcucagugcca

SEQ ID NO: 2322704 - RNA, 19 nt, Homo sapiens
  misc_RNA (1)...(19): siRNA sense strand
ccaaagccaagaaagggaa

SEQ ID NO: 2322705 - RNA, 19 nt, Homo sapiens
  misc_RNA (1)...(19): siRNA sense strand
ggaacggaauaaagggcaa

SEQ ID NO: 2322706 - RNA, 19 nt, Homo sapiens
  misc_RNA (1)...(19): siRNA sense strand
gggaagaagaaaacgaaau

SEQ ID NO: 2322707 - RNA, 19 nt, Homo sapiens
  misc_RNA (1)...(19): siRNA sense strand
cuccagaggaugcaggaaa

SEQ ID NO: 2322708 - RNA, 19 nt, Homo sapiens
  misc_RNA (1)...(19): siRNA sense strand
caggaaaaggaacggaaua

SEQ ID NO: 2322709 - RNA, 19 nt, Homo sapiens
  misc_RNA (1)...(19): siRNA sense strand
aggaaaaggaacggaauaa

SEQ ID NO: 2322710 - RNA, 19 nt, Homo sapiens
  misc_RNA (1)...(19): siRNA sense strand
ccaucagggaagaagaaaa

SEQ ID NO: 2322711 - RNA, 19 nt, Homo sapiens
  misc_RNA (1)...(19): siRNA sense strand
ggaaugaggaugaacucca

SEQ ID NO: 2322712 - RNA, 19 nt, Homo sapiens
  misc_RNA (1)...(19): siRNA sense strand
cggaauaaagggcaaaaga

SEQ ID NO: 2322713 - RNA, 19 nt, Homo sapiens
  misc_RNA (1)...(19): siRNA sense strand
uggaaauuggaaugaggau

SEQ ID NO: 2322714 - RNA, 19 nt, Homo sapiens
  misc_RNA (1)...(19): siRNA sense strand
guacagacugagaggaaaa

SEQ ID NO: 2322715 - RNA, 19 nt, Homo sapiens
  misc_RNA (1)...(19): siRNA sense strand
gcaaggaccaagauggaga

SEQ ID NO: 2322716 - RNA, 19 nt, Homo sapiens
  misc_RNA (1)...(19): siRNA sense strand
gggaagaacgcuacaggca

SEQ ID NO: 2322717 - RNA, 19 nt, Homo sapiens
  misc_RNA (1)...(19): siRNA sense strand
augcuauuggugagggaaa

SEQ ID NO: 2322718 - RNA, 19 nt, Homo sapiens
  misc_RNA (1)...(19): siRNA sense strand
ggaccaagauggagaccag

SEQ ID NO: 2322719 - RNA, 19 nt, Homo sapiens
  misc_RNA (1)...(19): siRNA sense strand
guucagagugauaggacca

SEQ ID NO: 2322720 - RNA, 19 nt, Homo sapiens
  misc_RNA (1)...(19): siRNA sense strand
ugaaagaugcuauugguga

SEQ ID NO: 2322721 - RNA, 19 nt, Homo sapiens
  misc_RNA (1)...(19): siRNA sense strand
ucgcauaucuccugggaag

SEQ ID NO: 2322722 - RNA, 19 nt, Homo sapiens
  misc_RNA (1)...(19): siRNA sense strand
ggaagaacgcuacaggcau

SEQ ID NO: 2322723 - RNA, 19 nt, Homo sapiens
  misc_RNA (1)...(19): siRNA sense strand
cagaaauggcaaggaccaa

SEQ ID NO: 2322724 - RNA, 19 nt, Homo sapiens
  misc_RNA (1)...(19): siRNA sense strand
gauccuuucuacuggguga

SEQ ID NO: 2322725 - RNA, 19 nt, Homo sapiens
  misc_RNA (1)...(19): siRNA sense strand
acagaaauggcaaggacca

SEQ ID NO: 2322726 - RNA, 19 nt, Homo sapiens
  misc_RNA (1)...(19): siRNA sense strand
aguacagacugagaggaaa

SEQ ID NO: 2322727 - RNA, 19 nt, Homo sapiens
  misc_RNA (1)...(19): siRNA sense strand
uguaagguucucagaugaa

SEQ ID NO: 2322728 - RNA, 19 nt, Homo sapiens
  misc_RNA (1)...(19): siRNA sense strand
ucgagcagagauagagaau

SEQ ID NO: 2322729 - RNA, 19 nt, Homo sapiens
  misc_RNA (1)...(19): siRNA sense strand
guacagacugagaggaaaa

SEQ ID NO: 2322730 - RNA, 19 nt, Homo sapiens
  misc_RNA (1)...(19): siRNA sense strand
gcaaggaccaagauggaga

SEQ ID NO: 2322731 - RNA, 19 nt, Homo sapiens
  misc_RNA (1)...(19): siRNA sense strand
gggaagaacgcuacaggca

SEQ ID NO: 2322732 - RNA, 19 nt, Homo sapiens
  misc_RNA (1)...(19): siRNA sense strand
augcuauuggugagggaaa

SEQ ID NO: 2322733 - RNA, 19 nt, Homo sapiens
  misc_RNA (1)...(19): siRNA sense strand
ggaccaagauggagaccag

SEQ ID NO: 2322734 - RNA, 19 nt, Homo sapiens
  misc_RNA (1)...(19): siRNA sense strand
guucagagugauaggacca

SEQ ID NO: 2322735 - RNA, 19 nt, Homo sapiens
  misc_RNA (1)...(19): siRNA sense strand
ugaaagaugcuauugguga

SEQ ID NO: 2322736 - RNA, 19 nt, Homo sapiens
  misc_RNA (1)...(19): siRNA sense strand
ucgcauaucuccugggaag

SEQ ID NO: 2322737 - RNA, 19 nt, Homo sapiens
  misc_RNA (1)...(19): siRNA sense strand
ggaagaacgcuacaggcau

SEQ ID NO: 2322738 - RNA, 19 nt, Homo sapiens
  misc_RNA (1)...(19): siRNA sense strand
cagaaauggcaaggaccaa

SEQ ID NO: 2322739 - RNA, 19 nt, Homo sapiens
  misc_RNA (1)...(19): siRNA sense strand
gauccuuucuacuggguga

SEQ ID NO: 2322740 - RNA, 19 nt, Homo sapiens
  misc_RNA (1)...(19): siRNA sense strand
acagaaauggcaaggacca

SEQ ID NO: 2322741 - RNA, 19 nt, Homo sapiens
  misc_RNA (1)...(19): siRNA sense strand
aguacagacugagaggaaa

SEQ ID NO: 2322742 - RNA, 19 nt, Homo sapiens
  misc_RNA (1)...(19): siRNA sense strand
uguaagguucucagaugaa

SEQ ID NO: 2322743 - RNA, 19 nt, Homo sapiens
  misc_RNA (1)...(19): siRNA sense strand
ucgagcagagauagagaau

SEQ ID NO: 2322744 - RNA, 19 nt, Homo sapiens
  misc_RNA (1)...(19): siRNA sense strand
guacagacugagaggaaaa

SEQ ID NO: 2322745 - RNA, 19 nt, Homo sapiens
  misc_RNA (1)...(19): siRNA sense strand
gcaaggaccaagauggaga

SEQ ID NO: 2322746 - RNA, 19 nt, Homo sapiens
  misc_RNA (1)...(19): siRNA sense strand
gggaagaacgcuacaggca

SEQ ID NO: 2322747 - RNA, 19 nt, Homo sapiens
  misc_RNA (1)...(19): siRNA sense strand
augcuauuggugagggaaa

SEQ ID NO: 2322748 - RNA, 19 nt, Homo sapiens
  misc_RNA (1)...(19): siRNA sense strand
ggaccaagauggagaccag

SEQ ID NO: 2322749 - RNA, 19 nt, Homo sapiens
  misc_RNA (1)...(19): siRNA sense strand
guucagagugauaggacca

SEQ ID NO: 2322750 - RNA, 19 nt, Homo sapiens
  misc_RNA (1)...(19): siRNA sense strand
ugaaagaugcuauugguga

SEQ ID NO: 2322751 - RNA, 19 nt, Homo sapiens
  misc_RNA (1)...(19): siRNA sense strand
ucgcauaucuccugggaag

SEQ ID NO: 2322752 - RNA, 19 nt, Homo sapiens
  misc_RNA (1)...(19): siRNA sense strand
ggaagaacgcuacaggcau

SEQ ID NO: 2322753 - RNA, 19 nt, Homo sapiens
  misc_RNA (1)...(19): siRNA sense strand
cagaaauggcaaggaccaa

SEQ ID NO: 2322754 - RNA, 19 nt, Homo sapiens
  misc_RNA (1)...(19): siRNA sense strand
gauccuuucuacuggguga

SEQ ID NO: 2322755 - RNA, 19 nt, Homo sapiens
  misc_RNA (1)...(19): siRNA sense strand
acagaaauggcaaggacca

SEQ ID NO: 2322756 - RNA, 19 nt, Homo sapiens
  misc_RNA (1)...(19): siRNA sense strand
aguacagacugagaggaaa

SEQ ID NO: 2322757 - RNA, 19 nt, Homo sapiens
  misc_RNA (1)...(19): siRNA sense strand
uguaagguucucagaugaa

SEQ ID NO: 2322758 - RNA, 19 nt, Homo sapiens
  misc_RNA (1)...(19): siRNA sense strand
ucgagcagagauagagaau

SEQ ID NO: 2322759 - RNA, 19 nt, Homo sapiens
  misc_RNA (1)...(19): siRNA sense strand
guacagacugagaggaaaa

SEQ ID NO: 2322760 - RNA, 19 nt, Homo sapiens
  misc_RNA (1)...(19): siRNA sense strand
gcaaggaccaagauggaga

SEQ ID NO: 2322761 - RNA, 19 nt, Homo sapiens
  misc_RNA (1)...(19): siRNA sense strand
gggaagaacgcuacaggca

SEQ ID NO: 2322762 - RNA, 19 nt, Homo sapiens
  misc_RNA (1)...(19): siRNA sense strand
augcuauuggugagggaaa

SEQ ID NO: 2322763 - RNA, 19 nt, Homo sapiens
  misc_RNA (1)...(19): siRNA sense strand
ggaccaagauggagaccag

SEQ ID NO: 2322764 - RNA, 19 nt, Homo sapiens
  misc_RNA (1)...(19): siRNA sense strand
guucagagugauaggacca

SEQ ID NO: 2322765 - RNA, 19 nt, Homo sapiens
  misc_RNA (1)...(19): siRNA sense strand
ugaaagaugcuauugguga

SEQ ID NO: 2322766 - RNA, 19 nt, Homo sapiens
  misc_RNA (1)...(19): siRNA sense strand
ucgcauaucuccugggaag

SEQ ID NO: 2322767 - RNA, 19 nt, Homo sapiens
  misc_RNA (1)...(19): siRNA sense strand
ggaagaacgcuacaggcau

SEQ ID NO: 2322768 - RNA, 19 nt, Homo sapiens
  misc_RNA (1)...(19): siRNA sense strand
cagaaauggcaaggaccaa

SEQ ID NO: 2322769 - RNA, 19 nt, Homo sapiens
  misc_RNA (1)...(19): siRNA sense strand
gauccuuucuacuggguga

SEQ ID NO: 2322770 - RNA, 19 nt, Homo sapiens
  misc_RNA (1)...(19): siRNA sense strand
acagaaauggcaaggacca

SEQ ID NO: 2322771 - RNA, 19 nt, Homo sapiens
  misc_RNA (1)...(19): siRNA sense strand
aguacagacugagaggaaa

SEQ ID NO: 2322772 - RNA, 19 nt, Homo sapiens
  misc_RNA (1)...(19): siRNA sense strand
uguaagguucucagaugaa

SEQ ID NO: 2322773 - RNA, 19 nt, Homo sapiens
  misc_RNA (1)...(19): siRNA sense strand
ucgagcagagauagagaau

SEQ ID NO: 2322774 - RNA, 19 nt, Homo sapiens
  misc_RNA (1)...(19): siRNA sense strand
guacagacugagaggaaaa

SEQ ID NO: 2322775 - RNA, 19 nt, Homo sapiens
  misc_RNA (1)...(19): siRNA sense strand
gcaaggaccaagauggaga

SEQ ID NO: 2322776 - RNA, 19 nt, Homo sapiens
  misc_RNA (1)...(19): siRNA sense strand
gggaagaacgcuacaggca

SEQ ID NO: 2322777 - RNA, 19 nt, Homo sapiens
  misc_RNA (1)...(19): siRNA sense strand
augcuauuggugagggaaa

SEQ ID NO: 2322778 - RNA, 19 nt, Homo sapiens
  misc_RNA (1)...(19): siRNA sense strand
ggaccaagauggagaccag

SEQ ID NO: 2322779 - RNA, 19 nt, Homo sapiens
  misc_RNA (1)...(19): siRNA sense strand
guucagagugauaggacca

SEQ ID NO: 2322780 - RNA, 19 nt, Homo sapiens
  misc_RNA (1)...(19): siRNA sense strand
ugaaagaugcuauugguga

SEQ ID NO: 2322781 - RNA, 19 nt, Homo sapiens
  misc_RNA (1)...(19): siRNA sense strand
ucgcauaucuccugggaag

SEQ ID NO: 2322782 - RNA, 19 nt, Homo sapiens
  misc_RNA (1)...(19): siRNA sense strand
ggaagaacgcuacaggcau

SEQ ID NO: 2322783 - RNA, 19 nt, Homo sapiens
  misc_RNA (1)...(19): siRNA sense strand
cagaaauggcaaggaccaa

SEQ ID NO: 2322784 - RNA, 19 nt, Homo sapiens
  misc_RNA (1)...(19): siRNA sense strand
gauccuuucuacuggguga

SEQ ID NO: 2322785 - RNA, 19 nt, Homo sapiens
  misc_RNA (1)...(19): siRNA sense strand
acagaaauggcaaggacca

SEQ ID NO: 2322786 - RNA, 19 nt, Homo sapiens
  misc_RNA (1)...(19): siRNA sense strand
aguacagacugagaggaaa

SEQ ID NO: 2322787 - RNA, 19 nt, Homo sapiens
  misc_RNA (1)...(19): siRNA sense strand
uguaagguucucagaugaa

SEQ ID NO: 2322788 - RNA, 19 nt, Homo sapiens
  misc_RNA (1)...(19): siRNA sense strand
ucgagcagagauagagaau

SEQ ID NO: 2322789 - RNA, 19 nt, Homo sapiens
  misc_RNA (1)...(19): siRNA sense strand
gcaaggaccaagauggaga

SEQ ID NO: 2322790 - RNA, 19 nt, Homo sapiens
  misc_RNA (1)...(19): siRNA sense strand
gggaagaacgcuacaggca

SEQ ID NO: 2322791 - RNA, 19 nt, Homo sapiens
  misc_RNA (1)...(19): siRNA sense strand
augcuauuggugagggaaa

SEQ ID NO: 2322792 - RNA, 19 nt, Homo sapiens
  misc_RNA (1)...(19): siRNA sense strand
ggaccaagauggagaccag

SEQ ID NO: 2322793 - RNA, 19 nt, Homo sapiens
  misc_RNA (1)...(19): siRNA sense strand
guucagagugauaggacca

SEQ ID NO: 2322794 - RNA, 19 nt, Homo sapiens
  misc_RNA (1)...(19): siRNA sense strand
ugaaagaugcuauugguga

SEQ ID NO: 2322795 - RNA, 19 nt, Homo sapiens
  misc_RNA (1)...(19): siRNA sense strand
ucgcauaucuccugggaag

SEQ ID NO: 2322796 - RNA, 19 nt, Homo sapiens
  misc_RNA (1)...(19): siRNA sense strand
ggaagaacgcuacaggcau

SEQ ID NO: 2322797 - RNA, 19 nt, Homo sapiens
  misc_RNA (1)...(19): siRNA sense strand
cagaaauggcaaggaccaa

SEQ ID NO: 2322798 - RNA, 19 nt, Homo sapiens
  misc_RNA (1)...(19): siRNA sense strand
acagaaauggcaaggacca

SEQ ID NO: 2322799 - RNA, 19 nt, Homo sapiens
  misc_RNA (1)...(19): siRNA sense strand
uguaagguucucagaugaa

SEQ ID NO: 2322800 - RNA, 19 nt, Homo sapiens
  misc_RNA (1)...(19): siRNA sense strand
gcaaggaccaagauggaga

SEQ ID NO: 2322801 - RNA, 19 nt, Homo sapiens
  misc_RNA (1)...(19): siRNA sense strand
gggaagaacgcuacaggca

SEQ ID NO: 2322802 - RNA, 19 nt, Homo sapiens
  misc_RNA (1)...(19): siRNA sense strand
augcuauuggugagggaaa

SEQ ID NO: 2322803 - RNA, 19 nt, Homo sapiens
  misc_RNA (1)...(19): siRNA sense strand
ggaccaagauggagaccag

SEQ ID NO: 2322804 - RNA, 19 nt, Homo sapiens
  misc_RNA (1)...(19): siRNA sense strand
guucagagugauaggacca

SEQ ID NO: 2322805 - RNA, 19 nt, Homo sapiens
  misc_RNA (1)...(19): siRNA sense strand
ugaaagaugcuauugguga

SEQ ID NO: 2322806 - RNA, 19 nt, Homo sapiens
  misc_RNA (1)...(19): siRNA sense strand
ucgcauaucuccugggaag

SEQ ID NO: 2322807 - RNA, 19 nt, Homo sapiens
  misc_RNA (1)...(19): siRNA sense strand
ggaagaacgcuacaggcau

SEQ ID NO: 2322808 - RNA, 19 nt, Homo sapiens
  misc_RNA (1)...(19): siRNA sense strand
cagaaauggcaaggaccaa

SEQ ID NO: 2322809 - RNA, 19 nt, Homo sapiens
  misc_RNA (1)...(19): siRNA sense strand
acagaaauggcaaggacca

SEQ ID NO: 2322810 - RNA, 19 nt, Homo sapiens
  misc_RNA (1)...(19): siRNA sense strand
uguaagguucucagaugaa

SEQ ID NO: 2322811 - RNA, 19 nt, Homo sapiens
  misc_RNA (1)...(19): siRNA sense strand
agaucaagguggacugcaa

SEQ ID NO: 2322812 - RNA, 19 nt, Homo sapiens
  misc_RNA (1)...(19): siRNA sense strand
gcuacuauguccuggccaa

SEQ ID NO: 2322813 - RNA, 19 nt, Homo sapiens
  misc_RNA (1)...(19): siRNA sense strand
augaagaccaguuuggaaa

SEQ ID NO: 2322814 - RNA, 19 nt, Homo sapiens
  misc_RNA (1)...(19): siRNA sense strand
ucaacuacgugguggacau

SEQ ID NO: 2322815 - RNA, 19 nt, Homo sapiens
  misc_RNA (1)...(19): siRNA sense strand
ccgaagaacaacugcacau

SEQ ID NO: 2322816 - RNA, 19 nt, Homo sapiens
  misc_RNA (1)...(19): siRNA sense strand
gcgccaagaucaaggugga

SEQ ID NO: 2322817 - RNA, 19 nt, Homo sapiens
  misc_RNA (1)...(19): siRNA sense strand
ccaacgggacgguggagaa

SEQ ID NO: 2322818 - RNA, 19 nt, Homo sapiens
  misc_RNA (1)...(19): siRNA sense strand
gggaacaugcagaagauca

SEQ ID NO: 2322819 - RNA, 19 nt, Homo sapiens
  misc_RNA (1)...(19): siRNA sense strand
ugaucaagaccgugcauau

SEQ ID NO: 2322820 - RNA, 19 nt, Homo sapiens
  misc_RNA (1)...(19): siRNA sense strand
aguacgggcuggaggugua

SEQ ID NO: 2322821 - RNA, 19 nt, Homo sapiens
  misc_RNA (1)...(19): siRNA sense strand
gcaacaacaccaagggcca

SEQ ID NO: 2322822 - RNA, 19 nt, Homo sapiens
  misc_RNA (1)...(19): siRNA sense strand
cuacaagauacgugucaau

SEQ ID NO: 2322823 - RNA, 19 nt, Homo sapiens
  misc_RNA (1)...(19): siRNA sense strand
cccaagaggugcagccaga

SEQ ID NO: 2322824 - RNA, 19 nt, Homo sapiens
  misc_RNA (1)...(19): siRNA sense strand
agcugaaguuggaagacaa

SEQ ID NO: 2322825 - RNA, 19 nt, Homo sapiens
  misc_RNA (1)...(19): siRNA sense strand
gaucugaagaaguguguca

SEQ ID NO: 2322826 - RNA, 19 nt, Homo sapiens
  misc_RNA (1)...(19): siRNA sense strand
cccaggaggugcugaucaa

SEQ ID NO: 2322827 - RNA, 19 nt, Homo sapiens
  misc_RNA (1)...(19): siRNA sense strand
gcaacaaggaugugggcuc

SEQ ID NO: 2322828 - RNA, 19 nt, Homo sapiens
  misc_RNA (1)...(19): siRNA sense strand
gaguauuacaagaggugca

SEQ ID NO: 2322829 - RNA, 19 nt, Homo sapiens
  misc_RNA (1)...(19): siRNA sense strand
caggugaggagguguacaa

SEQ ID NO: 2322830 - RNA, 19 nt, Homo sapiens
  misc_RNA (1)...(19): siRNA sense strand
cguguaacugucagaacaa

SEQ ID NO: 2322831 - RNA, 19 nt, Homo sapiens
  misc_RNA (1)...(19): siRNA sense strand
augaggaggaucugaagaa

SEQ ID NO: 2322832 - RNA, 19 nt, Homo sapiens
  misc_RNA (1)...(19): siRNA sense strand
agagcgacccgaagaacaa

SEQ ID NO: 2322833 - RNA, 19 nt, Homo sapiens
  misc_RNA (1)...(19): siRNA sense strand
acaacaacacgguggagau

SEQ ID NO: 2322834 - RNA, 19 nt, Homo sapiens
  misc_RNA (1)...(19): siRNA sense strand
uauuacaagaggugcaaau

SEQ ID NO: 2322835 - RNA, 19 nt, Homo sapiens
  misc_RNA (1)...(19): siRNA sense strand
ggguguguguucacgggaa

SEQ ID NO: 2322836 - RNA, 19 nt, Homo sapiens
  misc_RNA (1)...(19): siRNA sense strand
gugaggaucccgaggagga

SEQ ID NO: 2322837 - RNA, 19 nt, Homo sapiens
  misc_RNA (1)...(19): siRNA sense strand
uggcugacaagaagaagaa

SEQ ID NO: 2322838 - RNA, 19 nt, Homo sapiens
  misc_RNA (1)...(19): siRNA sense strand
guggcugcgugguggagaa

SEQ ID NO: 2322839 - RNA, 19 nt, Homo sapiens
  misc_RNA (1)...(19): siRNA sense strand
cgguggagaucgugaaggu

SEQ ID NO: 2322840 - RNA, 19 nt, Homo sapiens
  misc_RNA (1)...(19): siRNA sense strand
ccuacgugcugguggagga

SEQ ID NO: 2322841 - RNA, 19 nt, Homo sapiens
  misc_RNA (1)...(19): siRNA sense strand
gguguguguucacgggaau

SEQ ID NO: 2322842 - RNA, 19 nt, Homo sapiens
  misc_RNA (1)...(19): siRNA sense strand
gggauguggucgucaggca

SEQ ID NO: 2322843 - RNA, 19 nt, Homo sapiens
  misc_RNA (1)...(19): siRNA sense strand
acaccuuccuggacgagaa

SEQ ID NO: 2322844 - RNA, 19 nt, Homo sapiens
  misc_RNA (1)...(19): siRNA sense strand
gggaacagcuggaaggagg

SEQ ID NO: 2322845 - RNA, 19 nt, Homo sapiens
  misc_RNA (1)...(19): siRNA sense strand
gcugcgugguggagaagga

SEQ ID NO: 2322846 - RNA, 19 nt, Homo sapiens
  misc_RNA (1)...(19): siRNA sense strand
acuacgacuuugacggaca

SEQ ID NO: 2322847 - RNA, 19 nt, Homo sapiens
  misc_RNA (1)...(19): siRNA sense strand
ggacgguggagaagcacuu

SEQ ID NO: 2322848 - RNA, 19 nt, Homo sapiens
  misc_RNA (1)...(19): siRNA sense strand
cgauguggugugugaggau

SEQ ID NO: 2322849 - RNA, 19 nt, Homo sapiens
  misc_RNA (1)...(19): siRNA sense strand
uggccaagggugaccacaa

SEQ ID NO: 2322850 - RNA, 19 nt, Homo sapiens
  misc_RNA (1)...(19): siRNA sense strand
acguguaacugucagaaca

SEQ ID NO: 2322851 - RNA, 19 nt, Homo sapiens
  misc_RNA (1)...(19): siRNA sense strand
ccaucuaugaggaggaucu

SEQ ID NO: 2322852 - RNA, 19 nt, Homo sapiens
  misc_RNA (1)...(19): siRNA sense strand
gccacugucucgagggcuu

SEQ ID NO: 2322853 - RNA, 19 nt, Homo sapiens
  misc_RNA (1)...(19): siRNA sense strand
guguggugauccagcguga

SEQ ID NO: 2322854 - RNA, 19 nt, Homo sapiens
  misc_RNA (1)...(19): siRNA sense strand
augacaagcuggacugguu

SEQ ID NO: 2322855 - RNA, 19 nt, Homo sapiens
  misc_RNA (1)...(19): siRNA sense strand
aaauaugacacguguaacu

SEQ ID NO: 2322856 - RNA, 19 nt, Homo sapiens
  misc_RNA (1)...(19): siRNA sense strand
gcaucaacuacguggugga

SEQ ID NO: 2322857 - RNA, 19 nt, Homo sapiens
  misc_RNA (1)...(19): siRNA sense strand
acaacaacacccugcucaa

SEQ ID NO: 2322858 - RNA, 19 nt, Homo sapiens
  misc_RNA (1)...(19): siRNA sense strand
ucaacggccuggaagguga

SEQ ID NO: 2322859 - RNA, 19 nt, Homo sapiens
  misc_RNA (1)...(19): siRNA sense strand
acuacagcuaccagggcaa

SEQ ID NO: 2322860 - RNA, 19 nt, Homo sapiens
  misc_RNA (1)...(19): siRNA sense strand
ccaauaaccaccacgacca

SEQ ID NO: 2322861 - RNA, 19 nt, Homo sapiens
  misc_RNA (1)...(19): siRNA sense strand
gcuucauggccacgugcaa

SEQ ID NO: 2322862 - RNA, 19 nt, Homo sapiens
  misc_RNA (1)...(19): siRNA sense strand
ccacgugcaaguacaacaa

SEQ ID NO: 2322863 - RNA, 19 nt, Homo sapiens
  misc_RNA (1)...(19): siRNA sense strand
gcaacauuaccgucugcaa

SEQ ID NO: 2322864 - RNA, 19 nt, Homo sapiens
  misc_RNA (1)...(19): siRNA sense strand
agaucaagguggacugcaa

SEQ ID NO: 2322865 - RNA, 19 nt, Homo sapiens
  misc_RNA (1)...(19): siRNA sense strand
gcuacuauguccuggccaa

SEQ ID NO: 2322866 - RNA, 19 nt, Homo sapiens
  misc_RNA (1)...(19): siRNA sense strand
augaagaccaguuuggaaa

SEQ ID NO: 2322867 - RNA, 19 nt, Homo sapiens
  misc_RNA (1)...(19): siRNA sense strand
ucaacuacgugguggacau

SEQ ID NO: 2322868 - RNA, 19 nt, Homo sapiens
  misc_RNA (1)...(19): siRNA sense strand
ccgaagaacaacugcacau

SEQ ID NO: 2322869 - RNA, 19 nt, Homo sapiens
  misc_RNA (1)...(19): siRNA sense strand
gcgccaagaucaaggugga

SEQ ID NO: 2322870 - RNA, 19 nt, Homo sapiens
  misc_RNA (1)...(19): siRNA sense strand
ccaacgggacgguggagaa

SEQ ID NO: 2322871 - RNA, 19 nt, Homo sapiens
  misc_RNA (1)...(19): siRNA sense strand
gggaacaugcagaagauca

SEQ ID NO: 2322872 - RNA, 19 nt, Homo sapiens
  misc_RNA (1)...(19): siRNA sense strand
ugaucaagaccgugcauau

SEQ ID NO: 2322873 - RNA, 19 nt, Homo sapiens
  misc_RNA (1)...(19): siRNA sense strand
aguacgggcuggaggugua

SEQ ID NO: 2322874 - RNA, 19 nt, Homo sapiens
  misc_RNA (1)...(19): siRNA sense strand
gcaacaacaccaagggcca

SEQ ID NO: 2322875 - RNA, 19 nt, Homo sapiens
  misc_RNA (1)...(19): siRNA sense strand
cuacaagauacgugucaau

SEQ ID NO: 2322876 - RNA, 19 nt, Homo sapiens
  misc_RNA (1)...(19): siRNA sense strand
agcugaaguuggaagacaa

SEQ ID NO: 2322877 - RNA, 19 nt, Homo sapiens
  misc_RNA (1)...(19): siRNA sense strand
gaucugaagaaguguguca

SEQ ID NO: 2322878 - RNA, 19 nt, Homo sapiens
  misc_RNA (1)...(19): siRNA sense strand
cccaggaggugcugaucaa

SEQ ID NO: 2322879 - RNA, 19 nt, Homo sapiens
  misc_RNA (1)...(19): siRNA sense strand
gcaacaaggaugugggcuc

SEQ ID NO: 2322880 - RNA, 19 nt, Homo sapiens
  misc_RNA (1)...(19): siRNA sense strand
gaguauuacaagaggugca

SEQ ID NO: 2322881 - RNA, 19 nt, Homo sapiens
  misc_RNA (1)...(19): siRNA sense strand
caggugaggagguguacaa

SEQ ID NO: 2322882 - RNA, 19 nt, Homo sapiens
  misc_RNA (1)...(19): siRNA sense strand
cguguaacugucagaacaa

SEQ ID NO: 2322883 - RNA, 19 nt, Homo sapiens
  misc_RNA (1)...(19): siRNA sense strand
augaggaggaucugaagaa

SEQ ID NO: 2322884 - RNA, 19 nt, Homo sapiens
  misc_RNA (1)...(19): siRNA sense strand
agagcgacccgaagaacaa

SEQ ID NO: 2322885 - RNA, 19 nt, Homo sapiens
  misc_RNA (1)...(19): siRNA sense strand
acaacaacacgguggagau

SEQ ID NO: 2322886 - RNA, 19 nt, Homo sapiens
  misc_RNA (1)...(19): siRNA sense strand
uauuacaagaggugcaaau

SEQ ID NO: 2322887 - RNA, 19 nt, Homo sapiens
  misc_RNA (1)...(19): siRNA sense strand
ggguguguguucacgggaa

SEQ ID NO: 2322888 - RNA, 19 nt, Homo sapiens
  misc_RNA (1)...(19): siRNA sense strand
gugaggaucccgaggagga

SEQ ID NO: 2322889 - RNA, 19 nt, Homo sapiens
  misc_RNA (1)...(19): siRNA sense strand
uggcugacaagaagaagaa

SEQ ID NO: 2322890 - RNA, 19 nt, Homo sapiens
  misc_RNA (1)...(19): siRNA sense strand
guggcugcgugguggagaa

SEQ ID NO: 2322891 - RNA, 19 nt, Homo sapiens
  misc_RNA (1)...(19): siRNA sense strand
cgguggagaucgugaaggu

SEQ ID NO: 2322892 - RNA, 19 nt, Homo sapiens
  misc_RNA (1)...(19): siRNA sense strand
ccuacgugcugguggagga

SEQ ID NO: 2322893 - RNA, 19 nt, Homo sapiens
  misc_RNA (1)...(19): siRNA sense strand
gguguguguucacgggaau

SEQ ID NO: 2322894 - RNA, 19 nt, Homo sapiens
  misc_RNA (1)...(19): siRNA sense strand
gggauguggucgucaggca

SEQ ID NO: 2322895 - RNA, 19 nt, Homo sapiens
  misc_RNA (1)...(19): siRNA sense strand
acaccuuccuggacgagaa

SEQ ID NO: 2322896 - RNA, 19 nt, Homo sapiens
  misc_RNA (1)...(19): siRNA sense strand
gggaacagcuggaaggagg

SEQ ID NO: 2322897 - RNA, 19 nt, Homo sapiens
  misc_RNA (1)...(19): siRNA sense strand
gcugcgugguggagaagga

SEQ ID NO: 2322898 - RNA, 19 nt, Homo sapiens
  misc_RNA (1)...(19): siRNA sense strand
acuacgacuuugacggaca

SEQ ID NO: 2322899 - RNA, 19 nt, Homo sapiens
  misc_RNA (1)...(19): siRNA sense strand
ggacgguggagaagcacuu

SEQ ID NO: 2322900 - RNA, 19 nt, Homo sapiens
  misc_RNA (1)...(19): siRNA sense strand
cgauguggugugugaggau

SEQ ID NO: 2322901 - RNA, 19 nt, Homo sapiens
  misc_RNA (1)...(19): siRNA sense strand
uggccaagggugaccacaa

SEQ ID NO: 2322902 - RNA, 19 nt, Homo sapiens
  misc_RNA (1)...(19): siRNA sense strand
acguguaacugucagaaca

SEQ ID NO: 2322903 - RNA, 19 nt, Homo sapiens
  misc_RNA (1)...(19): siRNA sense strand
ccaucuaugaggaggaucu

SEQ ID NO: 2322904 - RNA, 19 nt, Homo sapiens
  misc_RNA (1)...(19): siRNA sense strand
gccacugucucgagggcuu

SEQ ID NO: 2322905 - RNA, 19 nt, Homo sapiens
  misc_RNA (1)...(19): siRNA sense strand
guguggugauccagcguga

SEQ ID NO: 2322906 - RNA, 19 nt, Homo sapiens
  misc_RNA (1)...(19): siRNA sense strand
augacaagcuggacugguu

SEQ ID NO: 2322907 - RNA, 19 nt, Homo sapiens
  misc_RNA (1)...(19): siRNA sense strand
aaauaugacacguguaacu

SEQ ID NO: 2322908 - RNA, 19 nt, Homo sapiens
  misc_RNA (1)...(19): siRNA sense strand
gcaucaacuacguggugga

SEQ ID NO: 2322909 - RNA, 19 nt, Homo sapiens
  misc_RNA (1)...(19): siRNA sense strand
acaacaacacccugcucaa

SEQ ID NO: 2322910 - RNA, 19 nt, Homo sapiens
  misc_RNA (1)...(19): siRNA sense strand
ucaacggccuggaagguga

SEQ ID NO: 2322911 - RNA, 19 nt, Homo sapiens
  misc_RNA (1)...(19): siRNA sense strand
acuacagcuaccagggcaa

SEQ ID NO: 2322912 - RNA, 19 nt, Homo sapiens
  misc_RNA (1)...(19): siRNA sense strand
ccaauaaccaccacgacca

SEQ ID NO: 2322913 - RNA, 19 nt, Homo sapiens
  misc_RNA (1)...(19): siRNA sense strand
gcuucauggccacgugcaa

SEQ ID NO: 2322914 - RNA, 19 nt, Homo sapiens
  misc_RNA (1)...(19): siRNA sense strand
ccacgugcaaguacaacaa

SEQ ID NO: 2322915 - RNA, 19 nt, Homo sapiens
  misc_RNA (1)...(19): siRNA sense strand
gcaacauuaccgucugcaa

SEQ ID NO: 2322916 - RNA, 19 nt, Homo sapiens
  misc_RNA (1)...(19): siRNA sense strand
ggauaaacugcaagugaaa

SEQ ID NO: 2322917 - RNA, 19 nt, Homo sapiens
  misc_RNA (1)...(19): siRNA sense strand
gugcaauccuggagggaca

SEQ ID NO: 2322918 - RNA, 19 nt, Homo sapiens
  misc_RNA (1)...(19): siRNA sense strand
gcgcgaagacagagaaaca

SEQ ID NO: 2322919 - RNA, 19 nt, Homo sapiens
  misc_RNA (1)...(19): siRNA sense strand
cagaagagcucaagaggca

SEQ ID NO: 2322920 - RNA, 19 nt, Homo sapiens
  misc_RNA (1)...(19): siRNA sense strand
uggcagaguggaagacaaa

SEQ ID NO: 2322921 - RNA, 19 nt, Homo sapiens
  misc_RNA (1)...(19): siRNA sense strand
ucgccaagucggaggcaaa

SEQ ID NO: 2322922 - RNA, 19 nt, Homo sapiens
  misc_RNA (1)...(19): siRNA sense strand
aggaagagaacaaggccaa

SEQ ID NO: 2322923 - RNA, 19 nt, Homo sapiens
  misc_RNA (1)...(19): siRNA sense strand
caaggaacgcugaggagaa

SEQ ID NO: 2322924 - RNA, 19 nt, Homo sapiens
  misc_RNA (1)...(19): siRNA sense strand
guacaagcugaaagcgaaa

SEQ ID NO: 2322925 - RNA, 19 nt, Homo sapiens
  misc_RNA (1)...(19): siRNA sense strand
ccauauuagaucuggagaa

SEQ ID NO: 2322926 - RNA, 19 nt, Homo sapiens
  misc_RNA (1)...(19): siRNA sense strand
agggagagcagaagaagaa

SEQ ID NO: 2322927 - RNA, 19 nt, Homo sapiens
  misc_RNA (1)...(19): siRNA sense strand
ggaaaggaacaaaaggaaa

SEQ ID NO: 2322928 - RNA, 19 nt, Homo sapiens
  misc_RNA (1)...(19): siRNA sense strand
ugucgaaaucuaaggcaaa

SEQ ID NO: 2322929 - RNA, 19 nt, Homo sapiens
  misc_RNA (1)...(19): siRNA sense strand
gaggaaggagcuagaggaa

SEQ ID NO: 2322930 - RNA, 19 nt, Homo sapiens
  misc_RNA (1)...(19): siRNA sense strand
acgccaagacugugaggaa

SEQ ID NO: 2322931 - RNA, 19 nt, Homo sapiens
  misc_RNA (1)...(19): siRNA sense strand
ccgaggugguggaaggcua

SEQ ID NO: 2322932 - RNA, 19 nt, Homo sapiens
  misc_RNA (1)...(19): siRNA sense strand
uggccaagguugagaagga

SEQ ID NO: 2322933 - RNA, 19 nt, Homo sapiens
  misc_RNA (1)...(19): siRNA sense strand
gcacagaagagcuggagga

SEQ ID NO: 2322934 - RNA, 19 nt, Homo sapiens
  misc_RNA (1)...(19): siRNA sense strand
agaaaguugccaagaagaa

SEQ ID NO: 2322935 - RNA, 19 nt, Homo sapiens
  misc_RNA (1)...(19): siRNA sense strand
ugaauugacacaagugaaa

SEQ ID NO: 2322936 - RNA, 19 nt, Homo sapiens
  misc_RNA (1)...(19): siRNA sense strand
cuguggaaacugaggacaa

SEQ ID NO: 2322937 - RNA, 19 nt, Homo sapiens
  misc_RNA (1)...(19): siRNA sense strand
aagaugaggaggagaucaa

SEQ ID NO: 2322938 - RNA, 19 nt, Homo sapiens
  misc_RNA (1)...(19): siRNA sense strand
gcaaaguuaaccagagaga

SEQ ID NO: 2322939 - RNA, 19 nt, Homo sapiens
  misc_RNA (1)...(19): siRNA sense strand
agucggaggcaaagaggaa

SEQ ID NO: 2322940 - RNA, 19 nt, Homo sapiens
  misc_RNA (1)...(19): siRNA sense strand
gagcaaacuggaacagcaa

SEQ ID NO: 2322941 - RNA, 19 nt, Homo sapiens
  misc_RNA (1)...(19): siRNA sense strand
gggaagaagcagauccaga

SEQ ID NO: 2322942 - RNA, 19 nt, Homo sapiens
  misc_RNA (1)...(19): siRNA sense strand
aggaggagcaggaaggcaa

SEQ ID NO: 2322943 - RNA, 19 nt, Homo sapiens
  misc_RNA (1)...(19): siRNA sense strand
aaaggaaauuggaaggaga

SEQ ID NO: 2322944 - RNA, 19 nt, Homo sapiens
  misc_RNA (1)...(19): siRNA sense strand
gugucgaaaucuaaggcaa

SEQ ID NO: 2322945 - RNA, 19 nt, Homo sapiens
  misc_RNA (1)...(19): siRNA sense strand
gggaacaguaugaggagga

SEQ ID NO: 2322946 - RNA, 19 nt, Homo sapiens
  misc_RNA (1)...(19): siRNA sense strand
uggacaagaagcagaggaa

SEQ ID NO: 2322947 - RNA, 19 nt, Homo sapiens
  misc_RNA (1)...(19): siRNA sense strand
aaguaugagcggaggguca

SEQ ID NO: 2322948 - RNA, 19 nt, Homo sapiens
  misc_RNA (1)...(19): siRNA sense strand
cugaagaagacaaagucaa

SEQ ID NO: 2322949 - RNA, 19 nt, Homo sapiens
  misc_RNA (1)...(19): siRNA sense strand
uggaacagcaaguggaaga

SEQ ID NO: 2322950 - RNA, 19 nt, Homo sapiens
  misc_RNA (1)...(19): siRNA sense strand
cgaccaacccuuacgacua

SEQ ID NO: 2322951 - RNA, 19 nt, Homo sapiens
  misc_RNA (1)...(19): siRNA sense strand
gaaagaagaaaguugccaa

SEQ ID NO: 2322952 - RNA, 19 nt, Homo sapiens
  misc_RNA (1)...(19): siRNA sense strand
ccagaaaaccaaagaugaa

SEQ ID NO: 2322953 - RNA, 19 nt, Homo sapiens
  misc_RNA (1)...(19): siRNA sense strand
cugaagaugaggaggagau

SEQ ID NO: 2322954 - RNA, 19 nt, Homo sapiens
  misc_RNA (1)...(19): siRNA sense strand
aaggagagguggaggaucu

SEQ ID NO: 2322955 - RNA, 19 nt, Homo sapiens
  misc_RNA (1)...(19): siRNA sense strand
acacaagugaaaucagaaa

SEQ ID NO: 2322956 - RNA, 19 nt, Homo sapiens
  misc_RNA (1)...(19): siRNA sense strand
gacaagaagcagaggaacu

SEQ ID NO: 2322957 - RNA, 19 nt, Homo sapiens
  misc_RNA (1)...(19): siRNA sense strand
guuaagggccugaggaagu

SEQ ID NO: 2322958 - RNA, 19 nt, Homo sapiens
  misc_RNA (1)...(19): siRNA sense strand
cggaggaggcugaugaaca

SEQ ID NO: 2322959 - RNA, 19 nt, Homo sapiens
  misc_RNA (1)...(19): siRNA sense strand
gaaaggaacaaaaggaaau

SEQ ID NO: 2322960 - RNA, 19 nt, Homo sapiens
  misc_RNA (1)...(19): siRNA sense strand
aagcagagcuggaggcauc

SEQ ID NO: 2322961 - RNA, 19 nt, Homo sapiens
  misc_RNA (1)...(19): siRNA sense strand
ggaaugaguacguuaccaa

SEQ ID NO: 2322962 - RNA, 19 nt, Homo sapiens
  misc_RNA (1)...(19): siRNA sense strand
gagcugaagaugaggagga

SEQ ID NO: 2322963 - RNA, 19 nt, Homo sapiens
  misc_RNA (1)...(19): siRNA sense strand
aguucaagcuggagaucga

SEQ ID NO: 2322964 - RNA, 19 nt, Homo sapiens
  misc_RNA (1)...(19): siRNA sense strand
aggaacagguugaggcagu

SEQ ID NO: 2322965 - RNA, 19 nt, Homo sapiens
  misc_RNA (1)...(19): siRNA sense strand
ccgagaaggaugaagagau

SEQ ID NO: 2322966 - RNA, 19 nt, Homo sapiens
  misc_RNA (1)...(19): siRNA sense strand
ugaaugaaaucgagaucca

SEQ ID NO: 2322967 - RNA, 19 nt, Homo sapiens
  misc_RNA (1)...(19): siRNA sense strand
ugaagaagaaccuggaaca

SEQ ID NO: 2322968 - RNA, 19 nt, Homo sapiens
  misc_RNA (1)...(19): siRNA sense strand
aguacaagcugaaagcgaa

SEQ ID NO: 2322969 - RNA, 19 nt, Homo sapiens
  misc_RNA (1)...(19): siRNA sense strand
agaucaaggaggugacaga

SEQ ID NO: 2322970 - RNA, 19 nt, Homo sapiens
  misc_RNA (1)...(19): siRNA sense strand
ccacgcagauagagcucaa

SEQ ID NO: 2322971 - RNA, 19 nt, Homo sapiens
  misc_RNA (1)...(19): siRNA sense strand
acaagaagcgggaggcuga

SEQ ID NO: 2322972 - RNA, 19 nt, Homo sapiens
  misc_RNA (1)...(19): siRNA sense strand
ucgagcagcugaagaggaa

SEQ ID NO: 2322973 - RNA, 19 nt, Homo sapiens
  misc_RNA (1)...(19): siRNA sense strand
gagaaggagaagagcgagu

SEQ ID NO: 2322974 - RNA, 19 nt, Homo sapiens
  misc_RNA (1)...(19): siRNA sense strand
aagugaaagucaaguccua

SEQ ID NO: 2322975 - RNA, 19 nt, Homo sapiens
  misc_RNA (1)...(19): siRNA sense strand
acaagaagccugagcucau

SEQ ID NO: 2322976 - RNA, 19 nt, Homo sapiens
  misc_RNA (1)...(19): siRNA sense strand
agaacaagcuguaugacca

SEQ ID NO: 2322977 - RNA, 19 nt, Homo sapiens
  misc_RNA (1)...(19): siRNA sense strand
aggaagaagcaugcggaua

SEQ ID NO: 2322978 - RNA, 19 nt, Homo sapiens
  misc_RNA (1)...(19): siRNA sense strand
aggagaggaucgaggcuca

SEQ ID NO: 2322979 - RNA, 19 nt, Homo sapiens
  misc_RNA (1)...(19): siRNA sense strand
cuguuaagggccugaggaa

SEQ ID NO: 2322980 - RNA, 19 nt, Homo sapiens
  misc_RNA (1)...(19): siRNA sense strand
ggaaggcuaccgaggcaaa

SEQ ID NO: 2322981 - RNA, 19 nt, Homo sapiens
  misc_RNA (1)...(19): siRNA sense strand
ggaucgaggcucagaacca

SEQ ID NO: 2322982 - RNA, 19 nt, Homo sapiens
  misc_RNA (1)...(19): siRNA sense strand
gaaacugugaaacgggaaa

SEQ ID NO: 2322983 - RNA, 19 nt, Homo sapiens
  misc_RNA (1)...(19): siRNA sense strand
gugaagaggacaggaagaa

SEQ ID NO: 2322984 - RNA, 19 nt, Homo sapiens
  misc_RNA (1)...(19): siRNA sense strand
aggcagagaucgagcggaa

SEQ ID NO: 2322985 - RNA, 19 nt, Homo sapiens
  misc_RNA (1)...(19): siRNA sense strand
agaagaagauggaaggaga

SEQ ID NO: 2322986 - RNA, 19 nt, Homo sapiens
  misc_RNA (1)...(19): siRNA sense strand
uggacaagaagcagagaaa

SEQ ID NO: 2322987 - RNA, 19 nt, Homo sapiens
  misc_RNA (1)...(19): siRNA sense strand
cugcagacauagagaccua

SEQ ID NO: 2322988 - RNA, 19 nt, Homo sapiens
  misc_RNA (1)...(19): siRNA sense strand
gcaaacagcuggaggugga

SEQ ID NO: 2322989 - RNA, 19 nt, Homo sapiens
  misc_RNA (1)...(19): siRNA sense strand
ccaaaguaaaggagaugaa

SEQ ID NO: 2322990 - RNA, 19 nt, Homo sapiens
  misc_RNA (1)...(19): siRNA sense strand
aggagaaggaggaaagaau

SEQ ID NO: 2322991 - RNA, 19 nt, Homo sapiens
  misc_RNA (1)...(19): siRNA sense strand
ccuucaagcgggagaacaa

SEQ ID NO: 2322992 - RNA, 19 nt, Homo sapiens
  misc_RNA (1)...(19): siRNA sense strand
cagagaaggacgaggagau

SEQ ID NO: 2322993 - RNA, 19 nt, Homo sapiens
  misc_RNA (1)...(19): siRNA sense strand
ucaucaaggccaaggcaaa

SEQ ID NO: 2322994 - RNA, 19 nt, Homo sapiens
  misc_RNA (1)...(19): siRNA sense strand
aggccaagcuguacgacaa

SEQ ID NO: 2322995 - RNA, 19 nt, Homo sapiens
  misc_RNA (1)...(19): siRNA sense strand
aaguaaaggagaugaauga

SEQ ID NO: 2322996 - RNA, 19 nt, Homo sapiens
  misc_RNA (1)...(19): siRNA sense strand
cccuagagcaagagaagaa

SEQ ID NO: 2322997 - RNA, 19 nt, Homo sapiens
  misc_RNA (1)...(19): siRNA sense strand
uggcagaggagcugaagaa

SEQ ID NO: 2322998 - RNA, 19 nt, Homo sapiens
  misc_RNA (1)...(19): siRNA sense strand
ggacagugguaaaagcaaa

SEQ ID NO: 2322999 - RNA, 19 nt, Homo sapiens
  misc_RNA (1)...(19): siRNA sense strand
cagagaacaaggugaagaa

SEQ ID NO: 2323000 - RNA, 19 nt, Homo sapiens
  misc_RNA (1)...(19): siRNA sense strand
cggugaagggcaugaggaa

SEQ ID NO: 2323001 - RNA, 19 nt, Homo sapiens
  misc_RNA (1)...(19): siRNA sense strand
aggaugaggaggagaugaa

SEQ ID NO: 2323002 - RNA, 19 nt, Homo sapiens
  misc_RNA (1)...(19): siRNA sense strand
gagaaugggaagacgguga

SEQ ID NO: 2323003 - RNA, 19 nt, Homo sapiens
  misc_RNA (1)...(19): siRNA sense strand
aggccaaaguaaaggagau

SEQ ID NO: 2323004 - RNA, 19 nt, Homo sapiens
  misc_RNA (1)...(19): siRNA sense strand
uggccaagguggagaagga

SEQ ID NO: 2323005 - RNA, 19 nt, Homo sapiens
  misc_RNA (1)...(19): siRNA sense strand
gcaagaaggacaaugccaa

SEQ ID NO: 2323006 - RNA, 19 nt, Homo sapiens
  misc_RNA (1)...(19): siRNA sense strand
agauucagcuggaggccaa

SEQ ID NO: 2323007 - RNA, 19 nt, Homo sapiens
  misc_RNA (1)...(19): siRNA sense strand
augagaggcuggaggauga

SEQ ID NO: 2323008 - RNA, 19 nt, Homo sapiens
  misc_RNA (1)...(19): siRNA sense strand
gacaagaagcagagaaacu

SEQ ID NO: 2323009 - RNA, 19 nt, Homo sapiens
  misc_RNA (1)...(19): siRNA sense strand
aguacaagaaggagggcau

SEQ ID NO: 2323010 - RNA, 19 nt, Homo sapiens
  misc_RNA (1)...(19): siRNA sense strand
aggaggagacagaggccaa

SEQ ID NO: 2323011 - RNA, 19 nt, Homo sapiens
  misc_RNA (1)...(19): siRNA sense strand
acgacgaccugaaggagaa

SEQ ID NO: 2323012 - RNA, 19 nt, Homo sapiens
  misc_RNA (1)...(19): siRNA sense strand
gggcccagcuagaguucaa

SEQ ID NO: 2323013 - RNA, 19 nt, Homo sapiens
  misc_RNA (1)...(19): siRNA sense strand
uggaacaggccaagcgcaa

SEQ ID NO: 2323014 - RNA, 19 nt, Homo sapiens
  misc_RNA (1)...(19): siRNA sense strand
gcagagacggagaaggaga

SEQ ID NO: 2323015 - RNA, 19 nt, Homo sapiens
  misc_RNA (1)...(19): siRNA sense strand
ccaagguggagaaggagaa

SEQ ID NO: 2323016 - RNA, 19 nt, Homo sapiens
  misc_RNA (1)...(19): siRNA sense strand
gagccaagcugcagaccga

SEQ ID NO: 2323017 - RNA, 19 nt, Homo sapiens
  misc_RNA (1)...(19): siRNA sense strand
cagaagaagaagauggagu

SEQ ID NO: 2323018 - RNA, 19 nt, Homo sapiens
  misc_RNA (1)...(19): siRNA sense strand
ucgaggagcuggaggagga

SEQ ID NO: 2323019 - RNA, 19 nt, Homo sapiens
  misc_RNA (1)...(19): siRNA sense strand
ccgugcagaucgagaugaa

SEQ ID NO: 2323020 - RNA, 19 nt, Homo sapiens
  misc_RNA (1)...(19): siRNA sense strand
ggaccaaguaugagacgga

SEQ ID NO: 2323021 - RNA, 19 nt, Homo sapiens
  misc_RNA (1)...(19): siRNA sense strand
ggacaaugccaaugcgaac

SEQ ID NO: 2323022 - RNA, 19 nt, Homo sapiens
  misc_RNA (1)...(19): siRNA sense strand
guucaagaagauaguggaa

SEQ ID NO: 2323023 - RNA, 19 nt, Homo sapiens
  misc_RNA (1)...(19): siRNA sense strand
gagaaggagaagagcgagu

SEQ ID NO: 2323024 - RNA, 19 nt, Homo sapiens
  misc_RNA (1)...(19): siRNA sense strand
acaagaaccuucaggagga

SEQ ID NO: 2323025 - RNA, 19 nt, Homo sapiens
  misc_RNA (1)...(19): siRNA sense strand
cuggagaagucccggguga

SEQ ID NO: 2323026 - RNA, 19 nt, Homo sapiens
  misc_RNA (1)...(19): siRNA sense strand
aagaauuggcccuggauga

SEQ ID NO: 2323027 - RNA, 19 nt, Homo sapiens
  misc_RNA (1)...(19): siRNA sense strand
uggagaaggagaagagcga

SEQ ID NO: 2323028 - RNA, 19 nt, Homo sapiens
  misc_RNA (1)...(19): siRNA sense strand
aggagaagagcgaguucaa

SEQ ID NO: 2323029 - RNA, 19 nt, Homo sapiens
  misc_RNA (1)...(19): siRNA sense strand
acgacaaccaccugggcaa

SEQ ID NO: 2323030 - RNA, 19 nt, Homo sapiens
  misc_RNA (1)...(19): siRNA sense strand
gaacaguaagauugaggau

SEQ ID NO: 2323031 - RNA, 19 nt, Homo sapiens
  misc_RNA (1)...(19): siRNA sense strand
aggcaguguaugagaagau

SEQ ID NO: 2323032 - RNA, 19 nt, Homo sapiens
  misc_RNA (1)...(19): siRNA sense strand
uguccaagucuaaggucaa

SEQ ID NO: 2323033 - RNA, 19 nt, Homo sapiens
  misc_RNA (1)...(19): siRNA sense strand
gcaucauggaccuggaaaa

SEQ ID NO: 2323034 - RNA, 19 nt, Homo sapiens
  misc_RNA (1)...(19): siRNA sense strand
aguacgaggaggagacaga

SEQ ID NO: 2323035 - RNA, 19 nt, Homo sapiens
  misc_RNA (1)...(19): siRNA sense strand
ucaucaaccagaagaagaa

SEQ ID NO: 2323036 - RNA, 19 nt, Homo sapiens
  misc_RNA (1)...(19): siRNA sense strand
cggaaguggaggaggcagu

SEQ ID NO: 2323037 - RNA, 19 nt, Homo sapiens
  misc_RNA (1)...(19): siRNA sense strand
ugacagaucgggagaacca

SEQ ID NO: 2323038 - RNA, 19 nt, Homo sapiens
  misc_RNA (1)...(19): siRNA sense strand
ccgaguggaagcagaagua

SEQ ID NO: 2323039 - RNA, 19 nt, Homo sapiens
  misc_RNA (1)...(19): siRNA sense strand
aggccgagcagaagcgcaa

SEQ ID NO: 2323040 - RNA, 19 nt, Homo sapiens
  misc_RNA (1)...(19): siRNA sense strand
aggccgaguuccagaagau

SEQ ID NO: 2323041 - RNA, 19 nt, Homo sapiens
  misc_RNA (1)...(19): siRNA sense strand
gcaacgagguccugagggu

SEQ ID NO: 2323042 - RNA, 19 nt, Homo sapiens
  misc_RNA (1)...(19): siRNA sense strand
gcaccgaagaugcugacaa

SEQ ID NO: 2323043 - RNA, 19 nt, Homo sapiens
  misc_RNA (1)...(19): siRNA sense strand
gcaacgaguaugucaccaa

SEQ ID NO: 2323044 - RNA, 19 nt, Homo sapiens
  misc_RNA (1)...(19): siRNA sense strand
gugaagaagaagauggaag

SEQ ID NO: 2323045 - RNA, 19 nt, Homo sapiens
  misc_RNA (1)...(19): siRNA sense strand
ccuaccagacagaggaaga

SEQ ID NO: 2323046 - RNA, 19 nt, Homo sapiens
  misc_RNA (1)...(19): siRNA sense strand
uggccaaggcaguguauga

SEQ ID NO: 2323047 - RNA, 19 nt, Homo sapiens
  misc_RNA (1)...(19): siRNA sense strand
gcaacagagaacaagguga

SEQ ID NO: 2323048 - RNA, 19 nt, Homo sapiens
  misc_RNA (1)...(19): siRNA sense strand
agcuggaggaggagggcaa

SEQ ID NO: 2323049 - RNA, 19 nt, Homo sapiens
  misc_RNA (1)...(19): siRNA sense strand
gcuaggagaaggaggaaag

SEQ ID NO: 2323050 - RNA, 19 nt, Homo sapiens
  misc_RNA (1)...(19): siRNA sense strand
aagcaaagaaggagggaaa

SEQ ID NO: 2323051 - RNA, 19 nt, Homo sapiens
  misc_RNA (1)...(19): siRNA sense strand
gggaagaaaucgaggcaga

SEQ ID NO: 2323052 - RNA, 19 nt, Homo sapiens
  misc_RNA (1)...(19): siRNA sense strand
acgcaaugcagaagagaaa

SEQ ID NO: 2323053 - RNA, 19 nt, Homo sapiens
  misc_RNA (1)...(19): siRNA sense strand
agucugaaguugauagaaa

SEQ ID NO: 2323054 - RNA, 19 nt, Homo sapiens
  misc_RNA (1)...(19): siRNA sense strand
cagaaaaggaugaggaaau

SEQ ID NO: 2323055 - RNA, 19 nt, Homo sapiens
  misc_RNA (1)...(19): siRNA sense strand
ggaagaaaugagagaugaa

SEQ ID NO: 2323056 - RNA, 19 nt, Homo sapiens
  misc_RNA (1)...(19): siRNA sense strand
aggaagagcaggaaggcaa

SEQ ID NO: 2323057 - RNA, 19 nt, Homo sapiens
  misc_RNA (1)...(19): siRNA sense strand
gggaacaguaugaggaaga

SEQ ID NO: 2323058 - RNA, 19 nt, Homo sapiens
  misc_RNA (1)...(19): siRNA sense strand
agagaaaacuggaggauga

SEQ ID NO: 2323059 - RNA, 19 nt, Homo sapiens
  misc_RNA (1)...(19): siRNA sense strand
gagcugaggaggaggaaga

SEQ ID NO: 2323060 - RNA, 19 nt, Homo sapiens
  misc_RNA (1)...(19): siRNA sense strand
uuagaaaaguccagaguua

SEQ ID NO: 2323061 - RNA, 19 nt, Homo sapiens
  misc_RNA (1)...(19): siRNA sense strand
ccacaauggauauggaaaa

SEQ ID NO: 2323062 - RNA, 19 nt, Homo sapiens
  misc_RNA (1)...(19): siRNA sense strand
ggaugaaaccauugcaaaa

SEQ ID NO: 2323063 - RNA, 19 nt, Homo sapiens
  misc_RNA (1)...(19): siRNA sense strand
ccuaaugaggguagaauau

SEQ ID NO: 2323064 - RNA, 19 nt, Homo sapiens
  misc_RNA (1)...(19): siRNA sense strand
gauaagaagcaaaggaacu

SEQ ID NO: 2323065 - RNA, 19 nt, Homo sapiens
  misc_RNA (1)...(19): siRNA sense strand
gguugaaaaugaacagaaa

SEQ ID NO: 2323066 - RNA, 19 nt, Homo sapiens
  misc_RNA (1)...(19): siRNA sense strand
ucgccaagucagaggcaaa

SEQ ID NO: 2323067 - RNA, 19 nt, Homo sapiens
  misc_RNA (1)...(19): siRNA sense strand
ggguagaauaucagaagau

SEQ ID NO: 2323068 - RNA, 19 nt, Homo sapiens
  misc_RNA (1)...(19): siRNA sense strand
cguaaagacugaaggugga

SEQ ID NO: 2323069 - RNA, 19 nt, Homo sapiens
  misc_RNA (1)...(19): siRNA sense strand
agaggaaaggugugagcaa

SEQ ID NO: 2323070 - RNA, 19 nt, Homo sapiens
  misc_RNA (1)...(19): siRNA sense strand
aggaggaggaagagaucaa

SEQ ID NO: 2323071 - RNA, 19 nt, Homo sapiens
  misc_RNA (1)...(19): siRNA sense strand
cugaggaggcugaggaaca

SEQ ID NO: 2323072 - RNA, 19 nt, Homo sapiens
  misc_RNA (1)...(19): siRNA sense strand
ccaagguggucaaaggcaa

SEQ ID NO: 2323073 - RNA, 19 nt, Homo sapiens
  misc_RNA (1)...(19): siRNA sense strand
gcacagaggagcuggagga

SEQ ID NO: 2323074 - RNA, 19 nt, Homo sapiens
  misc_RNA (1)...(19): siRNA sense strand
aagcagaaguaugaggaaa

SEQ ID NO: 2323075 - RNA, 19 nt, Homo sapiens
  misc_RNA (1)...(19): siRNA sense strand
uggagaaggagaagaguga

SEQ ID NO: 2323076 - RNA, 19 nt, Homo sapiens
  misc_RNA (1)...(19): siRNA sense strand
uugaccagcugaagagaaa

SEQ ID NO: 2323077 - RNA, 19 nt, Homo sapiens
  misc_RNA (1)...(19): siRNA sense strand
cugaaagagcugaggagga

SEQ ID NO: 2323078 - RNA, 19 nt, Homo sapiens
  misc_RNA (1)...(19): siRNA sense strand
gagccaaagcggagaagca

SEQ ID NO: 2323079 - RNA, 19 nt, Homo sapiens
  misc_RNA (1)...(19): siRNA sense strand
agaaguaauccaagaauca

SEQ ID NO: 2323080 - RNA, 19 nt, Homo sapiens
  misc_RNA (1)...(19): siRNA sense strand
gggaagaagcagauccaga

SEQ ID NO: 2323081 - RNA, 19 nt, Homo sapiens
  misc_RNA (1)...(19): siRNA sense strand
ggugaauauucucgacaau

SEQ ID NO: 2323082 - RNA, 19 nt, Homo sapiens
  misc_RNA (1)...(19): siRNA sense strand
ugcaagaagcugaggaaca

SEQ ID NO: 2323083 - RNA, 19 nt, Homo sapiens
  misc_RNA (1)...(19): siRNA sense strand
acaugaagaaggaaagauu

SEQ ID NO: 2323084 - RNA, 19 nt, Homo sapiens
  misc_RNA (1)...(19): siRNA sense strand
uagaaagagcaaagcggaa

SEQ ID NO: 2323085 - RNA, 19 nt, Homo sapiens
  misc_RNA (1)...(19): siRNA sense strand
gaaacaucaacuagaggaa

SEQ ID NO: 2323086 - RNA, 19 nt, Homo sapiens
  misc_RNA (1)...(19): siRNA sense strand
ggaagagcaggaaggcaaa

SEQ ID NO: 2323087 - RNA, 19 nt, Homo sapiens
  misc_RNA (1)...(19): siRNA sense strand
uagauaaauuacaggcgaa

SEQ ID NO: 2323088 - RNA, 19 nt, Homo sapiens
  misc_RNA (1)...(19): siRNA sense strand
guugacugaucgagagaau

SEQ ID NO: 2323089 - RNA, 19 nt, Homo sapiens
  misc_RNA (1)...(19): siRNA sense strand
caauaagaagccagaucua

SEQ ID NO: 2323090 - RNA, 19 nt, Homo sapiens
  misc_RNA (1)...(19): siRNA sense strand
uuaaggaacuacaggaaca

SEQ ID NO: 2323091 - RNA, 19 nt, Homo sapiens
  misc_RNA (1)...(19): siRNA sense strand
uaucagaagauguugcaaa

SEQ ID NO: 2323092 - RNA, 19 nt, Homo sapiens
  misc_RNA (1)...(19): siRNA sense strand
ccagaaaaccaaagaugaa

SEQ ID NO: 2323093 - RNA, 19 nt, Homo sapiens
  misc_RNA (1)...(19): siRNA sense strand
agacagaagcgggugaaua

SEQ ID NO: 2323094 - RNA, 19 nt, Homo sapiens
  misc_RNA (1)...(19): siRNA sense strand
ggauauggaaaaugacaaa

SEQ ID NO: 2323095 - RNA, 19 nt, Homo sapiens
  misc_RNA (1)...(19): siRNA sense strand
ggaaaaugacaaacagcaa

SEQ ID NO: 2323096 - RNA, 19 nt, Homo sapiens
  misc_RNA (1)...(19): siRNA sense strand
cuagagucguggagacaau

SEQ ID NO: 2323097 - RNA, 19 nt, Homo sapiens
  misc_RNA (1)...(19): siRNA sense strand
agaagaaaauggaaggaga

SEQ ID NO: 2323098 - RNA, 19 nt, Homo sapiens
  misc_RNA (1)...(19): siRNA sense strand
gcaaaggagagaagcacuu

SEQ ID NO: 2323099 - RNA, 19 nt, Homo sapiens
  misc_RNA (1)...(19): siRNA sense strand
ggaagaaacuaaagccaag

SEQ ID NO: 2323100 - RNA, 19 nt, Homo sapiens
  misc_RNA (1)...(19): siRNA sense strand
gaucugaaugaaauggaaa

SEQ ID NO: 2323101 - RNA, 19 nt, Homo sapiens
  misc_RNA (1)...(19): siRNA sense strand
cugcugauauagaaacaua

SEQ ID NO: 2323102 - RNA, 19 nt, Homo sapiens
  misc_RNA (1)...(19): siRNA sense strand
caagaagaguugauggcca

SEQ ID NO: 2323103 - RNA, 19 nt, Homo sapiens
  misc_RNA (1)...(19): siRNA sense strand
ccacggagaacaaggugaa

SEQ ID NO: 2323104 - RNA, 19 nt, Homo sapiens
  misc_RNA (1)...(19): siRNA sense strand
aggaagaaacuaaagccaa

SEQ ID NO: 2323105 - RNA, 19 nt, Homo sapiens
  misc_RNA (1)...(19): siRNA sense strand
gaacagacagagagaagca

SEQ ID NO: 2323106 - RNA, 19 nt, Homo sapiens
  misc_RNA (1)...(19): siRNA sense strand
acagagagaagcaggaaaa

SEQ ID NO: 2323107 - RNA, 19 nt, Homo sapiens
  misc_RNA (1)...(19): siRNA sense strand
ggaacaauccaaugcuaau

SEQ ID NO: 2323108 - RNA, 19 nt, Homo sapiens
  misc_RNA (1)...(19): siRNA sense strand
acaagaagcgggaggcuga

SEQ ID NO: 2323109 - RNA, 19 nt, Homo sapiens
  misc_RNA (1)...(19): siRNA sense strand
gggugaauauucucgacaa

SEQ ID NO: 2323110 - RNA, 19 nt, Homo sapiens
  misc_RNA (1)...(19): siRNA sense strand
gauuagaagcagaaaugau

SEQ ID NO: 2323111 - RNA, 19 nt, Homo sapiens
  misc_RNA (1)...(19): siRNA sense strand
gugaaguggaagaaguaau

SEQ ID NO: 2323112 - RNA, 19 nt, Homo sapiens
  misc_RNA (1)...(19): siRNA sense strand
cgaagaaaggugcuaagaa

SEQ ID NO: 2323113 - RNA, 19 nt, Homo sapiens
  misc_RNA (1)...(19): siRNA sense strand
gcagaaucuuauaugguga

SEQ ID NO: 2323114 - RNA, 19 nt, Homo sapiens
  misc_RNA (1)...(19): siRNA sense strand
ugacagccaagaagagaaa

SEQ ID NO: 2323115 - RNA, 19 nt, Homo sapiens
  misc_RNA (1)...(19): siRNA sense strand
agaaagagcaaagcggaaa

SEQ ID NO: 2323116 - RNA, 19 nt, Homo sapiens
  misc_RNA (1)...(19): siRNA sense strand
gcagagauuagaagcagaa

SEQ ID NO: 2323117 - RNA, 19 nt, Homo sapiens
  misc_RNA (1)...(19): siRNA sense strand
cagaagagaaagccaagaa

SEQ ID NO: 2323118 - RNA, 19 nt, Homo sapiens
  misc_RNA (1)...(19): siRNA sense strand
uggcagagcuggaggacga

SEQ ID NO: 2323119 - RNA, 19 nt, Homo sapiens
  misc_RNA (1)...(19): siRNA sense strand
caaacuaccuauacggcaa

SEQ ID NO: 2323120 - RNA, 19 nt, Homo sapiens
  misc_RNA (1)...(19): siRNA sense strand
gcaaggacacuaugggcga

SEQ ID NO: 2323121 - RNA, 19 nt, Homo sapiens
  misc_RNA (1)...(19): siRNA sense strand
aggcauuccaggacggaga

SEQ ID NO: 2323122 - RNA, 19 nt, Homo sapiens
  misc_RNA (1)...(19): siRNA sense strand
cgugcugauccuuggacaa

SEQ ID NO: 2323123 - RNA, 19 nt, Homo sapiens
  misc_RNA (1)...(19): siRNA sense strand
agaccgucgugcagcagaa

SEQ ID NO: 2323124 - RNA, 19 nt, Homo sapiens
  misc_RNA (1)...(19): siRNA sense strand
uggagagccucgagcacca

SEQ ID NO: 2323125 - RNA, 19 nt, Homo sapiens
  misc_RNA (1)...(19): siRNA sense strand
ggcagaagaccgagagcac

SEQ ID NO: 2323126 - RNA, 19 nt, Homo sapiens
  misc_RNA (1)...(19): siRNA sense strand
cgagcuggagcgaggcaau

SEQ ID NO: 2323127 - RNA, 19 nt, Homo sapiens
  misc_RNA (1)...(19): siRNA sense strand
ccagaugcguucaaggugu

SEQ ID NO: 2323128 - RNA, 19 nt, Homo sapiens
  misc_RNA (1)...(19): siRNA sense strand
agaaaggcguucaaggguu

SEQ ID NO: 2323129 - RNA, 19 nt, Homo sapiens
  misc_RNA (1)...(19): siRNA sense strand
cuaaauuuaagcagcgaca

SEQ ID NO: 2323130 - RNA, 19 nt, Homo sapiens
  misc_RNA (1)...(19): siRNA sense strand
gaauggaaggccugggaac

SEQ ID NO: 2323131 - RNA, 19 nt, Homo sapiens
  misc_RNA (1)...(19): siRNA sense strand
ggcagaagcugguggugga

SEQ ID NO: 2323132 - RNA, 19 nt, Homo sapiens
  misc_RNA (1)...(19): siRNA sense strand
ccgcaaguuugacggacau

SEQ ID NO: 2323133 - RNA, 19 nt, Homo sapiens
  misc_RNA (1)...(19): siRNA sense strand
cuugaaaggaucaugguca

SEQ ID NO: 2323134 - RNA, 19 nt, Homo sapiens
  misc_RNA (1)...(19): siRNA sense strand
gugaggagcuacaagggca

SEQ ID NO: 2323135 - RNA, 19 nt, Homo sapiens
  misc_RNA (1)...(19): siRNA sense strand
agcuggugguggaggagaa

SEQ ID NO: 2323136 - RNA, 19 nt, Homo sapiens
  misc_RNA (1)...(19): siRNA sense strand
augaagaauccuccggcaa

SEQ ID NO: 2323137 - RNA, 19 nt, Homo sapiens
  misc_RNA (1)...(19): siRNA sense strand
gggccagaccauggaacaa

SEQ ID NO: 2323138 - RNA, 19 nt, Homo sapiens
  misc_RNA (1)...(19): siRNA sense strand
cgacggaacaugaagucca

SEQ ID NO: 2323139 - RNA, 19 nt, Homo sapiens
  misc_RNA (1)...(19): siRNA sense strand
gccgcaaguuugacggaca

SEQ ID NO: 2323140 - RNA, 19 nt, Homo sapiens
  misc_RNA (1)...(19): siRNA sense strand
gaaacguaguggugggcuc

SEQ ID NO: 2323141 - RNA, 19 nt, Homo sapiens
  misc_RNA (1)...(19): siRNA sense strand
uuuccauggucgaagguca

SEQ ID NO: 2323142 - RNA, 19 nt, Homo sapiens
  misc_RNA (1)...(19): siRNA sense strand
cguugauguuauucgggaa

SEQ ID NO: 2323143 - RNA, 19 nt, Homo sapiens
  misc_RNA (1)...(19): siRNA sense strand
cagaauugaaagaaugcau

SEQ ID NO: 2323144 - RNA, 19 nt, Homo sapiens
  misc_RNA (1)...(19): siRNA sense strand
ggacaggaccucugcagga

SEQ ID NO: 2323145 - RNA, 19 nt, Homo sapiens
  misc_RNA (1)...(19): siRNA sense strand
cugaaaugcugcaacacca

SEQ ID NO: 2323146 - RNA, 19 nt, Homo sapiens
  misc_RNA (1)...(19): siRNA sense strand
gguaagaggcugugcaacc

SEQ ID NO: 2323147 - RNA, 19 nt, Homo sapiens
  misc_RNA (1)...(19): siRNA sense strand
gagaaaagcuguacccacu

SEQ ID NO: 2323148 - RNA, 19 nt, Homo sapiens
  misc_RNA (1)...(19): siRNA sense strand
cuauaugguaagaggcugu

SEQ ID NO: 2323149 - RNA, 19 nt, Homo sapiens
  misc_RNA (1)...(19): siRNA sense strand
cgguagaagaacuggauua

SEQ ID NO: 2323150 - RNA, 19 nt, Homo sapiens
  misc_RNA (1)...(19): siRNA sense strand
ccacagagcuccugcccaa

SEQ ID NO: 2323151 - RNA, 19 nt, Homo sapiens
  misc_RNA (1)...(19): siRNA sense strand
cgcaagguccagagagaaa

SEQ ID NO: 2323152 - RNA, 19 nt, Homo sapiens
  misc_RNA (1)...(19): siRNA sense strand
gggcaucagccgugagcau

SEQ ID NO: 2323153 - RNA, 19 nt, Homo sapiens
  misc_RNA (1)...(19): siRNA sense strand
gccagaagucccagaggaa

SEQ ID NO: 2323154 - RNA, 19 nt, Homo sapiens
  misc_RNA (1)...(19): siRNA sense strand
cgagcaaaucuucgggcaa

SEQ ID NO: 2323155 - RNA, 19 nt, Homo sapiens
  misc_RNA (1)...(19): siRNA sense strand
gagagaaacugcaaggaag

SEQ ID NO: 2323156 - RNA, 19 nt, Homo sapiens
  misc_RNA (1)...(19): siRNA sense strand
cagaagaggcccagcgauc

SEQ ID NO: 2323157 - RNA, 19 nt, Homo sapiens
  misc_RNA (1)...(19): siRNA sense strand
aggaagucacaguggaaga

SEQ ID NO: 2323158 - RNA, 19 nt, Homo sapiens
  misc_RNA (1)...(19): siRNA sense strand
gagcguuacucuuggacca

SEQ ID NO: 2323159 - RNA, 19 nt, Homo sapiens
  misc_RNA (1)...(19): siRNA sense strand
uggcagaggugcacagacu

SEQ ID NO: 2323160 - RNA, 19 nt, Homo sapiens
  misc_RNA (1)...(19): siRNA sense strand
ccgaguaggcagugaguug

SEQ ID NO: 2323161 - RNA, 19 nt, Homo sapiens
  misc_RNA (1)...(19): siRNA sense strand
gcgucgagcaccugcagaa

SEQ ID NO: 2323162 - RNA, 19 nt, Homo sapiens
  misc_RNA (1)...(19): siRNA sense strand
ggcugguggaagagcguua

SEQ ID NO: 2323163 - RNA, 19 nt, Homo sapiens
  misc_RNA (1)...(19): siRNA sense strand
cggcacaacccauuggaca

SEQ ID NO: 2323164 - RNA, 19 nt, Homo sapiens
  misc_RNA (1)...(19): siRNA sense strand
agaagaaagcuaagaaggu

SEQ ID NO: 2323165 - RNA, 19 nt, Homo sapiens
  misc_RNA (1)...(19): siRNA sense strand
cuuacaacgacguggacau

SEQ ID NO: 2323166 - RNA, 19 nt, Homo sapiens
  misc_RNA (1)...(19): siRNA sense strand
cugagaaggcccagcagau

SEQ ID NO: 2323167 - RNA, 19 nt, Homo sapiens
  misc_RNA (1)...(19): siRNA sense strand
caggaagaguuuaugacca

SEQ ID NO: 2323168 - RNA, 19 nt, Homo sapiens
  misc_RNA (1)...(19): siRNA sense strand
ccauauggcaaacgguaga

SEQ ID NO: 2323169 - RNA, 19 nt, Homo sapiens
  misc_RNA (1)...(19): siRNA sense strand
aagaaagcuaagaagguga

SEQ ID NO: 2323170 - RNA, 19 nt, Homo sapiens
  misc_RNA (1)...(19): siRNA sense strand
gugaggaggaggaguuuca

SEQ ID NO: 2323171 - RNA, 19 nt, Homo sapiens
  misc_RNA (1)...(19): siRNA sense strand
gagucagaaauguucaaua

SEQ ID NO: 2323172 - RNA, 19 nt, Homo sapiens
  misc_RNA (1)...(19): siRNA sense strand
gagaaggagccucgagaac

SEQ ID NO: 2323173 - RNA, 19 nt, Homo sapiens
  misc_RNA (1)...(19): siRNA sense strand
cagaagucccagaggaaag

SEQ ID NO: 2323174 - RNA, 19 nt, Homo sapiens
  misc_RNA (1)...(19): siRNA sense strand
gaagaaggaaccagccaca

SEQ ID NO: 2323175 - RNA, 19 nt, Homo sapiens
  misc_RNA (1)...(19): siRNA sense strand
ggcaaacgguagaagaacu

SEQ ID NO: 2323176 - RNA, 19 nt, Homo sapiens
  misc_RNA (1)...(19): siRNA sense strand
ggaagaagugggagguggu

SEQ ID NO: 2323177 - RNA, 19 nt, Homo sapiens
  misc_RNA (1)...(19): siRNA sense strand
agggugaagcgcuggauau

SEQ ID NO: 2323178 - RNA, 19 nt, Homo sapiens
  misc_RNA (1)...(19): siRNA sense strand
cguugauggaucuggccaa

SEQ ID NO: 2323179 - RNA, 19 nt, Homo sapiens
  misc_RNA (1)...(19): siRNA sense strand
ugcgcaagguccagagaga

SEQ ID NO: 2323180 - RNA, 19 nt, Homo sapiens
  misc_RNA (1)...(19): siRNA sense strand
auggcaaacgguagaagaa

SEQ ID NO: 2323181 - RNA, 19 nt, Homo sapiens
  misc_RNA (1)...(19): siRNA sense strand
gguaauagcuguaaugugg

SEQ ID NO: 2323182 - RNA, 19 nt, Homo sapiens
  misc_RNA (1)...(19): siRNA sense strand
agagaaacugcaaggaagu

SEQ ID NO: 2323183 - RNA, 19 nt, Homo sapiens
  misc_RNA (1)...(19): siRNA sense strand
ggcacaacccauuggacau

SEQ ID NO: 2323184 - RNA, 19 nt, Homo sapiens
  misc_RNA (1)...(19): siRNA sense strand
ccaugaaggacauucguga

SEQ ID NO: 2323185 - RNA, 19 nt, Homo sapiens
  misc_RNA (1)...(19): siRNA sense strand
gagcaggggcacugaucua

SEQ ID NO: 2323186 - RNA, 19 nt, Homo sapiens
  misc_RNA (1)...(19): siRNA sense strand
gggugaagcgcuggauauu

SEQ ID NO: 2323187 - RNA, 19 nt, Homo sapiens
  misc_RNA (1)...(19): siRNA sense strand
ggaugguaauagcuguaau

SEQ ID NO: 2323188 - RNA, 19 nt, Homo sapiens
  misc_RNA (1)...(19): siRNA sense strand
ggcagugaguugaaagcca

SEQ ID NO: 2323189 - RNA, 19 nt, Homo sapiens
  misc_RNA (1)...(19): siRNA sense strand
gcagugaguugaaagccau

SEQ ID NO: 2323190 - RNA, 19 nt, Homo sapiens
  misc_RNA (1)...(19): siRNA sense strand
gugagaacuuccaggaccu

SEQ ID NO: 2323191 - RNA, 19 nt, Homo sapiens
  misc_RNA (1)...(19): siRNA sense strand
ccagaagucccagaggaaa

SEQ ID NO: 2323192 - RNA, 19 nt, Homo sapiens
  misc_RNA (1)...(19): siRNA sense strand
gagugggaccugcaagaau

SEQ ID NO: 2323193 - RNA, 19 nt, Homo sapiens
  misc_RNA (1)...(19): siRNA sense strand
gaguaggcagugaguugaa

SEQ ID NO: 2323194 - RNA, 19 nt, Homo sapiens
  misc_RNA (1)...(19): siRNA sense strand
ucaggaaggaagugaccau

SEQ ID NO: 2323195 - RNA, 19 nt, Homo sapiens
  misc_RNA (1)...(19): siRNA sense strand
gauauugaccggugccuca

SEQ ID NO: 2323196 - RNA, 19 nt, Homo sapiens
  misc_RNA (1)...(19): siRNA sense strand
uuuaagcagaagaaagcua

SEQ ID NO: 2323197 - RNA, 19 nt, Homo sapiens
  misc_RNA (1)...(19): siRNA sense strand
ccucacaaggaugguaaua

SEQ ID NO: 2323198 - RNA, 19 nt, Homo sapiens
  misc_RNA (1)...(19): siRNA sense strand
cagaaauguucaauaagcu

SEQ ID NO: 2323199 - RNA, 19 nt, Homo sapiens
  misc_RNA (1)...(19): siRNA sense strand
agcuagugauggagggaua

SEQ ID NO: 2323200 - RNA, 19 nt, Homo sapiens
  misc_RNA (1)...(19): siRNA sense strand
ggauauaacuggugccaug

SEQ ID NO: 2323201 - RNA, 19 nt, Homo sapiens
  misc_RNA (1)...(19): siRNA sense strand
ggaucauaucagagcacuu

SEQ ID NO: 2323202 - RNA, 19 nt, Homo sapiens
  misc_RNA (1)...(19): siRNA sense strand
ugcgagaaggcuaaagaaa

SEQ ID NO: 2323203 - RNA, 19 nt, Homo sapiens
  misc_RNA (1)...(19): siRNA sense strand
gcaagagguucgaugucca

SEQ ID NO: 2323204 - RNA, 19 nt, Homo sapiens
  misc_RNA (1)...(19): siRNA sense strand
aaucaugagagcagacaga

SEQ ID NO: 2323205 - RNA, 19 nt, Homo sapiens
  misc_RNA (1)...(19): siRNA sense strand
ccggaauguaguaacgauu

SEQ ID NO: 2323206 - RNA, 19 nt, Homo sapiens
  misc_RNA (1)...(19): siRNA sense strand
uggagaugugcaugggcaa

SEQ ID NO: 2323207 - RNA, 19 nt, Homo sapiens
  misc_RNA (1)...(19): siRNA sense strand
uuauguugacagaggauau

SEQ ID NO: 2323208 - RNA, 19 nt, Homo sapiens
  misc_RNA (1)...(19): siRNA sense strand
uguccgagucccaggucaa

SEQ ID NO: 2323209 - RNA, 19 nt, Homo sapiens
  misc_RNA (1)...(19): siRNA sense strand
ugguuacaccuuugggcaa

SEQ ID NO: 2323210 - RNA, 19 nt, Homo sapiens
  misc_RNA (1)...(19): siRNA sense strand
auuacuuguuuaugggaga

SEQ ID NO: 2323211 - RNA, 19 nt, Homo sapiens
  misc_RNA (1)...(19): siRNA sense strand
ucaccaaggagcuggacca

SEQ ID NO: 2323212 - RNA, 19 nt, Homo sapiens
  misc_RNA (1)...(19): siRNA sense strand
gcgacgucccugagaccaa

SEQ ID NO: 2323213 - RNA, 19 nt, Homo sapiens
  misc_RNA (1)...(19): siRNA sense strand
ucuugguagaggagagcaa

SEQ ID NO: 2323214 - RNA, 19 nt, Homo sapiens
  misc_RNA (1)...(19): siRNA sense strand
cgcuaaggccagagagauc

SEQ ID NO: 2323215 - RNA, 19 nt, Homo sapiens
  misc_RNA (1)...(19): siRNA sense strand
cggcgacauccauggacaa

SEQ ID NO: 2323216 - RNA, 19 nt, Homo sapiens
  misc_RNA (1)...(19): siRNA sense strand
cugcuaccgcugugggaau

SEQ ID NO: 2323217 - RNA, 19 nt, Homo sapiens
  misc_RNA (1)...(19): siRNA sense strand
gucaaggcccugugcgcua

SEQ ID NO: 2323218 - RNA, 19 nt, Homo sapiens
  misc_RNA (1)...(19): siRNA sense strand
acgaugagugccugcgcaa

SEQ ID NO: 2323219 - RNA, 19 nt, Homo sapiens
  misc_RNA (1)...(19): siRNA sense strand
cgaacaaggaguaagggaa

SEQ ID NO: 2323220 - RNA, 19 nt, Homo sapiens
  misc_RNA (1)...(19): siRNA sense strand
cagauacaucagagauaaa

SEQ ID NO: 2323221 - RNA, 19 nt, Homo sapiens
  misc_RNA (1)...(19): siRNA sense strand
aaguaaaagcauuggcaaa

SEQ ID NO: 2323222 - RNA, 19 nt, Homo sapiens
  misc_RNA (1)...(19): siRNA sense strand
aguucaaggucaaagacua

SEQ ID NO: 2323223 - RNA, 19 nt, Homo sapiens
  misc_RNA (1)...(19): siRNA sense strand
acgagaaggcggagcguga

SEQ ID NO: 2323224 - RNA, 19 nt, Homo sapiens
  misc_RNA (1)...(19): siRNA sense strand
aggcgagaaacuagacaaa

SEQ ID NO: 2323225 - RNA, 19 nt, Homo sapiens
  misc_RNA (1)...(19): siRNA sense strand
gagaauuuccagaagguga

SEQ ID NO: 2323226 - RNA, 19 nt, Homo sapiens
  misc_RNA (1)...(19): siRNA sense strand
gcaaaaugggacagaaaga

SEQ ID NO: 2323227 - RNA, 19 nt, Homo sapiens
  misc_RNA (1)...(19): siRNA sense strand
cuuccugacaugaaagaaa

SEQ ID NO: 2323228 - RNA, 19 nt, Homo sapiens
  misc_RNA (1)...(19): siRNA sense strand
aggcggagcgugaaguaaa

SEQ ID NO: 2323229 - RNA, 19 nt, Homo sapiens
  misc_RNA (1)...(19): siRNA sense strand
ccaaauuagcuguugagau

SEQ ID NO: 2323230 - RNA, 19 nt, Homo sapiens
  misc_RNA (1)...(19): siRNA sense strand
agcagauacaucagagaua

SEQ ID NO: 2323231 - RNA, 19 nt, Homo sapiens
  misc_RNA (1)...(19): siRNA sense strand
gaacaaggaguaagggaac

SEQ ID NO: 2323232 - RNA, 19 nt, Homo sapiens
  misc_RNA (1)...(19): siRNA sense strand
augcaaaaugggacagaaa

SEQ ID NO: 2323233 - RNA, 19 nt, Homo sapiens
  misc_RNA (1)...(19): siRNA sense strand
ggucaaagacuaagugccu

SEQ ID NO: 2323234 - RNA, 19 nt, Homo sapiens
  misc_RNA (1)...(19): siRNA sense strand
cagaaauaaucaaaggaag

SEQ ID NO: 2323235 - RNA, 19 nt, Homo sapiens
  misc_RNA (1)...(19): siRNA sense strand
ucauagagaucuuaagcca

SEQ ID NO: 2323236 - RNA, 19 nt, Homo sapiens
  misc_RNA (1)...(19): siRNA sense strand
cuacaauggcuguugggau

SEQ ID NO: 2323237 - RNA, 19 nt, Homo sapiens
  misc_RNA (1)...(19): siRNA sense strand
gcccagaagaaaagacuaa

SEQ ID NO: 2323238 - RNA, 19 nt, Homo sapiens
  misc_RNA (1)...(19): siRNA sense strand
cugacaugaaagaaacaaa

SEQ ID NO: 2323239 - RNA, 19 nt, Homo sapiens
  misc_RNA (1)...(19): siRNA sense strand
aguaaaagcauuggcaaaa

SEQ ID NO: 2323240 - RNA, 19 nt, Homo sapiens
  misc_RNA (1)...(19): siRNA sense strand
uccagaaggugaagguaga

SEQ ID NO: 2323241 - RNA, 19 nt, Homo sapiens
  misc_RNA (1)...(19): siRNA sense strand
auagaauugcccagaagaa

SEQ ID NO: 2323242 - RNA, 19 nt, Homo sapiens
  misc_RNA (1)...(19): siRNA sense strand
cgugugagucccaaagcaa

SEQ ID NO: 2323243 - RNA, 19 nt, Homo sapiens
  misc_RNA (1)...(19): siRNA sense strand
aauaaucaaaggaaggcaa

SEQ ID NO: 2323244 - RNA, 19 nt, Homo sapiens
  misc_RNA (1)...(19): siRNA sense strand
cuucgcaagacuauggaaa

SEQ ID NO: 2323245 - RNA, 19 nt, Homo sapiens
  misc_RNA (1)...(19): siRNA sense strand
aaagaagaggcgagaaacu

SEQ ID NO: 2323246 - RNA, 19 nt, Homo sapiens
  misc_RNA (1)...(19): siRNA sense strand
ggacaagagguuuggcaug

SEQ ID NO: 2323247 - RNA, 19 nt, Homo sapiens
  misc_RNA (1)...(19): siRNA sense strand
ggugaagguagaucaaaga

SEQ ID NO: 2323248 - RNA, 19 nt, Homo sapiens
  misc_RNA (1)...(19): siRNA sense strand
cuuuggaacucuuugaaca

SEQ ID NO: 2323249 - RNA, 19 nt, Homo sapiens
  misc_RNA (1)...(19): siRNA sense strand
agaauugcccagaagaaaa

SEQ ID NO: 2323250 - RNA, 19 nt, Homo sapiens
  misc_RNA (1)...(19): siRNA sense strand
ggcauggauuuuaaagaaa

SEQ ID NO: 2323251 - RNA, 19 nt, Homo sapiens
  misc_RNA (1)...(19): siRNA sense strand
accuaacacaucugaaaua

SEQ ID NO: 2323252 - RNA, 19 nt, Homo sapiens
  misc_RNA (1)...(19): siRNA sense strand
aaugauggaaagcgaacaa

SEQ ID NO: 2323253 - RNA, 19 nt, Homo sapiens
  misc_RNA (1)...(19): siRNA sense strand
agaauuuccagaaggugaa

SEQ ID NO: 2323254 - RNA, 19 nt, Homo sapiens
  misc_RNA (1)...(19): siRNA sense strand
uagaauugcccagaagaaa

SEQ ID NO: 2323255 - RNA, 19 nt, Homo sapiens
  misc_RNA (1)...(19): siRNA sense strand
agaaauaaucaaaggaagg

SEQ ID NO: 2323256 - RNA, 19 nt, Homo sapiens
  misc_RNA (1)...(19): siRNA sense strand
gcgaacaaggaguaaggga

SEQ ID NO: 2323257 - RNA, 19 nt, Homo sapiens
  misc_RNA (1)...(19): siRNA sense strand
cauagagaucuuaagccaa

SEQ ID NO: 2323258 - RNA, 19 nt, Homo sapiens
  misc_RNA (1)...(19): siRNA sense strand
acuuguaacaucucugaaa

SEQ ID NO: 2323259 - RNA, 19 nt, Homo sapiens
  misc_RNA (1)...(19): siRNA sense strand
caaagaaaccugaggaucg

SEQ ID NO: 2323260 - RNA, 19 nt, Homo sapiens
  misc_RNA (1)...(19): siRNA sense strand
aagaaaagcccagagaaaa

SEQ ID NO: 2323261 - RNA, 19 nt, Homo sapiens
  misc_RNA (1)...(19): siRNA sense strand
uggcauggauuuuaaagaa

SEQ ID NO: 2323262 - RNA, 19 nt, Homo sapiens
  misc_RNA (1)...(19): siRNA sense strand
auaaucaaaggaaggcaaa

SEQ ID NO: 2323263 - RNA, 19 nt, Homo sapiens
  misc_RNA (1)...(19): siRNA sense strand
ucuugagagcagugauuau

SEQ ID NO: 2323264 - RNA, 19 nt, Homo sapiens
  misc_RNA (1)...(19): siRNA sense strand
agacuuuggacuuguaaca

SEQ ID NO: 2323265 - RNA, 19 nt, Homo sapiens
  misc_RNA (1)...(19): siRNA sense strand
agaucaaagaaggaagcaa

SEQ ID NO: 2323266 - RNA, 19 nt, Homo sapiens
  misc_RNA (1)...(19): siRNA sense strand
aauuaugaacagugugcau

SEQ ID NO: 2323267 - RNA, 19 nt, Homo sapiens
  misc_RNA (1)...(19): siRNA sense strand
ucuaacagugacaguuuaa

SEQ ID NO: 2323268 - RNA, 19 nt, Homo sapiens
  misc_RNA (1)...(19): siRNA sense strand
ugauuaugauccugagaac

SEQ ID NO: 2323269 - RNA, 19 nt, Homo sapiens
  misc_RNA (1)...(19): siRNA sense strand
gauccugagaacagcaaaa

SEQ ID NO: 2323270 - RNA, 19 nt, Homo sapiens
  misc_RNA (1)...(19): siRNA sense strand
auacauaccgucagaagca

SEQ ID NO: 2323271 - RNA, 19 nt, Homo sapiens
  misc_RNA (1)...(19): siRNA sense strand
caugauaggagguuuacau

SEQ ID NO: 2323272 - RNA, 19 nt, Homo sapiens
  misc_RNA (1)...(19): siRNA sense strand
aggugaagcaggagaauaa

SEQ ID NO: 2323273 - RNA, 19 nt, Homo sapiens
  misc_RNA (1)...(19): siRNA sense strand
agaaaggguacgaggcaaa

SEQ ID NO: 2323274 - RNA, 19 nt, Homo sapiens
  misc_RNA (1)...(19): siRNA sense strand
aguacaaagugaagaucaa

SEQ ID NO: 2323275 - RNA, 19 nt, Homo sapiens
  misc_RNA (1)...(19): siRNA sense strand
aguuaucauuggugguaaa

SEQ ID NO: 2323276 - RNA, 19 nt, Homo sapiens
  misc_RNA (1)...(19): siRNA sense strand
ccguggaccugguggagaa

SEQ ID NO: 2323277 - RNA, 19 nt, Homo sapiens
  misc_RNA (1)...(19): siRNA sense strand
caaugguggucuugggaga

SEQ ID NO: 2323278 - RNA, 19 nt, Homo sapiens
  misc_RNA (1)...(19): siRNA sense strand
aggcugugcuggaccgaaa

SEQ ID NO: 2323279 - RNA, 19 nt, Homo sapiens
  misc_RNA (1)...(19): siRNA sense strand
agaagaggaaggaagcaaa

SEQ ID NO: 2323280 - RNA, 19 nt, Homo sapiens
  misc_RNA (1)...(19): siRNA sense strand
ccaaaugacuuuaaccuca

SEQ ID NO: 2323281 - RNA, 19 nt, Homo sapiens
  misc_RNA (1)...(19): siRNA sense strand
gguagaagaagcagaugau

SEQ ID NO: 2323282 - RNA, 19 nt, Homo sapiens
  misc_RNA (1)...(19): siRNA sense strand
gguacgaggcaaaagaaua

SEQ ID NO: 2323283 - RNA, 19 nt, Homo sapiens
  misc_RNA (1)...(19): siRNA sense strand
gaaaauuggagaagacuau

SEQ ID NO: 2323284 - RNA, 19 nt, Homo sapiens
  misc_RNA (1)...(19): siRNA sense strand
ccaaggugaagcaggagaa

SEQ ID NO: 2323285 - RNA, 19 nt, Homo sapiens
  misc_RNA (1)...(19): siRNA sense strand
cgguaugaauaugggauuu

SEQ ID NO: 2323286 - RNA, 19 nt, Homo sapiens
  misc_RNA (1)...(19): siRNA sense strand
cugugaauggcguggcuaa

SEQ ID NO: 2323287 - RNA, 19 nt, Homo sapiens
  misc_RNA (1)...(19): siRNA sense strand
gcaucgugggcguggagaa

SEQ ID NO: 2323288 - RNA, 19 nt, Homo sapiens
  misc_RNA (1)...(19): siRNA sense strand
gaauaaaaccaaugggauc

SEQ ID NO: 2323289 - RNA, 19 nt, Homo sapiens
  misc_RNA (1)...(19): siRNA sense strand
cggaguacaaagugaagau

SEQ ID NO: 2323290 - RNA, 19 nt, Homo sapiens
  misc_RNA (1)...(19): siRNA sense strand
gcguggagaacguggcaga

SEQ ID NO: 2323291 - RNA, 19 nt, Homo sapiens
  misc_RNA (1)...(19): siRNA sense strand
caggauaucacauggccaa

SEQ ID NO: 2323292 - RNA, 19 nt, Homo sapiens
  misc_RNA (1)...(19): siRNA sense strand
agaggauacaugaguacaa

SEQ ID NO: 2323293 - RNA, 19 nt, Homo sapiens
  misc_RNA (1)...(19): siRNA sense strand
gagcauagaugauguggcu

SEQ ID NO: 2323294 - RNA, 19 nt, Homo sapiens
  misc_RNA (1)...(19): siRNA sense strand
uauggaaacccuugggaga

SEQ ID NO: 2323295 - RNA, 19 nt, Homo sapiens
  misc_RNA (1)...(19): siRNA sense strand
gggaacucgccaaggugaa

SEQ ID NO: 2323296 - RNA, 19 nt, Homo sapiens
  misc_RNA (1)...(19): siRNA sense strand
gggaccaaguggauugaca

SEQ ID NO: 2323297 - RNA, 19 nt, Homo sapiens
  misc_RNA (1)...(19): siRNA sense strand
gugucaagauaaagugagu

SEQ ID NO: 2323298 - RNA, 19 nt, Homo sapiens
  misc_RNA (1)...(19): siRNA sense strand
ugauagaagaggaaggaag

SEQ ID NO: 2323299 - RNA, 19 nt, Homo sapiens
  misc_RNA (1)...(19): siRNA sense strand
uggcaugagcauagaugau

SEQ ID NO: 2323300 - RNA, 19 nt, Homo sapiens
  misc_RNA (1)...(19): siRNA sense strand
agguagaagaagcagauga

SEQ ID NO: 2323301 - RNA, 19 nt, Homo sapiens
  misc_RNA (1)...(19): siRNA sense strand
uguuugauguccaggugaa

SEQ ID NO: 2323302 - RNA, 19 nt, Homo sapiens
  misc_RNA (1)...(19): siRNA sense strand
aagaaagacccuaagaagu

SEQ ID NO: 2323303 - RNA, 19 nt, Homo sapiens
  misc_RNA (1)...(19): siRNA sense strand
cuuuaauguuggagacuac

SEQ ID NO: 2323304 - RNA, 19 nt, Homo sapiens
  misc_RNA (1)...(19): siRNA sense strand
uugcagagcucauagcaga

SEQ ID NO: 2323305 - RNA, 19 nt, Homo sapiens
  misc_RNA (1)...(19): siRNA sense strand
gucaagauaaagugaguca

SEQ ID NO: 2323306 - RNA, 19 nt, Homo sapiens
  misc_RNA (1)...(19): siRNA sense strand
cugugcacuucuauggaaa

SEQ ID NO: 2323307 - RNA, 19 nt, Homo sapiens
  misc_RNA (1)...(19): siRNA sense strand
gaaaccuggccgagaacau

SEQ ID NO: 2323308 - RNA, 19 nt, Homo sapiens
  misc_RNA (1)...(19): siRNA sense strand
gaguacaaagugaagauca

SEQ ID NO: 2323309 - RNA, 19 nt, Homo sapiens
  misc_RNA (1)...(19): siRNA sense strand
caagaaaggguacgaggca

SEQ ID NO: 2323310 - RNA, 19 nt, Homo sapiens
  misc_RNA (1)...(19): siRNA sense strand
aagaaaggguacgaggcaa

SEQ ID NO: 2323311 - RNA, 19 nt, Homo sapiens
  misc_RNA (1)...(19): siRNA sense strand
uagaagaggaaggaagcaa

SEQ ID NO: 2323312 - RNA, 19 nt, Homo sapiens
  misc_RNA (1)...(19): siRNA sense strand
gaagaggaaggaagcaaaa

SEQ ID NO: 2323313 - RNA, 19 nt, Homo sapiens
  misc_RNA (1)...(19): siRNA sense strand
gaaggaagcaaaaggauca

SEQ ID NO: 2323314 - RNA, 19 nt, Homo sapiens
  misc_RNA (1)...(19): siRNA sense strand
ucgccaaggugaagcagga

SEQ ID NO: 2323315 - RNA, 19 nt, Homo sapiens
  misc_RNA (1)...(19): siRNA sense strand
aagaauacuaugaggcacu

SEQ ID NO: 2323316 - RNA, 19 nt, Homo sapiens
  misc_RNA (1)...(19): siRNA sense strand
agaacguggcagagcugaa

SEQ ID NO: 2323317 - RNA, 19 nt, Homo sapiens
  misc_RNA (1)...(19): siRNA sense strand
ccauuuaccagcuuggauu

SEQ ID NO: 2323318 - RNA, 19 nt, Homo sapiens
  misc_RNA (1)...(19): siRNA sense strand
gcuaaaauccacucagaca

SEQ ID NO: 2323319 - RNA, 19 nt, Homo sapiens
  misc_RNA (1)...(19): siRNA sense strand
uguggaaauggcagaagaa

SEQ ID NO: 2323320 - RNA, 19 nt, Homo sapiens
  misc_RNA (1)...(19): siRNA sense strand
gaagcuggucauugaucaa

SEQ ID NO: 2323321 - RNA, 19 nt, Homo sapiens
  misc_RNA (1)...(19): siRNA sense strand
aagccuaugucaaguguca

SEQ ID NO: 2323322 - RNA, 19 nt, Homo sapiens
  misc_RNA (1)...(19): siRNA sense strand
uggauauagaagaguuaga

SEQ ID NO: 2323323 - RNA, 19 nt, Homo sapiens
  misc_RNA (1)...(19): siRNA sense strand
caugggagcucaaccagaa

SEQ ID NO: 2323324 - RNA, 19 nt, Homo sapiens
  misc_RNA (1)...(19): siRNA sense strand
ccaauguggaaauggcaga

SEQ ID NO: 2323325 - RNA, 19 nt, Homo sapiens
  misc_RNA (1)...(19): siRNA sense strand
uggucaaggaacuguguuu

SEQ ID NO: 2323326 - RNA, 19 nt, Homo sapiens
  misc_RNA (1)...(19): siRNA sense strand
uagauagaauuguggccuu

SEQ ID NO: 2323327 - RNA, 19 nt, Homo sapiens
  misc_RNA (1)...(19): siRNA sense strand
agagcucauagcagagaaa

SEQ ID NO: 2323328 - RNA, 19 nt, Homo sapiens
  misc_RNA (1)...(19): siRNA sense strand
agacggaguacaaagugaa

SEQ ID NO: 2323329 - RNA, 19 nt, Homo sapiens
  misc_RNA (1)...(19): siRNA sense strand
cggaaaagcgagccgagaa

SEQ ID NO: 2323330 - RNA, 19 nt, Homo sapiens
  misc_RNA (1)...(19): siRNA sense strand
augaaaacacgccggaaaa

SEQ ID NO: 2323331 - RNA, 19 nt, Homo sapiens
  misc_RNA (1)...(19): siRNA sense strand
acaccaaguucucggagga

SEQ ID NO: 2323332 - RNA, 19 nt, Homo sapiens
  misc_RNA (1)...(19): siRNA sense strand
gcaagaaugaagugcugga

SEQ ID NO: 2323333 - RNA, 19 nt, Homo sapiens
  misc_RNA (1)...(19): siRNA sense strand
uggagaucgucauggcuau

SEQ ID NO: 2323334 - RNA, 19 nt, Homo sapiens
  misc_RNA (1)...(19): siRNA sense strand
cccuggacuucaaggagua

SEQ ID NO: 2323335 - RNA, 19 nt, Homo sapiens
  misc_RNA (1)...(19): siRNA sense strand
ccaaguucucggaggagga

SEQ ID NO: 2323336 - RNA, 19 nt, Homo sapiens
  misc_RNA (1)...(19): siRNA sense strand
augaagugcuggagaucgu

SEQ ID NO: 2323337 - RNA, 19 nt, Homo sapiens
  misc_RNA (1)...(19): siRNA sense strand
ugaaggaaaagaugaagaa

SEQ ID NO: 2323338 - RNA, 19 nt, Homo sapiens
  misc_RNA (1)...(19): siRNA sense strand
caacagagaucaacgacga

SEQ ID NO: 2323339 - RNA, 19 nt, Homo sapiens
  misc_RNA (1)...(19): siRNA sense strand
caguucaccuggauagaau

SEQ ID NO: 2323340 - RNA, 19 nt, Homo sapiens
  misc_RNA (1)...(19): siRNA sense strand
cuccaaguccacagaauau

SEQ ID NO: 2323341 - RNA, 19 nt, Homo sapiens
  misc_RNA (1)...(19): siRNA sense strand
gcaugugacaacagagauc

SEQ ID NO: 2323342 - RNA, 19 nt, Homo sapiens
  misc_RNA (1)...(19): siRNA sense strand
ccucacaacuccaagucca

SEQ ID NO: 2323343 - RNA, 19 nt, Homo sapiens
  misc_RNA (1)...(19): siRNA sense strand
ccucauaaauccaggugca

SEQ ID NO: 2323344 - RNA, 19 nt, Homo sapiens
  misc_RNA (1)...(19): siRNA sense strand
caacaauugucaucggagu

SEQ ID NO: 2323345 - RNA, 19 nt, Homo sapiens
  misc_RNA (1)...(19): siRNA sense strand
gcaugugacaacagagauc

SEQ ID NO: 2323346 - RNA, 19 nt, Homo sapiens
  misc_RNA (1)...(19): siRNA sense strand
ugucauugcugguggaguu

SEQ ID NO: 2323347 - RNA, 19 nt, Homo sapiens
  misc_RNA (1)...(19): siRNA sense strand
gaaagaaggaugaaggaag

SEQ ID NO: 2323348 - RNA, 19 nt, Homo sapiens
  misc_RNA (1)...(19): siRNA sense strand
cgcugaauauacagaacaa

SEQ ID NO: 2323349 - RNA, 19 nt, Homo sapiens
  misc_RNA (1)...(19): siRNA sense strand
ugguguaucgcaugagaaa

SEQ ID NO: 2323350 - RNA, 19 nt, Homo sapiens
  misc_RNA (1)...(19): siRNA sense strand
aagcuaugaccuuggagaa

SEQ ID NO: 2323351 - RNA, 19 nt, Homo sapiens
  misc_RNA (1)...(19): siRNA sense strand
cuauugaugacgaugacua

SEQ ID NO: 2323352 - RNA, 19 nt, Homo sapiens
  misc_RNA (1)...(19): siRNA sense strand
agaaagaaggaugaaggaa

SEQ ID NO: 2323353 - RNA, 19 nt, Homo sapiens
  misc_RNA (1)...(19): siRNA sense strand
accugaagaaacugauaaa

SEQ ID NO: 2323354 - RNA, 19 nt, Homo sapiens
  misc_RNA (1)...(19): siRNA sense strand
cugauaaagagaaaguuca

SEQ ID NO: 2323355 - RNA, 19 nt, Homo sapiens
  misc_RNA (1)...(19): siRNA sense strand
auguguauacugagaaaca

SEQ ID NO: 2323356 - RNA, 19 nt, Homo sapiens
  misc_RNA (1)...(19): siRNA sense strand
gaaaauggacccagccgaa

SEQ ID NO: 2323357 - RNA, 19 nt, Homo sapiens
  misc_RNA (1)...(19): siRNA sense strand
acaaagucaccugaagaaa

SEQ ID NO: 2323358 - RNA, 19 nt, Homo sapiens
  misc_RNA (1)...(19): siRNA sense strand
ugaccuuggagaacgcaaa

SEQ ID NO: 2323359 - RNA, 19 nt, Homo sapiens
  misc_RNA (1)...(19): siRNA sense strand
gggcaaagucuuaggguug

SEQ ID NO: 2323360 - RNA, 19 nt, Homo sapiens
  misc_RNA (1)...(19): siRNA sense strand
aggacaaggaggaggagau

SEQ ID NO: 2323361 - RNA, 19 nt, Homo sapiens
  misc_RNA (1)...(19): siRNA sense strand
gcucagacccacuggccua

SEQ ID NO: 2323362 - RNA, 19 nt, Homo sapiens
  misc_RNA (1)...(19): siRNA sense strand
uggcugucuuugaggaaau

SEQ ID NO: 2323363 - RNA, 19 nt, Homo sapiens
  misc_RNA (1)...(19): siRNA sense strand
cugcaaagguggcugagga

SEQ ID NO: 2323364 - RNA, 19 nt, Homo sapiens
  misc_RNA (1)...(19): siRNA sense strand
cugaggaggacgaggacga

SEQ ID NO: 2323365 - RNA, 19 nt, Homo sapiens
  misc_RNA (1)...(19): siRNA sense strand
ccuaugagccgaaggagga

SEQ ID NO: 2323366 - RNA, 19 nt, Homo sapiens
  misc_RNA (1)...(19): siRNA sense strand
caaagguggcugaggagga

SEQ ID NO: 2323367 - RNA, 19 nt, Homo sapiens
  misc_RNA (1)...(19): siRNA sense strand
acuacgaacacgugggcau

SEQ ID NO: 2323368 - RNA, 19 nt, Homo sapiens
  misc_RNA (1)...(19): siRNA sense strand
acacacaguuccuggacca

SEQ ID NO: 2323369 - RNA, 19 nt, Homo sapiens
  misc_RNA (1)...(19): siRNA sense strand
ccaaggacaaggaggagga

SEQ ID NO: 2323370 - RNA, 19 nt, Homo sapiens
  misc_RNA (1)...(19): siRNA sense strand
gcucauagccucaggagug

SEQ ID NO: 2323371 - RNA, 19 nt, Homo sapiens
  misc_RNA (1)...(19): siRNA sense strand
ccaucaacgaagagaucca

SEQ ID NO: 2323372 - RNA, 19 nt, Homo sapiens
  misc_RNA (1)...(19): siRNA sense strand
gaucaaggguguaggcgag

SEQ ID NO: 2323373 - RNA, 19 nt, Homo sapiens
  misc_RNA (1)...(19): siRNA sense strand
aggacaagcucaaccgguu

SEQ ID NO: 2323374 - RNA, 19 nt, Homo sapiens
  misc_RNA (1)...(19): siRNA sense strand
acaucggccuccuggacaa

SEQ ID NO: 2323375 - RNA, 19 nt, Homo sapiens
  misc_RNA (1)...(19): siRNA sense strand
ugguagaccuguuggcugu

SEQ ID NO: 2323376 - RNA, 19 nt, Homo sapiens
  misc_RNA (1)...(19): siRNA sense strand
agggcaaagucuuaggguu

SEQ ID NO: 2323377 - RNA, 19 nt, Homo sapiens
  misc_RNA (1)...(19): siRNA sense strand
acuggaaggacaagcucaa

SEQ ID NO: 2323378 - RNA, 19 nt, Homo sapiens
  misc_RNA (1)...(19): siRNA sense strand
cagcuggagcagaagauca

SEQ ID NO: 2323379 - RNA, 19 nt, Homo sapiens
  misc_RNA (1)...(19): siRNA sense strand
ccgucuuugugcagggcau

SEQ ID NO: 2323380 - RNA, 19 nt, Homo sapiens
  misc_RNA (1)...(19): siRNA sense strand
ccaucgagcugguggagag

SEQ ID NO: 2323381 - RNA, 19 nt, Homo sapiens
  misc_RNA (1)...(19): siRNA sense strand
aggaggaggagauccgcaa

SEQ ID NO: 2323382 - RNA, 19 nt, Homo sapiens
  misc_RNA (1)...(19): siRNA sense strand
gggagcacucagagcgcaa

SEQ ID NO: 2323383 - RNA, 19 nt, Homo sapiens
  misc_RNA (1)...(19): siRNA sense strand
acgccaaggucacggagau

SEQ ID NO: 2323384 - RNA, 19 nt, Homo sapiens
  misc_RNA (1)...(19): siRNA sense strand
gaagauucgguuaugggua

SEQ ID NO: 2323385 - RNA, 19 nt, Homo sapiens
  misc_RNA (1)...(19): siRNA sense strand
cggacauggacguggugaa

SEQ ID NO: 2323386 - RNA, 19 nt, Homo sapiens
  misc_RNA (1)...(19): siRNA sense strand
acaucuuccugcagaacaa

SEQ ID NO: 2323387 - RNA, 19 nt, Homo sapiens
  misc_RNA (1)...(19): siRNA sense strand
caugcaaggagcugagaga

SEQ ID NO: 2323388 - RNA, 19 nt, Homo sapiens
  misc_RNA (1)...(19): siRNA sense strand
gagaacauuaucaaggaga

SEQ ID NO: 2323389 - RNA, 19 nt, Homo sapiens
  misc_RNA (1)...(19): siRNA sense strand
ccuacaucuuccugcagaa

SEQ ID NO: 2323390 - RNA, 19 nt, Homo sapiens
  misc_RNA (1)...(19): siRNA sense strand
gaagauggccacagaccca

SEQ ID NO: 2323391 - RNA, 19 nt, Homo sapiens
  misc_RNA (1)...(19): siRNA sense strand
cuaguuagcucaucggcau

SEQ ID NO: 2323392 - RNA, 19 nt, Homo sapiens
  misc_RNA (1)...(19): siRNA sense strand
agaucaagcgggaggagaa

SEQ ID NO: 2323393 - RNA, 19 nt, Homo sapiens
  misc_RNA (1)...(19): siRNA sense strand
gggaggagaaggaggacga

SEQ ID NO: 2323394 - RNA, 19 nt, Homo sapiens
  misc_RNA (1)...(19): siRNA sense strand
aggagaagaaggagcugaa

SEQ ID NO: 2323395 - RNA, 19 nt, Homo sapiens
  misc_RNA (1)...(19): siRNA sense strand
cagacgaggacgaggacga

SEQ ID NO: 2323396 - RNA, 19 nt, Homo sapiens
  misc_RNA (1)...(19): siRNA sense strand
agaguaagauagaagacca

SEQ ID NO: 2323397 - RNA, 19 nt, Homo sapiens
  misc_RNA (1)...(19): siRNA sense strand
cuacagugggcuagggcga

SEQ ID NO: 2323398 - RNA, 19 nt, Homo sapiens
  misc_RNA (1)...(19): siRNA sense strand
ugucaggugugguuggaga

SEQ ID NO: 2323399 - RNA, 19 nt, Homo sapiens
  misc_RNA (1)...(19): siRNA sense strand
aggagaaggaggacgagga

SEQ ID NO: 2323400 - RNA, 19 nt, Homo sapiens
  misc_RNA (1)...(19): siRNA sense strand
cggccugcagaguaagaua

SEQ ID NO: 2323401 - RNA, 19 nt, Homo sapiens
  misc_RNA (1)...(19): siRNA sense strand
agcaagugcgagagcggaa

SEQ ID NO: 2323402 - RNA, 19 nt, Homo sapiens
  misc_RNA (1)...(19): siRNA sense strand
uagaagaccaccuggacga

SEQ ID NO: 2323403 - RNA, 19 nt, Homo sapiens
  misc_RNA (1)...(19): siRNA sense strand
ccagcgagaucaagcggga

SEQ ID NO: 2323404 - RNA, 19 nt, Homo sapiens
  misc_RNA (1)...(19): siRNA sense strand
cugcagaguaagauagaag

SEQ ID NO: 2323405 - RNA, 19 nt, Homo sapiens
  misc_RNA (1)...(19): siRNA sense strand
aggaaaaggugucaggugu

SEQ ID NO: 2323406 - RNA, 19 nt, Homo sapiens
  misc_RNA (1)...(19): siRNA sense strand
ccagaagaggagugugaau

SEQ ID NO: 2323407 - RNA, 19 nt, Homo sapiens
  misc_RNA (1)...(19): siRNA sense strand
ccauggagaacaaggugau

SEQ ID NO: 2323408 - RNA, 19 nt, Homo sapiens
  misc_RNA (1)...(19): siRNA sense strand
gcaccaaggagcugggcaa

SEQ ID NO: 2323409 - RNA, 19 nt, Homo sapiens
  misc_RNA (1)...(19): siRNA sense strand
aggacggagacaagaacaa

SEQ ID NO: 2323410 - RNA, 19 nt, Homo sapiens
  misc_RNA (1)...(19): siRNA sense strand
ugggcaaggugaugaggau

SEQ ID NO: 2323411 - RNA, 19 nt, Homo sapiens
  misc_RNA (1)...(19): siRNA sense strand
agauaaugcugcaggcuac

SEQ ID NO: 2323412 - RNA, 19 nt, Homo sapiens
  misc_RNA (1)...(19): siRNA sense strand
aagauaaugcugcaggcua

SEQ ID NO: 2323413 - RNA, 19 nt, Homo sapiens
  misc_RNA (1)...(19): siRNA sense strand
ucgaugagguggacgagga

SEQ ID NO: 2323414 - RNA, 19 nt, Homo sapiens
  misc_RNA (1)...(19): siRNA sense strand
aagggaaaucugaggagga

SEQ ID NO: 2323415 - RNA, 19 nt, Homo sapiens
  misc_RNA (1)...(19): siRNA sense strand
ugaugaggaugcugggcca

SEQ ID NO: 2323416 - RNA, 19 nt, Homo sapiens
  misc_RNA (1)...(19): siRNA sense strand
ggacagaggaugaggugga

SEQ ID NO: 2323417 - RNA, 19 nt, Homo sapiens
  misc_RNA (1)...(19): siRNA sense strand
cugagguggccgagaguaa

SEQ ID NO: 2323418 - RNA, 19 nt, Homo sapiens
  misc_RNA (1)...(19): siRNA sense strand
ccgagaggucuguggcaaa

SEQ ID NO: 2323419 - RNA, 19 nt, Homo sapiens
  misc_RNA (1)...(19): siRNA sense strand
gcaagcagcuggaggagga

SEQ ID NO: 2323420 - RNA, 19 nt, Homo sapiens
  misc_RNA (1)...(19): siRNA sense strand
aauaugaagaggagaucaa

SEQ ID NO: 2323421 - RNA, 19 nt, Homo sapiens
  misc_RNA (1)...(19): siRNA sense strand
agaucaaacuguuggagga

SEQ ID NO: 2323422 - RNA, 19 nt, Homo sapiens
  misc_RNA (1)...(19): siRNA sense strand
cccagaagaugaaguacaa

SEQ ID NO: 2323423 - RNA, 19 nt, Homo sapiens
  misc_RNA (1)...(19): siRNA sense strand
uggcaaaguuggagaaaac

SEQ ID NO: 2323424 - RNA, 19 nt, Homo sapiens
  misc_RNA (1)...(19): siRNA sense strand
ccacugaugcugaggcaga

SEQ ID NO: 2323425 - RNA, 19 nt, Homo sapiens
  misc_RNA (1)...(19): siRNA sense strand
ggacaaguauuccaccaaa

SEQ ID NO: 2323426 - RNA, 19 nt, Homo sapiens
  misc_RNA (1)...(19): siRNA sense strand
cagaggaugagguggaaaa

SEQ ID NO: 2323427 - RNA, 19 nt, Homo sapiens
  misc_RNA (1)...(19): siRNA sense strand
aggccgaagccgacaagaa

SEQ ID NO: 2323428 - RNA, 19 nt, Homo sapiens
  misc_RNA (1)...(19): siRNA sense strand
gagagaggaaugaagguca

SEQ ID NO: 2323429 - RNA, 19 nt, Homo sapiens
  misc_RNA (1)...(19): siRNA sense strand
ucgaugaccuagaagauga

SEQ ID NO: 2323430 - RNA, 19 nt, Homo sapiens
  misc_RNA (1)...(19): siRNA sense strand
gcccagaagaugaaguaca

SEQ ID NO: 2323431 - RNA, 19 nt, Homo sapiens
  misc_RNA (1)...(19): siRNA sense strand
ccgcaaauaugaagaggug

SEQ ID NO: 2323432 - RNA, 19 nt, Homo sapiens
  misc_RNA (1)...(19): siRNA sense strand
agauaaauaugaagaggag

SEQ ID NO: 2323433 - RNA, 19 nt, Homo sapiens
  misc_RNA (1)...(19): siRNA sense strand
caucgaugaccuagaagau

SEQ ID NO: 2323434 - RNA, 19 nt, Homo sapiens
  misc_RNA (1)...(19): siRNA sense strand
agaugaaguacaaggccau

SEQ ID NO: 2323435 - RNA, 19 nt, Homo sapiens
  misc_RNA (1)...(19): siRNA sense strand
cagaagaagcugaagggga

SEQ ID NO: 2323436 - RNA, 19 nt, Homo sapiens
  misc_RNA (1)...(19): siRNA sense strand
gaguaaauguggggaccua

SEQ ID NO: 2323437 - RNA, 19 nt, Homo sapiens
  misc_RNA (1)...(19): siRNA sense strand
accuagaggaggagcugaa

SEQ ID NO: 2323438 - RNA, 19 nt, Homo sapiens
  misc_RNA (1)...(19): siRNA sense strand
aagaugaaguacaaggcca

SEQ ID NO: 2323439 - RNA, 19 nt, Homo sapiens
  misc_RNA (1)...(19): siRNA sense strand
ugaaaucccuggaggccca

SEQ ID NO: 2323440 - RNA, 19 nt, Homo sapiens
  misc_RNA (1)...(19): siRNA sense strand
aagaagaugcagaugcuga

SEQ ID NO: 2323441 - RNA, 19 nt, Homo sapiens
  misc_RNA (1)...(19): siRNA sense strand
gcauucagcugguugagga

SEQ ID NO: 2323442 - RNA, 19 nt, Homo sapiens
  misc_RNA (1)...(19): siRNA sense strand
aggaugaggagaagaugga

SEQ ID NO: 2323443 - RNA, 19 nt, Homo sapiens
  misc_RNA (1)...(19): siRNA sense strand
aggagaagauggaacugca

SEQ ID NO: 2323444 - RNA, 19 nt, Homo sapiens
  misc_RNA (1)...(19): siRNA sense strand
ccgacaagaagcaagcuga

SEQ ID NO: 2323445 - RNA, 19 nt, Homo sapiens
  misc_RNA (1)...(19): siRNA sense strand
cggacaaguauuccaccaa

SEQ ID NO: 2323446 - RNA, 19 nt, Homo sapiens
  misc_RNA (1)...(19): siRNA sense strand
ccacauaugaagagagcaa

SEQ ID NO: 2323447 - RNA, 19 nt, Homo sapiens
  misc_RNA (1)...(19): siRNA sense strand
gaugaagagcagauggaaa

SEQ ID NO: 2323448 - RNA, 19 nt, Homo sapiens
  misc_RNA (1)...(19): siRNA sense strand
acgacaaacuggaaggauu

SEQ ID NO: 2323449 - RNA, 19 nt, Homo sapiens
  misc_RNA (1)...(19): siRNA sense strand
auguggagauuaagaguaa

SEQ ID NO: 2323450 - RNA, 19 nt, Homo sapiens
  misc_RNA (1)...(19): siRNA sense strand
gcaacugaugagagacaaa

SEQ ID NO: 2323451 - RNA, 19 nt, Homo sapiens
  misc_RNA (1)...(19): siRNA sense strand
ccacaaagcuaauggacag

SEQ ID NO: 2323452 - RNA, 19 nt, Homo sapiens
  misc_RNA (1)...(19): siRNA sense strand
aguaacaacagcagggaau

SEQ ID NO: 2323453 - RNA, 19 nt, Homo sapiens
  misc_RNA (1)...(19): siRNA sense strand
cuuuugaacuuguggauaa

SEQ ID NO: 2323454 - RNA, 19 nt, Homo sapiens
  misc_RNA (1)...(19): siRNA sense strand
gagcaacugaugagagaca

SEQ ID NO: 2323455 - RNA, 19 nt, Homo sapiens
  misc_RNA (1)...(19): siRNA sense strand
auggaaaggcauaagagaa

SEQ ID NO: 2323456 - RNA, 19 nt, Homo sapiens
  misc_RNA (1)...(19): siRNA sense strand
aggcauaagagaacucaua

SEQ ID NO: 2323457 - RNA, 19 nt, Homo sapiens
  misc_RNA (1)...(19): siRNA sense strand
agaagaaagcugaggccca

SEQ ID NO: 2323458 - RNA, 19 nt, Homo sapiens
  misc_RNA (1)...(19): siRNA sense strand
ccaugaggagacagugaaa

SEQ ID NO: 2323459 - RNA, 19 nt, Homo sapiens
  misc_RNA (1)...(19): siRNA sense strand
cagaauuucccuuggugaa

SEQ ID NO: 2323460 - RNA, 19 nt, Homo sapiens
  misc_RNA (1)...(19): siRNA sense strand
agaagaugcgucaggagaa

SEQ ID NO: 2323461 - RNA, 19 nt, Homo sapiens
  misc_RNA (1)...(19): siRNA sense strand
uaguaagagaagucugaaa

SEQ ID NO: 2323462 - RNA, 19 nt, Homo sapiens
  misc_RNA (1)...(19): siRNA sense strand
uguaauggguggagugucu

SEQ ID NO: 2323463 - RNA, 19 nt, Homo sapiens
  misc_RNA (1)...(19): siRNA sense strand
cugagcaacugaugagaga

SEQ ID NO: 2323464 - RNA, 19 nt, Homo sapiens
  misc_RNA (1)...(19): siRNA sense strand
uggaucaagagcuggaaua

SEQ ID NO: 2323465 - RNA, 19 nt, Homo sapiens
  misc_RNA (1)...(19): siRNA sense strand
augcagucuuccaggacaa

SEQ ID NO: 2323466 - RNA, 19 nt, Homo sapiens
  misc_RNA (1)...(19): siRNA sense strand
aagaaagugaaaugagaca

SEQ ID NO: 2323467 - RNA, 19 nt, Homo sapiens
  misc_RNA (1)...(19): siRNA sense strand
uggaaaggcauaagagaac

SEQ ID NO: 2323468 - RNA, 19 nt, Homo sapiens
  misc_RNA (1)...(19): siRNA sense strand
uuucaggugaugagacaaa

SEQ ID NO: 2323469 - RNA, 19 nt, Homo sapiens
  misc_RNA (1)...(19): siRNA sense strand
caauaaaugaggauggauc

SEQ ID NO: 2323470 - RNA, 19 nt, Homo sapiens
  misc_RNA (1)...(19): siRNA sense strand
gaugaaaguaccacggcau

SEQ ID NO: 2323471 - RNA, 19 nt, Homo sapiens
  misc_RNA (1)...(19): siRNA sense strand
caucaauagcuuucgauca

SEQ ID NO: 2323472 - RNA, 19 nt, Homo sapiens
  misc_RNA (1)...(19): siRNA sense strand
agaugaaguguuacaagaa

SEQ ID NO: 2323473 - RNA, 19 nt, Homo sapiens
  misc_RNA (1)...(19): siRNA sense strand
aaaugagacaacaggauau

SEQ ID NO: 2323474 - RNA, 19 nt, Homo sapiens
  misc_RNA (1)...(19): siRNA sense strand
uggaauggacaaagagagu

SEQ ID NO: 2323475 - RNA, 19 nt, Homo sapiens
  misc_RNA (1)...(19): siRNA sense strand
cauuauucccacaaagcua

SEQ ID NO: 2323476 - RNA, 19 nt, Homo sapiens
  misc_RNA (1)...(19): siRNA sense strand
cuauaagcguaaagcagga

SEQ ID NO: 2323477 - RNA, 19 nt, Homo sapiens
  misc_RNA (1)...(19): siRNA sense strand
aagagagugcuuuggacaa

SEQ ID NO: 2323478 - RNA, 19 nt, Homo sapiens
  misc_RNA (1)...(19): siRNA sense strand
ccacaucaacacaggacuu

SEQ ID NO: 2323479 - RNA, 19 nt, Homo sapiens
  misc_RNA (1)...(19): siRNA sense strand
agaugcgucaggagaaaua

SEQ ID NO: 2323480 - RNA, 19 nt, Homo sapiens
  misc_RNA (1)...(19): siRNA sense strand
uguuauuccagaugaggua

SEQ ID NO: 2323481 - RNA, 19 nt, Homo sapiens
  misc_RNA (1)...(19): siRNA sense strand
aauaaaugaggauggauca

SEQ ID NO: 2323482 - RNA, 19 nt, Homo sapiens
  misc_RNA (1)...(19): siRNA sense strand
aaaccuuaccagugugaau

SEQ ID NO: 2323483 - RNA, 19 nt, Homo sapiens
  misc_RNA (1)...(19): siRNA sense strand
guaagagaagucugaaaca

SEQ ID NO: 2323484 - RNA, 19 nt, Homo sapiens
  misc_RNA (1)...(19): siRNA sense strand
ugaaaugagacaacaggau

SEQ ID NO: 2323485 - RNA, 19 nt, Homo sapiens
  misc_RNA (1)...(19): siRNA sense strand
gcugaauguggguaccaua

SEQ ID NO: 2323486 - RNA, 19 nt, Homo sapiens
  misc_RNA (1)...(19): siRNA sense strand
gccuuaacuuugugacuga

SEQ ID NO: 2323487 - RNA, 19 nt, Homo sapiens
  misc_RNA (1)...(19): siRNA sense strand
guuacaagaaagugaaaug

SEQ ID NO: 2323488 - RNA, 19 nt, Homo sapiens
  misc_RNA (1)...(19): siRNA sense strand
ccuucugacaucugaggaa

SEQ ID NO: 2323489 - RNA, 19 nt, Homo sapiens
  misc_RNA (1)...(19): siRNA sense strand
cauccauauuagagucaca

SEQ ID NO: 2323490 - RNA, 19 nt, Homo sapiens
  misc_RNA (1)...(19): siRNA sense strand
cugcagaugaaguguuaca

SEQ ID NO: 2323491 - RNA, 19 nt, Homo sapiens
  misc_RNA (1)...(19): siRNA sense strand
augaagagcagauggaaac

SEQ ID NO: 2323492 - RNA, 19 nt, Homo sapiens
  misc_RNA (1)...(19): siRNA sense strand
guaacaacagcagggaaua

SEQ ID NO: 2323493 - RNA, 19 nt, Homo sapiens
  misc_RNA (1)...(19): siRNA sense strand
augaaugugguaugagauu

SEQ ID NO: 2323494 - RNA, 19 nt, Homo sapiens
  misc_RNA (1)...(19): siRNA sense strand
aagacaacucacugccaaa

SEQ ID NO: 2323495 - RNA, 19 nt, Homo sapiens
  misc_RNA (1)...(19): siRNA sense strand
aagaagaagcggaaacaac

SEQ ID NO: 2323496 - RNA, 19 nt, Homo sapiens
  misc_RNA (1)...(19): siRNA sense strand
gcacggaguccaaggccua

SEQ ID NO: 2323497 - RNA, 19 nt, Homo sapiens
  misc_RNA (1)...(19): siRNA sense strand
gggaagagcuaccgccuca

SEQ ID NO: 2323498 - RNA, 19 nt, Homo sapiens
  misc_RNA (1)...(19): siRNA sense strand
cagcugaggucaaggagga

SEQ ID NO: 2323499 - RNA, 19 nt, Homo sapiens
  misc_RNA (1)...(19): siRNA sense strand
gggaaggaguucacgcaca

SEQ ID NO: 2323500 - RNA, 19 nt, Homo sapiens
  misc_RNA (1)...(19): siRNA sense strand
ccucaagugccgagagugu

SEQ ID NO: 2323501 - RNA, 19 nt, Homo sapiens
  misc_RNA (1)...(19): siRNA sense strand
ggcagaugcuggaguuuau

SEQ ID NO: 2323502 - RNA, 19 nt, Homo sapiens
  misc_RNA (1)...(19): siRNA sense strand
gggcagaugcuggaguuua

SEQ ID NO: 2323503 - RNA, 19 nt, Homo sapiens
  misc_RNA (1)...(19): siRNA sense strand
agcaagaaauggaggugga

SEQ ID NO: 2323504 - RNA, 19 nt, Homo sapiens
  misc_RNA (1)...(19): siRNA sense strand
agaccgugcaccagggcaa

SEQ ID NO: 2323505 - RNA, 19 nt, Homo sapiens
  misc_RNA (1)...(19): siRNA sense strand
cggaaguccugaaggccga

SEQ ID NO: 2323506 - RNA, 19 nt, Homo sapiens
  misc_RNA (1)...(19): siRNA sense strand
ggaaaggggaagaggagca

SEQ ID NO: 2323507 - RNA, 19 nt, Homo sapiens
  misc_RNA (1)...(19): siRNA sense strand
acacggacaaggagcacaa

SEQ ID NO: 2323508 - RNA, 19 nt, Homo sapiens
  misc_RNA (1)...(19): siRNA sense strand
gcuucaaccggguagacaa

SEQ ID NO: 2323509 - RNA, 19 nt, Homo sapiens
  misc_RNA (1)...(19): siRNA sense strand
aagaggagcaagaggagga

SEQ ID NO: 2323510 - RNA, 19 nt, Homo sapiens
  misc_RNA (1)...(19): siRNA sense strand
cuguggagcucaagccaga

SEQ ID NO: 2323511 - RNA, 19 nt, Homo sapiens
  misc_RNA (1)...(19): siRNA sense strand
cgugcaaggcccaugagaa

SEQ ID NO: 2323512 - RNA, 19 nt, Homo sapiens
  misc_RNA (1)...(19): siRNA sense strand
ggugcagagcagacagaga

SEQ ID NO: 2323513 - RNA, 19 nt, Homo sapiens
  misc_RNA (1)...(19): siRNA sense strand
aggucaaggaggaggguuc

SEQ ID NO: 2323514 - RNA, 19 nt, Homo sapiens
  misc_RNA (1)...(19): siRNA sense strand
aggagcaagaggagcaaga

SEQ ID NO: 2323515 - RNA, 19 nt, Homo sapiens
  misc_RNA (1)...(19): siRNA sense strand
aguucaaccagguagggaa

SEQ ID NO: 2323516 - RNA, 19 nt, Homo sapiens
  misc_RNA (1)...(19): siRNA sense strand
ggggaaaugcggaggccuu

SEQ ID NO: 2323517 - RNA, 19 nt, Homo sapiens
  misc_RNA (1)...(19): siRNA sense strand
aggagugcgggaagagcua

SEQ ID NO: 2323518 - RNA, 19 nt, Homo sapiens
  misc_RNA (1)...(19): siRNA sense strand
ggacaucaguaacgcggca

SEQ ID NO: 2323519 - RNA, 19 nt, Homo sapiens
  misc_RNA (1)...(19): siRNA sense strand
ccacagaaggaggggacaa

SEQ ID NO: 2323520 - RNA, 19 nt, Homo sapiens
  misc_RNA (1)...(19): siRNA sense strand
acaaguuucuggaugccaa

SEQ ID NO: 2323521 - RNA, 19 nt, Homo sapiens
  misc_RNA (1)...(19): siRNA sense strand
uggcucagcaugugcgaau

SEQ ID NO: 2323522 - RNA, 19 nt, Homo sapiens
  misc_RNA (1)...(19): siRNA sense strand
aaggggaagaggagcaaaa

SEQ ID NO: 2323523 - RNA, 19 nt, Homo sapiens
  misc_RNA (1)...(19): siRNA sense strand
caagagagccaaagaggag

SEQ ID NO: 2323524 - RNA, 19 nt, Homo sapiens
  misc_RNA (1)...(19): siRNA sense strand
uggucauguuccagacaga

SEQ ID NO: 2323525 - RNA, 19 nt, Homo sapiens
  misc_RNA (1)...(19): siRNA sense strand
agagagccaaagaggagaa

SEQ ID NO: 2323526 - RNA, 19 nt, Homo sapiens
  misc_RNA (1)...(19): siRNA sense strand
gcgacaagaaguucaacca

SEQ ID NO: 2323527 - RNA, 19 nt, Homo sapiens
  misc_RNA (1)...(19): siRNA sense strand
ggugagaagccaugccagu

SEQ ID NO: 2323528 - RNA, 19 nt, Homo sapiens
  misc_RNA (1)...(19): siRNA sense strand
agcaagugcaggaagaaga

SEQ ID NO: 2323529 - RNA, 19 nt, Homo sapiens
  misc_RNA (1)...(19): siRNA sense strand
gggacaaguuucuggaugc

SEQ ID NO: 2323530 - RNA, 19 nt, Homo sapiens
  misc_RNA (1)...(19): siRNA sense strand
gaguuuauguacacggcca

SEQ ID NO: 2323531 - RNA, 19 nt, Homo sapiens
  misc_RNA (1)...(19): siRNA sense strand
cugugaagcaagugcagga

SEQ ID NO: 2323532 - RNA, 19 nt, Homo sapiens
  misc_RNA (1)...(19): siRNA sense strand
gcguggucacuguggauga

SEQ ID NO: 2323533 - RNA, 19 nt, Homo sapiens
  misc_RNA (1)...(19): siRNA sense strand
guguaaugaaugugggaaa

SEQ ID NO: 2323534 - RNA, 19 nt, Homo sapiens
  misc_RNA (1)...(19): siRNA sense strand
augcaacaauugugggaaa

SEQ ID NO: 2323535 - RNA, 19 nt, Homo sapiens
  misc_RNA (1)...(19): siRNA sense strand
auguaaugaaugugggaaa

SEQ ID NO: 2323536 - RNA, 19 nt, Homo sapiens
  misc_RNA (1)...(19): siRNA sense strand
gugugauguuggagaacua

SEQ ID NO: 2323537 - RNA, 19 nt, Homo sapiens
  misc_RNA (1)...(19): siRNA sense strand
uuguaaugaaugugggaaa

SEQ ID NO: 2323538 - RNA, 19 nt, Homo sapiens
  misc_RNA (1)...(19): siRNA sense strand
ccuuaugggugcagugaau

SEQ ID NO: 2323539 - RNA, 19 nt, Homo sapiens
  misc_RNA (1)...(19): siRNA sense strand
agucaaaccuuaugguaca

SEQ ID NO: 2323540 - RNA, 19 nt, Homo sapiens
  misc_RNA (1)...(19): siRNA sense strand
ccuuauaaaugcagucaau

SEQ ID NO: 2323541 - RNA, 19 nt, Homo sapiens
  misc_RNA (1)...(19): siRNA sense strand
aauucauacaggagagaaa

SEQ ID NO: 2323542 - RNA, 19 nt, Homo sapiens
  misc_RNA (1)...(19): siRNA sense strand
aauucauacaggagagaaa

SEQ ID NO: 2323543 - RNA, 19 nt, Homo sapiens
  misc_RNA (1)...(19): siRNA sense strand
augcagugaaugugggaaa

SEQ ID NO: 2323544 - RNA, 19 nt, Homo sapiens
  misc_RNA (1)...(19): siRNA sense strand
gggaaagccuucaggagca

SEQ ID NO: 2323545 - RNA, 19 nt, Homo sapiens
  misc_RNA (1)...(19): siRNA sense strand
gugcacugaaugugggaaa

SEQ ID NO: 2323546 - RNA, 19 nt, Homo sapiens
  misc_RNA (1)...(19): siRNA sense strand
ucagaaagcuccaagguca

SEQ ID NO: 2323547 - RNA, 19 nt, Homo sapiens
  misc_RNA (1)...(19): siRNA sense strand
gugcugugaaugugggaaa

SEQ ID NO: 2323548 - RNA, 19 nt, Homo sapiens
  misc_RNA (1)...(19): siRNA sense strand
augcaaugaauguggcaaa

SEQ ID NO: 2323549 - RNA, 19 nt, Homo sapiens
  misc_RNA (1)...(19): siRNA sense strand
augcagcuguugugagaaa

SEQ ID NO: 2323550 - RNA, 19 nt, Homo sapiens
  misc_RNA (1)...(19): siRNA sense strand
augcaaugaaugucagaaa

SEQ ID NO: 2323551 - RNA, 19 nt, Homo sapiens
  misc_RNA (1)...(19): siRNA sense strand
augcagugagugugggaaa

SEQ ID NO: 2323552 - RNA, 19 nt, Homo sapiens
  misc_RNA (1)...(19): siRNA sense strand
guuuaaagucacagcuuau

SEQ ID NO: 2323553 - RNA, 19 nt, Homo sapiens
  misc_RNA (1)...(19): siRNA sense strand
augcagucaaugugagaaa

SEQ ID NO: 2323554 - RNA, 19 nt, Homo sapiens
  misc_RNA (1)...(19): siRNA sense strand
ccuuauguuuguagugauu

SEQ ID NO: 2323555 - RNA, 19 nt, Homo sapiens
  misc_RNA (1)...(19): siRNA sense strand
acacaggaguaaagcccua

SEQ ID NO: 2323556 - RNA, 19 nt, Homo sapiens
  misc_RNA (1)...(19): siRNA sense strand
gagaagucacacaggagua

SEQ ID NO: 2323557 - RNA, 19 nt, Homo sapiens
  misc_RNA (1)...(19): siRNA sense strand
cagaauagagaaaguccua

SEQ ID NO: 2323558 - RNA, 19 nt, Homo sapiens
  misc_RNA (1)...(19): siRNA sense strand
guguauucagugugguaaa

SEQ ID NO: 2323559 - RNA, 19 nt, Homo sapiens
  misc_RNA (1)...(19): siRNA sense strand
gagucgcagaauagagaaa

SEQ ID NO: 2323560 - RNA, 19 nt, Homo sapiens
  misc_RNA (1)...(19): siRNA sense strand
cagagaagucacacaggaa

SEQ ID NO: 2323561 - RNA, 19 nt, Homo sapiens
  misc_RNA (1)...(19): siRNA sense strand
augccaugaaugugggaaa

SEQ ID NO: 2323562 - RNA, 19 nt, Homo sapiens
  misc_RNA (1)...(19): siRNA sense strand
ccagagaacucaugcagga

SEQ ID NO: 2323563 - RNA, 19 nt, Homo sapiens
  misc_RNA (1)...(19): siRNA sense strand
gagaaauccuucaguggga

SEQ ID NO: 2323564 - RNA, 19 nt, Homo sapiens
  misc_RNA (1)...(19): siRNA sense strand
cccuauaguuguaaugaau

SEQ ID NO: 2323565 - RNA, 19 nt, Homo sapiens
  misc_RNA (1)...(19): siRNA sense strand
uggauguguuuguggauuu

SEQ ID NO: 2323566 - RNA, 19 nt, Homo sapiens
  misc_RNA (1)...(19): siRNA sense strand
acacaagagagaaaccaua

SEQ ID NO: 2323567 - RNA, 19 nt, Homo sapiens
  misc_RNA (1)...(19): siRNA sense strand
gcauggaaagaguuugaaa

SEQ ID NO: 2323568 - RNA, 19 nt, Homo sapiens
  misc_RNA (1)...(19): siRNA sense strand
gagaaagccuucagcagca

SEQ ID NO: 2323569 - RNA, 19 nt, Homo sapiens
  misc_RNA (1)...(19): siRNA sense strand
uuguagugauuguggaaaa

SEQ ID NO: 2323570 - RNA, 19 nt, Homo sapiens
  misc_RNA (1)...(19): siRNA sense strand
ccauauggaugcagugagu

SEQ ID NO: 2323571 - RNA, 19 nt, Homo sapiens
  misc_RNA (1)...(19): siRNA sense strand
ccauaugaaugcagugagu

SEQ ID NO: 2323572 - RNA, 19 nt, Homo sapiens
  misc_RNA (1)...(19): siRNA sense strand
cugugaaaguauugaaucu

SEQ ID NO: 2323573 - RNA, 19 nt, Homo sapiens
  misc_RNA (1)...(19): siRNA sense strand
agucaaaccugauuguaca

SEQ ID NO: 2323574 - RNA, 19 nt, Homo sapiens
  misc_RNA (1)...(19): siRNA sense strand
ggguguauucaguguggua

SEQ ID NO: 2323575 - RNA, 19 nt, Homo sapiens
  misc_RNA (1)...(19): siRNA sense strand
ccuuguaagugcacugaau

SEQ ID NO: 2323576 - RNA, 19 nt, Homo sapiens
  misc_RNA (1)...(19): siRNA sense strand
aagcagaagagucgcagaa

SEQ ID NO: 2323577 - RNA, 19 nt, Homo sapiens
  misc_RNA (1)...(19): siRNA sense strand
aacucauacaggagagaaa

SEQ ID NO: 2323578 - RNA, 19 nt, Homo sapiens
  misc_RNA (1)...(19): siRNA sense strand
aacucauacaggagagaaa

SEQ ID NO: 2323579 - RNA, 19 nt, Homo sapiens
  misc_RNA (1)...(19): siRNA sense strand
cccuaugaaugcagugaau

SEQ ID NO: 2323580 - RNA, 19 nt, Homo sapiens
  misc_RNA (1)...(19): siRNA sense strand
ggaacaaggagaagagcug

SEQ ID NO: 2323581 - RNA, 19 nt, Homo sapiens
  misc_RNA (1)...(19): siRNA sense strand
cccuaugagugcugugaau

SEQ ID NO: 2323582 - RNA, 19 nt, Homo sapiens
  misc_RNA (1)...(19): siRNA sense strand
ggcaaagccuucaggagca

SEQ ID NO: 2323583 - RNA, 19 nt, Homo sapiens
  misc_RNA (1)...(19): siRNA sense strand
gggaaagccuucagucgga

SEQ ID NO: 2323584 - RNA, 19 nt, Homo sapiens
  misc_RNA (1)...(19): siRNA sense strand
gaaauaauccuaauggguu

SEQ ID NO: 2323585 - RNA, 19 nt, Homo sapiens
  misc_RNA (1)...(19): siRNA sense strand
gcucauuguacaucagaga

SEQ ID NO: 2323586 - RNA, 19 nt, Homo sapiens
  misc_RNA (1)...(19): siRNA sense strand
gcucauuguacaucagaga

SEQ ID NO: 2323587 - RNA, 19 nt, Homo sapiens
  misc_RNA (1)...(19): siRNA sense strand
aaugcacacaagagagaaa

SEQ ID NO: 2323588 - RNA, 19 nt, Homo sapiens
  misc_RNA (1)...(19): siRNA sense strand
gcgggaaauccuuuaguuu

SEQ ID NO: 2323589 - RNA, 19 nt, Homo sapiens
  misc_RNA (1)...(19): siRNA sense strand
cuaauggguuucagguaca

SEQ ID NO: 2323590 - RNA, 19 nt, Homo sapiens
  misc_RNA (1)...(19): siRNA sense strand
cgucaauaagaaaucgcaa

SEQ ID NO: 2323591 - RNA, 19 nt, Homo sapiens
  misc_RNA (1)...(19): siRNA sense strand
aauaaagacaagcugggaa

SEQ ID NO: 2323592 - RNA, 19 nt, Homo sapiens
  misc_RNA (1)...(19): siRNA sense strand
aacucaugccgaagagaaa

SEQ ID NO: 2323593 - RNA, 19 nt, Homo sapiens
  misc_RNA (1)...(19): siRNA sense strand
guguaaugaaugugggaaa

SEQ ID NO: 2323594 - RNA, 19 nt, Homo sapiens
  misc_RNA (1)...(19): siRNA sense strand
augcaacaauugugggaaa

SEQ ID NO: 2323595 - RNA, 19 nt, Homo sapiens
  misc_RNA (1)...(19): siRNA sense strand
auguaaugaaugugggaaa

SEQ ID NO: 2323596 - RNA, 19 nt, Homo sapiens
  misc_RNA (1)...(19): siRNA sense strand
uuguaaugaaugugggaaa

SEQ ID NO: 2323597 - RNA, 19 nt, Homo sapiens
  misc_RNA (1)...(19): siRNA sense strand
ccuuaugggugcagugaau

SEQ ID NO: 2323598 - RNA, 19 nt, Homo sapiens
  misc_RNA (1)...(19): siRNA sense strand
agucaaaccuuaugguaca

SEQ ID NO: 2323599 - RNA, 19 nt, Homo sapiens
  misc_RNA (1)...(19): siRNA sense strand
ccuuauaaaugcagucaau

SEQ ID NO: 2323600 - RNA, 19 nt, Homo sapiens
  misc_RNA (1)...(19): siRNA sense strand
aauucauacaggagagaaa

SEQ ID NO: 2323601 - RNA, 19 nt, Homo sapiens
  misc_RNA (1)...(19): siRNA sense strand
aauucauacaggagagaaa

SEQ ID NO: 2323602 - RNA, 19 nt, Homo sapiens
  misc_RNA (1)...(19): siRNA sense strand
augcagugaaugugggaaa

SEQ ID NO: 2323603 - RNA, 19 nt, Homo sapiens
  misc_RNA (1)...(19): siRNA sense strand
gggaaagccuucaggagca

SEQ ID NO: 2323604 - RNA, 19 nt, Homo sapiens
  misc_RNA (1)...(19): siRNA sense strand
gugcacugaaugugggaaa

SEQ ID NO: 2323605 - RNA, 19 nt, Homo sapiens
  misc_RNA (1)...(19): siRNA sense strand
gugcugugaaugugggaaa

SEQ ID NO: 2323606 - RNA, 19 nt, Homo sapiens
  misc_RNA (1)...(19): siRNA sense strand
augcaaugaauguggcaaa

SEQ ID NO: 2323607 - RNA, 19 nt, Homo sapiens
  misc_RNA (1)...(19): siRNA sense strand
augcagcuguugugagaaa

SEQ ID NO: 2323608 - RNA, 19 nt, Homo sapiens
  misc_RNA (1)...(19): siRNA sense strand
augcaaugaaugucagaaa

SEQ ID NO: 2323609 - RNA, 19 nt, Homo sapiens
  misc_RNA (1)...(19): siRNA sense strand
augcagugagugugggaaa

SEQ ID NO: 2323610 - RNA, 19 nt, Homo sapiens
  misc_RNA (1)...(19): siRNA sense strand
guuuaaagucacagcuuau

SEQ ID NO: 2323611 - RNA, 19 nt, Homo sapiens
  misc_RNA (1)...(19): siRNA sense strand
augcagucaaugugagaaa

SEQ ID NO: 2323612 - RNA, 19 nt, Homo sapiens
  misc_RNA (1)...(19): siRNA sense strand
ccuuauguuuguagugauu

SEQ ID NO: 2323613 - RNA, 19 nt, Homo sapiens
  misc_RNA (1)...(19): siRNA sense strand
acacaggaguaaagcccua

SEQ ID NO: 2323614 - RNA, 19 nt, Homo sapiens
  misc_RNA (1)...(19): siRNA sense strand
gagaagucacacaggagua

SEQ ID NO: 2323615 - RNA, 19 nt, Homo sapiens
  misc_RNA (1)...(19): siRNA sense strand
guguauucagugugguaaa

SEQ ID NO: 2323616 - RNA, 19 nt, Homo sapiens
  misc_RNA (1)...(19): siRNA sense strand
cagagaagucacacaggaa

SEQ ID NO: 2323617 - RNA, 19 nt, Homo sapiens
  misc_RNA (1)...(19): siRNA sense strand
augccaugaaugugggaaa

SEQ ID NO: 2323618 - RNA, 19 nt, Homo sapiens
  misc_RNA (1)...(19): siRNA sense strand
ccagagaacucaugcagga

SEQ ID NO: 2323619 - RNA, 19 nt, Homo sapiens
  misc_RNA (1)...(19): siRNA sense strand
gagaaauccuucaguggga

SEQ ID NO: 2323620 - RNA, 19 nt, Homo sapiens
  misc_RNA (1)...(19): siRNA sense strand
cccuauaguuguaaugaau

SEQ ID NO: 2323621 - RNA, 19 nt, Homo sapiens
  misc_RNA (1)...(19): siRNA sense strand
acacaagagagaaaccaua

SEQ ID NO: 2323622 - RNA, 19 nt, Homo sapiens
  misc_RNA (1)...(19): siRNA sense strand
gcauggaaagaguuugaaa

SEQ ID NO: 2323623 - RNA, 19 nt, Homo sapiens
  misc_RNA (1)...(19): siRNA sense strand
gagaaagccuucagcagca

SEQ ID NO: 2323624 - RNA, 19 nt, Homo sapiens
  misc_RNA (1)...(19): siRNA sense strand
uuguagugauuguggaaaa

SEQ ID NO: 2323625 - RNA, 19 nt, Homo sapiens
  misc_RNA (1)...(19): siRNA sense strand
ccauauggaugcagugagu

SEQ ID NO: 2323626 - RNA, 19 nt, Homo sapiens
  misc_RNA (1)...(19): siRNA sense strand
ccauaugaaugcagugagu

SEQ ID NO: 2323627 - RNA, 19 nt, Homo sapiens
  misc_RNA (1)...(19): siRNA sense strand
cugugaaaguauugaaucu

SEQ ID NO: 2323628 - RNA, 19 nt, Homo sapiens
  misc_RNA (1)...(19): siRNA sense strand
agucaaaccugauuguaca

SEQ ID NO: 2323629 - RNA, 19 nt, Homo sapiens
  misc_RNA (1)...(19): siRNA sense strand
ggguguauucaguguggua

SEQ ID NO: 2323630 - RNA, 19 nt, Homo sapiens
  misc_RNA (1)...(19): siRNA sense strand
ccuuguaagugcacugaau

SEQ ID NO: 2323631 - RNA, 19 nt, Homo sapiens
  misc_RNA (1)...(19): siRNA sense strand
aacucauacaggagagaaa

SEQ ID NO: 2323632 - RNA, 19 nt, Homo sapiens
  misc_RNA (1)...(19): siRNA sense strand
aacucauacaggagagaaa

SEQ ID NO: 2323633 - RNA, 19 nt, Homo sapiens
  misc_RNA (1)...(19): siRNA sense strand
cccuaugaaugcagugaau

SEQ ID NO: 2323634 - RNA, 19 nt, Homo sapiens
  misc_RNA (1)...(19): siRNA sense strand
cccuaugagugcugugaau

SEQ ID NO: 2323635 - RNA, 19 nt, Homo sapiens
  misc_RNA (1)...(19): siRNA sense strand
ggcaaagccuucaggagca

SEQ ID NO: 2323636 - RNA, 19 nt, Homo sapiens
  misc_RNA (1)...(19): siRNA sense strand
gggaaagccuucagucgga

SEQ ID NO: 2323637 - RNA, 19 nt, Homo sapiens
  misc_RNA (1)...(19): siRNA sense strand
gaaauaauccuaauggguu

SEQ ID NO: 2323638 - RNA, 19 nt, Homo sapiens
  misc_RNA (1)...(19): siRNA sense strand
gcucauuguacaucagaga

SEQ ID NO: 2323639 - RNA, 19 nt, Homo sapiens
  misc_RNA (1)...(19): siRNA sense strand
gcucauuguacaucagaga

SEQ ID NO: 2323640 - RNA, 19 nt, Homo sapiens
  misc_RNA (1)...(19): siRNA sense strand
aaugcacacaagagagaaa

SEQ ID NO: 2323641 - RNA, 19 nt, Homo sapiens
  misc_RNA (1)...(19): siRNA sense strand
gcgggaaauccuuuaguuu

SEQ ID NO: 2323642 - RNA, 19 nt, Homo sapiens
  misc_RNA (1)...(19): siRNA sense strand
cuaauggguuucagguaca

SEQ ID NO: 2323643 - RNA, 19 nt, Homo sapiens
  misc_RNA (1)...(19): siRNA sense strand
cgucaauaagaaaucgcaa

SEQ ID NO: 2323644 - RNA, 19 nt, Homo sapiens
  misc_RNA (1)...(19): siRNA sense strand
aacucaugccgaagagaaa

SEQ ID NO: 2323645 - RNA, 19 nt, Homo sapiens
  misc_RNA (1)...(19): siRNA sense strand
ucauuguacaucagagaau

SEQ ID NO: 2323646 - RNA, 19 nt, Homo sapiens
  misc_RNA (1)...(19): siRNA sense strand
agaaaccauauguguguaa

SEQ ID NO: 2323647 - RNA, 19 nt, Homo sapiens
  misc_RNA (1)...(19): siRNA sense strand
aauaaagacaagcugggaa

SEQ ID NO: 2323648 - RNA, 19 nt, Homo sapiens
  misc_RNA (1)...(19): siRNA sense strand
gugggaaagccuucaguuu

SEQ ID NO: 2323649 - RNA, 19 nt, Homo sapiens
  misc_RNA (1)...(19): siRNA sense strand
ucauugugcaucagagaau

SEQ ID NO: 2323650 - RNA, 19 nt, Homo sapiens
  misc_RNA (1)...(19): siRNA sense strand
cauggaaagaguuugaaau

SEQ ID NO: 2323651 - RNA, 19 nt, Homo sapiens
  misc_RNA (1)...(19): siRNA sense strand
auguagugagugucagaaa

SEQ ID NO: 2323652 - RNA, 19 nt, Homo sapiens
  misc_RNA (1)...(19): siRNA sense strand
ggagaaaaucccuaugaau

SEQ ID NO: 2323653 - RNA, 19 nt, Homo sapiens
  misc_RNA (1)...(19): siRNA sense strand
ucauaaauguggcacgcau

SEQ ID NO: 2323654 - RNA, 19 nt, Homo sapiens
  misc_RNA (1)...(19): siRNA sense strand
ccuuauguaugcaaugaau

SEQ ID NO: 2323655 - RNA, 19 nt, Homo sapiens
  misc_RNA (1)...(19): siRNA sense strand
ccucauuguacaucagaga

SEQ ID NO: 2323656 - RNA, 19 nt, Homo sapiens
  misc_RNA (1)...(19): siRNA sense strand
augcaggagagaagccuua

SEQ ID NO: 2323657 - RNA, 19 nt, Homo sapiens
  misc_RNA (1)...(19): siRNA sense strand
gcacaaaccucauucgaca

SEQ ID NO: 2323658 - RNA, 19 nt, Homo sapiens
  misc_RNA (1)...(19): siRNA sense strand
cagaaaugcaggaaggaca

SEQ ID NO: 2323659 - RNA, 19 nt, Homo sapiens
  misc_RNA (1)...(19): siRNA sense strand
aaggaugcauacugggaaa

SEQ ID NO: 2323660 - RNA, 19 nt, Homo sapiens
  misc_RNA (1)...(19): siRNA sense strand
ggucauaucucauguggca

SEQ ID NO: 2323661 - RNA, 19 nt, Homo sapiens
  misc_RNA (1)...(19): siRNA sense strand
uugcauaacaggagacaca

SEQ ID NO: 2323662 - RNA, 19 nt, Homo sapiens
  misc_RNA (1)...(19): siRNA sense strand
cagccuugucagagggaau

SEQ ID NO: 2323663 - RNA, 19 nt, Homo sapiens
  misc_RNA (1)...(19): siRNA sense strand
augugaugguuuagggaca

SEQ ID NO: 2323664 - RNA, 19 nt, Homo sapiens
  misc_RNA (1)...(19): siRNA sense strand
cccuaugagugcagugaau

SEQ ID NO: 2323665 - RNA, 19 nt, Homo sapiens
  misc_RNA (1)...(19): siRNA sense strand
gauucauaguggagagaag

SEQ ID NO: 2323666 - RNA, 19 nt, Homo sapiens
  misc_RNA (1)...(19): siRNA sense strand
cuuuaaaugcagugaaugu

SEQ ID NO: 2323667 - RNA, 19 nt, Homo sapiens
  misc_RNA (1)...(19): siRNA sense strand
gaaucucacuucagggaca

SEQ ID NO: 2323668 - RNA, 19 nt, Homo sapiens
  misc_RNA (1)...(19): siRNA sense strand
caggagacacacuggagaa

SEQ ID NO: 2323669 - RNA, 19 nt, Homo sapiens
  misc_RNA (1)...(19): siRNA sense strand
gaauguaaccacugaggca

SEQ ID NO: 2323670 - RNA, 19 nt, Homo sapiens
  misc_RNA (1)...(19): siRNA sense strand
ugauucaggaagaggaaaa

SEQ ID NO: 2323671 - RNA, 19 nt, Homo sapiens
  misc_RNA (1)...(19): siRNA sense strand
augcagugaauguggaaaa

SEQ ID NO: 2323672 - RNA, 19 nt, Homo sapiens
  misc_RNA (1)...(19): siRNA sense strand
aggaggugaugcuggaaaa

SEQ ID NO: 2323673 - RNA, 19 nt, Homo sapiens
  misc_RNA (1)...(19): siRNA sense strand
auguguugagugugggaaa

SEQ ID NO: 2323674 - RNA, 19 nt, Homo sapiens
  misc_RNA (1)...(19): siRNA sense strand
auguaaccacugaggcaaa

SEQ ID NO: 2323675 - RNA, 19 nt, Homo sapiens
  misc_RNA (1)...(19): siRNA sense strand
ccuugcuggacaugagaaa

SEQ ID NO: 2323676 - RNA, 19 nt, Homo sapiens
  misc_RNA (1)...(19): siRNA sense strand
cccuaugaaugcacagaau

SEQ ID NO: 2323677 - RNA, 19 nt, Homo sapiens
  misc_RNA (1)...(19): siRNA sense strand
ccuucaaccgcaagucaua

SEQ ID NO: 2323678 - RNA, 19 nt, Homo sapiens
  misc_RNA (1)...(19): siRNA sense strand
ggaaaggccuucagucgca

SEQ ID NO: 2323679 - RNA, 19 nt, Homo sapiens
  misc_RNA (1)...(19): siRNA sense strand
ggauuggacaggagcaagu

SEQ ID NO: 2323680 - RNA, 19 nt, Homo sapiens
  misc_RNA (1)...(19): siRNA sense strand
guccaggcgacaaaggaaa

SEQ ID NO: 2323681 - RNA, 19 nt, Homo sapiens
  misc_RNA (1)...(19): siRNA sense strand
caugauucaggaagaggaa

SEQ ID NO: 2323682 - RNA, 19 nt, Homo sapiens
  misc_RNA (1)...(19): siRNA sense strand
gcugaugguguguguucaa

SEQ ID NO: 2323683 - RNA, 19 nt, Homo sapiens
  misc_RNA (1)...(19): siRNA sense strand
gauucacaguggagagaag

SEQ ID NO: 2323684 - RNA, 19 nt, Homo sapiens
  misc_RNA (1)...(19): siRNA sense strand
gcggaaaggccuucaccca

SEQ ID NO: 2323685 - RNA, 19 nt, Homo sapiens
  misc_RNA (1)...(19): siRNA sense strand
gugcagugaaugugggaag

SEQ ID NO: 2323686 - RNA, 19 nt, Homo sapiens
  misc_RNA (1)...(19): siRNA sense strand
caggaggugaugcuggaaa

SEQ ID NO: 2323687 - RNA, 19 nt, Homo sapiens
  misc_RNA (1)...(19): siRNA sense strand
gugcagugaauguggaaag

SEQ ID NO: 2323688 - RNA, 19 nt, Homo sapiens
  misc_RNA (1)...(19): siRNA sense strand
cuaugaaugcacagaaugu

SEQ ID NO: 2323689 - RNA, 19 nt, Homo sapiens
  misc_RNA (1)...(19): siRNA sense strand
ggaaggaccucauucgcca

SEQ ID NO: 2323690 - RNA, 19 nt, Homo sapiens
  misc_RNA (1)...(19): siRNA sense strand
aggagacacacuggagaaa

SEQ ID NO: 2323691 - RNA, 19 nt, Homo sapiens
  misc_RNA (1)...(19): siRNA sense strand
aaauguagugaauguggaa

SEQ ID NO: 2323692 - RNA, 19 nt, Homo sapiens
  misc_RNA (1)...(19): siRNA sense strand
guguaacagaugugggaag

SEQ ID NO: 2323693 - RNA, 19 nt, Homo sapiens
  misc_RNA (1)...(19): siRNA sense strand
gugcauggaguguggaaag

SEQ ID NO: 2323694 - RNA, 19 nt, Homo sapiens
  misc_RNA (1)...(19): siRNA sense strand
gugcaaugaaugcggaaag

SEQ ID NO: 2323695 - RNA, 19 nt, Homo sapiens
  misc_RNA (1)...(19): siRNA sense strand
ccucauucgacaugccauu

SEQ ID NO: 2323696 - RNA, 19 nt, Homo sapiens
  misc_RNA (1)...(19): siRNA sense strand
agaccauagcugagaacua

SEQ ID NO: 2323697 - RNA, 19 nt, Homo sapiens
  misc_RNA (1)...(19): siRNA sense strand
agaaaaugcaacagcgaaa

SEQ ID NO: 2323698 - RNA, 19 nt, Homo sapiens
  misc_RNA (1)...(19): siRNA sense strand
gcacagaaggagauggagu

SEQ ID NO: 2323699 - RNA, 19 nt, Homo sapiens
  misc_RNA (1)...(19): siRNA sense strand
gcacagaaggagauggagu

SEQ ID NO: 2323700 - RNA, 19 nt, Homo sapiens
  misc_RNA (1)...(19): siRNA sense strand
ccuuaaacaaugagaagca

SEQ ID NO: 2323701 - RNA, 19 nt, Homo sapiens
  misc_RNA (1)...(19): siRNA sense strand
uaaauaaggcuguuggaga

SEQ ID NO: 2323702 - RNA, 19 nt, Homo sapiens
  misc_RNA (1)...(19): siRNA sense strand
uaaauaaggcuguuggaga

SEQ ID NO: 2323703 - RNA, 19 nt, Homo sapiens
  misc_RNA (1)...(19): siRNA sense strand
augagaagcaguggauaaa

SEQ ID NO: 2323704 - RNA, 19 nt, Homo sapiens
  misc_RNA (1)...(19): siRNA sense strand
gaacaauggcugcugacca

SEQ ID NO: 2323705 - RNA, 19 nt, Homo sapiens
  misc_RNA (1)...(19): siRNA sense strand
guggacaccuggaugccaa

SEQ ID NO: 2323706 - RNA, 19 nt, Homo sapiens
  misc_RNA (1)...(19): siRNA sense strand
cuacaaacugcgcacagaa

SEQ ID NO: 2323707 - RNA, 19 nt, Homo sapiens
  misc_RNA (1)...(19): siRNA sense strand
cuacaaacugcgcacagaa

SEQ ID NO: 2323708 - RNA, 19 nt, Homo sapiens
  misc_RNA (1)...(19): siRNA sense strand
acaaugagaagcaguggau

SEQ ID NO: 2323709 - RNA, 19 nt, Homo sapiens
  misc_RNA (1)...(19): siRNA sense strand
aggaggaagaggaggaaga

SEQ ID NO: 2323710 - RNA, 19 nt, Homo sapiens
  misc_RNA (1)...(19): siRNA sense strand
acgaugaaggaacgagaaa

SEQ ID NO: 2323711 - RNA, 19 nt, Homo sapiens
  misc_RNA (1)...(19): siRNA sense strand
gaaaugagcagguccggaa

SEQ ID NO: 2323712 - RNA, 19 nt, Homo sapiens
  misc_RNA (1)...(19): siRNA sense strand
cguuggaaguuauggcaca

SEQ ID NO: 2323713 - RNA, 19 nt, Homo sapiens
  misc_RNA (1)...(19): siRNA sense strand
aagaagagcuccuggccca

SEQ ID NO: 2323714 - RNA, 19 nt, Homo sapiens
  misc_RNA (1)...(19): siRNA sense strand
gaggaagaggaggaagaaa

SEQ ID NO: 2323715 - RNA, 19 nt, Homo sapiens
  misc_RNA (1)...(19): siRNA sense strand
gugcacagcccaagaggca

SEQ ID NO: 2323716 - RNA, 19 nt, Homo sapiens
  misc_RNA (1)...(19): siRNA sense strand
uggaggaggaagaggagga

SEQ ID NO: 2323717 - RNA, 19 nt, Homo sapiens
  misc_RNA (1)...(19): siRNA sense strand
uggacacuuuggaggacaa

SEQ ID NO: 2323718 - RNA, 19 nt, Homo sapiens
  misc_RNA (1)...(19): siRNA sense strand
ccacgaugaaggaacgaga

SEQ ID NO: 2323719 - RNA, 19 nt, Homo sapiens
  misc_RNA (1)...(19): siRNA sense strand
guggauuucuucugcgaga

SEQ ID NO: 2323720 - RNA, 19 nt, Homo sapiens
  misc_RNA (1)...(19): siRNA sense strand
gcaucauggccgaguucuu

SEQ ID NO: 2323721 - RNA, 19 nt, Homo sapiens
  misc_RNA (1)...(19): siRNA sense strand
augcauaguaacagccuga

SEQ ID NO: 2323722 - RNA, 19 nt, Homo sapiens
  misc_RNA (1)...(19): siRNA sense strand
cugacguggccuaccauaa

SEQ ID NO: 2323723 - RNA, 19 nt, Homo sapiens
  misc_RNA (1)...(19): siRNA sense strand
gcauccagguccuccggaa

SEQ ID NO: 2323724 - RNA, 19 nt, Homo sapiens
  misc_RNA (1)...(19): siRNA sense strand
ugucaggagucgaggaagc

SEQ ID NO: 2323725 - RNA, 19 nt, Homo sapiens
  misc_RNA (1)...(19): siRNA sense strand
uggacuuacucgagaacaa

SEQ ID NO: 2323726 - RNA, 19 nt, Homo sapiens
  misc_RNA (1)...(19): siRNA sense strand
agaacaagaaagagcuuau

SEQ ID NO: 2323727 - RNA, 19 nt, Homo sapiens
  misc_RNA (1)...(19): siRNA sense strand
aguaagaagcggaagagga

SEQ ID NO: 2323728 - RNA, 19 nt, Homo sapiens
  misc_RNA (1)...(19): siRNA sense strand
cgagaacaagaaagagcuu

SEQ ID NO: 2323729 - RNA, 19 nt, Homo sapiens
  misc_RNA (1)...(19): siRNA sense strand
gcuggaaccaagacacaau

SEQ ID NO: 2323730 - RNA, 19 nt, Homo sapiens
  misc_RNA (1)...(19): siRNA sense strand
uggacuuacucgagaacaa

SEQ ID NO: 2323731 - RNA, 19 nt, Homo sapiens
  misc_RNA (1)...(19): siRNA sense strand
agaacaagaaagagcuuau

SEQ ID NO: 2323732 - RNA, 19 nt, Homo sapiens
  misc_RNA (1)...(19): siRNA sense strand
aguaagaagcggaagagga

SEQ ID NO: 2323733 - RNA, 19 nt, Homo sapiens
  misc_RNA (1)...(19): siRNA sense strand
cgagaacaagaaagagcuu

SEQ ID NO: 2323734 - RNA, 19 nt, Homo sapiens
  misc_RNA (1)...(19): siRNA sense strand
gcuggaaccaagacacaau

SEQ ID NO: 2323735 - RNA, 19 nt, Homo sapiens
  misc_RNA (1)...(19): siRNA sense strand
uggacuuacucgagaacaa

SEQ ID NO: 2323736 - RNA, 19 nt, Homo sapiens
  misc_RNA (1)...(19): siRNA sense strand
agaacaagaaagagcuuau

SEQ ID NO: 2323737 - RNA, 19 nt, Homo sapiens
  misc_RNA (1)...(19): siRNA sense strand
aguaagaagcggaagagga

SEQ ID NO: 2323738 - RNA, 19 nt, Homo sapiens
  misc_RNA (1)...(19): siRNA sense strand
cgagaacaagaaagagcuu

SEQ ID NO: 2323739 - RNA, 19 nt, Homo sapiens
  misc_RNA (1)...(19): siRNA sense strand
gcuggaaccaagacacaau

SEQ ID NO: 2323740 - RNA, 19 nt, Homo sapiens
  misc_RNA (1)...(19): siRNA sense strand
uggacuuacucgagaacaa

SEQ ID NO: 2323741 - RNA, 19 nt, Homo sapiens
  misc_RNA (1)...(19): siRNA sense strand
agaacaagaaagagcuuau

SEQ ID NO: 2323742 - RNA, 19 nt, Homo sapiens
  misc_RNA (1)...(19): siRNA sense strand
aguaagaagcggaagagga

SEQ ID NO: 2323743 - RNA, 19 nt, Homo sapiens
  misc_RNA (1)...(19): siRNA sense strand
cgagaacaagaaagagcuu

SEQ ID NO: 2323744 - RNA, 19 nt, Homo sapiens
  misc_RNA (1)...(19): siRNA sense strand
gcuggaaccaagacacaau

SEQ ID NO: 2323745 - RNA, 19 nt, Homo sapiens
  misc_RNA (1)...(19): siRNA sense strand
gcaaggaccuguuggcuga

SEQ ID NO: 2323746 - RNA, 19 nt, Homo sapiens
  misc_RNA (1)...(19): siRNA sense strand
gggcaacagcagaggaaac

SEQ ID NO: 2323747 - RNA, 19 nt, Homo sapiens
  misc_RNA (1)...(19): siRNA sense strand
aguaagaacuuuaacacga

SEQ ID NO: 2323748 - RNA, 19 nt, Homo sapiens
  misc_RNA (1)...(19): siRNA sense strand
gcuuugaugaaauggcuaa

SEQ ID NO: 2323749 - RNA, 19 nt, Homo sapiens
  misc_RNA (1)...(19): siRNA sense strand
cugaagugacuaugaacau

SEQ ID NO: 2323750 - RNA, 19 nt, Homo sapiens
  misc_RNA (1)...(19): siRNA sense strand
cuguuaagucugggaaauu

SEQ ID NO: 2323751 - RNA, 19 nt, Homo sapiens
  misc_RNA (1)...(19): siRNA sense strand
ggcuguuaagucugggaaa

SEQ ID NO: 2323752 - RNA, 19 nt, Homo sapiens
  misc_RNA (1)...(19): siRNA sense strand
agaggaaacaccugggcca

SEQ ID NO: 2323753 - RNA, 19 nt, Homo sapiens
  misc_RNA (1)...(19): siRNA sense strand
acauaauccagcaggaacu

SEQ ID NO: 2323754 - RNA, 19 nt, Homo sapiens
  misc_RNA (1)...(19): siRNA sense strand
ggauuugacaguaagaacu

SEQ ID NO: 2323755 - RNA, 19 nt, Homo sapiens
  misc_RNA (1)...(19): siRNA sense strand
ggacaaagcuggcggcuac

SEQ ID NO: 2323756 - RNA, 19 nt, Homo sapiens
  misc_RNA (1)...(19): siRNA sense strand
cggaauucuacgaggaaac

SEQ ID NO: 2323757 - RNA, 19 nt, Homo sapiens
  misc_RNA (1)...(19): siRNA sense strand
acgaggaaacgaaggugaa

SEQ ID NO: 2323758 - RNA, 19 nt, Homo sapiens
  misc_RNA (1)...(19): siRNA sense strand
gcaaagaccaucagcugga

SEQ ID NO: 2323759 - RNA, 19 nt, Homo sapiens
  misc_RNA (1)...(19): siRNA sense strand
uggacaagcaggacgccua

SEQ ID NO: 2323760 - RNA, 19 nt, Homo sapiens
  misc_RNA (1)...(19): siRNA sense strand
cgguugagugggagagaac

SEQ ID NO: 2323761 - RNA, 19 nt, Homo sapiens
  misc_RNA (1)...(19): siRNA sense strand
ugucacaggacucgggaga

SEQ ID NO: 2323762 - RNA, 19 nt, Homo sapiens
  misc_RNA (1)...(19): siRNA sense strand
ggaacaaaccagcaccaca

SEQ ID NO: 2323763 - RNA, 19 nt, Homo sapiens
  misc_RNA (1)...(19): siRNA sense strand
uucugaacguggugggauu

SEQ ID NO: 2323764 - RNA, 19 nt, Homo sapiens
  misc_RNA (1)...(19): siRNA sense strand
ccuggagaagacagagcaa

SEQ ID NO: 2323765 - RNA, 19 nt, Homo sapiens
  misc_RNA (1)...(19): siRNA sense strand
gacaaagccuccuucgcua

SEQ ID NO: 2323766 - RNA, 19 nt, Homo sapiens
  misc_RNA (1)...(19): siRNA sense strand
caacaaauguggacggaga

SEQ ID NO: 2323767 - RNA, 19 nt, Homo sapiens
  misc_RNA (1)...(19): siRNA sense strand
gcaacugucuagugggcca

SEQ ID NO: 2323768 - RNA, 19 nt, Homo sapiens
  misc_RNA (1)...(19): siRNA sense strand
gcugcagugucaugggcaa

SEQ ID NO: 2323769 - RNA, 19 nt, Homo sapiens
  misc_RNA (1)...(19): siRNA sense strand
ucacagagcuggagcaguc

SEQ ID NO: 2323770 - RNA, 19 nt, Homo sapiens
  misc_RNA (1)...(19): siRNA sense strand
ccaaugagaccgugcggca

SEQ ID NO: 2323771 - RNA, 19 nt, Homo sapiens
  misc_RNA (1)...(19): siRNA sense strand
cgguggagaagaaggacga

SEQ ID NO: 2323772 - RNA, 19 nt, Homo sapiens
  misc_RNA (1)...(19): siRNA sense strand
acaagaugcugguggcugu

SEQ ID NO: 2323773 - RNA, 19 nt, Homo sapiens
  misc_RNA (1)...(19): siRNA sense strand
guggagaagaaggacgaaa

SEQ ID NO: 2323774 - RNA, 19 nt, Homo sapiens
  misc_RNA (1)...(19): siRNA sense strand
acaaauguggacggagaaa

SEQ ID NO: 2323775 - RNA, 19 nt, Homo sapiens
  misc_RNA (1)...(19): siRNA sense strand
caccagaggucuacgccau

SEQ ID NO: 2323776 - RNA, 19 nt, Homo sapiens
  misc_RNA (1)...(19): siRNA sense strand
cugucaaggcacugaagga

SEQ ID NO: 2323777 - RNA, 19 nt, Homo sapiens
  misc_RNA (1)...(19): siRNA sense strand
ggacagagcuccugcugga

SEQ ID NO: 2323778 - RNA, 19 nt, Homo sapiens
  misc_RNA (1)...(19): siRNA sense strand
ggagacgaggggaggaaaa

SEQ ID NO: 2323779 - RNA, 19 nt, Homo sapiens
  misc_RNA (1)...(19): siRNA sense strand
caggaggucuggagcguca

SEQ ID NO: 2323780 - RNA, 19 nt, Homo sapiens
  misc_RNA (1)...(19): siRNA sense strand
gaagugguguggacggcaa

SEQ ID NO: 2323781 - RNA, 19 nt, Homo sapiens
  misc_RNA (1)...(19): siRNA sense strand
aggaggaagaacagauuga

SEQ ID NO: 2323782 - RNA, 19 nt, Homo sapiens
  misc_RNA (1)...(19): siRNA sense strand
gcaaacuaucgcaaggaca

SEQ ID NO: 2323783 - RNA, 19 nt, Homo sapiens
  misc_RNA (1)...(19): siRNA sense strand
cgugagagaaggaaggaac

SEQ ID NO: 2323784 - RNA, 19 nt, Homo sapiens
  misc_RNA (1)...(19): siRNA sense strand
gugugaccuuggugggaca

SEQ ID NO: 2323785 - RNA, 19 nt, Homo sapiens
  misc_RNA (1)...(19): siRNA sense strand
ggaugaaucuguuuggcga

SEQ ID NO: 2323786 - RNA, 19 nt, Homo sapiens
  misc_RNA (1)...(19): siRNA sense strand
cggguaacgaugaaaauua

SEQ ID NO: 2323787 - RNA, 19 nt, Homo sapiens
  misc_RNA (1)...(19): siRNA sense strand
cccagaaggcacagacaga

SEQ ID NO: 2323788 - RNA, 19 nt, Homo sapiens
  misc_RNA (1)...(19): siRNA sense strand
ccaaauuugccuaaccaga

SEQ ID NO: 2323789 - RNA, 19 nt, Homo sapiens
  misc_RNA (1)...(19): siRNA sense strand
gcuaccuaucacagagcaa

SEQ ID NO: 2323790 - RNA, 19 nt, Homo sapiens
  misc_RNA (1)...(19): siRNA sense strand
cgcaacagcagcagcaaca

SEQ ID NO: 2323791 - RNA, 19 nt, Homo sapiens
  misc_RNA (1)...(19): siRNA sense strand
ggcagaagcuggaggacca

SEQ ID NO: 2323792 - RNA, 19 nt, Homo sapiens
  misc_RNA (1)...(19): siRNA sense strand
gggaagaguuucacccuga

SEQ ID NO: 2323793 - RNA, 19 nt, Homo sapiens
  misc_RNA (1)...(19): siRNA sense strand
gggcgagggaagaguuuca

SEQ ID NO: 2323794 - RNA, 19 nt, Homo sapiens
  misc_RNA (1)...(19): siRNA sense strand
ugacugugauggcaggcaa

SEQ ID NO: 2323795 - RNA, 19 nt, Homo sapiens
  misc_RNA (1)...(19): siRNA sense strand
cggcaagaugggcgagaac

SEQ ID NO: 2323796 - RNA, 19 nt, Homo sapiens
  misc_RNA (1)...(19): siRNA sense strand
gcguauucccguagaccca

SEQ ID NO: 2323797 - RNA, 19 nt, Homo sapiens
  misc_RNA (1)...(19): siRNA sense strand
gcaagaugggcgagaacag

SEQ ID NO: 2323798 - RNA, 19 nt, Homo sapiens
  misc_RNA (1)...(19): siRNA sense strand
uggcaggcaaugacgagaa

SEQ ID NO: 2323799 - RNA, 19 nt, Homo sapiens
  misc_RNA (1)...(19): siRNA sense strand
cuuaagaacaccauggaga

SEQ ID NO: 2323800 - RNA, 19 nt, Homo sapiens
  misc_RNA (1)...(19): siRNA sense strand
gcaacaugacagaggacca

SEQ ID NO: 2323801 - RNA, 19 nt, Homo sapiens
  misc_RNA (1)...(19): siRNA sense strand
cucccaagccugugagcaa

SEQ ID NO: 2323802 - RNA, 19 nt, Homo sapiens
  misc_RNA (1)...(19): siRNA sense strand
aagcaggagcugucgggaa

SEQ ID NO: 2323803 - RNA, 19 nt, Homo sapiens
  misc_RNA (1)...(19): siRNA sense strand
gggaagaucagaagccagu

SEQ ID NO: 2323804 - RNA, 19 nt, Homo sapiens
  misc_RNA (1)...(19): siRNA sense strand
ccgaaagagucacuggaac

SEQ ID NO: 2323805 - RNA, 19 nt, Homo sapiens
  misc_RNA (1)...(19): siRNA sense strand
ggaaggucuuugagagcug

SEQ ID NO: 2323806 - RNA, 19 nt, Homo sapiens
  misc_RNA (1)...(19): siRNA sense strand
ccgucaaauuauaggauau

SEQ ID NO: 2323807 - RNA, 19 nt, Homo sapiens
  misc_RNA (1)...(19): siRNA sense strand
gcacaguauucuuggcuga

SEQ ID NO: 2323808 - RNA, 19 nt, Homo sapiens
  misc_RNA (1)...(19): siRNA sense strand
ccgcaguauucuuggcgua

SEQ ID NO: 2323809 - RNA, 19 nt, Homo sapiens
  misc_RNA (1)...(19): siRNA sense strand
ccaacaucacugagaagaa

SEQ ID NO: 2323810 - RNA, 19 nt, Homo sapiens
  misc_RNA (1)...(19): siRNA sense strand
cgucauaaagucagaucuu

SEQ ID NO: 2323811 - RNA, 19 nt, Homo sapiens
  misc_RNA (1)...(19): siRNA sense strand
ggguaaacaaucagagccu

SEQ ID NO: 2323812 - RNA, 19 nt, Homo sapiens
  misc_RNA (1)...(19): siRNA sense strand
acaagaaaugacacagcaa

SEQ ID NO: 2323813 - RNA, 19 nt, Homo sapiens
  misc_RNA (1)...(19): siRNA sense strand
ggguaaauaaucagagccu

SEQ ID NO: 2323814 - RNA, 19 nt, Homo sapiens
  misc_RNA (1)...(19): siRNA sense strand
ggguaaauggucagagccu

SEQ ID NO: 2323815 - RNA, 19 nt, Homo sapiens
  misc_RNA (1)...(19): siRNA sense strand
auuccauagucaagagcau

SEQ ID NO: 2323816 - RNA, 19 nt, Homo sapiens
  misc_RNA (1)...(19): siRNA sense strand
acucagugucacaaggaau

SEQ ID NO: 2323817 - RNA, 19 nt, Homo sapiens
  misc_RNA (1)...(19): siRNA sense strand
caguauucuuggcguauca

SEQ ID NO: 2323818 - RNA, 19 nt, Homo sapiens
  misc_RNA (1)...(19): siRNA sense strand
cucaauaggaccacaguca

SEQ ID NO: 2323819 - RNA, 19 nt, Homo sapiens
  misc_RNA (1)...(19): siRNA sense strand
agaaaugacgcaagagccu

SEQ ID NO: 2323820 - RNA, 19 nt, Homo sapiens
  misc_RNA (1)...(19): siRNA sense strand
ugucacaaggaaugaugua

SEQ ID NO: 2323821 - RNA, 19 nt, Homo sapiens
  misc_RNA (1)...(19): siRNA sense strand
ccaaaaucacgccaaauaa

SEQ ID NO: 2323822 - RNA, 19 nt, Homo sapiens
  misc_RNA (1)...(19): siRNA sense strand
ccauggaaguggaggccga

SEQ ID NO: 2323823 - RNA, 19 nt, Homo sapiens
  misc_RNA (1)...(19): siRNA sense strand
cggcggagaccuauggcaa

SEQ ID NO: 2323824 - RNA, 19 nt, Homo sapiens
  misc_RNA (1)...(19): siRNA sense strand
ccuuccaggaugagaacua

SEQ ID NO: 2323825 - RNA, 19 nt, Homo sapiens
  misc_RNA (1)...(19): siRNA sense strand
ggugguugcuacuggguca

SEQ ID NO: 2323826 - RNA, 19 nt, Homo sapiens
  misc_RNA (1)...(19): siRNA sense strand
agguagcgguagugaagau

SEQ ID NO: 2323827 - RNA, 19 nt, Homo sapiens
  misc_RNA (1)...(19): siRNA sense strand
ugaaacagcugaaguggca

SEQ ID NO: 2323828 - RNA, 19 nt, Homo sapiens
  misc_RNA (1)...(19): siRNA sense strand
guguauucgccuaugaaau

SEQ ID NO: 2323829 - RNA, 19 nt, Homo sapiens
  misc_RNA (1)...(19): siRNA sense strand
acaucaaacccgacaacau

SEQ ID NO: 2323830 - RNA, 19 nt, Homo sapiens
  misc_RNA (1)...(19): siRNA sense strand
cagugugacagcugagauu

SEQ ID NO: 2323831 - RNA, 19 nt, Homo sapiens
  misc_RNA (1)...(19): siRNA sense strand
aggaagcccuggaggagga

SEQ ID NO: 2323832 - RNA, 19 nt, Homo sapiens
  misc_RNA (1)...(19): siRNA sense strand
guguaugccaugaagauca

SEQ ID NO: 2323833 - RNA, 19 nt, Homo sapiens
  misc_RNA (1)...(19): siRNA sense strand
gcgagguagcgguagugaa

SEQ ID NO: 2323834 - RNA, 19 nt, Homo sapiens
  misc_RNA (1)...(19): siRNA sense strand
cggagauugucauggccau

SEQ ID NO: 2323835 - RNA, 19 nt, Homo sapiens
  misc_RNA (1)...(19): siRNA sense strand
guagugaagaugaagcaga

SEQ ID NO: 2323836 - RNA, 19 nt, Homo sapiens
  misc_RNA (1)...(19): siRNA sense strand
augaaauguucuaugggca

SEQ ID NO: 2323837 - RNA, 19 nt, Homo sapiens
  misc_RNA (1)...(19): siRNA sense strand
aggacaaguacguggccga

SEQ ID NO: 2323838 - RNA, 19 nt, Homo sapiens
  misc_RNA (1)...(19): siRNA sense strand
gaaccgggaccuagaggca

SEQ ID NO: 2323839 - RNA, 19 nt, Homo sapiens
  misc_RNA (1)...(19): siRNA sense strand
cgguagugaagaugaagca

SEQ ID NO: 2323840 - RNA, 19 nt, Homo sapiens
  misc_RNA (1)...(19): siRNA sense strand
gguccuuguagccgggaau

SEQ ID NO: 2323841 - RNA, 19 nt, Homo sapiens
  misc_RNA (1)...(19): siRNA sense strand
agaugaagcagacgggcca

SEQ ID NO: 2323842 - RNA, 19 nt, Homo sapiens
  misc_RNA (1)...(19): siRNA sense strand
aggaggaggaauuggguau

SEQ ID NO: 2323843 - RNA, 19 nt, Homo sapiens
  misc_RNA (1)...(19): siRNA sense strand
auuaguaacaagagcacaa

SEQ ID NO: 2323844 - RNA, 19 nt, Homo sapiens
  misc_RNA (1)...(19): siRNA sense strand
acaggaaaccaguggcaga

SEQ ID NO: 2323845 - RNA, 19 nt, Homo sapiens
  misc_RNA (1)...(19): siRNA sense strand
aggcccaggaggaggaauu

SEQ ID NO: 2323846 - RNA, 19 nt, Homo sapiens
  misc_RNA (1)...(19): siRNA sense strand
cagaugaagaacauggaga

SEQ ID NO: 2323847 - RNA, 19 nt, Homo sapiens
  misc_RNA (1)...(19): siRNA sense strand
acgacgaggcauucagcaa

SEQ ID NO: 2323848 - RNA, 19 nt, Homo sapiens
  misc_RNA (1)...(19): siRNA sense strand
cuucuggggaggugggaaa

SEQ ID NO: 2323849 - RNA, 19 nt, Homo sapiens
  misc_RNA (1)...(19): siRNA sense strand
uaacaagagcacaaaggca

SEQ ID NO: 2323850 - RNA, 19 nt, Homo sapiens
  misc_RNA (1)...(19): siRNA sense strand
aaacaaagauggaaaggga

SEQ ID NO: 2323851 - RNA, 19 nt, Homo sapiens
  misc_RNA (1)...(19): siRNA sense strand
uggcaaaaguggaagguca

SEQ ID NO: 2323852 - RNA, 19 nt, Homo sapiens
  misc_RNA (1)...(19): siRNA sense strand
cggucuagccuguguggaa

SEQ ID NO: 2323853 - RNA, 19 nt, Homo sapiens
  misc_RNA (1)...(19): siRNA sense strand
cagcaguugcauacaguaa

SEQ ID NO: 2323854 - RNA, 19 nt, Homo sapiens
  misc_RNA (1)...(19): siRNA sense strand
uggcacugcuccaggacaa

SEQ ID NO: 2323855 - RNA, 19 nt, Homo sapiens
  misc_RNA (1)...(19): siRNA sense strand
agaagaaaucauagacgau

SEQ ID NO: 2323856 - RNA, 19 nt, Homo sapiens
  misc_RNA (1)...(19): siRNA sense strand
cugaagugauggaaacaca

SEQ ID NO: 2323857 - RNA, 19 nt, Homo sapiens
  misc_RNA (1)...(19): siRNA sense strand
gaacagccuaagaggaaaa

SEQ ID NO: 2323858 - RNA, 19 nt, Homo sapiens
  misc_RNA (1)...(19): siRNA sense strand
aagaagaaaucauagacga

SEQ ID NO: 2323859 - RNA, 19 nt, Homo sapiens
  misc_RNA (1)...(19): siRNA sense strand
cgucacauuagaugggauu

SEQ ID NO: 2323860 - RNA, 19 nt, Homo sapiens
  misc_RNA (1)...(19): siRNA sense strand
aggaaucagcaguugcaua

SEQ ID NO: 2323861 - RNA, 19 nt, Homo sapiens
  misc_RNA (1)...(19): siRNA sense strand
gguaaaaggaggagccacu

SEQ ID NO: 2323862 - RNA, 19 nt, Homo sapiens
  misc_RNA (1)...(19): siRNA sense strand
cugccguaauuguggaaca

SEQ ID NO: 2323863 - RNA, 19 nt, Homo sapiens
  misc_RNA (1)...(19): siRNA sense strand
cugaagaagaaaucauaga

SEQ ID NO: 2323864 - RNA, 19 nt, Homo sapiens
  misc_RNA (1)...(19): siRNA sense strand
gcccuaugcuggaugaaaa

SEQ ID NO: 2323865 - RNA, 19 nt, Homo sapiens
  misc_RNA (1)...(19): siRNA sense strand
ggagaagcagcuagaacca

SEQ ID NO: 2323866 - RNA, 19 nt, Homo sapiens
  misc_RNA (1)...(19): siRNA sense strand
augacaguacugaaagaaa

SEQ ID NO: 2323867 - RNA, 19 nt, Homo sapiens
  misc_RNA (1)...(19): siRNA sense strand
uacacaggaaguagagaaa

SEQ ID NO: 2323868 - RNA, 19 nt, Homo sapiens
  misc_RNA (1)...(19): siRNA sense strand
gggaagagcacucagguac

SEQ ID NO: 2323869 - RNA, 19 nt, Homo sapiens
  misc_RNA (1)...(19): siRNA sense strand
uuacacaggaaguagagaa

SEQ ID NO: 2323870 - RNA, 19 nt, Homo sapiens
  misc_RNA (1)...(19): siRNA sense strand
cuaguaacgucauggagga

SEQ ID NO: 2323871 - RNA, 19 nt, Homo sapiens
  misc_RNA (1)...(19): siRNA sense strand
guucacagcugguugcuca

SEQ ID NO: 2323872 - RNA, 19 nt, Homo sapiens
  misc_RNA (1)...(19): siRNA sense strand
acuggauguugcugaagaa

SEQ ID NO: 2323873 - RNA, 19 nt, Homo sapiens
  misc_RNA (1)...(19): siRNA sense strand
aauuaugagaccaugggaa

SEQ ID NO: 2323874 - RNA, 19 nt, Homo sapiens
  misc_RNA (1)...(19): siRNA sense strand
ccguaauuguggaacaugu

SEQ ID NO: 2323875 - RNA, 19 nt, Homo sapiens
  misc_RNA (1)...(19): siRNA sense strand
cuaaauacaucaaguggac

SEQ ID NO: 2323876 - RNA, 19 nt, Homo sapiens
  misc_RNA (1)...(19): siRNA sense strand
ggaggaugaacgacagcuu

SEQ ID NO: 2323877 - RNA, 19 nt, Homo sapiens
  misc_RNA (1)...(19): siRNA sense strand
aauugaaacuauugaggcu

SEQ ID NO: 2323878 - RNA, 19 nt, Homo sapiens
  misc_RNA (1)...(19): siRNA sense strand
agaacagccuaagaggaaa

SEQ ID NO: 2323879 - RNA, 19 nt, Homo sapiens
  misc_RNA (1)...(19): siRNA sense strand
gcuugguguaucaguuuaa

SEQ ID NO: 2323880 - RNA, 19 nt, Homo sapiens
  misc_RNA (1)...(19): siRNA sense strand
ccaugcaggaugaaacauu

SEQ ID NO: 2323881 - RNA, 19 nt, Homo sapiens
  misc_RNA (1)...(19): siRNA sense strand
acgaacugcuggaacccaa

SEQ ID NO: 2323882 - RNA, 19 nt, Homo sapiens
  misc_RNA (1)...(19): siRNA sense strand
cuagcaauguucagaccau

SEQ ID NO: 2323883 - RNA, 19 nt, Homo sapiens
  misc_RNA (1)...(19): siRNA sense strand
ugggaagagcacucaggua

SEQ ID NO: 2323884 - RNA, 19 nt, Homo sapiens
  misc_RNA (1)...(19): siRNA sense strand
gagaguaucuucaagucca

SEQ ID NO: 2323885 - RNA, 19 nt, Homo sapiens
  misc_RNA (1)...(19): siRNA sense strand
ucuccauccuucagugcua

SEQ ID NO: 2323886 - RNA, 19 nt, Homo sapiens
  misc_RNA (1)...(19): siRNA sense strand
cagguagcuaugaaacaaa

SEQ ID NO: 2323887 - RNA, 19 nt, Homo sapiens
  misc_RNA (1)...(19): siRNA sense strand
ucaaguggacccagcgaga

SEQ ID NO: 2323888 - RNA, 19 nt, Homo sapiens
  misc_RNA (1)...(19): siRNA sense strand
ccugauaugaauuaugaga

SEQ ID NO: 2323889 - RNA, 19 nt, Homo sapiens
  misc_RNA (1)...(19): siRNA sense strand
acuacgaaucugugaauga

SEQ ID NO: 2323890 - RNA, 19 nt, Homo sapiens
  misc_RNA (1)...(19): siRNA sense strand
gugaaugaaugcauggaag

SEQ ID NO: 2323891 - RNA, 19 nt, Homo sapiens
  misc_RNA (1)...(19): siRNA sense strand
caagaggccagaaggcaga

SEQ ID NO: 2323892 - RNA, 19 nt, Homo sapiens
  misc_RNA (1)...(19): siRNA sense strand
cugagagacuggaaggcaa

SEQ ID NO: 2323893 - RNA, 19 nt, Homo sapiens
  misc_RNA (1)...(19): siRNA sense strand
gaagguggcuggagagcga

SEQ ID NO: 2323894 - RNA, 19 nt, Homo sapiens
  misc_RNA (1)...(19): siRNA sense strand
ugagagacuggaaggcaaa

SEQ ID NO: 2323895 - RNA, 19 nt, Homo sapiens
  misc_RNA (1)...(19): siRNA sense strand
aagcaggagccucgggauu

SEQ ID NO: 2323896 - RNA, 19 nt, Homo sapiens
  misc_RNA (1)...(19): siRNA sense strand
acuggaaggcaaagucaaa

SEQ ID NO: 2323897 - RNA, 19 nt, Homo sapiens
  misc_RNA (1)...(19): siRNA sense strand
caaccaagaucaaacggga

SEQ ID NO: 2323898 - RNA, 19 nt, Homo sapiens
  misc_RNA (1)...(19): siRNA sense strand
cagaagaaccggccagcca

SEQ ID NO: 2323899 - RNA, 19 nt, Homo sapiens
  misc_RNA (1)...(19): siRNA sense strand
ugauugacagaaagaggaa

SEQ ID NO: 2323900 - RNA, 19 nt, Homo sapiens
  misc_RNA (1)...(19): siRNA sense strand
agaacagagauuucagaga

SEQ ID NO: 2323901 - RNA, 19 nt, Homo sapiens
  misc_RNA (1)...(19): siRNA sense strand
ugccaaagaugaugccuga

SEQ ID NO: 2323902 - RNA, 19 nt, Homo sapiens
  misc_RNA (1)...(19): siRNA sense strand
cagccaugaacuaugacaa

SEQ ID NO: 2323903 - RNA, 19 nt, Homo sapiens
  misc_RNA (1)...(19): siRNA sense strand
gauuauacuuugacgacac

SEQ ID NO: 2323904 - RNA, 19 nt, Homo sapiens
  misc_RNA (1)...(19): siRNA sense strand
ggcaaaugucagaaccuau

SEQ ID NO: 2323905 - RNA, 19 nt, Homo sapiens
  misc_RNA (1)...(19): siRNA sense strand
guguugugccugagagacu

SEQ ID NO: 2323906 - RNA, 19 nt, Homo sapiens
  misc_RNA (1)...(19): siRNA sense strand
aacagagauuucagagaca

SEQ ID NO: 2323907 - RNA, 19 nt, Homo sapiens
  misc_RNA (1)...(19): siRNA sense strand
ugauagaaccggaagaggu

SEQ ID NO: 2323908 - RNA, 19 nt, Homo sapiens
  misc_RNA (1)...(19): siRNA sense strand
cuggagagcgauacgucua

SEQ ID NO: 2323909 - RNA, 19 nt, Homo sapiens
  misc_RNA (1)...(19): siRNA sense strand
gaacagagauuucagagac

SEQ ID NO: 2323910 - RNA, 19 nt, Homo sapiens
  misc_RNA (1)...(19): siRNA sense strand
uguuggauuuaucgggaaa

SEQ ID NO: 2323911 - RNA, 19 nt, Homo sapiens
  misc_RNA (1)...(19): siRNA sense strand
cgaaaauuaaucagagaga

SEQ ID NO: 2323912 - RNA, 19 nt, Homo sapiens
  misc_RNA (1)...(19): siRNA sense strand
cugcaggagcuguggcuga

SEQ ID NO: 2323913 - RNA, 19 nt, Homo sapiens
  misc_RNA (1)...(19): siRNA sense strand
gcuaaggggcauugaccaa

SEQ ID NO: 2323914 - RNA, 19 nt, Homo sapiens
  misc_RNA (1)...(19): siRNA sense strand
gagagagagcccuugggua

SEQ ID NO: 2323915 - RNA, 19 nt, Homo sapiens
  misc_RNA (1)...(19): siRNA sense strand
agccagagcuucagcggca

SEQ ID NO: 2323916 - RNA, 19 nt, Homo sapiens
  misc_RNA (1)...(19): siRNA sense strand
ccaccgagcucaagcgcua

SEQ ID NO: 2323917 - RNA, 19 nt, Homo sapiens
  misc_RNA (1)...(19): siRNA sense strand
cauccaaagaauugcaaau

SEQ ID NO: 2323918 - RNA, 19 nt, Homo sapiens
  misc_RNA (1)...(19): siRNA sense strand
augcaaaaggaaagaacaa

SEQ ID NO: 2323919 - RNA, 19 nt, Homo sapiens
  misc_RNA (1)...(19): siRNA sense strand
cagcaauggaaguaauuca

SEQ ID NO: 2323920 - RNA, 19 nt, Homo sapiens
  misc_RNA (1)...(19): siRNA sense strand
ucucggaccugcugcgcaa

SEQ ID NO: 2323921 - RNA, 19 nt, Homo sapiens
  misc_RNA (1)...(19): siRNA sense strand
aagaacaagaacaugggaa

SEQ ID NO: 2323922 - RNA, 19 nt, Homo sapiens
  misc_RNA (1)...(19): siRNA sense strand
agaacaagaacaugggaag

SEQ ID NO: 2323923 - RNA, 19 nt, Homo sapiens
  misc_RNA (1)...(19): siRNA sense strand
ugggaaggauagaggcaac

SEQ ID NO: 2323924 - RNA, 19 nt, Homo sapiens
  misc_RNA (1)...(19): siRNA sense strand
gaucaauaccaaagaggug

SEQ ID NO: 2323925 - RNA, 19 nt, Homo sapiens
  misc_RNA (1)...(19): siRNA sense strand
aaaggaaagaacaagaaca

SEQ ID NO: 2323926 - RNA, 19 nt, Homo sapiens
  misc_RNA (1)...(19): siRNA sense strand
gcaaggaaagaaagagaaa

SEQ ID NO: 2323927 - RNA, 19 nt, Homo sapiens
  misc_RNA (1)...(19): siRNA sense strand
cgauggagcugaugagaau

SEQ ID NO: 2323928 - RNA, 19 nt, Homo sapiens
  misc_RNA (1)...(19): siRNA sense strand
ugucauugcuucagguaua

SEQ ID NO: 2323929 - RNA, 19 nt, Homo sapiens
  misc_RNA (1)...(19): siRNA sense strand
ggacaguauugcaaagcua

SEQ ID NO: 2323930 - RNA, 19 nt, Homo sapiens
  misc_RNA (1)...(19): siRNA sense strand
ggacaguggaaaagggaaa

SEQ ID NO: 2323931 - RNA, 19 nt, Homo sapiens
  misc_RNA (1)...(19): siRNA sense strand
agacaaacaaggagacaau

SEQ ID NO: 2323932 - RNA, 19 nt, Homo sapiens
  misc_RNA (1)...(19): siRNA sense strand
ugagauaguuccagagaca

SEQ ID NO: 2323933 - RNA, 19 nt, Homo sapiens
  misc_RNA (1)...(19): siRNA sense strand
ggaagugugauguggauaa

SEQ ID NO: 2323934 - RNA, 19 nt, Homo sapiens
  misc_RNA (1)...(19): siRNA sense strand
ggucaauggcaaugaguga

SEQ ID NO: 2323935 - RNA, 19 nt, Homo sapiens
  misc_RNA (1)...(19): siRNA sense strand
gaagaguggaagugugaua

SEQ ID NO: 2323936 - RNA, 19 nt, Homo sapiens
  misc_RNA (1)...(19): siRNA sense strand
ccaacaagucugugauaau

SEQ ID NO: 2323937 - RNA, 19 nt, Homo sapiens
  misc_RNA (1)...(19): siRNA sense strand
gggcaaggaaagaaagaga

SEQ ID NO: 2323938 - RNA, 19 nt, Homo sapiens
  misc_RNA (1)...(19): siRNA sense strand
ggacagacaccgugcaaaa

SEQ ID NO: 2323939 - RNA, 19 nt, Homo sapiens
  misc_RNA (1)...(19): siRNA sense strand
ggaaaguguugcugcgaca

SEQ ID NO: 2323940 - RNA, 19 nt, Homo sapiens
  misc_RNA (1)...(19): siRNA sense strand
cagaauugcaccaggagaa

SEQ ID NO: 2323941 - RNA, 19 nt, Homo sapiens
  misc_RNA (1)...(19): siRNA sense strand
ugagaaaggcuguggcauu

SEQ ID NO: 2323942 - RNA, 19 nt, Homo sapiens
  misc_RNA (1)...(19): siRNA sense strand
ggcaagucauugagagaau

SEQ ID NO: 2323943 - RNA, 19 nt, Homo sapiens
  misc_RNA (1)...(19): siRNA sense strand
ugauaacagugaugagcaa

SEQ ID NO: 2323944 - RNA, 19 nt, Homo sapiens
  misc_RNA (1)...(19): siRNA sense strand
guagaugacugcagggaca

SEQ ID NO: 2323945 - RNA, 19 nt, Homo sapiens
  misc_RNA (1)...(19): siRNA sense strand
agaaagaacaugugcugaa

SEQ ID NO: 2323946 - RNA, 19 nt, Homo sapiens
  misc_RNA (1)...(19): siRNA sense strand
cuguaaagauaauggagau

SEQ ID NO: 2323947 - RNA, 19 nt, Homo sapiens
  misc_RNA (1)...(19): siRNA sense strand
cgucaagauugcucacaaa

SEQ ID NO: 2323948 - RNA, 19 nt, Homo sapiens
  misc_RNA (1)...(19): siRNA sense strand
caauaaauguggaaagaac

SEQ ID NO: 2323949 - RNA, 19 nt, Homo sapiens
  misc_RNA (1)...(19): siRNA sense strand
agauaguuccagagacaaa

SEQ ID NO: 2323950 - RNA, 19 nt, Homo sapiens
  misc_RNA (1)...(19): siRNA sense strand
ucauauggguagauaggaa

SEQ ID NO: 2323951 - RNA, 19 nt, Homo sapiens
  misc_RNA (1)...(19): siRNA sense strand
ggauaugagugaugagaag

SEQ ID NO: 2323952 - RNA, 19 nt, Homo sapiens
  misc_RNA (1)...(19): siRNA sense strand
acaaaauagucuugagaga

SEQ ID NO: 2323953 - RNA, 19 nt, Homo sapiens
  misc_RNA (1)...(19): siRNA sense strand
ccacggaguuuaugugcaa

SEQ ID NO: 2323954 - RNA, 19 nt, Homo sapiens
  misc_RNA (1)...(19): siRNA sense strand
ggauaugagugacgaggau

SEQ ID NO: 2323955 - RNA, 19 nt, Homo sapiens
  misc_RNA (1)...(19): siRNA sense strand
agauggaacugaugagaca

SEQ ID NO: 2323956 - RNA, 19 nt, Homo sapiens
  misc_RNA (1)...(19): siRNA sense strand
ccaauuaaaugaaggagga

SEQ ID NO: 2323957 - RNA, 19 nt, Homo sapiens
  misc_RNA (1)...(19): siRNA sense strand
uggcacaggaagagaaauu

SEQ ID NO: 2323958 - RNA, 19 nt, Homo sapiens
  misc_RNA (1)...(19): siRNA sense strand
caucaagccaggaggaaaa

SEQ ID NO: 2323959 - RNA, 19 nt, Homo sapiens
  misc_RNA (1)...(19): siRNA sense strand
ccguaaagacuuggugaaa

SEQ ID NO: 2323960 - RNA, 19 nt, Homo sapiens
  misc_RNA (1)...(19): siRNA sense strand
aagaagacucugaaguaua

SEQ ID NO: 2323961 - RNA, 19 nt, Homo sapiens
  misc_RNA (1)...(19): siRNA sense strand
cugaauugcuugagagaug

SEQ ID NO: 2323962 - RNA, 19 nt, Homo sapiens
  misc_RNA (1)...(19): siRNA sense strand
gcaauaaucuugugcagga

SEQ ID NO: 2323963 - RNA, 19 nt, Homo sapiens
  misc_RNA (1)...(19): siRNA sense strand
cugcauugcuguucagaau

SEQ ID NO: 2323964 - RNA, 19 nt, Homo sapiens
  misc_RNA (1)...(19): siRNA sense strand
ggaagaggagugauugaaa

SEQ ID NO: 2323965 - RNA, 19 nt, Homo sapiens
  misc_RNA (1)...(19): siRNA sense strand
agaugaagauggaugugaa

SEQ ID NO: 2323966 - RNA, 19 nt, Homo sapiens
  misc_RNA (1)...(19): siRNA sense strand
cuggauuacuagaagaauu

SEQ ID NO: 2323967 - RNA, 19 nt, Homo sapiens
  misc_RNA (1)...(19): siRNA sense strand
agacaaugacuguggagau

SEQ ID NO: 2323968 - RNA, 19 nt, Homo sapiens
  misc_RNA (1)...(19): siRNA sense strand
caaaaugacuguggagaua

SEQ ID NO: 2323969 - RNA, 19 nt, Homo sapiens
  misc_RNA (1)...(19): siRNA sense strand
auacaaggacaguggaaaa

SEQ ID NO: 2323970 - RNA, 19 nt, Homo sapiens
  misc_RNA (1)...(19): siRNA sense strand
cagaaauaccaaaggaagu

SEQ ID NO: 2323971 - RNA, 19 nt, Homo sapiens
  misc_RNA (1)...(19): siRNA sense strand
gcuacauguuagaaaguga

SEQ ID NO: 2323972 - RNA, 19 nt, Homo sapiens
  misc_RNA (1)...(19): siRNA sense strand
ggaugagcccauugaagaa

SEQ ID NO: 2323973 - RNA, 19 nt, Homo sapiens
  misc_RNA (1)...(19): siRNA sense strand
uggauuggguagcaggaaa

SEQ ID NO: 2323974 - RNA, 19 nt, Homo sapiens
  misc_RNA (1)...(19): siRNA sense strand
cggaagaguggaaguguga

SEQ ID NO: 2323975 - RNA, 19 nt, Homo sapiens
  misc_RNA (1)...(19): siRNA sense strand
caaagugggccgugugcaa

SEQ ID NO: 2323976 - RNA, 19 nt, Homo sapiens
  misc_RNA (1)...(19): siRNA sense strand
ucacaaaguacaugcucaa

SEQ ID NO: 2323977 - RNA, 19 nt, Homo sapiens
  misc_RNA (1)...(19): siRNA sense strand
uccaagaggacuagcauua

SEQ ID NO: 2323978 - RNA, 19 nt, Homo sapiens
  misc_RNA (1)...(19): siRNA sense strand
ggauaaugauuguggagac

SEQ ID NO: 2323979 - RNA, 19 nt, Homo sapiens
  misc_RNA (1)...(19): siRNA sense strand
gauggaagguacagaaagu

SEQ ID NO: 2323980 - RNA, 19 nt, Homo sapiens
  misc_RNA (1)...(19): siRNA sense strand
gaugaagauggaugugaaa

SEQ ID NO: 2323981 - RNA, 19 nt, Homo sapiens
  misc_RNA (1)...(19): siRNA sense strand
gaagagaagaugaaaacaa

SEQ ID NO: 2323982 - RNA, 19 nt, Homo sapiens
  misc_RNA (1)...(19): siRNA sense strand
gcuaaaauuaugagagcau

SEQ ID NO: 2323983 - RNA, 19 nt, Homo sapiens
  misc_RNA (1)...(19): siRNA sense strand
gauaaugacuguggggaua

SEQ ID NO: 2323984 - RNA, 19 nt, Homo sapiens
  misc_RNA (1)...(19): siRNA sense strand
gguuugugauggagaagau

SEQ ID NO: 2323985 - RNA, 19 nt, Homo sapiens
  misc_RNA (1)...(19): siRNA sense strand
ccauaacaucugugugaau

SEQ ID NO: 2323986 - RNA, 19 nt, Homo sapiens
  misc_RNA (1)...(19): siRNA sense strand
ucagaagugugauuggaaa

SEQ ID NO: 2323987 - RNA, 19 nt, Homo sapiens
  misc_RNA (1)...(19): siRNA sense strand
accaagagcaauuguguua

SEQ ID NO: 2323988 - RNA, 19 nt, Homo sapiens
  misc_RNA (1)...(19): siRNA sense strand
gaggcaagucauugagaga

SEQ ID NO: 2323989 - RNA, 19 nt, Homo sapiens
  misc_RNA (1)...(19): siRNA sense strand
uggaaaagggaaacaaaua

SEQ ID NO: 2323990 - RNA, 19 nt, Homo sapiens
  misc_RNA (1)...(19): siRNA sense strand
ggacuggguuggaaggcau

SEQ ID NO: 2323991 - RNA, 19 nt, Homo sapiens
  misc_RNA (1)...(19): siRNA sense strand
ucaaagugguucagccaau

SEQ ID NO: 2323992 - RNA, 19 nt, Homo sapiens
  misc_RNA (1)...(19): siRNA sense strand
uggacuggguuaauaauaa

SEQ ID NO: 2323993 - RNA, 19 nt, Homo sapiens
  misc_RNA (1)...(19): siRNA sense strand
cugugaagacauagaugaa

SEQ ID NO: 2323994 - RNA, 19 nt, Homo sapiens
  misc_RNA (1)...(19): siRNA sense strand
acagaaugguuuagauguu

SEQ ID NO: 2323995 - RNA, 19 nt, Homo sapiens
  misc_RNA (1)...(19): siRNA sense strand
cucaagaaugccugggaca

SEQ ID NO: 2323996 - RNA, 19 nt, Homo sapiens
  misc_RNA (1)...(19): siRNA sense strand
ggacagaacuaccagcaga

SEQ ID NO: 2323997 - RNA, 19 nt, Homo sapiens
  misc_RNA (1)...(19): siRNA sense strand
gagaauuuauagagcggca

SEQ ID NO: 2323998 - RNA, 19 nt, Homo sapiens
  misc_RNA (1)...(19): siRNA sense strand
guaucaaggaaguggagca

SEQ ID NO: 2323999 - RNA, 19 nt, Homo sapiens
  misc_RNA (1)...(19): siRNA sense strand
agugcaaggaggaggacau

SEQ ID NO: 2324000 - RNA, 19 nt, Homo sapiens
  misc_RNA (1)...(19): siRNA sense strand
agagggaaggacagaacua

SEQ ID NO: 2324001 - RNA, 19 nt, Homo sapiens
  misc_RNA (1)...(19): siRNA sense strand
gugcauguaugaagccgaa

SEQ ID NO: 2324002 - RNA, 19 nt, Homo sapiens
  misc_RNA (1)...(19): siRNA sense strand
agagagaaaagcugcaaaa

SEQ ID NO: 2324003 - RNA, 19 nt, Homo sapiens
  misc_RNA (1)...(19): siRNA sense strand
acaaagucgaccaagaaau

SEQ ID NO: 2324004 - RNA, 19 nt, Homo sapiens
  misc_RNA (1)...(19): siRNA sense strand
aaacagaggcagaggaugc

SEQ ID NO: 2324005 - RNA, 19 nt, Homo sapiens
  misc_RNA (1)...(19): siRNA sense strand
augcaguggaagagggacu

SEQ ID NO: 2324006 - RNA, 19 nt, Homo sapiens
  misc_RNA (1)...(19): siRNA sense strand
agagaaaagcugcaaaaga

SEQ ID NO: 2324007 - RNA, 19 nt, Homo sapiens
  misc_RNA (1)...(19): siRNA sense strand
ggauggaggugcaaggcga

SEQ ID NO: 2324008 - RNA, 19 nt, Homo sapiens
  misc_RNA (1)...(19): siRNA sense strand
aggaggacgaggaggauga

SEQ ID NO: 2324009 - RNA, 19 nt, Homo sapiens
  misc_RNA (1)...(19): siRNA sense strand
acaaggaggacgaggagga

SEQ ID NO: 2324010 - RNA, 19 nt, Homo sapiens
  misc_RNA (1)...(19): siRNA sense strand
aggaggaugaggaggauga

SEQ ID NO: 2324011 - RNA, 19 nt, Homo sapiens
  misc_RNA (1)...(19): siRNA sense strand
gcgccagcaacgagaguga

SEQ ID NO: 2324012 - RNA, 19 nt, Homo sapiens
  misc_RNA (1)...(19): siRNA sense strand
acgaggaggaugaggagga

SEQ ID NO: 2324013 - RNA, 19 nt, Homo sapiens
  misc_RNA (1)...(19): siRNA sense strand
gcaacgagagugagcggga

SEQ ID NO: 2324014 - RNA, 19 nt, Homo sapiens
  misc_RNA (1)...(19): siRNA sense strand
ugcaaggcgaggaggagaa

SEQ ID NO: 2324015 - RNA, 19 nt, Homo sapiens
  misc_RNA (1)...(19): siRNA sense strand
cuugcaaccaggagagcau

SEQ ID NO: 2324016 - RNA, 19 nt, Homo sapiens
  misc_RNA (1)...(19): siRNA sense strand
ugguggacgucaagggcca

SEQ ID NO: 2324017 - RNA, 19 nt, Homo sapiens
  misc_RNA (1)...(19): siRNA sense strand
aggaugaugaugugagcca

SEQ ID NO: 2324018 - RNA, 19 nt, Homo sapiens
  misc_RNA (1)...(19): siRNA sense strand
aggacaaggaggacgagga

SEQ ID NO: 2324019 - RNA, 19 nt, Homo sapiens
  misc_RNA (1)...(19): siRNA sense strand
aacucaaguccgaaauuaa

SEQ ID NO: 2324020 - RNA, 19 nt, Homo sapiens
  misc_RNA (1)...(19): siRNA sense strand
gacagaaagcagcuggaga

SEQ ID NO: 2324021 - RNA, 19 nt, Homo sapiens
  misc_RNA (1)...(19): siRNA sense strand
agaaguaugugaaggccaa

SEQ ID NO: 2324022 - RNA, 19 nt, Homo sapiens
  misc_RNA (1)...(19): siRNA sense strand
gcuacguggcugagggaga

SEQ ID NO: 2324023 - RNA, 19 nt, Homo sapiens
  misc_RNA (1)...(19): siRNA sense strand
gugcaguggcugaagguga

SEQ ID NO: 2324024 - RNA, 19 nt, Homo sapiens
  misc_RNA (1)...(19): siRNA sense strand
aggagaaagacuuggaacu

SEQ ID NO: 2324025 - RNA, 19 nt, Homo sapiens
  misc_RNA (1)...(19): siRNA sense strand
ggagacaaggucaaggaga

SEQ ID NO: 2324026 - RNA, 19 nt, Homo sapiens
  misc_RNA (1)...(19): siRNA sense strand
ccaucaaggagaaagacuu

SEQ ID NO: 2324027 - RNA, 19 nt, Homo sapiens
  misc_RNA (1)...(19): siRNA sense strand
acaaggucaaggagaagaa

SEQ ID NO: 2324028 - RNA, 19 nt, Homo sapiens
  misc_RNA (1)...(19): siRNA sense strand
ucuucauguuccuggguau

SEQ ID NO: 2324029 - RNA, 19 nt, Homo sapiens
  misc_RNA (1)...(19): siRNA sense strand
gagcugaaccugaaggaug

SEQ ID NO: 2324030 - RNA, 19 nt, Homo sapiens
  misc_RNA (1)...(19): siRNA sense strand
uggauggagacaaggucaa

SEQ ID NO: 2324031 - RNA, 19 nt, Homo sapiens
  misc_RNA (1)...(19): siRNA sense strand
agaaacaggaccgggaaau

SEQ ID NO: 2324032 - RNA, 19 nt, Homo sapiens
  misc_RNA (1)...(19): siRNA sense strand
agaacaagaaggcagccaa

SEQ ID NO: 2324033 - RNA, 19 nt, Homo sapiens
  misc_RNA (1)...(19): siRNA sense strand
ucaccaucaaggagaaaga

SEQ ID NO: 2324034 - RNA, 19 nt, Homo sapiens
  misc_RNA (1)...(19): siRNA sense strand
uggacugcgugaagggcau

SEQ ID NO: 2324035 - RNA, 19 nt, Homo sapiens
  misc_RNA (1)...(19): siRNA sense strand
ccaucaagccucuggugca

SEQ ID NO: 2324036 - RNA, 19 nt, Homo sapiens
  misc_RNA (1)...(19): siRNA sense strand
cgagaaacaggaccgggaa

SEQ ID NO: 2324037 - RNA, 19 nt, Homo sapiens
  misc_RNA (1)...(19): siRNA sense strand
ccggacagaucgggcacaa

SEQ ID NO: 2324038 - RNA, 19 nt, Homo sapiens
  misc_RNA (1)...(19): siRNA sense strand
cagaaguaugugaaggcca

SEQ ID NO: 2324039 - RNA, 19 nt, Homo sapiens
  misc_RNA (1)...(19): siRNA sense strand
gggaagcugcccauggaga

SEQ ID NO: 2324040 - RNA, 19 nt, Homo sapiens
  misc_RNA (1)...(19): siRNA sense strand
ccgucaaguaccagagcaa

SEQ ID NO: 2324041 - RNA, 19 nt, Homo sapiens
  misc_RNA (1)...(19): siRNA sense strand
uggaggaggugaagcggaa

SEQ ID NO: 2324042 - RNA, 19 nt, Homo sapiens
  misc_RNA (1)...(19): siRNA sense strand
ccagaaaguuuguggaggu

SEQ ID NO: 2324043 - RNA, 19 nt, Homo sapiens
  misc_RNA (1)...(19): siRNA sense strand
uggaagaacucauguccga

SEQ ID NO: 2324044 - RNA, 19 nt, Homo sapiens
  misc_RNA (1)...(19): siRNA sense strand
aggucaugucggaguacaa

SEQ ID NO: 2324045 - RNA, 19 nt, Homo sapiens
  misc_RNA (1)...(19): siRNA sense strand
agacgaaggaggagcugga

SEQ ID NO: 2324046 - RNA, 19 nt, Homo sapiens
  misc_RNA (1)...(19): siRNA sense strand
ucgaguacaauguggaaca

SEQ ID NO: 2324047 - RNA, 19 nt, Homo sapiens
  misc_RNA (1)...(19): siRNA sense strand
uugagcagguggaggagau

SEQ ID NO: 2324048 - RNA, 19 nt, Homo sapiens
  misc_RNA (1)...(19): siRNA sense strand
ggaggagauucgaggcuuc

SEQ ID NO: 2324049 - RNA, 19 nt, Homo sapiens
  misc_RNA (1)...(19): siRNA sense strand
gaggugaagcggaagcaca

SEQ ID NO: 2324050 - RNA, 19 nt, Homo sapiens
  misc_RNA (1)...(19): siRNA sense strand
gagauugagacgcggcaca

SEQ ID NO: 2324051 - RNA, 19 nt, Homo sapiens
  misc_RNA (1)...(19): siRNA sense strand
cgagcaguccaucgagcaa

SEQ ID NO: 2324052 - RNA, 19 nt, Homo sapiens
  misc_RNA (1)...(19): siRNA sense strand
aaacaaaguucguuccaag

SEQ ID NO: 2324053 - RNA, 19 nt, Homo sapiens
  misc_RNA (1)...(19): siRNA sense strand
gcugugugauccugggcau

SEQ ID NO: 2324054 - RNA, 19 nt, Homo sapiens
  misc_RNA (1)...(19): siRNA sense strand
cggaagaaaaucaugauca

SEQ ID NO: 2324055 - RNA, 19 nt, Homo sapiens
  misc_RNA (1)...(19): siRNA sense strand
gguaaauagcauugaggaa

SEQ ID NO: 2324056 - RNA, 19 nt, Homo sapiens
  misc_RNA (1)...(19): siRNA sense strand
aggagaaggacaaggaaua

SEQ ID NO: 2324057 - RNA, 19 nt, Homo sapiens
  misc_RNA (1)...(19): siRNA sense strand
aggaagagcuggaggagga

SEQ ID NO: 2324058 - RNA, 19 nt, Homo sapiens
  misc_RNA (1)...(19): siRNA sense strand
ucacagaggcugagcgaga

SEQ ID NO: 2324059 - RNA, 19 nt, Homo sapiens
  misc_RNA (1)...(19): siRNA sense strand
uggaacagguggaggccua

SEQ ID NO: 2324060 - RNA, 19 nt, Homo sapiens
  misc_RNA (1)...(19): siRNA sense strand
agaaggagaaggaggguau

SEQ ID NO: 2324061 - RNA, 19 nt, Homo sapiens
  misc_RNA (1)...(19): siRNA sense strand
agaccuuccuggagagcaa

SEQ ID NO: 2324062 - RNA, 19 nt, Homo sapiens
  misc_RNA (1)...(19): siRNA sense strand
gugucauggcggaguguaa

SEQ ID NO: 2324063 - RNA, 19 nt, Homo sapiens
  misc_RNA (1)...(19): siRNA sense strand
gauaaugaggagaaggaca

SEQ ID NO: 2324064 - RNA, 19 nt, Homo sapiens
  misc_RNA (1)...(19): siRNA sense strand
auaaugaggagaaggacaa

SEQ ID NO: 2324065 - RNA, 19 nt, Homo sapiens
  misc_RNA (1)...(19): siRNA sense strand
uggagaaggcagagcguca

SEQ ID NO: 2324066 - RNA, 19 nt, Homo sapiens
  misc_RNA (1)...(19): siRNA sense strand
caacuauccaccaggcaaa

SEQ ID NO: 2324067 - RNA, 19 nt, Homo sapiens
  misc_RNA (1)...(19): siRNA sense strand
cuuccaaguucaacagcua

SEQ ID NO: 2324068 - RNA, 19 nt, Homo sapiens
  misc_RNA (1)...(19): siRNA sense strand
agaagaauccagagcugaa

SEQ ID NO: 2324069 - RNA, 19 nt, Homo sapiens
  misc_RNA (1)...(19): siRNA sense strand
gaggagaaggacaaggaau

SEQ ID NO: 2324070 - RNA, 19 nt, Homo sapiens
  misc_RNA (1)...(19): siRNA sense strand
ugaaugagcuagaggccca

SEQ ID NO: 2324071 - RNA, 19 nt, Homo sapiens
  misc_RNA (1)...(19): siRNA sense strand
cgagagugaaacugaacua

SEQ ID NO: 2324072 - RNA, 19 nt, Homo sapiens
  misc_RNA (1)...(19): siRNA sense strand
caguaguggugaaggagga

SEQ ID NO: 2324073 - RNA, 19 nt, Homo sapiens
  misc_RNA (1)...(19): siRNA sense strand
cggaggagggcucagguaa

SEQ ID NO: 2324074 - RNA, 19 nt, Homo sapiens
  misc_RNA (1)...(19): siRNA sense strand
gcaaaauugugguggagga

SEQ ID NO: 2324075 - RNA, 19 nt, Homo sapiens
  misc_RNA (1)...(19): siRNA sense strand
cugcuggccuggugggaau

SEQ ID NO: 2324076 - RNA, 19 nt, Homo sapiens
  misc_RNA (1)...(19): siRNA sense strand
ccagugugcaggagaguuu

SEQ ID NO: 2324077 - RNA, 19 nt, Homo sapiens
  misc_RNA (1)...(19): siRNA sense strand
ggcccagacgagagugaaa

SEQ ID NO: 2324078 - RNA, 19 nt, Homo sapiens
  misc_RNA (1)...(19): siRNA sense strand
cugaggagguccaggagga

SEQ ID NO: 2324079 - RNA, 19 nt, Homo sapiens
  misc_RNA (1)...(19): siRNA sense strand
ccaagagacugcagccuga

SEQ ID NO: 2324080 - RNA, 19 nt, Homo sapiens
  misc_RNA (1)...(19): siRNA sense strand
ccuaagaccuuccuggaga

SEQ ID NO: 2324081 - RNA, 19 nt, Homo sapiens
  misc_RNA (1)...(19): siRNA sense strand
cugcagagcuuuggcgaga

SEQ ID NO: 2324082 - RNA, 19 nt, Homo sapiens
  misc_RNA (1)...(19): siRNA sense strand
gugcauaaggagauguuca

SEQ ID NO: 2324083 - RNA, 19 nt, Homo sapiens
  misc_RNA (1)...(19): siRNA sense strand
cugcauaagcugaagguuc

SEQ ID NO: 2324084 - RNA, 19 nt, Homo sapiens
  misc_RNA (1)...(19): siRNA sense strand
aagacaagacucugcggaa

SEQ ID NO: 2324085 - RNA, 19 nt, Homo sapiens
  misc_RNA (1)...(19): siRNA sense strand
aggcugagcgagaggcuuu

SEQ ID NO: 2324086 - RNA, 19 nt, Homo sapiens
  misc_RNA (1)...(19): siRNA sense strand
aggccgagcugcaggaacu

SEQ ID NO: 2324087 - RNA, 19 nt, Homo sapiens
  misc_RNA (1)...(19): siRNA sense strand
ugccuaagguccagggcuu

SEQ ID NO: 2324088 - RNA, 19 nt, Homo sapiens
  misc_RNA (1)...(19): siRNA sense strand
cagaggaagacauugagaa

SEQ ID NO: 2324089 - RNA, 19 nt, Homo sapiens
  misc_RNA (1)...(19): siRNA sense strand
gacaagacucugcggaaga

SEQ ID NO: 2324090 - RNA, 19 nt, Homo sapiens
  misc_RNA (1)...(19): siRNA sense strand
cagaacuuguggagaagga

SEQ ID NO: 2324091 - RNA, 19 nt, Homo sapiens
  misc_RNA (1)...(19): siRNA sense strand
ccaugaggcuacggaggaa

SEQ ID NO: 2324092 - RNA, 19 nt, Homo sapiens
  misc_RNA (1)...(19): siRNA sense strand
cgaaaggcccugcuggaga

SEQ ID NO: 2324093 - RNA, 19 nt, Homo sapiens
  misc_RNA (1)...(19): siRNA sense strand
caacuaaagaacugccuga

SEQ ID NO: 2324094 - RNA, 19 nt, Homo sapiens
  misc_RNA (1)...(19): siRNA sense strand
ccaaccuugugcaguguaa

SEQ ID NO: 2324095 - RNA, 19 nt, Homo sapiens
  misc_RNA (1)...(19): siRNA sense strand
gguggaggaaggugguuau

SEQ ID NO: 2324096 - RNA, 19 nt, Homo sapiens
  misc_RNA (1)...(19): siRNA sense strand
caguguaucaagugcaaga

SEQ ID NO: 2324097 - RNA, 19 nt, Homo sapiens
  misc_RNA (1)...(19): siRNA sense strand
gcucugugaucguggccuu

SEQ ID NO: 2324098 - RNA, 19 nt, Homo sapiens
  misc_RNA (1)...(19): siRNA sense strand
cugcagugccucacagaga

SEQ ID NO: 2324099 - RNA, 19 nt, Homo sapiens
  misc_RNA (1)...(19): siRNA sense strand
ucgcagagaaaucgggcau

SEQ ID NO: 2324100 - RNA, 19 nt, Homo sapiens
  misc_RNA (1)...(19): siRNA sense strand
cuacgaacgcauuguuuau

SEQ ID NO: 2324101 - RNA, 19 nt, Homo sapiens
  misc_RNA (1)...(19): siRNA sense strand
gagcaggcuacccgggaau

SEQ ID NO: 2324102 - RNA, 19 nt, Homo sapiens
  misc_RNA (1)...(19): siRNA sense strand
agaaggacaaggaauacaa

SEQ ID NO: 2324103 - RNA, 19 nt, Homo sapiens
  misc_RNA (1)...(19): siRNA sense strand
ucaucauggugcaagaaga

SEQ ID NO: 2324104 - RNA, 19 nt, Homo sapiens
  misc_RNA (1)...(19): siRNA sense strand
uggauaaagcccaggccga

SEQ ID NO: 2324105 - RNA, 19 nt, Homo sapiens
  misc_RNA (1)...(19): siRNA sense strand
agguccaggaggaggaaga

SEQ ID NO: 2324106 - RNA, 19 nt, Homo sapiens
  misc_RNA (1)...(19): siRNA sense strand
acucugcggaagaaagaua

SEQ ID NO: 2324107 - RNA, 19 nt, Homo sapiens
  misc_RNA (1)...(19): siRNA sense strand
gggccaacaaagugcgagu

SEQ ID NO: 2324108 - RNA, 19 nt, Homo sapiens
  misc_RNA (1)...(19): siRNA sense strand
ccagaggcugaaugagcua

SEQ ID NO: 2324109 - RNA, 19 nt, Homo sapiens
  misc_RNA (1)...(19): siRNA sense strand
ccucuacagucucagcaaa

SEQ ID NO: 2324110 - RNA, 19 nt, Homo sapiens
  misc_RNA (1)...(19): siRNA sense strand
guuaugaagcuaucugcaa

SEQ ID NO: 2324111 - RNA, 19 nt, Homo sapiens
  misc_RNA (1)...(19): siRNA sense strand
ccuuuaaagcugacuacuu

SEQ ID NO: 2324112 - RNA, 19 nt, Homo sapiens
  misc_RNA (1)...(19): siRNA sense strand
auuuggaagaagugaugaa

SEQ ID NO: 2324113 - RNA, 19 nt, Homo sapiens
  misc_RNA (1)...(19): siRNA sense strand
cagccacacuugaggccau

SEQ ID NO: 2324114 - RNA, 19 nt, Homo sapiens
  misc_RNA (1)...(19): siRNA sense strand
ggcuggaggagcugagaca

SEQ ID NO: 2324115 - RNA, 19 nt, Homo sapiens
  misc_RNA (1)...(19): siRNA sense strand
auugccaaauucugggaaa

SEQ ID NO: 2324116 - RNA, 19 nt, Homo sapiens
  misc_RNA (1)...(19): siRNA sense strand
ccgagaggagcuagagcca

SEQ ID NO: 2324117 - RNA, 19 nt, Homo sapiens
  misc_RNA (1)...(19): siRNA sense strand
cccaguuuauugagucaua

SEQ ID NO: 2324118 - RNA, 19 nt, Homo sapiens
  misc_RNA (1)...(19): siRNA sense strand
cggaacccacagaggaaga

SEQ ID NO: 2324119 - RNA, 19 nt, Homo sapiens
  misc_RNA (1)...(19): siRNA sense strand
aggaaauguugaaccuaaa

SEQ ID NO: 2324120 - RNA, 19 nt, Homo sapiens
  misc_RNA (1)...(19): siRNA sense strand
augcagaauuuauggguga

SEQ ID NO: 2324121 - RNA, 19 nt, Homo sapiens
  misc_RNA (1)...(19): siRNA sense strand
augaagaagagcaggaaga

SEQ ID NO: 2324122 - RNA, 19 nt, Homo sapiens
  misc_RNA (1)...(19): siRNA sense strand
uggaguugcuaauggacaa

SEQ ID NO: 2324123 - RNA, 19 nt, Homo sapiens
  misc_RNA (1)...(19): siRNA sense strand
gcaaaggccuuguacguca

SEQ ID NO: 2324124 - RNA, 19 nt, Homo sapiens
  misc_RNA (1)...(19): siRNA sense strand
gugaaggaagcgaggauga

SEQ ID NO: 2324125 - RNA, 19 nt, Homo sapiens
  misc_RNA (1)...(19): siRNA sense strand
gagauaaaaucgugaggga

SEQ ID NO: 2324126 - RNA, 19 nt, Homo sapiens
  misc_RNA (1)...(19): siRNA sense strand
aagucaagccugucugaaa

SEQ ID NO: 2324127 - RNA, 19 nt, Homo sapiens
  misc_RNA (1)...(19): siRNA sense strand
ggauaaacuaccugaugga

SEQ ID NO: 2324128 - RNA, 19 nt, Homo sapiens
  misc_RNA (1)...(19): siRNA sense strand
acaucaggucugugguuua

SEQ ID NO: 2324129 - RNA, 19 nt, Homo sapiens
  misc_RNA (1)...(19): siRNA sense strand
ggugaaaccaacugcugaa

SEQ ID NO: 2324130 - RNA, 19 nt, Homo sapiens
  misc_RNA (1)...(19): siRNA sense strand
agacagucaaggugaucaa

SEQ ID NO: 2324131 - RNA, 19 nt, Homo sapiens
  misc_RNA (1)...(19): siRNA sense strand
cgauguaccaccugaugaa

SEQ ID NO: 2324132 - RNA, 19 nt, Homo sapiens
  misc_RNA (1)...(19): siRNA sense strand
uugaauauccuguggacuu

SEQ ID NO: 2324133 - RNA, 19 nt, Homo sapiens
  misc_RNA (1)...(19): siRNA sense strand
guucuaauguggaggcgga

SEQ ID NO: 2324134 - RNA, 19 nt, Homo sapiens
  misc_RNA (1)...(19): siRNA sense strand
gugcaaaggccuuguacgu

SEQ ID NO: 2324135 - RNA, 19 nt, Homo sapiens
  misc_RNA (1)...(19): siRNA sense strand
aggaugcacuggagagcuu

SEQ ID NO: 2324136 - RNA, 19 nt, Homo sapiens
  misc_RNA (1)...(19): siRNA sense strand
uuugaaagaugguggcgau

SEQ ID NO: 2324137 - RNA, 19 nt, Homo sapiens
  misc_RNA (1)...(19): siRNA sense strand
agaagagcaggaagaacaa

SEQ ID NO: 2324138 - RNA, 19 nt, Homo sapiens
  misc_RNA (1)...(19): siRNA sense strand
ccaaacaagagguugagau

SEQ ID NO: 2324139 - RNA, 19 nt, Homo sapiens
  misc_RNA (1)...(19): siRNA sense strand
aggugaaggaagcgaggau

SEQ ID NO: 2324140 - RNA, 19 nt, Homo sapiens
  misc_RNA (1)...(19): siRNA sense strand
agaacaaggugaaggaagc

SEQ ID NO: 2324141 - RNA, 19 nt, Homo sapiens
  misc_RNA (1)...(19): siRNA sense strand
cuacaguauuucaagcaca

SEQ ID NO: 2324142 - RNA, 19 nt, Homo sapiens
  misc_RNA (1)...(19): siRNA sense strand
aagcgaggaugaaugggaa

SEQ ID NO: 2324143 - RNA, 19 nt, Homo sapiens
  misc_RNA (1)...(19): siRNA sense strand
guccaagguuauaccacaa

SEQ ID NO: 2324144 - RNA, 19 nt, Homo sapiens
  misc_RNA (1)...(19): siRNA sense strand
cuggagagcuugguggcaa

SEQ ID NO: 2324145 - RNA, 19 nt, Homo sapiens
  misc_RNA (1)...(19): siRNA sense strand
cucagguggucuuggacaa

SEQ ID NO: 2324146 - RNA, 19 nt, Homo sapiens
  misc_RNA (1)...(19): siRNA sense strand
aguugcuaauggacaaaua

SEQ ID NO: 2324147 - RNA, 19 nt, Homo sapiens
  misc_RNA (1)...(19): siRNA sense strand
ggucaaugaagaagagcag

SEQ ID NO: 2324148 - RNA, 19 nt, Homo sapiens
  misc_RNA (1)...(19): siRNA sense strand
gcagaggcuggcagagaca

SEQ ID NO: 2324149 - RNA, 19 nt, Homo sapiens
  misc_RNA (1)...(19): siRNA sense strand
caaccaaacccgagagugc

SEQ ID NO: 2324150 - RNA, 19 nt, Homo sapiens
  misc_RNA (1)...(19): siRNA sense strand
ucaaugaagaagagcagga

SEQ ID NO: 2324151 - RNA, 19 nt, Homo sapiens
  misc_RNA (1)...(19): siRNA sense strand
agucaagccugucugaaaa

SEQ ID NO: 2324152 - RNA, 19 nt, Homo sapiens
  misc_RNA (1)...(19): siRNA sense strand
gguugagauaagucgaaga

SEQ ID NO: 2324153 - RNA, 19 nt, Homo sapiens
  misc_RNA (1)...(19): siRNA sense strand
cagucaaggugaucaacca

SEQ ID NO: 2324154 - RNA, 19 nt, Homo sapiens
  misc_RNA (1)...(19): siRNA sense strand
ugguaucacuaaagaagca

SEQ ID NO: 2324155 - RNA, 19 nt, Homo sapiens
  misc_RNA (1)...(19): siRNA sense strand
uuggacaaagggagcguaa

SEQ ID NO: 2324156 - RNA, 19 nt, Homo sapiens
  misc_RNA (1)...(19): siRNA sense strand
uggacuuggaaauuaguaa

SEQ ID NO: 2324157 - RNA, 19 nt, Homo sapiens
  misc_RNA (1)...(19): siRNA sense strand
uggacaagaauaucagaga

SEQ ID NO: 2324158 - RNA, 19 nt, Homo sapiens
  misc_RNA (1)...(19): siRNA sense strand
gaguugcacaccacggaaa

SEQ ID NO: 2324159 - RNA, 19 nt, Homo sapiens
  misc_RNA (1)...(19): siRNA sense strand
gcugaucaauaaagggaac

SEQ ID NO: 2324160 - RNA, 19 nt, Homo sapiens
  misc_RNA (1)...(19): siRNA sense strand
guuaacaagucaagccugu

SEQ ID NO: 2324161 - RNA, 19 nt, Homo sapiens
  misc_RNA (1)...(19): siRNA sense strand
ugagauaagucgaagagug

SEQ ID NO: 2324162 - RNA, 19 nt, Homo sapiens
  misc_RNA (1)...(19): siRNA sense strand
ccuggauauuacagcuauu

SEQ ID NO: 2324163 - RNA, 19 nt, Homo sapiens
  misc_RNA (1)...(19): siRNA sense strand
cagugucagugcagaggau

SEQ ID NO: 2324164 - RNA, 19 nt, Homo sapiens
  misc_RNA (1)...(19): siRNA sense strand
agacagcuuuguucggcua

SEQ ID NO: 2324165 - RNA, 19 nt, Homo sapiens
  misc_RNA (1)...(19): siRNA sense strand
caguugagcuuccuccaua

SEQ ID NO: 2324166 - RNA, 19 nt, Homo sapiens
  misc_RNA (1)...(19): siRNA sense strand
cacuaaagaagcaagcuau

SEQ ID NO: 2324167 - RNA, 19 nt, Homo sapiens
  misc_RNA (1)...(19): siRNA sense strand
gggcugaucaauaaaggga

SEQ ID NO: 2324168 - RNA, 19 nt, Homo sapiens
  misc_RNA (1)...(19): siRNA sense strand
gggagaagcagcuggccaa

SEQ ID NO: 2324169 - RNA, 19 nt, Homo sapiens
  misc_RNA (1)...(19): siRNA sense strand
agaaggaagccaagcggaa

SEQ ID NO: 2324170 - RNA, 19 nt, Homo sapiens
  misc_RNA (1)...(19): siRNA sense strand
cgguggaggcagagcucaa

SEQ ID NO: 2324171 - RNA, 19 nt, Homo sapiens
  misc_RNA (1)...(19): siRNA sense strand
ugaaugacaugaaggccaa

SEQ ID NO: 2324172 - RNA, 19 nt, Homo sapiens
  misc_RNA (1)...(19): siRNA sense strand
ccugaaaagaagugggaca

SEQ ID NO: 2324173 - RNA, 19 nt, Homo sapiens
  misc_RNA (1)...(19): siRNA sense strand
cuggagaagcuucgagaga

SEQ ID NO: 2324174 - RNA, 19 nt, Homo sapiens
  misc_RNA (1)...(19): siRNA sense strand
cugaggagcugguacgaga

SEQ ID NO: 2324175 - RNA, 19 nt, Homo sapiens
  misc_RNA (1)...(19): siRNA sense strand
ccauguaugaggaggagau

SEQ ID NO: 2324176 - RNA, 19 nt, Homo sapiens
  misc_RNA (1)...(19): siRNA sense strand
cugaugaagaagcgggaga

SEQ ID NO: 2324177 - RNA, 19 nt, Homo sapiens
  misc_RNA (1)...(19): siRNA sense strand
agaucaagagugaggagau

SEQ ID NO: 2324178 - RNA, 19 nt, Homo sapiens
  misc_RNA (1)...(19): siRNA sense strand
aggaggagauggaaaggga

SEQ ID NO: 2324179 - RNA, 19 nt, Homo sapiens
  misc_RNA (1)...(19): siRNA sense strand
ucaagaugagaaagggcaa

SEQ ID NO: 2324180 - RNA, 19 nt, Homo sapiens
  misc_RNA (1)...(19): siRNA sense strand
cggaagaucuccagccugu

SEQ ID NO: 2324181 - RNA, 19 nt, Homo sapiens
  misc_RNA (1)...(19): siRNA sense strand
ggagaaucggcuucgggaa

SEQ ID NO: 2324182 - RNA, 19 nt, Homo sapiens
  misc_RNA (1)...(19): siRNA sense strand
gcgccaugcaccugaugaa

SEQ ID NO: 2324183 - RNA, 19 nt, Homo sapiens
  misc_RNA (1)...(19): siRNA sense strand
agggaggcgaggaggaaga

SEQ ID NO: 2324184 - RNA, 19 nt, Homo sapiens
  misc_RNA (1)...(19): siRNA sense strand
cugaaugacaugaaggcca

SEQ ID NO: 2324185 - RNA, 19 nt, Homo sapiens
  misc_RNA (1)...(19): siRNA sense strand
uaugaggaggagauggaaa

SEQ ID NO: 2324186 - RNA, 19 nt, Homo sapiens
  misc_RNA (1)...(19): siRNA sense strand
acgagaagaacaagcacau

SEQ ID NO: 2324187 - RNA, 19 nt, Homo sapiens
  misc_RNA (1)...(19): siRNA sense strand
cggaaagacuucagugagc

SEQ ID NO: 2324188 - RNA, 19 nt, Homo sapiens
  misc_RNA (1)...(19): siRNA sense strand
uucgagagaaggagcguaa

SEQ ID NO: 2324189 - RNA, 19 nt, Homo sapiens
  misc_RNA (1)...(19): siRNA sense strand
cggccauguaugaggagga

SEQ ID NO: 2324190 - RNA, 19 nt, Homo sapiens
  misc_RNA (1)...(19): siRNA sense strand
cggacagucaagaugagaa

SEQ ID NO: 2324191 - RNA, 19 nt, Homo sapiens
  misc_RNA (1)...(19): siRNA sense strand
acaugaaggccaagcagga

SEQ ID NO: 2324192 - RNA, 19 nt, Homo sapiens
  misc_RNA (1)...(19): siRNA sense strand
ggaggaggaagaagaggga

SEQ ID NO: 2324193 - RNA, 19 nt, Homo sapiens
  misc_RNA (1)...(19): siRNA sense strand
uguaugaggaggagaugga

SEQ ID NO: 2324194 - RNA, 19 nt, Homo sapiens
  misc_RNA (1)...(19): siRNA sense strand
ggaggagauggaaagggaa

SEQ ID NO: 2324195 - RNA, 19 nt, Homo sapiens
  misc_RNA (1)...(19): siRNA sense strand
ucauguacaucaaggagga

SEQ ID NO: 2324196 - RNA, 19 nt, Homo sapiens
  misc_RNA (1)...(19): siRNA sense strand
ccaacauugacaagaaguu

SEQ ID NO: 2324197 - RNA, 19 nt, Homo sapiens
  misc_RNA (1)...(19): siRNA sense strand
aggccaagcaggaggcucu

SEQ ID NO: 2324198 - RNA, 19 nt, Homo sapiens
  misc_RNA (1)...(19): siRNA sense strand
gcaucgcggaggagaacau

SEQ ID NO: 2324199 - RNA, 19 nt, Homo sapiens
  misc_RNA (1)...(19): siRNA sense strand
cugaaaagaagugggacaa

SEQ ID NO: 2324200 - RNA, 19 nt, Homo sapiens
  misc_RNA (1)...(19): siRNA sense strand
cugcagaugaagcuggaga

SEQ ID NO: 2324201 - RNA, 19 nt, Homo sapiens
  misc_RNA (1)...(19): siRNA sense strand
agauggagcagaugaagca

SEQ ID NO: 2324202 - RNA, 19 nt, Homo sapiens
  misc_RNA (1)...(19): siRNA sense strand
aagcaggagaagaucaaga

SEQ ID NO: 2324203 - RNA, 19 nt, Homo sapiens
  misc_RNA (1)...(19): siRNA sense strand
gcaauagcgucaucauaua

SEQ ID NO: 2324204 - RNA, 19 nt, Homo sapiens
  misc_RNA (1)...(19): siRNA sense strand
ccacaauacauuugccaca

SEQ ID NO: 2324205 - RNA, 19 nt, Homo sapiens
  misc_RNA (1)...(19): siRNA sense strand
agguacagaagaagaagua

SEQ ID NO: 2324206 - RNA, 19 nt, Homo sapiens
  misc_RNA (1)...(19): siRNA sense strand
gcagaguguugguguggga

SEQ ID NO: 2324207 - RNA, 19 nt, Homo sapiens
  misc_RNA (1)...(19): siRNA sense strand
cugagguacagaagaagaa

SEQ ID NO: 2324208 - RNA, 19 nt, Homo sapiens
  misc_RNA (1)...(19): siRNA sense strand
cuucaguaaugaugggacu

SEQ ID NO: 2324209 - RNA, 19 nt, Homo sapiens
  misc_RNA (1)...(19): siRNA sense strand
acuuacggaacauggguua

SEQ ID NO: 2324210 - RNA, 19 nt, Homo sapiens
  misc_RNA (1)...(19): siRNA sense strand
aguugggaucagacaguua

SEQ ID NO: 2324211 - RNA, 19 nt, Homo sapiens
  misc_RNA (1)...(19): siRNA sense strand
guaugaaauggaugacaca

SEQ ID NO: 2324212 - RNA, 19 nt, Homo sapiens
  misc_RNA (1)...(19): siRNA sense strand
augaaauggaugacacaga

SEQ ID NO: 2324213 - RNA, 19 nt, Homo sapiens
  misc_RNA (1)...(19): siRNA sense strand
cuaucagauguguugaaua

SEQ ID NO: 2324214 - RNA, 19 nt, Homo sapiens
  misc_RNA (1)...(19): siRNA sense strand
ugucacagacuaaaagaaa

SEQ ID NO: 2324215 - RNA, 19 nt, Homo sapiens
  misc_RNA (1)...(19): siRNA sense strand
cuucauucgccaagugaca

SEQ ID NO: 2324216 - RNA, 19 nt, Homo sapiens
  misc_RNA (1)...(19): siRNA sense strand
uucaaaugucacagacuaa

SEQ ID NO: 2324217 - RNA, 19 nt, Homo sapiens
  misc_RNA (1)...(19): siRNA sense strand
gaagugaaugugaugguca

SEQ ID NO: 2324218 - RNA, 19 nt, Homo sapiens
  misc_RNA (1)...(19): siRNA sense strand
cagaaguacuggugcguga

SEQ ID NO: 2324219 - RNA, 19 nt, Homo sapiens
  misc_RNA (1)...(19): siRNA sense strand
gcguggaggaccaggaaga

SEQ ID NO: 2324220 - RNA, 19 nt, Homo sapiens
  misc_RNA (1)...(19): siRNA sense strand
ccaaggaggucaucgccaa

SEQ ID NO: 2324221 - RNA, 19 nt, Homo sapiens
  misc_RNA (1)...(19): siRNA sense strand
ugguggaggagcugagcaa

SEQ ID NO: 2324222 - RNA, 19 nt, Homo sapiens
  misc_RNA (1)...(19): siRNA sense strand
aggccaucccugagaagua

SEQ ID NO: 2324223 - RNA, 19 nt, Homo sapiens
  misc_RNA (1)...(19): siRNA sense strand
gcgugguggaagaggccaa

SEQ ID NO: 2324224 - RNA, 19 nt, Homo sapiens
  misc_RNA (1)...(19): siRNA sense strand
cggcugaggacaagaucuu

SEQ ID NO: 2324225 - RNA, 19 nt, Homo sapiens
  misc_RNA (1)...(19): siRNA sense strand
gcaagaagcagcaggagcu

SEQ ID NO: 2324226 - RNA, 19 nt, Homo sapiens
  misc_RNA (1)...(19): siRNA sense strand
ccaacuauggcaaggacau

SEQ ID NO: 2324227 - RNA, 19 nt, Homo sapiens
  misc_RNA (1)...(19): siRNA sense strand
acaccaacgccgagggaug

SEQ ID NO: 2324228 - RNA, 19 nt, Homo sapiens
  misc_RNA (1)...(19): siRNA sense strand
cauguggaggagugagaau

SEQ ID NO: 2324229 - RNA, 19 nt, Homo sapiens
  misc_RNA (1)...(19): siRNA sense strand
gaagagaacacggcggaga

SEQ ID NO: 2324230 - RNA, 19 nt, Homo sapiens
  misc_RNA (1)...(19): siRNA sense strand
ccuucaagcagguggccga

SEQ ID NO: 2324231 - RNA, 19 nt, Homo sapiens
  misc_RNA (1)...(19): siRNA sense strand
uggucagcgccaagaggaa

SEQ ID NO: 2324232 - RNA, 19 nt, Homo sapiens
  misc_RNA (1)...(19): siRNA sense strand
uguccuaccaccuggagaa

SEQ ID NO: 2324233 - RNA, 19 nt, Homo sapiens
  misc_RNA (1)...(19): siRNA sense strand
ucgaggugcccgaagagaa

SEQ ID NO: 2324234 - RNA, 19 nt, Homo sapiens
  misc_RNA (1)...(19): siRNA sense strand
gggucuugguggaggacag

SEQ ID NO: 2324235 - RNA, 19 nt, Homo sapiens
  misc_RNA (1)...(19): siRNA sense strand
ggugaagagaggauggaga

SEQ ID NO: 2324236 - RNA, 19 nt, Homo sapiens
  misc_RNA (1)...(19): siRNA sense strand
gcuccgaagauguggacuu

SEQ ID NO: 2324237 - RNA, 19 nt, Homo sapiens
  misc_RNA (1)...(19): siRNA sense strand
cagagaaaccuaaguggca

SEQ ID NO: 2324238 - RNA, 19 nt, Homo sapiens
  misc_RNA (1)...(19): siRNA sense strand
agaaauacagagcggagau

SEQ ID NO: 2324239 - RNA, 19 nt, Homo sapiens
  misc_RNA (1)...(19): siRNA sense strand
agagaaaccuaaguggcaa

SEQ ID NO: 2324240 - RNA, 19 nt, Homo sapiens
  misc_RNA (1)...(19): siRNA sense strand
guuauuggaggguggugaa

SEQ ID NO: 2324241 - RNA, 19 nt, Homo sapiens
  misc_RNA (1)...(19): siRNA sense strand
acccggaugggcagagaaa

SEQ ID NO: 2324242 - RNA, 19 nt, Homo sapiens
  misc_RNA (1)...(19): siRNA sense strand
uuguaaguuugcacggcua

SEQ ID NO: 2324243 - RNA, 19 nt, Homo sapiens
  misc_RNA (1)...(19): siRNA sense strand
ggagaauagcagugggaca

SEQ ID NO: 2324244 - RNA, 19 nt, Homo sapiens
  misc_RNA (1)...(19): siRNA sense strand
ucuuagggcucaagggaga

SEQ ID NO: 2324245 - RNA, 19 nt, Homo sapiens
  misc_RNA (1)...(19): siRNA sense strand
agacauaaagccagaaaau

SEQ ID NO: 2324246 - RNA, 19 nt, Homo sapiens
  misc_RNA (1)...(19): siRNA sense strand
ggccagaaggugauggaga

SEQ ID NO: 2324247 - RNA, 19 nt, Homo sapiens
  misc_RNA (1)...(19): siRNA sense strand
agauagagaaggagggcgu

SEQ ID NO: 2324248 - RNA, 19 nt, Homo sapiens
  misc_RNA (1)...(19): siRNA sense strand
ucacagagacauaaagcca

SEQ ID NO: 2324249 - RNA, 19 nt, Homo sapiens
  misc_RNA (1)...(19): siRNA sense strand
acagagacauaaagccaga

SEQ ID NO: 2324250 - RNA, 19 nt, Homo sapiens
  misc_RNA (1)...(19): siRNA sense strand
ucuacaaggagcugcagaa

SEQ ID NO: 2324251 - RNA, 19 nt, Homo sapiens
  misc_RNA (1)...(19): siRNA sense strand
agaaggagggcguggagca

SEQ ID NO: 2324252 - RNA, 19 nt, Homo sapiens
  misc_RNA (1)...(19): siRNA sense strand
aggagggcguggagcauca

SEQ ID NO: 2324253 - RNA, 19 nt, Homo sapiens
  misc_RNA (1)...(19): siRNA sense strand
ucuucaagucccagauaga

SEQ ID NO: 2324254 - RNA, 19 nt, Homo sapiens
  misc_RNA (1)...(19): siRNA sense strand
ucauggaggaguuggcaga

SEQ ID NO: 2324255 - RNA, 19 nt, Homo sapiens
  misc_RNA (1)...(19): siRNA sense strand
acauaaagccagaaaaucu

SEQ ID NO: 2324256 - RNA, 19 nt, Homo sapiens
  misc_RNA (1)...(19): siRNA sense strand
aggaagacaauguguggca

SEQ ID NO: 2324257 - RNA, 19 nt, Homo sapiens
  misc_RNA (1)...(19): siRNA sense strand
ccagaaggugauggagaau

SEQ ID NO: 2324258 - RNA, 19 nt, Homo sapiens
  misc_RNA (1)...(19): siRNA sense strand
agucccagauagagaagga

SEQ ID NO: 2324259 - RNA, 19 nt, Homo sapiens
  misc_RNA (1)...(19): siRNA sense strand
agaucgaaauccaggccca

SEQ ID NO: 2324260 - RNA, 19 nt, Homo sapiens
  misc_RNA (1)...(19): siRNA sense strand
gcgcaugcacaaugagaag

SEQ ID NO: 2324261 - RNA, 19 nt, Homo sapiens
  misc_RNA (1)...(19): siRNA sense strand
gagaaugagaagugggagu

SEQ ID NO: 2324262 - RNA, 19 nt, Homo sapiens
  misc_RNA (1)...(19): siRNA sense strand
gcaagagcaaggagcgcaa

SEQ ID NO: 2324263 - RNA, 19 nt, Homo sapiens
  misc_RNA (1)...(19): siRNA sense strand
cgaggagagcggagaguca

SEQ ID NO: 2324264 - RNA, 19 nt, Homo sapiens
  misc_RNA (1)...(19): siRNA sense strand
gcgaugugccugugggaca

SEQ ID NO: 2324265 - RNA, 19 nt, Homo sapiens
  misc_RNA (1)...(19): siRNA sense strand
ccggaaagaaaggaagaaa

SEQ ID NO: 2324266 - RNA, 19 nt, Homo sapiens
  misc_RNA (1)...(19): siRNA sense strand
acgcagagacaaagaggau

SEQ ID NO: 2324267 - RNA, 19 nt, Homo sapiens
  misc_RNA (1)...(19): siRNA sense strand
ccaaggaggccuaccgcaa

SEQ ID NO: 2324268 - RNA, 19 nt, Homo sapiens
  misc_RNA (1)...(19): siRNA sense strand
ugagcgaggcggagaucaa

SEQ ID NO: 2324269 - RNA, 19 nt, Homo sapiens
  misc_RNA (1)...(19): siRNA sense strand
uggaagaugagaagcgaca

SEQ ID NO: 2324270 - RNA, 19 nt, Homo sapiens
  misc_RNA (1)...(19): siRNA sense strand
guggcaaagaugaggagau

SEQ ID NO: 2324271 - RNA, 19 nt, Homo sapiens
  misc_RNA (1)...(19): siRNA sense strand
gugcaaagagauggagaga

SEQ ID NO: 2324272 - RNA, 19 nt, Homo sapiens
  misc_RNA (1)...(19): siRNA sense strand
cugaauucccagagcauca

SEQ ID NO: 2324273 - RNA, 19 nt, Homo sapiens
  misc_RNA (1)...(19): siRNA sense strand
gcgccaagaucaaccgcau

SEQ ID NO: 2324274 - RNA, 19 nt, Homo sapiens
  misc_RNA (1)...(19): siRNA sense strand
cggaaagaaaggaagaaag

SEQ ID NO: 2324275 - RNA, 19 nt, Homo sapiens
  misc_RNA (1)...(19): siRNA sense strand
cgguagagacugggaggau

SEQ ID NO: 2324276 - RNA, 19 nt, Homo sapiens
  misc_RNA (1)...(19): siRNA sense strand
ccauugaggacgucagcau

SEQ ID NO: 2324277 - RNA, 19 nt, Homo sapiens
  misc_RNA (1)...(19): siRNA sense strand
acgacaaccuggacagcga

SEQ ID NO: 2324278 - RNA, 19 nt, Homo sapiens
  misc_RNA (1)...(19): siRNA sense strand
ggagauucccugcaggaga

SEQ ID NO: 2324279 - RNA, 19 nt, Homo sapiens
  misc_RNA (1)...(19): siRNA sense strand
gcaugaaguucgacgagcu

SEQ ID NO: 2324280 - RNA, 19 nt, Homo sapiens
  misc_RNA (1)...(19): siRNA sense strand
gagacaaagaggauggaag

SEQ ID NO: 2324281 - RNA, 19 nt, Homo sapiens
  misc_RNA (1)...(19): siRNA sense strand
aagcacagcaagaggagca

SEQ ID NO: 2324282 - RNA, 19 nt, Homo sapiens
  misc_RNA (1)...(19): siRNA sense strand
agggauggcucgugguuuu

SEQ ID NO: 2324283 - RNA, 19 nt, Homo sapiens
  misc_RNA (1)...(19): siRNA sense strand
gggaguuacauuaaagcca

SEQ ID NO: 2324284 - RNA, 19 nt, Homo sapiens
  misc_RNA (1)...(19): siRNA sense strand
ccagagagccagagcagcu

SEQ ID NO: 2324285 - RNA, 19 nt, Homo sapiens
  misc_RNA (1)...(19): siRNA sense strand
ggaguuacauuaaagccau

SEQ ID NO: 2324286 - RNA, 19 nt, Homo sapiens
  misc_RNA (1)...(19): siRNA sense strand
aggccauccugguguccaa

SEQ ID NO: 2324287 - RNA, 19 nt, Homo sapiens
  misc_RNA (1)...(19): siRNA sense strand
cugcaguaccagaggacgu

SEQ ID NO: 2324288 - RNA, 19 nt, Homo sapiens
  misc_RNA (1)...(19): siRNA sense strand
ugguacacuccgugcagaa

SEQ ID NO: 2324289 - RNA, 19 nt, Homo sapiens
  misc_RNA (1)...(19): siRNA sense strand
ggaccagcgacaaggccau

SEQ ID NO: 2324290 - RNA, 19 nt, Homo sapiens
  misc_RNA (1)...(19): siRNA sense strand
cggcucaacgacuggaaga

SEQ ID NO: 2324291 - RNA, 19 nt, Homo sapiens
  misc_RNA (1)...(19): siRNA sense strand
uggaccaguucgagaagca

SEQ ID NO: 2324292 - RNA, 19 nt, Homo sapiens
  misc_RNA (1)...(19): siRNA sense strand
gguggagcucggacgacaa

SEQ ID NO: 2324293 - RNA, 19 nt, Homo sapiens
  misc_RNA (1)...(19): siRNA sense strand
ucaagaccuccaagagcaa

SEQ ID NO: 2324294 - RNA, 19 nt, Homo sapiens
  misc_RNA (1)...(19): siRNA sense strand
ggauggaaggcuggugcaa

SEQ ID NO: 2324295 - RNA, 19 nt, Homo sapiens
  misc_RNA (1)...(19): siRNA sense strand
gcuccuaccugcuggacca

SEQ ID NO: 2324296 - RNA, 19 nt, Homo sapiens
  misc_RNA (1)...(19): siRNA sense strand
ggcaagagcuucagccgca

SEQ ID NO: 2324297 - RNA, 19 nt, Homo sapiens
  misc_RNA (1)...(19): siRNA sense strand
caugaggauggcagggauu

SEQ ID NO: 2324298 - RNA, 19 nt, Homo sapiens
  misc_RNA (1)...(19): siRNA sense strand
cgggaucucuucugggaca

SEQ ID NO: 2324299 - RNA, 19 nt, Homo sapiens
  misc_RNA (1)...(19): siRNA sense strand
gcaugaggauggcagggau

SEQ ID NO: 2324300 - RNA, 19 nt, Homo sapiens
  misc_RNA (1)...(19): siRNA sense strand
ugauugugaaaguggaaga

SEQ ID NO: 2324301 - RNA, 19 nt, Homo sapiens
  misc_RNA (1)...(19): siRNA sense strand
gugaagaagcugaaggcga

SEQ ID NO: 2324302 - RNA, 19 nt, Homo sapiens
  misc_RNA (1)...(19): siRNA sense strand
ugaagaagcugaaggcgau

SEQ ID NO: 2324303 - RNA, 19 nt, Homo sapiens
  misc_RNA (1)...(19): siRNA sense strand
cggacaagaagaaagcaga

SEQ ID NO: 2324304 - RNA, 19 nt, Homo sapiens
  misc_RNA (1)...(19): siRNA sense strand
caagaagaaagcagaggca

SEQ ID NO: 2324305 - RNA, 19 nt, Homo sapiens
  misc_RNA (1)...(19): siRNA sense strand
ccaaggaucuucuggucga

SEQ ID NO: 2324306 - RNA, 19 nt, Homo sapiens
  misc_RNA (1)...(19): siRNA sense strand
ggggaaugcacguguguga

SEQ ID NO: 2324307 - RNA, 19 nt, Homo sapiens
  misc_RNA (1)...(19): siRNA sense strand
augaacaaguuacggcaga

SEQ ID NO: 2324308 - RNA, 19 nt, Homo sapiens
  misc_RNA (1)...(19): siRNA sense strand
cgaaaacagcgacgggaga

SEQ ID NO: 2324309 - RNA, 19 nt, Homo sapiens
  misc_RNA (1)...(19): siRNA sense strand
ccgagugguggacgacaaa

SEQ ID NO: 2324310 - RNA, 19 nt, Homo sapiens
  misc_RNA (1)...(19): siRNA sense strand
cagcgacgggagaaggaau

SEQ ID NO: 2324311 - RNA, 19 nt, Homo sapiens
  misc_RNA (1)...(19): siRNA sense strand
cgguaauuguggugaagaa

SEQ ID NO: 2324312 - RNA, 19 nt, Homo sapiens
  misc_RNA (1)...(19): siRNA sense strand
aggaacagcaggaggaaca

SEQ ID NO: 2324313 - RNA, 19 nt, Homo sapiens
  misc_RNA (1)...(19): siRNA sense strand
aggcauuauaguaagguua

SEQ ID NO: 2324314 - RNA, 19 nt, Homo sapiens
  misc_RNA (1)...(19): siRNA sense strand
agacauacagaguggauga

SEQ ID NO: 2324315 - RNA, 19 nt, Homo sapiens
  misc_RNA (1)...(19): siRNA sense strand
aguuauugauguagagguu

SEQ ID NO: 2324316 - RNA, 19 nt, Homo sapiens
  misc_RNA (1)...(19): siRNA sense strand
ggcccgaaccuuaggcaaa

SEQ ID NO: 2324317 - RNA, 19 nt, Homo sapiens
  misc_RNA (1)...(19): siRNA sense strand
caaagaaacaagaggugca

SEQ ID NO: 2324318 - RNA, 19 nt, Homo sapiens
  misc_RNA (1)...(19): siRNA sense strand
agaccauguuaaagaauca

SEQ ID NO: 2324319 - RNA, 19 nt, Homo sapiens
  misc_RNA (1)...(19): siRNA sense strand
ccauaaaguccuucgaagu

SEQ ID NO: 2324320 - RNA, 19 nt, Homo sapiens
  misc_RNA (1)...(19): siRNA sense strand
ucaaguaaucggaaggaca

SEQ ID NO: 2324321 - RNA, 19 nt, Homo sapiens
  misc_RNA (1)...(19): siRNA sense strand
gaguauucacagagagcca

SEQ ID NO: 2324322 - RNA, 19 nt, Homo sapiens
  misc_RNA (1)...(19): siRNA sense strand
ucuuagaauacuacaggaa

SEQ ID NO: 2324323 - RNA, 19 nt, Homo sapiens
  misc_RNA (1)...(19): siRNA sense strand
gcagagaggaacagcagga

SEQ ID NO: 2324324 - RNA, 19 nt, Homo sapiens
  misc_RNA (1)...(19): siRNA sense strand
gguaauuguggugaagaaa

SEQ ID NO: 2324325 - RNA, 19 nt, Homo sapiens
  misc_RNA (1)...(19): siRNA sense strand
auacagaguggaugauauu

SEQ ID NO: 2324326 - RNA, 19 nt, Homo sapiens
  misc_RNA (1)...(19): siRNA sense strand
cguggacggcagagaggaa

SEQ ID NO: 2324327 - RNA, 19 nt, Homo sapiens
  misc_RNA (1)...(19): siRNA sense strand
gagaggaacagcaggagga

SEQ ID NO: 2324328 - RNA, 19 nt, Homo sapiens
  misc_RNA (1)...(19): siRNA sense strand
cuacagaugaacugcaaga

SEQ ID NO: 2324329 - RNA, 19 nt, Homo sapiens
  misc_RNA (1)...(19): siRNA sense strand
gaugaaagacuuagccguu

SEQ ID NO: 2324330 - RNA, 19 nt, Homo sapiens
  misc_RNA (1)...(19): siRNA sense strand
agaucuaauuggaaagugu

SEQ ID NO: 2324331 - RNA, 19 nt, Homo sapiens
  misc_RNA (1)...(19): siRNA sense strand
ccuaaaagacuacagcaaa

SEQ ID NO: 2324332 - RNA, 19 nt, Homo sapiens
  misc_RNA (1)...(19): siRNA sense strand
auggagaggaugugaggau

SEQ ID NO: 2324333 - RNA, 19 nt, Homo sapiens
  misc_RNA (1)...(19): siRNA sense strand
cccugaagcucgugaugau

SEQ ID NO: 2324334 - RNA, 19 nt, Homo sapiens
  misc_RNA (1)...(19): siRNA sense strand
ugacagaacugaagccuac

SEQ ID NO: 2324335 - RNA, 19 nt, Homo sapiens
  misc_RNA (1)...(19): siRNA sense strand
acauacagcgcuugaccua

SEQ ID NO: 2324336 - RNA, 19 nt, Homo sapiens
  misc_RNA (1)...(19): siRNA sense strand
ucaugaucuuggugugaau

SEQ ID NO: 2324337 - RNA, 19 nt, Homo sapiens
  misc_RNA (1)...(19): siRNA sense strand
acaauaagacauacagagu

SEQ ID NO: 2324338 - RNA, 19 nt, Homo sapiens
  misc_RNA (1)...(19): siRNA sense strand
gaauacuacaggaagcaau

SEQ ID NO: 2324339 - RNA, 19 nt, Homo sapiens
  misc_RNA (1)...(19): siRNA sense strand
agaaacaagaggugcacca

SEQ ID NO: 2324340 - RNA, 19 nt, Homo sapiens
  misc_RNA (1)...(19): siRNA sense strand
aauacuacaggaagcaaua

SEQ ID NO: 2324341 - RNA, 19 nt, Homo sapiens
  misc_RNA (1)...(19): siRNA sense strand
gauugaaguggaugacaga

SEQ ID NO: 2324342 - RNA, 19 nt, Homo sapiens
  misc_RNA (1)...(19): siRNA sense strand
ggugugaauacaaggcaga

SEQ ID NO: 2324343 - RNA, 19 nt, Homo sapiens
  misc_RNA (1)...(19): siRNA sense strand
cugcuaucuuacaggucua

SEQ ID NO: 2324344 - RNA, 19 nt, Homo sapiens
  misc_RNA (1)...(19): siRNA sense strand
ucuucaggcauuauaguaa

SEQ ID NO: 2324345 - RNA, 19 nt, Homo sapiens
  misc_RNA (1)...(19): siRNA sense strand
gaaauuaugaagcagccaa

SEQ ID NO: 2324346 - RNA, 19 nt, Homo sapiens
  misc_RNA (1)...(19): siRNA sense strand
cagcagacacccagauagu

SEQ ID NO: 2324347 - RNA, 19 nt, Homo sapiens
  misc_RNA (1)...(19): siRNA sense strand
aggacaaauacgaugcuau

SEQ ID NO: 2324348 - RNA, 19 nt, Homo sapiens
  misc_RNA (1)...(19): siRNA sense strand
cguaaugauuuuaacguga

SEQ ID NO: 2324349 - RNA, 19 nt, Homo sapiens
  misc_RNA (1)...(19): siRNA sense strand
acgauaauguucaaaggga

SEQ ID NO: 2324350 - RNA, 19 nt, Homo sapiens
  misc_RNA (1)...(19): siRNA sense strand
gucacaaggacuccagaua

SEQ ID NO: 2324351 - RNA, 19 nt, Homo sapiens
  misc_RNA (1)...(19): siRNA sense strand
acagcugggcggaggucaa

SEQ ID NO: 2324352 - RNA, 19 nt, Homo sapiens
  misc_RNA (1)...(19): siRNA sense strand
gaggacaggagcugguaga

SEQ ID NO: 2324353 - RNA, 19 nt, Homo sapiens
  misc_RNA (1)...(19): siRNA sense strand
ugugagaagugguaguguu

SEQ ID NO: 2324354 - RNA, 19 nt, Homo sapiens
  misc_RNA (1)...(19): siRNA sense strand
uggagaggaugugaggaua

SEQ ID NO: 2324355 - RNA, 19 nt, Homo sapiens
  misc_RNA (1)...(19): siRNA sense strand
aggauaacgaucacuuuaa

SEQ ID NO: 2324356 - RNA, 19 nt, Homo sapiens
  misc_RNA (1)...(19): siRNA sense strand
ugucauggccauugcuaca

SEQ ID NO: 2324357 - RNA, 19 nt, Homo sapiens
  misc_RNA (1)...(19): siRNA sense strand
cgauaauguucaaagggag

SEQ ID NO: 2324358 - RNA, 19 nt, Homo sapiens
  misc_RNA (1)...(19): siRNA sense strand
cuuacaggucuaacugaua

SEQ ID NO: 2324359 - RNA, 19 nt, Homo sapiens
  misc_RNA (1)...(19): siRNA sense strand
caagaugggaggagagcuc

SEQ ID NO: 2324360 - RNA, 19 nt, Homo sapiens
  misc_RNA (1)...(19): siRNA sense strand
ccuuauaucaguaucacau

SEQ ID NO: 2324361 - RNA, 19 nt, Homo sapiens
  misc_RNA (1)...(19): siRNA sense strand
gacccggaauggagaggau

SEQ ID NO: 2324362 - RNA, 19 nt, Homo sapiens
  misc_RNA (1)...(19): siRNA sense strand
cugcauauuucaggauaga

SEQ ID NO: 2324363 - RNA, 19 nt, Homo sapiens
  misc_RNA (1)...(19): siRNA sense strand
auuuagaacgagaggaaua

SEQ ID NO: 2324364 - RNA, 19 nt, Homo sapiens
  misc_RNA (1)...(19): siRNA sense strand
auauuuagaacgagaggaa

SEQ ID NO: 2324365 - RNA, 19 nt, Homo sapiens
  misc_RNA (1)...(19): siRNA sense strand
aggacuacgaccuggaaua

SEQ ID NO: 2324366 - RNA, 19 nt, Homo sapiens
  misc_RNA (1)...(19): siRNA sense strand
gcgaaacaucagaacacaa

SEQ ID NO: 2324367 - RNA, 19 nt, Homo sapiens
  misc_RNA (1)...(19): siRNA sense strand
gggauuuaaagcacugaaa

SEQ ID NO: 2324368 - RNA, 19 nt, Homo sapiens
  misc_RNA (1)...(19): siRNA sense strand
gcuuaugaaaucgggaaua

SEQ ID NO: 2324369 - RNA, 19 nt, Homo sapiens
  misc_RNA (1)...(19): siRNA sense strand
gggaguuaucagagaaugu

SEQ ID NO: 2324370 - RNA, 19 nt, Homo sapiens
  misc_RNA (1)...(19): siRNA sense strand
aguaagugccuaucagaau

SEQ ID NO: 2324371 - RNA, 19 nt, Homo sapiens
  misc_RNA (1)...(19): siRNA sense strand
gcuaagaaugauagacugu

SEQ ID NO: 2324372 - RNA, 19 nt, Homo sapiens
  misc_RNA (1)...(19): siRNA sense strand
aaacacaaagcuuggaaaa

SEQ ID NO: 2324373 - RNA, 19 nt, Homo sapiens
  misc_RNA (1)...(19): siRNA sense strand
aacgagaggaauauggaaa

SEQ ID NO: 2324374 - RNA, 19 nt, Homo sapiens
  misc_RNA (1)...(19): siRNA sense strand
auaguaacuccgagccaaa

SEQ ID NO: 2324375 - RNA, 19 nt, Homo sapiens
  misc_RNA (1)...(19): siRNA sense strand
uaaaagaagaugacccaaa

SEQ ID NO: 2324376 - RNA, 19 nt, Homo sapiens
  misc_RNA (1)...(19): siRNA sense strand
gggaaggugaauuugaaaa

SEQ ID NO: 2324377 - RNA, 19 nt, Homo sapiens
  misc_RNA (1)...(19): siRNA sense strand
gacugaugauggagaagau

SEQ ID NO: 2324378 - RNA, 19 nt, Homo sapiens
  misc_RNA (1)...(19): siRNA sense strand
agaacacauugaagagcuu

SEQ ID NO: 2324379 - RNA, 19 nt, Homo sapiens
  misc_RNA (1)...(19): siRNA sense strand
guaaaaugcacuugaggga

SEQ ID NO: 2324380 - RNA, 19 nt, Homo sapiens
  misc_RNA (1)...(19): siRNA sense strand
acuucuaaacagauggauu

SEQ ID NO: 2324381 - RNA, 19 nt, Homo sapiens
  misc_RNA (1)...(19): siRNA sense strand
acuuaaagcacucuaugaa

SEQ ID NO: 2324382 - RNA, 19 nt, Homo sapiens
  misc_RNA (1)...(19): siRNA sense strand
ccuucaagaauuaugauga

SEQ ID NO: 2324383 - RNA, 19 nt, Homo sapiens
  misc_RNA (1)...(19): siRNA sense strand
cuaugaaacaacacuggaa

SEQ ID NO: 2324384 - RNA, 19 nt, Homo sapiens
  misc_RNA (1)...(19): siRNA sense strand
gcacuagauaaauggacca

SEQ ID NO: 2324385 - RNA, 19 nt, Homo sapiens
  misc_RNA (1)...(19): siRNA sense strand
aggaauauggaaagcuuca

SEQ ID NO: 2324386 - RNA, 19 nt, Homo sapiens
  misc_RNA (1)...(19): siRNA sense strand
cugacauggaggaugauuu

SEQ ID NO: 2324387 - RNA, 19 nt, Homo sapiens
  misc_RNA (1)...(19): siRNA sense strand
uuacaucagucgugccaga

SEQ ID NO: 2324388 - RNA, 19 nt, Homo sapiens
  misc_RNA (1)...(19): siRNA sense strand
gggaaaaggaacagaguaa

SEQ ID NO: 2324389 - RNA, 19 nt, Homo sapiens
  misc_RNA (1)...(19): siRNA sense strand
ccacagaugaugagagcaa

SEQ ID NO: 2324390 - RNA, 19 nt, Homo sapiens
  misc_RNA (1)...(19): siRNA sense strand
agaagaaguagcagggaaa

SEQ ID NO: 2324391 - RNA, 19 nt, Homo sapiens
  misc_RNA (1)...(19): siRNA sense strand
gaguggaaccaguggguaa

SEQ ID NO: 2324392 - RNA, 19 nt, Homo sapiens
  misc_RNA (1)...(19): siRNA sense strand
ccuuguaguuagaggguau

SEQ ID NO: 2324393 - RNA, 19 nt, Homo sapiens
  misc_RNA (1)...(19): siRNA sense strand
cagaagaaguagcagggaa

SEQ ID NO: 2324394 - RNA, 19 nt, Homo sapiens
  misc_RNA (1)...(19): siRNA sense strand
gagcaauccucuaggcaga

SEQ ID NO: 2324395 - RNA, 19 nt, Homo sapiens
  misc_RNA (1)...(19): siRNA sense strand
gaagaaaagacuugaacaa

SEQ ID NO: 2324396 - RNA, 19 nt, Homo sapiens
  misc_RNA (1)...(19): siRNA sense strand
gagaggaugaagaaaguaa

SEQ ID NO: 2324397 - RNA, 19 nt, Homo sapiens
  misc_RNA (1)...(19): siRNA sense strand
aagaaaggagggaaggaua

SEQ ID NO: 2324398 - RNA, 19 nt, Homo sapiens
  misc_RNA (1)...(19): siRNA sense strand
gaaaaggaacagaguaaaa

SEQ ID NO: 2324399 - RNA, 19 nt, Homo sapiens
  misc_RNA (1)...(19): siRNA sense strand
ccacauaguaagucaaaga

SEQ ID NO: 2324400 - RNA, 19 nt, Homo sapiens
  misc_RNA (1)...(19): siRNA sense strand
aguuacuggucaugggaaa

SEQ ID NO: 2324401 - RNA, 19 nt, Homo sapiens
  misc_RNA (1)...(19): siRNA sense strand
ccauguugaagaagggaaa

SEQ ID NO: 2324402 - RNA, 19 nt, Homo sapiens
  misc_RNA (1)...(19): siRNA sense strand
cauaaaugcccaaagaaau

SEQ ID NO: 2324403 - RNA, 19 nt, Homo sapiens
  misc_RNA (1)...(19): siRNA sense strand
gguacaagccaucgagaga

SEQ ID NO: 2324404 - RNA, 19 nt, Homo sapiens
  misc_RNA (1)...(19): siRNA sense strand
agauuguguuggugguaaa

SEQ ID NO: 2324405 - RNA, 19 nt, Homo sapiens
  misc_RNA (1)...(19): siRNA sense strand
uggcagacccugaaagcaa

SEQ ID NO: 2324406 - RNA, 19 nt, Homo sapiens
  misc_RNA (1)...(19): siRNA sense strand
ggauuaaggagcaggcaca

SEQ ID NO: 2324407 - RNA, 19 nt, Homo sapiens
  misc_RNA (1)...(19): siRNA sense strand
uggaagaguaagagaagau

SEQ ID NO: 2324408 - RNA, 19 nt, Homo sapiens
  misc_RNA (1)...(19): siRNA sense strand
agaagagagaucugcgaaa

SEQ ID NO: 2324409 - RNA, 19 nt, Homo sapiens
  misc_RNA (1)...(19): siRNA sense strand
guguaaugcaucaaguaaa

SEQ ID NO: 2324410 - RNA, 19 nt, Homo sapiens
  misc_RNA (1)...(19): siRNA sense strand
ccauagaacaauuggaagu

SEQ ID NO: 2324411 - RNA, 19 nt, Homo sapiens
  misc_RNA (1)...(19): siRNA sense strand
ccauauaacaggauugaca

SEQ ID NO: 2324412 - RNA, 19 nt, Homo sapiens
  misc_RNA (1)...(19): siRNA sense strand
ccgaaagacguuugaauca

SEQ ID NO: 2324413 - RNA, 19 nt, Homo sapiens
  misc_RNA (1)...(19): siRNA sense strand
gaagaaacgcagugagucu

SEQ ID NO: 2324414 - RNA, 19 nt, Homo sapiens
  misc_RNA (1)...(19): siRNA sense strand
agagcaauucuuaggauaa

SEQ ID NO: 2324415 - RNA, 19 nt, Homo sapiens
  misc_RNA (1)...(19): siRNA sense strand
cuucaagauccuuuaguaa

SEQ ID NO: 2324416 - RNA, 19 nt, Homo sapiens
  misc_RNA (1)...(19): siRNA sense strand
agaaaggagggaaggauau

SEQ ID NO: 2324417 - RNA, 19 nt, Homo sapiens
  misc_RNA (1)...(19): siRNA sense strand
uagcauagucucagaguca

SEQ ID NO: 2324418 - RNA, 19 nt, Homo sapiens
  misc_RNA (1)...(19): siRNA sense strand
aguaagagaagaugaugaa

SEQ ID NO: 2324419 - RNA, 19 nt, Homo sapiens
  misc_RNA (1)...(19): siRNA sense strand
gcugaagaugaaagagaau

SEQ ID NO: 2324420 - RNA, 19 nt, Homo sapiens
  misc_RNA (1)...(19): siRNA sense strand
cauuagaaaccuugacuau

SEQ ID NO: 2324421 - RNA, 19 nt, Homo sapiens
  misc_RNA (1)...(19): siRNA sense strand
agccaauacuucagaaaga

SEQ ID NO: 2324422 - RNA, 19 nt, Homo sapiens
  misc_RNA (1)...(19): siRNA sense strand
gggaacagcacgugccauu

SEQ ID NO: 2324423 - RNA, 19 nt, Homo sapiens
  misc_RNA (1)...(19): siRNA sense strand
guggauauucagagucaaa

SEQ ID NO: 2324424 - RNA, 19 nt, Homo sapiens
  misc_RNA (1)...(19): siRNA sense strand
ggagugaagcgcagugcua

SEQ ID NO: 2324425 - RNA, 19 nt, Homo sapiens
  misc_RNA (1)...(19): siRNA sense strand
ccagagugaaacaaggaaa

SEQ ID NO: 2324426 - RNA, 19 nt, Homo sapiens
  misc_RNA (1)...(19): siRNA sense strand
gaguaagagaagaugauga

SEQ ID NO: 2324427 - RNA, 19 nt, Homo sapiens
  misc_RNA (1)...(19): siRNA sense strand
ggcuaacacaucaggauaa

SEQ ID NO: 2324428 - RNA, 19 nt, Homo sapiens
  misc_RNA (1)...(19): siRNA sense strand
uguuagaaauccaguauga

SEQ ID NO: 2324429 - RNA, 19 nt, Homo sapiens
  misc_RNA (1)...(19): siRNA sense strand
uguagaaauccguagcaua

SEQ ID NO: 2324430 - RNA, 19 nt, Homo sapiens
  misc_RNA (1)...(19): siRNA sense strand
gaggaugaagaaaguaaua

SEQ ID NO: 2324431 - RNA, 19 nt, Homo sapiens
  misc_RNA (1)...(19): siRNA sense strand
caccuagauuggauagaaa

SEQ ID NO: 2324432 - RNA, 19 nt, Homo sapiens
  misc_RNA (1)...(19): siRNA sense strand
cgacucaauaggaggaaga

SEQ ID NO: 2324433 - RNA, 19 nt, Homo sapiens
  misc_RNA (1)...(19): siRNA sense strand
cagucaaaguacaugauuu

SEQ ID NO: 2324434 - RNA, 19 nt, Homo sapiens
  misc_RNA (1)...(19): siRNA sense strand
aguuagaggguauggaaga

SEQ ID NO: 2324435 - RNA, 19 nt, Homo sapiens
  misc_RNA (1)...(19): siRNA sense strand
gcacaaucaccaucaacaa

SEQ ID NO: 2324436 - RNA, 19 nt, Homo sapiens
  misc_RNA (1)...(19): siRNA sense strand
cguuucagcccuaaaguua

SEQ ID NO: 2324437 - RNA, 19 nt, Homo sapiens
  misc_RNA (1)...(19): siRNA sense strand
guauacaggcugaagauga

SEQ ID NO: 2324438 - RNA, 19 nt, Homo sapiens
  misc_RNA (1)...(19): siRNA sense strand
aagauaaaucccagaccaa

SEQ ID NO: 2324439 - RNA, 19 nt, Homo sapiens
  misc_RNA (1)...(19): siRNA sense strand
gagacauaguaaagccauu

SEQ ID NO: 2324440 - RNA, 19 nt, Homo sapiens
  misc_RNA (1)...(19): siRNA sense strand
cgauggaucagaugaggaa

SEQ ID NO: 2324441 - RNA, 19 nt, Homo sapiens
  misc_RNA (1)...(19): siRNA sense strand
guugauagcagcaagagaa

SEQ ID NO: 2324442 - RNA, 19 nt, Homo sapiens
  misc_RNA (1)...(19): siRNA sense strand
aagucaaagaagagacauu

SEQ ID NO: 2324443 - RNA, 19 nt, Homo sapiens
  misc_RNA (1)...(19): siRNA sense strand
guacacaguccaacagcaa

SEQ ID NO: 2324444 - RNA, 19 nt, Homo sapiens
  misc_RNA (1)...(19): siRNA sense strand
ggcugaagaugaaagagaa

SEQ ID NO: 2324445 - RNA, 19 nt, Homo sapiens
  misc_RNA (1)...(19): siRNA sense strand
guauggaagaguaagagaa

SEQ ID NO: 2324446 - RNA, 19 nt, Homo sapiens
  misc_RNA (1)...(19): siRNA sense strand
aggcugaagaugaaagaga

SEQ ID NO: 2324447 - RNA, 19 nt, Homo sapiens
  misc_RNA (1)...(19): siRNA sense strand
ugaugaaagucaacagcuu

SEQ ID NO: 2324448 - RNA, 19 nt, Homo sapiens
  misc_RNA (1)...(19): siRNA sense strand
ggagacacugggaggguuu

SEQ ID NO: 2324449 - RNA, 19 nt, Homo sapiens
  misc_RNA (1)...(19): siRNA sense strand
caaagaaaugcauuagcaa

SEQ ID NO: 2324450 - RNA, 19 nt, Homo sapiens
  misc_RNA (1)...(19): siRNA sense strand
augacaaaguagacaauca

SEQ ID NO: 2324451 - RNA, 19 nt, Homo sapiens
  misc_RNA (1)...(19): siRNA sense strand
agaucagauuaaagcgauu

SEQ ID NO: 2324452 - RNA, 19 nt, Homo sapiens
  misc_RNA (1)...(19): siRNA sense strand
gcccauuggaagaguggaa

SEQ ID NO: 2324453 - RNA, 19 nt, Homo sapiens
  misc_RNA (1)...(19): siRNA sense strand
augcagaaguuaccugaua

SEQ ID NO: 2324454 - RNA, 19 nt, Homo sapiens
  misc_RNA (1)...(19): siRNA sense strand
ggagaagagcccauuggaa

SEQ ID NO: 2324455 - RNA, 19 nt, Homo sapiens
  misc_RNA (1)...(19): siRNA sense strand
ccuaaauucaggaaaugua

SEQ ID NO: 2324456 - RNA, 19 nt, Homo sapiens
  misc_RNA (1)...(19): siRNA sense strand
acaaaguccuaaugagaaa

SEQ ID NO: 2324457 - RNA, 19 nt, Homo sapiens
  misc_RNA (1)...(19): siRNA sense strand
aaugagaagacuagggaaa

SEQ ID NO: 2324458 - RNA, 19 nt, Homo sapiens
  misc_RNA (1)...(19): siRNA sense strand
accaagagcuagagagauu

SEQ ID NO: 2324459 - RNA, 19 nt, Homo sapiens
  misc_RNA (1)...(19): siRNA sense strand
gggaaaggaaacagaauau

SEQ ID NO: 2324460 - RNA, 19 nt, Homo sapiens
  misc_RNA (1)...(19): siRNA sense strand
gcagaauuguguugggcua

SEQ ID NO: 2324461 - RNA, 19 nt, Homo sapiens
  misc_RNA (1)...(19): siRNA sense strand
aggaggaauuggauaaaua

SEQ ID NO: 2324462 - RNA, 19 nt, Homo sapiens
  misc_RNA (1)...(19): siRNA sense strand
guucaaagcugcaggagga

SEQ ID NO: 2324463 - RNA, 19 nt, Homo sapiens
  misc_RNA (1)...(19): siRNA sense strand
agaaagauuuggagauaca

SEQ ID NO: 2324464 - RNA, 19 nt, Homo sapiens
  misc_RNA (1)...(19): siRNA sense strand
agcagaaacuugaggacaa

SEQ ID NO: 2324465 - RNA, 19 nt, Homo sapiens
  misc_RNA (1)...(19): siRNA sense strand
cuaaauuacaaguggacua

SEQ ID NO: 2324466 - RNA, 19 nt, Homo sapiens
  misc_RNA (1)...(19): siRNA sense strand
cagaacaguuagauguaaa

SEQ ID NO: 2324467 - RNA, 19 nt, Homo sapiens
  misc_RNA (1)...(19): siRNA sense strand
ggcuaaacuaagaaagaaa

SEQ ID NO: 2324468 - RNA, 19 nt, Homo sapiens
  misc_RNA (1)...(19): siRNA sense strand
gggaacaagaacagcuaaa

SEQ ID NO: 2324469 - RNA, 19 nt, Homo sapiens
  misc_RNA (1)...(19): siRNA sense strand
gcagaaaaugacagagaua

SEQ ID NO: 2324470 - RNA, 19 nt, Homo sapiens
  misc_RNA (1)...(19): siRNA sense strand
uagagaaggaugaggaaau

SEQ ID NO: 2324471 - RNA, 19 nt, Homo sapiens
  misc_RNA (1)...(19): siRNA sense strand
agcgagaacuggagauuaa

SEQ ID NO: 2324472 - RNA, 19 nt, Homo sapiens
  misc_RNA (1)...(19): siRNA sense strand
gcagagugucuuagagcaa

SEQ ID NO: 2324473 - RNA, 19 nt, Homo sapiens
  misc_RNA (1)...(19): siRNA sense strand
ucacaguauuggaggaaaa

SEQ ID NO: 2324474 - RNA, 19 nt, Homo sapiens
  misc_RNA (1)...(19): siRNA sense strand
guaacaaaccugaaggaga

SEQ ID NO: 2324475 - RNA, 19 nt, Homo sapiens
  misc_RNA (1)...(19): siRNA sense strand
cagaagauagagaggcuaa

SEQ ID NO: 2324476 - RNA, 19 nt, Homo sapiens
  misc_RNA (1)...(19): siRNA sense strand
gauucuaggacaaaggaaa

SEQ ID NO: 2324477 - RNA, 19 nt, Homo sapiens
  misc_RNA (1)...(19): siRNA sense strand
ucuuaaagccagacagauu

SEQ ID NO: 2324478 - RNA, 19 nt, Homo sapiens
  misc_RNA (1)...(19): siRNA sense strand
aguuagauguacagaaaga

SEQ ID NO: 2324479 - RNA, 19 nt, Homo sapiens
  misc_RNA (1)...(19): siRNA sense strand
acaugaagcaucagagauu

SEQ ID NO: 2324480 - RNA, 19 nt, Homo sapiens
  misc_RNA (1)...(19): siRNA sense strand
ggauaacagucuugcugaa

SEQ ID NO: 2324481 - RNA, 19 nt, Homo sapiens
  misc_RNA (1)...(19): siRNA sense strand
uagaagaauuggacagaca

SEQ ID NO: 2324482 - RNA, 19 nt, Homo sapiens
  misc_RNA (1)...(19): siRNA sense strand
caaagaugaaguugguaaa

SEQ ID NO: 2324483 - RNA, 19 nt, Homo sapiens
  misc_RNA (1)...(19): siRNA sense strand
aagagaaagaacagggcaa

SEQ ID NO: 2324484 - RNA, 19 nt, Homo sapiens
  misc_RNA (1)...(19): siRNA sense strand
gauacugaccauaaagaaa

SEQ ID NO: 2324485 - RNA, 19 nt, Homo sapiens
  misc_RNA (1)...(19): siRNA sense strand
gaucaaaaccagaguaaga

SEQ ID NO: 2324486 - RNA, 19 nt, Homo sapiens
  misc_RNA (1)...(19): siRNA sense strand
aggaacaaguaaagcagua

SEQ ID NO: 2324487 - RNA, 19 nt, Homo sapiens
  misc_RNA (1)...(19): siRNA sense strand
agucugaaguauugaguga

SEQ ID NO: 2324488 - RNA, 19 nt, Homo sapiens
  misc_RNA (1)...(19): siRNA sense strand
agacaaaguccuaaugaga

SEQ ID NO: 2324489 - RNA, 19 nt, Homo sapiens
  misc_RNA (1)...(19): siRNA sense strand
gcugugaagcaaagugaua

SEQ ID NO: 2324490 - RNA, 19 nt, Homo sapiens
  misc_RNA (1)...(19): siRNA sense strand
aguuaugagcagaaugaaa

SEQ ID NO: 2324491 - RNA, 19 nt, Homo sapiens
  misc_RNA (1)...(19): siRNA sense strand
guagaagaacagauguaaa

SEQ ID NO: 2324492 - RNA, 19 nt, Homo sapiens
  misc_RNA (1)...(19): siRNA sense strand
cggaggaaguggaagcaga

SEQ ID NO: 2324493 - RNA, 19 nt, Homo sapiens
  misc_RNA (1)...(19): siRNA sense strand
agugauacuaugacagaaa

SEQ ID NO: 2324494 - RNA, 19 nt, Homo sapiens
  misc_RNA (1)...(19): siRNA sense strand
aaggagagauagaggcaga

SEQ ID NO: 2324495 - RNA, 19 nt, Homo sapiens
  misc_RNA (1)...(19): siRNA sense strand
gcuuaaagaaagaaguuca

SEQ ID NO: 2324496 - RNA, 19 nt, Homo sapiens
  misc_RNA (1)...(19): siRNA sense strand
ccaugaaagaggaaaauaa

SEQ ID NO: 2324497 - RNA, 19 nt, Homo sapiens
  misc_RNA (1)...(19): siRNA sense strand
ugaagaacgaauugaagaa

SEQ ID NO: 2324498 - RNA, 19 nt, Homo sapiens
  misc_RNA (1)...(19): siRNA sense strand
guucaaaccaagagcuaga

SEQ ID NO: 2324499 - RNA, 19 nt, Homo sapiens
  misc_RNA (1)...(19): siRNA sense strand
caaacagcucagaaggaaa

SEQ ID NO: 2324500 - RNA, 19 nt, Homo sapiens
  misc_RNA (1)...(19): siRNA sense strand
agagauggacauuggcaaa

SEQ ID NO: 2324501 - RNA, 19 nt, Homo sapiens
  misc_RNA (1)...(19): siRNA sense strand
agagaaacaugaagcauca

SEQ ID NO: 2324502 - RNA, 19 nt, Homo sapiens
  misc_RNA (1)...(19): siRNA sense strand
agaacgaauugaagaacuu

SEQ ID NO: 2324503 - RNA, 19 nt, Homo sapiens
  misc_RNA (1)...(19): siRNA sense strand
uggaagaagcaaacaagua

SEQ ID NO: 2324504 - RNA, 19 nt, Homo sapiens
  misc_RNA (1)...(19): siRNA sense strand
agacauggaaauagcagaa

SEQ ID NO: 2324505 - RNA, 19 nt, Homo sapiens
  misc_RNA (1)...(19): siRNA sense strand
auuugaaaguaguggccaa

SEQ ID NO: 2324506 - RNA, 19 nt, Homo sapiens
  misc_RNA (1)...(19): siRNA sense strand
cagaaaucaagcagcuaaa

SEQ ID NO: 2324507 - RNA, 19 nt, Homo sapiens
  misc_RNA (1)...(19): siRNA sense strand
ccucuuaaucaaagccaaa

SEQ ID NO: 2324508 - RNA, 19 nt, Homo sapiens
  misc_RNA (1)...(19): siRNA sense strand
uugaacagcuauugaaaga

SEQ ID NO: 2324509 - RNA, 19 nt, Homo sapiens
  misc_RNA (1)...(19): siRNA sense strand
gcagaugguacuagagcau

SEQ ID NO: 2324510 - RNA, 19 nt, Homo sapiens
  misc_RNA (1)...(19): siRNA sense strand
ugaacuagcaucugaggua

SEQ ID NO: 2324511 - RNA, 19 nt, Homo sapiens
  misc_RNA (1)...(19): siRNA sense strand
gcaagaguuagaagagcua

SEQ ID NO: 2324512 - RNA, 19 nt, Homo sapiens
  misc_RNA (1)...(19): siRNA sense strand
augaaaggcuuaagaaacu

SEQ ID NO: 2324513 - RNA, 19 nt, Homo sapiens
  misc_RNA (1)...(19): siRNA sense strand
agaaagagaagcugaaguu

SEQ ID NO: 2324514 - RNA, 19 nt, Homo sapiens
  misc_RNA (1)...(19): siRNA sense strand
ggaaaauagccaucuaaaa

SEQ ID NO: 2324515 - RNA, 19 nt, Homo sapiens
  misc_RNA (1)...(19): siRNA sense strand
ggugaugaccacaguacaa

SEQ ID NO: 2324516 - RNA, 19 nt, Homo sapiens
  misc_RNA (1)...(19): siRNA sense strand
ugguagaagaacagaugua

SEQ ID NO: 2324517 - RNA, 19 nt, Homo sapiens
  misc_RNA (1)...(19): siRNA sense strand
aaaccaagagcuagagaga

SEQ ID NO: 2324518 - RNA, 19 nt, Homo sapiens
  misc_RNA (1)...(19): siRNA sense strand
gcuuauagcugaauggaag

SEQ ID NO: 2324519 - RNA, 19 nt, Homo sapiens
  misc_RNA (1)...(19): siRNA sense strand
caaauaaagcagcaaucua

SEQ ID NO: 2324520 - RNA, 19 nt, Homo sapiens
  misc_RNA (1)...(19): siRNA sense strand
ugagaaaaccauugaagaa

SEQ ID NO: 2324521 - RNA, 19 nt, Homo sapiens
  misc_RNA (1)...(19): siRNA sense strand
agaaggaugaggaaauuaa

SEQ ID NO: 2324522 - RNA, 19 nt, Homo sapiens
  misc_RNA (1)...(19): siRNA sense strand
agaugaaacaggagaggaa

SEQ ID NO: 2324523 - RNA, 19 nt, Homo sapiens
  misc_RNA (1)...(19): siRNA sense strand
ccgaaguggaacaggcuua

SEQ ID NO: 2324524 - RNA, 19 nt, Homo sapiens
  misc_RNA (1)...(19): siRNA sense strand
ccauaauagccaagugcuu

SEQ ID NO: 2324525 - RNA, 19 nt, Homo sapiens
  misc_RNA (1)...(19): siRNA sense strand
acguggaauucgaggacuu

SEQ ID NO: 2324526 - RNA, 19 nt, Homo sapiens
  misc_RNA (1)...(19): siRNA sense strand
cggaguuugaugaggauuu

SEQ ID NO: 2324527 - RNA, 19 nt, Homo sapiens
  misc_RNA (1)...(19): siRNA sense strand
ucucuauggccgaggguga

SEQ ID NO: 2324528 - RNA, 19 nt, Homo sapiens
  misc_RNA (1)...(19): siRNA sense strand
ucgcugaaacccugagcaa

SEQ ID NO: 2324529 - RNA, 19 nt, Homo sapiens
  misc_RNA (1)...(19): siRNA sense strand
caguggugaccgaggauuu

SEQ ID NO: 2324530 - RNA, 19 nt, Homo sapiens
  misc_RNA (1)...(19): siRNA sense strand
augaaacaggagaggaaga

SEQ ID NO: 2324531 - RNA, 19 nt, Homo sapiens
  misc_RNA (1)...(19): siRNA sense strand
aagagggaggcgagggcua

SEQ ID NO: 2324532 - RNA, 19 nt, Homo sapiens
  misc_RNA (1)...(19): siRNA sense strand
ccccagagcagcagcgaaa

SEQ ID NO: 2324533 - RNA, 19 nt, Homo sapiens
  misc_RNA (1)...(19): siRNA sense strand
acucacaagagaugaaaca

SEQ ID NO: 2324534 - RNA, 19 nt, Homo sapiens
  misc_RNA (1)...(19): siRNA sense strand
ccagacugcugaacggcua

SEQ ID NO: 2324535 - RNA, 19 nt, Homo sapiens
  misc_RNA (1)...(19): siRNA sense strand
ggcuagaccaggauaucaa

SEQ ID NO: 2324536 - RNA, 19 nt, Homo sapiens
  misc_RNA (1)...(19): siRNA sense strand
cggcucaacugcagcgcuu

SEQ ID NO: 2324537 - RNA, 19 nt, Homo sapiens
  misc_RNA (1)...(19): siRNA sense strand
ucacaggacaccaaggaga

SEQ ID NO: 2324538 - RNA, 19 nt, Homo sapiens
  misc_RNA (1)...(19): siRNA sense strand
ccaaauucagccagcaaca

SEQ ID NO: 2324539 - RNA, 19 nt, Homo sapiens
  misc_RNA (1)...(19): siRNA sense strand
gggcuggaccuguuggaca

SEQ ID NO: 2324540 - RNA, 19 nt, Homo sapiens
  misc_RNA (1)...(19): siRNA sense strand
uggaacaggcuuacgccaa

SEQ ID NO: 2324541 - RNA, 19 nt, Homo sapiens
  misc_RNA (1)...(19): siRNA sense strand
acacggaguuugaugagga

SEQ ID NO: 2324542 - RNA, 19 nt, Homo sapiens
  misc_RNA (1)...(19): siRNA sense strand
ggcagaagcugaaagucga

SEQ ID NO: 2324543 - RNA, 19 nt, Homo sapiens
  misc_RNA (1)...(19): siRNA sense strand
ggucaggcggaaagaggga

SEQ ID NO: 2324544 - RNA, 19 nt, Homo sapiens
  misc_RNA (1)...(19): siRNA sense strand
uggagaaggccaagcagca

SEQ ID NO: 2324545 - RNA, 19 nt, Homo sapiens
  misc_RNA (1)...(19): siRNA sense strand
cugauguggagaaggccaa

SEQ ID NO: 2324546 - RNA, 19 nt, Homo sapiens
  misc_RNA (1)...(19): siRNA sense strand
agaaaaugaaggaugucua

SEQ ID NO: 2324547 - RNA, 19 nt, Homo sapiens
  misc_RNA (1)...(19): siRNA sense strand
caugaagguggcugcaaau

SEQ ID NO: 2324548 - RNA, 19 nt, Homo sapiens
  misc_RNA (1)...(19): siRNA sense strand
augaggauuucgaggagga

SEQ ID NO: 2324549 - RNA, 19 nt, Homo sapiens
  misc_RNA (1)...(19): siRNA sense strand
cuuuaaacagcuggagaau

SEQ ID NO: 2324550 - RNA, 19 nt, Homo sapiens
  misc_RNA (1)...(19): siRNA sense strand
cuggagaauaguaagcgua

SEQ ID NO: 2324551 - RNA, 19 nt, Homo sapiens
  misc_RNA (1)...(19): siRNA sense strand
cgugaaagaacgcaccgaa

SEQ ID NO: 2324552 - RNA, 19 nt, Homo sapiens
  misc_RNA (1)...(19): siRNA sense strand
aguaaaugcuggugguaaa

SEQ ID NO: 2324553 - RNA, 19 nt, Homo sapiens
  misc_RNA (1)...(19): siRNA sense strand
gaacagaguuugacggaga

SEQ ID NO: 2324554 - RNA, 19 nt, Homo sapiens
  misc_RNA (1)...(19): siRNA sense strand
ugguaaaguucaagaauca

SEQ ID NO: 2324555 - RNA, 19 nt, Homo sapiens
  misc_RNA (1)...(19): siRNA sense strand
aagcaaacucuguaggaaa

SEQ ID NO: 2324556 - RNA, 19 nt, Homo sapiens
  misc_RNA (1)...(19): siRNA sense strand
acaaauacaaagaggaaca

SEQ ID NO: 2324557 - RNA, 19 nt, Homo sapiens
  misc_RNA (1)...(19): siRNA sense strand
aggaagaagauuuggauga

SEQ ID NO: 2324558 - RNA, 19 nt, Homo sapiens
  misc_RNA (1)...(19): siRNA sense strand
gugaaagaagauuggcaaa

SEQ ID NO: 2324559 - RNA, 19 nt, Homo sapiens
  misc_RNA (1)...(19): siRNA sense strand
cugaauggcauguggagaa

SEQ ID NO: 2324560 - RNA, 19 nt, Homo sapiens
  misc_RNA (1)...(19): siRNA sense strand
aguaaaaccuccaagauaa

SEQ ID NO: 2324561 - RNA, 19 nt, Homo sapiens
  misc_RNA (1)...(19): siRNA sense strand
ccuccaagauaaauguaaa

SEQ ID NO: 2324562 - RNA, 19 nt, Homo sapiens
  misc_RNA (1)...(19): siRNA sense strand
gauaaagucaacaggagaa

SEQ ID NO: 2324563 - RNA, 19 nt, Homo sapiens
  misc_RNA (1)...(19): siRNA sense strand
caggaaugcaauauggaua

SEQ ID NO: 2324564 - RNA, 19 nt, Homo sapiens
  misc_RNA (1)...(19): siRNA sense strand
agaucgaguuagugaaaga

SEQ ID NO: 2324565 - RNA, 19 nt, Homo sapiens
  misc_RNA (1)...(19): siRNA sense strand
cagccaagcuacuggugaa

SEQ ID NO: 2324566 - RNA, 19 nt, Homo sapiens
  misc_RNA (1)...(19): siRNA sense strand
uuauauaucacgaggagaa

SEQ ID NO: 2324567 - RNA, 19 nt, Homo sapiens
  misc_RNA (1)...(19): siRNA sense strand
cuguaaauacgauguguaa

SEQ ID NO: 2324568 - RNA, 19 nt, Homo sapiens
  misc_RNA (1)...(19): siRNA sense strand
gggaucaaauacaggaaga

SEQ ID NO: 2324569 - RNA, 19 nt, Homo sapiens
  misc_RNA (1)...(19): siRNA sense strand
accagaaagugaagguuua

SEQ ID NO: 2324570 - RNA, 19 nt, Homo sapiens
  misc_RNA (1)...(19): siRNA sense strand
ggugaaagaagauuggcaa

SEQ ID NO: 2324571 - RNA, 19 nt, Homo sapiens
  misc_RNA (1)...(19): siRNA sense strand
ggagaaacuggaagaauca

SEQ ID NO: 2324572 - RNA, 19 nt, Homo sapiens
  misc_RNA (1)...(19): siRNA sense strand
aggaaugcaauauggauaa

SEQ ID NO: 2324573 - RNA, 19 nt, Homo sapiens
  misc_RNA (1)...(19): siRNA sense strand
guagauacucacaagauaa

SEQ ID NO: 2324574 - RNA, 19 nt, Homo sapiens
  misc_RNA (1)...(19): siRNA sense strand
acggagauguggagaccua

SEQ ID NO: 2324575 - RNA, 19 nt, Homo sapiens
  misc_RNA (1)...(19): siRNA sense strand
cggagaaacuggaagaauc

SEQ ID NO: 2324576 - RNA, 19 nt, Homo sapiens
  misc_RNA (1)...(19): siRNA sense strand
gcaaaggacuaaaagacaa

SEQ ID NO: 2324577 - RNA, 19 nt, Homo sapiens
  misc_RNA (1)...(19): siRNA sense strand
ggagaaaauccuaaaggua

SEQ ID NO: 2324578 - RNA, 19 nt, Homo sapiens
  misc_RNA (1)...(19): siRNA sense strand
gcacuuauugggucagaaa

SEQ ID NO: 2324579 - RNA, 19 nt, Homo sapiens
  misc_RNA (1)...(19): siRNA sense strand
gaaggaaaccugaggagga

SEQ ID NO: 2324580 - RNA, 19 nt, Homo sapiens
  misc_RNA (1)...(19): siRNA sense strand
cagaaaugauuguaggagu

SEQ ID NO: 2324581 - RNA, 19 nt, Homo sapiens
  misc_RNA (1)...(19): siRNA sense strand
agaagaugaaggaggaaaa

SEQ ID NO: 2324582 - RNA, 19 nt, Homo sapiens
  misc_RNA (1)...(19): siRNA sense strand
caauauggauaaagcacau

SEQ ID NO: 2324583 - RNA, 19 nt, Homo sapiens
  misc_RNA (1)...(19): siRNA sense strand
agcagaugguauuggauua

SEQ ID NO: 2324584 - RNA, 19 nt, Homo sapiens
  misc_RNA (1)...(19): siRNA sense strand
ugccaaagaaagaaguaaa

SEQ ID NO: 2324585 - RNA, 19 nt, Homo sapiens
  misc_RNA (1)...(19): siRNA sense strand
ggauauaauaggugauaag

SEQ ID NO: 2324586 - RNA, 19 nt, Homo sapiens
  misc_RNA (1)...(19): siRNA sense strand
cagaugaagagaagaugaa

SEQ ID NO: 2324587 - RNA, 19 nt, Homo sapiens
  misc_RNA (1)...(19): siRNA sense strand
ugaacuagauauagagacu

SEQ ID NO: 2324588 - RNA, 19 nt, Homo sapiens
  misc_RNA (1)...(19): siRNA sense strand
aaggaaaggaagaguucua

SEQ ID NO: 2324589 - RNA, 19 nt, Homo sapiens
  misc_RNA (1)...(19): siRNA sense strand
gagaagaugaaggaggaaa

SEQ ID NO: 2324590 - RNA, 19 nt, Homo sapiens
  misc_RNA (1)...(19): siRNA sense strand
uaaauggagaagaaggaaa

SEQ ID NO: 2324591 - RNA, 19 nt, Homo sapiens
  misc_RNA (1)...(19): siRNA sense strand
agggugagagagagaauua

SEQ ID NO: 2324592 - RNA, 19 nt, Homo sapiens
  misc_RNA (1)...(19): siRNA sense strand
gugaagguuuaguaggcaa

SEQ ID NO: 2324593 - RNA, 19 nt, Homo sapiens
  misc_RNA (1)...(19): siRNA sense strand
caaaagacucccaggcaaa

SEQ ID NO: 2324594 - RNA, 19 nt, Homo sapiens
  misc_RNA (1)...(19): siRNA sense strand
gcaaaagagaaaaggugaa

SEQ ID NO: 2324595 - RNA, 19 nt, Homo sapiens
  misc_RNA (1)...(19): siRNA sense strand
augcacacucuuagggaaa

SEQ ID NO: 2324596 - RNA, 19 nt, Homo sapiens
  misc_RNA (1)...(19): siRNA sense strand
agaucaugauauaggaaca

SEQ ID NO: 2324597 - RNA, 19 nt, Homo sapiens
  misc_RNA (1)...(19): siRNA sense strand
gagacuggagagagguuaa

SEQ ID NO: 2324598 - RNA, 19 nt, Homo sapiens
  misc_RNA (1)...(19): siRNA sense strand
cguuaugaaugaucaggua

SEQ ID NO: 2324599 - RNA, 19 nt, Homo sapiens
  misc_RNA (1)...(19): siRNA sense strand
aaacaagaaugcaagguca

SEQ ID NO: 2324600 - RNA, 19 nt, Homo sapiens
  misc_RNA (1)...(19): siRNA sense strand
caguaacaaccuucagaaa

SEQ ID NO: 2324601 - RNA, 19 nt, Homo sapiens
  misc_RNA (1)...(19): siRNA sense strand
cagaugaaagugaaagcaa

SEQ ID NO: 2324602 - RNA, 19 nt, Homo sapiens
  misc_RNA (1)...(19): siRNA sense strand
gaauaaugaacaaggcuca

SEQ ID NO: 2324603 - RNA, 19 nt, Homo sapiens
  misc_RNA (1)...(19): siRNA sense strand
uggaagauaagcugcauaa

SEQ ID NO: 2324604 - RNA, 19 nt, Homo sapiens
  misc_RNA (1)...(19): siRNA sense strand
cuaccauacuaaacugaaa

SEQ ID NO: 2324605 - RNA, 19 nt, Homo sapiens
  misc_RNA (1)...(19): siRNA sense strand
aagaaagagaacaagacaa

SEQ ID NO: 2324606 - RNA, 19 nt, Homo sapiens
  misc_RNA (1)...(19): siRNA sense strand
augccaauguuaaggaauu

SEQ ID NO: 2324607 - RNA, 19 nt, Homo sapiens
  misc_RNA (1)...(19): siRNA sense strand
ugguguaguugcugcuaaa

SEQ ID NO: 2324608 - RNA, 19 nt, Homo sapiens
  misc_RNA (1)...(19): siRNA sense strand
uggcauagcaaaaggaaau

SEQ ID NO: 2324609 - RNA, 19 nt, Homo sapiens
  misc_RNA (1)...(19): siRNA sense strand
ccaagcuacuggugaaaga

SEQ ID NO: 2324610 - RNA, 19 nt, Homo sapiens
  misc_RNA (1)...(19): siRNA sense strand
gccucuacaucuagugaua

SEQ ID NO: 2324611 - RNA, 19 nt, Homo sapiens
  misc_RNA (1)...(19): siRNA sense strand
gguacuagaaccacagaau

SEQ ID NO: 2324612 - RNA, 19 nt, Homo sapiens
  misc_RNA (1)...(19): siRNA sense strand
acacaggaacugagacuuu

SEQ ID NO: 2324613 - RNA, 19 nt, Homo sapiens
  misc_RNA (1)...(19): siRNA sense strand
aagagaagaugaaggagga

SEQ ID NO: 2324614 - RNA, 19 nt, Homo sapiens
  misc_RNA (1)...(19): siRNA sense strand
gcuucuaaagaucgaguua

SEQ ID NO: 2324615 - RNA, 19 nt, Homo sapiens
  misc_RNA (1)...(19): siRNA sense strand
auguaaaaccagagcuuaa

SEQ ID NO: 2324616 - RNA, 19 nt, Homo sapiens
  misc_RNA (1)...(19): siRNA sense strand
ccucagaacagaagccaga

SEQ ID NO: 2324617 - RNA, 19 nt, Homo sapiens
  misc_RNA (1)...(19): siRNA sense strand
acaaaugcuucuucaggaa

SEQ ID NO: 2324618 - RNA, 19 nt, Homo sapiens
  misc_RNA (1)...(19): siRNA sense strand
ggaaaugaucacuugaaca

SEQ ID NO: 2324619 - RNA, 19 nt, Homo sapiens
  misc_RNA (1)...(19): siRNA sense strand
ucucauagaaccuguuuaa

SEQ ID NO: 2324620 - RNA, 19 nt, Homo sapiens
  misc_RNA (1)...(19): siRNA sense strand
agaaaggaaggcagcuaua

SEQ ID NO: 2324621 - RNA, 19 nt, Homo sapiens
  misc_RNA (1)...(19): siRNA sense strand
gggcaagcuucccagacaa

SEQ ID NO: 2324622 - RNA, 19 nt, Homo sapiens
  misc_RNA (1)...(19): siRNA sense strand
guugacaagauaagggaau

SEQ ID NO: 2324623 - RNA, 19 nt, Homo sapiens
  misc_RNA (1)...(19): siRNA sense strand
caggagugccaaagaaaga

SEQ ID NO: 2324624 - RNA, 19 nt, Homo sapiens
  misc_RNA (1)...(19): siRNA sense strand
gcaaaggaaaggaagaguu

SEQ ID NO: 2324625 - RNA, 19 nt, Homo sapiens
  misc_RNA (1)...(19): siRNA sense strand
agaaauuugaggaagaaga

SEQ ID NO: 2324626 - RNA, 19 nt, Homo sapiens
  misc_RNA (1)...(19): siRNA sense strand
agaacaucuuguagaguca

SEQ ID NO: 2324627 - RNA, 19 nt, Homo sapiens
  misc_RNA (1)...(19): siRNA sense strand
cgaagcaguacauuagaaa

SEQ ID NO: 2324628 - RNA, 19 nt, Homo sapiens
  misc_RNA (1)...(19): siRNA sense strand
ccguaaagccuguggaaaa

SEQ ID NO: 2324629 - RNA, 19 nt, Homo sapiens
  misc_RNA (1)...(19): siRNA sense strand
gcgugaucugcuuggagaa

SEQ ID NO: 2324630 - RNA, 19 nt, Homo sapiens
  misc_RNA (1)...(19): siRNA sense strand
aacucguccuguugagaaa

SEQ ID NO: 2324631 - RNA, 19 nt, Homo sapiens
  misc_RNA (1)...(19): siRNA sense strand
ggugaagaggaaacaacaa

SEQ ID NO: 2324632 - RNA, 19 nt, Homo sapiens
  misc_RNA (1)...(19): siRNA sense strand
gcauucaguucuaugagua

SEQ ID NO: 2324633 - RNA, 19 nt, Homo sapiens
  misc_RNA (1)...(19): siRNA sense strand
ucaaacgaguaguuggcaa

SEQ ID NO: 2324634 - RNA, 19 nt, Homo sapiens
  misc_RNA (1)...(19): siRNA sense strand
guacaucagugucagggaa

SEQ ID NO: 2324635 - RNA, 19 nt, Homo sapiens
  misc_RNA (1)...(19): siRNA sense strand
ggcagaaagaagugaacca

SEQ ID NO: 2324636 - RNA, 19 nt, Homo sapiens
  misc_RNA (1)...(19): siRNA sense strand
caugagagggugugggcca

SEQ ID NO: 2324637 - RNA, 19 nt, Homo sapiens
  misc_RNA (1)...(19): siRNA sense strand
cauucaguucuaugaguaa

SEQ ID NO: 2324638 - RNA, 19 nt, Homo sapiens
  misc_RNA (1)...(19): siRNA sense strand
uggaacugacagaggauga

SEQ ID NO: 2324639 - RNA, 19 nt, Homo sapiens
  misc_RNA (1)...(19): siRNA sense strand
agcaaugaggacacagaua

SEQ ID NO: 2324640 - RNA, 19 nt, Homo sapiens
  misc_RNA (1)...(19): siRNA sense strand
uugaagaggcagaaagaag

SEQ ID NO: 2324641 - RNA, 19 nt, Homo sapiens
  misc_RNA (1)...(19): siRNA sense strand
ucuuggaagucgauguaca

SEQ ID NO: 2324642 - RNA, 19 nt, Homo sapiens
  misc_RNA (1)...(19): siRNA sense strand
cugugggauuagaagaaaa

SEQ ID NO: 2324643 - RNA, 19 nt, Homo sapiens
  misc_RNA (1)...(19): siRNA sense strand
auuucaagggccagauaau

SEQ ID NO: 2324644 - RNA, 19 nt, Homo sapiens
  misc_RNA (1)...(19): siRNA sense strand
ccagacucgccguggucaa

SEQ ID NO: 2324645 - RNA, 19 nt, Homo sapiens
  misc_RNA (1)...(19): siRNA sense strand
gggucugcauggaggggaa

SEQ ID NO: 2324646 - RNA, 19 nt, Homo sapiens
  misc_RNA (1)...(19): siRNA sense strand
gcuucaaccugcacagcga

SEQ ID NO: 2324647 - RNA, 19 nt, Homo sapiens
  misc_RNA (1)...(19): siRNA sense strand
ggggagauacagaaggaga

SEQ ID NO: 2324648 - RNA, 19 nt, Homo sapiens
  misc_RNA (1)...(19): siRNA sense strand
acgaggaccuggugggaga

SEQ ID NO: 2324649 - RNA, 19 nt, Homo sapiens
  misc_RNA (1)...(19): siRNA sense strand
cgucaagacacuacggaga

SEQ ID NO: 2324650 - RNA, 19 nt, Homo sapiens
  misc_RNA (1)...(19): siRNA sense strand
gcaaggaggucgugggguu

SEQ ID NO: 2324651 - RNA, 19 nt, Homo sapiens
  misc_RNA (1)...(19): siRNA sense strand
agaucaaacagguggagga

SEQ ID NO: 2324652 - RNA, 19 nt, Homo sapiens
  misc_RNA (1)...(19): siRNA sense strand
ccaacaagguggugugcuc

SEQ ID NO: 2324653 - RNA, 19 nt, Homo sapiens
  misc_RNA (1)...(19): siRNA sense strand
gaaugaagguguuccguag

SEQ ID NO: 2324654 - RNA, 19 nt, Homo sapiens
  misc_RNA (1)...(19): siRNA sense strand
ucauaaagggugugcgcgu

SEQ ID NO: 2324655 - RNA, 19 nt, Homo sapiens
  misc_RNA (1)...(19): siRNA sense strand
ugcucaaccuccuggacua

SEQ ID NO: 2324656 - RNA, 19 nt, Homo sapiens
  misc_RNA (1)...(19): siRNA sense strand
uggacgaccgcgugugcaa

SEQ ID NO: 2324657 - RNA, 19 nt, Homo sapiens
  misc_RNA (1)...(19): siRNA sense strand
ccaaggagaucaucggcua

SEQ ID NO: 2324658 - RNA, 19 nt, Homo sapiens
  misc_RNA (1)...(19): siRNA sense strand
ggaagacgacggaggcgaa

SEQ ID NO: 2324659 - RNA, 19 nt, Homo sapiens
  misc_RNA (1)...(19): siRNA sense strand
cugcaguguaugaggugaa

SEQ ID NO: 2324660 - RNA, 19 nt, Homo sapiens
  misc_RNA (1)...(19): siRNA sense strand
uguguaaagauguggaaaa

SEQ ID NO: 2324661 - RNA, 19 nt, Homo sapiens
  misc_RNA (1)...(19): siRNA sense strand
guuucuacaucaaggccua

SEQ ID NO: 2324662 - RNA, 19 nt, Homo sapiens
  misc_RNA (1)...(19): siRNA sense strand
gugccaaauccaugggcuu

SEQ ID NO: 2324663 - RNA, 19 nt, Homo sapiens
  misc_RNA (1)...(19): siRNA sense strand
aggugaagcugcucgccua

SEQ ID NO: 2324664 - RNA, 19 nt, Homo sapiens
  misc_RNA (1)...(19): siRNA sense strand
ggagaagaacagaguccca

SEQ ID NO: 2324665 - RNA, 19 nt, Homo sapiens
  misc_RNA (1)...(19): siRNA sense strand
ccucaugucacguggcuga

SEQ ID NO: 2324666 - RNA, 19 nt, Homo sapiens
  misc_RNA (1)...(19): siRNA sense strand
caggaaggcugcugaccca

SEQ ID NO: 2324667 - RNA, 19 nt, Homo sapiens
  misc_RNA (1)...(19): siRNA sense strand
ccuacaaccagcauggaga

SEQ ID NO: 2324668 - RNA, 19 nt, Homo sapiens
  misc_RNA (1)...(19): siRNA sense strand
ccuacaguuucuacaucaa

SEQ ID NO: 2324669 - RNA, 19 nt, Homo sapiens
  misc_RNA (1)...(19): siRNA sense strand
gguacacauugcugcccaa

SEQ ID NO: 2324670 - RNA, 19 nt, Homo sapiens
  misc_RNA (1)...(19): siRNA sense strand
ccagcauggagauggcaau

SEQ ID NO: 2324671 - RNA, 19 nt, Homo sapiens
  misc_RNA (1)...(19): siRNA sense strand
cagugaaggacaagaaacu

SEQ ID NO: 2324672 - RNA, 19 nt, Homo sapiens
  misc_RNA (1)...(19): siRNA sense strand
ggacacuacuuguggcaau

SEQ ID NO: 2324673 - RNA, 19 nt, Homo sapiens
  misc_RNA (1)...(19): siRNA sense strand
ugacaaucaacgaggacau

SEQ ID NO: 2324674 - RNA, 19 nt, Homo sapiens
  misc_RNA (1)...(19): siRNA sense strand
cuggagacauaaaggcaau

SEQ ID NO: 2324675 - RNA, 19 nt, Homo sapiens
  misc_RNA (1)...(19): siRNA sense strand
cuggaaaugaagaugaauu

SEQ ID NO: 2324676 - RNA, 19 nt, Homo sapiens
  misc_RNA (1)...(19): siRNA sense strand
caacaaugaugacuggaca

SEQ ID NO: 2324677 - RNA, 19 nt, Homo sapiens
  misc_RNA (1)...(19): siRNA sense strand
gggagaggaaacagaggau

SEQ ID NO: 2324678 - RNA, 19 nt, Homo sapiens
  misc_RNA (1)...(19): siRNA sense strand
gcaauguaguggauggcca

SEQ ID NO: 2324679 - RNA, 19 nt, Homo sapiens
  misc_RNA (1)...(19): siRNA sense strand
gaauuuagaaacaugguga

SEQ ID NO: 2324680 - RNA, 19 nt, Homo sapiens
  misc_RNA (1)...(19): siRNA sense strand
auucaaguauggugcaaaa

SEQ ID NO: 2324681 - RNA, 19 nt, Homo sapiens
  misc_RNA (1)...(19): siRNA sense strand
augcacaagaucuggaaau

SEQ ID NO: 2324682 - RNA, 19 nt, Homo sapiens
  misc_RNA (1)...(19): siRNA sense strand
aagcaguaccuguggaagu

SEQ ID NO: 2324683 - RNA, 19 nt, Homo sapiens
  misc_RNA (1)...(19): siRNA sense strand
ugaucuggguggugagcca

SEQ ID NO: 2324684 - RNA, 19 nt, Homo sapiens
  misc_RNA (1)...(19): siRNA sense strand
gguaugauaaugggagcaa

SEQ ID NO: 2324685 - RNA, 19 nt, Homo sapiens
  misc_RNA (1)...(19): siRNA sense strand
cucuugaaugugagcgaua

SEQ ID NO: 2324686 - RNA, 19 nt, Homo sapiens
  misc_RNA (1)...(19): siRNA sense strand
ccuggagacauaaaggcaa

SEQ ID NO: 2324687 - RNA, 19 nt, Homo sapiens
  misc_RNA (1)...(19): siRNA sense strand
ugacugggucugugaacau

SEQ ID NO: 2324688 - RNA, 19 nt, Homo sapiens
  misc_RNA (1)...(19): siRNA sense strand
gguuaauuuccgcaaugua

SEQ ID NO: 2324689 - RNA, 19 nt, Homo sapiens
  misc_RNA (1)...(19): siRNA sense strand
ggaaguggagauaucgaga

SEQ ID NO: 2324690 - RNA, 19 nt, Homo sapiens
  misc_RNA (1)...(19): siRNA sense strand
ugauaaugggagcaaccaa

SEQ ID NO: 2324691 - RNA, 19 nt, Homo sapiens
  misc_RNA (1)...(19): siRNA sense strand
ggaaaguaaaagagcaaua

SEQ ID NO: 2324692 - RNA, 19 nt, Homo sapiens
  misc_RNA (1)...(19): siRNA sense strand
caguuuaagaagacagauu

SEQ ID NO: 2324693 - RNA, 19 nt, Homo sapiens
  misc_RNA (1)...(19): siRNA sense strand
cggaauauccagacugaca

SEQ ID NO: 2324694 - RNA, 19 nt, Homo sapiens
  misc_RNA (1)...(19): siRNA sense strand
caggaaaguaaaagagcaa

SEQ ID NO: 2324695 - RNA, 19 nt, Homo sapiens
  misc_RNA (1)...(19): siRNA sense strand
acaaauuggagguggcuga

SEQ ID NO: 2324696 - RNA, 19 nt, Homo sapiens
  misc_RNA (1)...(19): siRNA sense strand
ggcagagcucccagagaaa

SEQ ID NO: 2324697 - RNA, 19 nt, Homo sapiens
  misc_RNA (1)...(19): siRNA sense strand
cccagaaguccguggaaga

SEQ ID NO: 2324698 - RNA, 19 nt, Homo sapiens
  misc_RNA (1)...(19): siRNA sense strand
ucuuggagaaggagaacua

SEQ ID NO: 2324699 - RNA, 19 nt, Homo sapiens
  misc_RNA (1)...(19): siRNA sense strand
ugaguaugcucgaggcaga

SEQ ID NO: 2324700 - RNA, 19 nt, Homo sapiens
  misc_RNA (1)...(19): siRNA sense strand
ccuaccagcuggaggcaga

SEQ ID NO: 2324701 - RNA, 19 nt, Homo sapiens
  misc_RNA (1)...(19): siRNA sense strand
cagagcucccagagaaaua

SEQ ID NO: 2324702 - RNA, 19 nt, Homo sapiens
  misc_RNA (1)...(19): siRNA sense strand
cucaagaaucucaugauaa

SEQ ID NO: 2324703 - RNA, 19 nt, Homo sapiens
  misc_RNA (1)...(19): siRNA sense strand
augacaaacucaagaaucu

SEQ ID NO: 2324704 - RNA, 19 nt, Homo sapiens
  misc_RNA (1)...(19): siRNA sense strand
guggaguggcuguggcauu

SEQ ID NO: 2324705 - RNA, 19 nt, Homo sapiens
  misc_RNA (1)...(19): siRNA sense strand
ccuuaggagcucugcagaa

SEQ ID NO: 2324706 - RNA, 19 nt, Homo sapiens
  misc_RNA (1)...(19): siRNA sense strand
ccuccaacaaagcaaguaa

SEQ ID NO: 2324707 - RNA, 19 nt, Homo sapiens
  misc_RNA (1)...(19): siRNA sense strand
uugaagacaaugacaacaa

SEQ ID NO: 2324708 - RNA, 19 nt, Homo sapiens
  misc_RNA (1)...(19): siRNA sense strand
ggagaugacucuggagcga

SEQ ID NO: 2324709 - RNA, 19 nt, Homo sapiens
  misc_RNA (1)...(19): siRNA sense strand
cugaaggagacuacccaaa

SEQ ID NO: 2324710 - RNA, 19 nt, Homo sapiens
  misc_RNA (1)...(19): siRNA sense strand
ggagaaaagcgaugagaag

SEQ ID NO: 2324711 - RNA, 19 nt, Homo sapiens
  misc_RNA (1)...(19): siRNA sense strand
gaugagaagaugugacgga

SEQ ID NO: 2324712 - RNA, 19 nt, Homo sapiens
  misc_RNA (1)...(19): siRNA sense strand
ugacaaggccacggagaau

SEQ ID NO: 2324713 - RNA, 19 nt, Homo sapiens
  misc_RNA (1)...(19): siRNA sense strand
uggcagucgaagcaggaaa

SEQ ID NO: 2324714 - RNA, 19 nt, Homo sapiens
  misc_RNA (1)...(19): siRNA sense strand
acaguuguccagaaggaaa

SEQ ID NO: 2324715 - RNA, 19 nt, Homo sapiens
  misc_RNA (1)...(19): siRNA sense strand
ggccauuagugcaggcgau

SEQ ID NO: 2324716 - RNA, 19 nt, Homo sapiens
  misc_RNA (1)...(19): siRNA sense strand
gggagaaaagcgaugagaa

SEQ ID NO: 2324717 - RNA, 19 nt, Homo sapiens
  misc_RNA (1)...(19): siRNA sense strand
caucagagcuccuuccaca

SEQ ID NO: 2324718 - RNA, 19 nt, Homo sapiens
  misc_RNA (1)...(19): siRNA sense strand
cuguggaauuugucaucua

SEQ ID NO: 2324719 - RNA, 19 nt, Homo sapiens
  misc_RNA (1)...(19): siRNA sense strand
agaaaagcgaugagaagau

SEQ ID NO: 2324720 - RNA, 19 nt, Homo sapiens
  misc_RNA (1)...(19): siRNA sense strand
augacaaggccacggagaa

SEQ ID NO: 2324721 - RNA, 19 nt, Homo sapiens
  misc_RNA (1)...(19): siRNA sense strand
ccagagaaauauucccaga

SEQ ID NO: 2324722 - RNA, 19 nt, Homo sapiens
  misc_RNA (1)...(19): siRNA sense strand
cagaggaaccauugcagau

SEQ ID NO: 2324723 - RNA, 19 nt, Homo sapiens
  misc_RNA (1)...(19): siRNA sense strand
gggaagaggaacagcacag

SEQ ID NO: 2324724 - RNA, 19 nt, Homo sapiens
  misc_RNA (1)...(19): siRNA sense strand
uccuaaaaguucagaauga

SEQ ID NO: 2324725 - RNA, 19 nt, Homo sapiens
  misc_RNA (1)...(19): siRNA sense strand
gggaaugcagacauggaga

SEQ ID NO: 2324726 - RNA, 19 nt, Homo sapiens
  misc_RNA (1)...(19): siRNA sense strand
uggagguggcugaacuaaa

SEQ ID NO: 2324727 - RNA, 19 nt, Homo sapiens
  misc_RNA (1)...(19): siRNA sense strand
caacgucacuggaugccua

SEQ ID NO: 2324728 - RNA, 19 nt, Homo sapiens
  misc_RNA (1)...(19): siRNA sense strand
cggagaauugugugugcau

SEQ ID NO: 2324729 - RNA, 19 nt, Homo sapiens
  misc_RNA (1)...(19): siRNA sense strand
ccagaaugcacgcgaccuu

SEQ ID NO: 2324730 - RNA, 19 nt, Homo sapiens
  misc_RNA (1)...(19): siRNA sense strand
guccauuaugucagaggaa

SEQ ID NO: 2324731 - RNA, 19 nt, Homo sapiens
  misc_RNA (1)...(19): siRNA sense strand
cagaaguccguggaagaaa

SEQ ID NO: 2324732 - RNA, 19 nt, Homo sapiens
  misc_RNA (1)...(19): siRNA sense strand
gcgauuaccaguacagcca

SEQ ID NO: 2324733 - RNA, 19 nt, Homo sapiens
  misc_RNA (1)...(19): siRNA sense strand
ccaaagaaacucucccuga

SEQ ID NO: 2324734 - RNA, 19 nt, Homo sapiens
  misc_RNA (1)...(19): siRNA sense strand
gagaagaugugacggacuc

SEQ ID NO: 2324735 - RNA, 19 nt, Homo sapiens
  misc_RNA (1)...(19): siRNA sense strand
caucaguggcucagacagu

SEQ ID NO: 2324736 - RNA, 19 nt, Homo sapiens
  misc_RNA (1)...(19): siRNA sense strand
gagacuacccaaaagcaaa

SEQ ID NO: 2324737 - RNA, 19 nt, Homo sapiens
  misc_RNA (1)...(19): siRNA sense strand
acuggaugccuaagaaaca

SEQ ID NO: 2324738 - RNA, 19 nt, Homo sapiens
  misc_RNA (1)...(19): siRNA sense strand
caugguuugcuguggaauu

SEQ ID NO: 2324739 - RNA, 19 nt, Homo sapiens
  misc_RNA (1)...(19): siRNA sense strand
ugccgaugccggaggaaaa

SEQ ID NO: 2324740 - RNA, 19 nt, Homo sapiens
  misc_RNA (1)...(19): siRNA sense strand
cauugaaacuacagccucu

SEQ ID NO: 2324741 - RNA, 19 nt, Homo sapiens
  misc_RNA (1)...(19): siRNA sense strand
ggcaugaccugcaggggaa

SEQ ID NO: 2324742 - RNA, 19 nt, Homo sapiens
  misc_RNA (1)...(19): siRNA sense strand
auaaagagugggaggcuaa

SEQ ID NO: 2324743 - RNA, 19 nt, Homo sapiens
  misc_RNA (1)...(19): siRNA sense strand
augaaaugaugaaggaaca

SEQ ID NO: 2324744 - RNA, 19 nt, Homo sapiens
  misc_RNA (1)...(19): siRNA sense strand
cagacauagaggaaauaaa

SEQ ID NO: 2324745 - RNA, 19 nt, Homo sapiens
  misc_RNA (1)...(19): siRNA sense strand
uuacuaaagaguuggagaa

SEQ ID NO: 2324746 - RNA, 19 nt, Homo sapiens
  misc_RNA (1)...(19): siRNA sense strand
aagaagagcuacaacguca

SEQ ID NO: 2324747 - RNA, 19 nt, Homo sapiens
  misc_RNA (1)...(19): siRNA sense strand
gcuccagaaagcagacaua

SEQ ID NO: 2324748 - RNA, 19 nt, Homo sapiens
  misc_RNA (1)...(19): siRNA sense strand
gaaggaacaugaaaggaga

SEQ ID NO: 2324749 - RNA, 19 nt, Homo sapiens
  misc_RNA (1)...(19): siRNA sense strand
ccuggaugaacaagaauua

SEQ ID NO: 2324750 - RNA, 19 nt, Homo sapiens
  misc_RNA (1)...(19): siRNA sense strand
agacauuagaucagcaaca

SEQ ID NO: 2324751 - RNA, 19 nt, Homo sapiens
  misc_RNA (1)...(19): siRNA sense strand
agguaugggaagagacuga

SEQ ID NO: 2324752 - RNA, 19 nt, Homo sapiens
  misc_RNA (1)...(19): siRNA sense strand
agauaaacacuucagagaa

SEQ ID NO: 2324753 - RNA, 19 nt, Homo sapiens
  misc_RNA (1)...(19): siRNA sense strand
gagaaaagaagaagagucu

SEQ ID NO: 2324754 - RNA, 19 nt, Homo sapiens
  misc_RNA (1)...(19): siRNA sense strand
uggaaagugcgaagauaga

SEQ ID NO: 2324755 - RNA, 19 nt, Homo sapiens
  misc_RNA (1)...(19): siRNA sense strand
aauugaaguuugagccaca

SEQ ID NO: 2324756 - RNA, 19 nt, Homo sapiens
  misc_RNA (1)...(19): siRNA sense strand
ggaaauaaagagugggagg

SEQ ID NO: 2324757 - RNA, 19 nt, Homo sapiens
  misc_RNA (1)...(19): siRNA sense strand
agaaaguauaugacccuaa

SEQ ID NO: 2324758 - RNA, 19 nt, Homo sapiens
  misc_RNA (1)...(19): siRNA sense strand
aauaaagagugggaggcua

SEQ ID NO: 2324759 - RNA, 19 nt, Homo sapiens
  misc_RNA (1)...(19): siRNA sense strand
aggcucagaagcuggaaua

SEQ ID NO: 2324760 - RNA, 19 nt, Homo sapiens
  misc_RNA (1)...(19): siRNA sense strand
agacaagacaaaaguacaa

SEQ ID NO: 2324761 - RNA, 19 nt, Homo sapiens
  misc_RNA (1)...(19): siRNA sense strand
uggaauaucaucaggucau

SEQ ID NO: 2324762 - RNA, 19 nt, Homo sapiens
  misc_RNA (1)...(19): siRNA sense strand
gaggaaauaaagaguggga

SEQ ID NO: 2324763 - RNA, 19 nt, Homo sapiens
  misc_RNA (1)...(19): siRNA sense strand
aggaagguuaagaauguua

SEQ ID NO: 2324764 - RNA, 19 nt, Homo sapiens
  misc_RNA (1)...(19): siRNA sense strand
ugucaauagugauggauuc

SEQ ID NO: 2324765 - RNA, 19 nt, Homo sapiens
  misc_RNA (1)...(19): siRNA sense strand
aggcuuagaaugagggaac

SEQ ID NO: 2324766 - RNA, 19 nt, Homo sapiens
  misc_RNA (1)...(19): siRNA sense strand
uugacauagacaagacaaa

SEQ ID NO: 2324767 - RNA, 19 nt, Homo sapiens
  misc_RNA (1)...(19): siRNA sense strand
aagaagaaaggcuuagaau

SEQ ID NO: 2324768 - RNA, 19 nt, Homo sapiens
  misc_RNA (1)...(19): siRNA sense strand
auguaaugaaugagguuga

SEQ ID NO: 2324769 - RNA, 19 nt, Homo sapiens
  misc_RNA (1)...(19): siRNA sense strand
ucauacagcagauggaaca

SEQ ID NO: 2324770 - RNA, 19 nt, Homo sapiens
  misc_RNA (1)...(19): siRNA sense strand
cccaggaagcaaagaucaa

SEQ ID NO: 2324771 - RNA, 19 nt, Homo sapiens
  misc_RNA (1)...(19): siRNA sense strand
acugaaaaggcaagaagua

SEQ ID NO: 2324772 - RNA, 19 nt, Homo sapiens
  misc_RNA (1)...(19): siRNA sense strand
uaagcaaagaacuggauuu

SEQ ID NO: 2324773 - RNA, 19 nt, Homo sapiens
  misc_RNA (1)...(19): siRNA sense strand
aagaguuggagaaaguaua

SEQ ID NO: 2324774 - RNA, 19 nt, Homo sapiens
  misc_RNA (1)...(19): siRNA sense strand
guagaaauggaagaagaaa

SEQ ID NO: 2324775 - RNA, 19 nt, Homo sapiens
  misc_RNA (1)...(19): siRNA sense strand
ggcagaugagcuucagaaa

SEQ ID NO: 2324776 - RNA, 19 nt, Homo sapiens
  misc_RNA (1)...(19): siRNA sense strand
gagugggaggcuaagcaaa

SEQ ID NO: 2324777 - RNA, 19 nt, Homo sapiens
  misc_RNA (1)...(19): siRNA sense strand
acuaaaagagguaugggaa

SEQ ID NO: 2324778 - RNA, 19 nt, Homo sapiens
  misc_RNA (1)...(19): siRNA sense strand
ggagaaaguauaugacccu

SEQ ID NO: 2324779 - RNA, 19 nt, Homo sapiens
  misc_RNA (1)...(19): siRNA sense strand
ggauuuaguaagucaccau

SEQ ID NO: 2324780 - RNA, 19 nt, Homo sapiens
  misc_RNA (1)...(19): siRNA sense strand
ccuucaagauauaggcaug

SEQ ID NO: 2324781 - RNA, 19 nt, Homo sapiens
  misc_RNA (1)...(19): siRNA sense strand
gaggaugauaugguagaaa

SEQ ID NO: 2324782 - RNA, 19 nt, Homo sapiens
  misc_RNA (1)...(19): siRNA sense strand
auggaagaagaaaggcuua

SEQ ID NO: 2324783 - RNA, 19 nt, Homo sapiens
  misc_RNA (1)...(19): siRNA sense strand
gaaugagggaacauguaau

SEQ ID NO: 2324784 - RNA, 19 nt, Homo sapiens
  misc_RNA (1)...(19): siRNA sense strand
cagauagcugggagacauu

SEQ ID NO: 2324785 - RNA, 19 nt, Homo sapiens
  misc_RNA (1)...(19): siRNA sense strand
guugauacuaacaaagaca

SEQ ID NO: 2324786 - RNA, 19 nt, Homo sapiens
  misc_RNA (1)...(19): siRNA sense strand
gaggaagaacuaaaagaau

SEQ ID NO: 2324787 - RNA, 19 nt, Homo sapiens
  misc_RNA (1)...(19): siRNA sense strand
augaucaacuggaggcuca

SEQ ID NO: 2324788 - RNA, 19 nt, Homo sapiens
  misc_RNA (1)...(19): siRNA sense strand
caucagggccagcuggaga

SEQ ID NO: 2324789 - RNA, 19 nt, Homo sapiens
  misc_RNA (1)...(19): siRNA sense strand
gugauugaugugcuggaaa

SEQ ID NO: 2324790 - RNA, 19 nt, Homo sapiens
  misc_RNA (1)...(19): siRNA sense strand
aggaagagguguuugggua

SEQ ID NO: 2324791 - RNA, 19 nt, Homo sapiens
  misc_RNA (1)...(19): siRNA sense strand
cuaccaagacagaggacua

SEQ ID NO: 2324792 - RNA, 19 nt, Homo sapiens
  misc_RNA (1)...(19): siRNA sense strand
ccgcaaagggacagcagaa

SEQ ID NO: 2324793 - RNA, 19 nt, Homo sapiens
  misc_RNA (1)...(19): siRNA sense strand
agacagaggacuauggaau

SEQ ID NO: 2324794 - RNA, 19 nt, Homo sapiens
  misc_RNA (1)...(19): siRNA sense strand
gcauuauugcagagaaauu

SEQ ID NO: 2324795 - RNA, 19 nt, Homo sapiens
  misc_RNA (1)...(19): siRNA sense strand
gcaaagaacgugaucgaca

SEQ ID NO: 2324796 - RNA, 19 nt, Homo sapiens
  misc_RNA (1)...(19): siRNA sense strand
aagugaaccagaaggauaa

SEQ ID NO: 2324797 - RNA, 19 nt, Homo sapiens
  misc_RNA (1)...(19): siRNA sense strand
guaagaaggaagagguguu

SEQ ID NO: 2324798 - RNA, 19 nt, Homo sapiens
  misc_RNA (1)...(19): siRNA sense strand
gugcagagcugaccggcua

SEQ ID NO: 2324799 - RNA, 19 nt, Homo sapiens
  misc_RNA (1)...(19): siRNA sense strand
guuaaaggcugcuggggaa

SEQ ID NO: 2324800 - RNA, 19 nt, Homo sapiens
  misc_RNA (1)...(19): siRNA sense strand
ccgaugacccagagcacaa

SEQ ID NO: 2324801 - RNA, 19 nt, Homo sapiens
  misc_RNA (1)...(19): siRNA sense strand
ucuucgaccucauggaaua

SEQ ID NO: 2324802 - RNA, 19 nt, Homo sapiens
  misc_RNA (1)...(19): siRNA sense strand
aggcggagauugaggcuga

SEQ ID NO: 2324803 - RNA, 19 nt, Homo sapiens
  misc_RNA (1)...(19): siRNA sense strand
aagaauuggagaaggguca

SEQ ID NO: 2324804 - RNA, 19 nt, Homo sapiens
  misc_RNA (1)...(19): siRNA sense strand
acgcaaagaacgugaucga

SEQ ID NO: 2324805 - RNA, 19 nt, Homo sapiens
  misc_RNA (1)...(19): siRNA sense strand
cugaggaacgcaagaagaa

SEQ ID NO: 2324806 - RNA, 19 nt, Homo sapiens
  misc_RNA (1)...(19): siRNA sense strand
aagaaaaucaccaaggaua

SEQ ID NO: 2324807 - RNA, 19 nt, Homo sapiens
  misc_RNA (1)...(19): siRNA sense strand
ggugcuaacaugucugaaa

SEQ ID NO: 2324808 - RNA, 19 nt, Homo sapiens
  misc_RNA (1)...(19): siRNA sense strand
ccugcuagagccugagaaa

SEQ ID NO: 2324809 - RNA, 19 nt, Homo sapiens
  misc_RNA (1)...(19): siRNA sense strand
ccuucgggaucuugagcua

SEQ ID NO: 2324810 - RNA, 19 nt, Homo sapiens
  misc_RNA (1)...(19): siRNA sense strand
ggacaaugaggauggggaa

SEQ ID NO: 2324811 - RNA, 19 nt, Homo sapiens
  misc_RNA (1)...(19): siRNA sense strand
ggacauuggcugcagacau

SEQ ID NO: 2324812 - RNA, 19 nt, Homo sapiens
  misc_RNA (1)...(19): siRNA sense strand
gggagcaguuacagaagau

SEQ ID NO: 2324813 - RNA, 19 nt, Homo sapiens
  misc_RNA (1)...(19): siRNA sense strand
gggaaagcagcgagaugau

SEQ ID NO: 2324814 - RNA, 19 nt, Homo sapiens
  misc_RNA (1)...(19): siRNA sense strand
cgacaaaagcagaagagca

SEQ ID NO: 2324815 - RNA, 19 nt, Homo sapiens
  misc_RNA (1)...(19): siRNA sense strand
cugacugauagcagaauua

SEQ ID NO: 2324816 - RNA, 19 nt, Homo sapiens
  misc_RNA (1)...(19): siRNA sense strand
gauaaaugccaggaagcua

SEQ ID NO: 2324817 - RNA, 19 nt, Homo sapiens
  misc_RNA (1)...(19): siRNA sense strand
agagugagcggguggaauu

SEQ ID NO: 2324818 - RNA, 19 nt, Homo sapiens
  misc_RNA (1)...(19): siRNA sense strand
ugaaagggcaggaugaaca

SEQ ID NO: 2324819 - RNA, 19 nt, Homo sapiens
  misc_RNA (1)...(19): siRNA sense strand
auggaaugcuggacagaca

SEQ ID NO: 2324820 - RNA, 19 nt, Homo sapiens
  misc_RNA (1)...(19): siRNA sense strand
agagacaggcggagauuga

SEQ ID NO: 2324821 - RNA, 19 nt, Homo sapiens
  misc_RNA (1)...(19): siRNA sense strand
ggcugagcguuguggagaa

SEQ ID NO: 2324822 - RNA, 19 nt, Homo sapiens
  misc_RNA (1)...(19): siRNA sense strand
agaagauggcugaauacua

SEQ ID NO: 2324823 - RNA, 19 nt, Homo sapiens
  misc_RNA (1)...(19): siRNA sense strand
ugcccaugccagaggguaa

SEQ ID NO: 2324824 - RNA, 19 nt, Homo sapiens
  misc_RNA (1)...(19): siRNA sense strand
ccgccaugccaucaagaaa

SEQ ID NO: 2324825 - RNA, 19 nt, Homo sapiens
  misc_RNA (1)...(19): siRNA sense strand
gacaggaggaacagaagaa

SEQ ID NO: 2324826 - RNA, 19 nt, Homo sapiens
  misc_RNA (1)...(19): siRNA sense strand
gggacaggcaguugaaguu

SEQ ID NO: 2324827 - RNA, 19 nt, Homo sapiens
  misc_RNA (1)...(19): siRNA sense strand
aggaggaacagaagaacuu

SEQ ID NO: 2324828 - RNA, 19 nt, Homo sapiens
  misc_RNA (1)...(19): siRNA sense strand
ggaaguacugcaagcaaca

SEQ ID NO: 2324829 - RNA, 19 nt, Homo sapiens
  misc_RNA (1)...(19): siRNA sense strand
uggcgaagaaguugcagaa

SEQ ID NO: 2324830 - RNA, 19 nt, Homo sapiens
  misc_RNA (1)...(19): siRNA sense strand
ggguggaauucuuuaacuu

SEQ ID NO: 2324831 - RNA, 19 nt, Homo sapiens
  misc_RNA (1)...(19): siRNA sense strand
ucucagaaucuauggacau

SEQ ID NO: 2324832 - RNA, 19 nt, Homo sapiens
  misc_RNA (1)...(19): siRNA sense strand
agccagaugucgagaagga

SEQ ID NO: 2324833 - RNA, 19 nt, Homo sapiens
  misc_RNA (1)...(19): siRNA sense strand
ccgauagggugaaugacau

SEQ ID NO: 2324834 - RNA, 19 nt, Homo sapiens
  misc_RNA (1)...(19): siRNA sense strand
gggaagaauuggagaaggg

SEQ ID NO: 2324835 - RNA, 19 nt, Homo sapiens
  misc_RNA (1)...(19): siRNA sense strand
gacaaaagcagaagagcau

SEQ ID NO: 2324836 - RNA, 19 nt, Homo sapiens
  misc_RNA (1)...(19): siRNA sense strand
cugacggccuugaauguaa

SEQ ID NO: 2324837 - RNA, 19 nt, Homo sapiens
  misc_RNA (1)...(19): siRNA sense strand
agaaaaucaccaaggauau

SEQ ID NO: 2324838 - RNA, 19 nt, Homo sapiens
  misc_RNA (1)...(19): siRNA sense strand
gaauauucacucagcauca

SEQ ID NO: 2324839 - RNA, 19 nt, Homo sapiens
  misc_RNA (1)...(19): siRNA sense strand
aaucagaagccgcagauga

SEQ ID NO: 2324840 - RNA, 19 nt, Homo sapiens
  misc_RNA (1)...(19): siRNA sense strand
acaggaauggguaggagaa

SEQ ID NO: 2324841 - RNA, 19 nt, Homo sapiens
  misc_RNA (1)...(19): siRNA sense strand
gagaggagcagcagcgguu

SEQ ID NO: 2324842 - RNA, 19 nt, Homo sapiens
  misc_RNA (1)...(19): siRNA sense strand
gagaagagacaggcggaga

SEQ ID NO: 2324843 - RNA, 19 nt, Homo sapiens
  misc_RNA (1)...(19): siRNA sense strand
ucuuugaggacauggagaa

SEQ ID NO: 2324844 - RNA, 19 nt, Homo sapiens
  misc_RNA (1)...(19): siRNA sense strand
ggaugaacaacgcgaggga

SEQ ID NO: 2324845 - RNA, 19 nt, Homo sapiens
  misc_RNA (1)...(19): siRNA sense strand
ggagaagauugaagggacc

SEQ ID NO: 2324846 - RNA, 19 nt, Homo sapiens
  misc_RNA (1)...(19): siRNA sense strand
gcaacagcaacaacagcaa

SEQ ID NO: 2324847 - RNA, 19 nt, Homo sapiens
  misc_RNA (1)...(19): siRNA sense strand
agaccaagguuaagaagag

SEQ ID NO: 2324848 - RNA, 19 nt, Homo sapiens
  misc_RNA (1)...(19): siRNA sense strand
uggaauggacucagaucau

SEQ ID NO: 2324849 - RNA, 19 nt, Homo sapiens
  misc_RNA (1)...(19): siRNA sense strand
ccgcagaugagaaggguuc

SEQ ID NO: 2324850 - RNA, 19 nt, Homo sapiens
  misc_RNA (1)...(19): siRNA sense strand
aagguagcauggaggaaaa

SEQ ID NO: 2324851 - RNA, 19 nt, Homo sapiens
  misc_RNA (1)...(19): siRNA sense strand
caacaagauugcuggcuuc

SEQ ID NO: 2324852 - RNA, 19 nt, Homo sapiens
  misc_RNA (1)...(19): siRNA sense strand
uuucaugacucgcuggcua

SEQ ID NO: 2324853 - RNA, 19 nt, Homo sapiens
  misc_RNA (1)...(19): siRNA sense strand
ccuauuaccuggagccacu

SEQ ID NO: 2324854 - RNA, 19 nt, Homo sapiens
  misc_RNA (1)...(19): siRNA sense strand
gggauuacaccgagaagcu

SEQ ID NO: 2324855 - RNA, 19 nt, Homo sapiens
  misc_RNA (1)...(19): siRNA sense strand
aguguuugcuccuggaaga

SEQ ID NO: 2324856 - RNA, 19 nt, Homo sapiens
  misc_RNA (1)...(19): siRNA sense strand
gauccagggcucucagaau

SEQ ID NO: 2324857 - RNA, 19 nt, Homo sapiens
  misc_RNA (1)...(19): siRNA sense strand
ugaguguaguugaggcuga

SEQ ID NO: 2324858 - RNA, 19 nt, Homo sapiens
  misc_RNA (1)...(19): siRNA sense strand
gcuacagcuuugucugcaa

SEQ ID NO: 2324859 - RNA, 19 nt, Homo sapiens
  misc_RNA (1)...(19): siRNA sense strand
agaaguugcagaaggaguu

SEQ ID NO: 2324860 - RNA, 19 nt, Homo sapiens
  misc_RNA (1)...(19): siRNA sense strand
gggcauguugggacaguca

SEQ ID NO: 2324861 - RNA, 19 nt, Homo sapiens
  misc_RNA (1)...(19): siRNA sense strand
caacauauuuggacgcuac

SEQ ID NO: 2324862 - RNA, 19 nt, Homo sapiens
  misc_RNA (1)...(19): siRNA sense strand
gcaagaacauggagcaaua

SEQ ID NO: 2324863 - RNA, 19 nt, Homo sapiens
  misc_RNA (1)...(19): siRNA sense strand
aaucaagagcagcaagaaa

SEQ ID NO: 2324864 - RNA, 19 nt, Homo sapiens
  misc_RNA (1)...(19): siRNA sense strand
ccuccaacuuagugaugaa

SEQ ID NO: 2324865 - RNA, 19 nt, Homo sapiens
  misc_RNA (1)...(19): siRNA sense strand
aggaagaagugauuggcau

SEQ ID NO: 2324866 - RNA, 19 nt, Homo sapiens
  misc_RNA (1)...(19): siRNA sense strand
caagagaggagaacggauu

SEQ ID NO: 2324867 - RNA, 19 nt, Homo sapiens
  misc_RNA (1)...(19): siRNA sense strand
caguucaaagggaggaaua

SEQ ID NO: 2324868 - RNA, 19 nt, Homo sapiens
  misc_RNA (1)...(19): siRNA sense strand
cggagaaguauucaacaaa

SEQ ID NO: 2324869 - RNA, 19 nt, Homo sapiens
  misc_RNA (1)...(19): siRNA sense strand
gcgaaggcuguaaggguuu

SEQ ID NO: 2324870 - RNA, 19 nt, Homo sapiens
  misc_RNA (1)...(19): siRNA sense strand
ggaaagaaauauagugugg

SEQ ID NO: 2324871 - RNA, 19 nt, Homo sapiens
  misc_RNA (1)...(19): siRNA sense strand
guguaaagucuguggggau

SEQ ID NO: 2324872 - RNA, 19 nt, Homo sapiens
  misc_RNA (1)...(19): siRNA sense strand
guggaggcuuugcaggaaa

SEQ ID NO: 2324873 - RNA, 19 nt, Homo sapiens
  misc_RNA (1)...(19): siRNA sense strand
ggacaugaaaucugggaag

SEQ ID NO: 2324874 - RNA, 19 nt, Homo sapiens
  misc_RNA (1)...(19): siRNA sense strand
cugaggagcucuuggccuu

SEQ ID NO: 2324875 - RNA, 19 nt, Homo sapiens
  misc_RNA (1)...(19): siRNA sense strand
gcucuaauucugauaccaa

SEQ ID NO: 2324876 - RNA, 19 nt, Homo sapiens
  misc_RNA (1)...(19): siRNA sense strand
augagaaugaauaggaaca

SEQ ID NO: 2324877 - RNA, 19 nt, Homo sapiens
  misc_RNA (1)...(19): siRNA sense strand
uggaauuugcaaagcguau

SEQ ID NO: 2324878 - RNA, 19 nt, Homo sapiens
  misc_RNA (1)...(19): siRNA sense strand
agaacauggagcaauauaa

SEQ ID NO: 2324879 - RNA, 19 nt, Homo sapiens
  misc_RNA (1)...(19): siRNA sense strand
augaagaccaugaugaaca

SEQ ID NO: 2324880 - RNA, 19 nt, Homo sapiens
  misc_RNA (1)...(19): siRNA sense strand
gggaggaauauaaugcauu

SEQ ID NO: 2324881 - RNA, 19 nt, Homo sapiens
  misc_RNA (1)...(19): siRNA sense strand
guuugaauuuagugagaag

SEQ ID NO: 2324882 - RNA, 19 nt, Homo sapiens
  misc_RNA (1)...(19): siRNA sense strand
gagcaagaaaacaucaaaa

SEQ ID NO: 2324883 - RNA, 19 nt, Homo sapiens
  misc_RNA (1)...(19): siRNA sense strand
uugcaaaggaagaagugau

SEQ ID NO: 2324884 - RNA, 19 nt, Homo sapiens
  misc_RNA (1)...(19): siRNA sense strand
acaugaaaucugggaagaa

SEQ ID NO: 2324885 - RNA, 19 nt, Homo sapiens
  misc_RNA (1)...(19): siRNA sense strand
cagugaaagaaguggugga

SEQ ID NO: 2324886 - RNA, 19 nt, Homo sapiens
  misc_RNA (1)...(19): siRNA sense strand
gaucgaucuggaauagaaa

SEQ ID NO: 2324887 - RNA, 19 nt, Homo sapiens
  misc_RNA (1)...(19): siRNA sense strand
uaguagaacaucaugaaca

SEQ ID NO: 2324888 - RNA, 19 nt, Homo sapiens
  misc_RNA (1)...(19): siRNA sense strand
gaggagaacggauucgcaa

SEQ ID NO: 2324889 - RNA, 19 nt, Homo sapiens
  misc_RNA (1)...(19): siRNA sense strand
ucgccaauauugaaggcau

SEQ ID NO: 2324890 - RNA, 19 nt, Homo sapiens
  misc_RNA (1)...(19): siRNA sense strand
gggauguggcgucaggauu

SEQ ID NO: 2324891 - RNA, 19 nt, Homo sapiens
  misc_RNA (1)...(19): siRNA sense strand
ggagaacggauucgcaaga

SEQ ID NO: 2324892 - RNA, 19 nt, Homo sapiens
  misc_RNA (1)...(19): siRNA sense strand
guggaaagaaauauagugu

SEQ ID NO: 2324893 - RNA, 19 nt, Homo sapiens
  misc_RNA (1)...(19): siRNA sense strand
aggaacagaugucagcaau

SEQ ID NO: 2324894 - RNA, 19 nt, Homo sapiens
  misc_RNA (1)...(19): siRNA sense strand
ugacacauuaguagaacau

SEQ ID NO: 2324895 - RNA, 19 nt, Homo sapiens
  misc_RNA (1)...(19): siRNA sense strand
ucgcaagaacauggagcaa

SEQ ID NO: 2324896 - RNA, 19 nt, Homo sapiens
  misc_RNA (1)...(19): siRNA sense strand
agaacaucaugaacagaca

SEQ ID NO: 2324897 - RNA, 19 nt, Homo sapiens
  misc_RNA (1)...(19): siRNA sense strand
ggaagaagugauuggcaug

SEQ ID NO: 2324898 - RNA, 19 nt, Homo sapiens
  misc_RNA (1)...(19): siRNA sense strand
gaacggauucgcaagaaca

SEQ ID NO: 2324899 - RNA, 19 nt, Homo sapiens
  misc_RNA (1)...(19): siRNA sense strand
acuuagugaugaagagaug

SEQ ID NO: 2324900 - RNA, 19 nt, Homo sapiens
  misc_RNA (1)...(19): siRNA sense strand
ugcaaaggaagaagugauu

SEQ ID NO: 2324901 - RNA, 19 nt, Homo sapiens
  misc_RNA (1)...(19): siRNA sense strand
uucaaagggaggaauauaa

SEQ ID NO: 2324902 - RNA, 19 nt, Homo sapiens
  misc_RNA (1)...(19): siRNA sense strand
augaaaucugggaagaauu

SEQ ID NO: 2324903 - RNA, 19 nt, Homo sapiens
  misc_RNA (1)...(19): siRNA sense strand
caguacaagaagugccuga

SEQ ID NO: 2324904 - RNA, 19 nt, Homo sapiens
  misc_RNA (1)...(19): siRNA sense strand
aauaguuaccugugcaaca

SEQ ID NO: 2324905 - RNA, 19 nt, Homo sapiens
  misc_RNA (1)...(19): siRNA sense strand
agaaugaauaggaacagau

SEQ ID NO: 2324906 - RNA, 19 nt, Homo sapiens
  misc_RNA (1)...(19): siRNA sense strand
cauaaaucaggacaugaaa

SEQ ID NO: 2324907 - RNA, 19 nt, Homo sapiens
  misc_RNA (1)...(19): siRNA sense strand
gaugaagagaugaguuugu

SEQ ID NO: 2324908 - RNA, 19 nt, Homo sapiens
  misc_RNA (1)...(19): siRNA sense strand
gaacagaaauucaaggaga

SEQ ID NO: 2324909 - RNA, 19 nt, Homo sapiens
  misc_RNA (1)...(19): siRNA sense strand
augaguugguugaggucua

SEQ ID NO: 2324910 - RNA, 19 nt, Homo sapiens
  misc_RNA (1)...(19): siRNA sense strand
uggaaaucaaggacagcaa

SEQ ID NO: 2324911 - RNA, 19 nt, Homo sapiens
  misc_RNA (1)...(19): siRNA sense strand
agaaauucaaggagaggca

SEQ ID NO: 2324912 - RNA, 19 nt, Homo sapiens
  misc_RNA (1)...(19): siRNA sense strand
aaauucaaggagaggcaua

SEQ ID NO: 2324913 - RNA, 19 nt, Homo sapiens
  misc_RNA (1)...(19): siRNA sense strand
cccaagaaggccuggaaga

SEQ ID NO: 2324914 - RNA, 19 nt, Homo sapiens
  misc_RNA (1)...(19): siRNA sense strand
auggagaagcugaacagaa

SEQ ID NO: 2324915 - RNA, 19 nt, Homo sapiens
  misc_RNA (1)...(19): siRNA sense strand
ucauacucgugauggaaau

SEQ ID NO: 2324916 - RNA, 19 nt, Homo sapiens
  misc_RNA (1)...(19): siRNA sense strand
ccguuaaggagaucgauga

SEQ ID NO: 2324917 - RNA, 19 nt, Homo sapiens
  misc_RNA (1)...(19): siRNA sense strand
acucuaaggaagaaaacaa

SEQ ID NO: 2324918 - RNA, 19 nt, Homo sapiens
  misc_RNA (1)...(19): siRNA sense strand
cgucagguccuuuggggaa

SEQ ID NO: 2324919 - RNA, 19 nt, Homo sapiens
  misc_RNA (1)...(19): siRNA sense strand
cuaucaggauggagacgca

SEQ ID NO: 2324920 - RNA, 19 nt, Homo sapiens
  misc_RNA (1)...(19): siRNA sense strand
gagacauccguuaaggaga

SEQ ID NO: 2324921 - RNA, 19 nt, Homo sapiens
  misc_RNA (1)...(19): siRNA sense strand
gggccuucaccaacagcaa

SEQ ID NO: 2324922 - RNA, 19 nt, Homo sapiens
  misc_RNA (1)...(19): siRNA sense strand
ggucuuagaaauaggagaa

SEQ ID NO: 2324923 - RNA, 19 nt, Homo sapiens
  misc_RNA (1)...(19): siRNA sense strand
cagagaagauagaacgaau

SEQ ID NO: 2324924 - RNA, 19 nt, Homo sapiens
  misc_RNA (1)...(19): siRNA sense strand
cugcaugaaaggagaggaa

SEQ ID NO: 2324925 - RNA, 19 nt, Homo sapiens
  misc_RNA (1)...(19): siRNA sense strand
gcuaauuugcucagggauu

SEQ ID NO: 2324926 - RNA, 19 nt, Homo sapiens
  misc_RNA (1)...(19): siRNA sense strand
agucaauggacguggucaa

SEQ ID NO: 2324927 - RNA, 19 nt, Homo sapiens
  misc_RNA (1)...(19): siRNA sense strand
cuuagaaauaggagaaaca

SEQ ID NO: 2324928 - RNA, 19 nt, Homo sapiens
  misc_RNA (1)...(19): siRNA sense strand
guggaauggaagaggaaca

SEQ ID NO: 2324929 - RNA, 19 nt, Homo sapiens
  misc_RNA (1)...(19): siRNA sense strand
caagaaacauggcgcgaga

SEQ ID NO: 2324930 - RNA, 19 nt, Homo sapiens
  misc_RNA (1)...(19): siRNA sense strand
gcgucaacaaugugaggaa

SEQ ID NO: 2324931 - RNA, 19 nt, Homo sapiens
  misc_RNA (1)...(19): siRNA sense strand
ugguaagacugaacaagaa

SEQ ID NO: 2324932 - RNA, 19 nt, Homo sapiens
  misc_RNA (1)...(19): siRNA sense strand
uggacugggagcagagaaa

SEQ ID NO: 2324933 - RNA, 19 nt, Homo sapiens
  misc_RNA (1)...(19): siRNA sense strand
ccuccuugagugagaguaa

SEQ ID NO: 2324934 - RNA, 19 nt, Homo sapiens
  misc_RNA (1)...(19): siRNA sense strand
ugacgaagaucuugagcca

SEQ ID NO: 2324935 - RNA, 19 nt, Homo sapiens
  misc_RNA (1)...(19): siRNA sense strand
gagauuaacaaggaagaaa

SEQ ID NO: 2324936 - RNA, 19 nt, Homo sapiens
  misc_RNA (1)...(19): siRNA sense strand
agacagaguggcagcggaa

SEQ ID NO: 2324937 - RNA, 19 nt, Homo sapiens
  misc_RNA (1)...(19): siRNA sense strand
cgagagaggaggaaagagu

SEQ ID NO: 2324938 - RNA, 19 nt, Homo sapiens
  misc_RNA (1)...(19): siRNA sense strand
cagcagaacugauucgaca

SEQ ID NO: 2324939 - RNA, 19 nt, Homo sapiens
  misc_RNA (1)...(19): siRNA sense strand
cauccaagugguugagaau

SEQ ID NO: 2324940 - RNA, 19 nt, Homo sapiens
  misc_RNA (1)...(19): siRNA sense strand
uggaggaaguagagaugau

SEQ ID NO: 2324941 - RNA, 19 nt, Homo sapiens
  misc_RNA (1)...(19): siRNA sense strand
gcaugaaaggagaggaaac

SEQ ID NO: 2324942 - RNA, 19 nt, Homo sapiens
  misc_RNA (1)...(19): siRNA sense strand
cgaggaacccagagaagau

SEQ ID NO: 2324943 - RNA, 19 nt, Homo sapiens
  misc_RNA (1)...(19): siRNA sense strand
aggguuggucuuagaaaua

SEQ ID NO: 2324944 - RNA, 19 nt, Homo sapiens
  misc_RNA (1)...(19): siRNA sense strand
cagaaguaaaggaagaaaa

SEQ ID NO: 2324945 - RNA, 19 nt, Homo sapiens
  misc_RNA (1)...(19): siRNA sense strand
acgagaacaucauccgaaa

SEQ ID NO: 2324946 - RNA, 19 nt, Homo sapiens
  misc_RNA (1)...(19): siRNA sense strand
ucaaacagguggaggccga

SEQ ID NO: 2324947 - RNA, 19 nt, Homo sapiens
  misc_RNA (1)...(19): siRNA sense strand
caggagaugcugagaagau

SEQ ID NO: 2324948 - RNA, 19 nt, Homo sapiens
  misc_RNA (1)...(19): siRNA sense strand
gcuuuaugcagauggagaa

SEQ ID NO: 2324949 - RNA, 19 nt, Homo sapiens
  misc_RNA (1)...(19): siRNA sense strand
aggagaggaaacagagaau

SEQ ID NO: 2324950 - RNA, 19 nt, Homo sapiens
  misc_RNA (1)...(19): siRNA sense strand
gaaacagagaauaagaaga

SEQ ID NO: 2324951 - RNA, 19 nt, Homo sapiens
  misc_RNA (1)...(19): siRNA sense strand
aggcagaugucauggagga

SEQ ID NO: 2324952 - RNA, 19 nt, Homo sapiens
  misc_RNA (1)...(19): siRNA sense strand
gaauaagaaccaggagcua

SEQ ID NO: 2324953 - RNA, 19 nt, Homo sapiens
  misc_RNA (1)...(19): siRNA sense strand
ccugaacgacucaaagaaa

SEQ ID NO: 2324954 - RNA, 19 nt, Homo sapiens
  misc_RNA (1)...(19): siRNA sense strand
ggaugauaauacagagaag

SEQ ID NO: 2324955 - RNA, 19 nt, Homo sapiens
  misc_RNA (1)...(19): siRNA sense strand
uggcaguucuauucauaaa

SEQ ID NO: 2324956 - RNA, 19 nt, Homo sapiens
  misc_RNA (1)...(19): siRNA sense strand
agaauuugggugaacauaa

SEQ ID NO: 2324957 - RNA, 19 nt, Homo sapiens
  misc_RNA (1)...(19): siRNA sense strand
caacaagcacccaggagau

SEQ ID NO: 2324958 - RNA, 19 nt, Homo sapiens
  misc_RNA (1)...(19): siRNA sense strand
cagccgaaacucagaaaca

SEQ ID NO: 2324959 - RNA, 19 nt, Homo sapiens
  misc_RNA (1)...(19): siRNA sense strand
aggaauuucugcugaagau

SEQ ID NO: 2324960 - RNA, 19 nt, Homo sapiens
  misc_RNA (1)...(19): siRNA sense strand
aggacaaggagaaugaauu

SEQ ID NO: 2324961 - RNA, 19 nt, Homo sapiens
  misc_RNA (1)...(19): siRNA sense strand
cggcagaguguacagcaaa

SEQ ID NO: 2324962 - RNA, 19 nt, Homo sapiens
  misc_RNA (1)...(19): siRNA sense strand
cgugcaacaacgagaguga

SEQ ID NO: 2324963 - RNA, 19 nt, Homo sapiens
  misc_RNA (1)...(19): siRNA sense strand
gaggaaagaguguacaaaa

SEQ ID NO: 2324964 - RNA, 19 nt, Homo sapiens
  misc_RNA (1)...(19): siRNA sense strand
ggaaaauggaggccagcua

SEQ ID NO: 2324965 - RNA, 19 nt, Homo sapiens
  misc_RNA (1)...(19): siRNA sense strand
gguuugaaguggagaggag

SEQ ID NO: 2324966 - RNA, 19 nt, Homo sapiens
  misc_RNA (1)...(19): siRNA sense strand
ccggcagaguguacagcaa

SEQ ID NO: 2324967 - RNA, 19 nt, Homo sapiens
  misc_RNA (1)...(19): siRNA sense strand
gcauggugucagaagggaa

SEQ ID NO: 2324968 - RNA, 19 nt, Homo sapiens
  misc_RNA (1)...(19): siRNA sense strand
cuacagggacugcaugaaa

SEQ ID NO: 2324969 - RNA, 19 nt, Homo sapiens
  misc_RNA (1)...(19): siRNA sense strand
aggcaagagcugggaguuu

SEQ ID NO: 2324970 - RNA, 19 nt, Homo sapiens
  misc_RNA (1)...(19): siRNA sense strand
ccaugaguccggagagcau

SEQ ID NO: 2324971 - RNA, 19 nt, Homo sapiens
  misc_RNA (1)...(19): siRNA sense strand
ggaccagauuagugucuca

SEQ ID NO: 2324972 - RNA, 19 nt, Homo sapiens
  misc_RNA (1)...(19): siRNA sense strand
gagaauaagaagauaggcu

SEQ ID NO: 2324973 - RNA, 19 nt, Homo sapiens
  misc_RNA (1)...(19): siRNA sense strand
gaaacaguuguaugugaaa

SEQ ID NO: 2324974 - RNA, 19 nt, Homo sapiens
  misc_RNA (1)...(19): siRNA sense strand
gacuuuaagguguggaauu

SEQ ID NO: 2324975 - RNA, 19 nt, Homo sapiens
  misc_RNA (1)...(19): siRNA sense strand
ugaaaggagaggaaacaga

SEQ ID NO: 2324976 - RNA, 19 nt, Homo sapiens
  misc_RNA (1)...(19): siRNA sense strand
ggagggaacugguggaggu

SEQ ID NO: 2324977 - RNA, 19 nt, Homo sapiens
  misc_RNA (1)...(19): siRNA sense strand
ccuuauaugacaugaggga

SEQ ID NO: 2324978 - RNA, 19 nt, Homo sapiens
  misc_RNA (1)...(19): siRNA sense strand
acaagcaggugcauggcaa

SEQ ID NO: 2324979 - RNA, 19 nt, Homo sapiens
  misc_RNA (1)...(19): siRNA sense strand
cauggugucagaagggaaa

SEQ ID NO: 2324980 - RNA, 19 nt, Homo sapiens
  misc_RNA (1)...(19): siRNA sense strand
ccauccaagugguugagaa

SEQ ID NO: 2324981 - RNA, 19 nt, Homo sapiens
  misc_RNA (1)...(19): siRNA sense strand
cgucuagugaagcaggaaa

SEQ ID NO: 2324982 - RNA, 19 nt, Homo sapiens
  misc_RNA (1)...(19): siRNA sense strand
gguaagacugaacaagaau

SEQ ID NO: 2324983 - RNA, 19 nt, Homo sapiens
  misc_RNA (1)...(19): siRNA sense strand
aggaggaaagaguguacaa

SEQ ID NO: 2324984 - RNA, 19 nt, Homo sapiens
  misc_RNA (1)...(19): siRNA sense strand
cgacagaccuuuacccaca

SEQ ID NO: 2324985 - RNA, 19 nt, Homo sapiens
  misc_RNA (1)...(19): siRNA sense strand
aggccaaguuagcaggaga

SEQ ID NO: 2324986 - RNA, 19 nt, Homo sapiens
  misc_RNA (1)...(19): siRNA sense strand
gugaacaacgcaugcggaa

SEQ ID NO: 2324987 - RNA, 19 nt, Homo sapiens
  misc_RNA (1)...(19): siRNA sense strand
gcaaaauggcgaugggacu

SEQ ID NO: 2324988 - RNA, 19 nt, Homo sapiens
  misc_RNA (1)...(19): siRNA sense strand
cuucaguggaugagaaaug

SEQ ID NO: 2324989 - RNA, 19 nt, Homo sapiens
  misc_RNA (1)...(19): siRNA sense strand
gcacgacacacuuggcuga

SEQ ID NO: 2324990 - RNA, 19 nt, Homo sapiens
  misc_RNA (1)...(19): siRNA sense strand
caucacaaugagugggaaa

SEQ ID NO: 2324991 - RNA, 19 nt, Homo sapiens
  misc_RNA (1)...(19): siRNA sense strand
aguucaagccacagggcaa

SEQ ID NO: 2324992 - RNA, 19 nt, Homo sapiens
  misc_RNA (1)...(19): siRNA sense strand
agggcaacaucauggguaa

SEQ ID NO: 2324993 - RNA, 19 nt, Homo sapiens
  misc_RNA (1)...(19): siRNA sense strand
ccuauauaguccaaaggaa

SEQ ID NO: 2324994 - RNA, 19 nt, Homo sapiens
  misc_RNA (1)...(19): siRNA sense strand
caggagaaacaaagaaaca

SEQ ID NO: 2324995 - RNA, 19 nt, Homo sapiens
  misc_RNA (1)...(19): siRNA sense strand
ugggaaaguucaagaccau

SEQ ID NO: 2324996 - RNA, 19 nt, Homo sapiens
  misc_RNA (1)...(19): siRNA sense strand
uugaagagggccaggagaa

SEQ ID NO: 2324997 - RNA, 19 nt, Homo sapiens
  misc_RNA (1)...(19): siRNA sense strand
acaagaaguucaagccaca

SEQ ID NO: 2324998 - RNA, 19 nt, Homo sapiens
  misc_RNA (1)...(19): siRNA sense strand
gggccaauucacagaaaca

SEQ ID NO: 2324999 - RNA, 19 nt, Homo sapiens
  misc_RNA (1)...(19): siRNA sense strand
ccugauagcucucgggacu

SEQ ID NO: 2325000 - RNA, 19 nt, Homo sapiens
  misc_RNA (1)...(19): siRNA sense strand
guaaaguggccaagugcau

SEQ ID NO: 2325001 - RNA, 19 nt, Homo sapiens
  misc_RNA (1)...(19): siRNA sense strand
agauuuaggcaucggagua

SEQ ID NO: 2325002 - RNA, 19 nt, Homo sapiens
  misc_RNA (1)...(19): siRNA sense strand
gccaggagaaacaaagaaa

SEQ ID NO: 2325003 - RNA, 19 nt, Homo sapiens
  misc_RNA (1)...(19): siRNA sense strand
ccaucgugcagguggaaau

SEQ ID NO: 2325004 - RNA, 19 nt, Homo sapiens
  misc_RNA (1)...(19): siRNA sense strand
gggcaggccaguucagcaa

SEQ ID NO: 2325005 - RNA, 19 nt, Homo sapiens
  misc_RNA (1)...(19): siRNA sense strand
gaucagaugcagaccguga

SEQ ID NO: 2325006 - RNA, 19 nt, Homo sapiens
  misc_RNA (1)...(19): siRNA sense strand
ugaagagggccaggagaaa

SEQ ID NO: 2325007 - RNA, 19 nt, Homo sapiens
  misc_RNA (1)...(19): siRNA sense strand
aguucaacaauguggaauu

SEQ ID NO: 2325008 - RNA, 19 nt, Homo sapiens
  misc_RNA (1)...(19): siRNA sense strand
ggauguacaagaaguucaa

SEQ ID NO: 2325009 - RNA, 19 nt, Homo sapiens
  misc_RNA (1)...(19): siRNA sense strand
gggcaacaucauggguaaa

SEQ ID NO: 2325010 - RNA, 19 nt, Homo sapiens
  misc_RNA (1)...(19): siRNA sense strand
guccaaaggaagaaugaca

SEQ ID NO: 2325011 - RNA, 19 nt, Homo sapiens
  misc_RNA (1)...(19): siRNA sense strand
uggaauucacaguaaacaa

SEQ ID NO: 2325012 - RNA, 19 nt, Homo sapiens
  misc_RNA (1)...(19): siRNA sense strand
cagcggagaucgaagcuca

SEQ ID NO: 2325013 - RNA, 19 nt, Homo sapiens
  misc_RNA (1)...(19): siRNA sense strand
ugaugaggaugaaaagaaa

SEQ ID NO: 2325014 - RNA, 19 nt, Homo sapiens
  misc_RNA (1)...(19): siRNA sense strand
ucccaaauuaagaugguua

SEQ ID NO: 2325015 - RNA, 19 nt, Homo sapiens
  misc_RNA (1)...(19): siRNA sense strand
cuggagagauggugacacu

SEQ ID NO: 2325016 - RNA, 19 nt, Homo sapiens
  misc_RNA (1)...(19): siRNA sense strand
gcauaaaaggcuucacaau

SEQ ID NO: 2325017 - RNA, 19 nt, Homo sapiens
  misc_RNA (1)...(19): siRNA sense strand
ggaguaaggcauuucccaa

SEQ ID NO: 2325018 - RNA, 19 nt, Homo sapiens
  misc_RNA (1)...(19): siRNA sense strand
agaaauacgaugagcggcu

SEQ ID NO: 2325019 - RNA, 19 nt, Homo sapiens
  misc_RNA (1)...(19): siRNA sense strand
aaucaaacccugugugucu

SEQ ID NO: 2325020 - RNA, 19 nt, Homo sapiens
  misc_RNA (1)...(19): siRNA sense strand
gcaacaucauugugcucau

SEQ ID NO: 2325021 - RNA, 19 nt, Homo sapiens
  misc_RNA (1)...(19): siRNA sense strand
gggcuaaagagaaauacga

SEQ ID NO: 2325022 - RNA, 19 nt, Homo sapiens
  misc_RNA (1)...(19): siRNA sense strand
cugacaaggauaaacauuu

SEQ ID NO: 2325023 - RNA, 19 nt, Homo sapiens
  misc_RNA (1)...(19): siRNA sense strand
cuauauaguccaaaggaag

SEQ ID NO: 2325024 - RNA, 19 nt, Homo sapiens
  misc_RNA (1)...(19): siRNA sense strand
ggcuauuaaugcuggaagu

SEQ ID NO: 2325025 - RNA, 19 nt, Homo sapiens
  misc_RNA (1)...(19): siRNA sense strand
ccgacucguggcugggaaa

SEQ ID NO: 2325026 - RNA, 19 nt, Homo sapiens
  misc_RNA (1)...(19): siRNA sense strand
gggauguacaagaaguuca

SEQ ID NO: 2325027 - RNA, 19 nt, Homo sapiens
  misc_RNA (1)...(19): siRNA sense strand
agaagauggcaguuggcau

SEQ ID NO: 2325028 - RNA, 19 nt, Homo sapiens
  misc_RNA (1)...(19): siRNA sense strand
gaauauaucucuuccugga

SEQ ID NO: 2325029 - RNA, 19 nt, Homo sapiens
  misc_RNA (1)...(19): siRNA sense strand
aacaaacugacaaggauaa

SEQ ID NO: 2325030 - RNA, 19 nt, Homo sapiens
  misc_RNA (1)...(19): siRNA sense strand
acacaguuucuuugguuau

SEQ ID NO: 2325031 - RNA, 19 nt, Homo sapiens
  misc_RNA (1)...(19): siRNA sense strand
cgggauuggaauucucaua

SEQ ID NO: 2325032 - RNA, 19 nt, Homo sapiens
  misc_RNA (1)...(19): siRNA sense strand
gguucuauacuuacaucaa

SEQ ID NO: 2325033 - RNA, 19 nt, Homo sapiens
  misc_RNA (1)...(19): siRNA sense strand
cguuuguggcucugugcua

SEQ ID NO: 2325034 - RNA, 19 nt, Homo sapiens
  misc_RNA (1)...(19): siRNA sense strand
caacaacuauguccgggaa

SEQ ID NO: 2325035 - RNA, 19 nt, Homo sapiens
  misc_RNA (1)...(19): siRNA sense strand
gugcagguggaaaucgaua

SEQ ID NO: 2325036 - RNA, 19 nt, Homo sapiens
  misc_RNA (1)...(19): siRNA sense strand
uguccaaaucacacaguuu

SEQ ID NO: 2325037 - RNA, 19 nt, Homo sapiens
  misc_RNA (1)...(19): siRNA sense strand
aagagggccaggagaaaca

SEQ ID NO: 2325038 - RNA, 19 nt, Homo sapiens
  misc_RNA (1)...(19): siRNA sense strand
cgggaaaaucggagcucuu

SEQ ID NO: 2325039 - RNA, 19 nt, Homo sapiens
  misc_RNA (1)...(19): siRNA sense strand
aauaagcucaacagagauu

SEQ ID NO: 2325040 - RNA, 19 nt, Homo sapiens
  misc_RNA (1)...(19): siRNA sense strand
uauauaguccaaaggaaga

SEQ ID NO: 2325041 - RNA, 19 nt, Homo sapiens
  misc_RNA (1)...(19): siRNA sense strand
cugggaaaguucaagacca

SEQ ID NO: 2325042 - RNA, 19 nt, Homo sapiens
  misc_RNA (1)...(19): siRNA sense strand
ugguaaaggauggucuuaa

SEQ ID NO: 2325043 - RNA, 19 nt, Homo sapiens
  misc_RNA (1)...(19): siRNA sense strand
cugaagugaagguguuuga

SEQ ID NO: 2325044 - RNA, 19 nt, Homo sapiens
  misc_RNA (1)...(19): siRNA sense strand
ugaccguggcuguuggcaa

SEQ ID NO: 2325045 - RNA, 19 nt, Homo sapiens
  misc_RNA (1)...(19): siRNA sense strand
acuugaagccagagaacau

SEQ ID NO: 2325046 - RNA, 19 nt, Homo sapiens
  misc_RNA (1)...(19): siRNA sense strand
ccugagaaugacugggaca

SEQ ID NO: 2325047 - RNA, 19 nt, Homo sapiens
  misc_RNA (1)...(19): siRNA sense strand
ccaagaagcugguagacag

SEQ ID NO: 2325048 - RNA, 19 nt, Homo sapiens
  misc_RNA (1)...(19): siRNA sense strand
gugaaggagaagacagcca

SEQ ID NO: 2325049 - RNA, 19 nt, Homo sapiens
  misc_RNA (1)...(19): siRNA sense strand
cgauuaggaaacaugaaga

SEQ ID NO: 2325050 - RNA, 19 nt, Homo sapiens
  misc_RNA (1)...(19): siRNA sense strand
uggaaaacacagaggagaa

SEQ ID NO: 2325051 - RNA, 19 nt, Homo sapiens
  misc_RNA (1)...(19): siRNA sense strand
uggagaagaugguggagca

SEQ ID NO: 2325052 - RNA, 19 nt, Homo sapiens
  misc_RNA (1)...(19): siRNA sense strand
aaauauugccugauggaga

SEQ ID NO: 2325053 - RNA, 19 nt, Homo sapiens
  misc_RNA (1)...(19): siRNA sense strand
gggcaaguaugaaggcagu

SEQ ID NO: 2325054 - RNA, 19 nt, Homo sapiens
  misc_RNA (1)...(19): siRNA sense strand
agaagaugguggagcagca

SEQ ID NO: 2325055 - RNA, 19 nt, Homo sapiens
  misc_RNA (1)...(19): siRNA sense strand
cuaccagaaagaugauaau

SEQ ID NO: 2325056 - RNA, 19 nt, Homo sapiens
  misc_RNA (1)...(19): siRNA sense strand
agaaagaugauaauggugu

SEQ ID NO: 2325057 - RNA, 19 nt, Homo sapiens
  misc_RNA (1)...(19): siRNA sense strand
gggcaaaggcauucuggcu

SEQ ID NO: 2325058 - RNA, 19 nt, Homo sapiens
  misc_RNA (1)...(19): siRNA sense strand
ugcugaugaccgugugaaa

SEQ ID NO: 2325059 - RNA, 19 nt, Homo sapiens
  misc_RNA (1)...(19): siRNA sense strand
agggcaucgucgugggcau

SEQ ID NO: 2325060 - RNA, 19 nt, Homo sapiens
  misc_RNA (1)...(19): siRNA sense strand
gagcagacauggaggagga

SEQ ID NO: 2325061 - RNA, 19 nt, Homo sapiens
  misc_RNA (1)...(19): siRNA sense strand
aggaagaagaggaagaaga

SEQ ID NO: 2325062 - RNA, 19 nt, Homo sapiens
  misc_RNA (1)...(19): siRNA sense strand
aggaagaagaggaagaaga

SEQ ID NO: 2325063 - RNA, 19 nt, Homo sapiens
  misc_RNA (1)...(19): siRNA sense strand
aggcauggcaggagauaau

SEQ ID NO: 2325064 - RNA, 19 nt, Homo sapiens
  misc_RNA (1)...(19): siRNA sense strand
aggaggaggaggaggaaga

SEQ ID NO: 2325065 - RNA, 19 nt, Homo sapiens
  misc_RNA (1)...(19): siRNA sense strand
aggaggaagaagaggaaga

SEQ ID NO: 2325066 - RNA, 19 nt, Homo sapiens
  misc_RNA (1)...(19): siRNA sense strand
caagggaaccaaagggcaa

SEQ ID NO: 2325067 - RNA, 19 nt, Homo sapiens
  misc_RNA (1)...(19): siRNA sense strand
caguaagggugaagggauc

SEQ ID NO: 2325068 - RNA, 19 nt, Homo sapiens
  misc_RNA (1)...(19): siRNA sense strand
aagaggaagaagaggaaga

SEQ ID NO: 2325069 - RNA, 19 nt, Homo sapiens
  misc_RNA (1)...(19): siRNA sense strand
aagaggaagaagaggaaga

SEQ ID NO: 2325070 - RNA, 19 nt, Homo sapiens
  misc_RNA (1)...(19): siRNA sense strand
gcgaugaggaugaggagga

SEQ ID NO: 2325071 - RNA, 19 nt, Homo sapiens
  misc_RNA (1)...(19): siRNA sense strand
agauaaaccgaaacaacaa

SEQ ID NO: 2325072 - RNA, 19 nt, Homo sapiens
  misc_RNA (1)...(19): siRNA sense strand
guguggagaaagaggaaga

SEQ ID NO: 2325073 - RNA, 19 nt, Homo sapiens
  misc_RNA (1)...(19): siRNA sense strand
cagaggaggaggaagaaga

SEQ ID NO: 2325074 - RNA, 19 nt, Homo sapiens
  misc_RNA (1)...(19): siRNA sense strand
ggaaucugaaggcgggaaa

SEQ ID NO: 2325075 - RNA, 19 nt, Homo sapiens
  misc_RNA (1)...(19): siRNA sense strand
caggaauguuggugugcau

SEQ ID NO: 2325076 - RNA, 19 nt, Homo sapiens
  misc_RNA (1)...(19): siRNA sense strand
ugguauacccagauggaga

SEQ ID NO: 2325077 - RNA, 19 nt, Homo sapiens
  misc_RNA (1)...(19): siRNA sense strand
agggaguggaggaggaaga

SEQ ID NO: 2325078 - RNA, 19 nt, Homo sapiens
  misc_RNA (1)...(19): siRNA sense strand
aggaggaggaggaagaaga

SEQ ID NO: 2325079 - RNA, 19 nt, Homo sapiens
  misc_RNA (1)...(19): siRNA sense strand
aaaccaacccgcugaggaa

SEQ ID NO: 2325080 - RNA, 19 nt, Homo sapiens
  misc_RNA (1)...(19): siRNA sense strand
ggagaagagcaaugagaag

SEQ ID NO: 2325081 - RNA, 19 nt, Homo sapiens
  misc_RNA (1)...(19): siRNA sense strand
gaguggaggaggaagauga

SEQ ID NO: 2325082 - RNA, 19 nt, Homo sapiens
  misc_RNA (1)...(19): siRNA sense strand
gguuuaauauguuggaucu

SEQ ID NO: 2325083 - RNA, 19 nt, Homo sapiens
  misc_RNA (1)...(19): siRNA sense strand
gcaugcagauguucggcaa

SEQ ID NO: 2325084 - RNA, 19 nt, Homo sapiens
  misc_RNA (1)...(19): siRNA sense strand
aagaagaggaagaagagga

SEQ ID NO: 2325085 - RNA, 19 nt, Homo sapiens
  misc_RNA (1)...(19): siRNA sense strand
aagaagaggaagaagagga

SEQ ID NO: 2325086 - RNA, 19 nt, Homo sapiens
  misc_RNA (1)...(19): siRNA sense strand
uggcugugaucauggacaa

SEQ ID NO: 2325087 - RNA, 19 nt, Homo sapiens
  misc_RNA (1)...(19): siRNA sense strand
gaucaaaacagaagggaac

SEQ ID NO: 2325088 - RNA, 19 nt, Homo sapiens
  misc_RNA (1)...(19): siRNA sense strand
acaagcaagaugaggauga

SEQ ID NO: 2325089 - RNA, 19 nt, Homo sapiens
  misc_RNA (1)...(19): siRNA sense strand
cucacagagcucagagaua

SEQ ID NO: 2325090 - RNA, 19 nt, Homo sapiens
  misc_RNA (1)...(19): siRNA sense strand
aggaggaggaggaggagga

SEQ ID NO: 2325091 - RNA, 19 nt, Homo sapiens
  misc_RNA (1)...(19): siRNA sense strand
gaugaaaaggacuuggaaa

SEQ ID NO: 2325092 - RNA, 19 nt, Homo sapiens
  misc_RNA (1)...(19): siRNA sense strand
aagaugaggaugaggaagu

SEQ ID NO: 2325093 - RNA, 19 nt, Homo sapiens
  misc_RNA (1)...(19): siRNA sense strand
gcucagagauacauggaug

SEQ ID NO: 2325094 - RNA, 19 nt, Homo sapiens
  misc_RNA (1)...(19): siRNA sense strand
aggagggaguggaggagga

SEQ ID NO: 2325095 - RNA, 19 nt, Homo sapiens
  misc_RNA (1)...(19): siRNA sense strand
augaggaggacuugggaga

SEQ ID NO: 2325096 - RNA, 19 nt, Homo sapiens
  misc_RNA (1)...(19): siRNA sense strand
acauggaagcggaggagga

SEQ ID NO: 2325097 - RNA, 19 nt, Homo sapiens
  misc_RNA (1)...(19): siRNA sense strand
ggaagaagaggaagagggu

SEQ ID NO: 2325098 - RNA, 19 nt, Homo sapiens
  misc_RNA (1)...(19): siRNA sense strand
cggcccuggugaagaguuu

SEQ ID NO: 2325099 - RNA, 19 nt, Homo sapiens
  misc_RNA (1)...(19): siRNA sense strand
gcgucaauguguggaauau

SEQ ID NO: 2325100 - RNA, 19 nt, Homo sapiens
  misc_RNA (1)...(19): siRNA sense strand
ugacagagacccaaggcga

SEQ ID NO: 2325101 - RNA, 19 nt, Homo sapiens
  misc_RNA (1)...(19): siRNA sense strand
uggaggaggaggaggagga

SEQ ID NO: 2325102 - RNA, 19 nt, Homo sapiens
  misc_RNA (1)...(19): siRNA sense strand
ugaacaucuucgugggcuu

SEQ ID NO: 2325103 - RNA, 19 nt, Homo sapiens
  misc_RNA (1)...(19): siRNA sense strand
ccucuuugcucgagaccca

SEQ ID NO: 2325104 - RNA, 19 nt, Homo sapiens
  misc_RNA (1)...(19): siRNA sense strand
gugaaggcauugagggcgu

SEQ ID NO: 2325105 - RNA, 19 nt, Homo sapiens
  misc_RNA (1)...(19): siRNA sense strand
acauggaggaggaggagga

SEQ ID NO: 2325106 - RNA, 19 nt, Homo sapiens
  misc_RNA (1)...(19): siRNA sense strand
cuacuaaagaugacagugu

SEQ ID NO: 2325107 - RNA, 19 nt, Homo sapiens
  misc_RNA (1)...(19): siRNA sense strand
uggaggaggaagaugaaaa

SEQ ID NO: 2325108 - RNA, 19 nt, Homo sapiens
  misc_RNA (1)...(19): siRNA sense strand
agagauacauggaugggca

SEQ ID NO: 2325109 - RNA, 19 nt, Homo sapiens
  misc_RNA (1)...(19): siRNA sense strand
ggguguacuuugugagccu

SEQ ID NO: 2325110 - RNA, 19 nt, Homo sapiens
  misc_RNA (1)...(19): siRNA sense strand
caaccuggccaguggagau

SEQ ID NO: 2325111 - RNA, 19 nt, Homo sapiens
  misc_RNA (1)...(19): siRNA sense strand
cagacauggaggaggagga

SEQ ID NO: 2325112 - RNA, 19 nt, Homo sapiens
  misc_RNA (1)...(19): siRNA sense strand
aggauggcacacagauaaa

SEQ ID NO: 2325113 - RNA, 19 nt, Homo sapiens
  misc_RNA (1)...(19): siRNA sense strand
acaacaacuuccagaccuu

SEQ ID NO: 2325114 - RNA, 19 nt, Homo sapiens
  misc_RNA (1)...(19): siRNA sense strand
cagaugggacggugacauu

SEQ ID NO: 2325115 - RNA, 19 nt, Homo sapiens
  misc_RNA (1)...(19): siRNA sense strand
gggaaggagcagacaugga

SEQ ID NO: 2325116 - RNA, 19 nt, Homo sapiens
  misc_RNA (1)...(19): siRNA sense strand
cuguggagauucuacuaaa

SEQ ID NO: 2325117 - RNA, 19 nt, Homo sapiens
  misc_RNA (1)...(19): siRNA sense strand
acuaaagaugacaguguuu

SEQ ID NO: 2325118 - RNA, 19 nt, Homo sapiens
  misc_RNA (1)...(19): siRNA sense strand
gcuucgaugaggaggacuu

SEQ ID NO: 2325119 - RNA, 19 nt, Homo sapiens
  misc_RNA (1)...(19): siRNA sense strand
ggagaaagaggaagaggag

SEQ ID NO: 2325120 - RNA, 19 nt, Homo sapiens
  misc_RNA (1)...(19): siRNA sense strand
aggagaaggugguacccau

SEQ ID NO: 2325121 - RNA, 19 nt, Homo sapiens
  misc_RNA (1)...(19): siRNA sense strand
aggaggucaccgugggcaa

SEQ ID NO: 2325122 - RNA, 19 nt, Homo sapiens
  misc_RNA (1)...(19): siRNA sense strand
gggcaaauucuacgccaca

SEQ ID NO: 2325123 - RNA, 19 nt, Homo sapiens
  misc_RNA (1)...(19): siRNA sense strand
uggagaaagaggaagagga

SEQ ID NO: 2325124 - RNA, 19 nt, Homo sapiens
  misc_RNA (1)...(19): siRNA sense strand
ucaggauggcacacagaua

SEQ ID NO: 2325125 - RNA, 19 nt, Homo sapiens
  misc_RNA (1)...(19): siRNA sense strand
ccaauagggcucaggguuc

SEQ ID NO: 2325126 - RNA, 19 nt, Homo sapiens
  misc_RNA (1)...(19): siRNA sense strand
cgcuguuguugguggaaga

SEQ ID NO: 2325127 - RNA, 19 nt, Homo sapiens
  misc_RNA (1)...(19): siRNA sense strand
ugcucaagaucguggccua

SEQ ID NO: 2325128 - RNA, 19 nt, Homo sapiens
  misc_RNA (1)...(19): siRNA sense strand
caggaaagaagaugggcaa

SEQ ID NO: 2325129 - RNA, 19 nt, Homo sapiens
  misc_RNA (1)...(19): siRNA sense strand
ucuuagaagccgugaggua

SEQ ID NO: 2325130 - RNA, 19 nt, Homo sapiens
  misc_RNA (1)...(19): siRNA sense strand
guaccaacugucagggaaa

SEQ ID NO: 2325131 - RNA, 19 nt, Homo sapiens
  misc_RNA (1)...(19): siRNA sense strand
ccugagaagcauaaagauu

SEQ ID NO: 2325132 - RNA, 19 nt, Homo sapiens
  misc_RNA (1)...(19): siRNA sense strand
ggggaaaccuaaagggcuu

SEQ ID NO: 2325133 - RNA, 19 nt, Homo sapiens
  misc_RNA (1)...(19): siRNA sense strand
agguauggcuguaugaaca

SEQ ID NO: 2325134 - RNA, 19 nt, Homo sapiens
  misc_RNA (1)...(19): siRNA sense strand
gcagcuuaaaguugauaaa

SEQ ID NO: 2325135 - RNA, 19 nt, Homo sapiens
  misc_RNA (1)...(19): siRNA sense strand
gugugugugugaugagaau

SEQ ID NO: 2325136 - RNA, 19 nt, Homo sapiens
  misc_RNA (1)...(19): siRNA sense strand
gccaaugagcccugcacaa

SEQ ID NO: 2325137 - RNA, 19 nt, Homo sapiens
  misc_RNA (1)...(19): siRNA sense strand
ggaccuaucagauuggcua

SEQ ID NO: 2325138 - RNA, 19 nt, Homo sapiens
  misc_RNA (1)...(19): siRNA sense strand
cauguaagguagaggaggu

SEQ ID NO: 2325139 - RNA, 19 nt, Homo sapiens
  misc_RNA (1)...(19): siRNA sense strand
aggucaaagcucagauuca

SEQ ID NO: 2325140 - RNA, 19 nt, Homo sapiens
  misc_RNA (1)...(19): siRNA sense strand
cguuauugggccaguucaa

SEQ ID NO: 2325141 - RNA, 19 nt, Homo sapiens
  misc_RNA (1)...(19): siRNA sense strand
gcgaauggcuccuuggaag

SEQ ID NO: 2325142 - RNA, 19 nt, Homo sapiens
  misc_RNA (1)...(19): siRNA sense strand
uuaaagauaacuugcgaga

SEQ ID NO: 2325143 - RNA, 19 nt, Homo sapiens
  misc_RNA (1)...(19): siRNA sense strand
gaggaggugugcagagcca

SEQ ID NO: 2325144 - RNA, 19 nt, Homo sapiens
  misc_RNA (1)...(19): siRNA sense strand
ugaagacagagcuggcaaa

SEQ ID NO: 2325145 - RNA, 19 nt, Homo sapiens
  misc_RNA (1)...(19): siRNA sense strand
ugaugagaauugugagaag

SEQ ID NO: 2325146 - RNA, 19 nt, Homo sapiens
  misc_RNA (1)...(19): siRNA sense strand
ucuccaugccagagcagaa

SEQ ID NO: 2325147 - RNA, 19 nt, Homo sapiens
  misc_RNA (1)...(19): siRNA sense strand
ugagaauggcagucgugaa

SEQ ID NO: 2325148 - RNA, 19 nt, Homo sapiens
  misc_RNA (1)...(19): siRNA sense strand
augaauacuuccugguguu

SEQ ID NO: 2325149 - RNA, 19 nt, Homo sapiens
  misc_RNA (1)...(19): siRNA sense strand
aguccuauaaugugaauga

SEQ ID NO: 2325150 - RNA, 19 nt, Homo sapiens
  misc_RNA (1)...(19): siRNA sense strand
ucgugaaaccagugagaag

SEQ ID NO: 2325151 - RNA, 19 nt, Homo sapiens
  misc_RNA (1)...(19): siRNA sense strand
auaacuugcgagaggucaa

SEQ ID NO: 2325152 - RNA, 19 nt, Homo sapiens
  misc_RNA (1)...(19): siRNA sense strand
ccuuccaagucauaaagaa

SEQ ID NO: 2325153 - RNA, 19 nt, Homo sapiens
  misc_RNA (1)...(19): siRNA sense strand
uugcagaguguguguguga

SEQ ID NO: 2325154 - RNA, 19 nt, Homo sapiens
  misc_RNA (1)...(19): siRNA sense strand
cugugugccuggagagacu

SEQ ID NO: 2325155 - RNA, 19 nt, Homo sapiens
  misc_RNA (1)...(19): siRNA sense strand
ccaggaaagaagaugggca

SEQ ID NO: 2325156 - RNA, 19 nt, Homo sapiens
  misc_RNA (1)...(19): siRNA sense strand
ggagcuugcuauuggugga

SEQ ID NO: 2325157 - RNA, 19 nt, Homo sapiens
  misc_RNA (1)...(19): siRNA sense strand
ggaggugugcagagccaau

SEQ ID NO: 2325158 - RNA, 19 nt, Homo sapiens
  misc_RNA (1)...(19): siRNA sense strand
ugugaugagaauugugaga

SEQ ID NO: 2325159 - RNA, 19 nt, Homo sapiens
  misc_RNA (1)...(19): siRNA sense strand
cugaagacagagcuggcaa

SEQ ID NO: 2325160 - RNA, 19 nt, Homo sapiens
  misc_RNA (1)...(19): siRNA sense strand
agauugaaaaccugggcaa

SEQ ID NO: 2325161 - RNA, 19 nt, Homo sapiens
  misc_RNA (1)...(19): siRNA sense strand
cucuacaggaggaacauaa

SEQ ID NO: 2325162 - RNA, 19 nt, Homo sapiens
  misc_RNA (1)...(19): siRNA sense strand
gaaacugagccguggccua

SEQ ID NO: 2325163 - RNA, 19 nt, Homo sapiens
  misc_RNA (1)...(19): siRNA sense strand
gcuucgacucagaggacua

SEQ ID NO: 2325164 - RNA, 19 nt, Homo sapiens
  misc_RNA (1)...(19): siRNA sense strand
cuucauuagcuaugguauu

SEQ ID NO: 2325165 - RNA, 19 nt, Homo sapiens
  misc_RNA (1)...(19): siRNA sense strand
uagcuaugguauugagcau

SEQ ID NO: 2325166 - RNA, 19 nt, Homo sapiens
  misc_RNA (1)...(19): siRNA sense strand
cuacacaggcaguggacca

SEQ ID NO: 2325167 - RNA, 19 nt, Homo sapiens
  misc_RNA (1)...(19): siRNA sense strand
ggagauggggaaagaggaa

SEQ ID NO: 2325168 - RNA, 19 nt, Homo sapiens
  misc_RNA (1)...(19): siRNA sense strand
agauggggaaagaggaaaa

SEQ ID NO: 2325169 - RNA, 19 nt, Homo sapiens
  misc_RNA (1)...(19): siRNA sense strand
ccacaagacagcggggaaa

SEQ ID NO: 2325170 - RNA, 19 nt, Homo sapiens
  misc_RNA (1)...(19): siRNA sense strand
acgccaugcuggacgucaa

SEQ ID NO: 2325171 - RNA, 19 nt, Homo sapiens
  misc_RNA (1)...(19): siRNA sense strand
agaaagaggaugugaaacc

SEQ ID NO: 2325172 - RNA, 19 nt, Homo sapiens
  misc_RNA (1)...(19): siRNA sense strand
cuaaagaacagcaacgacu

SEQ ID NO: 2325173 - RNA, 19 nt, Homo sapiens
  misc_RNA (1)...(19): siRNA sense strand
gacaggagauggcugggaa

SEQ ID NO: 2325174 - RNA, 19 nt, Homo sapiens
  misc_RNA (1)...(19): siRNA sense strand
auucaaacuuucugaccca

SEQ ID NO: 2325175 - RNA, 19 nt, Homo sapiens
  misc_RNA (1)...(19): siRNA sense strand
gcagaugucccacuauuaa

SEQ ID NO: 2325176 - RNA, 19 nt, Homo sapiens
  misc_RNA (1)...(19): siRNA sense strand
ggugaugugggcugugaau

SEQ ID NO: 2325177 - RNA, 19 nt, Homo sapiens
  misc_RNA (1)...(19): siRNA sense strand
gugcaaagacuguggacaa

SEQ ID NO: 2325178 - RNA, 19 nt, Homo sapiens
  misc_RNA (1)...(19): siRNA sense strand
gaguagagccagugggaca

SEQ ID NO: 2325179 - RNA, 19 nt, Homo sapiens
  misc_RNA (1)...(19): siRNA sense strand
gagaaauacuugaggccuu

SEQ ID NO: 2325180 - RNA, 19 nt, Homo sapiens
  misc_RNA (1)...(19): siRNA sense strand
ggaauguggaggagagaau

SEQ ID NO: 2325181 - RNA, 19 nt, Homo sapiens
  misc_RNA (1)...(19): siRNA sense strand
ccuaaagaaacaugagaau

SEQ ID NO: 2325182 - RNA, 19 nt, Homo sapiens
  misc_RNA (1)...(19): siRNA sense strand
agagaggcccuuugagaaa

SEQ ID NO: 2325183 - RNA, 19 nt, Homo sapiens
  misc_RNA (1)...(19): siRNA sense strand
gguaaaauguucaaagaca

SEQ ID NO: 2325184 - RNA, 19 nt, Homo sapiens
  misc_RNA (1)...(19): siRNA sense strand
ggaagggaaaggagcgcua

SEQ ID NO: 2325185 - RNA, 19 nt, Homo sapiens
  misc_RNA (1)...(19): siRNA sense strand
aaggaaacccggaggauga

SEQ ID NO: 2325186 - RNA, 19 nt, Homo sapiens
  misc_RNA (1)...(19): siRNA sense strand
guguaaggaaugugaccaa

SEQ ID NO: 2325187 - RNA, 19 nt, Homo sapiens
  misc_RNA (1)...(19): siRNA sense strand
aguccaaaucgcaggcaua

SEQ ID NO: 2325188 - RNA, 19 nt, Homo sapiens
  misc_RNA (1)...(19): siRNA sense strand
ugcaaagccuggagaaaca

SEQ ID NO: 2325189 - RNA, 19 nt, Homo sapiens
  misc_RNA (1)...(19): siRNA sense strand
aaguaaagaaacugcagaa

SEQ ID NO: 2325190 - RNA, 19 nt, Homo sapiens
  misc_RNA (1)...(19): siRNA sense strand
uguuagaugaggaggauga

SEQ ID NO: 2325191 - RNA, 19 nt, Homo sapiens
  misc_RNA (1)...(19): siRNA sense strand
ugucaggagcugugaauga

SEQ ID NO: 2325192 - RNA, 19 nt, Homo sapiens
  misc_RNA (1)...(19): siRNA sense strand
ugaggaaaauggaagauaa

SEQ ID NO: 2325193 - RNA, 19 nt, Homo sapiens
  misc_RNA (1)...(19): siRNA sense strand
acaauaaagagaagccauu

SEQ ID NO: 2325194 - RNA, 19 nt, Homo sapiens
  misc_RNA (1)...(19): siRNA sense strand
ggaaaauggaagauaauca

SEQ ID NO: 2325195 - RNA, 19 nt, Homo sapiens
  misc_RNA (1)...(19): siRNA sense strand
cugaagagagggaauacaa

SEQ ID NO: 2325196 - RNA, 19 nt, Homo sapiens
  misc_RNA (1)...(19): siRNA sense strand
aggaaaggaaccagugaca

SEQ ID NO: 2325197 - RNA, 19 nt, Homo sapiens
  misc_RNA (1)...(19): siRNA sense strand
acacaggagagcagccuua

SEQ ID NO: 2325198 - RNA, 19 nt, Homo sapiens
  misc_RNA (1)...(19): siRNA sense strand
gugcgauucuggaugacaa

SEQ ID NO: 2325199 - RNA, 19 nt, Homo sapiens
  misc_RNA (1)...(19): siRNA sense strand
cauacugaagagagggaau

SEQ ID NO: 2325200 - RNA, 19 nt, Homo sapiens
  misc_RNA (1)...(19): siRNA sense strand
aaaccaauuuagacagaca

SEQ ID NO: 2325201 - RNA, 19 nt, Homo sapiens
  misc_RNA (1)...(19): siRNA sense strand
agugagguauaaagaggaa

SEQ ID NO: 2325202 - RNA, 19 nt, Homo sapiens
  misc_RNA (1)...(19): siRNA sense strand
cuggaaagugacauugaaa

SEQ ID NO: 2325203 - RNA, 19 nt, Homo sapiens
  misc_RNA (1)...(19): siRNA sense strand
aguaugggcaguaggagua

SEQ ID NO: 2325204 - RNA, 19 nt, Homo sapiens
  misc_RNA (1)...(19): siRNA sense strand
uugaaaacauggcagaaaa

SEQ ID NO: 2325205 - RNA, 19 nt, Homo sapiens
  misc_RNA (1)...(19): siRNA sense strand
auucagacuugcuggauga

SEQ ID NO: 2325206 - RNA, 19 nt, Homo sapiens
  misc_RNA (1)...(19): siRNA sense strand
aggaugaagacuaugauau

SEQ ID NO: 2325207 - RNA, 19 nt, Homo sapiens
  misc_RNA (1)...(19): siRNA sense strand
caggugaaguaaagaaacu

SEQ ID NO: 2325208 - RNA, 19 nt, Homo sapiens
  misc_RNA (1)...(19): siRNA sense strand
augacaaagaagaugcuua

SEQ ID NO: 2325209 - RNA, 19 nt, Homo sapiens
  misc_RNA (1)...(19): siRNA sense strand
augaggaggaugaagacua

SEQ ID NO: 2325210 - RNA, 19 nt, Homo sapiens
  misc_RNA (1)...(19): siRNA sense strand
ugaugaagaaguugaagau

SEQ ID NO: 2325211 - RNA, 19 nt, Homo sapiens
  misc_RNA (1)...(19): siRNA sense strand
ggcaguaggaguagagcca

SEQ ID NO: 2325212 - RNA, 19 nt, Homo sapiens
  misc_RNA (1)...(19): siRNA sense strand
gaggaaaauggaagauaau

SEQ ID NO: 2325213 - RNA, 19 nt, Homo sapiens
  misc_RNA (1)...(19): siRNA sense strand
cagacaaacaaaagucaaa

SEQ ID NO: 2325214 - RNA, 19 nt, Homo sapiens
  misc_RNA (1)...(19): siRNA sense strand
ccucagauacugccagcua

SEQ ID NO: 2325215 - RNA, 19 nt, Homo sapiens
  misc_RNA (1)...(19): siRNA sense strand
caguaggaguagagccagu

SEQ ID NO: 2325216 - RNA, 19 nt, Homo sapiens
  misc_RNA (1)...(19): siRNA sense strand
ggaugaugaagaaguugaa

SEQ ID NO: 2325217 - RNA, 19 nt, Homo sapiens
  misc_RNA (1)...(19): siRNA sense strand
ugcaaagacuguggacaaa

SEQ ID NO: 2325218 - RNA, 19 nt, Homo sapiens
  misc_RNA (1)...(19): siRNA sense strand
agaacuuggaugucagcua

SEQ ID NO: 2325219 - RNA, 19 nt, Homo sapiens
  misc_RNA (1)...(19): siRNA sense strand
cagccaaucucccaggaau

SEQ ID NO: 2325220 - RNA, 19 nt, Homo sapiens
  misc_RNA (1)...(19): siRNA sense strand
aagaaagaauacagcaauc

SEQ ID NO: 2325221 - RNA, 19 nt, Homo sapiens
  misc_RNA (1)...(19): siRNA sense strand
aggcugaacuagcagauca

SEQ ID NO: 2325222 - RNA, 19 nt, Homo sapiens
  misc_RNA (1)...(19): siRNA sense strand
ccacguguuuggcggaaaa

SEQ ID NO: 2325223 - RNA, 19 nt, Homo sapiens
  misc_RNA (1)...(19): siRNA sense strand
gcugauugcagaacccaaa

SEQ ID NO: 2325224 - RNA, 19 nt, Homo sapiens
  misc_RNA (1)...(19): siRNA sense strand
gaguagugaccuugaugau

SEQ ID NO: 2325225 - RNA, 19 nt, Homo sapiens
  misc_RNA (1)...(19): siRNA sense strand
cagaguagagaaaagaaaa

SEQ ID NO: 2325226 - RNA, 19 nt, Homo sapiens
  misc_RNA (1)...(19): siRNA sense strand
agaaacaugagaaugggaa

SEQ ID NO: 2325227 - RNA, 19 nt, Homo sapiens
  misc_RNA (1)...(19): siRNA sense strand
uagaugaggaggaugaaga

SEQ ID NO: 2325228 - RNA, 19 nt, Homo sapiens
  misc_RNA (1)...(19): siRNA sense strand
cggaggaugacuaugaaga

SEQ ID NO: 2325229 - RNA, 19 nt, Homo sapiens
  misc_RNA (1)...(19): siRNA sense strand
ugagguauaaagaggaaga

SEQ ID NO: 2325230 - RNA, 19 nt, Homo sapiens
  misc_RNA (1)...(19): siRNA sense strand
aagaggacuuucagcaaaa

SEQ ID NO: 2325231 - RNA, 19 nt, Homo sapiens
  misc_RNA (1)...(19): siRNA sense strand
ucaaacaacacaagcacau

SEQ ID NO: 2325232 - RNA, 19 nt, Homo sapiens
  misc_RNA (1)...(19): siRNA sense strand
acaauaagccaguggagcu

SEQ ID NO: 2325233 - RNA, 19 nt, Homo sapiens
  misc_RNA (1)...(19): siRNA sense strand
gaucagugucccaaggcau

SEQ ID NO: 2325234 - RNA, 19 nt, Homo sapiens
  misc_RNA (1)...(19): siRNA sense strand
aguaagcccucuucagaau

SEQ ID NO: 2325235 - RNA, 19 nt, Homo sapiens
  misc_RNA (1)...(19): siRNA sense strand
gcacauucgcucucagcau

SEQ ID NO: 2325236 - RNA, 19 nt, Homo sapiens
  misc_RNA (1)...(19): siRNA sense strand
cgcuauaccugcagauacu

SEQ ID NO: 2325237 - RNA, 19 nt, Homo sapiens
  misc_RNA (1)...(19): siRNA sense strand
gauccaggaguguaaggaa

SEQ ID NO: 2325238 - RNA, 19 nt, Homo sapiens
  misc_RNA (1)...(19): siRNA sense strand
ccgacaaguccaagagcuu

SEQ ID NO: 2325239 - RNA, 19 nt, Homo sapiens
  misc_RNA (1)...(19): siRNA sense strand
acagcauccuggcgggaaa

SEQ ID NO: 2325240 - RNA, 19 nt, Homo sapiens
  misc_RNA (1)...(19): siRNA sense strand
cgaacgaggacgcugguga

SEQ ID NO: 2325241 - RNA, 19 nt, Homo sapiens
  misc_RNA (1)...(19): siRNA sense strand
gcuucagcauagacagcau

SEQ ID NO: 2325242 - RNA, 19 nt, Homo sapiens
  misc_RNA (1)...(19): siRNA sense strand
cacaagaaguggagggcga

SEQ ID NO: 2325243 - RNA, 19 nt, Homo sapiens
  misc_RNA (1)...(19): siRNA sense strand
gcauggaggagaagcgcaa

SEQ ID NO: 2325244 - RNA, 19 nt, Homo sapiens
  misc_RNA (1)...(19): siRNA sense strand
agaagaaggaggaagcaga

SEQ ID NO: 2325245 - RNA, 19 nt, Homo sapiens
  misc_RNA (1)...(19): siRNA sense strand
ccgaggugggagagaagaa

SEQ ID NO: 2325246 - RNA, 19 nt, Homo sapiens
  misc_RNA (1)...(19): siRNA sense strand
gaguggauaaggaggguga

SEQ ID NO: 2325247 - RNA, 19 nt, Homo sapiens
  misc_RNA (1)...(19): siRNA sense strand
guggauaaggagggugaaa

SEQ ID NO: 2325248 - RNA, 19 nt, Homo sapiens
  misc_RNA (1)...(19): siRNA sense strand
aauccgacuucgugugcaa

SEQ ID NO: 2325249 - RNA, 19 nt, Homo sapiens
  misc_RNA (1)...(19): siRNA sense strand
ucuuggaggaggugaauga

SEQ ID NO: 2325250 - RNA, 19 nt, Homo sapiens
  misc_RNA (1)...(19): siRNA sense strand
ggaacaucuuggaggaggu

SEQ ID NO: 2325251 - RNA, 19 nt, Homo sapiens
  misc_RNA (1)...(19): siRNA sense strand
acaucuuggaggaggugaa

SEQ ID NO: 2325252 - RNA, 19 nt, Homo sapiens
  misc_RNA (1)...(19): siRNA sense strand
gagagaagaaggaggaagc

SEQ ID NO: 2325253 - RNA, 19 nt, Homo sapiens
  misc_RNA (1)...(19): siRNA sense strand
gaggaagcagagaggcuga

SEQ ID NO: 2325254 - RNA, 19 nt, Homo sapiens
  misc_RNA (1)...(19): siRNA sense strand
ugggagagaagaaggagga

SEQ ID NO: 2325255 - RNA, 19 nt, Homo sapiens
  misc_RNA (1)...(19): siRNA sense strand
aggaggaagcagagaggcu

SEQ ID NO: 2325256 - RNA, 19 nt, Homo sapiens
  misc_RNA (1)...(19): siRNA sense strand
gaagaggccuguagagcag

SEQ ID NO: 2325257 - RNA, 19 nt, Homo sapiens
  misc_RNA (1)...(19): siRNA sense strand
agaucuuccuggagagaaa

SEQ ID NO: 2325258 - RNA, 19 nt, Homo sapiens
  misc_RNA (1)...(19): siRNA sense strand
guucaagagaguuuagaaa

SEQ ID NO: 2325259 - RNA, 19 nt, Homo sapiens
  misc_RNA (1)...(19): siRNA sense strand
ucaagagaguuuagaaaga

SEQ ID NO: 2325260 - RNA, 19 nt, Homo sapiens
  misc_RNA (1)...(19): siRNA sense strand
aggaaugacaccaggguuu

SEQ ID NO: 2325261 - RNA, 19 nt, Homo sapiens
  misc_RNA (1)...(19): siRNA sense strand
ucaagaugguggagggcuu

SEQ ID NO: 2325262 - RNA, 19 nt, Homo sapiens
  misc_RNA (1)...(19): siRNA sense strand
ccagcaucguggaggacaa

SEQ ID NO: 2325263 - RNA, 19 nt, Homo sapiens
  misc_RNA (1)...(19): siRNA sense strand
aggacaagcugguggagga

SEQ ID NO: 2325264 - RNA, 19 nt, Homo sapiens
  misc_RNA (1)...(19): siRNA sense strand
gcgaggagcagaagcggaa

SEQ ID NO: 2325265 - RNA, 19 nt, Homo sapiens
  misc_RNA (1)...(19): siRNA sense strand
gggaggucaucgaaggcua

SEQ ID NO: 2325266 - RNA, 19 nt, Homo sapiens
  misc_RNA (1)...(19): siRNA sense strand
gggagagcgaggagcagaa

SEQ ID NO: 2325267 - RNA, 19 nt, Homo sapiens
  misc_RNA (1)...(19): siRNA sense strand
cuuuauugguccuggcauu

SEQ ID NO: 2325268 - RNA, 19 nt, Homo sapiens
  misc_RNA (1)...(19): siRNA sense strand
gagucaaagccaagaucau

SEQ ID NO: 2325269 - RNA, 19 nt, Homo sapiens
  misc_RNA (1)...(19): siRNA sense strand
uggaaagcaugguggaacu

SEQ ID NO: 2325270 - RNA, 19 nt, Homo sapiens
  misc_RNA (1)...(19): siRNA sense strand
acccaaaggaacuggaaga

SEQ ID NO: 2325271 - RNA, 19 nt, Homo sapiens
  misc_RNA (1)...(19): siRNA sense strand
cauuuguuguucagggauu

SEQ ID NO: 2325272 - RNA, 19 nt, Homo sapiens
  misc_RNA (1)...(19): siRNA sense strand
ugaugggaguauauggaau

SEQ ID NO: 2325273 - RNA, 19 nt, Homo sapiens
  misc_RNA (1)...(19): siRNA sense strand
gcuucuuacaugagcauuu

SEQ ID NO: 2325274 - RNA, 19 nt, Homo sapiens
  misc_RNA (1)...(19): siRNA sense strand
ugguauugacccaaaggaa

SEQ ID NO: 2325275 - RNA, 19 nt, Homo sapiens
  misc_RNA (1)...(19): siRNA sense strand
guguuaagaucaaucccaa

SEQ ID NO: 2325276 - RNA, 19 nt, Homo sapiens
  misc_RNA (1)...(19): siRNA sense strand
caagagaguuuagaaagaa

SEQ ID NO: 2325277 - RNA, 19 nt, Homo sapiens
  misc_RNA (1)...(19): siRNA sense strand
ugaguguagaugaaguaaa

SEQ ID NO: 2325278 - RNA, 19 nt, Homo sapiens
  misc_RNA (1)...(19): siRNA sense strand
agaaagacaucgugcacuc

SEQ ID NO: 2325279 - RNA, 19 nt, Homo sapiens
  misc_RNA (1)...(19): siRNA sense strand
accaggguuuggagauaaa

SEQ ID NO: 2325280 - RNA, 19 nt, Homo sapiens
  misc_RNA (1)...(19): siRNA sense strand
cggcagaguuccaagacag

SEQ ID NO: 2325281 - RNA, 19 nt, Homo sapiens
  misc_RNA (1)...(19): siRNA sense strand
ugguaaacccaucagccaa

SEQ ID NO: 2325282 - RNA, 19 nt, Homo sapiens
  misc_RNA (1)...(19): siRNA sense strand
guauugacccaaaggaacu

SEQ ID NO: 2325283 - RNA, 19 nt, Homo sapiens
  misc_RNA (1)...(19): siRNA sense strand
augaaagggauucuaacua

SEQ ID NO: 2325284 - RNA, 19 nt, Homo sapiens
  misc_RNA (1)...(19): siRNA sense strand
cuacacucuaugagauauu

SEQ ID NO: 2325285 - RNA, 19 nt, Homo sapiens
  misc_RNA (1)...(19): siRNA sense strand
ugucuguucaagagaguuu

SEQ ID NO: 2325286 - RNA, 19 nt, Homo sapiens
  misc_RNA (1)...(19): siRNA sense strand
caaugaagcuggugugacc

SEQ ID NO: 2325287 - RNA, 19 nt, Homo sapiens
  misc_RNA (1)...(19): siRNA sense strand
ugugaguguagaugaagua

SEQ ID NO: 2325288 - RNA, 19 nt, Homo sapiens
  misc_RNA (1)...(19): siRNA sense strand
gagucugaugggaguauau

SEQ ID NO: 2325289 - RNA, 19 nt, Homo sapiens
  misc_RNA (1)...(19): siRNA sense strand
gacaagaucuuccuggaga

SEQ ID NO: 2325290 - RNA, 19 nt, Homo sapiens
  misc_RNA (1)...(19): siRNA sense strand
cuacuugaaugcuggagga

SEQ ID NO: 2325291 - RNA, 19 nt, Homo sapiens
  misc_RNA (1)...(19): siRNA sense strand
acuuugaguggcugaagaa

SEQ ID NO: 2325292 - RNA, 19 nt, Homo sapiens
  misc_RNA (1)...(19): siRNA sense strand
ccggagaagacgugaaaca

SEQ ID NO: 2325293 - RNA, 19 nt, Homo sapiens
  misc_RNA (1)...(19): siRNA sense strand
agagaaaggcugacgccaa

SEQ ID NO: 2325294 - RNA, 19 nt, Homo sapiens
  misc_RNA (1)...(19): siRNA sense strand
gaauauggugauaaggaga

SEQ ID NO: 2325295 - RNA, 19 nt, Homo sapiens
  misc_RNA (1)...(19): siRNA sense strand
gggcuggagaaucaggaaa

SEQ ID NO: 2325296 - RNA, 19 nt, Homo sapiens
  misc_RNA (1)...(19): siRNA sense strand
auggugauaaggagagaaa

SEQ ID NO: 2325297 - RNA, 19 nt, Homo sapiens
  misc_RNA (1)...(19): siRNA sense strand
ccauggacacuuugggcau

SEQ ID NO: 2325298 - RNA, 19 nt, Homo sapiens
  misc_RNA (1)...(19): siRNA sense strand
ggcuggagaaucaggaaaa

SEQ ID NO: 2325299 - RNA, 19 nt, Homo sapiens
  misc_RNA (1)...(19): siRNA sense strand
ccauugugaagcagaugaa

SEQ ID NO: 2325300 - RNA, 19 nt, Homo sapiens
  misc_RNA (1)...(19): siRNA sense strand
caggaauccaagagugcuu

SEQ ID NO: 2325301 - RNA, 19 nt, Homo sapiens
  misc_RNA (1)...(19): siRNA sense strand
uggaagacaccgagcccuu

SEQ ID NO: 2325302 - RNA, 19 nt, Homo sapiens
  misc_RNA (1)...(19): siRNA sense strand
gccaaauacuaccuggaca

SEQ ID NO: 2325303 - RNA, 19 nt, Homo sapiens
  misc_RNA (1)...(19): siRNA sense strand
ggugauaaggagagaaagg

SEQ ID NO: 2325304 - RNA, 19 nt, Homo sapiens
  misc_RNA (1)...(19): siRNA sense strand
ggucaaaaccacuggcauc

SEQ ID NO: 2325305 - RNA, 19 nt, Homo sapiens
  misc_RNA (1)...(19): siRNA sense strand
ccggagaagacgugaaaca

SEQ ID NO: 2325306 - RNA, 19 nt, Homo sapiens
  misc_RNA (1)...(19): siRNA sense strand
agagaaaggcugacgccaa

SEQ ID NO: 2325307 - RNA, 19 nt, Homo sapiens
  misc_RNA (1)...(19): siRNA sense strand
gaauauggugauaaggaga

SEQ ID NO: 2325308 - RNA, 19 nt, Homo sapiens
  misc_RNA (1)...(19): siRNA sense strand
gggcuggagaaucaggaaa

SEQ ID NO: 2325309 - RNA, 19 nt, Homo sapiens
  misc_RNA (1)...(19): siRNA sense strand
auggugauaaggagagaaa

SEQ ID NO: 2325310 - RNA, 19 nt, Homo sapiens
  misc_RNA (1)...(19): siRNA sense strand
ccauggacacuuugggcau

SEQ ID NO: 2325311 - RNA, 19 nt, Homo sapiens
  misc_RNA (1)...(19): siRNA sense strand
ggcuggagaaucaggaaaa

SEQ ID NO: 2325312 - RNA, 19 nt, Homo sapiens
  misc_RNA (1)...(19): siRNA sense strand
ccauugugaagcagaugaa

SEQ ID NO: 2325313 - RNA, 19 nt, Homo sapiens
  misc_RNA (1)...(19): siRNA sense strand
caggaauccaagagugcuu

SEQ ID NO: 2325314 - RNA, 19 nt, Homo sapiens
  misc_RNA (1)...(19): siRNA sense strand
uggaagacaccgagcccuu

SEQ ID NO: 2325315 - RNA, 19 nt, Homo sapiens
  misc_RNA (1)...(19): siRNA sense strand
gccaaauacuaccuggaca

SEQ ID NO: 2325316 - RNA, 19 nt, Homo sapiens
  misc_RNA (1)...(19): siRNA sense strand
ggugauaaggagagaaagg

SEQ ID NO: 2325317 - RNA, 19 nt, Homo sapiens
  misc_RNA (1)...(19): siRNA sense strand
ggucaaaaccacuggcauc

SEQ ID NO: 2325318 - RNA, 19 nt, Homo sapiens
  misc_RNA (1)...(19): siRNA sense strand
auugaggaccugacagaaa

SEQ ID NO: 2325319 - RNA, 19 nt, Homo sapiens
  misc_RNA (1)...(19): siRNA sense strand
aggacaaauugaagaugga

SEQ ID NO: 2325320 - RNA, 19 nt, Homo sapiens
  misc_RNA (1)...(19): siRNA sense strand
ugugaagaaguaagagauu

SEQ ID NO: 2325321 - RNA, 19 nt, Homo sapiens
  misc_RNA (1)...(19): siRNA sense strand
acaaauugaagauggaagu

SEQ ID NO: 2325322 - RNA, 19 nt, Homo sapiens
  misc_RNA (1)...(19): siRNA sense strand
agggcaucccagaggacaa

SEQ ID NO: 2325323 - RNA, 19 nt, Homo sapiens
  misc_RNA (1)...(19): siRNA sense strand
guugugaagaaguaagaga

SEQ ID NO: 2325324 - RNA, 19 nt, Homo sapiens
  misc_RNA (1)...(19): siRNA sense strand
aagagauuacguugaagaa

SEQ ID NO: 2325325 - RNA, 19 nt, Homo sapiens
  misc_RNA (1)...(19): siRNA sense strand
agaccaaggcagugcgcau

SEQ ID NO: 2325326 - RNA, 19 nt, Homo sapiens
  misc_RNA (1)...(19): siRNA sense strand
gcauccuggcccuggcaaa

SEQ ID NO: 2325327 - RNA, 19 nt, Homo sapiens
  misc_RNA (1)...(19): siRNA sense strand
aggagacgccacuggagaa

SEQ ID NO: 2325328 - RNA, 19 nt, Homo sapiens
  misc_RNA (1)...(19): siRNA sense strand
gagcaauguggccaggaga

SEQ ID NO: 2325329 - RNA, 19 nt, Homo sapiens
  misc_RNA (1)...(19): siRNA sense strand
gcaaagaucauguacccaa

SEQ ID NO: 2325330 - RNA, 19 nt, Homo sapiens
  misc_RNA (1)...(19): siRNA sense strand
agaggaagugagugaucaa

SEQ ID NO: 2325331 - RNA, 19 nt, Homo sapiens
  misc_RNA (1)...(19): siRNA sense strand
gauucaaauucaagccuca

SEQ ID NO: 2325332 - RNA, 19 nt, Homo sapiens
  misc_RNA (1)...(19): siRNA sense strand
gaaaaugagaagugagacu

SEQ ID NO: 2325333 - RNA, 19 nt, Homo sapiens
  misc_RNA (1)...(19): siRNA sense strand
acuauuaggacuaggagga

SEQ ID NO: 2325334 - RNA, 19 nt, Homo sapiens
  misc_RNA (1)...(19): siRNA sense strand
ucucguacuauuaggacua

SEQ ID NO: 2325335 - RNA, 19 nt, Homo sapiens
  misc_RNA (1)...(19): siRNA sense strand
uucaagaggaagugaguga

SEQ ID NO: 2325336 - RNA, 19 nt, Homo sapiens
  misc_RNA (1)...(19): siRNA sense strand
auuaggacuaggaggaauu

SEQ ID NO: 2325337 - RNA, 19 nt, Homo sapiens
  misc_RNA (1)...(19): siRNA sense strand
acaaauaaugguggugaau

SEQ ID NO: 2325338 - RNA, 19 nt, Homo sapiens
  misc_RNA (1)...(19): siRNA sense strand
cugcaagaucucuggaacu

SEQ ID NO: 2325339 - RNA, 19 nt, Homo sapiens
  misc_RNA (1)...(19): siRNA sense strand
gugagugaucaaacaacaa

SEQ ID NO: 2325340 - RNA, 19 nt, Homo sapiens
  misc_RNA (1)...(19): siRNA sense strand
ccaccugcuuugaaggcuu

SEQ ID NO: 2325341 - RNA, 19 nt, Homo sapiens
  misc_RNA (1)...(19): siRNA sense strand
cagcuauucaagaggaagu

SEQ ID NO: 2325342 - RNA, 19 nt, Homo sapiens
  misc_RNA (1)...(19): siRNA sense strand
ggugaauuaaugcuagaau

SEQ ID NO: 2325343 - RNA, 19 nt, Homo sapiens
  misc_RNA (1)...(19): siRNA sense strand
gaaaaugaucacaguacau

SEQ ID NO: 2325344 - RNA, 19 nt, Homo sapiens
  misc_RNA (1)...(19): siRNA sense strand
ggaaauggcuggaaaggca

SEQ ID NO: 2325345 - RNA, 19 nt, Homo sapiens
  misc_RNA (1)...(19): siRNA sense strand
agaauaaagaagaggaaag

SEQ ID NO: 2325346 - RNA, 19 nt, Homo sapiens
  misc_RNA (1)...(19): siRNA sense strand
ucgagaacaucguggccaa

SEQ ID NO: 2325347 - RNA, 19 nt, Homo sapiens
  misc_RNA (1)...(19): siRNA sense strand
agaaggaaguggaacccaa

SEQ ID NO: 2325348 - RNA, 19 nt, Homo sapiens
  misc_RNA (1)...(19): siRNA sense strand
cgaucaaagaaucaagaau

SEQ ID NO: 2325349 - RNA, 19 nt, Homo sapiens
  misc_RNA (1)...(19): siRNA sense strand
auuacagaguucuaggaaa

SEQ ID NO: 2325350 - RNA, 19 nt, Homo sapiens
  misc_RNA (1)...(19): siRNA sense strand
uggaagauuuacagaggga

SEQ ID NO: 2325351 - RNA, 19 nt, Homo sapiens
  misc_RNA (1)...(19): siRNA sense strand
guagauucguaguuaguuu

SEQ ID NO: 2325352 - RNA, 19 nt, Homo sapiens
  misc_RNA (1)...(19): siRNA sense strand
caaaguagauucguaguua

SEQ ID NO: 2325353 - RNA, 19 nt, Homo sapiens
  misc_RNA (1)...(19): siRNA sense strand
aggcggauuuggagagguu

SEQ ID NO: 2325354 - RNA, 19 nt, Homo sapiens
  misc_RNA (1)...(19): siRNA sense strand
ccagaaggacagaggguuc

SEQ ID NO: 2325355 - RNA, 19 nt, Homo sapiens
  misc_RNA (1)...(19): siRNA sense strand
ucaaaugggaggaggucga

SEQ ID NO: 2325356 - RNA, 19 nt, Homo sapiens
  misc_RNA (1)...(19): siRNA sense strand
ucgaggaagaguuggaaca

SEQ ID NO: 2325357 - RNA, 19 nt, Homo sapiens
  misc_RNA (1)...(19): siRNA sense strand
cuggaaaggcaacccguaa

SEQ ID NO: 2325358 - RNA, 19 nt, Homo sapiens
  misc_RNA (1)...(19): siRNA sense strand
acauuuacaaccugggcaa

SEQ ID NO: 2325359 - RNA, 19 nt, Homo sapiens
  misc_RNA (1)...(19): siRNA sense strand
aaagaagaggaaaggugaa

SEQ ID NO: 2325360 - RNA, 19 nt, Homo sapiens
  misc_RNA (1)...(19): siRNA sense strand
cagagaucccagaaggaca

SEQ ID NO: 2325361 - RNA, 19 nt, Homo sapiens
  misc_RNA (1)...(19): siRNA sense strand
agacuugaagccugagaau

SEQ ID NO: 2325362 - RNA, 19 nt, Homo sapiens
  misc_RNA (1)...(19): siRNA sense strand
gauugggacugaaggagga

SEQ ID NO: 2325363 - RNA, 19 nt, Homo sapiens
  misc_RNA (1)...(19): siRNA sense strand
gaauauucuccuugaugau

SEQ ID NO: 2325364 - RNA, 19 nt, Homo sapiens
  misc_RNA (1)...(19): siRNA sense strand
ccgaagugauuguggacug

SEQ ID NO: 2325365 - RNA, 19 nt, Homo sapiens
  misc_RNA (1)...(19): siRNA sense strand
gcucuaaaugagaaaagaa

SEQ ID NO: 2325366 - RNA, 19 nt, Homo sapiens
  misc_RNA (1)...(19): siRNA sense strand
gcaaaguagauucguaguu

SEQ ID NO: 2325367 - RNA, 19 nt, Homo sapiens
  misc_RNA (1)...(19): siRNA sense strand
gaggaauguacuagaguug

SEQ ID NO: 2325368 - RNA, 19 nt, Homo sapiens
  misc_RNA (1)...(19): siRNA sense strand
uaaagaagaggaaagguga

SEQ ID NO: 2325369 - RNA, 19 nt, Homo sapiens
  misc_RNA (1)...(19): siRNA sense strand
ccagauguugugacagaau

SEQ ID NO: 2325370 - RNA, 19 nt, Homo sapiens
  misc_RNA (1)...(19): siRNA sense strand
agaggaaaggugaagcuau

SEQ ID NO: 2325371 - RNA, 19 nt, Homo sapiens
  misc_RNA (1)...(19): siRNA sense strand
acagagacuugaagccuga

SEQ ID NO: 2325372 - RNA, 19 nt, Homo sapiens
  misc_RNA (1)...(19): siRNA sense strand
aagagaaagucaaauggga

SEQ ID NO: 2325373 - RNA, 19 nt, Homo sapiens
  misc_RNA (1)...(19): siRNA sense strand
agugcgagccacaggaaaa

SEQ ID NO: 2325374 - RNA, 19 nt, Homo sapiens
  misc_RNA (1)...(19): siRNA sense strand
gaguuggaacagucggcua

SEQ ID NO: 2325375 - RNA, 19 nt, Homo sapiens
  misc_RNA (1)...(19): siRNA sense strand
ggaccgaagugauugugga

SEQ ID NO: 2325376 - RNA, 19 nt, Homo sapiens
  misc_RNA (1)...(19): siRNA sense strand
agaauuguauacagagacu

SEQ ID NO: 2325377 - RNA, 19 nt, Homo sapiens
  misc_RNA (1)...(19): siRNA sense strand
ggacauucuccauucaaaa

SEQ ID NO: 2325378 - RNA, 19 nt, Homo sapiens
  misc_RNA (1)...(19): siRNA sense strand
ugggacugaaggaggagaa

SEQ ID NO: 2325379 - RNA, 19 nt, Homo sapiens
  misc_RNA (1)...(19): siRNA sense strand
aggugaagcuauggcucua

SEQ ID NO: 2325380 - RNA, 19 nt, Homo sapiens
  misc_RNA (1)...(19): siRNA sense strand
auuuacagagggaaagaau

SEQ ID NO: 2325381 - RNA, 19 nt, Homo sapiens
  misc_RNA (1)...(19): siRNA sense strand
ggaaauggcuggaaaggca

SEQ ID NO: 2325382 - RNA, 19 nt, Homo sapiens
  misc_RNA (1)...(19): siRNA sense strand
agaauaaagaagaggaaag

SEQ ID NO: 2325383 - RNA, 19 nt, Homo sapiens
  misc_RNA (1)...(19): siRNA sense strand
ucgagaacaucguggccaa

SEQ ID NO: 2325384 - RNA, 19 nt, Homo sapiens
  misc_RNA (1)...(19): siRNA sense strand
agaaggaaguggaacccaa

SEQ ID NO: 2325385 - RNA, 19 nt, Homo sapiens
  misc_RNA (1)...(19): siRNA sense strand
cgaucaaagaaucaagaau

SEQ ID NO: 2325386 - RNA, 19 nt, Homo sapiens
  misc_RNA (1)...(19): siRNA sense strand
auuacagaguucuaggaaa

SEQ ID NO: 2325387 - RNA, 19 nt, Homo sapiens
  misc_RNA (1)...(19): siRNA sense strand
uggaagauuuacagaggga

SEQ ID NO: 2325388 - RNA, 19 nt, Homo sapiens
  misc_RNA (1)...(19): siRNA sense strand
guagauucguaguuaguuu

SEQ ID NO: 2325389 - RNA, 19 nt, Homo sapiens
  misc_RNA (1)...(19): siRNA sense strand
caaaguagauucguaguua

SEQ ID NO: 2325390 - RNA, 19 nt, Homo sapiens
  misc_RNA (1)...(19): siRNA sense strand
aggcggauuuggagagguu

SEQ ID NO: 2325391 - RNA, 19 nt, Homo sapiens
  misc_RNA (1)...(19): siRNA sense strand
ccagaaggacagaggguuc

SEQ ID NO: 2325392 - RNA, 19 nt, Homo sapiens
  misc_RNA (1)...(19): siRNA sense strand
ucaaaugggaggaggucga

SEQ ID NO: 2325393 - RNA, 19 nt, Homo sapiens
  misc_RNA (1)...(19): siRNA sense strand
ucgaggaagaguuggaaca

SEQ ID NO: 2325394 - RNA, 19 nt, Homo sapiens
  misc_RNA (1)...(19): siRNA sense strand
cuggaaaggcaacccguaa

SEQ ID NO: 2325395 - RNA, 19 nt, Homo sapiens
  misc_RNA (1)...(19): siRNA sense strand
acauuuacaaccugggcaa

SEQ ID NO: 2325396 - RNA, 19 nt, Homo sapiens
  misc_RNA (1)...(19): siRNA sense strand
aaagaagaggaaaggugaa

SEQ ID NO: 2325397 - RNA, 19 nt, Homo sapiens
  misc_RNA (1)...(19): siRNA sense strand
cagagaucccagaaggaca

SEQ ID NO: 2325398 - RNA, 19 nt, Homo sapiens
  misc_RNA (1)...(19): siRNA sense strand
agacuugaagccugagaau

SEQ ID NO: 2325399 - RNA, 19 nt, Homo sapiens
  misc_RNA (1)...(19): siRNA sense strand
gauugggacugaaggagga

SEQ ID NO: 2325400 - RNA, 19 nt, Homo sapiens
  misc_RNA (1)...(19): siRNA sense strand
gaauauucuccuugaugau

SEQ ID NO: 2325401 - RNA, 19 nt, Homo sapiens
  misc_RNA (1)...(19): siRNA sense strand
ccgaagugauuguggacug

SEQ ID NO: 2325402 - RNA, 19 nt, Homo sapiens
  misc_RNA (1)...(19): siRNA sense strand
gcucuaaaugagaaaagaa

SEQ ID NO: 2325403 - RNA, 19 nt, Homo sapiens
  misc_RNA (1)...(19): siRNA sense strand
gcaaaguagauucguaguu

SEQ ID NO: 2325404 - RNA, 19 nt, Homo sapiens
  misc_RNA (1)...(19): siRNA sense strand
gaggaauguacuagaguug

SEQ ID NO: 2325405 - RNA, 19 nt, Homo sapiens
  misc_RNA (1)...(19): siRNA sense strand
uaaagaagaggaaagguga

SEQ ID NO: 2325406 - RNA, 19 nt, Homo sapiens
  misc_RNA (1)...(19): siRNA sense strand
ccagauguugugacagaau

SEQ ID NO: 2325407 - RNA, 19 nt, Homo sapiens
  misc_RNA (1)...(19): siRNA sense strand
agaggaaaggugaagcuau

SEQ ID NO: 2325408 - RNA, 19 nt, Homo sapiens
  misc_RNA (1)...(19): siRNA sense strand
acagagacuugaagccuga

SEQ ID NO: 2325409 - RNA, 19 nt, Homo sapiens
  misc_RNA (1)...(19): siRNA sense strand
aagagaaagucaaauggga

SEQ ID NO: 2325410 - RNA, 19 nt, Homo sapiens
  misc_RNA (1)...(19): siRNA sense strand
agugcgagccacaggaaaa

SEQ ID NO: 2325411 - RNA, 19 nt, Homo sapiens
  misc_RNA (1)...(19): siRNA sense strand
gaguuggaacagucggcua

SEQ ID NO: 2325412 - RNA, 19 nt, Homo sapiens
  misc_RNA (1)...(19): siRNA sense strand
ggaccgaagugauugugga

SEQ ID NO: 2325413 - RNA, 19 nt, Homo sapiens
  misc_RNA (1)...(19): siRNA sense strand
agaauuguauacagagacu

SEQ ID NO: 2325414 - RNA, 19 nt, Homo sapiens
  misc_RNA (1)...(19): siRNA sense strand
ggacauucuccauucaaaa

SEQ ID NO: 2325415 - RNA, 19 nt, Homo sapiens
  misc_RNA (1)...(19): siRNA sense strand
ugggacugaaggaggagaa

SEQ ID NO: 2325416 - RNA, 19 nt, Homo sapiens
  misc_RNA (1)...(19): siRNA sense strand
aggugaagcuauggcucua

SEQ ID NO: 2325417 - RNA, 19 nt, Homo sapiens
  misc_RNA (1)...(19): siRNA sense strand
auuuacagagggaaagaau

SEQ ID NO: 2325418 - RNA, 19 nt, Homo sapiens
  misc_RNA (1)...(19): siRNA sense strand
ccuggaggaagaagacaaa

SEQ ID NO: 2325419 - RNA, 19 nt, Homo sapiens
  misc_RNA (1)...(19): siRNA sense strand
caacaagcuucgaaaugga

SEQ ID NO: 2325420 - RNA, 19 nt, Homo sapiens
  misc_RNA (1)...(19): siRNA sense strand
caggaaacuucgagaggag

SEQ ID NO: 2325421 - RNA, 19 nt, Homo sapiens
  misc_RNA (1)...(19): siRNA sense strand
agaauuaccagcaggcaca

SEQ ID NO: 2325422 - RNA, 19 nt, Homo sapiens
  misc_RNA (1)...(19): siRNA sense strand
gccuggaggaagaagacaa

SEQ ID NO: 2325423 - RNA, 19 nt, Homo sapiens
  misc_RNA (1)...(19): siRNA sense strand
cgaugcacacacugguaua

SEQ ID NO: 2325424 - RNA, 19 nt, Homo sapiens
  misc_RNA (1)...(19): siRNA sense strand
ggaaacuucgagaggagga

SEQ ID NO: 2325425 - RNA, 19 nt, Homo sapiens
  misc_RNA (1)...(19): siRNA sense strand
cccauguaguaaaggugua

SEQ ID NO: 2325426 - RNA, 19 nt, Homo sapiens
  misc_RNA (1)...(19): siRNA sense strand
cagaugugaacgaguccaa

SEQ ID NO: 2325427 - RNA, 19 nt, Homo sapiens
  misc_RNA (1)...(19): siRNA sense strand
gguucaggacggaagcuuu

SEQ ID NO: 2325428 - RNA, 19 nt, Homo sapiens
  misc_RNA (1)...(19): siRNA sense strand
gaagaugagcagagccgca

SEQ ID NO: 2325429 - RNA, 19 nt, Homo sapiens
  misc_RNA (1)...(19): siRNA sense strand
cugaggagguaaagagguc

SEQ ID NO: 2325430 - RNA, 19 nt, Homo sapiens
  misc_RNA (1)...(19): siRNA sense strand
ggagauagccgcuucgucu

SEQ ID NO: 2325431 - RNA, 19 nt, Homo sapiens
  misc_RNA (1)...(19): siRNA sense strand
aaguggaggaugagagaua

SEQ ID NO: 2325432 - RNA, 19 nt, Homo sapiens
  misc_RNA (1)...(19): siRNA sense strand
caauaaaguuggaggcauc

SEQ ID NO: 2325433 - RNA, 19 nt, Homo sapiens
  misc_RNA (1)...(19): siRNA sense strand
agagauacgaugaggaaga

SEQ ID NO: 2325434 - RNA, 19 nt, Homo sapiens
  misc_RNA (1)...(19): siRNA sense strand
caguggacgcaaugaauaa

SEQ ID NO: 2325435 - RNA, 19 nt, Homo sapiens
  misc_RNA (1)...(19): siRNA sense strand
aaggacaagcagugcgaaa

SEQ ID NO: 2325436 - RNA, 19 nt, Homo sapiens
  misc_RNA (1)...(19): siRNA sense strand
ggguuauacuccagcugaa

SEQ ID NO: 2325437 - RNA, 19 nt, Homo sapiens
  misc_RNA (1)...(19): siRNA sense strand
agaucaugcagaugguaaa

SEQ ID NO: 2325438 - RNA, 19 nt, Homo sapiens
  misc_RNA (1)...(19): siRNA sense strand
cagauagagucaaggugau

SEQ ID NO: 2325439 - RNA, 19 nt, Homo sapiens
  misc_RNA (1)...(19): siRNA sense strand
guccauauuuugagcauaa

SEQ ID NO: 2325440 - RNA, 19 nt, Homo sapiens
  misc_RNA (1)...(19): siRNA sense strand
guaaauaugucguugccca

SEQ ID NO: 2325441 - RNA, 19 nt, Homo sapiens
  misc_RNA (1)...(19): siRNA sense strand
ugacaaagaggcuggggaa

SEQ ID NO: 2325442 - RNA, 19 nt, Homo sapiens
  misc_RNA (1)...(19): siRNA sense strand
cagaucaugcagaugguaa

SEQ ID NO: 2325443 - RNA, 19 nt, Homo sapiens
  misc_RNA (1)...(19): siRNA sense strand
cuuugaaguugcuugggaa

SEQ ID NO: 2325444 - RNA, 19 nt, Homo sapiens
  misc_RNA (1)...(19): siRNA sense strand
uggaagaugaaguggagga

SEQ ID NO: 2325445 - RNA, 19 nt, Homo sapiens
  misc_RNA (1)...(19): siRNA sense strand
cagcagugcaugaguuuca

SEQ ID NO: 2325446 - RNA, 19 nt, Homo sapiens
  misc_RNA (1)...(19): siRNA sense strand
ccuuacuacccauggacua

SEQ ID NO: 2325447 - RNA, 19 nt, Homo sapiens
  misc_RNA (1)...(19): siRNA sense strand
cauuagacggauuggacuu

SEQ ID NO: 2325448 - RNA, 19 nt, Homo sapiens
  misc_RNA (1)...(19): siRNA sense strand
uggaaacccugaaaggaca

SEQ ID NO: 2325449 - RNA, 19 nt, Homo sapiens
  misc_RNA (1)...(19): siRNA sense strand
caaaacaacagcagaugaa

SEQ ID NO: 2325450 - RNA, 19 nt, Homo sapiens
  misc_RNA (1)...(19): siRNA sense strand
ggaacagaacugagaggcu

SEQ ID NO: 2325451 - RNA, 19 nt, Homo sapiens
  misc_RNA (1)...(19): siRNA sense strand
ggcugaaagggaucgguua

SEQ ID NO: 2325452 - RNA, 19 nt, Homo sapiens
  misc_RNA (1)...(19): siRNA sense strand
gagcaguggacgcaaugaa

SEQ ID NO: 2325453 - RNA, 19 nt, Homo sapiens
  misc_RNA (1)...(19): siRNA sense strand
agcaauagaagcugaacau

SEQ ID NO: 2325454 - RNA, 19 nt, Homo sapiens
  misc_RNA (1)...(19): siRNA sense strand
augaauggggagagaacua

SEQ ID NO: 2325455 - RNA, 19 nt, Homo sapiens
  misc_RNA (1)...(19): siRNA sense strand
acagauagagucaagguga

SEQ ID NO: 2325456 - RNA, 19 nt, Homo sapiens
  misc_RNA (1)...(19): siRNA sense strand
augaggaagaggaggcuga

SEQ ID NO: 2325457 - RNA, 19 nt, Homo sapiens
  misc_RNA (1)...(19): siRNA sense strand
acaaaggagcugacaucuu

SEQ ID NO: 2325458 - RNA, 19 nt, Homo sapiens
  misc_RNA (1)...(19): siRNA sense strand
gcauuauuaagaggagaaa

SEQ ID NO: 2325459 - RNA, 19 nt, Homo sapiens
  misc_RNA (1)...(19): siRNA sense strand
agguugucaucuuggagua

SEQ ID NO: 2325460 - RNA, 19 nt, Homo sapiens
  misc_RNA (1)...(19): siRNA sense strand
gaaacuuccuauugccaca

SEQ ID NO: 2325461 - RNA, 19 nt, Homo sapiens
  misc_RNA (1)...(19): siRNA sense strand
ucuacaaccaucuugauaa

SEQ ID NO: 2325462 - RNA, 19 nt, Homo sapiens
  misc_RNA (1)...(19): siRNA sense strand
ugaaggaaaaguuuggaaa

SEQ ID NO: 2325463 - RNA, 19 nt, Homo sapiens
  misc_RNA (1)...(19): siRNA sense strand
cagcaccauuagacggauu

SEQ ID NO: 2325464 - RNA, 19 nt, Homo sapiens
  misc_RNA (1)...(19): siRNA sense strand
cugaaauaacagcaauaga

SEQ ID NO: 2325465 - RNA, 19 nt, Homo sapiens
  misc_RNA (1)...(19): siRNA sense strand
auuccugaccugaacgaua

SEQ ID NO: 2325466 - RNA, 19 nt, Homo sapiens
  misc_RNA (1)...(19): siRNA sense strand
aagaggaggcugaaaggga

SEQ ID NO: 2325467 - RNA, 19 nt, Homo sapiens
  misc_RNA (1)...(19): siRNA sense strand
ccacgaaucucuccggguu

SEQ ID NO: 2325468 - RNA, 19 nt, Homo sapiens
  misc_RNA (1)...(19): siRNA sense strand
ugaaguggaggaugagaga

SEQ ID NO: 2325469 - RNA, 19 nt, Homo sapiens
  misc_RNA (1)...(19): siRNA sense strand
cugaaagggaucgguuaaa

SEQ ID NO: 2325470 - RNA, 19 nt, Homo sapiens
  misc_RNA (1)...(19): siRNA sense strand
augaauggcaggcuggaau

SEQ ID NO: 2325471 - RNA, 19 nt, Homo sapiens
  misc_RNA (1)...(19): siRNA sense strand
ggaaacccugaaaggacaa

SEQ ID NO: 2325472 - RNA, 19 nt, Homo sapiens
  misc_RNA (1)...(19): siRNA sense strand
agauagagucaaggugauu

SEQ ID NO: 2325473 - RNA, 19 nt, Homo sapiens
  misc_RNA (1)...(19): siRNA sense strand
caccaacgacagaaggauu

SEQ ID NO: 2325474 - RNA, 19 nt, Homo sapiens
  misc_RNA (1)...(19): siRNA sense strand
ccauguacaaggccagaau

SEQ ID NO: 2325475 - RNA, 19 nt, Homo sapiens
  misc_RNA (1)...(19): siRNA sense strand
ugcauuauuaagaggagaa

SEQ ID NO: 2325476 - RNA, 19 nt, Homo sapiens
  misc_RNA (1)...(19): siRNA sense strand
agugggaagucgaagaacu

SEQ ID NO: 2325477 - RNA, 19 nt, Homo sapiens
  misc_RNA (1)...(19): siRNA sense strand
cagugauguggaagaugaa

SEQ ID NO: 2325478 - RNA, 19 nt, Homo sapiens
  misc_RNA (1)...(19): siRNA sense strand
agaggaggcugaaagggau

SEQ ID NO: 2325479 - RNA, 19 nt, Homo sapiens
  misc_RNA (1)...(19): siRNA sense strand
gcagaugaauggggagaga

SEQ ID NO: 2325480 - RNA, 19 nt, Homo sapiens
  misc_RNA (1)...(19): siRNA sense strand
aggcaucuauacugugauu

SEQ ID NO: 2325481 - RNA, 19 nt, Homo sapiens
  misc_RNA (1)...(19): siRNA sense strand
ccuuaaggauacagaaaga

SEQ ID NO: 2325482 - RNA, 19 nt, Homo sapiens
  misc_RNA (1)...(19): siRNA sense strand
gauaggaaauagugaccaa

SEQ ID NO: 2325483 - RNA, 19 nt, Homo sapiens
  misc_RNA (1)...(19): siRNA sense strand
agcuaaacuuggaaggaaa

SEQ ID NO: 2325484 - RNA, 19 nt, Homo sapiens
  misc_RNA (1)...(19): siRNA sense strand
ggaaagaacuauugcacag

SEQ ID NO: 2325485 - RNA, 19 nt, Homo sapiens
  misc_RNA (1)...(19): siRNA sense strand
gggcaguggauggaagaaa

SEQ ID NO: 2325486 - RNA, 19 nt, Homo sapiens
  misc_RNA (1)...(19): siRNA sense strand
cacagaagucauauggaaa

SEQ ID NO: 2325487 - RNA, 19 nt, Homo sapiens
  misc_RNA (1)...(19): siRNA sense strand
gugugcauuuauugggaua

SEQ ID NO: 2325488 - RNA, 19 nt, Homo sapiens
  misc_RNA (1)...(19): siRNA sense strand
uaaagauguucuauggcaa

SEQ ID NO: 2325489 - RNA, 19 nt, Homo sapiens
  misc_RNA (1)...(19): siRNA sense strand
gcacagauaaggcagagua

SEQ ID NO: 2325490 - RNA, 19 nt, Homo sapiens
  misc_RNA (1)...(19): siRNA sense strand
gcauuuuaccuuaaggaua

SEQ ID NO: 2325491 - RNA, 19 nt, Homo sapiens
  misc_RNA (1)...(19): siRNA sense strand
acacaaacagcgagggaag

SEQ ID NO: 2325492 - RNA, 19 nt, Homo sapiens
  misc_RNA (1)...(19): siRNA sense strand
augcauugccucaggaaca

SEQ ID NO: 2325493 - RNA, 19 nt, Homo sapiens
  misc_RNA (1)...(19): siRNA sense strand
cagauaaggcagaguauac

SEQ ID NO: 2325494 - RNA, 19 nt, Homo sapiens
  misc_RNA (1)...(19): siRNA sense strand
auguagaagcugaaacuau

SEQ ID NO: 2325495 - RNA, 19 nt, Homo sapiens
  misc_RNA (1)...(19): siRNA sense strand
cuaacgaaucaaacacaaa

SEQ ID NO: 2325496 - RNA, 19 nt, Homo sapiens
  misc_RNA (1)...(19): siRNA sense strand
gcauuuauugggauaggaa

SEQ ID NO: 2325497 - RNA, 19 nt, Homo sapiens
  misc_RNA (1)...(19): siRNA sense strand
acuuggaaggaaagaacua

SEQ ID NO: 2325498 - RNA, 19 nt, Homo sapiens
  misc_RNA (1)...(19): siRNA sense strand
ggcaguggauggaagaaaa

SEQ ID NO: 2325499 - RNA, 19 nt, Homo sapiens
  misc_RNA (1)...(19): siRNA sense strand
ugaacuuacaggacagaau

SEQ ID NO: 2325500 - RNA, 19 nt, Homo sapiens
  misc_RNA (1)...(19): siRNA sense strand
guugauaagcagaccgcau

SEQ ID NO: 2325501 - RNA, 19 nt, Homo sapiens
  misc_RNA (1)...(19): siRNA sense strand
agaauguauuugugccuuu

SEQ ID NO: 2325502 - RNA, 19 nt, Homo sapiens
  misc_RNA (1)...(19): siRNA sense strand
cagacaagcgaaagcacuu

SEQ ID NO: 2325503 - RNA, 19 nt, Homo sapiens
  misc_RNA (1)...(19): siRNA sense strand
guguauaucuuaugggcag

SEQ ID NO: 2325504 - RNA, 19 nt, Homo sapiens
  misc_RNA (1)...(19): siRNA sense strand
guaaagauguucuauggca

SEQ ID NO: 2325505 - RNA, 19 nt, Homo sapiens
  misc_RNA (1)...(19): siRNA sense strand
cauuauggacaaacaguca

SEQ ID NO: 2325506 - RNA, 19 nt, Homo sapiens
  misc_RNA (1)...(19): siRNA sense strand
aagaacaaauggaacgcga

SEQ ID NO: 2325507 - RNA, 19 nt, Homo sapiens
  misc_RNA (1)...(19): siRNA sense strand
agggaagcuaugcgaaauu

SEQ ID NO: 2325508 - RNA, 19 nt, Homo sapiens
  misc_RNA (1)...(19): siRNA sense strand
cauuauuggaugcagauga

SEQ ID NO: 2325509 - RNA, 19 nt, Homo sapiens
  misc_RNA (1)...(19): siRNA sense strand
cauuuauugggauaggaaa

SEQ ID NO: 2325510 - RNA, 19 nt, Homo sapiens
  misc_RNA (1)...(19): siRNA sense strand
uaaacgacuuacuagggaa

SEQ ID NO: 2325511 - RNA, 19 nt, Homo sapiens
  misc_RNA (1)...(19): siRNA sense strand
ucacaguccgagauggcua

SEQ ID NO: 2325512 - RNA, 19 nt, Homo sapiens
  misc_RNA (1)...(19): siRNA sense strand
acaaauucaaccaguguca

SEQ ID NO: 2325513 - RNA, 19 nt, Homo sapiens
  misc_RNA (1)...(19): siRNA sense strand
uaccuuaaggauacagaaa

SEQ ID NO: 2325514 - RNA, 19 nt, Homo sapiens
  misc_RNA (1)...(19): siRNA sense strand
uuuaaaagagcgaggggau

SEQ ID NO: 2325515 - RNA, 19 nt, Homo sapiens
  misc_RNA (1)...(19): siRNA sense strand
ccagacaguuaguaccaga

SEQ ID NO: 2325516 - RNA, 19 nt, Homo sapiens
  misc_RNA (1)...(19): siRNA sense strand
aaucaaacacaaacagcga

SEQ ID NO: 2325517 - RNA, 19 nt, Homo sapiens
  misc_RNA (1)...(19): siRNA sense strand
cagucaaacuugugugcuc

SEQ ID NO: 2325518 - RNA, 19 nt, Homo sapiens
  misc_RNA (1)...(19): siRNA sense strand
ccuuaaggauacagaaaga

SEQ ID NO: 2325519 - RNA, 19 nt, Homo sapiens
  misc_RNA (1)...(19): siRNA sense strand
gauaggaaauagugaccaa

SEQ ID NO: 2325520 - RNA, 19 nt, Homo sapiens
  misc_RNA (1)...(19): siRNA sense strand
agcuaaacuuggaaggaaa

SEQ ID NO: 2325521 - RNA, 19 nt, Homo sapiens
  misc_RNA (1)...(19): siRNA sense strand
ggaaagaacuauugcacag

SEQ ID NO: 2325522 - RNA, 19 nt, Homo sapiens
  misc_RNA (1)...(19): siRNA sense strand
gggcaguggauggaagaaa

SEQ ID NO: 2325523 - RNA, 19 nt, Homo sapiens
  misc_RNA (1)...(19): siRNA sense strand
cacagaagucauauggaaa

SEQ ID NO: 2325524 - RNA, 19 nt, Homo sapiens
  misc_RNA (1)...(19): siRNA sense strand
gugugcauuuauugggaua

SEQ ID NO: 2325525 - RNA, 19 nt, Homo sapiens
  misc_RNA (1)...(19): siRNA sense strand
uaaagauguucuauggcaa

SEQ ID NO: 2325526 - RNA, 19 nt, Homo sapiens
  misc_RNA (1)...(19): siRNA sense strand
gcacagauaaggcagagua

SEQ ID NO: 2325527 - RNA, 19 nt, Homo sapiens
  misc_RNA (1)...(19): siRNA sense strand
gcauuuuaccuuaaggaua

SEQ ID NO: 2325528 - RNA, 19 nt, Homo sapiens
  misc_RNA (1)...(19): siRNA sense strand
acacaaacagcgagggaag

SEQ ID NO: 2325529 - RNA, 19 nt, Homo sapiens
  misc_RNA (1)...(19): siRNA sense strand
augcauugccucaggaaca

SEQ ID NO: 2325530 - RNA, 19 nt, Homo sapiens
  misc_RNA (1)...(19): siRNA sense strand
cagauaaggcagaguauac

SEQ ID NO: 2325531 - RNA, 19 nt, Homo sapiens
  misc_RNA (1)...(19): siRNA sense strand
auguagaagcugaaacuau

SEQ ID NO: 2325532 - RNA, 19 nt, Homo sapiens
  misc_RNA (1)...(19): siRNA sense strand
cuaacgaaucaaacacaaa

SEQ ID NO: 2325533 - RNA, 19 nt, Homo sapiens
  misc_RNA (1)...(19): siRNA sense strand
gcauuuauugggauaggaa

SEQ ID NO: 2325534 - RNA, 19 nt, Homo sapiens
  misc_RNA (1)...(19): siRNA sense strand
acuuggaaggaaagaacua

SEQ ID NO: 2325535 - RNA, 19 nt, Homo sapiens
  misc_RNA (1)...(19): siRNA sense strand
ggcaguggauggaagaaaa

SEQ ID NO: 2325536 - RNA, 19 nt, Homo sapiens
  misc_RNA (1)...(19): siRNA sense strand
ugaacuuacaggacagaau

SEQ ID NO: 2325537 - RNA, 19 nt, Homo sapiens
  misc_RNA (1)...(19): siRNA sense strand
guugauaagcagaccgcau

SEQ ID NO: 2325538 - RNA, 19 nt, Homo sapiens
  misc_RNA (1)...(19): siRNA sense strand
agaauguauuugugccuuu

SEQ ID NO: 2325539 - RNA, 19 nt, Homo sapiens
  misc_RNA (1)...(19): siRNA sense strand
cagacaagcgaaagcacuu

SEQ ID NO: 2325540 - RNA, 19 nt, Homo sapiens
  misc_RNA (1)...(19): siRNA sense strand
guguauaucuuaugggcag

SEQ ID NO: 2325541 - RNA, 19 nt, Homo sapiens
  misc_RNA (1)...(19): siRNA sense strand
guaaagauguucuauggca

SEQ ID NO: 2325542 - RNA, 19 nt, Homo sapiens
  misc_RNA (1)...(19): siRNA sense strand
cauuauggacaaacaguca

SEQ ID NO: 2325543 - RNA, 19 nt, Homo sapiens
  misc_RNA (1)...(19): siRNA sense strand
aagaacaaauggaacgcga

SEQ ID NO: 2325544 - RNA, 19 nt, Homo sapiens
  misc_RNA (1)...(19): siRNA sense strand
agggaagcuaugcgaaauu

SEQ ID NO: 2325545 - RNA, 19 nt, Homo sapiens
  misc_RNA (1)...(19): siRNA sense strand
cauuauuggaugcagauga

SEQ ID NO: 2325546 - RNA, 19 nt, Homo sapiens
  misc_RNA (1)...(19): siRNA sense strand
cauuuauugggauaggaaa

SEQ ID NO: 2325547 - RNA, 19 nt, Homo sapiens
  misc_RNA (1)...(19): siRNA sense strand
uaaacgacuuacuagggaa

SEQ ID NO: 2325548 - RNA, 19 nt, Homo sapiens
  misc_RNA (1)...(19): siRNA sense strand
ucacaguccgagauggcua

SEQ ID NO: 2325549 - RNA, 19 nt, Homo sapiens
  misc_RNA (1)...(19): siRNA sense strand
acaaauucaaccaguguca

SEQ ID NO: 2325550 - RNA, 19 nt, Homo sapiens
  misc_RNA (1)...(19): siRNA sense strand
uaccuuaaggauacagaaa

SEQ ID NO: 2325551 - RNA, 19 nt, Homo sapiens
  misc_RNA (1)...(19): siRNA sense strand
uuuaaaagagcgaggggau

SEQ ID NO: 2325552 - RNA, 19 nt, Homo sapiens
  misc_RNA (1)...(19): siRNA sense strand
ccagacaguuaguaccaga

SEQ ID NO: 2325553 - RNA, 19 nt, Homo sapiens
  misc_RNA (1)...(19): siRNA sense strand
aaucaaacacaaacagcga

SEQ ID NO: 2325554 - RNA, 19 nt, Homo sapiens
  misc_RNA (1)...(19): siRNA sense strand
cagucaaacuugugugcuc

SEQ ID NO: 2325555 - RNA, 19 nt, Homo sapiens
  misc_RNA (1)...(19): siRNA sense strand
ccuuaaggauacagaaaga

SEQ ID NO: 2325556 - RNA, 19 nt, Homo sapiens
  misc_RNA (1)...(19): siRNA sense strand
gauaggaaauagugaccaa

SEQ ID NO: 2325557 - RNA, 19 nt, Homo sapiens
  misc_RNA (1)...(19): siRNA sense strand
agcuaaacuuggaaggaaa

SEQ ID NO: 2325558 - RNA, 19 nt, Homo sapiens
  misc_RNA (1)...(19): siRNA sense strand
ggaaagaacuauugcacag

SEQ ID NO: 2325559 - RNA, 19 nt, Homo sapiens
  misc_RNA (1)...(19): siRNA sense strand
gggcaguggauggaagaaa

SEQ ID NO: 2325560 - RNA, 19 nt, Homo sapiens
  misc_RNA (1)...(19): siRNA sense strand
cacagaagucauauggaaa

SEQ ID NO: 2325561 - RNA, 19 nt, Homo sapiens
  misc_RNA (1)...(19): siRNA sense strand
gugugcauuuauugggaua

SEQ ID NO: 2325562 - RNA, 19 nt, Homo sapiens
  misc_RNA (1)...(19): siRNA sense strand
uaaagauguucuauggcaa

SEQ ID NO: 2325563 - RNA, 19 nt, Homo sapiens
  misc_RNA (1)...(19): siRNA sense strand
gcacagauaaggcagagua

SEQ ID NO: 2325564 - RNA, 19 nt, Homo sapiens
  misc_RNA (1)...(19): siRNA sense strand
gcauuuuaccuuaaggaua

SEQ ID NO: 2325565 - RNA, 19 nt, Homo sapiens
  misc_RNA (1)...(19): siRNA sense strand
acacaaacagcgagggaag

SEQ ID NO: 2325566 - RNA, 19 nt, Homo sapiens
  misc_RNA (1)...(19): siRNA sense strand
augcauugccucaggaaca

SEQ ID NO: 2325567 - RNA, 19 nt, Homo sapiens
  misc_RNA (1)...(19): siRNA sense strand
cagauaaggcagaguauac

SEQ ID NO: 2325568 - RNA, 19 nt, Homo sapiens
  misc_RNA (1)...(19): siRNA sense strand
auguagaagcugaaacuau

SEQ ID NO: 2325569 - RNA, 19 nt, Homo sapiens
  misc_RNA (1)...(19): siRNA sense strand
cuaacgaaucaaacacaaa

SEQ ID NO: 2325570 - RNA, 19 nt, Homo sapiens
  misc_RNA (1)...(19): siRNA sense strand
gcauuuauugggauaggaa

SEQ ID NO: 2325571 - RNA, 19 nt, Homo sapiens
  misc_RNA (1)...(19): siRNA sense strand
acuuggaaggaaagaacua

SEQ ID NO: 2325572 - RNA, 19 nt, Homo sapiens
  misc_RNA (1)...(19): siRNA sense strand
ggcaguggauggaagaaaa

SEQ ID NO: 2325573 - RNA, 19 nt, Homo sapiens
  misc_RNA (1)...(19): siRNA sense strand
ugaacuuacaggacagaau

SEQ ID NO: 2325574 - RNA, 19 nt, Homo sapiens
  misc_RNA (1)...(19): siRNA sense strand
guugauaagcagaccgcau

SEQ ID NO: 2325575 - RNA, 19 nt, Homo sapiens
  misc_RNA (1)...(19): siRNA sense strand
agaauguauuugugccuuu

SEQ ID NO: 2325576 - RNA, 19 nt, Homo sapiens
  misc_RNA (1)...(19): siRNA sense strand
cagacaagcgaaagcacuu

SEQ ID NO: 2325577 - RNA, 19 nt, Homo sapiens
  misc_RNA (1)...(19): siRNA sense strand
guguauaucuuaugggcag

SEQ ID NO: 2325578 - RNA, 19 nt, Homo sapiens
  misc_RNA (1)...(19): siRNA sense strand
guaaagauguucuauggca

SEQ ID NO: 2325579 - RNA, 19 nt, Homo sapiens
  misc_RNA (1)...(19): siRNA sense strand
cauuauggacaaacaguca

SEQ ID NO: 2325580 - RNA, 19 nt, Homo sapiens
  misc_RNA (1)...(19): siRNA sense strand
aagaacaaauggaacgcga

SEQ ID NO: 2325581 - RNA, 19 nt, Homo sapiens
  misc_RNA (1)...(19): siRNA sense strand
agggaagcuaugcgaaauu

SEQ ID NO: 2325582 - RNA, 19 nt, Homo sapiens
  misc_RNA (1)...(19): siRNA sense strand
cauuauuggaugcagauga

SEQ ID NO: 2325583 - RNA, 19 nt, Homo sapiens
  misc_RNA (1)...(19): siRNA sense strand
cauuuauugggauaggaaa

SEQ ID NO: 2325584 - RNA, 19 nt, Homo sapiens
  misc_RNA (1)...(19): siRNA sense strand
uaaacgacuuacuagggaa

SEQ ID NO: 2325585 - RNA, 19 nt, Homo sapiens
  misc_RNA (1)...(19): siRNA sense strand
ucacaguccgagauggcua

SEQ ID NO: 2325586 - RNA, 19 nt, Homo sapiens
  misc_RNA (1)...(19): siRNA sense strand
acaaauucaaccaguguca

SEQ ID NO: 2325587 - RNA, 19 nt, Homo sapiens
  misc_RNA (1)...(19): siRNA sense strand
uaccuuaaggauacagaaa

SEQ ID NO: 2325588 - RNA, 19 nt, Homo sapiens
  misc_RNA (1)...(19): siRNA sense strand
uuuaaaagagcgaggggau

SEQ ID NO: 2325589 - RNA, 19 nt, Homo sapiens
  misc_RNA (1)...(19): siRNA sense strand
ccagacaguuaguaccaga

SEQ ID NO: 2325590 - RNA, 19 nt, Homo sapiens
  misc_RNA (1)...(19): siRNA sense strand
aaucaaacacaaacagcga

SEQ ID NO: 2325591 - RNA, 19 nt, Homo sapiens
  misc_RNA (1)...(19): siRNA sense strand
cagucaaacuugugugcuc

SEQ ID NO: 2325592 - RNA, 19 nt, Homo sapiens
  misc_RNA (1)...(19): siRNA sense strand
ccuuaaggauacagaaaga

SEQ ID NO: 2325593 - RNA, 19 nt, Homo sapiens
  misc_RNA (1)...(19): siRNA sense strand
gauaggaaauagugaccaa

SEQ ID NO: 2325594 - RNA, 19 nt, Homo sapiens
  misc_RNA (1)...(19): siRNA sense strand
agcuaaacuuggaaggaaa

SEQ ID NO: 2325595 - RNA, 19 nt, Homo sapiens
  misc_RNA (1)...(19): siRNA sense strand
ggaaagaacuauugcacag

SEQ ID NO: 2325596 - RNA, 19 nt, Homo sapiens
  misc_RNA (1)...(19): siRNA sense strand
gggcaguggauggaagaaa

SEQ ID NO: 2325597 - RNA, 19 nt, Homo sapiens
  misc_RNA (1)...(19): siRNA sense strand
cacagaagucauauggaaa

SEQ ID NO: 2325598 - RNA, 19 nt, Homo sapiens
  misc_RNA (1)...(19): siRNA sense strand
gugugcauuuauugggaua

SEQ ID NO: 2325599 - RNA, 19 nt, Homo sapiens
  misc_RNA (1)...(19): siRNA sense strand
uaaagauguucuauggcaa

SEQ ID NO: 2325600 - RNA, 19 nt, Homo sapiens
  misc_RNA (1)...(19): siRNA sense strand
gcacagauaaggcagagua

SEQ ID NO: 2325601 - RNA, 19 nt, Homo sapiens
  misc_RNA (1)...(19): siRNA sense strand
gcauuuuaccuuaaggaua

SEQ ID NO: 2325602 - RNA, 19 nt, Homo sapiens
  misc_RNA (1)...(19): siRNA sense strand
acacaaacagcgagggaag

SEQ ID NO: 2325603 - RNA, 19 nt, Homo sapiens
  misc_RNA (1)...(19): siRNA sense strand
augcauugccucaggaaca

SEQ ID NO: 2325604 - RNA, 19 nt, Homo sapiens
  misc_RNA (1)...(19): siRNA sense strand
cagauaaggcagaguauac

SEQ ID NO: 2325605 - RNA, 19 nt, Homo sapiens
  misc_RNA (1)...(19): siRNA sense strand
auguagaagcugaaacuau

SEQ ID NO: 2325606 - RNA, 19 nt, Homo sapiens
  misc_RNA (1)...(19): siRNA sense strand
cuaacgaaucaaacacaaa

SEQ ID NO: 2325607 - RNA, 19 nt, Homo sapiens
  misc_RNA (1)...(19): siRNA sense strand
gcauuuauugggauaggaa

SEQ ID NO: 2325608 - RNA, 19 nt, Homo sapiens
  misc_RNA (1)...(19): siRNA sense strand
acuuggaaggaaagaacua

SEQ ID NO: 2325609 - RNA, 19 nt, Homo sapiens
  misc_RNA (1)...(19): siRNA sense strand
ggcaguggauggaagaaaa

SEQ ID NO: 2325610 - RNA, 19 nt, Homo sapiens
  misc_RNA (1)...(19): siRNA sense strand
ugaacuuacaggacagaau

SEQ ID NO: 2325611 - RNA, 19 nt, Homo sapiens
  misc_RNA (1)...(19): siRNA sense strand
guugauaagcagaccgcau

SEQ ID NO: 2325612 - RNA, 19 nt, Homo sapiens
  misc_RNA (1)...(19): siRNA sense strand
agaauguauuugugccuuu

SEQ ID NO: 2325613 - RNA, 19 nt, Homo sapiens
  misc_RNA (1)...(19): siRNA sense strand
cagacaagcgaaagcacuu

SEQ ID NO: 2325614 - RNA, 19 nt, Homo sapiens
  misc_RNA (1)...(19): siRNA sense strand
guguauaucuuaugggcag

SEQ ID NO: 2325615 - RNA, 19 nt, Homo sapiens
  misc_RNA (1)...(19): siRNA sense strand
guaaagauguucuauggca

SEQ ID NO: 2325616 - RNA, 19 nt, Homo sapiens
  misc_RNA (1)...(19): siRNA sense strand
cauuauggacaaacaguca

SEQ ID NO: 2325617 - RNA, 19 nt, Homo sapiens
  misc_RNA (1)...(19): siRNA sense strand
aagaacaaauggaacgcga

SEQ ID NO: 2325618 - RNA, 19 nt, Homo sapiens
  misc_RNA (1)...(19): siRNA sense strand
agggaagcuaugcgaaauu

SEQ ID NO: 2325619 - RNA, 19 nt, Homo sapiens
  misc_RNA (1)...(19): siRNA sense strand
cauuauuggaugcagauga

SEQ ID NO: 2325620 - RNA, 19 nt, Homo sapiens
  misc_RNA (1)...(19): siRNA sense strand
cauuuauugggauaggaaa

SEQ ID NO: 2325621 - RNA, 19 nt, Homo sapiens
  misc_RNA (1)...(19): siRNA sense strand
uaaacgacuuacuagggaa

SEQ ID NO: 2325622 - RNA, 19 nt, Homo sapiens
  misc_RNA (1)...(19): siRNA sense strand
ucacaguccgagauggcua

SEQ ID NO: 2325623 - RNA, 19 nt, Homo sapiens
  misc_RNA (1)...(19): siRNA sense strand
acaaauucaaccaguguca

SEQ ID NO: 2325624 - RNA, 19 nt, Homo sapiens
  misc_RNA (1)...(19): siRNA sense strand
uaccuuaaggauacagaaa

SEQ ID NO: 2325625 - RNA, 19 nt, Homo sapiens
  misc_RNA (1)...(19): siRNA sense strand
uuuaaaagagcgaggggau

SEQ ID NO: 2325626 - RNA, 19 nt, Homo sapiens
  misc_RNA (1)...(19): siRNA sense strand
ccagacaguuaguaccaga

SEQ ID NO: 2325627 - RNA, 19 nt, Homo sapiens
  misc_RNA (1)...(19): siRNA sense strand
aaucaaacacaaacagcga

SEQ ID NO: 2325628 - RNA, 19 nt, Homo sapiens
  misc_RNA (1)...(19): siRNA sense strand
cagucaaacuugugugcuc

SEQ ID NO: 2325629 - RNA, 19 nt, Homo sapiens
  misc_RNA (1)...(19): siRNA sense strand
ccuuugggaugcugggaau

SEQ ID NO: 2325630 - RNA, 19 nt, Homo sapiens
  misc_RNA (1)...(19): siRNA sense strand
gcagauguccauugggcau

SEQ ID NO: 2325631 - RNA, 19 nt, Homo sapiens
  misc_RNA (1)...(19): siRNA sense strand
gggcaucacauccgggaca

SEQ ID NO: 2325632 - RNA, 19 nt, Homo sapiens
  misc_RNA (1)...(19): siRNA sense strand
augaaugacaugauuggaa

SEQ ID NO: 2325633 - RNA, 19 nt, Homo sapiens
  misc_RNA (1)...(19): siRNA sense strand
cggaggacuguucgggauu

SEQ ID NO: 2325634 - RNA, 19 nt, Homo sapiens
  misc_RNA (1)...(19): siRNA sense strand
cgucagcauaugagccgua

SEQ ID NO: 2325635 - RNA, 19 nt, Homo sapiens
  misc_RNA (1)...(19): siRNA sense strand
ccgcagcguuugaugacga

SEQ ID NO: 2325636 - RNA, 19 nt, Homo sapiens
  misc_RNA (1)...(19): siRNA sense strand
aagcaagagccgauggaau

SEQ ID NO: 2325637 - RNA, 19 nt, Homo sapiens
  misc_RNA (1)...(19): siRNA sense strand
cuacaaaguuucugaccca

SEQ ID NO: 2325638 - RNA, 19 nt, Homo sapiens
  misc_RNA (1)...(19): siRNA sense strand
ucucagugcaagugacuaa

SEQ ID NO: 2325639 - RNA, 19 nt, Homo sapiens
  misc_RNA (1)...(19): siRNA sense strand
aaauaaugaagcugccaaa

SEQ ID NO: 2325640 - RNA, 19 nt, Homo sapiens
  misc_RNA (1)...(19): siRNA sense strand
caagagacuuauagccaca

SEQ ID NO: 2325641 - RNA, 19 nt, Homo sapiens
  misc_RNA (1)...(19): siRNA sense strand
agaucaaaguagaagccuu

SEQ ID NO: 2325642 - RNA, 19 nt, Homo sapiens
  misc_RNA (1)...(19): siRNA sense strand
augauggugugguaggaaa

SEQ ID NO: 2325643 - RNA, 19 nt, Homo sapiens
  misc_RNA (1)...(19): siRNA sense strand
auggagaagacgagcaaca

SEQ ID NO: 2325644 - RNA, 19 nt, Homo sapiens
  misc_RNA (1)...(19): siRNA sense strand
ggaucaaagccaaagccau

SEQ ID NO: 2325645 - RNA, 19 nt, Homo sapiens
  misc_RNA (1)...(19): siRNA sense strand
gaucaaagccaaagccaug

SEQ ID NO: 2325646 - RNA, 19 nt, Homo sapiens
  misc_RNA (1)...(19): siRNA sense strand
ccaguagcaauguggacaa

SEQ ID NO: 2325647 - RNA, 19 nt, Homo sapiens
  misc_RNA (1)...(19): siRNA sense strand
cgugagaagcgucgacuga

SEQ ID NO: 2325648 - RNA, 19 nt, Homo sapiens
  misc_RNA (1)...(19): siRNA sense strand
gugucaaguaguuguauuu

SEQ ID NO: 2325649 - RNA, 19 nt, Homo sapiens
  misc_RNA (1)...(19): siRNA sense strand
cauuaaacacucuccacaa

SEQ ID NO: 2325650 - RNA, 19 nt, Homo sapiens
  misc_RNA (1)...(19): siRNA sense strand
ugauggagaagacgagcaa

SEQ ID NO: 2325651 - RNA, 19 nt, Homo sapiens
  misc_RNA (1)...(19): siRNA sense strand
gcuccggaucaaagccaaa

SEQ ID NO: 2325652 - RNA, 19 nt, Homo sapiens
  misc_RNA (1)...(19): siRNA sense strand
ccuauugacaugacaucua

SEQ ID NO: 2325653 - RNA, 19 nt, Homo sapiens
  misc_RNA (1)...(19): siRNA sense strand
gugaaggaaguguggggaa

SEQ ID NO: 2325654 - RNA, 19 nt, Homo sapiens
  misc_RNA (1)...(19): siRNA sense strand
ugucggaggaaacgggaau

SEQ ID NO: 2325655 - RNA, 19 nt, Homo sapiens
  misc_RNA (1)...(19): siRNA sense strand
acacaagggagccaagaga

SEQ ID NO: 2325656 - RNA, 19 nt, Homo sapiens
  misc_RNA (1)...(19): siRNA sense strand
guuccagauuaucaagcaa

SEQ ID NO: 2325657 - RNA, 19 nt, Homo sapiens
  misc_RNA (1)...(19): siRNA sense strand
cuggaguuguugaaaugaa

SEQ ID NO: 2325658 - RNA, 19 nt, Homo sapiens
  misc_RNA (1)...(19): siRNA sense strand
cugcagaaguccugaaaac

SEQ ID NO: 2325659 - RNA, 19 nt, Homo sapiens
  misc_RNA (1)...(19): siRNA sense strand
aaaagaacugaguggcaaa

SEQ ID NO: 2325660 - RNA, 19 nt, Homo sapiens
  misc_RNA (1)...(19): siRNA sense strand
guucauuuguggacgagca

SEQ ID NO: 2325661 - RNA, 19 nt, Homo sapiens
  misc_RNA (1)...(19): siRNA sense strand
ccacaacaggugaggacgu

SEQ ID NO: 2325662 - RNA, 19 nt, Homo sapiens
  misc_RNA (1)...(19): siRNA sense strand
acuaauugcacugggagaa

SEQ ID NO: 2325663 - RNA, 19 nt, Homo sapiens
  misc_RNA (1)...(19): siRNA sense strand
acuuauagccacacaacca

SEQ ID NO: 2325664 - RNA, 19 nt, Homo sapiens
  misc_RNA (1)...(19): siRNA sense strand
uaucaaaacuauaugggga

SEQ ID NO: 2325665 - RNA, 19 nt, Homo sapiens
  misc_RNA (1)...(19): siRNA sense strand
agauucagaaacucaguaa

SEQ ID NO: 2325666 - RNA, 19 nt, Homo sapiens
  misc_RNA (1)...(19): siRNA sense strand
ucaccaagcugaauggcau

SEQ ID NO: 2325667 - RNA, 19 nt, Homo sapiens
  misc_RNA (1)...(19): siRNA sense strand
agcaagagcaccagcaaca

SEQ ID NO: 2325668 - RNA, 19 nt, Homo sapiens
  misc_RNA (1)...(19): siRNA sense strand
gcugagaugcagagugcca

SEQ ID NO: 2325669 - RNA, 19 nt, Homo sapiens
  misc_RNA (1)...(19): siRNA sense strand
aggagaucugggaggauuu

SEQ ID NO: 2325670 - RNA, 19 nt, Homo sapiens
  misc_RNA (1)...(19): siRNA sense strand
acaaaaggugucugaagaa

SEQ ID NO: 2325671 - RNA, 19 nt, Homo sapiens
  misc_RNA (1)...(19): siRNA sense strand
cagaacauccaguacaaaa

SEQ ID NO: 2325672 - RNA, 19 nt, Homo sapiens
  misc_RNA (1)...(19): siRNA sense strand
ggagcauccagcagaacau

SEQ ID NO: 2325673 - RNA, 19 nt, Homo sapiens
  misc_RNA (1)...(19): siRNA sense strand
caaaguaugaggaggccaa

SEQ ID NO: 2325674 - RNA, 19 nt, Homo sapiens
  misc_RNA (1)...(19): siRNA sense strand
cauuucuacuggaggacaa

SEQ ID NO: 2325675 - RNA, 19 nt, Homo sapiens
  misc_RNA (1)...(19): siRNA sense strand
aguuugggaucguggucua

SEQ ID NO: 2325676 - RNA, 19 nt, Homo sapiens
  misc_RNA (1)...(19): siRNA sense strand
ggacaaaguaugaggaggc

SEQ ID NO: 2325677 - RNA, 19 nt, Homo sapiens
  misc_RNA (1)...(19): siRNA sense strand
cugcaggagaagagcuaca

SEQ ID NO: 2325678 - RNA, 19 nt, Homo sapiens
  misc_RNA (1)...(19): siRNA sense strand
ugcucaagcucuauggaau

SEQ ID NO: 2325679 - RNA, 19 nt, Homo sapiens
  misc_RNA (1)...(19): siRNA sense strand
caucagaguucacugggau

SEQ ID NO: 2325680 - RNA, 19 nt, Homo sapiens
  misc_RNA (1)...(19): siRNA sense strand
acacagucaccuucagcaa

SEQ ID NO: 2325681 - RNA, 19 nt, Homo sapiens
  misc_RNA (1)...(19): siRNA sense strand
aggagaagagcuacaacuu

SEQ ID NO: 2325682 - RNA, 19 nt, Homo sapiens
  misc_RNA (1)...(19): siRNA sense strand
agaucgugguggugggaga

SEQ ID NO: 2325683 - RNA, 19 nt, Homo sapiens
  misc_RNA (1)...(19): siRNA sense strand
gagcucaacaugugggaca

SEQ ID NO: 2325684 - RNA, 19 nt, Homo sapiens
  misc_RNA (1)...(19): siRNA sense strand
ggggaaugagggcgagaua

SEQ ID NO: 2325685 - RNA, 19 nt, Homo sapiens
  misc_RNA (1)...(19): siRNA sense strand
ucaagaaguggcaaggaga

SEQ ID NO: 2325686 - RNA, 19 nt, Homo sapiens
  misc_RNA (1)...(19): siRNA sense strand
agagaagaaaccagaguca

SEQ ID NO: 2325687 - RNA, 19 nt, Homo sapiens
  misc_RNA (1)...(19): siRNA sense strand
augaguuuguagaggagaa

SEQ ID NO: 2325688 - RNA, 19 nt, Homo sapiens
  misc_RNA (1)...(19): siRNA sense strand
agguggacacugaggauau

SEQ ID NO: 2325689 - RNA, 19 nt, Homo sapiens
  misc_RNA (1)...(19): siRNA sense strand
uagccaaggaguagaagau

SEQ ID NO: 2325690 - RNA, 19 nt, Homo sapiens
  misc_RNA (1)...(19): siRNA sense strand
cagggaugucauaguuaaa

SEQ ID NO: 2325691 - RNA, 19 nt, Homo sapiens
  misc_RNA (1)...(19): siRNA sense strand
cugauacauaugaggaaga

SEQ ID NO: 2325692 - RNA, 19 nt, Homo sapiens
  misc_RNA (1)...(19): siRNA sense strand
uggcaggagugaaaggacu

SEQ ID NO: 2325693 - RNA, 19 nt, Homo sapiens
  misc_RNA (1)...(19): siRNA sense strand
gagugaaaggacugaccau

SEQ ID NO: 2325694 - RNA, 19 nt, Homo sapiens
  misc_RNA (1)...(19): siRNA sense strand
acuugauucuucugagaca

SEQ ID NO: 2325695 - RNA, 19 nt, Homo sapiens
  misc_RNA (1)...(19): siRNA sense strand
aggaagauucugaguuguu

SEQ ID NO: 2325696 - RNA, 19 nt, Homo sapiens
  misc_RNA (1)...(19): siRNA sense strand
ggaaugggauuguggagug

SEQ ID NO: 2325697 - RNA, 19 nt, Homo sapiens
  misc_RNA (1)...(19): siRNA sense strand
guucuuuacaggagauguu

SEQ ID NO: 2325698 - RNA, 19 nt, Homo sapiens
  misc_RNA (1)...(19): siRNA sense strand
ccaaauugaagaugggaaa

SEQ ID NO: 2325699 - RNA, 19 nt, Homo sapiens
  misc_RNA (1)...(19): siRNA sense strand
aguacaaagucaaggagaa

SEQ ID NO: 2325700 - RNA, 19 nt, Homo sapiens
  misc_RNA (1)...(19): siRNA sense strand
gggcaaaguacuuguucaa

SEQ ID NO: 2325701 - RNA, 19 nt, Homo sapiens
  misc_RNA (1)...(19): siRNA sense strand
ggacaaacuauggcggaaa

SEQ ID NO: 2325702 - RNA, 19 nt, Homo sapiens
  misc_RNA (1)...(19): siRNA sense strand
ugauaguauuggaaggauu

SEQ ID NO: 2325703 - RNA, 19 nt, Homo sapiens
  misc_RNA (1)...(19): siRNA sense strand
gggcuaaaucaacuggaua

SEQ ID NO: 2325704 - RNA, 19 nt, Homo sapiens
  misc_RNA (1)...(19): siRNA sense strand
cgucagugaagaagagaga

SEQ ID NO: 2325705 - RNA, 19 nt, Homo sapiens
  misc_RNA (1)...(19): siRNA sense strand
agaggaaauuagaugagaa

SEQ ID NO: 2325706 - RNA, 19 nt, Homo sapiens
  misc_RNA (1)...(19): siRNA sense strand
acaaagucaaggagaagaa

SEQ ID NO: 2325707 - RNA, 19 nt, Homo sapiens
  misc_RNA (1)...(19): siRNA sense strand
agggagagacggaagcuaa

SEQ ID NO: 2325708 - RNA, 19 nt, Homo sapiens
  misc_RNA (1)...(19): siRNA sense strand
ggcuaaaucaacuggauau

SEQ ID NO: 2325709 - RNA, 19 nt, Homo sapiens
  misc_RNA (1)...(19): siRNA sense strand
gcuaauaaucacaagaagu

SEQ ID NO: 2325710 - RNA, 19 nt, Homo sapiens
  misc_RNA (1)...(19): siRNA sense strand
ccgaagagggagagacgga

SEQ ID NO: 2325711 - RNA, 19 nt, Homo sapiens
  misc_RNA (1)...(19): siRNA sense strand
agagaagccgcaagaggaa

SEQ ID NO: 2325712 - RNA, 19 nt, Homo sapiens
  misc_RNA (1)...(19): siRNA sense strand
cugacuauaauguggaauu

SEQ ID NO: 2325713 - RNA, 19 nt, Homo sapiens
  misc_RNA (1)...(19): siRNA sense strand
augaagauggugacauuaa

SEQ ID NO: 2325714 - RNA, 19 nt, Homo sapiens
  misc_RNA (1)...(19): siRNA sense strand
ggagaagaaacgaaugcau

SEQ ID NO: 2325715 - RNA, 19 nt, Homo sapiens
  misc_RNA (1)...(19): siRNA sense strand
gcaucgagacuuugagagu

SEQ ID NO: 2325716 - RNA, 19 nt, Homo sapiens
  misc_RNA (1)...(19): siRNA sense strand
uuacaagacaagauaguga

SEQ ID NO: 2325717 - RNA, 19 nt, Homo sapiens
  misc_RNA (1)...(19): siRNA sense strand
gggagagacggaagcuaau

SEQ ID NO: 2325718 - RNA, 19 nt, Homo sapiens
  misc_RNA (1)...(19): siRNA sense strand
ucuuauugaaaguggaaca

SEQ ID NO: 2325719 - RNA, 19 nt, Homo sapiens
  misc_RNA (1)...(19): siRNA sense strand
cuacuaaggaaugggcuaa

SEQ ID NO: 2325720 - RNA, 19 nt, Homo sapiens
  misc_RNA (1)...(19): siRNA sense strand
agaagaaacgaaugcauca

SEQ ID NO: 2325721 - RNA, 19 nt, Homo sapiens
  misc_RNA (1)...(19): siRNA sense strand
gagagaagccgcaagagga

SEQ ID NO: 2325722 - RNA, 19 nt, Homo sapiens
  misc_RNA (1)...(19): siRNA sense strand
uucuagauguaaagagcua

SEQ ID NO: 2325723 - RNA, 19 nt, Homo sapiens
  misc_RNA (1)...(19): siRNA sense strand
ugaagaugggaaaggaaca

SEQ ID NO: 2325724 - RNA, 19 nt, Homo sapiens
  misc_RNA (1)...(19): siRNA sense strand
aauuugaaguuguugguga

SEQ ID NO: 2325725 - RNA, 19 nt, Homo sapiens
  misc_RNA (1)...(19): siRNA sense strand
ucuacuaaggaaugggcua

SEQ ID NO: 2325726 - RNA, 19 nt, Homo sapiens
  misc_RNA (1)...(19): siRNA sense strand
acaagacaagauagugaaa

SEQ ID NO: 2325727 - RNA, 19 nt, Homo sapiens
  misc_RNA (1)...(19): siRNA sense strand
aagaagaugcugaucaaga

SEQ ID NO: 2325728 - RNA, 19 nt, Homo sapiens
  misc_RNA (1)...(19): siRNA sense strand
agccagagcuagagcaucu

SEQ ID NO: 2325729 - RNA, 19 nt, Homo sapiens
  misc_RNA (1)...(19): siRNA sense strand
acguauuucuacuaaggaa

SEQ ID NO: 2325730 - RNA, 19 nt, Homo sapiens
  misc_RNA (1)...(19): siRNA sense strand
aggaaaguguacugcaguu

SEQ ID NO: 2325731 - RNA, 19 nt, Homo sapiens
  misc_RNA (1)...(19): siRNA sense strand
aaguggaacagcuggguau

SEQ ID NO: 2325732 - RNA, 19 nt, Homo sapiens
  misc_RNA (1)...(19): siRNA sense strand
ucaaaucaauggcagggaa

SEQ ID NO: 2325733 - RNA, 19 nt, Homo sapiens
  misc_RNA (1)...(19): siRNA sense strand
cugaauguccauaaaguga

SEQ ID NO: 2325734 - RNA, 19 nt, Homo sapiens
  misc_RNA (1)...(19): siRNA sense strand
agcugaagaugcugccaaa

SEQ ID NO: 2325735 - RNA, 19 nt, Homo sapiens
  misc_RNA (1)...(19): siRNA sense strand
agggugugaccgaguguua

SEQ ID NO: 2325736 - RNA, 19 nt, Homo sapiens
  misc_RNA (1)...(19): siRNA sense strand
auagugaagaccuaggaaa

SEQ ID NO: 2325737 - RNA, 19 nt, Homo sapiens
  misc_RNA (1)...(19): siRNA sense strand
aagcauaaccaauggcagu

SEQ ID NO: 2325738 - RNA, 19 nt, Homo sapiens
  misc_RNA (1)...(19): siRNA sense strand
uggacaaacuauggcggaa

SEQ ID NO: 2325739 - RNA, 19 nt, Homo sapiens
  misc_RNA (1)...(19): siRNA sense strand
gaagaugggaaaggaacaa

SEQ ID NO: 2325740 - RNA, 19 nt, Homo sapiens
  misc_RNA (1)...(19): siRNA sense strand
gugcaaagaggucacguau

SEQ ID NO: 2325741 - RNA, 19 nt, Homo sapiens
  misc_RNA (1)...(19): siRNA sense strand
agaugcugaucaagaagua

SEQ ID NO: 2325742 - RNA, 19 nt, Homo sapiens
  misc_RNA (1)...(19): siRNA sense strand
gcucauaugggauaaggau

SEQ ID NO: 2325743 - RNA, 19 nt, Homo sapiens
  misc_RNA (1)...(19): siRNA sense strand
gcccaaacaagcugaagau

SEQ ID NO: 2325744 - RNA, 19 nt, Homo sapiens
  misc_RNA (1)...(19): siRNA sense strand
aagcuaauaucguugccua

SEQ ID NO: 2325745 - RNA, 19 nt, Homo sapiens
  misc_RNA (1)...(19): siRNA sense strand
cuguacaauucguaacaca

SEQ ID NO: 2325746 - RNA, 19 nt, Homo sapiens
  misc_RNA (1)...(19): siRNA sense strand
cguauuucuacuaaggaau

SEQ ID NO: 2325747 - RNA, 19 nt, Homo sapiens
  misc_RNA (1)...(19): siRNA sense strand
aaacauguuggaagaucaa

SEQ ID NO: 2325748 - RNA, 19 nt, Homo sapiens
  misc_RNA (1)...(19): siRNA sense strand
uggaaggauugaagauuuu

SEQ ID NO: 2325749 - RNA, 19 nt, Homo sapiens
  misc_RNA (1)...(19): siRNA sense strand
gaauaaacaaccaaaccca

SEQ ID NO: 2325750 - RNA, 19 nt, Homo sapiens
  misc_RNA (1)...(19): siRNA sense strand
ugacaaaaucagaggcaua

SEQ ID NO: 2325751 - RNA, 19 nt, Homo sapiens
  misc_RNA (1)...(19): siRNA sense strand
ccuauaagacagaagaaaa

SEQ ID NO: 2325752 - RNA, 19 nt, Homo sapiens
  misc_RNA (1)...(19): siRNA sense strand
cugaagacaagaagaaaca

SEQ ID NO: 2325753 - RNA, 19 nt, Homo sapiens
  misc_RNA (1)...(19): siRNA sense strand
aagaauacaaucuggccaa

SEQ ID NO: 2325754 - RNA, 19 nt, Homo sapiens
  misc_RNA (1)...(19): siRNA sense strand
gaauauauggauugggauc

SEQ ID NO: 2325755 - RNA, 19 nt, Homo sapiens
  misc_RNA (1)...(19): siRNA sense strand
cugcaaaauuaccaagaau

SEQ ID NO: 2325756 - RNA, 19 nt, Homo sapiens
  misc_RNA (1)...(19): siRNA sense strand
ccuuaauaccguugcaagu

SEQ ID NO: 2325757 - RNA, 19 nt, Homo sapiens
  misc_RNA (1)...(19): siRNA sense strand
aggcauacuuuauaggacu

SEQ ID NO: 2325758 - RNA, 19 nt, Homo sapiens
  misc_RNA (1)...(19): siRNA sense strand
cauucaaagaagugggaag

SEQ ID NO: 2325759 - RNA, 19 nt, Homo sapiens
  misc_RNA (1)...(19): siRNA sense strand
auucaaagaagugggaaga

SEQ ID NO: 2325760 - RNA, 19 nt, Homo sapiens
  misc_RNA (1)...(19): siRNA sense strand
ucgaauauauggauuggga

SEQ ID NO: 2325761 - RNA, 19 nt, Homo sapiens
  misc_RNA (1)...(19): siRNA sense strand
aggacuguguggugcuauu

SEQ ID NO: 2325762 - RNA, 19 nt, Homo sapiens
  misc_RNA (1)...(19): siRNA sense strand
ccugaagacaagaagaaac

SEQ ID NO: 2325763 - RNA, 19 nt, Homo sapiens
  misc_RNA (1)...(19): siRNA sense strand
gaaagauaucaccaggaga

SEQ ID NO: 2325764 - RNA, 19 nt, Homo sapiens
  misc_RNA (1)...(19): siRNA sense strand
gcuuggaagaagaggaagu

SEQ ID NO: 2325765 - RNA, 19 nt, Homo sapiens
  misc_RNA (1)...(19): siRNA sense strand
gaucaggagcccagaggca

SEQ ID NO: 2325766 - RNA, 19 nt, Homo sapiens
  misc_RNA (1)...(19): siRNA sense strand
acgaccggguagagaacua

SEQ ID NO: 2325767 - RNA, 19 nt, Homo sapiens
  misc_RNA (1)...(19): siRNA sense strand
aggcuuggaagaagaggaa

SEQ ID NO: 2325768 - RNA, 19 nt, Homo sapiens
  misc_RNA (1)...(19): siRNA sense strand
agaaggacuugcagagcca

SEQ ID NO: 2325769 - RNA, 19 nt, Homo sapiens
  misc_RNA (1)...(19): siRNA sense strand
ccuucaaagccguggagca

SEQ ID NO: 2325770 - RNA, 19 nt, Homo sapiens
  misc_RNA (1)...(19): siRNA sense strand
agugggaaguggugguuca

SEQ ID NO: 2325771 - RNA, 19 nt, Homo sapiens
  misc_RNA (1)...(19): siRNA sense strand
ucaucgaggacgagaagau

SEQ ID NO: 2325772 - RNA, 19 nt, Homo sapiens
  misc_RNA (1)...(19): siRNA sense strand
acaagaaacccgaggacug

SEQ ID NO: 2325773 - RNA, 19 nt, Homo sapiens
  misc_RNA (1)...(19): siRNA sense strand
gugcugaccaggaggaagu

SEQ ID NO: 2325774 - RNA, 19 nt, Homo sapiens
  misc_RNA (1)...(19): siRNA sense strand
gcuacaaguuuacccgaca

SEQ ID NO: 2325775 - RNA, 19 nt, Homo sapiens
  misc_RNA (1)...(19): siRNA sense strand
cagaagaaggacuugcaga

SEQ ID NO: 2325776 - RNA, 19 nt, Homo sapiens
  misc_RNA (1)...(19): siRNA sense strand
gggaguugcgagugccaga

SEQ ID NO: 2325777 - RNA, 19 nt, Homo sapiens
  misc_RNA (1)...(19): siRNA sense strand
ggaaacugaagcaggccuu

SEQ ID NO: 2325778 - RNA, 19 nt, Homo sapiens
  misc_RNA (1)...(19): siRNA sense strand
cugcggaggcacauggaga

SEQ ID NO: 2325779 - RNA, 19 nt, Homo sapiens
  misc_RNA (1)...(19): siRNA sense strand
gaggaaguuucgaggacuc

SEQ ID NO: 2325780 - RNA, 19 nt, Homo sapiens
  misc_RNA (1)...(19): siRNA sense strand
acgagaagauggugguggu

SEQ ID NO: 2325781 - RNA, 19 nt, Homo sapiens
  misc_RNA (1)...(19): siRNA sense strand
ggccaguaccuuagggaca

SEQ ID NO: 2325782 - RNA, 19 nt, Homo sapiens
  misc_RNA (1)...(19): siRNA sense strand
gcgaagaggaagagaaaac

SEQ ID NO: 2325783 - RNA, 19 nt, Homo sapiens
  misc_RNA (1)...(19): siRNA sense strand
cagcgaaccugaugggauc

SEQ ID NO: 2325784 - RNA, 19 nt, Homo sapiens
  misc_RNA (1)...(19): siRNA sense strand
agaacugcgaagaggaaga

SEQ ID NO: 2325785 - RNA, 19 nt, Homo sapiens
  misc_RNA (1)...(19): siRNA sense strand
cucagauaccugugaagaa

SEQ ID NO: 2325786 - RNA, 19 nt, Homo sapiens
  misc_RNA (1)...(19): siRNA sense strand
gcagcgaaccugaugggau

SEQ ID NO: 2325787 - RNA, 19 nt, Homo sapiens
  misc_RNA (1)...(19): siRNA sense strand
ggaccaugcuagcucccaa

SEQ ID NO: 2325788 - RNA, 19 nt, Homo sapiens
  misc_RNA (1)...(19): siRNA sense strand
gggagaacugcgaagagga

SEQ ID NO: 2325789 - RNA, 19 nt, Homo sapiens
  misc_RNA (1)...(19): siRNA sense strand
ccacuaagcuauuggcagc

SEQ ID NO: 2325790 - RNA, 19 nt, Homo sapiens
  misc_RNA (1)...(19): siRNA sense strand
ggagaaggccaucaggacu

SEQ ID NO: 2325791 - RNA, 19 nt, Homo sapiens
  misc_RNA (1)...(19): siRNA sense strand
caagauggaccaaagcaga

SEQ ID NO: 2325792 - RNA, 19 nt, Homo sapiens
  misc_RNA (1)...(19): siRNA sense strand
ggaagaaauucgagcuggu

SEQ ID NO: 2325793 - RNA, 19 nt, Homo sapiens
  misc_RNA (1)...(19): siRNA sense strand
uggagagagcugugagcga

SEQ ID NO: 2325794 - RNA, 19 nt, Homo sapiens
  misc_RNA (1)...(19): siRNA sense strand
ccaagcagaucgagcgcua

SEQ ID NO: 2325795 - RNA, 19 nt, Homo sapiens
  misc_RNA (1)...(19): siRNA sense strand
cauuaagaucagugaccua

SEQ ID NO: 2325796 - RNA, 19 nt, Homo sapiens
  misc_RNA (1)...(19): siRNA sense strand
ugauugaauacaaggagaa

SEQ ID NO: 2325797 - RNA, 19 nt, Homo sapiens
  misc_RNA (1)...(19): siRNA sense strand
aaauaagagcccugaggau

SEQ ID NO: 2325798 - RNA, 19 nt, Homo sapiens
  misc_RNA (1)...(19): siRNA sense strand
gugauugaauacaaggaga

SEQ ID NO: 2325799 - RNA, 19 nt, Homo sapiens
  misc_RNA (1)...(19): siRNA sense strand
uugaauacaaggagaaguu

SEQ ID NO: 2325800 - RNA, 19 nt, Homo sapiens
  misc_RNA (1)...(19): siRNA sense strand
uggcuaacacaaugagaga

SEQ ID NO: 2325801 - RNA, 19 nt, Homo sapiens
  misc_RNA (1)...(19): siRNA sense strand
agagauaaugcaugugaga

SEQ ID NO: 2325802 - RNA, 19 nt, Homo sapiens
  misc_RNA (1)...(19): siRNA sense strand
agcuggaaguugaagaauu

SEQ ID NO: 2325803 - RNA, 19 nt, Homo sapiens
  misc_RNA (1)...(19): siRNA sense strand
cuacaauggcacaaggagu

SEQ ID NO: 2325804 - RNA, 19 nt, Homo sapiens
  misc_RNA (1)...(19): siRNA sense strand
cuggacuucgggagagaua

SEQ ID NO: 2325805 - RNA, 19 nt, Homo sapiens
  misc_RNA (1)...(19): siRNA sense strand
cagaguugguauaugcaga

SEQ ID NO: 2325806 - RNA, 19 nt, Homo sapiens
  misc_RNA (1)...(19): siRNA sense strand
uggcacaaggagugauuga

SEQ ID NO: 2325807 - RNA, 19 nt, Homo sapiens
  misc_RNA (1)...(19): siRNA sense strand
ccauggaaggaguggguac

SEQ ID NO: 2325808 - RNA, 19 nt, Homo sapiens
  misc_RNA (1)...(19): siRNA sense strand
cacaaugagagaaguuaau

SEQ ID NO: 2325809 - RNA, 19 nt, Homo sapiens
  misc_RNA (1)...(19): siRNA sense strand
ugaagcagccggugcccaa

SEQ ID NO: 2325810 - RNA, 19 nt, Homo sapiens
  misc_RNA (1)...(19): siRNA sense strand
agagcuggaaguugaagaa

SEQ ID NO: 2325811 - RNA, 19 nt, Homo sapiens
  misc_RNA (1)...(19): siRNA sense strand
aggauggcgugguggagau

SEQ ID NO: 2325812 - RNA, 19 nt, Homo sapiens
  misc_RNA (1)...(19): siRNA sense strand
caguaaaccaggagaauau

SEQ ID NO: 2325813 - RNA, 19 nt, Homo sapiens
  misc_RNA (1)...(19): siRNA sense strand
cagaaagagcacaggacaa

SEQ ID NO: 2325814 - RNA, 19 nt, Homo sapiens
  misc_RNA (1)...(19): siRNA sense strand
cugaaauggugguggauca

SEQ ID NO: 2325815 - RNA, 19 nt, Homo sapiens
  misc_RNA (1)...(19): siRNA sense strand
ggaaagaagaccagagaac

SEQ ID NO: 2325816 - RNA, 19 nt, Homo sapiens
  misc_RNA (1)...(19): siRNA sense strand
cugcaagaauauuuggaua

SEQ ID NO: 2325817 - RNA, 19 nt, Homo sapiens
  misc_RNA (1)...(19): siRNA sense strand
aaagaagaccagagaacaa

SEQ ID NO: 2325818 - RNA, 19 nt, Homo sapiens
  misc_RNA (1)...(19): siRNA sense strand
agaccaagaacaagcaaua

SEQ ID NO: 2325819 - RNA, 19 nt, Homo sapiens
  misc_RNA (1)...(19): siRNA sense strand
aaagaaagucgcugagcaa

SEQ ID NO: 2325820 - RNA, 19 nt, Homo sapiens
  misc_RNA (1)...(19): siRNA sense strand
aaacagaugagaaggcaaa

SEQ ID NO: 2325821 - RNA, 19 nt, Homo sapiens
  misc_RNA (1)...(19): siRNA sense strand
gcucaaguucaguguguua

SEQ ID NO: 2325822 - RNA, 19 nt, Homo sapiens
  misc_RNA (1)...(19): siRNA sense strand
gcaauauacuugugccgua

SEQ ID NO: 2325823 - RNA, 19 nt, Homo sapiens
  misc_RNA (1)...(19): siRNA sense strand
acaaagaaccggaagacau

SEQ ID NO: 2325824 - RNA, 19 nt, Homo sapiens
  misc_RNA (1)...(19): siRNA sense strand
gagaauugguagaagaacu

SEQ ID NO: 2325825 - RNA, 19 nt, Homo sapiens
  misc_RNA (1)...(19): siRNA sense strand
agacaaagauaucaagcau

SEQ ID NO: 2325826 - RNA, 19 nt, Homo sapiens
  misc_RNA (1)...(19): siRNA sense strand
gauccuacgaugaagauaa

SEQ ID NO: 2325827 - RNA, 19 nt, Homo sapiens
  misc_RNA (1)...(19): siRNA sense strand
ggcugaugcugguguaaua

SEQ ID NO: 2325828 - RNA, 19 nt, Homo sapiens
  misc_RNA (1)...(19): siRNA sense strand
ucacaugaauacagaccaa

SEQ ID NO: 2325829 - RNA, 19 nt, Homo sapiens
  misc_RNA (1)...(19): siRNA sense strand
aggaaaagucuaugaacaa

SEQ ID NO: 2325830 - RNA, 19 nt, Homo sapiens
  misc_RNA (1)...(19): siRNA sense strand
ugaugagacuagagagcau

SEQ ID NO: 2325831 - RNA, 19 nt, Homo sapiens
  misc_RNA (1)...(19): siRNA sense strand
cgucacugguccugaacaa

SEQ ID NO: 2325832 - RNA, 19 nt, Homo sapiens
  misc_RNA (1)...(19): siRNA sense strand
uggcagagccccuggaaaa

SEQ ID NO: 2325833 - RNA, 19 nt, Homo sapiens
  misc_RNA (1)...(19): siRNA sense strand
ggucaaagacaaagauauc

SEQ ID NO: 2325834 - RNA, 19 nt, Homo sapiens
  misc_RNA (1)...(19): siRNA sense strand
cagcacaaauggagcccua

SEQ ID NO: 2325835 - RNA, 19 nt, Homo sapiens
  misc_RNA (1)...(19): siRNA sense strand
ggaacuuaauccugaccaa

SEQ ID NO: 2325836 - RNA, 19 nt, Homo sapiens
  misc_RNA (1)...(19): siRNA sense strand
ggccaaguauggagaugaa

SEQ ID NO: 2325837 - RNA, 19 nt, Homo sapiens
  misc_RNA (1)...(19): siRNA sense strand
caagauugguggaggugau

SEQ ID NO: 2325838 - RNA, 19 nt, Homo sapiens
  misc_RNA (1)...(19): siRNA sense strand
ccgagaaaagcuugagaaa

SEQ ID NO: 2325839 - RNA, 19 nt, Homo sapiens
  misc_RNA (1)...(19): siRNA sense strand
auucagagcucaucgcaaa

SEQ ID NO: 2325840 - RNA, 19 nt, Homo sapiens
  misc_RNA (1)...(19): siRNA sense strand
aaugagaaauggagcaaca

SEQ ID NO: 2325841 - RNA, 19 nt, Homo sapiens
  misc_RNA (1)...(19): siRNA sense strand
caaggaauuaccugggaaa

SEQ ID NO: 2325842 - RNA, 19 nt, Homo sapiens
  misc_RNA (1)...(19): siRNA sense strand
guuacuuuguggagaaauu

SEQ ID NO: 2325843 - RNA, 19 nt, Homo sapiens
  misc_RNA (1)...(19): siRNA sense strand
agacaguaaaccaggagaa

SEQ ID NO: 2325844 - RNA, 19 nt, Homo sapiens
  misc_RNA (1)...(19): siRNA sense strand
guaauaagugacagcacaa

SEQ ID NO: 2325845 - RNA, 19 nt, Homo sapiens
  misc_RNA (1)...(19): siRNA sense strand
cugaauauguccagggaac

SEQ ID NO: 2325846 - RNA, 19 nt, Homo sapiens
  misc_RNA (1)...(19): siRNA sense strand
ccucgaggucaaagacaaa

SEQ ID NO: 2325847 - RNA, 19 nt, Homo sapiens
  misc_RNA (1)...(19): siRNA sense strand
gaacauugguuuacgggca

SEQ ID NO: 2325848 - RNA, 19 nt, Homo sapiens
  misc_RNA (1)...(19): siRNA sense strand
gcgaugaacaacagcgaga

SEQ ID NO: 2325849 - RNA, 19 nt, Homo sapiens
  misc_RNA (1)...(19): siRNA sense strand
guacagugagcuacgauaa

SEQ ID NO: 2325850 - RNA, 19 nt, Homo sapiens
  misc_RNA (1)...(19): siRNA sense strand
ucagagaauugguagaaga

SEQ ID NO: 2325851 - RNA, 19 nt, Homo sapiens
  misc_RNA (1)...(19): siRNA sense strand
acaccaacagagagauuua

SEQ ID NO: 2325852 - RNA, 19 nt, Homo sapiens
  misc_RNA (1)...(19): siRNA sense strand
cuguaaggauauagccgaa

SEQ ID NO: 2325853 - RNA, 19 nt, Homo sapiens
  misc_RNA (1)...(19): siRNA sense strand
aagaaguaggauugagcaa

SEQ ID NO: 2325854 - RNA, 19 nt, Homo sapiens
  misc_RNA (1)...(19): siRNA sense strand
auggagagggugagaguau

SEQ ID NO: 2325855 - RNA, 19 nt, Homo sapiens
  misc_RNA (1)...(19): siRNA sense strand
ggaucaagagauggaguaa

SEQ ID NO: 2325856 - RNA, 19 nt, Homo sapiens
  misc_RNA (1)...(19): siRNA sense strand
cagagaauugguagaagaa

SEQ ID NO: 2325857 - RNA, 19 nt, Homo sapiens
  misc_RNA (1)...(19): siRNA sense strand
cuucaaagccauagcaacu

SEQ ID NO: 2325858 - RNA, 19 nt, Homo sapiens
  misc_RNA (1)...(19): siRNA sense strand
gcuuugacuuccugagaga

SEQ ID NO: 2325859 - RNA, 19 nt, Homo sapiens
  misc_RNA (1)...(19): siRNA sense strand
ccuccuuguuuaagaauau

SEQ ID NO: 2325860 - RNA, 19 nt, Homo sapiens
  misc_RNA (1)...(19): siRNA sense strand
aggaugaaucacaugaaua

SEQ ID NO: 2325861 - RNA, 19 nt, Homo sapiens
  misc_RNA (1)...(19): siRNA sense strand
gagagaugggugaagcuaa

SEQ ID NO: 2325862 - RNA, 19 nt, Homo sapiens
  misc_RNA (1)...(19): siRNA sense strand
agaacauggagaugagauu

SEQ ID NO: 2325863 - RNA, 19 nt, Homo sapiens
  misc_RNA (1)...(19): siRNA sense strand
agaacauggaugacacaaa

SEQ ID NO: 2325864 - RNA, 19 nt, Homo sapiens
  misc_RNA (1)...(19): siRNA sense strand
aucaagagauggaguaauu

SEQ ID NO: 2325865 - RNA, 19 nt, Homo sapiens
  misc_RNA (1)...(19): siRNA sense strand
gcccagaggacgaagucaa

SEQ ID NO: 2325866 - RNA, 19 nt, Homo sapiens
  misc_RNA (1)...(19): siRNA sense strand
uggaaguucugaagacaau

SEQ ID NO: 2325867 - RNA, 19 nt, Homo sapiens
  misc_RNA (1)...(19): siRNA sense strand
gaacugugucagagauuau

SEQ ID NO: 2325868 - RNA, 19 nt, Homo sapiens
  misc_RNA (1)...(19): siRNA sense strand
uggagugccugaagaacaa

SEQ ID NO: 2325869 - RNA, 19 nt, Homo sapiens
  misc_RNA (1)...(19): siRNA sense strand
ccaaauucccugcuguaaa

SEQ ID NO: 2325870 - RNA, 19 nt, Homo sapiens
  misc_RNA (1)...(19): siRNA sense strand
cuuaauaaugggcaugaaa

SEQ ID NO: 2325871 - RNA, 19 nt, Homo sapiens
  misc_RNA (1)...(19): siRNA sense strand
ccuuagaaauuuuguggaa

SEQ ID NO: 2325872 - RNA, 19 nt, Homo sapiens
  misc_RNA (1)...(19): siRNA sense strand
guggaaagccuguaugaca

SEQ ID NO: 2325873 - RNA, 19 nt, Homo sapiens
  misc_RNA (1)...(19): siRNA sense strand
aacacuaacugaagaggaa

SEQ ID NO: 2325874 - RNA, 19 nt, Homo sapiens
  misc_RNA (1)...(19): siRNA sense strand
gaaacagaugagaaggcaa

SEQ ID NO: 2325875 - RNA, 19 nt, Homo sapiens
  misc_RNA (1)...(19): siRNA sense strand
uggaaaagccauugacgaa

SEQ ID NO: 2325876 - RNA, 19 nt, Homo sapiens
  misc_RNA (1)...(19): siRNA sense strand
cggugggaguucuguuaaa

SEQ ID NO: 2325877 - RNA, 19 nt, Homo sapiens
  misc_RNA (1)...(19): siRNA sense strand
agaugaaguuccugggcca

SEQ ID NO: 2325878 - RNA, 19 nt, Homo sapiens
  misc_RNA (1)...(19): siRNA sense strand
gggaucaagagauggagua

SEQ ID NO: 2325879 - RNA, 19 nt, Homo sapiens
  misc_RNA (1)...(19): siRNA sense strand
acugagugaccuaaagaaa

SEQ ID NO: 2325880 - RNA, 19 nt, Homo sapiens
  misc_RNA (1)...(19): siRNA sense strand
cccaauuaaugccaagaaa

SEQ ID NO: 2325881 - RNA, 19 nt, Homo sapiens
  misc_RNA (1)...(19): siRNA sense strand
acgacaugaaggugcguaa

SEQ ID NO: 2325882 - RNA, 19 nt, Homo sapiens
  misc_RNA (1)...(19): siRNA sense strand
aagaagaagcugacaggga

SEQ ID NO: 2325883 - RNA, 19 nt, Homo sapiens
  misc_RNA (1)...(19): siRNA sense strand
agaagaagcugacagggau

SEQ ID NO: 2325884 - RNA, 19 nt, Homo sapiens
  misc_RNA (1)...(19): siRNA sense strand
gagaccaaggagagcaaga

SEQ ID NO: 2325885 - RNA, 19 nt, Homo sapiens
  misc_RNA (1)...(19): siRNA sense strand
gugaggacaagaagaacau

SEQ ID NO: 2325886 - RNA, 19 nt, Homo sapiens
  misc_RNA (1)...(19): siRNA sense strand
agugaggacaagaagaaca

SEQ ID NO: 2325887 - RNA, 19 nt, Homo sapiens
  misc_RNA (1)...(19): siRNA sense strand
agagcaagaaggaggaucu

SEQ ID NO: 2325888 - RNA, 19 nt, Homo sapiens
  misc_RNA (1)...(19): siRNA sense strand
uggaggagggcaaggagau

SEQ ID NO: 2325889 - RNA, 19 nt, Homo sapiens
  misc_RNA (1)...(19): siRNA sense strand
acugcuacgaggaggucaa

SEQ ID NO: 2325890 - RNA, 19 nt, Homo sapiens
  misc_RNA (1)...(19): siRNA sense strand
ugacauuacugcauggcaa

SEQ ID NO: 2325891 - RNA, 19 nt, Homo sapiens
  misc_RNA (1)...(19): siRNA sense strand
auuuaaacuggcagagaaa

SEQ ID NO: 2325892 - RNA, 19 nt, Homo sapiens
  misc_RNA (1)...(19): siRNA sense strand
gcagcaacauggagaggca

SEQ ID NO: 2325893 - RNA, 19 nt, Homo sapiens
  misc_RNA (1)...(19): siRNA sense strand
cuggagagguuguggugga

SEQ ID NO: 2325894 - RNA, 19 nt, Homo sapiens
  misc_RNA (1)...(19): siRNA sense strand
uuaaacuggcagagaaaga

SEQ ID NO: 2325895 - RNA, 19 nt, Homo sapiens
  misc_RNA (1)...(19): siRNA sense strand
ccuuugaaacugacauaau

SEQ ID NO: 2325896 - RNA, 19 nt, Homo sapiens
  misc_RNA (1)...(19): siRNA sense strand
gcucaguaugaaacgauau

SEQ ID NO: 2325897 - RNA, 19 nt, Homo sapiens
  misc_RNA (1)...(19): siRNA sense strand
agcaacauggagaggcaaa

SEQ ID NO: 2325898 - RNA, 19 nt, Homo sapiens
  misc_RNA (1)...(19): siRNA sense strand
auggagaggcaaacaaaga

SEQ ID NO: 2325899 - RNA, 19 nt, Homo sapiens
  misc_RNA (1)...(19): siRNA sense strand
agcaguuagaauugagaau

SEQ ID NO: 2325900 - RNA, 19 nt, Homo sapiens
  misc_RNA (1)...(19): siRNA sense strand
ggauguaaugccuggaaag

SEQ ID NO: 2325901 - RNA, 19 nt, Homo sapiens
  misc_RNA (1)...(19): siRNA sense strand
cgugaaaacacuaaagcaa

SEQ ID NO: 2325902 - RNA, 19 nt, Homo sapiens
  misc_RNA (1)...(19): siRNA sense strand
guagauuguuugaagcaga

SEQ ID NO: 2325903 - RNA, 19 nt, Homo sapiens
  misc_RNA (1)...(19): siRNA sense strand
ucacugaagguguggucaa

SEQ ID NO: 2325904 - RNA, 19 nt, Homo sapiens
  misc_RNA (1)...(19): siRNA sense strand
ucacagagaaggagaccca

SEQ ID NO: 2325905 - RNA, 19 nt, Homo sapiens
  misc_RNA (1)...(19): siRNA sense strand
gguaaacagaagaggcauc

SEQ ID NO: 2325906 - RNA, 19 nt, Homo sapiens
  misc_RNA (1)...(19): siRNA sense strand
ccgaaugcagggaagucaa

SEQ ID NO: 2325907 - RNA, 19 nt, Homo sapiens
  misc_RNA (1)...(19): siRNA sense strand
agguguggucaauggcaaa

SEQ ID NO: 2325908 - RNA, 19 nt, Homo sapiens
  misc_RNA (1)...(19): siRNA sense strand
gcauacuacucgcugccaa

SEQ ID NO: 2325909 - RNA, 19 nt, Homo sapiens
  misc_RNA (1)...(19): siRNA sense strand
guguccuggucaugaacaa

SEQ ID NO: 2325910 - RNA, 19 nt, Homo sapiens
  misc_RNA (1)...(19): siRNA sense strand
gagaaggagacccagguga

SEQ ID NO: 2325911 - RNA, 19 nt, Homo sapiens
  misc_RNA (1)...(19): siRNA sense strand
cagcaguuaaggacccaaa

SEQ ID NO: 2325912 - RNA, 19 nt, Homo sapiens
  misc_RNA (1)...(19): siRNA sense strand
gugaaaacacuaaagcaau

SEQ ID NO: 2325913 - RNA, 19 nt, Homo sapiens
  misc_RNA (1)...(19): siRNA sense strand
gggucaucacagagaagga

SEQ ID NO: 2325914 - RNA, 19 nt, Homo sapiens
  misc_RNA (1)...(19): siRNA sense strand
cugguaaacagaagaggca

SEQ ID NO: 2325915 - RNA, 19 nt, Homo sapiens
  misc_RNA (1)...(19): siRNA sense strand
ggugauucuacuugacaca

SEQ ID NO: 2325916 - RNA, 19 nt, Homo sapiens
  misc_RNA (1)...(19): siRNA sense strand
aagcaaaggugaaggacga

SEQ ID NO: 2325917 - RNA, 19 nt, Homo sapiens
  misc_RNA (1)...(19): siRNA sense strand
gagauaaagcaaaggugaa

SEQ ID NO: 2325918 - RNA, 19 nt, Homo sapiens
  misc_RNA (1)...(19): siRNA sense strand
gagaaaggcugaaggggau

SEQ ID NO: 2325919 - RNA, 19 nt, Homo sapiens
  misc_RNA (1)...(19): siRNA sense strand
ggagauaaagcaaagguga

SEQ ID NO: 2325920 - RNA, 19 nt, Homo sapiens
  misc_RNA (1)...(19): siRNA sense strand
gcuaagggagauaaagcaa

SEQ ID NO: 2325921 - RNA, 19 nt, Homo sapiens
  misc_RNA (1)...(19): siRNA sense strand
cuccaaagccagagcccaa

SEQ ID NO: 2325922 - RNA, 19 nt, Homo sapiens
  misc_RNA (1)...(19): siRNA sense strand
ggaugcuaagggagauaaa

SEQ ID NO: 2325923 - RNA, 19 nt, Homo sapiens
  misc_RNA (1)...(19): siRNA sense strand
agaaaauggagaugccaaa

SEQ ID NO: 2325924 - RNA, 19 nt, Homo sapiens
  misc_RNA (1)...(19): siRNA sense strand
acagaaagcugaaggugcu

SEQ ID NO: 2325925 - RNA, 19 nt, Homo sapiens
  misc_RNA (1)...(19): siRNA sense strand
cuaagggagauaaagcaaa

SEQ ID NO: 2325926 - RNA, 19 nt, Homo sapiens
  misc_RNA (1)...(19): siRNA sense strand
agaagguacccaaagggaa

SEQ ID NO: 2325927 - RNA, 19 nt, Homo sapiens
  misc_RNA (1)...(19): siRNA sense strand
cugcaaagaagggagagaa

SEQ ID NO: 2325928 - RNA, 19 nt, Homo sapiens
  misc_RNA (1)...(19): siRNA sense strand
agagaaaggcugaagggga

SEQ ID NO: 2325929 - RNA, 19 nt, Homo sapiens
  misc_RNA (1)...(19): siRNA sense strand
agcugaaggugcuggagau

SEQ ID NO: 2325930 - RNA, 19 nt, Homo sapiens
  misc_RNA (1)...(19): siRNA sense strand
cagaaaauggagaugccaa

SEQ ID NO: 2325931 - RNA, 19 nt, Homo sapiens
  misc_RNA (1)...(19): siRNA sense strand
aggacgaaccacagagaag

SEQ ID NO: 2325932 - RNA, 19 nt, Homo sapiens
  misc_RNA (1)...(19): siRNA sense strand
cggcuuucaacaagaacua

SEQ ID NO: 2325933 - RNA, 19 nt, Homo sapiens
  misc_RNA (1)...(19): siRNA sense strand
ccaaaguggcugagcaggu

SEQ ID NO: 2325934 - RNA, 19 nt, Homo sapiens
  misc_RNA (1)...(19): siRNA sense strand
gggagauccagaaggcuga

SEQ ID NO: 2325935 - RNA, 19 nt, Homo sapiens
  misc_RNA (1)...(19): siRNA sense strand
cgaucaacauggaggagug

SEQ ID NO: 2325936 - RNA, 19 nt, Homo sapiens
  misc_RNA (1)...(19): siRNA sense strand
caagaaagauuaaggagga

SEQ ID NO: 2325937 - RNA, 19 nt, Homo sapiens
  misc_RNA (1)...(19): siRNA sense strand
agauuaaggaggaaggaau

SEQ ID NO: 2325938 - RNA, 19 nt, Homo sapiens
  misc_RNA (1)...(19): siRNA sense strand
aggaggaguuugauggcaa

SEQ ID NO: 2325939 - RNA, 19 nt, Homo sapiens
  misc_RNA (1)...(19): siRNA sense strand
gagaagaaauacagcccuu

SEQ ID NO: 2325940 - RNA, 19 nt, Homo sapiens
  misc_RNA (1)...(19): siRNA sense strand
aggaggagagggugggaga

SEQ ID NO: 2325941 - RNA, 19 nt, Homo sapiens
  misc_RNA (1)...(19): siRNA sense strand
aagaaagauuaaggaggaa

SEQ ID NO: 2325942 - RNA, 19 nt, Homo sapiens
  misc_RNA (1)...(19): siRNA sense strand
ccuugaugcuccuggcaca

SEQ ID NO: 2325943 - RNA, 19 nt, Homo sapiens
  misc_RNA (1)...(19): siRNA sense strand
cuggauaacaggaggaccu

SEQ ID NO: 2325944 - RNA, 19 nt, Homo sapiens
  misc_RNA (1)...(19): siRNA sense strand
gcaccgaacucuaccagca

SEQ ID NO: 2325945 - RNA, 19 nt, Homo sapiens
  misc_RNA (1)...(19): siRNA sense strand
agacaaauucugcaccgaa

SEQ ID NO: 2325946 - RNA, 19 nt, Homo sapiens
  misc_RNA (1)...(19): siRNA sense strand
ucuuagaggccuuggacaa

SEQ ID NO: 2325947 - RNA, 19 nt, Homo sapiens
  misc_RNA (1)...(19): siRNA sense strand
cggaaaaggagcaagaaga

SEQ ID NO: 2325948 - RNA, 19 nt, Homo sapiens
  misc_RNA (1)...(19): siRNA sense strand
guuuacaaguccaggcaca

SEQ ID NO: 2325949 - RNA, 19 nt, Homo sapiens
  misc_RNA (1)...(19): siRNA sense strand
gaggaauccaacaggucaa

SEQ ID NO: 2325950 - RNA, 19 nt, Homo sapiens
  misc_RNA (1)...(19): siRNA sense strand
gcuacgaaacaauggcaga

SEQ ID NO: 2325951 - RNA, 19 nt, Homo sapiens
  misc_RNA (1)...(19): siRNA sense strand
caguuuaaauacaccgaca

SEQ ID NO: 2325952 - RNA, 19 nt, Homo sapiens
  misc_RNA (1)...(19): siRNA sense strand
guaaaugguucacggccga

SEQ ID NO: 2325953 - RNA, 19 nt, Homo sapiens
  misc_RNA (1)...(19): siRNA sense strand
gagucgggcauuuaagcaa

SEQ ID NO: 2325954 - RNA, 19 nt, Homo sapiens
  misc_RNA (1)...(19): siRNA sense strand
ucuuccugguccugaaaua

SEQ ID NO: 2325955 - RNA, 19 nt, Homo sapiens
  misc_RNA (1)...(19): siRNA sense strand
ccauguguguacagagcau

SEQ ID NO: 2325956 - RNA, 19 nt, Homo sapiens
  misc_RNA (1)...(19): siRNA sense strand
aagaaauugaagaggggaa

SEQ ID NO: 2325957 - RNA, 19 nt, Homo sapiens
  misc_RNA (1)...(19): siRNA sense strand
cagacuggcugaucgggaa

SEQ ID NO: 2325958 - RNA, 19 nt, Homo sapiens
  misc_RNA (1)...(19): siRNA sense strand
cuacaaaccuggagacugc

SEQ ID NO: 2325959 - RNA, 19 nt, Homo sapiens
  misc_RNA (1)...(19): siRNA sense strand
agaaauugaagaggggaaa

SEQ ID NO: 2325960 - RNA, 19 nt, Homo sapiens
  misc_RNA (1)...(19): siRNA sense strand
agacuggcugaucgggaaa

SEQ ID NO: 2325961 - RNA, 19 nt, Homo sapiens
  misc_RNA (1)...(19): siRNA sense strand
auugcaaccucuagugaca

SEQ ID NO: 2325962 - RNA, 19 nt, Homo sapiens
  misc_RNA (1)...(19): siRNA sense strand
cgaaauggauacagagccu

SEQ ID NO: 2325963 - RNA, 19 nt, Homo sapiens
  misc_RNA (1)...(19): siRNA sense strand
ugacagugauccugggagu

SEQ ID NO: 2325964 - RNA, 19 nt, Homo sapiens
  misc_RNA (1)...(19): siRNA sense strand
ugguauuguagaagacgaa

SEQ ID NO: 2325965 - RNA, 19 nt, Homo sapiens
  misc_RNA (1)...(19): siRNA sense strand
guauuguagaagacgaaau

SEQ ID NO: 2325966 - RNA, 19 nt, Homo sapiens
  misc_RNA (1)...(19): siRNA sense strand
cugaagaggccgcugggau

SEQ ID NO: 2325967 - RNA, 19 nt, Homo sapiens
  misc_RNA (1)...(19): siRNA sense strand
ggguuugaucaucgggaca

SEQ ID NO: 2325968 - RNA, 19 nt, Homo sapiens
  misc_RNA (1)...(19): siRNA sense strand
acucaaugugccuuaacaa

SEQ ID NO: 2325969 - RNA, 19 nt, Homo sapiens
  misc_RNA (1)...(19): siRNA sense strand
ucuuacaguuacagggaaa

SEQ ID NO: 2325970 - RNA, 19 nt, Homo sapiens
  misc_RNA (1)...(19): siRNA sense strand
cagcaugaguccaggagca

SEQ ID NO: 2325971 - RNA, 19 nt, Homo sapiens
  misc_RNA (1)...(19): siRNA sense strand
cagaaaggcaagaugcgaa

SEQ ID NO: 2325972 - RNA, 19 nt, Homo sapiens
  misc_RNA (1)...(19): siRNA sense strand
aggcaagaugcgaagaauu

SEQ ID NO: 2325973 - RNA, 19 nt, Homo sapiens
  misc_RNA (1)...(19): siRNA sense strand
auuaaggaccagccagaaa

SEQ ID NO: 2325974 - RNA, 19 nt, Homo sapiens
  misc_RNA (1)...(19): siRNA sense strand
ggagcaaugaggaggucuu

SEQ ID NO: 2325975 - RNA, 19 nt, Homo sapiens
  misc_RNA (1)...(19): siRNA sense strand
aggaaguggcagucaguca

SEQ ID NO: 2325976 - RNA, 19 nt, Homo sapiens
  misc_RNA (1)...(19): siRNA sense strand
gucaaaagaagaagagaga

SEQ ID NO: 2325977 - RNA, 19 nt, Homo sapiens
  misc_RNA (1)...(19): siRNA sense strand
acacugaagaagucggaga

SEQ ID NO: 2325978 - RNA, 19 nt, Homo sapiens
  misc_RNA (1)...(19): siRNA sense strand
acauuaaggaccagccaga

SEQ ID NO: 2325979 - RNA, 19 nt, Homo sapiens
  misc_RNA (1)...(19): siRNA sense strand
auuacaggacccagagcaa

SEQ ID NO: 2325980 - RNA, 19 nt, Homo sapiens
  misc_RNA (1)...(19): siRNA sense strand
augaaaagcguaugucaaa

SEQ ID NO: 2325981 - RNA, 19 nt, Homo sapiens
  misc_RNA (1)...(19): siRNA sense strand
gcguaugucaaaagaagaa

SEQ ID NO: 2325982 - RNA, 19 nt, Homo sapiens
  misc_RNA (1)...(19): siRNA sense strand
caugaaaagcguaugucaa

SEQ ID NO: 2325983 - RNA, 19 nt, Homo sapiens
  misc_RNA (1)...(19): siRNA sense strand
gaaagauauccgacccgaa

SEQ ID NO: 2325984 - RNA, 19 nt, Homo sapiens
  misc_RNA (1)...(19): siRNA sense strand
acccgaauaucgagaggau

SEQ ID NO: 2325985 - RNA, 19 nt, Homo sapiens
  misc_RNA (1)...(19): siRNA sense strand
aagagagagccgugaagga

SEQ ID NO: 2325986 - RNA, 19 nt, Homo sapiens
  misc_RNA (1)...(19): siRNA sense strand
ggaaaguacugauggcgag

SEQ ID NO: 2325987 - RNA, 19 nt, Homo sapiens
  misc_RNA (1)...(19): siRNA sense strand
cuguuaaggaacucgauuu

SEQ ID NO: 2325988 - RNA, 19 nt, Homo sapiens
  misc_RNA (1)...(19): siRNA sense strand
acgcugacauuaaggacca

SEQ ID NO: 2325989 - RNA, 19 nt, Homo sapiens
  misc_RNA (1)...(19): siRNA sense strand
gccaaggcaaggugcacaa

SEQ ID NO: 2325990 - RNA, 19 nt, Homo sapiens
  misc_RNA (1)...(19): siRNA sense strand
gugaaggaugaauugcuaa

SEQ ID NO: 2325991 - RNA, 19 nt, Homo sapiens
  misc_RNA (1)...(19): siRNA sense strand
agucuguggaggaugaaau

SEQ ID NO: 2325992 - RNA, 19 nt, Homo sapiens
  misc_RNA (1)...(19): siRNA sense strand
caaaagaagaagagagagc

SEQ ID NO: 2325993 - RNA, 19 nt, Homo sapiens
  misc_RNA (1)...(19): siRNA sense strand
ugagcuaguaagaguguca

SEQ ID NO: 2325994 - RNA, 19 nt, Homo sapiens
  misc_RNA (1)...(19): siRNA sense strand
ccaccauccaccagacaga

SEQ ID NO: 2325995 - RNA, 19 nt, Homo sapiens
  misc_RNA (1)...(19): siRNA sense strand
ggacauggaaggaggcauc

SEQ ID NO: 2325996 - RNA, 19 nt, Homo sapiens
  misc_RNA (1)...(19): siRNA sense strand
agaagacagagauggacaa

SEQ ID NO: 2325997 - RNA, 19 nt, Homo sapiens
  misc_RNA (1)...(19): siRNA sense strand
ccggugaagaagacagaga

SEQ ID NO: 2325998 - RNA, 19 nt, Homo sapiens
  misc_RNA (1)...(19): siRNA sense strand
uggccuacuucgugcguga

SEQ ID NO: 2325999 - RNA, 19 nt, Homo sapiens
  misc_RNA (1)...(19): siRNA sense strand
aagaagacagagauggaca

SEQ ID NO: 2326000 - RNA, 19 nt, Homo sapiens
  misc_RNA (1)...(19): siRNA sense strand
agcccgaggucaagcagaa

SEQ ID NO: 2326001 - RNA, 19 nt, Homo sapiens
  misc_RNA (1)...(19): siRNA sense strand
ccgacuuccaggagagcuu

SEQ ID NO: 2326002 - RNA, 19 nt, Homo sapiens
  misc_RNA (1)...(19): siRNA sense strand
acgaggagcgugcggucaa

SEQ ID NO: 2326003 - RNA, 19 nt, Homo sapiens
  misc_RNA (1)...(19): siRNA sense strand
cugaccaggaggacagcaa

SEQ ID NO: 2326004 - RNA, 19 nt, Homo sapiens
  misc_RNA (1)...(19): siRNA sense strand
ggacauggaaggaggcauc

SEQ ID NO: 2326005 - RNA, 19 nt, Homo sapiens
  misc_RNA (1)...(19): siRNA sense strand
agaagacagagauggacaa

SEQ ID NO: 2326006 - RNA, 19 nt, Homo sapiens
  misc_RNA (1)...(19): siRNA sense strand
ccggugaagaagacagaga

SEQ ID NO: 2326007 - RNA, 19 nt, Homo sapiens
  misc_RNA (1)...(19): siRNA sense strand
uggccuacuucgugcguga

SEQ ID NO: 2326008 - RNA, 19 nt, Homo sapiens
  misc_RNA (1)...(19): siRNA sense strand
aagaagacagagauggaca

SEQ ID NO: 2326009 - RNA, 19 nt, Homo sapiens
  misc_RNA (1)...(19): siRNA sense strand
agcccgaggucaagcagaa

SEQ ID NO: 2326010 - RNA, 19 nt, Homo sapiens
  misc_RNA (1)...(19): siRNA sense strand
ccgacuuccaggagagcuu

SEQ ID NO: 2326011 - RNA, 19 nt, Homo sapiens
  misc_RNA (1)...(19): siRNA sense strand
acgaggagcgugcggucaa

SEQ ID NO: 2326012 - RNA, 19 nt, Homo sapiens
  misc_RNA (1)...(19): siRNA sense strand
cugaccaggaggacagcaa

SEQ ID NO: 2326013 - RNA, 19 nt, Homo sapiens
  misc_RNA (1)...(19): siRNA sense strand
agaucauugccgaggacua

SEQ ID NO: 2326014 - RNA, 19 nt, Homo sapiens
  misc_RNA (1)...(19): siRNA sense strand
caguaagccgaaaggauga

SEQ ID NO: 2326015 - RNA, 19 nt, Homo sapiens
  misc_RNA (1)...(19): siRNA sense strand
agccugaaccagaggaaga

SEQ ID NO: 2326016 - RNA, 19 nt, Homo sapiens
  misc_RNA (1)...(19): siRNA sense strand
ucaaacaucuggagccuga

SEQ ID NO: 2326017 - RNA, 19 nt, Homo sapiens
  misc_RNA (1)...(19): siRNA sense strand
aaccagaggaagagaucau

SEQ ID NO: 2326018 - RNA, 19 nt, Homo sapiens
  misc_RNA (1)...(19): siRNA sense strand
cgaaccaagcagcaggauu

SEQ ID NO: 2326019 - RNA, 19 nt, Homo sapiens
  misc_RNA (1)...(19): siRNA sense strand
aggaagagaucauugccga

SEQ ID NO: 2326020 - RNA, 19 nt, Homo sapiens
  misc_RNA (1)...(19): siRNA sense strand
ccaagcggaaugaggccaa

SEQ ID NO: 2326021 - RNA, 19 nt, Homo sapiens
  misc_RNA (1)...(19): siRNA sense strand
gcaguaagccgaaaggaug

SEQ ID NO: 2326022 - RNA, 19 nt, Homo sapiens
  misc_RNA (1)...(19): siRNA sense strand
ccgaggacuaugacgauga

SEQ ID NO: 2326023 - RNA, 19 nt, Homo sapiens
  misc_RNA (1)...(19): siRNA sense strand
agaucauugccgaggacua

SEQ ID NO: 2326024 - RNA, 19 nt, Homo sapiens
  misc_RNA (1)...(19): siRNA sense strand
agccugaaccagaggaaga

SEQ ID NO: 2326025 - RNA, 19 nt, Homo sapiens
  misc_RNA (1)...(19): siRNA sense strand
ucaaacaucuggagccuga

SEQ ID NO: 2326026 - RNA, 19 nt, Homo sapiens
  misc_RNA (1)...(19): siRNA sense strand
aaccagaggaagagaucau

SEQ ID NO: 2326027 - RNA, 19 nt, Homo sapiens
  misc_RNA (1)...(19): siRNA sense strand
aggaagagaucauugccga

SEQ ID NO: 2326028 - RNA, 19 nt, Homo sapiens
  misc_RNA (1)...(19): siRNA sense strand
ccgaggacuaugacgauga

SEQ ID NO: 2326029 - RNA, 19 nt, Homo sapiens
  misc_RNA (1)...(19): siRNA sense strand
agaucauugccgaggacua

SEQ ID NO: 2326030 - RNA, 19 nt, Homo sapiens
  misc_RNA (1)...(19): siRNA sense strand
caguaagccgaaaggauga

SEQ ID NO: 2326031 - RNA, 19 nt, Homo sapiens
  misc_RNA (1)...(19): siRNA sense strand
agccugaaccagaggaaga

SEQ ID NO: 2326032 - RNA, 19 nt, Homo sapiens
  misc_RNA (1)...(19): siRNA sense strand
ucaaacaucuggagccuga

SEQ ID NO: 2326033 - RNA, 19 nt, Homo sapiens
  misc_RNA (1)...(19): siRNA sense strand
aaccagaggaagagaucau

SEQ ID NO: 2326034 - RNA, 19 nt, Homo sapiens
  misc_RNA (1)...(19): siRNA sense strand
cgaaccaagcagcaggauu

SEQ ID NO: 2326035 - RNA, 19 nt, Homo sapiens
  misc_RNA (1)...(19): siRNA sense strand
aggaagagaucauugccga

SEQ ID NO: 2326036 - RNA, 19 nt, Homo sapiens
  misc_RNA (1)...(19): siRNA sense strand
ccaagcggaaugaggccaa

SEQ ID NO: 2326037 - RNA, 19 nt, Homo sapiens
  misc_RNA (1)...(19): siRNA sense strand
gcaguaagccgaaaggaug

SEQ ID NO: 2326038 - RNA, 19 nt, Homo sapiens
  misc_RNA (1)...(19): siRNA sense strand
ccgaggacuaugacgauga

SEQ ID NO: 2326039 - RNA, 19 nt, Homo sapiens
  misc_RNA (1)...(19): siRNA sense strand
gcgacagcuuggagagcau

SEQ ID NO: 2326040 - RNA, 19 nt, Homo sapiens
  misc_RNA (1)...(19): siRNA sense strand
gggaauucucagaggagga

SEQ ID NO: 2326041 - RNA, 19 nt, Homo sapiens
  misc_RNA (1)...(19): siRNA sense strand
cagaggaggacgaggagga

SEQ ID NO: 2326042 - RNA, 19 nt, Homo sapiens
  misc_RNA (1)...(19): siRNA sense strand
ggaguaaaguggcggaccu

SEQ ID NO: 2326043 - RNA, 19 nt, Homo sapiens
  misc_RNA (1)...(19): siRNA sense strand
gcaaagugcugcaggccgu

SEQ ID NO: 2326044 - RNA, 19 nt, Homo sapiens
  misc_RNA (1)...(19): siRNA sense strand
gcaaaauccccgagaagca

SEQ ID NO: 2326045 - RNA, 19 nt, Homo sapiens
  misc_RNA (1)...(19): siRNA sense strand
cugcuguacuggaaggaca

SEQ ID NO: 2326046 - RNA, 19 nt, Homo sapiens
  misc_RNA (1)...(19): siRNA sense strand
ccgaagagccauugcugga

SEQ ID NO: 2326047 - RNA, 19 nt, Homo sapiens
  misc_RNA (1)...(19): siRNA sense strand
cagauuggagacaggagaa

SEQ ID NO: 2326048 - RNA, 19 nt, Homo sapiens
  misc_RNA (1)...(19): siRNA sense strand
aggagaagcuggggaagaa

SEQ ID NO: 2326049 - RNA, 19 nt, Homo sapiens
  misc_RNA (1)...(19): siRNA sense strand
ccacagaaggagggaacga

SEQ ID NO: 2326050 - RNA, 19 nt, Homo sapiens
  misc_RNA (1)...(19): siRNA sense strand
auggaaugguuaaagacau

SEQ ID NO: 2326051 - RNA, 19 nt, Homo sapiens
  misc_RNA (1)...(19): siRNA sense strand
ucucagaggaggacgagga

SEQ ID NO: 2326052 - RNA, 19 nt, Homo sapiens
  misc_RNA (1)...(19): siRNA sense strand
guucuacugaagugggcaa

SEQ ID NO: 2326053 - RNA, 19 nt, Homo sapiens
  misc_RNA (1)...(19): siRNA sense strand
uggaaggacacgaggacgu

SEQ ID NO: 2326054 - RNA, 19 nt, Homo sapiens
  misc_RNA (1)...(19): siRNA sense strand
ugaccaaucaguugagcca

SEQ ID NO: 2326055 - RNA, 19 nt, Homo sapiens
  misc_RNA (1)...(19): siRNA sense strand
auccaaagccaaagccgaa

SEQ ID NO: 2326056 - RNA, 19 nt, Homo sapiens
  misc_RNA (1)...(19): siRNA sense strand
ucucauucugggagugauu

SEQ ID NO: 2326057 - RNA, 19 nt, Homo sapiens
  misc_RNA (1)...(19): siRNA sense strand
gggucaaauccacgggaaa

SEQ ID NO: 2326058 - RNA, 19 nt, Homo sapiens
  misc_RNA (1)...(19): siRNA sense strand
agaacaaagucuugaggcu

SEQ ID NO: 2326059 - RNA, 19 nt, Homo sapiens
  misc_RNA (1)...(19): siRNA sense strand
uguucaaaggccugggcua

SEQ ID NO: 2326060 - RNA, 19 nt, Homo sapiens
  misc_RNA (1)...(19): siRNA sense strand
ccgacugcguggagaucuu

SEQ ID NO: 2326061 - RNA, 19 nt, Homo sapiens
  misc_RNA (1)...(19): siRNA sense strand
uuguagguguggagggcuu

SEQ ID NO: 2326062 - RNA, 19 nt, Homo sapiens
  misc_RNA (1)...(19): siRNA sense strand
acuacgagccgcuggucua

SEQ ID NO: 2326063 - RNA, 19 nt, Homo sapiens
  misc_RNA (1)...(19): siRNA sense strand
gcaaggucgucguggugga

SEQ ID NO: 2326064 - RNA, 19 nt, Homo sapiens
  misc_RNA (1)...(19): siRNA sense strand
ccugcugggugcuggucua

SEQ ID NO: 2326065 - RNA, 19 nt, Homo sapiens
  misc_RNA (1)...(19): siRNA sense strand
gcuucuauuaccuggucaa

SEQ ID NO: 2326066 - RNA, 19 nt, Homo sapiens
  misc_RNA (1)...(19): siRNA sense strand
uguccggcgacgagaagaa

SEQ ID NO: 2326067 - RNA, 19 nt, Homo sapiens
  misc_RNA (1)...(19): siRNA sense strand
gaucaaaggcucuuggcca

SEQ ID NO: 2326068 - RNA, 19 nt, Homo sapiens
  misc_RNA (1)...(19): siRNA sense strand
agggagaagcugagcaauc

SEQ ID NO: 2326069 - RNA, 19 nt, Homo sapiens
  misc_RNA (1)...(19): siRNA sense strand
ccacaagucugauuggucu

SEQ ID NO: 2326070 - RNA, 19 nt, Homo sapiens
  misc_RNA (1)...(19): siRNA sense strand
ggcagauggaagugagcaa

SEQ ID NO: 2326071 - RNA, 19 nt, Homo sapiens
  misc_RNA (1)...(19): siRNA sense strand
cggaggaaagaauggaaau

SEQ ID NO: 2326072 - RNA, 19 nt, Homo sapiens
  misc_RNA (1)...(19): siRNA sense strand
ugucagaggaagagaaucu

SEQ ID NO: 2326073 - RNA, 19 nt, Homo sapiens
  misc_RNA (1)...(19): siRNA sense strand
uggaagugagcaagcuaaa

SEQ ID NO: 2326074 - RNA, 19 nt, Homo sapiens
  misc_RNA (1)...(19): siRNA sense strand
auguugaggcugcaagaaa

SEQ ID NO: 2326075 - RNA, 19 nt, Homo sapiens
  misc_RNA (1)...(19): siRNA sense strand
caacaagugugauucguca

SEQ ID NO: 2326076 - RNA, 19 nt, Homo sapiens
  misc_RNA (1)...(19): siRNA sense strand
ccaccuaaauguugaggcu

SEQ ID NO: 2326077 - RNA, 19 nt, Homo sapiens
  misc_RNA (1)...(19): siRNA sense strand
ccaaaagagaguauguauu

SEQ ID NO: 2326078 - RNA, 19 nt, Homo sapiens
  misc_RNA (1)...(19): siRNA sense strand
caaugaaagcagccagcau

SEQ ID NO: 2326079 - RNA, 19 nt, Homo sapiens
  misc_RNA (1)...(19): siRNA sense strand
guucaugaggagugaccau

SEQ ID NO: 2326080 - RNA, 19 nt, Homo sapiens
  misc_RNA (1)...(19): siRNA sense strand
uccaaaugugagagaaaca

SEQ ID NO: 2326081 - RNA, 19 nt, Homo sapiens
  misc_RNA (1)...(19): siRNA sense strand
ccgaauggcaccagacucu

SEQ ID NO: 2326082 - RNA, 19 nt, Homo sapiens
  misc_RNA (1)...(19): siRNA sense strand
agacugcggaggaaagaau

SEQ ID NO: 2326083 - RNA, 19 nt, Homo sapiens
  misc_RNA (1)...(19): siRNA sense strand
gauguugaugagaaagcaa

SEQ ID NO: 2326084 - RNA, 19 nt, Homo sapiens
  misc_RNA (1)...(19): siRNA sense strand
gugaagaagaggaggaauu

SEQ ID NO: 2326085 - RNA, 19 nt, Homo sapiens
  misc_RNA (1)...(19): siRNA sense strand
ggagaagaggagaaagaaa

SEQ ID NO: 2326086 - RNA, 19 nt, Homo sapiens
  misc_RNA (1)...(19): siRNA sense strand
ggccaaagaaagugguaua

SEQ ID NO: 2326087 - RNA, 19 nt, Homo sapiens
  misc_RNA (1)...(19): siRNA sense strand
caguggaagcucagggaaa

SEQ ID NO: 2326088 - RNA, 19 nt, Homo sapiens
  misc_RNA (1)...(19): siRNA sense strand
ggaagaaaucccugagaca

SEQ ID NO: 2326089 - RNA, 19 nt, Homo sapiens
  misc_RNA (1)...(19): siRNA sense strand
gggaagaaagauggagaua

SEQ ID NO: 2326090 - RNA, 19 nt, Homo sapiens
  misc_RNA (1)...(19): siRNA sense strand
ccagaaagcaccauagcaa

SEQ ID NO: 2326091 - RNA, 19 nt, Homo sapiens
  misc_RNA (1)...(19): siRNA sense strand
gagaagaggagaaagaaaa

SEQ ID NO: 2326092 - RNA, 19 nt, Homo sapiens
  misc_RNA (1)...(19): siRNA sense strand
cggaguacuaauaaggaaa

SEQ ID NO: 2326093 - RNA, 19 nt, Homo sapiens
  misc_RNA (1)...(19): siRNA sense strand
cuauaaagaauguguguga

SEQ ID NO: 2326094 - RNA, 19 nt, Homo sapiens
  misc_RNA (1)...(19): siRNA sense strand
aggagaaagagaaggaaga

SEQ ID NO: 2326095 - RNA, 19 nt, Homo sapiens
  misc_RNA (1)...(19): siRNA sense strand
uugcaagggcagagaagaa

SEQ ID NO: 2326096 - RNA, 19 nt, Homo sapiens
  misc_RNA (1)...(19): siRNA sense strand
aaggagaagaggagaaaga

SEQ ID NO: 2326097 - RNA, 19 nt, Homo sapiens
  misc_RNA (1)...(19): siRNA sense strand
caauuaagcaugaagaaca

SEQ ID NO: 2326098 - RNA, 19 nt, Homo sapiens
  misc_RNA (1)...(19): siRNA sense strand
gauuagacaccaaggaaga

SEQ ID NO: 2326099 - RNA, 19 nt, Homo sapiens
  misc_RNA (1)...(19): siRNA sense strand
acaauuugguggaagggaa

SEQ ID NO: 2326100 - RNA, 19 nt, Homo sapiens
  misc_RNA (1)...(19): siRNA sense strand
agauauugcuuuaggggua

SEQ ID NO: 2326101 - RNA, 19 nt, Homo sapiens
  misc_RNA (1)...(19): siRNA sense strand
agaagaaacgguagcagaa

SEQ ID NO: 2326102 - RNA, 19 nt, Homo sapiens
  misc_RNA (1)...(19): siRNA sense strand
guguagaauaugaaggaga

SEQ ID NO: 2326103 - RNA, 19 nt, Homo sapiens
  misc_RNA (1)...(19): siRNA sense strand
cggaccacucagagggaaa

SEQ ID NO: 2326104 - RNA, 19 nt, Homo sapiens
  misc_RNA (1)...(19): siRNA sense strand
ccugagacaccuugugaaa

SEQ ID NO: 2326105 - RNA, 19 nt, Homo sapiens
  misc_RNA (1)...(19): siRNA sense strand
gcucagaagcuauggaagu

SEQ ID NO: 2326106 - RNA, 19 nt, Homo sapiens
  misc_RNA (1)...(19): siRNA sense strand
agaaagugguauaagcgaa

SEQ ID NO: 2326107 - RNA, 19 nt, Homo sapiens
  misc_RNA (1)...(19): siRNA sense strand
gggcagagaagaaacggua

SEQ ID NO: 2326108 - RNA, 19 nt, Homo sapiens
  misc_RNA (1)...(19): siRNA sense strand
ugaaagucaaggagaggaa

SEQ ID NO: 2326109 - RNA, 19 nt, Homo sapiens
  misc_RNA (1)...(19): siRNA sense strand
ccgaggaggcccaggaaaa

SEQ ID NO: 2326110 - RNA, 19 nt, Homo sapiens
  misc_RNA (1)...(19): siRNA sense strand
ugaacaaacagcuggagaa

SEQ ID NO: 2326111 - RNA, 19 nt, Homo sapiens
  misc_RNA (1)...(19): siRNA sense strand
aguaaaaccuggugcagua

SEQ ID NO: 2326112 - RNA, 19 nt, Homo sapiens
  misc_RNA (1)...(19): siRNA sense strand
uggaacagaaggagaaaga

SEQ ID NO: 2326113 - RNA, 19 nt, Homo sapiens
  misc_RNA (1)...(19): siRNA sense strand
gagaagaaacgguagcaga

SEQ ID NO: 2326114 - RNA, 19 nt, Homo sapiens
  misc_RNA (1)...(19): siRNA sense strand
aggaggaagcuauggaaau

SEQ ID NO: 2326115 - RNA, 19 nt, Homo sapiens
  misc_RNA (1)...(19): siRNA sense strand
cugcaaggucagaggacau

SEQ ID NO: 2326116 - RNA, 19 nt, Homo sapiens
  misc_RNA (1)...(19): siRNA sense strand
caagauaagccaauggaca

SEQ ID NO: 2326117 - RNA, 19 nt, Homo sapiens
  misc_RNA (1)...(19): siRNA sense strand
aguugaaaccagugugauu

SEQ ID NO: 2326118 - RNA, 19 nt, Homo sapiens
  misc_RNA (1)...(19): siRNA sense strand
auugaaaggcccagccaaa

SEQ ID NO: 2326119 - RNA, 19 nt, Homo sapiens
  misc_RNA (1)...(19): siRNA sense strand
gccaggauguugaggaaaa

SEQ ID NO: 2326120 - RNA, 19 nt, Homo sapiens
  misc_RNA (1)...(19): siRNA sense strand
gggacaagucucucagcua

SEQ ID NO: 2326121 - RNA, 19 nt, Homo sapiens
  misc_RNA (1)...(19): siRNA sense strand
agggagaagaguuggaaca

SEQ ID NO: 2326122 - RNA, 19 nt, Homo sapiens
  misc_RNA (1)...(19): siRNA sense strand
ugucauuguagaugugaaa

SEQ ID NO: 2326123 - RNA, 19 nt, Homo sapiens
  misc_RNA (1)...(19): siRNA sense strand
gcaagaagggagacaagau

SEQ ID NO: 2326124 - RNA, 19 nt, Homo sapiens
  misc_RNA (1)...(19): siRNA sense strand
uggaacagaaguagaaaga

SEQ ID NO: 2326125 - RNA, 19 nt, Homo sapiens
  misc_RNA (1)...(19): siRNA sense strand
ccgaaagaucacagaaagu

SEQ ID NO: 2326126 - RNA, 19 nt, Homo sapiens
  misc_RNA (1)...(19): siRNA sense strand
uggaggaagagaagggaga

SEQ ID NO: 2326127 - RNA, 19 nt, Homo sapiens
  misc_RNA (1)...(19): siRNA sense strand
ccccaaagauggagagcuu

SEQ ID NO: 2326128 - RNA, 19 nt, Homo sapiens
  misc_RNA (1)...(19): siRNA sense strand
agaauagauuagacaccaa

SEQ ID NO: 2326129 - RNA, 19 nt, Homo sapiens
  misc_RNA (1)...(19): siRNA sense strand
guacaguggaccagaacuu

SEQ ID NO: 2326130 - RNA, 19 nt, Homo sapiens
  misc_RNA (1)...(19): siRNA sense strand
gaaagugguauaagcgaau

SEQ ID NO: 2326131 - RNA, 19 nt, Homo sapiens
  misc_RNA (1)...(19): siRNA sense strand
gagcaaggaaacagacuga

SEQ ID NO: 2326132 - RNA, 19 nt, Homo sapiens
  misc_RNA (1)...(19): siRNA sense strand
uuacaaaggcagcagauau

SEQ ID NO: 2326133 - RNA, 19 nt, Homo sapiens
  misc_RNA (1)...(19): siRNA sense strand
gggaguucucucaggcaaa

SEQ ID NO: 2326134 - RNA, 19 nt, Homo sapiens
  misc_RNA (1)...(19): siRNA sense strand
ccaaagauggagagcuuga

SEQ ID NO: 2326135 - RNA, 19 nt, Homo sapiens
  misc_RNA (1)...(19): siRNA sense strand
cagaauugaugaagaugga

SEQ ID NO: 2326136 - RNA, 19 nt, Homo sapiens
  misc_RNA (1)...(19): siRNA sense strand
agaccuuguuucugggcua

SEQ ID NO: 2326137 - RNA, 19 nt, Homo sapiens
  misc_RNA (1)...(19): siRNA sense strand
ccagaaagaaggacggagu

SEQ ID NO: 2326138 - RNA, 19 nt, Homo sapiens
  misc_RNA (1)...(19): siRNA sense strand
gcagcaacccagacuauaa

SEQ ID NO: 2326139 - RNA, 19 nt, Homo sapiens
  misc_RNA (1)...(19): siRNA sense strand
gguacagccuugaggagca

SEQ ID NO: 2326140 - RNA, 19 nt, Homo sapiens
  misc_RNA (1)...(19): siRNA sense strand
ccucaugacugguggugca

SEQ ID NO: 2326141 - RNA, 19 nt, Homo sapiens
  misc_RNA (1)...(19): siRNA sense strand
cgauuauguuucucacuaa

SEQ ID NO: 2326142 - RNA, 19 nt, Homo sapiens
  misc_RNA (1)...(19): siRNA sense strand
aguuggaacagaaggagaa

SEQ ID NO: 2326143 - RNA, 19 nt, Homo sapiens
  misc_RNA (1)...(19): siRNA sense strand
gugaaguacaacugaguca

SEQ ID NO: 2326144 - RNA, 19 nt, Homo sapiens
  misc_RNA (1)...(19): siRNA sense strand
ccagggagaagaagaguuu

SEQ ID NO: 2326145 - RNA, 19 nt, Homo sapiens
  misc_RNA (1)...(19): siRNA sense strand
gugccuugccagugggauu

SEQ ID NO: 2326146 - RNA, 19 nt, Homo sapiens
  misc_RNA (1)...(19): siRNA sense strand
ggagaaagagaaggaagaa

SEQ ID NO: 2326147 - RNA, 19 nt, Homo sapiens
  misc_RNA (1)...(19): siRNA sense strand
ggaagaaagauggagauau

SEQ ID NO: 2326148 - RNA, 19 nt, Homo sapiens
  misc_RNA (1)...(19): siRNA sense strand
agauaucagcuuagacaau

SEQ ID NO: 2326149 - RNA, 19 nt, Homo sapiens
  misc_RNA (1)...(19): siRNA sense strand
acccaaacuucaagaacaa

SEQ ID NO: 2326150 - RNA, 19 nt, Homo sapiens
  misc_RNA (1)...(19): siRNA sense strand
agcuagaggaugagaacaa

SEQ ID NO: 2326151 - RNA, 19 nt, Homo sapiens
  misc_RNA (1)...(19): siRNA sense strand
gagaaguacaauuggccaa

SEQ ID NO: 2326152 - RNA, 19 nt, Homo sapiens
  misc_RNA (1)...(19): siRNA sense strand
ggagcaugauugauggcaa

SEQ ID NO: 2326153 - RNA, 19 nt, Homo sapiens
  misc_RNA (1)...(19): siRNA sense strand
cucagaaguugguggagaa

SEQ ID NO: 2326154 - RNA, 19 nt, Homo sapiens
  misc_RNA (1)...(19): siRNA sense strand
uguucgagguacaggagaa

SEQ ID NO: 2326155 - RNA, 19 nt, Homo sapiens
  misc_RNA (1)...(19): siRNA sense strand
guacagaucccuacggaca

SEQ ID NO: 2326156 - RNA, 19 nt, Homo sapiens
  misc_RNA (1)...(19): siRNA sense strand
ccauugaccugaacggcua

SEQ ID NO: 2326157 - RNA, 19 nt, Homo sapiens
  misc_RNA (1)...(19): siRNA sense strand
aggaugagaacaaggaaga

SEQ ID NO: 2326158 - RNA, 19 nt, Homo sapiens
  misc_RNA (1)...(19): siRNA sense strand
agaauguguucauggaaaa

SEQ ID NO: 2326159 - RNA, 19 nt, Homo sapiens
  misc_RNA (1)...(19): siRNA sense strand
gcuuugagucugaaggaca

SEQ ID NO: 2326160 - RNA, 19 nt, Homo sapiens
  misc_RNA (1)...(19): siRNA sense strand
ggaccaacguguaugagga

SEQ ID NO: 2326161 - RNA, 19 nt, Homo sapiens
  misc_RNA (1)...(19): siRNA sense strand
agauggacugcgagguuaa

SEQ ID NO: 2326162 - RNA, 19 nt, Homo sapiens
  misc_RNA (1)...(19): siRNA sense strand
ccucagaaguugguggaga

SEQ ID NO: 2326163 - RNA, 19 nt, Homo sapiens
  misc_RNA (1)...(19): siRNA sense strand
guacgauguccgaaggaga

SEQ ID NO: 2326164 - RNA, 19 nt, Homo sapiens
  misc_RNA (1)...(19): siRNA sense strand
cgugagauuuacaaggaca

SEQ ID NO: 2326165 - RNA, 19 nt, Homo sapiens
  misc_RNA (1)...(19): siRNA sense strand
uggacgacccugagaguga

SEQ ID NO: 2326166 - RNA, 19 nt, Homo sapiens
  misc_RNA (1)...(19): siRNA sense strand
aggacgucuuugagaagua

SEQ ID NO: 2326167 - RNA, 19 nt, Homo sapiens
  misc_RNA (1)...(19): siRNA sense strand
agaaugacacugugggcau

SEQ ID NO: 2326168 - RNA, 19 nt, Homo sapiens
  misc_RNA (1)...(19): siRNA sense strand
ccauggugcuggcaggcaa

SEQ ID NO: 2326169 - RNA, 19 nt, Homo sapiens
  misc_RNA (1)...(19): siRNA sense strand
aggacaacaucaaggagga

SEQ ID NO: 2326170 - RNA, 19 nt, Homo sapiens
  misc_RNA (1)...(19): siRNA sense strand
ggaaacugcuccaggcugu

SEQ ID NO: 2326171 - RNA, 19 nt, Homo sapiens
  misc_RNA (1)...(19): siRNA sense strand
acuucaagaacaaggucaa

SEQ ID NO: 2326172 - RNA, 19 nt, Homo sapiens
  misc_RNA (1)...(19): siRNA sense strand
agguuaacaaugaggacuu

SEQ ID NO: 2326173 - RNA, 19 nt, Homo sapiens
  misc_RNA (1)...(19): siRNA sense strand
acaucaaggaggaagacau

SEQ ID NO: 2326174 - RNA, 19 nt, Homo sapiens
  misc_RNA (1)...(19): siRNA sense strand
gugagauuuacaaggacaa

SEQ ID NO: 2326175 - RNA, 19 nt, Homo sapiens
  misc_RNA (1)...(19): siRNA sense strand
cgguaaacgccuccuacaa

SEQ ID NO: 2326176 - RNA, 19 nt, Homo sapiens
  misc_RNA (1)...(19): siRNA sense strand
agaaguugguggagaaggu

SEQ ID NO: 2326177 - RNA, 19 nt, Homo sapiens
  misc_RNA (1)...(19): siRNA sense strand
ggacaacaucaaggaggaa

SEQ ID NO: 2326178 - RNA, 19 nt, Homo sapiens
  misc_RNA (1)...(19): siRNA sense strand
acaacaucaaggaggaaga

SEQ ID NO: 2326179 - RNA, 19 nt, Homo sapiens
  misc_RNA (1)...(19): siRNA sense strand
aggcuugggcugagaaguu

SEQ ID NO: 2326180 - RNA, 19 nt, Homo sapiens
  misc_RNA (1)...(19): siRNA sense strand
gagcaugauugauggcaac

SEQ ID NO: 2326181 - RNA, 19 nt, Homo sapiens
  misc_RNA (1)...(19): siRNA sense strand
ucagugagguggaugccaa

SEQ ID NO: 2326182 - RNA, 19 nt, Homo sapiens
  misc_RNA (1)...(19): siRNA sense strand
ccagcagcuccgugagauu

SEQ ID NO: 2326183 - RNA, 19 nt, Homo sapiens
  misc_RNA (1)...(19): siRNA sense strand
cugcagagaacuuccagaa

SEQ ID NO: 2326184 - RNA, 19 nt, Homo sapiens
  misc_RNA (1)...(19): siRNA sense strand
agaucagaacguuggucaa

SEQ ID NO: 2326185 - RNA, 19 nt, Homo sapiens
  misc_RNA (1)...(19): siRNA sense strand
cagagaacccugagcccuu

SEQ ID NO: 2326186 - RNA, 19 nt, Homo sapiens
  misc_RNA (1)...(19): siRNA sense strand
cauugaugauggaggauuc

SEQ ID NO: 2326187 - RNA, 19 nt, Homo sapiens
  misc_RNA (1)...(19): siRNA sense strand
ucgagguacaggagaauga

SEQ ID NO: 2326188 - RNA, 19 nt, Homo sapiens
  misc_RNA (1)...(19): siRNA sense strand
aggaagcugugcagggcau

SEQ ID NO: 2326189 - RNA, 19 nt, Homo sapiens
  misc_RNA (1)...(19): siRNA sense strand
uggucaagucccuggauga

SEQ ID NO: 2326190 - RNA, 19 nt, Homo sapiens
  misc_RNA (1)...(19): siRNA sense strand
ccuucuaccuccaagccaa

SEQ ID NO: 2326191 - RNA, 19 nt, Homo sapiens
  misc_RNA (1)...(19): siRNA sense strand
acaacuuccuucugcacaa

SEQ ID NO: 2326192 - RNA, 19 nt, Homo sapiens
  misc_RNA (1)...(19): siRNA sense strand
ugaugaugacuaugugaau

SEQ ID NO: 2326193 - RNA, 19 nt, Homo sapiens
  misc_RNA (1)...(19): siRNA sense strand
ccgcaucaacacacaggaa

SEQ ID NO: 2326194 - RNA, 19 nt, Homo sapiens
  misc_RNA (1)...(19): siRNA sense strand
ggccacaagcagaucagaa

SEQ ID NO: 2326195 - RNA, 19 nt, Homo sapiens
  misc_RNA (1)...(19): siRNA sense strand
acgccaaggcugacgcuga

SEQ ID NO: 2326196 - RNA, 19 nt, Homo sapiens
  misc_RNA (1)...(19): siRNA sense strand
gcaaggaggccaagcaggu

SEQ ID NO: 2326197 - RNA, 19 nt, Homo sapiens
  misc_RNA (1)...(19): siRNA sense strand
caacaaggcagcugaggac

SEQ ID NO: 2326198 - RNA, 19 nt, Homo sapiens
  misc_RNA (1)...(19): siRNA sense strand
ggcugaugcugcagagaac

SEQ ID NO: 2326199 - RNA, 19 nt, Homo sapiens
  misc_RNA (1)...(19): siRNA sense strand
ccgaaggagacccugguau

SEQ ID NO: 2326200 - RNA, 19 nt, Homo sapiens
  misc_RNA (1)...(19): siRNA sense strand
gaauaaagaugaaggggau

SEQ ID NO: 2326201 - RNA, 19 nt, Homo sapiens
  misc_RNA (1)...(19): siRNA sense strand
ugauggaaagacagagaaa

SEQ ID NO: 2326202 - RNA, 19 nt, Homo sapiens
  misc_RNA (1)...(19): siRNA sense strand
agggaagaauaaagaugaa

SEQ ID NO: 2326203 - RNA, 19 nt, Homo sapiens
  misc_RNA (1)...(19): siRNA sense strand
ggagaauuacugagaggca

SEQ ID NO: 2326204 - RNA, 19 nt, Homo sapiens
  misc_RNA (1)...(19): siRNA sense strand
gcaauggcgaacugagcaa

SEQ ID NO: 2326205 - RNA, 19 nt, Homo sapiens
  misc_RNA (1)...(19): siRNA sense strand
auggaaagacagagaaaau

SEQ ID NO: 2326206 - RNA, 19 nt, Homo sapiens
  misc_RNA (1)...(19): siRNA sense strand
uguuuguaaccaugagaaa

SEQ ID NO: 2326207 - RNA, 19 nt, Homo sapiens
  misc_RNA (1)...(19): siRNA sense strand
agugauggaauaugagaau

SEQ ID NO: 2326208 - RNA, 19 nt, Homo sapiens
  misc_RNA (1)...(19): siRNA sense strand
guuuaugacaccagaagau

SEQ ID NO: 2326209 - RNA, 19 nt, Homo sapiens
  misc_RNA (1)...(19): siRNA sense strand
ucaaagaaggaaagggucu

SEQ ID NO: 2326210 - RNA, 19 nt, Homo sapiens
  misc_RNA (1)...(19): siRNA sense strand
cgaacugagcaauaaggaa

SEQ ID NO: 2326211 - RNA, 19 nt, Homo sapiens
  misc_RNA (1)...(19): siRNA sense strand
uggaaaugugcacaggaaa

SEQ ID NO: 2326212 - RNA, 19 nt, Homo sapiens
  misc_RNA (1)...(19): siRNA sense strand
ccuguggaugggagaauua

SEQ ID NO: 2326213 - RNA, 19 nt, Homo sapiens
  misc_RNA (1)...(19): siRNA sense strand
ggagcugaucugaagggaa

SEQ ID NO: 2326214 - RNA, 19 nt, Homo sapiens
  misc_RNA (1)...(19): siRNA sense strand
cauuucaggagguggagaa

SEQ ID NO: 2326215 - RNA, 19 nt, Homo sapiens
  misc_RNA (1)...(19): siRNA sense strand
ccauaacacccaaugaaaa

SEQ ID NO: 2326216 - RNA, 19 nt, Homo sapiens
  misc_RNA (1)...(19): siRNA sense strand
gggaaagcugacaaucaaa

SEQ ID NO: 2326217 - RNA, 19 nt, Homo sapiens
  misc_RNA (1)...(19): siRNA sense strand
augcaggccauguggaaau

SEQ ID NO: 2326218 - RNA, 19 nt, Homo sapiens
  misc_RNA (1)...(19): siRNA sense strand
ccucagagaaauuuugaaa

SEQ ID NO: 2326219 - RNA, 19 nt, Homo sapiens
  misc_RNA (1)...(19): siRNA sense strand
cuggauucagagacagaaa

SEQ ID NO: 2326220 - RNA, 19 nt, Homo sapiens
  misc_RNA (1)...(19): siRNA sense strand
aagugacaucggugauaaa

SEQ ID NO: 2326221 - RNA, 19 nt, Homo sapiens
  misc_RNA (1)...(19): siRNA sense strand
uggaaaagcccaaagacau

SEQ ID NO: 2326222 - RNA, 19 nt, Homo sapiens
  misc_RNA (1)...(19): siRNA sense strand
ggacaguggcuaaagugga

SEQ ID NO: 2326223 - RNA, 19 nt, Homo sapiens
  misc_RNA (1)...(19): siRNA sense strand
uggaauaugagaauaggau

SEQ ID NO: 2326224 - RNA, 19 nt, Homo sapiens
  misc_RNA (1)...(19): siRNA sense strand
cagugagccuggugaagca

SEQ ID NO: 2326225 - RNA, 19 nt, Homo sapiens
  misc_RNA (1)...(19): siRNA sense strand
uuugaauggagauggagaa

SEQ ID NO: 2326226 - RNA, 19 nt, Homo sapiens
  misc_RNA (1)...(19): siRNA sense strand
ccaagaagcugaccgccau

SEQ ID NO: 2326227 - RNA, 19 nt, Homo sapiens
  misc_RNA (1)...(19): siRNA sense strand
caucagugagccuggugaa

SEQ ID NO: 2326228 - RNA, 19 nt, Homo sapiens
  misc_RNA (1)...(19): siRNA sense strand
aagggaaagcugacaauca

SEQ ID NO: 2326229 - RNA, 19 nt, Homo sapiens
  misc_RNA (1)...(19): siRNA sense strand
uccucgaauuucagcguaa

SEQ ID NO: 2326230 - RNA, 19 nt, Homo sapiens
  misc_RNA (1)...(19): siRNA sense strand
agacaaaaucuuccgauau

SEQ ID NO: 2326231 - RNA, 19 nt, Homo sapiens
  misc_RNA (1)...(19): siRNA sense strand
gugaagcagaaguguuuau

SEQ ID NO: 2326232 - RNA, 19 nt, Homo sapiens
  misc_RNA (1)...(19): siRNA sense strand
uggaagaauuugaacaggu

SEQ ID NO: 2326233 - RNA, 19 nt, Homo sapiens
  misc_RNA (1)...(19): siRNA sense strand
cuggaaaagcccaaagaca

SEQ ID NO: 2326234 - RNA, 19 nt, Homo sapiens
  misc_RNA (1)...(19): siRNA sense strand
uggagaaguagauauggaa

SEQ ID NO: 2326235 - RNA, 19 nt, Homo sapiens
  misc_RNA (1)...(19): siRNA sense strand
cugaagggaaagcugacaa

SEQ ID NO: 2326236 - RNA, 19 nt, Homo sapiens
  misc_RNA (1)...(19): siRNA sense strand
uaaaacgcuuugauggaaa

SEQ ID NO: 2326237 - RNA, 19 nt, Homo sapiens
  misc_RNA (1)...(19): siRNA sense strand
ugacauuucaggaggugga

SEQ ID NO: 2326238 - RNA, 19 nt, Homo sapiens
  misc_RNA (1)...(19): siRNA sense strand
ugaugagaggccuggaaaa

SEQ ID NO: 2326239 - RNA, 19 nt, Homo sapiens
  misc_RNA (1)...(19): siRNA sense strand
ccgagaaaguggaggagau

SEQ ID NO: 2326240 - RNA, 19 nt, Homo sapiens
  misc_RNA (1)...(19): siRNA sense strand
caaagaagcuguuggacca

SEQ ID NO: 2326241 - RNA, 19 nt, Homo sapiens
  misc_RNA (1)...(19): siRNA sense strand
uugaaaacccugagaaaua

SEQ ID NO: 2326242 - RNA, 19 nt, Homo sapiens
  misc_RNA (1)...(19): siRNA sense strand
ggagcaaguaauugggauu

SEQ ID NO: 2326243 - RNA, 19 nt, Homo sapiens
  misc_RNA (1)...(19): siRNA sense strand
cgauggaagaugugaauga

SEQ ID NO: 2326244 - RNA, 19 nt, Homo sapiens
  misc_RNA (1)...(19): siRNA sense strand
cggcagacgcugacagaga

SEQ ID NO: 2326245 - RNA, 19 nt, Homo sapiens
  misc_RNA (1)...(19): siRNA sense strand
uaaugaaagccaauggaaa

SEQ ID NO: 2326246 - RNA, 19 nt, Homo sapiens
  misc_RNA (1)...(19): siRNA sense strand
ggacagaccucucagccaa

SEQ ID NO: 2326247 - RNA, 19 nt, Homo sapiens
  misc_RNA (1)...(19): siRNA sense strand
gaguuggaauagaggaaaa

SEQ ID NO: 2326248 - RNA, 19 nt, Homo sapiens
  misc_RNA (1)...(19): siRNA sense strand
ccgaguuggaauagaggaa

SEQ ID NO: 2326249 - RNA, 19 nt, Homo sapiens
  misc_RNA (1)...(19): siRNA sense strand
uggaggagauaguggccaa

SEQ ID NO: 2326250 - RNA, 19 nt, Homo sapiens
  misc_RNA (1)...(19): siRNA sense strand
gcucaauagaacuguagaa

SEQ ID NO: 2326251 - RNA, 19 nt, Homo sapiens
  misc_RNA (1)...(19): siRNA sense strand
ugaaaaugaucgaagagaa

SEQ ID NO: 2326252 - RNA, 19 nt, Homo sapiens
  misc_RNA (1)...(19): siRNA sense strand
uugaaaugauugagaacca

SEQ ID NO: 2326253 - RNA, 19 nt, Homo sapiens
  misc_RNA (1)...(19): siRNA sense strand
acauggagguugaugaaaa

SEQ ID NO: 2326254 - RNA, 19 nt, Homo sapiens
  misc_RNA (1)...(19): siRNA sense strand
ugguagaagucauguuuau

SEQ ID NO: 2326255 - RNA, 19 nt, Homo sapiens
  misc_RNA (1)...(19): siRNA sense strand
uugcagaagaugauguuaa

SEQ ID NO: 2326256 - RNA, 19 nt, Homo sapiens
  misc_RNA (1)...(19): siRNA sense strand
aggaauuguuugaagaagu

SEQ ID NO: 2326257 - RNA, 19 nt, Homo sapiens
  misc_RNA (1)...(19): siRNA sense strand
ggaagcaguuuguucgcua

SEQ ID NO: 2326258 - RNA, 19 nt, Homo sapiens
  misc_RNA (1)...(19): siRNA sense strand
caggaagagaugaagaaca

SEQ ID NO: 2326259 - RNA, 19 nt, Homo sapiens
  misc_RNA (1)...(19): siRNA sense strand
aguugaaaacccugagaaa

SEQ ID NO: 2326260 - RNA, 19 nt, Homo sapiens
  misc_RNA (1)...(19): siRNA sense strand
agaaaguggaggagauagu

SEQ ID NO: 2326261 - RNA, 19 nt, Homo sapiens
  misc_RNA (1)...(19): siRNA sense strand
auugaaaccugcaaagaga

SEQ ID NO: 2326262 - RNA, 19 nt, Homo sapiens
  misc_RNA (1)...(19): siRNA sense strand
gaagaaguguucaagcaga

SEQ ID NO: 2326263 - RNA, 19 nt, Homo sapiens
  misc_RNA (1)...(19): siRNA sense strand
gcgaaaugcugaagcgcug

SEQ ID NO: 2326264 - RNA, 19 nt, Homo sapiens
  misc_RNA (1)...(19): siRNA sense strand
ccugagaagaugucugaau

SEQ ID NO: 2326265 - RNA, 19 nt, Homo sapiens
  misc_RNA (1)...(19): siRNA sense strand
ccaaacugguagaagucau

SEQ ID NO: 2326266 - RNA, 19 nt, Homo sapiens
  misc_RNA (1)...(19): siRNA sense strand
uuauacagauguugagcau

SEQ ID NO: 2326267 - RNA, 19 nt, Homo sapiens
  misc_RNA (1)...(19): siRNA sense strand
agaugaagaacaaagaaca

SEQ ID NO: 2326268 - RNA, 19 nt, Homo sapiens
  misc_RNA (1)...(19): siRNA sense strand
gagagaaacagaacagcga

SEQ ID NO: 2326269 - RNA, 19 nt, Homo sapiens
  misc_RNA (1)...(19): siRNA sense strand
ugacugaacucuauggcga

SEQ ID NO: 2326270 - RNA, 19 nt, Homo sapiens
  misc_RNA (1)...(19): siRNA sense strand
ggaugagagagaaacagaa

SEQ ID NO: 2326271 - RNA, 19 nt, Homo sapiens
  misc_RNA (1)...(19): siRNA sense strand
aagaaguguucaagcagau

SEQ ID NO: 2326272 - RNA, 19 nt, Homo sapiens
  misc_RNA (1)...(19): siRNA sense strand
gugcaaggccugugcugau

SEQ ID NO: 2326273 - RNA, 19 nt, Homo sapiens
  misc_RNA (1)...(19): siRNA sense strand
uggccaaacugguagaagu

SEQ ID NO: 2326274 - RNA, 19 nt, Homo sapiens
  misc_RNA (1)...(19): siRNA sense strand
ccuuuauggaggaguucaa

SEQ ID NO: 2326275 - RNA, 19 nt, Homo sapiens
  misc_RNA (1)...(19): siRNA sense strand
aggagauaguggccaagaa

SEQ ID NO: 2326276 - RNA, 19 nt, Homo sapiens
  misc_RNA (1)...(19): siRNA sense strand
uugaaaacauggagguuga

SEQ ID NO: 2326277 - RNA, 19 nt, Homo sapiens
  misc_RNA (1)...(19): siRNA sense strand
ccguauaugcuguguagga

SEQ ID NO: 2326278 - RNA, 19 nt, Homo sapiens
  misc_RNA (1)...(19): siRNA sense strand
caguuuaagcagaacccaa

SEQ ID NO: 2326279 - RNA, 19 nt, Homo sapiens
  misc_RNA (1)...(19): siRNA sense strand
caacgauggaagaugugaa

SEQ ID NO: 2326280 - RNA, 19 nt, Homo sapiens
  misc_RNA (1)...(19): siRNA sense strand
cgaugaaagucuggagucu

SEQ ID NO: 2326281 - RNA, 19 nt, Homo sapiens
  misc_RNA (1)...(19): siRNA sense strand
uccaugaagugcaggaaga

SEQ ID NO: 2326282 - RNA, 19 nt, Homo sapiens
  misc_RNA (1)...(19): siRNA sense strand
aguuuaagcagaacccaaa

SEQ ID NO: 2326283 - RNA, 19 nt, Homo sapiens
  misc_RNA (1)...(19): siRNA sense strand
guauaugcuguguaggaau

SEQ ID NO: 2326284 - RNA, 19 nt, Homo sapiens
  misc_RNA (1)...(19): siRNA sense strand
cuaggugagcucugugaaa

SEQ ID NO: 2326285 - RNA, 19 nt, Homo sapiens
  misc_RNA (1)...(19): siRNA sense strand
gggcuauccgggagcucaa

SEQ ID NO: 2326286 - RNA, 19 nt, Homo sapiens
  misc_RNA (1)...(19): siRNA sense strand
ggcguggaugagagagaaa

SEQ ID NO: 2326287 - RNA, 19 nt, Homo sapiens
  misc_RNA (1)...(19): siRNA sense strand
ugaagaaagcacagaugca

SEQ ID NO: 2326288 - RNA, 19 nt, Homo sapiens
  misc_RNA (1)...(19): siRNA sense strand
ugagaagaugucugaauuu

SEQ ID NO: 2326289 - RNA, 19 nt, Homo sapiens
  misc_RNA (1)...(19): siRNA sense strand
guguucaagcagauauuua

SEQ ID NO: 2326290 - RNA, 19 nt, Homo sapiens
  misc_RNA (1)...(19): siRNA sense strand
cgguugugguugccgaaau

SEQ ID NO: 2326291 - RNA, 19 nt, Homo sapiens
  misc_RNA (1)...(19): siRNA sense strand
cagaagaugauguuaaagu

SEQ ID NO: 2326292 - RNA, 19 nt, Homo sapiens
  misc_RNA (1)...(19): siRNA sense strand
ugaugagacgcgugugaau

SEQ ID NO: 2326293 - RNA, 19 nt, Homo sapiens
  misc_RNA (1)...(19): siRNA sense strand
ccuaguugccgucgcuaua

SEQ ID NO: 2326294 - RNA, 19 nt, Homo sapiens
  misc_RNA (1)...(19): siRNA sense strand
cguggaugagagagaaaca

SEQ ID NO: 2326295 - RNA, 19 nt, Homo sapiens
  misc_RNA (1)...(19): siRNA sense strand
ucaauagaacuguagaaga

SEQ ID NO: 2326296 - RNA, 19 nt, Homo sapiens
  misc_RNA (1)...(19): siRNA sense strand
agaacaaagaacaguggga

SEQ ID NO: 2326297 - RNA, 19 nt, Homo sapiens
  misc_RNA (1)...(19): siRNA sense strand
caggcguggaugagagaga

SEQ ID NO: 2326298 - RNA, 19 nt, Homo sapiens
  misc_RNA (1)...(19): siRNA sense strand
gcauggauaucgauggugu

SEQ ID NO: 2326299 - RNA, 19 nt, Homo sapiens
  misc_RNA (1)...(19): siRNA sense strand
gugcaggaagagaugaaga

SEQ ID NO: 2326300 - RNA, 19 nt, Homo sapiens
  misc_RNA (1)...(19): siRNA sense strand
cagaaaucgacuacagcga

SEQ ID NO: 2326301 - RNA, 19 nt, Homo sapiens
  misc_RNA (1)...(19): siRNA sense strand
cagauggauuuaugcugaa

SEQ ID NO: 2326302 - RNA, 19 nt, Homo sapiens
  misc_RNA (1)...(19): siRNA sense strand
aaugaaagccaauggaaag

SEQ ID NO: 2326303 - RNA, 19 nt, Homo sapiens
  misc_RNA (1)...(19): siRNA sense strand
ggacagagaaugagcuccu

SEQ ID NO: 2326304 - RNA, 19 nt, Homo sapiens
  misc_RNA (1)...(19): siRNA sense strand
ggaaccuggauguggguga

SEQ ID NO: 2326305 - RNA, 19 nt, Homo sapiens
  misc_RNA (1)...(19): siRNA sense strand
ccgcaauaccguagcucca

SEQ ID NO: 2326306 - RNA, 19 nt, Homo sapiens
  misc_RNA (1)...(19): siRNA sense strand
ugaaagaggagcuggccca

SEQ ID NO: 2326307 - RNA, 19 nt, Homo sapiens
  misc_RNA (1)...(19): siRNA sense strand
agguggaacacaagacaga

SEQ ID NO: 2326308 - RNA, 19 nt, Homo sapiens
  misc_RNA (1)...(19): siRNA sense strand
ggcuauaagaaguccucaa

SEQ ID NO: 2326309 - RNA, 19 nt, Homo sapiens
  misc_RNA (1)...(19): siRNA sense strand
ggaugagauucgacgguug

SEQ ID NO: 2326310 - RNA, 19 nt, Homo sapiens
  misc_RNA (1)...(19): siRNA sense strand
ccaccacgugcaaggacaa

SEQ ID NO: 2326311 - RNA, 19 nt, Homo sapiens
  misc_RNA (1)...(19): siRNA sense strand
ucaccaagaaugugcacga

SEQ ID NO: 2326312 - RNA, 19 nt, Homo sapiens
  misc_RNA (1)...(19): siRNA sense strand
cccugaucgaagaggaaau

SEQ ID NO: 2326313 - RNA, 19 nt, Homo sapiens
  misc_RNA (1)...(19): siRNA sense strand
ugaucgaagaggaaauuga

SEQ ID NO: 2326314 - RNA, 19 nt, Homo sapiens
  misc_RNA (1)...(19): siRNA sense strand
gcagaaaggccuagggguc

SEQ ID NO: 2326315 - RNA, 19 nt, Homo sapiens
  misc_RNA (1)...(19): siRNA sense strand
ccaaggaggaggaggagga

SEQ ID NO: 2326316 - RNA, 19 nt, Homo sapiens
  misc_RNA (1)...(19): siRNA sense strand
guugagagcucuagggaug

SEQ ID NO: 2326317 - RNA, 19 nt, Homo sapiens
  misc_RNA (1)...(19): siRNA sense strand
aggaggaggaggaggcuga

SEQ ID NO: 2326318 - RNA, 19 nt, Homo sapiens
  misc_RNA (1)...(19): siRNA sense strand
aagccaaggaggaggagga

SEQ ID NO: 2326319 - RNA, 19 nt, Homo sapiens
  misc_RNA (1)...(19): siRNA sense strand
cgguugauggagagucuua

SEQ ID NO: 2326320 - RNA, 19 nt, Homo sapiens
  misc_RNA (1)...(19): siRNA sense strand
gagggaagaaaaugcgaaa

SEQ ID NO: 2326321 - RNA, 19 nt, Homo sapiens
  misc_RNA (1)...(19): siRNA sense strand
cuaccgaaugcuugggaga

SEQ ID NO: 2326322 - RNA, 19 nt, Homo sapiens
  misc_RNA (1)...(19): siRNA sense strand
aggaggaagccaaggagga

SEQ ID NO: 2326323 - RNA, 19 nt, Homo sapiens
  misc_RNA (1)...(19): siRNA sense strand
cuagggaugcccagaucaa

SEQ ID NO: 2326324 - RNA, 19 nt, Homo sapiens
  misc_RNA (1)...(19): siRNA sense strand
aguuaggccuggaagggca

SEQ ID NO: 2326325 - RNA, 19 nt, Homo sapiens
  misc_RNA (1)...(19): siRNA sense strand
guuccaagacacagcgaau

SEQ ID NO: 2326326 - RNA, 19 nt, Homo sapiens
  misc_RNA (1)...(19): siRNA sense strand
ccauggaggaacuggaaaa

SEQ ID NO: 2326327 - RNA, 19 nt, Homo sapiens
  misc_RNA (1)...(19): siRNA sense strand
agaaaucaacagaggagau

SEQ ID NO: 2326328 - RNA, 19 nt, Homo sapiens
  misc_RNA (1)...(19): siRNA sense strand
gaauauaauccucagcaca

SEQ ID NO: 2326329 - RNA, 19 nt, Homo sapiens
  misc_RNA (1)...(19): siRNA sense strand
guuccguaacuuaggacaa

SEQ ID NO: 2326330 - RNA, 19 nt, Homo sapiens
  misc_RNA (1)...(19): siRNA sense strand
ucaacaaucguguggguga

SEQ ID NO: 2326331 - RNA, 19 nt, Homo sapiens
  misc_RNA (1)...(19): siRNA sense strand
ccugcuggauugagauaca

SEQ ID NO: 2326332 - RNA, 19 nt, Homo sapiens
  misc_RNA (1)...(19): siRNA sense strand
gccgaaugccuuagugaca

SEQ ID NO: 2326333 - RNA, 19 nt, Homo sapiens
  misc_RNA (1)...(19): siRNA sense strand
gcauauuggaaaaggaguu

SEQ ID NO: 2326334 - RNA, 19 nt, Homo sapiens
  misc_RNA (1)...(19): siRNA sense strand
uguugaugcuuuggugaaa

SEQ ID NO: 2326335 - RNA, 19 nt, Homo sapiens
  misc_RNA (1)...(19): siRNA sense strand
caguagcaucuuugugcaa

SEQ ID NO: 2326336 - RNA, 19 nt, Homo sapiens
  misc_RNA (1)...(19): siRNA sense strand
caagaucccuagugggugu

SEQ ID NO: 2326337 - RNA, 19 nt, Homo sapiens
  misc_RNA (1)...(19): siRNA sense strand
cccaauagcaguuacccaa

SEQ ID NO: 2326338 - RNA, 19 nt, Homo sapiens
  misc_RNA (1)...(19): siRNA sense strand
ccucauaauccuauuucau

SEQ ID NO: 2326339 - RNA, 19 nt, Homo sapiens
  misc_RNA (1)...(19): siRNA sense strand
cuguugaugcuuuggugaa

SEQ ID NO: 2326340 - RNA, 19 nt, Homo sapiens
  misc_RNA (1)...(19): siRNA sense strand
agaaaggugccauggagga

SEQ ID NO: 2326341 - RNA, 19 nt, Homo sapiens
  misc_RNA (1)...(19): siRNA sense strand
caaaggaaucggcagguga

SEQ ID NO: 2326342 - RNA, 19 nt, Homo sapiens
  misc_RNA (1)...(19): siRNA sense strand
gcaucaagucugagcgccu

SEQ ID NO: 2326343 - RNA, 19 nt, Homo sapiens
  misc_RNA (1)...(19): siRNA sense strand
cugcugaaguacacagagu

SEQ ID NO: 2326344 - RNA, 19 nt, Homo sapiens
  misc_RNA (1)...(19): siRNA sense strand
ggacauggaccgugugcug

SEQ ID NO: 2326345 - RNA, 19 nt, Homo sapiens
  misc_RNA (1)...(19): siRNA sense strand
gugcaaaggcggagaggca

SEQ ID NO: 2326346 - RNA, 19 nt, Homo sapiens
  misc_RNA (1)...(19): siRNA sense strand
cagcugaggcagaagcaga

SEQ ID NO: 2326347 - RNA, 19 nt, Homo sapiens
  misc_RNA (1)...(19): siRNA sense strand
aggcagaagcagagaagug

SEQ ID NO: 2326348 - RNA, 19 nt, Homo sapiens
  misc_RNA (1)...(19): siRNA sense strand
gagaggcagcugaggcaga

SEQ ID NO: 2326349 - RNA, 19 nt, Homo sapiens
  misc_RNA (1)...(19): siRNA sense strand
ucaagaauuugcuggacca

SEQ ID NO: 2326350 - RNA, 19 nt, Homo sapiens
  misc_RNA (1)...(19): siRNA sense strand
cuuuagaagaugaggucgu

SEQ ID NO: 2326351 - RNA, 19 nt, Homo sapiens
  misc_RNA (1)...(19): siRNA sense strand
gggcaggauggacaggauu

SEQ ID NO: 2326352 - RNA, 19 nt, Homo sapiens
  misc_RNA (1)...(19): siRNA sense strand
ggacaggauuggagcccag

SEQ ID NO: 2326353 - RNA, 19 nt, Homo sapiens
  misc_RNA (1)...(19): siRNA sense strand
gaacaagggcugaagggga

SEQ ID NO: 2326354 - RNA, 19 nt, Homo sapiens
  misc_RNA (1)...(19): siRNA sense strand
uguucgaguuccucagcaa

SEQ ID NO: 2326355 - RNA, 19 nt, Homo sapiens
  misc_RNA (1)...(19): siRNA sense strand
ucuaugaugaaguggugaa

SEQ ID NO: 2326356 - RNA, 19 nt, Homo sapiens
  misc_RNA (1)...(19): siRNA sense strand
cgucaaacaaguugcagaa

SEQ ID NO: 2326357 - RNA, 19 nt, Homo sapiens
  misc_RNA (1)...(19): siRNA sense strand
gaguugucaucgagagaau

SEQ ID NO: 2326358 - RNA, 19 nt, Homo sapiens
  misc_RNA (1)...(19): siRNA sense strand
ccgugaaaauggaggaaga

SEQ ID NO: 2326359 - RNA, 19 nt, Homo sapiens
  misc_RNA (1)...(19): siRNA sense strand
gagagaacagagaggguga

SEQ ID NO: 2326360 - RNA, 19 nt, Homo sapiens
  misc_RNA (1)...(19): siRNA sense strand
ccgacgagacccuggacaa

SEQ ID NO: 2326361 - RNA, 19 nt, Homo sapiens
  misc_RNA (1)...(19): siRNA sense strand
gugacaaaggcaagaggau

SEQ ID NO: 2326362 - RNA, 19 nt, Homo sapiens
  misc_RNA (1)...(19): siRNA sense strand
ugaaaauggaggaagaaau

SEQ ID NO: 2326363 - RNA, 19 nt, Homo sapiens
  misc_RNA (1)...(19): siRNA sense strand
ccgagaagacacacccaaa

SEQ ID NO: 2326364 - RNA, 19 nt, Homo sapiens
  misc_RNA (1)...(19): siRNA sense strand
gugauaaggaagaagacca

SEQ ID NO: 2326365 - RNA, 19 nt, Homo sapiens
  misc_RNA (1)...(19): siRNA sense strand
aauuauguacugugggaau

SEQ ID NO: 2326366 - RNA, 19 nt, Homo sapiens
  misc_RNA (1)...(19): siRNA sense strand
gcaaugaggaucuggagca

SEQ ID NO: 2326367 - RNA, 19 nt, Homo sapiens
  misc_RNA (1)...(19): siRNA sense strand
aagaaggagaucagagcau

SEQ ID NO: 2326368 - RNA, 19 nt, Homo sapiens
  misc_RNA (1)...(19): siRNA sense strand
acggagaagugcacgguca

SEQ ID NO: 2326369 - RNA, 19 nt, Homo sapiens
  misc_RNA (1)...(19): siRNA sense strand
gggagagguaugugaagca

SEQ ID NO: 2326370 - RNA, 19 nt, Homo sapiens
  misc_RNA (1)...(19): siRNA sense strand
cggagaagugcacggucaa

SEQ ID NO: 2326371 - RNA, 19 nt, Homo sapiens
  misc_RNA (1)...(19): siRNA sense strand
gcaccauguccgaguggau

SEQ ID NO: 2326372 - RNA, 19 nt, Homo sapiens
  misc_RNA (1)...(19): siRNA sense strand
ugacuguaaagaagagauu

SEQ ID NO: 2326373 - RNA, 19 nt, Homo sapiens
  misc_RNA (1)...(19): siRNA sense strand
uggagugacugcagcguga

SEQ ID NO: 2326374 - RNA, 19 nt, Homo sapiens
  misc_RNA (1)...(19): siRNA sense strand
acuguaaagaagagauuca

SEQ ID NO: 2326375 - RNA, 19 nt, Homo sapiens
  misc_RNA (1)...(19): siRNA sense strand
agaucauagacgaagaaga

SEQ ID NO: 2326376 - RNA, 19 nt, Homo sapiens
  misc_RNA (1)...(19): siRNA sense strand
ugauaaggaagaagaccau

SEQ ID NO: 2326377 - RNA, 19 nt, Homo sapiens
  misc_RNA (1)...(19): siRNA sense strand
gcugcaaagacaagaagga

SEQ ID NO: 2326378 - RNA, 19 nt, Homo sapiens
  misc_RNA (1)...(19): siRNA sense strand
ugcaaagacaagaaggaga

SEQ ID NO: 2326379 - RNA, 19 nt, Homo sapiens
  misc_RNA (1)...(19): siRNA sense strand
gcgucaaacaaguugcaga

SEQ ID NO: 2326380 - RNA, 19 nt, Homo sapiens
  misc_RNA (1)...(19): siRNA sense strand
gaucugugcaccaaggaau

SEQ ID NO: 2326381 - RNA, 19 nt, Homo sapiens
  misc_RNA (1)...(19): siRNA sense strand
cggagguggaauucaggaa

SEQ ID NO: 2326382 - RNA, 19 nt, Homo sapiens
  misc_RNA (1)...(19): siRNA sense strand
agaauuauguacuguggga

SEQ ID NO: 2326383 - RNA, 19 nt, Homo sapiens
  misc_RNA (1)...(19): siRNA sense strand
cagaguugucaucgagaga

SEQ ID NO: 2326384 - RNA, 19 nt, Homo sapiens
  misc_RNA (1)...(19): siRNA sense strand
agaagagaaagaugaagau

SEQ ID NO: 2326385 - RNA, 19 nt, Homo sapiens
  misc_RNA (1)...(19): siRNA sense strand
uguaacaagucauguggga

SEQ ID NO: 2326386 - RNA, 19 nt, Homo sapiens
  misc_RNA (1)...(19): siRNA sense strand
ggaauugguccgagaagac

SEQ ID NO: 2326387 - RNA, 19 nt, Homo sapiens
  misc_RNA (1)...(19): siRNA sense strand
auuauguacugugggaaua

SEQ ID NO: 2326388 - RNA, 19 nt, Homo sapiens
  misc_RNA (1)...(19): siRNA sense strand
cauuaauugcccucagaga

SEQ ID NO: 2326389 - RNA, 19 nt, Homo sapiens
  misc_RNA (1)...(19): siRNA sense strand
gggugaacaaugcaauauu

SEQ ID NO: 2326390 - RNA, 19 nt, Homo sapiens
  misc_RNA (1)...(19): siRNA sense strand
cuuccagaucauagacgaa

SEQ ID NO: 2326391 - RNA, 19 nt, Homo sapiens
  misc_RNA (1)...(19): siRNA sense strand
gugaaaauggaggaagaaa

SEQ ID NO: 2326392 - RNA, 19 nt, Homo sapiens
  misc_RNA (1)...(19): siRNA sense strand
ccaccugugacaaaggcaa

SEQ ID NO: 2326393 - RNA, 19 nt, Homo sapiens
  misc_RNA (1)...(19): siRNA sense strand
uggacggccuggucagaau

SEQ ID NO: 2326394 - RNA, 19 nt, Homo sapiens
  misc_RNA (1)...(19): siRNA sense strand
gcaaggacagugagcgcua

SEQ ID NO: 2326395 - RNA, 19 nt, Homo sapiens
  misc_RNA (1)...(19): siRNA sense strand
aggugaagauccugggcau

SEQ ID NO: 2326396 - RNA, 19 nt, Homo sapiens
  misc_RNA (1)...(19): siRNA sense strand
cccuggacgacaagagaua

SEQ ID NO: 2326397 - RNA, 19 nt, Homo sapiens
  misc_RNA (1)...(19): siRNA sense strand
cugagaugaucgucaccaa

SEQ ID NO: 2326398 - RNA, 19 nt, Homo sapiens
  misc_RNA (1)...(19): siRNA sense strand
acgacaagagauacaggua

SEQ ID NO: 2326399 - RNA, 19 nt, Homo sapiens
  misc_RNA (1)...(19): siRNA sense strand
cggcauacuugcacccuca

SEQ ID NO: 2326400 - RNA, 19 nt, Homo sapiens
  misc_RNA (1)...(19): siRNA sense strand
agaugaagccucuguggga

SEQ ID NO: 2326401 - RNA, 19 nt, Homo sapiens
  misc_RNA (1)...(19): siRNA sense strand
gcacaaggaugcaggacac

SEQ ID NO: 2326402 - RNA, 19 nt, Homo sapiens
  misc_RNA (1)...(19): siRNA sense strand
ccacaaagccagugaccag

SEQ ID NO: 2326403 - RNA, 19 nt, Homo sapiens
  misc_RNA (1)...(19): siRNA sense strand
cccacuaccuccagagcau

SEQ ID NO: 2326404 - RNA, 19 nt, Homo sapiens
  misc_RNA (1)...(19): siRNA sense strand
gaguuugaggccagcacaa

SEQ ID NO: 2326405 - RNA, 19 nt, Homo sapiens
  misc_RNA (1)...(19): siRNA sense strand
gcaaggagcuguuucccau

SEQ ID NO: 2326406 - RNA, 19 nt, Homo sapiens
  misc_RNA (1)...(19): siRNA sense strand
gcacaaucggggaguccaa

SEQ ID NO: 2326407 - RNA, 19 nt, Homo sapiens
  misc_RNA (1)...(19): siRNA sense strand
cugaaucaccgcaagaaca

SEQ ID NO: 2326408 - RNA, 19 nt, Homo sapiens
  misc_RNA (1)...(19): siRNA sense strand
ucaccaaccaauugagaau

SEQ ID NO: 2326409 - RNA, 19 nt, Homo sapiens
  misc_RNA (1)...(19): siRNA sense strand
augagaaagagauggagaa

SEQ ID NO: 2326410 - RNA, 19 nt, Homo sapiens
  misc_RNA (1)...(19): siRNA sense strand
gggcuuacuacaaggccaa

SEQ ID NO: 2326411 - RNA, 19 nt, Homo sapiens
  misc_RNA (1)...(19): siRNA sense strand
guagaauaugagaaagaga

SEQ ID NO: 2326412 - RNA, 19 nt, Homo sapiens
  misc_RNA (1)...(19): siRNA sense strand
ggauuguagaauaugagaa

SEQ ID NO: 2326413 - RNA, 19 nt, Homo sapiens
  misc_RNA (1)...(19): siRNA sense strand
gugccagaggauaaauaua

SEQ ID NO: 2326414 - RNA, 19 nt, Homo sapiens
  misc_RNA (1)...(19): siRNA sense strand
aagagauggagaagaugaa

SEQ ID NO: 2326415 - RNA, 19 nt, Homo sapiens
  misc_RNA (1)...(19): siRNA sense strand
aggcuggcuugguggauga

SEQ ID NO: 2326416 - RNA, 19 nt, Homo sapiens
  misc_RNA (1)...(19): siRNA sense strand
cagaaaccaaauuagacaa

SEQ ID NO: 2326417 - RNA, 19 nt, Homo sapiens
  misc_RNA (1)...(19): siRNA sense strand
agguggaugccgaagaaaa

SEQ ID NO: 2326418 - RNA, 19 nt, Homo sapiens
  misc_RNA (1)...(19): siRNA sense strand
uagacaaugagaagagcaa

SEQ ID NO: 2326419 - RNA, 19 nt, Homo sapiens
  misc_RNA (1)...(19): siRNA sense strand
gugaugggaaauugggcaa

SEQ ID NO: 2326420 - RNA, 19 nt, Homo sapiens
  misc_RNA (1)...(19): siRNA sense strand
uauccaugugaaagggaaa

SEQ ID NO: 2326421 - RNA, 19 nt, Homo sapiens
  misc_RNA (1)...(19): siRNA sense strand
gguucaacugugaugggaa

SEQ ID NO: 2326422 - RNA, 19 nt, Homo sapiens
  misc_RNA (1)...(19): siRNA sense strand
gugaggaguaagaggagca

SEQ ID NO: 2326423 - RNA, 19 nt, Homo sapiens
  misc_RNA (1)...(19): siRNA sense strand
aaccauuauccaugugaaa

SEQ ID NO: 2326424 - RNA, 19 nt, Homo sapiens
  misc_RNA (1)...(19): siRNA sense strand
ggaaacaagauuuugguga

SEQ ID NO: 2326425 - RNA, 19 nt, Homo sapiens
  misc_RNA (1)...(19): siRNA sense strand
cguacgacaaugcggucaa

SEQ ID NO: 2326426 - RNA, 19 nt, Homo sapiens
  misc_RNA (1)...(19): siRNA sense strand
aguaacaggaaacaagauu

SEQ ID NO: 2326427 - RNA, 19 nt, Homo sapiens
  misc_RNA (1)...(19): siRNA sense strand
cuguguuguauaugggaau

SEQ ID NO: 2326428 - RNA, 19 nt, Homo sapiens
  misc_RNA (1)...(19): siRNA sense strand
acuggauagugcuguggaa

SEQ ID NO: 2326429 - RNA, 19 nt, Homo sapiens
  misc_RNA (1)...(19): siRNA sense strand
gggacaucguggaggagga

SEQ ID NO: 2326430 - RNA, 19 nt, Homo sapiens
  misc_RNA (1)...(19): siRNA sense strand
ccaccaugaucuuggacca

SEQ ID NO: 2326431 - RNA, 19 nt, Homo sapiens
  misc_RNA (1)...(19): siRNA sense strand
ucguggaggaggagcagaa

SEQ ID NO: 2326432 - RNA, 19 nt, Homo sapiens
  misc_RNA (1)...(19): siRNA sense strand
ggucauaagucagggccga

SEQ ID NO: 2326433 - RNA, 19 nt, Homo sapiens
  misc_RNA (1)...(19): siRNA sense strand
cugaugugcacguggaaga

SEQ ID NO: 2326434 - RNA, 19 nt, Homo sapiens
  misc_RNA (1)...(19): siRNA sense strand
gcaucaaggaggagcugga

SEQ ID NO: 2326435 - RNA, 19 nt, Homo sapiens
  misc_RNA (1)...(19): siRNA sense strand
acaacaucuucgagggagu

SEQ ID NO: 2326436 - RNA, 19 nt, Homo sapiens
  misc_RNA (1)...(19): siRNA sense strand
aggcugugggcaaggacaa

SEQ ID NO: 2326437 - RNA, 19 nt, Homo sapiens
  misc_RNA (1)...(19): siRNA sense strand
ugauaaaacaaaucggaga

SEQ ID NO: 2326438 - RNA, 19 nt, Homo sapiens
  misc_RNA (1)...(19): siRNA sense strand
cccgauggcaugagagcau

SEQ ID NO: 2326439 - RNA, 19 nt, Homo sapiens
  misc_RNA (1)...(19): siRNA sense strand
aggcccuggucaaggagaa

SEQ ID NO: 2326440 - RNA, 19 nt, Homo sapiens
  misc_RNA (1)...(19): siRNA sense strand
aucugaacguggaguacaa

SEQ ID NO: 2326441 - RNA, 19 nt, Homo sapiens
  misc_RNA (1)...(19): siRNA sense strand
aggaggagcagaagcgguu

SEQ ID NO: 2326442 - RNA, 19 nt, Homo sapiens
  misc_RNA (1)...(19): siRNA sense strand
uggucaaggagaagggugu

SEQ ID NO: 2326443 - RNA, 19 nt, Homo sapiens
  misc_RNA (1)...(19): siRNA sense strand
gcacagaagaucauggcac

SEQ ID NO: 2326444 - RNA, 19 nt, Homo sapiens
  misc_RNA (1)...(19): siRNA sense strand
gguccuuccugguggcguu

SEQ ID NO: 2326445 - RNA, 19 nt, Homo sapiens
  misc_RNA (1)...(19): siRNA sense strand
ugucgauggucugggagaa

SEQ ID NO: 2326446 - RNA, 19 nt, Homo sapiens
  misc_RNA (1)...(19): siRNA sense strand
ccaucguggaccugaggaa

SEQ ID NO: 2326447 - RNA, 19 nt, Homo sapiens
  misc_RNA (1)...(19): siRNA sense strand
gaaccagaauggaugagca

SEQ ID NO: 2326448 - RNA, 19 nt, Homo sapiens
  misc_RNA (1)...(19): siRNA sense strand
ggaagaguuugaagcucga

SEQ ID NO: 2326449 - RNA, 19 nt, Homo sapiens
  misc_RNA (1)...(19): siRNA sense strand
gaggagaaguucaaggaga

SEQ ID NO: 2326450 - RNA, 19 nt, Homo sapiens
  misc_RNA (1)...(19): siRNA sense strand
ggcuaaaccccgacggaaa

SEQ ID NO: 2326451 - RNA, 19 nt, Homo sapiens
  misc_RNA (1)...(19): siRNA sense strand
gggaggaaggcauggacau

SEQ ID NO: 2326452 - RNA, 19 nt, Homo sapiens
  misc_RNA (1)...(19): siRNA sense strand
ccccaaaacacccgagaaa

SEQ ID NO: 2326453 - RNA, 19 nt, Homo sapiens
  misc_RNA (1)...(19): siRNA sense strand
gcgagaucuucgaccgcua

SEQ ID NO: 2326454 - RNA, 19 nt, Homo sapiens
  misc_RNA (1)...(19): siRNA sense strand
aggagaucgcugaggccua

SEQ ID NO: 2326455 - RNA, 19 nt, Homo sapiens
  misc_RNA (1)...(19): siRNA sense strand
ugaccaucgaagugaagaa

SEQ ID NO: 2326456 - RNA, 19 nt, Homo sapiens
  misc_RNA (1)...(19): siRNA sense strand
cggaaagagcauucgaaac

SEQ ID NO: 2326457 - RNA, 19 nt, Homo sapiens
  misc_RNA (1)...(19): siRNA sense strand
gcuacacauuccauggaga

SEQ ID NO: 2326458 - RNA, 19 nt, Homo sapiens
  misc_RNA (1)...(19): siRNA sense strand
gaagagaucuacagcggcu

SEQ ID NO: 2326459 - RNA, 19 nt, Homo sapiens
  misc_RNA (1)...(19): siRNA sense strand
cgcaagaggaagcuggaaa

SEQ ID NO: 2326460 - RNA, 19 nt, Homo sapiens
  misc_RNA (1)...(19): siRNA sense strand
ggaccaagauggaggccac

SEQ ID NO: 2326461 - RNA, 19 nt, Homo sapiens
  misc_RNA (1)...(19): siRNA sense strand
gaacugacuuggcaggaga

SEQ ID NO: 2326462 - RNA, 19 nt, Homo sapiens
  misc_RNA (1)...(19): siRNA sense strand
ucaccgagcugcagggucu

SEQ ID NO: 2326463 - RNA, 19 nt, Homo sapiens
  misc_RNA (1)...(19): siRNA sense strand
cagagcaggaacaggguga

SEQ ID NO: 2326464 - RNA, 19 nt, Homo sapiens
  misc_RNA (1)...(19): siRNA sense strand
agaacugccgcaagaggaa

SEQ ID NO: 2326465 - RNA, 19 nt, Homo sapiens
  misc_RNA (1)...(19): siRNA sense strand
agaugacuuuaaugagcua

SEQ ID NO: 2326466 - RNA, 19 nt, Homo sapiens
  misc_RNA (1)...(19): siRNA sense strand
uuuaaugagcuauuggcaa

SEQ ID NO: 2326467 - RNA, 19 nt, Homo sapiens
  misc_RNA (1)...(19): siRNA sense strand
gcaaauacaaaggagccaa

SEQ ID NO: 2326468 - RNA, 19 nt, Homo sapiens
  misc_RNA (1)...(19): siRNA sense strand
gagcuguacuggcuggcua

SEQ ID NO: 2326469 - RNA, 19 nt, Homo sapiens
  misc_RNA (1)...(19): siRNA sense strand
cuugaugaaguuugaggua

SEQ ID NO: 2326470 - RNA, 19 nt, Homo sapiens
  misc_RNA (1)...(19): siRNA sense strand
aguuugagguaaagcggga

SEQ ID NO: 2326471 - RNA, 19 nt, Homo sapiens
  misc_RNA (1)...(19): siRNA sense strand
ugucugugcgggagcuaaa

SEQ ID NO: 2326472 - RNA, 19 nt, Homo sapiens
  misc_RNA (1)...(19): siRNA sense strand
cugaagaggccauggagcu

SEQ ID NO: 2326473 - RNA, 19 nt, Homo sapiens
  misc_RNA (1)...(19): siRNA sense strand
cugaauaccgugugagaaa

SEQ ID NO: 2326474 - RNA, 19 nt, Homo sapiens
  misc_RNA (1)...(19): siRNA sense strand
ugggagaaucagaggcuaa

SEQ ID NO: 2326475 - RNA, 19 nt, Homo sapiens
  misc_RNA (1)...(19): siRNA sense strand
ugggcaacuuaaaggauaa

SEQ ID NO: 2326476 - RNA, 19 nt, Homo sapiens
  misc_RNA (1)...(19): siRNA sense strand
cgacaagauggcagcagaa

SEQ ID NO: 2326477 - RNA, 19 nt, Homo sapiens
  misc_RNA (1)...(19): siRNA sense strand
aagcuaaaaccaaggaaaa

SEQ ID NO: 2326478 - RNA, 19 nt, Homo sapiens
  misc_RNA (1)...(19): siRNA sense strand
cuaaaguggaaguggacau

SEQ ID NO: 2326479 - RNA, 19 nt, Homo sapiens
  misc_RNA (1)...(19): siRNA sense strand
ucaguuuaccucagagaaa

SEQ ID NO: 2326480 - RNA, 19 nt, Homo sapiens
  misc_RNA (1)...(19): siRNA sense strand
aguauuuccuccagagauu

SEQ ID NO: 2326481 - RNA, 19 nt, Homo sapiens
  misc_RNA (1)...(19): siRNA sense strand
ccguggagaccaagaauuu

SEQ ID NO: 2326482 - RNA, 19 nt, Homo sapiens
  misc_RNA (1)...(19): siRNA sense strand
guacuaaaguggaagugga

SEQ ID NO: 2326483 - RNA, 19 nt, Homo sapiens
  misc_RNA (1)...(19): siRNA sense strand
gugcugaauuggagggucu

SEQ ID NO: 2326484 - RNA, 19 nt, Homo sapiens
  misc_RNA (1)...(19): siRNA sense strand
uggaaguggacauggagaa

SEQ ID NO: 2326485 - RNA, 19 nt, Homo sapiens
  misc_RNA (1)...(19): siRNA sense strand
caaauaugugggagaauca

SEQ ID NO: 2326486 - RNA, 19 nt, Homo sapiens
  misc_RNA (1)...(19): siRNA sense strand
ucuuauuggcaaagcuaaa

SEQ ID NO: 2326487 - RNA, 19 nt, Homo sapiens
  misc_RNA (1)...(19): siRNA sense strand
uuaacaaauaugugggaga

SEQ ID NO: 2326488 - RNA, 19 nt, Homo sapiens
  misc_RNA (1)...(19): siRNA sense strand
aggcuugccagaugagaaa

SEQ ID NO: 2326489 - RNA, 19 nt, Homo sapiens
  misc_RNA (1)...(19): siRNA sense strand
gcuuacuggugaaggacau

SEQ ID NO: 2326490 - RNA, 19 nt, Homo sapiens
  misc_RNA (1)...(19): siRNA sense strand
uggaagacuggaaguuaaa

SEQ ID NO: 2326491 - RNA, 19 nt, Homo sapiens
  misc_RNA (1)...(19): siRNA sense strand
gccagaaauccuuaacaaa

SEQ ID NO: 2326492 - RNA, 19 nt, Homo sapiens
  misc_RNA (1)...(19): siRNA sense strand
ggucaaugggccagaaauc

SEQ ID NO: 2326493 - RNA, 19 nt, Homo sapiens
  misc_RNA (1)...(19): siRNA sense strand
gaauaggaggucuagacaa

SEQ ID NO: 2326494 - RNA, 19 nt, Homo sapiens
  misc_RNA (1)...(19): siRNA sense strand
gggaagaaggucuggauag

SEQ ID NO: 2326495 - RNA, 19 nt, Homo sapiens
  misc_RNA (1)...(19): siRNA sense strand
cuuuggagcuuuugggcaa

SEQ ID NO: 2326496 - RNA, 19 nt, Homo sapiens
  misc_RNA (1)...(19): siRNA sense strand
caaacaguguauuggcaca

SEQ ID NO: 2326497 - RNA, 19 nt, Homo sapiens
  misc_RNA (1)...(19): siRNA sense strand
gggaaaaggcagaagauug

SEQ ID NO: 2326498 - RNA, 19 nt, Homo sapiens
  misc_RNA (1)...(19): siRNA sense strand
cagagauuguggagcagau

SEQ ID NO: 2326499 - RNA, 19 nt, Homo sapiens
  misc_RNA (1)...(19): siRNA sense strand
aggagauggaaaugcuuaa

SEQ ID NO: 2326500 - RNA, 19 nt, Homo sapiens
  misc_RNA (1)...(19): siRNA sense strand
cacaaugaccaucgagauu

SEQ ID NO: 2326501 - RNA, 19 nt, Homo sapiens
  misc_RNA (1)...(19): siRNA sense strand
ccgacaagauggcagcaga

SEQ ID NO: 2326502 - RNA, 19 nt, Homo sapiens
  misc_RNA (1)...(19): siRNA sense strand
uaggacugguuguuggaaa

SEQ ID NO: 2326503 - RNA, 19 nt, Homo sapiens
  misc_RNA (1)...(19): siRNA sense strand
guauacauguuaaaggcau

SEQ ID NO: 2326504 - RNA, 19 nt, Homo sapiens
  misc_RNA (1)...(19): siRNA sense strand
guugugugguuguggauga

SEQ ID NO: 2326505 - RNA, 19 nt, Homo sapiens
  misc_RNA (1)...(19): siRNA sense strand
agcaagaaugagagggcau

SEQ ID NO: 2326506 - RNA, 19 nt, Homo sapiens
  misc_RNA (1)...(19): siRNA sense strand
agauugauuuccugcagaa

SEQ ID NO: 2326507 - RNA, 19 nt, Homo sapiens
  misc_RNA (1)...(19): siRNA sense strand
aggccuacucagugggaca

SEQ ID NO: 2326508 - RNA, 19 nt, Homo sapiens
  misc_RNA (1)...(19): siRNA sense strand
cuagcauccugaagggaga

SEQ ID NO: 2326509 - RNA, 19 nt, Homo sapiens
  misc_RNA (1)...(19): siRNA sense strand
ggguuguauacauguuaaa

SEQ ID NO: 2326510 - RNA, 19 nt, Homo sapiens
  misc_RNA (1)...(19): siRNA sense strand
acauaaaggccaguacuaa

SEQ ID NO: 2326511 - RNA, 19 nt, Homo sapiens
  misc_RNA (1)...(19): siRNA sense strand
uggcacaaaccaagaagau

SEQ ID NO: 2326512 - RNA, 19 nt, Homo sapiens
  misc_RNA (1)...(19): siRNA sense strand
cccaguuacucgaguucua

SEQ ID NO: 2326513 - RNA, 19 nt, Homo sapiens
  misc_RNA (1)...(19): siRNA sense strand
gagaaaaugggcugggcuu

SEQ ID NO: 2326514 - RNA, 19 nt, Homo sapiens
  misc_RNA (1)...(19): siRNA sense strand
acaagauggcagcagaauu

SEQ ID NO: 2326515 - RNA, 19 nt, Homo sapiens
  misc_RNA (1)...(19): siRNA sense strand
cacauaaaggccaguacua

SEQ ID NO: 2326516 - RNA, 19 nt, Homo sapiens
  misc_RNA (1)...(19): siRNA sense strand
ggaaaaucgccaaucaauu

SEQ ID NO: 2326517 - RNA, 19 nt, Homo sapiens
  misc_RNA (1)...(19): siRNA sense strand
ggagcagauggguuguaua

SEQ ID NO: 2326518 - RNA, 19 nt, Homo sapiens
  misc_RNA (1)...(19): siRNA sense strand
aagauguccuacagaugaa

SEQ ID NO: 2326519 - RNA, 19 nt, Homo sapiens
  misc_RNA (1)...(19): siRNA sense strand
cauuuacacugaagacaca

SEQ ID NO: 2326520 - RNA, 19 nt, Homo sapiens
  misc_RNA (1)...(19): siRNA sense strand
ugucaggccaugaagaaga

SEQ ID NO: 2326521 - RNA, 19 nt, Homo sapiens
  misc_RNA (1)...(19): siRNA sense strand
aaugggaauaggaggucua

SEQ ID NO: 2326522 - RNA, 19 nt, Homo sapiens
  misc_RNA (1)...(19): siRNA sense strand
ccuggaagacuggaaguua

SEQ ID NO: 2326523 - RNA, 19 nt, Homo sapiens
  misc_RNA (1)...(19): siRNA sense strand
cacuuaaucuuauuggcaa

SEQ ID NO: 2326524 - RNA, 19 nt, Homo sapiens
  misc_RNA (1)...(19): siRNA sense strand
gugcagcagacuaagaaca

SEQ ID NO: 2326525 - RNA, 19 nt, Homo sapiens
  misc_RNA (1)...(19): siRNA sense strand
agggaagaaggucuggaua

SEQ ID NO: 2326526 - RNA, 19 nt, Homo sapiens
  misc_RNA (1)...(19): siRNA sense strand
cugaagagccagagggaaa

SEQ ID NO: 2326527 - RNA, 19 nt, Homo sapiens
  misc_RNA (1)...(19): siRNA sense strand
ggguaaagugugugaggaa

SEQ ID NO: 2326528 - RNA, 19 nt, Homo sapiens
  misc_RNA (1)...(19): siRNA sense strand
aggcagaggguaugagaaa

SEQ ID NO: 2326529 - RNA, 19 nt, Homo sapiens
  misc_RNA (1)...(19): siRNA sense strand
cugaagagccagagggaga

SEQ ID NO: 2326530 - RNA, 19 nt, Homo sapiens
  misc_RNA (1)...(19): siRNA sense strand
gaugauaacuggaaggaca

SEQ ID NO: 2326531 - RNA, 19 nt, Homo sapiens
  misc_RNA (1)...(19): siRNA sense strand
agaaagagcugaagagcca

SEQ ID NO: 2326532 - RNA, 19 nt, Homo sapiens
  misc_RNA (1)...(19): siRNA sense strand
aggugaagaucaagagauu

SEQ ID NO: 2326533 - RNA, 19 nt, Homo sapiens
  misc_RNA (1)...(19): siRNA sense strand
gggaaaagcugaagagcca

SEQ ID NO: 2326534 - RNA, 19 nt, Homo sapiens
  misc_RNA (1)...(19): siRNA sense strand
aagucagguuggagggaaa

SEQ ID NO: 2326535 - RNA, 19 nt, Homo sapiens
  misc_RNA (1)...(19): siRNA sense strand
ccagaaugucagaugauaa

SEQ ID NO: 2326536 - RNA, 19 nt, Homo sapiens
  misc_RNA (1)...(19): siRNA sense strand
cuuugaaggcagaggguau

SEQ ID NO: 2326537 - RNA, 19 nt, Homo sapiens
  misc_RNA (1)...(19): siRNA sense strand
gcaccaaggaggagaucau

SEQ ID NO: 2326538 - RNA, 19 nt, Homo sapiens
  misc_RNA (1)...(19): siRNA sense strand
uggaagaagaagaagaaga

SEQ ID NO: 2326539 - RNA, 19 nt, Homo sapiens
  misc_RNA (1)...(19): siRNA sense strand
cuaaagagcaagcgcggaa

SEQ ID NO: 2326540 - RNA, 19 nt, Homo sapiens
  misc_RNA (1)...(19): siRNA sense strand
gauucaugcuagagguuau

SEQ ID NO: 2326541 - RNA, 19 nt, Homo sapiens
  misc_RNA (1)...(19): siRNA sense strand
gcuuugaaauggacagaga

SEQ ID NO: 2326542 - RNA, 19 nt, Homo sapiens
  misc_RNA (1)...(19): siRNA sense strand
cagaagaaggugaagauca

SEQ ID NO: 2326543 - RNA, 19 nt, Homo sapiens
  misc_RNA (1)...(19): siRNA sense strand
gggaagagcaagggaguca

SEQ ID NO: 2326544 - RNA, 19 nt, Homo sapiens
  misc_RNA (1)...(19): siRNA sense strand
gaaucaggaaugugaggaa

SEQ ID NO: 2326545 - RNA, 19 nt, Homo sapiens
  misc_RNA (1)...(19): siRNA sense strand
aagaagaagaagaagauga

SEQ ID NO: 2326546 - RNA, 19 nt, Homo sapiens
  misc_RNA (1)...(19): siRNA sense strand
ugacaaagauaaugagcgu

SEQ ID NO: 2326547 - RNA, 19 nt, Homo sapiens
  misc_RNA (1)...(19): siRNA sense strand
ggaacaaauguaaggacuu

SEQ ID NO: 2326548 - RNA, 19 nt, Homo sapiens
  misc_RNA (1)...(19): siRNA sense strand
gggcagaagcagagacaug

SEQ ID NO: 2326549 - RNA, 19 nt, Homo sapiens
  misc_RNA (1)...(19): siRNA sense strand
ucagagaauccaugaacaa

SEQ ID NO: 2326550 - RNA, 19 nt, Homo sapiens
  misc_RNA (1)...(19): siRNA sense strand
ccucacagaccaucagaaa

SEQ ID NO: 2326551 - RNA, 19 nt, Homo sapiens
  misc_RNA (1)...(19): siRNA sense strand
acaaagauaaugagcguga

SEQ ID NO: 2326552 - RNA, 19 nt, Homo sapiens
  misc_RNA (1)...(19): siRNA sense strand
gagcaagcgcggaacaaau

SEQ ID NO: 2326553 - RNA, 19 nt, Homo sapiens
  misc_RNA (1)...(19): siRNA sense strand
augaauugguggaaucuaa

SEQ ID NO: 2326554 - RNA, 19 nt, Homo sapiens
  misc_RNA (1)...(19): siRNA sense strand
ccaggaaguugaagccaau

SEQ ID NO: 2326555 - RNA, 19 nt, Homo sapiens
  misc_RNA (1)...(19): siRNA sense strand
cuuaaaaggcgucagaaaa

SEQ ID NO: 2326556 - RNA, 19 nt, Homo sapiens
  misc_RNA (1)...(19): siRNA sense strand
aauugaagacccagaagaa

SEQ ID NO: 2326557 - RNA, 19 nt, Homo sapiens
  misc_RNA (1)...(19): siRNA sense strand
cuggagaauuacaaggaga

SEQ ID NO: 2326558 - RNA, 19 nt, Homo sapiens
  misc_RNA (1)...(19): siRNA sense strand
ucaucaagauccaagagaa

SEQ ID NO: 2326559 - RNA, 19 nt, Homo sapiens
  misc_RNA (1)...(19): siRNA sense strand
cagaauuuguugagcacca

SEQ ID NO: 2326560 - RNA, 19 nt, Homo sapiens
  misc_RNA (1)...(19): siRNA sense strand
agauaaugagcgugaacau

SEQ ID NO: 2326561 - RNA, 19 nt, Homo sapiens
  misc_RNA (1)...(19): siRNA sense strand
caucauaggagaaggucca

SEQ ID NO: 2326562 - RNA, 19 nt, Homo sapiens
  misc_RNA (1)...(19): siRNA sense strand
cgggaugccuucaugcaaa

SEQ ID NO: 2326563 - RNA, 19 nt, Homo sapiens
  misc_RNA (1)...(19): siRNA sense strand
ccaagaagucacaauggaa

SEQ ID NO: 2326564 - RNA, 19 nt, Homo sapiens
  misc_RNA (1)...(19): siRNA sense strand
gaguguauuccgugccaaa

SEQ ID NO: 2326565 - RNA, 19 nt, Homo sapiens
  misc_RNA (1)...(19): siRNA sense strand
agaagaagaugaagcagca

SEQ ID NO: 2326566 - RNA, 19 nt, Homo sapiens
  misc_RNA (1)...(19): siRNA sense strand
cggaacaaauguaaggacu

SEQ ID NO: 2326567 - RNA, 19 nt, Homo sapiens
  misc_RNA (1)...(19): siRNA sense strand
cguaacuguucauaagaau

SEQ ID NO: 2326568 - RNA, 19 nt, Homo sapiens
  misc_RNA (1)...(19): siRNA sense strand
cugaagggccagauggaga

SEQ ID NO: 2326569 - RNA, 19 nt, Homo sapiens
  misc_RNA (1)...(19): siRNA sense strand
uauugaagacccagaagaa

SEQ ID NO: 2326570 - RNA, 19 nt, Homo sapiens
  misc_RNA (1)...(19): siRNA sense strand
acaacacaauccaggacaa

SEQ ID NO: 2326571 - RNA, 19 nt, Homo sapiens
  misc_RNA (1)...(19): siRNA sense strand
gaauguaagaaucaggaau

SEQ ID NO: 2326572 - RNA, 19 nt, Homo sapiens
  misc_RNA (1)...(19): siRNA sense strand
gcucuaaccccuaugaaaa

SEQ ID NO: 2326573 - RNA, 19 nt, Homo sapiens
  misc_RNA (1)...(19): siRNA sense strand
cugcagagcccauuggaga

SEQ ID NO: 2326574 - RNA, 19 nt, Homo sapiens
  misc_RNA (1)...(19): siRNA sense strand
ugccaugaaugcacagaaa

SEQ ID NO: 2326575 - RNA, 19 nt, Homo sapiens
  misc_RNA (1)...(19): siRNA sense strand
aggaagaagcccuuugaau

SEQ ID NO: 2326576 - RNA, 19 nt, Homo sapiens
  misc_RNA (1)...(19): siRNA sense strand
cgucagaaaacuuacaaua

SEQ ID NO: 2326577 - RNA, 19 nt, Homo sapiens
  misc_RNA (1)...(19): siRNA sense strand
gccagauggugcagguauu

SEQ ID NO: 2326578 - RNA, 19 nt, Homo sapiens
  misc_RNA (1)...(19): siRNA sense strand
gugguagugagaugagaaa

SEQ ID NO: 2326579 - RNA, 19 nt, Homo sapiens
  misc_RNA (1)...(19): siRNA sense strand
cauuugaaaacaaggguaa

SEQ ID NO: 2326580 - RNA, 19 nt, Homo sapiens
  misc_RNA (1)...(19): siRNA sense strand
ucauaugagaggucuguua

SEQ ID NO: 2326581 - RNA, 19 nt, Homo sapiens
  misc_RNA (1)...(19): siRNA sense strand
aaucuaaugagaagggaga

SEQ ID NO: 2326582 - RNA, 19 nt, Homo sapiens
  misc_RNA (1)...(19): siRNA sense strand
caguaagaaucgcaacuau

SEQ ID NO: 2326583 - RNA, 19 nt, Homo sapiens
  misc_RNA (1)...(19): siRNA sense strand
ccagaaaaucuaugaccaa

SEQ ID NO: 2326584 - RNA, 19 nt, Homo sapiens
  misc_RNA (1)...(19): siRNA sense strand
aggaugacccugaugacaa

SEQ ID NO: 2326585 - RNA, 19 nt, Homo sapiens
  misc_RNA (1)...(19): siRNA sense strand
gcggguuuaugaagggaau

SEQ ID NO: 2326586 - RNA, 19 nt, Homo sapiens
  misc_RNA (1)...(19): siRNA sense strand
gcgugaacaugaacgugaa

SEQ ID NO: 2326587 - RNA, 19 nt, Homo sapiens
  misc_RNA (1)...(19): siRNA sense strand
cccaggaaguugaagccaa

SEQ ID NO: 2326588 - RNA, 19 nt, Homo sapiens
  misc_RNA (1)...(19): siRNA sense strand
aaccagaagacgacaacaa

SEQ ID NO: 2326589 - RNA, 19 nt, Homo sapiens
  misc_RNA (1)...(19): siRNA sense strand
caucaagauccaagagaag

SEQ ID NO: 2326590 - RNA, 19 nt, Homo sapiens
  misc_RNA (1)...(19): siRNA sense strand
acggagugauaauggaaaa

SEQ ID NO: 2326591 - RNA, 19 nt, Homo sapiens
  misc_RNA (1)...(19): siRNA sense strand
gggaugacaaagauaauga

SEQ ID NO: 2326592 - RNA, 19 nt, Homo sapiens
  misc_RNA (1)...(19): siRNA sense strand
gagucauacuauaacaaga

SEQ ID NO: 2326593 - RNA, 19 nt, Homo sapiens
  misc_RNA (1)...(19): siRNA sense strand
uggaagacccucagaagga

SEQ ID NO: 2326594 - RNA, 19 nt, Homo sapiens
  misc_RNA (1)...(19): siRNA sense strand
gcgaaaacaagcuuugaaa

SEQ ID NO: 2326595 - RNA, 19 nt, Homo sapiens
  misc_RNA (1)...(19): siRNA sense strand
cagcaaaacgauugaggaa

SEQ ID NO: 2326596 - RNA, 19 nt, Homo sapiens
  misc_RNA (1)...(19): siRNA sense strand
acugauuauuggacagaau

SEQ ID NO: 2326597 - RNA, 19 nt, Homo sapiens
  misc_RNA (1)...(19): siRNA sense strand
gacuguacgcagagagcua

SEQ ID NO: 2326598 - RNA, 19 nt, Homo sapiens
  misc_RNA (1)...(19): siRNA sense strand
agcaaugaaaggaggagaa

SEQ ID NO: 2326599 - RNA, 19 nt, Homo sapiens
  misc_RNA (1)...(19): siRNA sense strand
aagacaagaauuugaccua

SEQ ID NO: 2326600 - RNA, 19 nt, Homo sapiens
  misc_RNA (1)...(19): siRNA sense strand
ggaaauuguccgagaucac

SEQ ID NO: 2326601 - RNA, 19 nt, Homo sapiens
  misc_RNA (1)...(19): siRNA sense strand
ucgacuaggaagacaagaa

SEQ ID NO: 2326602 - RNA, 19 nt, Homo sapiens
  misc_RNA (1)...(19): siRNA sense strand
uuauaugauccuaggccaa

SEQ ID NO: 2326603 - RNA, 19 nt, Homo sapiens
  misc_RNA (1)...(19): siRNA sense strand
cgggauuggacgacugauu

SEQ ID NO: 2326604 - RNA, 19 nt, Homo sapiens
  misc_RNA (1)...(19): siRNA sense strand
cauucagaguggagauagu

SEQ ID NO: 2326605 - RNA, 19 nt, Homo sapiens
  misc_RNA (1)...(19): siRNA sense strand
ccaucgagaucguggugca

SEQ ID NO: 2326606 - RNA, 19 nt, Homo sapiens
  misc_RNA (1)...(19): siRNA sense strand
cgauugaggaauaugcuau

SEQ ID NO: 2326607 - RNA, 19 nt, Homo sapiens
  misc_RNA (1)...(19): siRNA sense strand
ggaagagagcuuuggcacu

SEQ ID NO: 2326608 - RNA, 19 nt, Homo sapiens
  misc_RNA (1)...(19): siRNA sense strand
uggaggaaauuguccgaga

SEQ ID NO: 2326609 - RNA, 19 nt, Homo sapiens
  misc_RNA (1)...(19): siRNA sense strand
gcauuaucaggaagaucaa

SEQ ID NO: 2326610 - RNA, 19 nt, Homo sapiens
  misc_RNA (1)...(19): siRNA sense strand
gaucaaggcagcuggugga

SEQ ID NO: 2326611 - RNA, 19 nt, Homo sapiens
  misc_RNA (1)...(19): siRNA sense strand
uaguggacccaguggauau

SEQ ID NO: 2326612 - RNA, 19 nt, Homo sapiens
  misc_RNA (1)...(19): siRNA sense strand
cagacaaaaucuaccaaau

SEQ ID NO: 2326613 - RNA, 19 nt, Homo sapiens
  misc_RNA (1)...(19): siRNA sense strand
ggcccuggucacagacaaa

SEQ ID NO: 2326614 - RNA, 19 nt, Homo sapiens
  misc_RNA (1)...(19): siRNA sense strand
gaaacagggccuaaggauc

SEQ ID NO: 2326615 - RNA, 19 nt, Homo sapiens
  misc_RNA (1)...(19): siRNA sense strand
cagagagcuacgagaggga

SEQ ID NO: 2326616 - RNA, 19 nt, Homo sapiens
  misc_RNA (1)...(19): siRNA sense strand
ucucaaaucugauggacuc

SEQ ID NO: 2326617 - RNA, 19 nt, Homo sapiens
  misc_RNA (1)...(19): siRNA sense strand
aaggaggagaauauggauu

SEQ ID NO: 2326618 - RNA, 19 nt, Homo sapiens
  misc_RNA (1)...(19): siRNA sense strand
ucgccauggugaugagaua

SEQ ID NO: 2326619 - RNA, 19 nt, Homo sapiens
  misc_RNA (1)...(19): siRNA sense strand
auaacaacagggucagaaa

SEQ ID NO: 2326620 - RNA, 19 nt, Homo sapiens
  misc_RNA (1)...(19): siRNA sense strand
acauugugacaguggcuaa

SEQ ID NO: 2326621 - RNA, 19 nt, Homo sapiens
  misc_RNA (1)...(19): siRNA sense strand
aauugaagucagugaagau

SEQ ID NO: 2326622 - RNA, 19 nt, Homo sapiens
  misc_RNA (1)...(19): siRNA sense strand
cccaaugauuuaugguaca

SEQ ID NO: 2326623 - RNA, 19 nt, Homo sapiens
  misc_RNA (1)...(19): siRNA sense strand
aaccaaagcuucagcagca

SEQ ID NO: 2326624 - RNA, 19 nt, Homo sapiens
  misc_RNA (1)...(19): siRNA sense strand
uccaagaagaauaaagaca

SEQ ID NO: 2326625 - RNA, 19 nt, Homo sapiens
  misc_RNA (1)...(19): siRNA sense strand
cugaaauugaagugccuuu

SEQ ID NO: 2326626 - RNA, 19 nt, Homo sapiens
  misc_RNA (1)...(19): siRNA sense strand
caguguauuucaagggucu

SEQ ID NO: 2326627 - RNA, 19 nt, Homo sapiens
  misc_RNA (1)...(19): siRNA sense strand
gcagauaaacaaacccuga

SEQ ID NO: 2326628 - RNA, 19 nt, Homo sapiens
  misc_RNA (1)...(19): siRNA sense strand
agucgaggccucaugacaa

SEQ ID NO: 2326629 - RNA, 19 nt, Homo sapiens
  misc_RNA (1)...(19): siRNA sense strand
cgacauaauccuacaggug

SEQ ID NO: 2326630 - RNA, 19 nt, Homo sapiens
  misc_RNA (1)...(19): siRNA sense strand
agauggaaccaaagcuuca

SEQ ID NO: 2326631 - RNA, 19 nt, Homo sapiens
  misc_RNA (1)...(19): siRNA sense strand
ucgucaacgcaguguauuu

SEQ ID NO: 2326632 - RNA, 19 nt, Homo sapiens
  misc_RNA (1)...(19): siRNA sense strand
gggaaagccacaaggacca

SEQ ID NO: 2326633 - RNA, 19 nt, Homo sapiens
  misc_RNA (1)...(19): siRNA sense strand
cguaauaucagauggagga

SEQ ID NO: 2326634 - RNA, 19 nt, Homo sapiens
  misc_RNA (1)...(19): siRNA sense strand
aggaaggccacaaggacca

SEQ ID NO: 2326635 - RNA, 19 nt, Homo sapiens
  misc_RNA (1)...(19): siRNA sense strand
aggaaggccacaaggacca

SEQ ID NO: 2326636 - RNA, 19 nt, Homo sapiens
  misc_RNA (1)...(19): siRNA sense strand
gauuauugucacaggcaua

SEQ ID NO: 2326637 - RNA, 19 nt, Homo sapiens
  misc_RNA (1)...(19): siRNA sense strand
gcaaagugaagguuggcaa

SEQ ID NO: 2326638 - RNA, 19 nt, Homo sapiens
  misc_RNA (1)...(19): siRNA sense strand
aaucaaagauaucagggaa

SEQ ID NO: 2326639 - RNA, 19 nt, Homo sapiens
  misc_RNA (1)...(19): siRNA sense strand
cauaauagauaacaggaga

SEQ ID NO: 2326640 - RNA, 19 nt, Homo sapiens
  misc_RNA (1)...(19): siRNA sense strand
gaauaaugaaugaagccaa

SEQ ID NO: 2326641 - RNA, 19 nt, Homo sapiens
  misc_RNA (1)...(19): siRNA sense strand
ccguaguauugaugaugaa

SEQ ID NO: 2326642 - RNA, 19 nt, Homo sapiens
  misc_RNA (1)...(19): siRNA sense strand
gaagauaugugaugggauc

SEQ ID NO: 2326643 - RNA, 19 nt, Homo sapiens
  misc_RNA (1)...(19): siRNA sense strand
aagucaaagucgaccaaau

SEQ ID NO: 2326644 - RNA, 19 nt, Homo sapiens
  misc_RNA (1)...(19): siRNA sense strand
caaaugauauuauggcaga

SEQ ID NO: 2326645 - RNA, 19 nt, Homo sapiens
  misc_RNA (1)...(19): siRNA sense strand
agacucaguuccuggagaa

SEQ ID NO: 2326646 - RNA, 19 nt, Homo sapiens
  misc_RNA (1)...(19): siRNA sense strand
auaaaguagcugugaagau

SEQ ID NO: 2326647 - RNA, 19 nt, Homo sapiens
  misc_RNA (1)...(19): siRNA sense strand
ggaauaugucucaggagga

SEQ ID NO: 2326648 - RNA, 19 nt, Homo sapiens
  misc_RNA (1)...(19): siRNA sense strand
gguuauucucuaugcuuua

SEQ ID NO: 2326649 - RNA, 19 nt, Homo sapiens
  misc_RNA (1)...(19): siRNA sense strand
ugauauuauggcagaagua

SEQ ID NO: 2326650 - RNA, 19 nt, Homo sapiens
  misc_RNA (1)...(19): siRNA sense strand
auggaaggcuggaugaaaa

SEQ ID NO: 2326651 - RNA, 19 nt, Homo sapiens
  misc_RNA (1)...(19): siRNA sense strand
cagccgagaagcagaaaca

SEQ ID NO: 2326652 - RNA, 19 nt, Homo sapiens
  misc_RNA (1)...(19): siRNA sense strand
augaauggaagguuguaaa

SEQ ID NO: 2326653 - RNA, 19 nt, Homo sapiens
  misc_RNA (1)...(19): siRNA sense strand
gaagagggccacaaucaaa

SEQ ID NO: 2326654 - RNA, 19 nt, Homo sapiens
  misc_RNA (1)...(19): siRNA sense strand
gguccauagagauuugaaa

SEQ ID NO: 2326655 - RNA, 19 nt, Homo sapiens
  misc_RNA (1)...(19): siRNA sense strand
gggccacaaucaaagauau

SEQ ID NO: 2326656 - RNA, 19 nt, Homo sapiens
  misc_RNA (1)...(19): siRNA sense strand
gauuaugaauggaagguug

SEQ ID NO: 2326657 - RNA, 19 nt, Homo sapiens
  misc_RNA (1)...(19): siRNA sense strand
gauccaucauauaguucaa

SEQ ID NO: 2326658 - RNA, 19 nt, Homo sapiens
  misc_RNA (1)...(19): siRNA sense strand
gcauuuaggaauuagaagu

SEQ ID NO: 2326659 - RNA, 19 nt, Homo sapiens
  misc_RNA (1)...(19): siRNA sense strand
aauuagaagucaaagucga

SEQ ID NO: 2326660 - RNA, 19 nt, Homo sapiens
  misc_RNA (1)...(19): siRNA sense strand
ugaagauacucaaucgaca

SEQ ID NO: 2326661 - RNA, 19 nt, Homo sapiens
  misc_RNA (1)...(19): siRNA sense strand
cgacagccgagaagcagaa

SEQ ID NO: 2326662 - RNA, 19 nt, Homo sapiens
  misc_RNA (1)...(19): siRNA sense strand
ccuugaugugguaggaaaa

SEQ ID NO: 2326663 - RNA, 19 nt, Homo sapiens
  misc_RNA (1)...(19): siRNA sense strand
ggagaaagauggcgacagc

SEQ ID NO: 2326664 - RNA, 19 nt, Homo sapiens
  misc_RNA (1)...(19): siRNA sense strand
auguagagcaaucaaacaa

SEQ ID NO: 2326665 - RNA, 19 nt, Homo sapiens
  misc_RNA (1)...(19): siRNA sense strand
gccacuacauucuggguga

SEQ ID NO: 2326666 - RNA, 19 nt, Homo sapiens
  misc_RNA (1)...(19): siRNA sense strand
aggcccagagguagauaua

SEQ ID NO: 2326667 - RNA, 19 nt, Homo sapiens
  misc_RNA (1)...(19): siRNA sense strand
ggguuauucucuaugcuuu

SEQ ID NO: 2326668 - RNA, 19 nt, Homo sapiens
  misc_RNA (1)...(19): siRNA sense strand
ugaugaagccuuaaaagaa

SEQ ID NO: 2326669 - RNA, 19 nt, Homo sapiens
  misc_RNA (1)...(19): siRNA sense strand
gagaaauucagaaccucaa

SEQ ID NO: 2326670 - RNA, 19 nt, Homo sapiens
  misc_RNA (1)...(19): siRNA sense strand
gugaaaaguuugagugcuc

SEQ ID NO: 2326671 - RNA, 19 nt, Homo sapiens
  misc_RNA (1)...(19): siRNA sense strand
acgccauacccuugaugaa

SEQ ID NO: 2326672 - RNA, 19 nt, Homo sapiens
  misc_RNA (1)...(19): siRNA sense strand
agguguaaggaaagcaaaa

SEQ ID NO: 2326673 - RNA, 19 nt, Homo sapiens
  misc_RNA (1)...(19): siRNA sense strand
aggcauccucauauaauua

SEQ ID NO: 2326674 - RNA, 19 nt, Homo sapiens
  misc_RNA (1)...(19): siRNA sense strand
caguacaccaucugauauu

SEQ ID NO: 2326675 - RNA, 19 nt, Homo sapiens
  misc_RNA (1)...(19): siRNA sense strand
acaccaagggcacgccaua

SEQ ID NO: 2326676 - RNA, 19 nt, Homo sapiens
  misc_RNA (1)...(19): siRNA sense strand
aguuauaccaaguggauag

SEQ ID NO: 2326677 - RNA, 19 nt, Homo sapiens
  misc_RNA (1)...(19): siRNA sense strand
cucaguuccuggagaaaga

SEQ ID NO: 2326678 - RNA, 19 nt, Homo sapiens
  misc_RNA (1)...(19): siRNA sense strand
augcaggcccagagguaga

SEQ ID NO: 2326679 - RNA, 19 nt, Homo sapiens
  misc_RNA (1)...(19): siRNA sense strand
ccugaggauccaucauaua

SEQ ID NO: 2326680 - RNA, 19 nt, Homo sapiens
  misc_RNA (1)...(19): siRNA sense strand
aaccaugauugaugaugaa

SEQ ID NO: 2326681 - RNA, 19 nt, Homo sapiens
  misc_RNA (1)...(19): siRNA sense strand
ccuuaaaagaaguauguga

SEQ ID NO: 2326682 - RNA, 19 nt, Homo sapiens
  misc_RNA (1)...(19): siRNA sense strand
ccauauuauuugcguguac

SEQ ID NO: 2326683 - RNA, 19 nt, Homo sapiens
  misc_RNA (1)...(19): siRNA sense strand
augaauugacugggcauaa

SEQ ID NO: 2326684 - RNA, 19 nt, Homo sapiens
  misc_RNA (1)...(19): siRNA sense strand
ccgcagagaaauucagaac

SEQ ID NO: 2326685 - RNA, 19 nt, Homo sapiens
  misc_RNA (1)...(19): siRNA sense strand
aggaauuagaagucaaagu

SEQ ID NO: 2326686 - RNA, 19 nt, Homo sapiens
  misc_RNA (1)...(19): siRNA sense strand
cugaaaauguccugcuuga

SEQ ID NO: 2326687 - RNA, 19 nt, Homo sapiens
  misc_RNA (1)...(19): siRNA sense strand
augaaugaagccaaagauu

SEQ ID NO: 2326688 - RNA, 19 nt, Homo sapiens
  misc_RNA (1)...(19): siRNA sense strand
ccgagaagcagaaacacga

SEQ ID NO: 2326689 - RNA, 19 nt, Homo sapiens
  misc_RNA (1)...(19): siRNA sense strand
augaagagggccacaauca

SEQ ID NO: 2326690 - RNA, 19 nt, Homo sapiens
  misc_RNA (1)...(19): siRNA sense strand
augaaauuacagaagccaa

SEQ ID NO: 2326691 - RNA, 19 nt, Homo sapiens
  misc_RNA (1)...(19): siRNA sense strand
gcugaaacaccaagggcac

SEQ ID NO: 2326692 - RNA, 19 nt, Homo sapiens
  misc_RNA (1)...(19): siRNA sense strand
agugaagguuggcaaacau

SEQ ID NO: 2326693 - RNA, 19 nt, Homo sapiens
  misc_RNA (1)...(19): siRNA sense strand
ucaagaagguggugcccua

SEQ ID NO: 2326694 - RNA, 19 nt, Homo sapiens
  misc_RNA (1)...(19): siRNA sense strand
gagaagaggaggaaggagu

SEQ ID NO: 2326695 - RNA, 19 nt, Homo sapiens
  misc_RNA (1)...(19): siRNA sense strand
cagaaacggccgaaggaga

SEQ ID NO: 2326696 - RNA, 19 nt, Homo sapiens
  misc_RNA (1)...(19): siRNA sense strand
cugaagaagacgugggaag

SEQ ID NO: 2326697 - RNA, 19 nt, Homo sapiens
  misc_RNA (1)...(19): siRNA sense strand
agaaguagcuccagcacca

SEQ ID NO: 2326698 - RNA, 19 nt, Homo sapiens
  misc_RNA (1)...(19): siRNA sense strand
gcaacauguacaagagcau

SEQ ID NO: 2326699 - RNA, 19 nt, Homo sapiens
  misc_RNA (1)...(19): siRNA sense strand
ucaagcagcugguggccua

SEQ ID NO: 2326700 - RNA, 19 nt, Homo sapiens
  misc_RNA (1)...(19): siRNA sense strand
ccgacguggaggagaucaa

SEQ ID NO: 2326701 - RNA, 19 nt, Homo sapiens
  misc_RNA (1)...(19): siRNA sense strand
gcaugaagcagaaaggacu

SEQ ID NO: 2326702 - RNA, 19 nt, Homo sapiens
  misc_RNA (1)...(19): siRNA sense strand
acaagaagggcaaggagca

SEQ ID NO: 2326703 - RNA, 19 nt, Homo sapiens
  misc_RNA (1)...(19): siRNA sense strand
uggccuacgugcagcucaa

SEQ ID NO: 2326704 - RNA, 19 nt, Homo sapiens
  misc_RNA (1)...(19): siRNA sense strand
gaagacguuuccagggaca

SEQ ID NO: 2326705 - RNA, 19 nt, Homo sapiens
  misc_RNA (1)...(19): siRNA sense strand
gcuacaaccugucgugcga

SEQ ID NO: 2326706 - RNA, 19 nt, Homo sapiens
  misc_RNA (1)...(19): siRNA sense strand
cggaacccauugaggcaga

SEQ ID NO: 2326707 - RNA, 19 nt, Homo sapiens
  misc_RNA (1)...(19): siRNA sense strand
accaguacucggaggauuu

SEQ ID NO: 2326708 - RNA, 19 nt, Homo sapiens
  misc_RNA (1)...(19): siRNA sense strand
agguucagagcuagaagua

SEQ ID NO: 2326709 - RNA, 19 nt, Homo sapiens
  misc_RNA (1)...(19): siRNA sense strand
cauccgagucagccagcaa

SEQ ID NO: 2326710 - RNA, 19 nt, Homo sapiens
  misc_RNA (1)...(19): siRNA sense strand
aacacaaccuggaggagga

SEQ ID NO: 2326711 - RNA, 19 nt, Homo sapiens
  misc_RNA (1)...(19): siRNA sense strand
ccacagacuacgagggagu

SEQ ID NO: 2326712 - RNA, 19 nt, Homo sapiens
  misc_RNA (1)...(19): siRNA sense strand
ccauacuggcagcaagaaa

SEQ ID NO: 2326713 - RNA, 19 nt, Homo sapiens
  misc_RNA (1)...(19): siRNA sense strand
gguucaagucagaggaaag

SEQ ID NO: 2326714 - RNA, 19 nt, Homo sapiens
  misc_RNA (1)...(19): siRNA sense strand
uggcauucuccuagcuuua

SEQ ID NO: 2326715 - RNA, 19 nt, Homo sapiens
  misc_RNA (1)...(19): siRNA sense strand
gagccuugcccauggcgaa

SEQ ID NO: 2326716 - RNA, 19 nt, Homo sapiens
  misc_RNA (1)...(19): siRNA sense strand
ucgcaauucuccaguggga

SEQ ID NO: 2326717 - RNA, 19 nt, Homo sapiens
  misc_RNA (1)...(19): siRNA sense strand
aggaaugagaggugaaaua

SEQ ID NO: 2326718 - RNA, 19 nt, Homo sapiens
  misc_RNA (1)...(19): siRNA sense strand
acaaauaccagaugggaga

SEQ ID NO: 2326719 - RNA, 19 nt, Homo sapiens
  misc_RNA (1)...(19): siRNA sense strand
cugcaaaguagaaguauau

SEQ ID NO: 2326720 - RNA, 19 nt, Homo sapiens
  misc_RNA (1)...(19): siRNA sense strand
acacauugauggaagguca

SEQ ID NO: 2326721 - RNA, 19 nt, Homo sapiens
  misc_RNA (1)...(19): siRNA sense strand
acugcaaaguagaaguaua

SEQ ID NO: 2326722 - RNA, 19 nt, Homo sapiens
  misc_RNA (1)...(19): siRNA sense strand
ccuguuugccuaagagaaa

SEQ ID NO: 2326723 - RNA, 19 nt, Homo sapiens
  misc_RNA (1)...(19): siRNA sense strand
gauggaaggucaagagcca

SEQ ID NO: 2326724 - RNA, 19 nt, Homo sapiens
  misc_RNA (1)...(19): siRNA sense strand
ucagcaagccacaaagaaa

SEQ ID NO: 2326725 - RNA, 19 nt, Homo sapiens
  misc_RNA (1)...(19): siRNA sense strand
aggacagguauuagugaua

SEQ ID NO: 2326726 - RNA, 19 nt, Homo sapiens
  misc_RNA (1)...(19): siRNA sense strand
ccgaacugaucaagcaaau

SEQ ID NO: 2326727 - RNA, 19 nt, Homo sapiens
  misc_RNA (1)...(19): siRNA sense strand
agucgauacaugagagaca

SEQ ID NO: 2326728 - RNA, 19 nt, Homo sapiens
  misc_RNA (1)...(19): siRNA sense strand
ccgaagaagccugggaaaa

SEQ ID NO: 2326729 - RNA, 19 nt, Homo sapiens
  misc_RNA (1)...(19): siRNA sense strand
caauaggacagaagauaca

SEQ ID NO: 2326730 - RNA, 19 nt, Homo sapiens
  misc_RNA (1)...(19): siRNA sense strand
gagaggugaaauagcuaaa

SEQ ID NO: 2326731 - RNA, 19 nt, Homo sapiens
  misc_RNA (1)...(19): siRNA sense strand
acaugaaaguguggaguau

SEQ ID NO: 2326732 - RNA, 19 nt, Homo sapiens
  misc_RNA (1)...(19): siRNA sense strand
cagcaagccacaaagaaau

SEQ ID NO: 2326733 - RNA, 19 nt, Homo sapiens
  misc_RNA (1)...(19): siRNA sense strand
aaagaugauaccaggcaua

SEQ ID NO: 2326734 - RNA, 19 nt, Homo sapiens
  misc_RNA (1)...(19): siRNA sense strand
ggaauaaacuugucagcug

SEQ ID NO: 2326735 - RNA, 19 nt, Homo sapiens
  misc_RNA (1)...(19): siRNA sense strand
agguauuagugauagaaca

SEQ ID NO: 2326736 - RNA, 19 nt, Homo sapiens
  misc_RNA (1)...(19): siRNA sense strand
cauuagaaagugaugaaga

SEQ ID NO: 2326737 - RNA, 19 nt, Homo sapiens
  misc_RNA (1)...(19): siRNA sense strand
gaagauggaacauggccaa

SEQ ID NO: 2326738 - RNA, 19 nt, Homo sapiens
  misc_RNA (1)...(19): siRNA sense strand
ccuuaguaguauuauggaa

SEQ ID NO: 2326739 - RNA, 19 nt, Homo sapiens
  misc_RNA (1)...(19): siRNA sense strand
agauauauuucauggccuu

SEQ ID NO: 2326740 - RNA, 19 nt, Homo sapiens
  misc_RNA (1)...(19): siRNA sense strand
cagccaggaucaagaacuu

SEQ ID NO: 2326741 - RNA, 19 nt, Homo sapiens
  misc_RNA (1)...(19): siRNA sense strand
gccgaagaagccugggaaa

SEQ ID NO: 2326742 - RNA, 19 nt, Homo sapiens
  misc_RNA (1)...(19): siRNA sense strand
caucaauaggacagaagau

SEQ ID NO: 2326743 - RNA, 19 nt, Homo sapiens
  misc_RNA (1)...(19): siRNA sense strand
gcugaagaucccugguauu

SEQ ID NO: 2326744 - RNA, 19 nt, Homo sapiens
  misc_RNA (1)...(19): siRNA sense strand
cccaagagccuuuaagaca

SEQ ID NO: 2326745 - RNA, 19 nt, Homo sapiens
  misc_RNA (1)...(19): siRNA sense strand
gaacuaugauuauucggaa

SEQ ID NO: 2326746 - RNA, 19 nt, Homo sapiens
  misc_RNA (1)...(19): siRNA sense strand
auggauuacaugaggauuu

SEQ ID NO: 2326747 - RNA, 19 nt, Homo sapiens
  misc_RNA (1)...(19): siRNA sense strand
agaacuucccucagagaau

SEQ ID NO: 2326748 - RNA, 19 nt, Homo sapiens
  misc_RNA (1)...(19): siRNA sense strand
agauucaguuggaggagau

SEQ ID NO: 2326749 - RNA, 19 nt, Homo sapiens
  misc_RNA (1)...(19): siRNA sense strand
uuguaaagaacaucagcaa

SEQ ID NO: 2326750 - RNA, 19 nt, Homo sapiens
  misc_RNA (1)...(19): siRNA sense strand
augagagacaaguuggaua

SEQ ID NO: 2326751 - RNA, 19 nt, Homo sapiens
  misc_RNA (1)...(19): siRNA sense strand
cagauaaggugguugccga

SEQ ID NO: 2326752 - RNA, 19 nt, Homo sapiens
  misc_RNA (1)...(19): siRNA sense strand
cugaagaaacugaaggauc

SEQ ID NO: 2326753 - RNA, 19 nt, Homo sapiens
  misc_RNA (1)...(19): siRNA sense strand
uggauuauguacugaggau

SEQ ID NO: 2326754 - RNA, 19 nt, Homo sapiens
  misc_RNA (1)...(19): siRNA sense strand
gaauaauguuguaacucga

SEQ ID NO: 2326755 - RNA, 19 nt, Homo sapiens
  misc_RNA (1)...(19): siRNA sense strand
ggauacuugcaaaggucaa

SEQ ID NO: 2326756 - RNA, 19 nt, Homo sapiens
  misc_RNA (1)...(19): siRNA sense strand
cuuaggaaugagaggugaa

SEQ ID NO: 2326757 - RNA, 19 nt, Homo sapiens
  misc_RNA (1)...(19): siRNA sense strand
gauuauuccuguuugccua

SEQ ID NO: 2326758 - RNA, 19 nt, Homo sapiens
  misc_RNA (1)...(19): siRNA sense strand
gcuuaggcuagaugaaaga

SEQ ID NO: 2326759 - RNA, 19 nt, Homo sapiens
  misc_RNA (1)...(19): siRNA sense strand
gaguaacacauuugaacca

SEQ ID NO: 2326760 - RNA, 19 nt, Homo sapiens
  misc_RNA (1)...(19): siRNA sense strand
ggacagaagauacagagca

SEQ ID NO: 2326761 - RNA, 19 nt, Homo sapiens
  misc_RNA (1)...(19): siRNA sense strand
ccgagaaacuaaaggugcu

SEQ ID NO: 2326762 - RNA, 19 nt, Homo sapiens
  misc_RNA (1)...(19): siRNA sense strand
cccauuagaaagugaugaa

SEQ ID NO: 2326763 - RNA, 19 nt, Homo sapiens
  misc_RNA (1)...(19): siRNA sense strand
aauucagacacucgaguua

SEQ ID NO: 2326764 - RNA, 19 nt, Homo sapiens
  misc_RNA (1)...(19): siRNA sense strand
ggauuauguacugaggaua

SEQ ID NO: 2326765 - RNA, 19 nt, Homo sapiens
  misc_RNA (1)...(19): siRNA sense strand
gaaguauaucucacagaau

SEQ ID NO: 2326766 - RNA, 19 nt, Homo sapiens
  misc_RNA (1)...(19): siRNA sense strand
ugugcuaagauuucaguaa

SEQ ID NO: 2326767 - RNA, 19 nt, Homo sapiens
  misc_RNA (1)...(19): siRNA sense strand
uggaacgggaugauauuua

SEQ ID NO: 2326768 - RNA, 19 nt, Homo sapiens
  misc_RNA (1)...(19): siRNA sense strand
acucgaagauuuagcaaag

SEQ ID NO: 2326769 - RNA, 19 nt, Homo sapiens
  misc_RNA (1)...(19): siRNA sense strand
guaucaagaagaacugaau

SEQ ID NO: 2326770 - RNA, 19 nt, Homo sapiens
  misc_RNA (1)...(19): siRNA sense strand
ugacaaucccuuaggaaug

SEQ ID NO: 2326771 - RNA, 19 nt, Homo sapiens
  misc_RNA (1)...(19): siRNA sense strand
cuggauaucagcagcaaga

SEQ ID NO: 2326772 - RNA, 19 nt, Homo sapiens
  misc_RNA (1)...(19): siRNA sense strand
uggaaacagaugagccaga

SEQ ID NO: 2326773 - RNA, 19 nt, Homo sapiens
  misc_RNA (1)...(19): siRNA sense strand
agcuaaaucuuaugccgaa

SEQ ID NO: 2326774 - RNA, 19 nt, Homo sapiens
  misc_RNA (1)...(19): siRNA sense strand
gggaauggcccaaauggca

SEQ ID NO: 2326775 - RNA, 19 nt, Homo sapiens
  misc_RNA (1)...(19): siRNA sense strand
cccaaauggcauacaugaa

SEQ ID NO: 2326776 - RNA, 19 nt, Homo sapiens
  misc_RNA (1)...(19): siRNA sense strand
gugaaauggaaacagauga

SEQ ID NO: 2326777 - RNA, 19 nt, Homo sapiens
  misc_RNA (1)...(19): siRNA sense strand
gaguauaaaccuccuaaaa

SEQ ID NO: 2326778 - RNA, 19 nt, Homo sapiens
  misc_RNA (1)...(19): siRNA sense strand
ccuuauuguuacaugguuu

SEQ ID NO: 2326779 - RNA, 19 nt, Homo sapiens
  misc_RNA (1)...(19): siRNA sense strand
gacaagaaccugaccgaga

SEQ ID NO: 2326780 - RNA, 19 nt, Homo sapiens
  misc_RNA (1)...(19): siRNA sense strand
gggcucuguccuagggcaa

SEQ ID NO: 2326781 - RNA, 19 nt, Homo sapiens
  misc_RNA (1)...(19): siRNA sense strand
agucaguguuaugaagaaa

SEQ ID NO: 2326782 - RNA, 19 nt, Homo sapiens
  misc_RNA (1)...(19): siRNA sense strand
gaagaaauguagaaagcug

SEQ ID NO: 2326783 - RNA, 19 nt, Homo sapiens
  misc_RNA (1)...(19): siRNA sense strand
uggccuuggauuagaaauu

SEQ ID NO: 2326784 - RNA, 19 nt, Homo sapiens
  misc_RNA (1)...(19): siRNA sense strand
gggagaaagugaugccuuc

SEQ ID NO: 2326785 - RNA, 19 nt, Homo sapiens
  misc_RNA (1)...(19): siRNA sense strand
guagaaagcuggaagaucc

SEQ ID NO: 2326786 - RNA, 19 nt, Homo sapiens
  misc_RNA (1)...(19): siRNA sense strand
cggacaagaaccugaccga

SEQ ID NO: 2326787 - RNA, 19 nt, Homo sapiens
  misc_RNA (1)...(19): siRNA sense strand
uggaggaaccggaacccaa

SEQ ID NO: 2326788 - RNA, 19 nt, Homo sapiens
  misc_RNA (1)...(19): siRNA sense strand
agugaauggcaucaaggua

SEQ ID NO: 2326789 - RNA, 19 nt, Homo sapiens
  misc_RNA (1)...(19): siRNA sense strand
ccugaaugcucuagaagaa

SEQ ID NO: 2326790 - RNA, 19 nt, Homo sapiens
  misc_RNA (1)...(19): siRNA sense strand
ccagaaagugagacagaua

SEQ ID NO: 2326791 - RNA, 19 nt, Homo sapiens
  misc_RNA (1)...(19): siRNA sense strand
gugaauuccuccagugaaa

SEQ ID NO: 2326792 - RNA, 19 nt, Homo sapiens
  misc_RNA (1)...(19): siRNA sense strand
gauauguuauggagagaaa

SEQ ID NO: 2326793 - RNA, 19 nt, Homo sapiens
  misc_RNA (1)...(19): siRNA sense strand
gggacgagguggauaacaa

SEQ ID NO: 2326794 - RNA, 19 nt, Homo sapiens
  misc_RNA (1)...(19): siRNA sense strand
ccacagaagccgagaagga

SEQ ID NO: 2326795 - RNA, 19 nt, Homo sapiens
  misc_RNA (1)...(19): siRNA sense strand
ggaucuuacacuugaaaua

SEQ ID NO: 2326796 - RNA, 19 nt, Homo sapiens
  misc_RNA (1)...(19): siRNA sense strand
aguaagaaaugccaagaaa

SEQ ID NO: 2326797 - RNA, 19 nt, Homo sapiens
  misc_RNA (1)...(19): siRNA sense strand
ugaagaaggacuuguguaa

SEQ ID NO: 2326798 - RNA, 19 nt, Homo sapiens
  misc_RNA (1)...(19): siRNA sense strand
guguugaaguccagguuua

SEQ ID NO: 2326799 - RNA, 19 nt, Homo sapiens
  misc_RNA (1)...(19): siRNA sense strand
cuacauggugguugagaua

SEQ ID NO: 2326800 - RNA, 19 nt, Homo sapiens
  misc_RNA (1)...(19): siRNA sense strand
guucaagucaugagacaua

SEQ ID NO: 2326801 - RNA, 19 nt, Homo sapiens
  misc_RNA (1)...(19): siRNA sense strand
gcgcaaggaggaagagaau

SEQ ID NO: 2326802 - RNA, 19 nt, Homo sapiens
  misc_RNA (1)...(19): siRNA sense strand
aaguggaguuccugagaaa

SEQ ID NO: 2326803 - RNA, 19 nt, Homo sapiens
  misc_RNA (1)...(19): siRNA sense strand
ucauuaaccugguggaauu

SEQ ID NO: 2326804 - RNA, 19 nt, Homo sapiens
  misc_RNA (1)...(19): siRNA sense strand
uguuaaagcaucugaagaa

SEQ ID NO: 2326805 - RNA, 19 nt, Homo sapiens
  misc_RNA (1)...(19): siRNA sense strand
cgaaacaauugaagcaaca

SEQ ID NO: 2326806 - RNA, 19 nt, Homo sapiens
  misc_RNA (1)...(19): siRNA sense strand
cugaaaucgaggaggacaa

SEQ ID NO: 2326807 - RNA, 19 nt, Homo sapiens
  misc_RNA (1)...(19): siRNA sense strand
ucgugaauguagagaagaa

SEQ ID NO: 2326808 - RNA, 19 nt, Homo sapiens
  misc_RNA (1)...(19): siRNA sense strand
guauagaucaauuggagaa

SEQ ID NO: 2326809 - RNA, 19 nt, Homo sapiens
  misc_RNA (1)...(19): siRNA sense strand
gguacaacuuacaggauca

SEQ ID NO: 2326810 - RNA, 19 nt, Homo sapiens
  misc_RNA (1)...(19): siRNA sense strand
caaccggaguucagagcua

SEQ ID NO: 2326811 - RNA, 19 nt, Homo sapiens
  misc_RNA (1)...(19): siRNA sense strand
ugauauacauggagagucu

SEQ ID NO: 2326812 - RNA, 19 nt, Homo sapiens
  misc_RNA (1)...(19): siRNA sense strand
caauggaggagaaggaauu

SEQ ID NO: 2326813 - RNA, 19 nt, Homo sapiens
  misc_RNA (1)...(19): siRNA sense strand
gcccacaagaggagugaaa

SEQ ID NO: 2326814 - RNA, 19 nt, Homo sapiens
  misc_RNA (1)...(19): siRNA sense strand
ggacaaagaccaagccguu

SEQ ID NO: 2326815 - RNA, 19 nt, Homo sapiens
  misc_RNA (1)...(19): siRNA sense strand
ggucauaagaauaaggagu

SEQ ID NO: 2326816 - RNA, 19 nt, Homo sapiens
  misc_RNA (1)...(19): siRNA sense strand
cuggaugcuuugagagaau

SEQ ID NO: 2326817 - RNA, 19 nt, Homo sapiens
  misc_RNA (1)...(19): siRNA sense strand
cuggaaagcguguaugaaa

SEQ ID NO: 2326818 - RNA, 19 nt, Homo sapiens
  misc_RNA (1)...(19): siRNA sense strand
aagaugaaguguuagcaaa

SEQ ID NO: 2326819 - RNA, 19 nt, Homo sapiens
  misc_RNA (1)...(19): siRNA sense strand
gauccuaauucuaaagaca

SEQ ID NO: 2326820 - RNA, 19 nt, Homo sapiens
  misc_RNA (1)...(19): siRNA sense strand
gagaaaauguugaaagcuu

SEQ ID NO: 2326821 - RNA, 19 nt, Homo sapiens
  misc_RNA (1)...(19): siRNA sense strand
ccuagugagaugauaaaua

SEQ ID NO: 2326822 - RNA, 19 nt, Homo sapiens
  misc_RNA (1)...(19): siRNA sense strand
uggaaagcguguaugaaau

SEQ ID NO: 2326823 - RNA, 19 nt, Homo sapiens
  misc_RNA (1)...(19): siRNA sense strand
agguacaacuacagcaaau

SEQ ID NO: 2326824 - RNA, 19 nt, Homo sapiens
  misc_RNA (1)...(19): siRNA sense strand
ugagauaggaacaaagcaa

SEQ ID NO: 2326825 - RNA, 19 nt, Homo sapiens
  misc_RNA (1)...(19): siRNA sense strand
cagcaugagcccagauuau

SEQ ID NO: 2326826 - RNA, 19 nt, Homo sapiens
  misc_RNA (1)...(19): siRNA sense strand
aaugcgaauuucaggaaua

SEQ ID NO: 2326827 - RNA, 19 nt, Homo sapiens
  misc_RNA (1)...(19): siRNA sense strand
gcuaagcuguauagaucaa

SEQ ID NO: 2326828 - RNA, 19 nt, Homo sapiens
  misc_RNA (1)...(19): siRNA sense strand
caguauagacagugagaac

SEQ ID NO: 2326829 - RNA, 19 nt, Homo sapiens
  misc_RNA (1)...(19): siRNA sense strand
gcugacauuuauugacaaa

SEQ ID NO: 2326830 - RNA, 19 nt, Homo sapiens
  misc_RNA (1)...(19): siRNA sense strand
gaauauaaagauuggcuga

SEQ ID NO: 2326831 - RNA, 19 nt, Homo sapiens
  misc_RNA (1)...(19): siRNA sense strand
ugaaauuccuccauggcaa

SEQ ID NO: 2326832 - RNA, 19 nt, Homo sapiens
  misc_RNA (1)...(19): siRNA sense strand
gcaccugccuucuggacaa

SEQ ID NO: 2326833 - RNA, 19 nt, Homo sapiens
  misc_RNA (1)...(19): siRNA sense strand
agcaauauccuuagaagaa

SEQ ID NO: 2326834 - RNA, 19 nt, Homo sapiens
  misc_RNA (1)...(19): siRNA sense strand
agagaauucuucagcacaa

SEQ ID NO: 2326835 - RNA, 19 nt, Homo sapiens
  misc_RNA (1)...(19): siRNA sense strand
aaacaauggaggagaagga

SEQ ID NO: 2326836 - RNA, 19 nt, Homo sapiens
  misc_RNA (1)...(19): siRNA sense strand
augagaugaugaagagcua

SEQ ID NO: 2326837 - RNA, 19 nt, Homo sapiens
  misc_RNA (1)...(19): siRNA sense strand
gguggauaacaaagugaaa

SEQ ID NO: 2326838 - RNA, 19 nt, Homo sapiens
  misc_RNA (1)...(19): siRNA sense strand
uggcaaggauuaaaaguaa

SEQ ID NO: 2326839 - RNA, 19 nt, Homo sapiens
  misc_RNA (1)...(19): siRNA sense strand
ugagaaacaagcagaauuu

SEQ ID NO: 2326840 - RNA, 19 nt, Homo sapiens
  misc_RNA (1)...(19): siRNA sense strand
ugaaaacaauggaggagaa

SEQ ID NO: 2326841 - RNA, 19 nt, Homo sapiens
  misc_RNA (1)...(19): siRNA sense strand
agaauacuauggaggacaa

SEQ ID NO: 2326842 - RNA, 19 nt, Homo sapiens
  misc_RNA (1)...(19): siRNA sense strand
cagaagagacucaagugaa

SEQ ID NO: 2326843 - RNA, 19 nt, Homo sapiens
  misc_RNA (1)...(19): siRNA sense strand
gggaacaagagaauggaga

SEQ ID NO: 2326844 - RNA, 19 nt, Homo sapiens
  misc_RNA (1)...(19): siRNA sense strand
gaggacaaggcuagaagaa

SEQ ID NO: 2326845 - RNA, 19 nt, Homo sapiens
  misc_RNA (1)...(19): siRNA sense strand
cagaguaccacgugcgaau

SEQ ID NO: 2326846 - RNA, 19 nt, Homo sapiens
  misc_RNA (1)...(19): siRNA sense strand
gucauggauucaagaaaua

SEQ ID NO: 2326847 - RNA, 19 nt, Homo sapiens
  misc_RNA (1)...(19): siRNA sense strand
ggagaagaguccaguaaac

SEQ ID NO: 2326848 - RNA, 19 nt, Homo sapiens
  misc_RNA (1)...(19): siRNA sense strand
aguuaaagagcaaggacuu

SEQ ID NO: 2326849 - RNA, 19 nt, Homo sapiens
  misc_RNA (1)...(19): siRNA sense strand
caugauaauuacagagauc

SEQ ID NO: 2326850 - RNA, 19 nt, Homo sapiens
  misc_RNA (1)...(19): siRNA sense strand
ugauguaagagcugaacua

SEQ ID NO: 2326851 - RNA, 19 nt, Homo sapiens
  misc_RNA (1)...(19): siRNA sense strand
gaacagaaaaugcugaaaa

SEQ ID NO: 2326852 - RNA, 19 nt, Homo sapiens
  misc_RNA (1)...(19): siRNA sense strand
aggcgaaucuaaagggaga

SEQ ID NO: 2326853 - RNA, 19 nt, Homo sapiens
  misc_RNA (1)...(19): siRNA sense strand
aguuaugacagcaguguaa

SEQ ID NO: 2326854 - RNA, 19 nt, Homo sapiens
  misc_RNA (1)...(19): siRNA sense strand
ggacacacucacagagaca

SEQ ID NO: 2326855 - RNA, 19 nt, Homo sapiens
  misc_RNA (1)...(19): siRNA sense strand
cagaauaaggagaaggugu

SEQ ID NO: 2326856 - RNA, 19 nt, Homo sapiens
  misc_RNA (1)...(19): siRNA sense strand
aggagaagguguauaucau

SEQ ID NO: 2326857 - RNA, 19 nt, Homo sapiens
  misc_RNA (1)...(19): siRNA sense strand
gugaagaguguuuuagaaa

SEQ ID NO: 2326858 - RNA, 19 nt, Homo sapiens
  misc_RNA (1)...(19): siRNA sense strand
cagcaaugagagaauacua

SEQ ID NO: 2326859 - RNA, 19 nt, Homo sapiens
  misc_RNA (1)...(19): siRNA sense strand
uguacaaugcaguagcaaa

SEQ ID NO: 2326860 - RNA, 19 nt, Homo sapiens
  misc_RNA (1)...(19): siRNA sense strand
cuuucagauuugugcaauu

SEQ ID NO: 2326861 - RNA, 19 nt, Homo sapiens
  misc_RNA (1)...(19): siRNA sense strand
cuagaaaguacauugaaca

SEQ ID NO: 2326862 - RNA, 19 nt, Homo sapiens
  misc_RNA (1)...(19): siRNA sense strand
ugaacaacucucagcagaa

SEQ ID NO: 2326863 - RNA, 19 nt, Homo sapiens
  misc_RNA (1)...(19): siRNA sense strand
acucacagagacagcauua

SEQ ID NO: 2326864 - RNA, 19 nt, Homo sapiens
  misc_RNA (1)...(19): siRNA sense strand
gaguauauccugacccaga

SEQ ID NO: 2326865 - RNA, 19 nt, Homo sapiens
  misc_RNA (1)...(19): siRNA sense strand
gauaagacauguaaggccu

SEQ ID NO: 2326866 - RNA, 19 nt, Homo sapiens
  misc_RNA (1)...(19): siRNA sense strand
auguaaggccuuucagauu

SEQ ID NO: 2326867 - RNA, 19 nt, Homo sapiens
  misc_RNA (1)...(19): siRNA sense strand
gcuagaugaagaagcuauu

SEQ ID NO: 2326868 - RNA, 19 nt, Homo sapiens
  misc_RNA (1)...(19): siRNA sense strand
caguaugauccucgugauu

SEQ ID NO: 2326869 - RNA, 19 nt, Homo sapiens
  misc_RNA (1)...(19): siRNA sense strand
caaccaguuugaauggcua

SEQ ID NO: 2326870 - RNA, 19 nt, Homo sapiens
  misc_RNA (1)...(19): siRNA sense strand
ccaucuggaagcuggagua

SEQ ID NO: 2326871 - RNA, 19 nt, Homo sapiens
  misc_RNA (1)...(19): siRNA sense strand
acuauuggccacaggauca

SEQ ID NO: 2326872 - RNA, 19 nt, Homo sapiens
  misc_RNA (1)...(19): siRNA sense strand
ggcuagaugaagaagcuau

SEQ ID NO: 2326873 - RNA, 19 nt, Homo sapiens
  misc_RNA (1)...(19): siRNA sense strand
guuugaauggcuagaaagu

SEQ ID NO: 2326874 - RNA, 19 nt, Homo sapiens
  misc_RNA (1)...(19): siRNA sense strand
gguguauaucauagcacau

SEQ ID NO: 2326875 - RNA, 19 nt, Homo sapiens
  misc_RNA (1)...(19): siRNA sense strand
cguaguaacagguggcaaa

SEQ ID NO: 2326876 - RNA, 19 nt, Homo sapiens
  misc_RNA (1)...(19): siRNA sense strand
gauuagauauugaggcuga

SEQ ID NO: 2326877 - RNA, 19 nt, Homo sapiens
  misc_RNA (1)...(19): siRNA sense strand
caguacaucaagaaggaaa

SEQ ID NO: 2326878 - RNA, 19 nt, Homo sapiens
  misc_RNA (1)...(19): siRNA sense strand
aguuaaggccaaugaagua

SEQ ID NO: 2326879 - RNA, 19 nt, Homo sapiens
  misc_RNA (1)...(19): siRNA sense strand
gcaugauaacagaaacuaa

SEQ ID NO: 2326880 - RNA, 19 nt, Homo sapiens
  misc_RNA (1)...(19): siRNA sense strand
ccaaauggaaugaacaaaa

SEQ ID NO: 2326881 - RNA, 19 nt, Homo sapiens
  misc_RNA (1)...(19): siRNA sense strand
ccuucgagauauugaugaa

SEQ ID NO: 2326882 - RNA, 19 nt, Homo sapiens
  misc_RNA (1)...(19): siRNA sense strand
gaccaaauggaaugaacaa

SEQ ID NO: 2326883 - RNA, 19 nt, Homo sapiens
  misc_RNA (1)...(19): siRNA sense strand
agaaggaaaccgaagguga

SEQ ID NO: 2326884 - RNA, 19 nt, Homo sapiens
  misc_RNA (1)...(19): siRNA sense strand
agguggagcaacagaaauu

SEQ ID NO: 2326885 - RNA, 19 nt, Homo sapiens
  misc_RNA (1)...(19): siRNA sense strand
gcauauggaccaaauggaa

SEQ ID NO: 2326886 - RNA, 19 nt, Homo sapiens
  misc_RNA (1)...(19): siRNA sense strand
uaacagaaacuaagggaac

SEQ ID NO: 2326887 - RNA, 19 nt, Homo sapiens
  misc_RNA (1)...(19): siRNA sense strand
ggaccaaauggaaugaaca

SEQ ID NO: 2326888 - RNA, 19 nt, Homo sapiens
  misc_RNA (1)...(19): siRNA sense strand
cugcugaagaauugaugaa

SEQ ID NO: 2326889 - RNA, 19 nt, Homo sapiens
  misc_RNA (1)...(19): siRNA sense strand
agaaagggcaguagacgau

SEQ ID NO: 2326890 - RNA, 19 nt, Homo sapiens
  misc_RNA (1)...(19): siRNA sense strand
gggaagaaagacugggaug

SEQ ID NO: 2326891 - RNA, 19 nt, Homo sapiens
  misc_RNA (1)...(19): siRNA sense strand
augaaguauuucuggccaa

SEQ ID NO: 2326892 - RNA, 19 nt, Homo sapiens
  misc_RNA (1)...(19): siRNA sense strand
cuucgaggcucuacagaca

SEQ ID NO: 2326893 - RNA, 19 nt, Homo sapiens
  misc_RNA (1)...(19): siRNA sense strand
gggcaguagacgauggugu

SEQ ID NO: 2326894 - RNA, 19 nt, Homo sapiens
  misc_RNA (1)...(19): siRNA sense strand
agaaguuugcugaggcauu

SEQ ID NO: 2326895 - RNA, 19 nt, Homo sapiens
  misc_RNA (1)...(19): siRNA sense strand
gaggcuguguauagaaaca

SEQ ID NO: 2326896 - RNA, 19 nt, Homo sapiens
  misc_RNA (1)...(19): siRNA sense strand
cugggaaaauauugggcua

SEQ ID NO: 2326897 - RNA, 19 nt, Homo sapiens
  misc_RNA (1)...(19): siRNA sense strand
ugacauagaaagggcagua

SEQ ID NO: 2326898 - RNA, 19 nt, Homo sapiens
  misc_RNA (1)...(19): siRNA sense strand
gguauguuguucugcaaaa

SEQ ID NO: 2326899 - RNA, 19 nt, Homo sapiens
  misc_RNA (1)...(19): siRNA sense strand
uggaauuagcugaagaacu

SEQ ID NO: 2326900 - RNA, 19 nt, Homo sapiens
  misc_RNA (1)...(19): siRNA sense strand
uuaucaaccacuuggagaa

SEQ ID NO: 2326901 - RNA, 19 nt, Homo sapiens
  misc_RNA (1)...(19): siRNA sense strand
acccggagguggagcaaca

SEQ ID NO: 2326902 - RNA, 19 nt, Homo sapiens
  misc_RNA (1)...(19): siRNA sense strand
agaacuagaaguacagcau

SEQ ID NO: 2326903 - RNA, 19 nt, Homo sapiens
  misc_RNA (1)...(19): siRNA sense strand
augaaauagccugcagaaa

SEQ ID NO: 2326904 - RNA, 19 nt, Homo sapiens
  misc_RNA (1)...(19): siRNA sense strand
cuccauaaugaguaaacaa

SEQ ID NO: 2326905 - RNA, 19 nt, Homo sapiens
  misc_RNA (1)...(19): siRNA sense strand
ucaaggagggagcgaaaca

SEQ ID NO: 2326906 - RNA, 19 nt, Homo sapiens
  misc_RNA (1)...(19): siRNA sense strand
cauaguacuucgaggcucu

SEQ ID NO: 2326907 - RNA, 19 nt, Homo sapiens
  misc_RNA (1)...(19): siRNA sense strand
ggagaaguuguuugugaca

SEQ ID NO: 2326908 - RNA, 19 nt, Homo sapiens
  misc_RNA (1)...(19): siRNA sense strand
cauggaugcacaagucaaa

SEQ ID NO: 2326909 - RNA, 19 nt, Homo sapiens
  misc_RNA (1)...(19): siRNA sense strand
caaucugauggaugacaua

SEQ ID NO: 2326910 - RNA, 19 nt, Homo sapiens
  misc_RNA (1)...(19): siRNA sense strand
uagaaagggcaguagacga

SEQ ID NO: 2326911 - RNA, 19 nt, Homo sapiens
  misc_RNA (1)...(19): siRNA sense strand
cauauggaccaaauggaau

SEQ ID NO: 2326912 - RNA, 19 nt, Homo sapiens
  misc_RNA (1)...(19): siRNA sense strand
augcacaagucaaagcuau

SEQ ID NO: 2326913 - RNA, 19 nt, Homo sapiens
  misc_RNA (1)...(19): siRNA sense strand
aguacaucaagaaggaaau

SEQ ID NO: 2326914 - RNA, 19 nt, Homo sapiens
  misc_RNA (1)...(19): siRNA sense strand
ccaagugggaagaaagacu

SEQ ID NO: 2326915 - RNA, 19 nt, Homo sapiens
  misc_RNA (1)...(19): siRNA sense strand
agagcaagaaguuggagau

SEQ ID NO: 2326916 - RNA, 19 nt, Homo sapiens
  misc_RNA (1)...(19): siRNA sense strand
ccuggaauuagcugaagaa

SEQ ID NO: 2326917 - RNA, 19 nt, Homo sapiens
  misc_RNA (1)...(19): siRNA sense strand
cucagaaguuggagauacu

SEQ ID NO: 2326918 - RNA, 19 nt, Homo sapiens
  misc_RNA (1)...(19): siRNA sense strand
cugaagucccugcuguaaa

SEQ ID NO: 2326919 - RNA, 19 nt, Homo sapiens
  misc_RNA (1)...(19): siRNA sense strand
cuagauacuuaccugggaa

SEQ ID NO: 2326920 - RNA, 19 nt, Homo sapiens
  misc_RNA (1)...(19): siRNA sense strand
gcagaaaagcucaugagau

SEQ ID NO: 2326921 - RNA, 19 nt, Homo sapiens
  misc_RNA (1)...(19): siRNA sense strand
uggauuagauauugaggcu

SEQ ID NO: 2326922 - RNA, 19 nt, Homo sapiens
  misc_RNA (1)...(19): siRNA sense strand
cuguaaaggacaugcugga

SEQ ID NO: 2326923 - RNA, 19 nt, Homo sapiens
  misc_RNA (1)...(19): siRNA sense strand
cuucaguauugcauggcau

SEQ ID NO: 2326924 - RNA, 19 nt, Homo sapiens
  misc_RNA (1)...(19): siRNA sense strand
guggcaaaguggcagacau

SEQ ID NO: 2326925 - RNA, 19 nt, Homo sapiens
  misc_RNA (1)...(19): siRNA sense strand
ucuccgaagacuuuguaaa

SEQ ID NO: 2326926 - RNA, 19 nt, Homo sapiens
  misc_RNA (1)...(19): siRNA sense strand
aguagacgaugguguuaau

SEQ ID NO: 2326927 - RNA, 19 nt, Homo sapiens
  misc_RNA (1)...(19): siRNA sense strand
auaacagaaacuaagggaa

SEQ ID NO: 2326928 - RNA, 19 nt, Homo sapiens
  misc_RNA (1)...(19): siRNA sense strand
ugcugauacuggugcaaau

SEQ ID NO: 2326929 - RNA, 19 nt, Homo sapiens
  misc_RNA (1)...(19): siRNA sense strand
gcaagaaguuggagauggc

SEQ ID NO: 2326930 - RNA, 19 nt, Homo sapiens
  misc_RNA (1)...(19): siRNA sense strand
uggcaugauaacagaaacu

SEQ ID NO: 2326931 - RNA, 19 nt, Homo sapiens
  misc_RNA (1)...(19): siRNA sense strand
guugauaaagacugcugaa

SEQ ID NO: 2326932 - RNA, 19 nt, Homo sapiens
  misc_RNA (1)...(19): siRNA sense strand
cugauggaugacauagaaa

SEQ ID NO: 2326933 - RNA, 19 nt, Homo sapiens
  misc_RNA (1)...(19): siRNA sense strand
gaaacauacaagcuugcaa

SEQ ID NO: 2326934 - RNA, 19 nt, Homo sapiens
  misc_RNA (1)...(19): siRNA sense strand
cacaucauauggagagaca

SEQ ID NO: 2326935 - RNA, 19 nt, Homo sapiens
  misc_RNA (1)...(19): siRNA sense strand
caucauauggagagacaug

SEQ ID NO: 2326936 - RNA, 19 nt, Homo sapiens
  misc_RNA (1)...(19): siRNA sense strand
gcaacuauuuuaagagaac

SEQ ID NO: 2326937 - RNA, 19 nt, Homo sapiens
  misc_RNA (1)...(19): siRNA sense strand
aagaaguaguagaaggaaa

SEQ ID NO: 2326938 - RNA, 19 nt, Homo sapiens
  misc_RNA (1)...(19): siRNA sense strand
ggcacaaacccuagcuaaa

SEQ ID NO: 2326939 - RNA, 19 nt, Homo sapiens
  misc_RNA (1)...(19): siRNA sense strand
agaaguaguagaaggaaaa

SEQ ID NO: 2326940 - RNA, 19 nt, Homo sapiens
  misc_RNA (1)...(19): siRNA sense strand
acaccaagagaguuagaaa

SEQ ID NO: 2326941 - RNA, 19 nt, Homo sapiens
  misc_RNA (1)...(19): siRNA sense strand
gcauagccuagaugagaaa

SEQ ID NO: 2326942 - RNA, 19 nt, Homo sapiens
  misc_RNA (1)...(19): siRNA sense strand
uuucaaugguuuagacaga

SEQ ID NO: 2326943 - RNA, 19 nt, Homo sapiens
  misc_RNA (1)...(19): siRNA sense strand
gcuucagauugcuggaauu

SEQ ID NO: 2326944 - RNA, 19 nt, Homo sapiens
  misc_RNA (1)...(19): siRNA sense strand
uggagaaggcguucagcaa

SEQ ID NO: 2326945 - RNA, 19 nt, Homo sapiens
  misc_RNA (1)...(19): siRNA sense strand
caaugcagcaacagguaaa

SEQ ID NO: 2326946 - RNA, 19 nt, Homo sapiens
  misc_RNA (1)...(19): siRNA sense strand
uggagauggaaauaagaaa

SEQ ID NO: 2326947 - RNA, 19 nt, Homo sapiens
  misc_RNA (1)...(19): siRNA sense strand
gagggaaguaguaagaaau

SEQ ID NO: 2326948 - RNA, 19 nt, Homo sapiens
  misc_RNA (1)...(19): siRNA sense strand
uuugaaagcuauagccaga

SEQ ID NO: 2326949 - RNA, 19 nt, Homo sapiens
  misc_RNA (1)...(19): siRNA sense strand
uggaugaaguagauaagau

SEQ ID NO: 2326950 - RNA, 19 nt, Homo sapiens
  misc_RNA (1)...(19): siRNA sense strand
ucguauguguggagguuga

SEQ ID NO: 2326951 - RNA, 19 nt, Homo sapiens
  misc_RNA (1)...(19): siRNA sense strand
gaaaucagcaagugaggga

SEQ ID NO: 2326952 - RNA, 19 nt, Homo sapiens
  misc_RNA (1)...(19): siRNA sense strand
cagaaaagaauucccgaaa

SEQ ID NO: 2326953 - RNA, 19 nt, Homo sapiens
  misc_RNA (1)...(19): siRNA sense strand
accaagacauugaagaaaa

SEQ ID NO: 2326954 - RNA, 19 nt, Homo sapiens
  misc_RNA (1)...(19): siRNA sense strand
ugagaaaacacuuguacaa

SEQ ID NO: 2326955 - RNA, 19 nt, Homo sapiens
  misc_RNA (1)...(19): siRNA sense strand
aacaaauaccucaggaaaa

SEQ ID NO: 2326956 - RNA, 19 nt, Homo sapiens
  misc_RNA (1)...(19): siRNA sense strand
gcaacagguaaaucaacaa

SEQ ID NO: 2326957 - RNA, 19 nt, Homo sapiens
  misc_RNA (1)...(19): siRNA sense strand
acaaauauuaacugagcca

SEQ ID NO: 2326958 - RNA, 19 nt, Homo sapiens
  misc_RNA (1)...(19): siRNA sense strand
acugaauguuacugaggau

SEQ ID NO: 2326959 - RNA, 19 nt, Homo sapiens
  misc_RNA (1)...(19): siRNA sense strand
cagauuggcacuagaacga

SEQ ID NO: 2326960 - RNA, 19 nt, Homo sapiens
  misc_RNA (1)...(19): siRNA sense strand
cucuggaguugaagaagaa

SEQ ID NO: 2326961 - RNA, 19 nt, Homo sapiens
  misc_RNA (1)...(19): siRNA sense strand
guaucuuggauuuggaaca

SEQ ID NO: 2326962 - RNA, 19 nt, Homo sapiens
  misc_RNA (1)...(19): siRNA sense strand
caccaagagaguuagaaau

SEQ ID NO: 2326963 - RNA, 19 nt, Homo sapiens
  misc_RNA (1)...(19): siRNA sense strand
gggaaaaggcagaagggcu

SEQ ID NO: 2326964 - RNA, 19 nt, Homo sapiens
  misc_RNA (1)...(19): siRNA sense strand
cccacaugguaaugcuuua

SEQ ID NO: 2326965 - RNA, 19 nt, Homo sapiens
  misc_RNA (1)...(19): siRNA sense strand
aaaacgaggaggugaagua

SEQ ID NO: 2326966 - RNA, 19 nt, Homo sapiens
  misc_RNA (1)...(19): siRNA sense strand
ggauguagguggagaaggc

SEQ ID NO: 2326967 - RNA, 19 nt, Homo sapiens
  misc_RNA (1)...(19): siRNA sense strand
gggaaguaguaagaaauca

SEQ ID NO: 2326968 - RNA, 19 nt, Homo sapiens
  misc_RNA (1)...(19): siRNA sense strand
cucugggaauucugggaaa

SEQ ID NO: 2326969 - RNA, 19 nt, Homo sapiens
  misc_RNA (1)...(19): siRNA sense strand
guugagaagcagacaucau

SEQ ID NO: 2326970 - RNA, 19 nt, Homo sapiens
  misc_RNA (1)...(19): siRNA sense strand
ucaacaaauaccucaggaa

SEQ ID NO: 2326971 - RNA, 19 nt, Homo sapiens
  misc_RNA (1)...(19): siRNA sense strand
ucaaugguuuagacagaau

SEQ ID NO: 2326972 - RNA, 19 nt, Homo sapiens
  misc_RNA (1)...(19): siRNA sense strand
ggcuggauauguaggcgaa

SEQ ID NO: 2326973 - RNA, 19 nt, Homo sapiens
  misc_RNA (1)...(19): siRNA sense strand
guaaagaugguucuggaga

SEQ ID NO: 2326974 - RNA, 19 nt, Homo sapiens
  misc_RNA (1)...(19): siRNA sense strand
aauaagaagacgggaggau

SEQ ID NO: 2326975 - RNA, 19 nt, Homo sapiens
  misc_RNA (1)...(19): siRNA sense strand
acaaagaaguaguagaagg

SEQ ID NO: 2326976 - RNA, 19 nt, Homo sapiens
  misc_RNA (1)...(19): siRNA sense strand
agaaauaagaagacgggag

SEQ ID NO: 2326977 - RNA, 19 nt, Homo sapiens
  misc_RNA (1)...(19): siRNA sense strand
acuacuagaaggcacaaua

SEQ ID NO: 2326978 - RNA, 19 nt, Homo sapiens
  misc_RNA (1)...(19): siRNA sense strand
ugggauaaguaaagauggu

SEQ ID NO: 2326979 - RNA, 19 nt, Homo sapiens
  misc_RNA (1)...(19): siRNA sense strand
auaagaaaucagcaaguga

SEQ ID NO: 2326980 - RNA, 19 nt, Homo sapiens
  misc_RNA (1)...(19): siRNA sense strand
ucauuaacaccaagagagu

SEQ ID NO: 2326981 - RNA, 19 nt, Homo sapiens
  misc_RNA (1)...(19): siRNA sense strand
uggcacaaacccuagcuaa

SEQ ID NO: 2326982 - RNA, 19 nt, Homo sapiens
  misc_RNA (1)...(19): siRNA sense strand
ccguggagaaacaguucaa

SEQ ID NO: 2326983 - RNA, 19 nt, Homo sapiens
  misc_RNA (1)...(19): siRNA sense strand
aagugugaacugaauguua

SEQ ID NO: 2326984 - RNA, 19 nt, Homo sapiens
  misc_RNA (1)...(19): siRNA sense strand
cuucagauugcuggaauua

SEQ ID NO: 2326985 - RNA, 19 nt, Homo sapiens
  misc_RNA (1)...(19): siRNA sense strand
acgggauguagguggagaa

SEQ ID NO: 2326986 - RNA, 19 nt, Homo sapiens
  misc_RNA (1)...(19): siRNA sense strand
aaguaaagaugguucugga

SEQ ID NO: 2326987 - RNA, 19 nt, Homo sapiens
  misc_RNA (1)...(19): siRNA sense strand
aggcuugggacauuugaaa

SEQ ID NO: 2326988 - RNA, 19 nt, Homo sapiens
  misc_RNA (1)...(19): siRNA sense strand
uggauaagugugaacugaa

SEQ ID NO: 2326989 - RNA, 19 nt, Homo sapiens
  misc_RNA (1)...(19): siRNA sense strand
ggauaaguaaagaugguuc

SEQ ID NO: 2326990 - RNA, 19 nt, Homo sapiens
  misc_RNA (1)...(19): siRNA sense strand
gcauaauuaaagaaccuga

SEQ ID NO: 2326991 - RNA, 19 nt, Homo sapiens
  misc_RNA (1)...(19): siRNA sense strand
gcagcaacagguaaaucaa

SEQ ID NO: 2326992 - RNA, 19 nt, Homo sapiens
  misc_RNA (1)...(19): siRNA sense strand
uuuaggaaggcuugggaca

SEQ ID NO: 2326993 - RNA, 19 nt, Homo sapiens
  misc_RNA (1)...(19): siRNA sense strand
cggaaaaggagcugaaaga

SEQ ID NO: 2326994 - RNA, 19 nt, Homo sapiens
  misc_RNA (1)...(19): siRNA sense strand
ugacagaauuaacggcaca

SEQ ID NO: 2326995 - RNA, 19 nt, Homo sapiens
  misc_RNA (1)...(19): siRNA sense strand
cuacaagggcaauggcaca

SEQ ID NO: 2326996 - RNA, 19 nt, Homo sapiens
  misc_RNA (1)...(19): siRNA sense strand
gagaacgacaucaggguga

SEQ ID NO: 2326997 - RNA, 19 nt, Homo sapiens
  misc_RNA (1)...(19): siRNA sense strand
ggcucugaauggaggacuu

SEQ ID NO: 2326998 - RNA, 19 nt, Homo sapiens
  misc_RNA (1)...(19): siRNA sense strand
ugaacggagcuuuggauca

SEQ ID NO: 2326999 - RNA, 19 nt, Homo sapiens
  misc_RNA (1)...(19): siRNA sense strand
gggcaauggcacagaaugc

SEQ ID NO: 2327000 - RNA, 19 nt, Homo sapiens
  misc_RNA (1)...(19): siRNA sense strand
uauuaaugcacuagcaguu

SEQ ID NO: 2327001 - RNA, 19 nt, Homo sapiens
  misc_RNA (1)...(19): siRNA sense strand
aaaccugcagauagugaaa

SEQ ID NO: 2327002 - RNA, 19 nt, Homo sapiens
  misc_RNA (1)...(19): siRNA sense strand
ggucggaaaaggagcugaa

SEQ ID NO: 2327003 - RNA, 19 nt, Homo sapiens
  misc_RNA (1)...(19): siRNA sense strand
gcacaaaggagcaagccca

SEQ ID NO: 2327004 - RNA, 19 nt, Homo sapiens
  misc_RNA (1)...(19): siRNA sense strand
gggaagaaccaggagguga

SEQ ID NO: 2327005 - RNA, 19 nt, Homo sapiens
  misc_RNA (1)...(19): siRNA sense strand
cggccaaagcccuggagau

SEQ ID NO: 2327006 - RNA, 19 nt, Homo sapiens
  misc_RNA (1)...(19): siRNA sense strand
agaacacaccugaggaaaa

SEQ ID NO: 2327007 - RNA, 19 nt, Homo sapiens
  misc_RNA (1)...(19): siRNA sense strand
gguaccuggaugagaagaa

SEQ ID NO: 2327008 - RNA, 19 nt, Homo sapiens
  misc_RNA (1)...(19): siRNA sense strand
cauuuaaggaccagaucca

SEQ ID NO: 2327009 - RNA, 19 nt, Homo sapiens
  misc_RNA (1)...(19): siRNA sense strand
caguuuaccuguacggcga

SEQ ID NO: 2327010 - RNA, 19 nt, Homo sapiens
  misc_RNA (1)...(19): siRNA sense strand
gugcuggacugcuuggaga

SEQ ID NO: 2327011 - RNA, 19 nt, Homo sapiens
  misc_RNA (1)...(19): siRNA sense strand
ggacaucacagacgaggca

SEQ ID NO: 2327012 - RNA, 19 nt, Homo sapiens
  misc_RNA (1)...(19): siRNA sense strand
cuaagagaaaugaguucaa

SEQ ID NO: 2327013 - RNA, 19 nt, Homo sapiens
  misc_RNA (1)...(19): siRNA sense strand
ggaaaagguccggaagcaa

SEQ ID NO: 2327014 - RNA, 19 nt, Homo sapiens
  misc_RNA (1)...(19): siRNA sense strand
uggaagaguuugugguagc

SEQ ID NO: 2327015 - RNA, 19 nt, Homo sapiens
  misc_RNA (1)...(19): siRNA sense strand
gagaggaagguguggguga

SEQ ID NO: 2327016 - RNA, 19 nt, Homo sapiens
  misc_RNA (1)...(19): siRNA sense strand
cggcacggcaagugaacaa

SEQ ID NO: 2327017 - RNA, 19 nt, Homo sapiens
  misc_RNA (1)...(19): siRNA sense strand
aaguggagcccgugggaau

SEQ ID NO: 2327018 - RNA, 19 nt, Homo sapiens
  misc_RNA (1)...(19): siRNA sense strand
uggcauucaaggagaggaa

SEQ ID NO: 2327019 - RNA, 19 nt, Homo sapiens
  misc_RNA (1)...(19): siRNA sense strand
ccuccaacgaccugggcaa

SEQ ID NO: 2327020 - RNA, 19 nt, Homo sapiens
  misc_RNA (1)...(19): siRNA sense strand
cucugaaggaggagaagaa

SEQ ID NO: 2327021 - RNA, 19 nt, Homo sapiens
  misc_RNA (1)...(19): siRNA sense strand
ugguuaaagaagacaaaga

SEQ ID NO: 2327022 - RNA, 19 nt, Homo sapiens
  misc_RNA (1)...(19): siRNA sense strand
aggcagaggaagagacaac

SEQ ID NO: 2327023 - RNA, 19 nt, Homo sapiens
  misc_RNA (1)...(19): siRNA sense strand
gcugguuaaagaagacaaa

SEQ ID NO: 2327024 - RNA, 19 nt, Homo sapiens
  misc_RNA (1)...(19): siRNA sense strand
gguguuuggcugauggcaa

SEQ ID NO: 2327025 - RNA, 19 nt, Homo sapiens
  misc_RNA (1)...(19): siRNA sense strand
ggcaagugaacaagaccaa

SEQ ID NO: 2327026 - RNA, 19 nt, Homo sapiens
  misc_RNA (1)...(19): siRNA sense strand
aggugugggugaaagagaa

SEQ ID NO: 2327027 - RNA, 19 nt, Homo sapiens
  misc_RNA (1)...(19): siRNA sense strand
agaccaagauccacagcga

SEQ ID NO: 2327028 - RNA, 19 nt, Homo sapiens
  misc_RNA (1)...(19): siRNA sense strand
guaaggagccugaggaggu

SEQ ID NO: 2327029 - RNA, 19 nt, Homo sapiens
  misc_RNA (1)...(19): siRNA sense strand
gugaaagagaauauggugu

SEQ ID NO: 2327030 - RNA, 19 nt, Homo sapiens
  misc_RNA (1)...(19): siRNA sense strand
ggagagaaauacaucgauc

SEQ ID NO: 2327031 - RNA, 19 nt, Homo sapiens
  misc_RNA (1)...(19): siRNA sense strand
ccucaagucaucugguaca

SEQ ID NO: 2327032 - RNA, 19 nt, Homo sapiens
  misc_RNA (1)...(19): siRNA sense strand
augaaggaguccagggaag

SEQ ID NO: 2327033 - RNA, 19 nt, Homo sapiens
  misc_RNA (1)...(19): siRNA sense strand
ggugugggugaaagagaau

SEQ ID NO: 2327034 - RNA, 19 nt, Homo sapiens
  misc_RNA (1)...(19): siRNA sense strand
gaagagacaaccaacgaca

SEQ ID NO: 2327035 - RNA, 19 nt, Homo sapiens
  misc_RNA (1)...(19): siRNA sense strand
ggcugagagaagagacaga

SEQ ID NO: 2327036 - RNA, 19 nt, Homo sapiens
  misc_RNA (1)...(19): siRNA sense strand
caccagggaggcagaggaa

SEQ ID NO: 2327037 - RNA, 19 nt, Homo sapiens
  misc_RNA (1)...(19): siRNA sense strand
ccugugaggcagagaguag

SEQ ID NO: 2327038 - RNA, 19 nt, Homo sapiens
  misc_RNA (1)...(19): siRNA sense strand
gagccaaacauccagguca

SEQ ID NO: 2327039 - RNA, 19 nt, Homo sapiens
  misc_RNA (1)...(19): siRNA sense strand
agaguauucugaaggcaca

SEQ ID NO: 2327040 - RNA, 19 nt, Homo sapiens
  misc_RNA (1)...(19): siRNA sense strand
gccaagaagcugaggagga

SEQ ID NO: 2327041 - RNA, 19 nt, Homo sapiens
  misc_RNA (1)...(19): siRNA sense strand
cugaggaggaucuggagaa

SEQ ID NO: 2327042 - RNA, 19 nt, Homo sapiens
  misc_RNA (1)...(19): siRNA sense strand
cuggagaauucuggaggaa

SEQ ID NO: 2327043 - RNA, 19 nt, Homo sapiens
  misc_RNA (1)...(19): siRNA sense strand
uggaggaagaggagagugu

SEQ ID NO: 2327044 - RNA, 19 nt, Homo sapiens
  misc_RNA (1)...(19): siRNA sense strand
gggugcaggcuguggagau

SEQ ID NO: 2327045 - RNA, 19 nt, Homo sapiens
  misc_RNA (1)...(19): siRNA sense strand
ccaaauacccaccucggaa

SEQ ID NO: 2327046 - RNA, 19 nt, Homo sapiens
  misc_RNA (1)...(19): siRNA sense strand
cucccaaggccaugaagaa

SEQ ID NO: 2327047 - RNA, 19 nt, Homo sapiens
  misc_RNA (1)...(19): siRNA sense strand
cagcaacgucauugagacu

SEQ ID NO: 2327048 - RNA, 19 nt, Homo sapiens
  misc_RNA (1)...(19): siRNA sense strand
cauugaguaccgcaagaaa

SEQ ID NO: 2327049 - RNA, 19 nt, Homo sapiens
  misc_RNA (1)...(19): siRNA sense strand
aggccaugaagaagaugua

SEQ ID NO: 2327050 - RNA, 19 nt, Homo sapiens
  misc_RNA (1)...(19): siRNA sense strand
ucaaguaccccgaguggaa

SEQ ID NO: 2327051 - RNA, 19 nt, Homo sapiens
  misc_RNA (1)...(19): siRNA sense strand
ggaaggagcuggagaggca

SEQ ID NO: 2327052 - RNA, 19 nt, Homo sapiens
  misc_RNA (1)...(19): siRNA sense strand
gggaaauggaugucacaaa

SEQ ID NO: 2327053 - RNA, 19 nt, Homo sapiens
  misc_RNA (1)...(19): siRNA sense strand
augaagaauuggaggaaca

SEQ ID NO: 2327054 - RNA, 19 nt, Homo sapiens
  misc_RNA (1)...(19): siRNA sense strand
agauaaggaaagugaagua

SEQ ID NO: 2327055 - RNA, 19 nt, Homo sapiens
  misc_RNA (1)...(19): siRNA sense strand
agaucaggaaauagagaaa

SEQ ID NO: 2327056 - RNA, 19 nt, Homo sapiens
  misc_RNA (1)...(19): siRNA sense strand
gagaaagacaugaugaaaa

SEQ ID NO: 2327057 - RNA, 19 nt, Homo sapiens
  misc_RNA (1)...(19): siRNA sense strand
cgaaagaaagggaguacau

SEQ ID NO: 2327058 - RNA, 19 nt, Homo sapiens
  misc_RNA (1)...(19): siRNA sense strand
ggcuaaggcagcuggauaa

SEQ ID NO: 2327059 - RNA, 19 nt, Homo sapiens
  misc_RNA (1)...(19): siRNA sense strand
uaacagaacugcugggcga

SEQ ID NO: 2327060 - RNA, 19 nt, Homo sapiens
  misc_RNA (1)...(19): siRNA sense strand
acagagaagaaaugaagaa

SEQ ID NO: 2327061 - RNA, 19 nt, Homo sapiens
  misc_RNA (1)...(19): siRNA sense strand
acgaugaagcaaaggcuaa

SEQ ID NO: 2327062 - RNA, 19 nt, Homo sapiens
  misc_RNA (1)...(19): siRNA sense strand
auuuagaggcagaaguuaa

SEQ ID NO: 2327063 - RNA, 19 nt, Homo sapiens
  misc_RNA (1)...(19): siRNA sense strand
aggcuaaggcagcuggaua

SEQ ID NO: 2327064 - RNA, 19 nt, Homo sapiens
  misc_RNA (1)...(19): siRNA sense strand
cauuagaacaugaggaaac

SEQ ID NO: 2327065 - RNA, 19 nt, Homo sapiens
  misc_RNA (1)...(19): siRNA sense strand
uggagaaggaugaggcaga

SEQ ID NO: 2327066 - RNA, 19 nt, Homo sapiens
  misc_RNA (1)...(19): siRNA sense strand
caugagacgaugaagcaaa

SEQ ID NO: 2327067 - RNA, 19 nt, Homo sapiens
  misc_RNA (1)...(19): siRNA sense strand
acgaagggcuccagcaaca

SEQ ID NO: 2327068 - RNA, 19 nt, Homo sapiens
  misc_RNA (1)...(19): siRNA sense strand
cacagagaguucagagcaa

SEQ ID NO: 2327069 - RNA, 19 nt, Homo sapiens
  misc_RNA (1)...(19): siRNA sense strand
cuuaugaacaggugaaaca

SEQ ID NO: 2327070 - RNA, 19 nt, Homo sapiens
  misc_RNA (1)...(19): siRNA sense strand
guacauuagccaagaaacu

SEQ ID NO: 2327071 - RNA, 19 nt, Homo sapiens
  misc_RNA (1)...(19): siRNA sense strand
cagcagaagcauucaccaa

SEQ ID NO: 2327072 - RNA, 19 nt, Homo sapiens
  misc_RNA (1)...(19): siRNA sense strand
ccaacauggagaaggauga

SEQ ID NO: 2327073 - RNA, 19 nt, Homo sapiens
  misc_RNA (1)...(19): siRNA sense strand
gaaaugaagaauuggagga

SEQ ID NO: 2327074 - RNA, 19 nt, Homo sapiens
  misc_RNA (1)...(19): siRNA sense strand
acacagaagauacagcaaa

SEQ ID NO: 2327075 - RNA, 19 nt, Homo sapiens
  misc_RNA (1)...(19): siRNA sense strand
ccgaauuacaacagagcca

SEQ ID NO: 2327076 - RNA, 19 nt, Homo sapiens
  misc_RNA (1)...(19): siRNA sense strand
gauuacaacaggugaagau

SEQ ID NO: 2327077 - RNA, 19 nt, Homo sapiens
  misc_RNA (1)...(19): siRNA sense strand
cagcuggcuucucgggaaa

SEQ ID NO: 2327078 - RNA, 19 nt, Homo sapiens
  misc_RNA (1)...(19): siRNA sense strand
ugggaaaguuacagagaag

SEQ ID NO: 2327079 - RNA, 19 nt, Homo sapiens
  misc_RNA (1)...(19): siRNA sense strand
ggagaguacaugagacgau

SEQ ID NO: 2327080 - RNA, 19 nt, Homo sapiens
  misc_RNA (1)...(19): siRNA sense strand
cagaaaaggagcacagaga

SEQ ID NO: 2327081 - RNA, 19 nt, Homo sapiens
  misc_RNA (1)...(19): siRNA sense strand
gaggaaaccaauaugccua

SEQ ID NO: 2327082 - RNA, 19 nt, Homo sapiens
  misc_RNA (1)...(19): siRNA sense strand
aggaggaacucucuggaau

SEQ ID NO: 2327083 - RNA, 19 nt, Homo sapiens
  misc_RNA (1)...(19): siRNA sense strand
aagacugguuaaagaaaga

SEQ ID NO: 2327084 - RNA, 19 nt, Homo sapiens
  misc_RNA (1)...(19): siRNA sense strand
gguuaaagaaagagaugac

SEQ ID NO: 2327085 - RNA, 19 nt, Homo sapiens
  misc_RNA (1)...(19): siRNA sense strand
gaggagacacugagggaac

SEQ ID NO: 2327086 - RNA, 19 nt, Homo sapiens
  misc_RNA (1)...(19): siRNA sense strand
uggaacaggagcagcagaa

SEQ ID NO: 2327087 - RNA, 19 nt, Homo sapiens
  misc_RNA (1)...(19): siRNA sense strand
gaaaagguuacaaaggaaa

SEQ ID NO: 2327088 - RNA, 19 nt, Homo sapiens
  misc_RNA (1)...(19): siRNA sense strand
gcaaggaagcaaaggccca

SEQ ID NO: 2327089 - RNA, 19 nt, Homo sapiens
  misc_RNA (1)...(19): siRNA sense strand
ugagaauagaacuggauga

SEQ ID NO: 2327090 - RNA, 19 nt, Homo sapiens
  misc_RNA (1)...(19): siRNA sense strand
aagcagauaaggaaaguga

SEQ ID NO: 2327091 - RNA, 19 nt, Homo sapiens
  misc_RNA (1)...(19): siRNA sense strand
uugagaaagacaugaugaa

SEQ ID NO: 2327092 - RNA, 19 nt, Homo sapiens
  misc_RNA (1)...(19): siRNA sense strand
gugcuuaugaacaggugaa

SEQ ID NO: 2327093 - RNA, 19 nt, Homo sapiens
  misc_RNA (1)...(19): siRNA sense strand
ugucacuauuggagaagau

SEQ ID NO: 2327094 - RNA, 19 nt, Homo sapiens
  misc_RNA (1)...(19): siRNA sense strand
gcagauaaggaaagugaag

SEQ ID NO: 2327095 - RNA, 19 nt, Homo sapiens
  misc_RNA (1)...(19): siRNA sense strand
agacaagaggagacacuga

SEQ ID NO: 2327096 - RNA, 19 nt, Homo sapiens
  misc_RNA (1)...(19): siRNA sense strand
gaaagggaguacaugggau

SEQ ID NO: 2327097 - RNA, 19 nt, Homo sapiens
  misc_RNA (1)...(19): siRNA sense strand
gaaaaggagcacagagagu

SEQ ID NO: 2327098 - RNA, 19 nt, Homo sapiens
  misc_RNA (1)...(19): siRNA sense strand
uagaacuggaugaaagcaa

SEQ ID NO: 2327099 - RNA, 19 nt, Homo sapiens
  misc_RNA (1)...(19): siRNA sense strand
cagcagagcuuuagcaagg

SEQ ID NO: 2327100 - RNA, 19 nt, Homo sapiens
  misc_RNA (1)...(19): siRNA sense strand
ugagaaagacaugaugaaa

SEQ ID NO: 2327101 - RNA, 19 nt, Homo sapiens
  misc_RNA (1)...(19): siRNA sense strand
gagaaggaugaggcagaaa

SEQ ID NO: 2327102 - RNA, 19 nt, Homo sapiens
  misc_RNA (1)...(19): siRNA sense strand
gcaccucaccagacaggaa

SEQ ID NO: 2327103 - RNA, 19 nt, Homo sapiens
  misc_RNA (1)...(19): siRNA sense strand
guuacagagaagaaaugaa

SEQ ID NO: 2327104 - RNA, 19 nt, Homo sapiens
  misc_RNA (1)...(19): siRNA sense strand
agugugaaauugaggaauc

SEQ ID NO: 2327105 - RNA, 19 nt, Homo sapiens
  misc_RNA (1)...(19): siRNA sense strand
gcagcaaagagaagcaagu

SEQ ID NO: 2327106 - RNA, 19 nt, Homo sapiens
  misc_RNA (1)...(19): siRNA sense strand
aggcuuuaauccaguguga

SEQ ID NO: 2327107 - RNA, 19 nt, Homo sapiens
  misc_RNA (1)...(19): siRNA sense strand
uagaacuggagaagcuaaa

SEQ ID NO: 2327108 - RNA, 19 nt, Homo sapiens
  misc_RNA (1)...(19): siRNA sense strand
ggauagaauacauggguga

SEQ ID NO: 2327109 - RNA, 19 nt, Homo sapiens
  misc_RNA (1)...(19): siRNA sense strand
cagugauuguggaggaaau

SEQ ID NO: 2327110 - RNA, 19 nt, Homo sapiens
  misc_RNA (1)...(19): siRNA sense strand
uugaagugauggagauaau

SEQ ID NO: 2327111 - RNA, 19 nt, Homo sapiens
  misc_RNA (1)...(19): siRNA sense strand
gagcagugauuguggagga

SEQ ID NO: 2327112 - RNA, 19 nt, Homo sapiens
  misc_RNA (1)...(19): siRNA sense strand
agaaagaggggaugcgaaa

SEQ ID NO: 2327113 - RNA, 19 nt, Homo sapiens
  misc_RNA (1)...(19): siRNA sense strand
gcucagaagcuaagaccca

SEQ ID NO: 2327114 - RNA, 19 nt, Homo sapiens
  misc_RNA (1)...(19): siRNA sense strand
cagucaaaguacaggaacu

SEQ ID NO: 2327115 - RNA, 19 nt, Homo sapiens
  misc_RNA (1)...(19): siRNA sense strand
guguugaagugauggagau

SEQ ID NO: 2327116 - RNA, 19 nt, Homo sapiens
  misc_RNA (1)...(19): siRNA sense strand
ucguguacaaggagacaaa

SEQ ID NO: 2327117 - RNA, 19 nt, Homo sapiens
  misc_RNA (1)...(19): siRNA sense strand
ugccagaacacauggacua

SEQ ID NO: 2327118 - RNA, 19 nt, Homo sapiens
  misc_RNA (1)...(19): siRNA sense strand
cuguaauacuucuggaauc

SEQ ID NO: 2327119 - RNA, 19 nt, Homo sapiens
  misc_RNA (1)...(19): siRNA sense strand
ccgggaagccaguguugaa

SEQ ID NO: 2327120 - RNA, 19 nt, Homo sapiens
  misc_RNA (1)...(19): siRNA sense strand
agaaaggcagaaaguuaaa

SEQ ID NO: 2327121 - RNA, 19 nt, Homo sapiens
  misc_RNA (1)...(19): siRNA sense strand
ccagcauugaugaggcuua

SEQ ID NO: 2327122 - RNA, 19 nt, Homo sapiens
  misc_RNA (1)...(19): siRNA sense strand
gagcagccauagagaggga

SEQ ID NO: 2327123 - RNA, 19 nt, Homo sapiens
  misc_RNA (1)...(19): siRNA sense strand
gaggugacucagaaagcaa

SEQ ID NO: 2327124 - RNA, 19 nt, Homo sapiens
  misc_RNA (1)...(19): siRNA sense strand
cguaucucaucaaggcaaa

SEQ ID NO: 2327125 - RNA, 19 nt, Homo sapiens
  misc_RNA (1)...(19): siRNA sense strand
cugccaaaggugccaguua

SEQ ID NO: 2327126 - RNA, 19 nt, Homo sapiens
  misc_RNA (1)...(19): siRNA sense strand
ccguagucuuggaggaaag

SEQ ID NO: 2327127 - RNA, 19 nt, Homo sapiens
  misc_RNA (1)...(19): siRNA sense strand
caaguggagcagcggcaaa

SEQ ID NO: 2327128 - RNA, 19 nt, Homo sapiens
  misc_RNA (1)...(19): siRNA sense strand
ugccaugugccgagggauu

SEQ ID NO: 2327129 - RNA, 19 nt, Homo sapiens
  misc_RNA (1)...(19): siRNA sense strand
gagacugacuaaagaccga

SEQ ID NO: 2327130 - RNA, 19 nt, Homo sapiens
  misc_RNA (1)...(19): siRNA sense strand
caacaaaacccauggucca

SEQ ID NO: 2327131 - RNA, 19 nt, Homo sapiens
  misc_RNA (1)...(19): siRNA sense strand
uggacaggaucgagugguu

SEQ ID NO: 2327132 - RNA, 19 nt, Homo sapiens
  misc_RNA (1)...(19): siRNA sense strand
guacaggaacugagcccuu

SEQ ID NO: 2327133 - RNA, 19 nt, Homo sapiens
  misc_RNA (1)...(19): siRNA sense strand
uguugaagugauggagaua

SEQ ID NO: 2327134 - RNA, 19 nt, Homo sapiens
  misc_RNA (1)...(19): siRNA sense strand
cuggaauuucacacaauaa

SEQ ID NO: 2327135 - RNA, 19 nt, Homo sapiens
  misc_RNA (1)...(19): siRNA sense strand
gugccgagggauugaacau

SEQ ID NO: 2327136 - RNA, 19 nt, Homo sapiens
  misc_RNA (1)...(19): siRNA sense strand
aggaacuagaggagagacu

SEQ ID NO: 2327137 - RNA, 19 nt, Homo sapiens
  misc_RNA (1)...(19): siRNA sense strand
gugcuguacaagagagacu

SEQ ID NO: 2327138 - RNA, 19 nt, Homo sapiens
  misc_RNA (1)...(19): siRNA sense strand
uggaagggugguggaauaa

SEQ ID NO: 2327139 - RNA, 19 nt, Homo sapiens
  misc_RNA (1)...(19): siRNA sense strand
ugugagcauucguguacaa

SEQ ID NO: 2327140 - RNA, 19 nt, Homo sapiens
  misc_RNA (1)...(19): siRNA sense strand
aagcuaagacccagggaag

SEQ ID NO: 2327141 - RNA, 19 nt, Homo sapiens
  misc_RNA (1)...(19): siRNA sense strand
gggcaugcaaacauuggaa

SEQ ID NO: 2327142 - RNA, 19 nt, Homo sapiens
  misc_RNA (1)...(19): siRNA sense strand
gcuaagaaguuauguccag

SEQ ID NO: 2327143 - RNA, 19 nt, Homo sapiens
  misc_RNA (1)...(19): siRNA sense strand
gcuggaggugacucagaaa

SEQ ID NO: 2327144 - RNA, 19 nt, Homo sapiens
  misc_RNA (1)...(19): siRNA sense strand
aggaagaugaggaggaaga

SEQ ID NO: 2327145 - RNA, 19 nt, Homo sapiens
  misc_RNA (1)...(19): siRNA sense strand
ggguuauccaagagaggaa

SEQ ID NO: 2327146 - RNA, 19 nt, Homo sapiens
  misc_RNA (1)...(19): siRNA sense strand
aggaggaagaggaggauga

SEQ ID NO: 2327147 - RNA, 19 nt, Homo sapiens
  misc_RNA (1)...(19): siRNA sense strand
augaagaagaggaagaaga

SEQ ID NO: 2327148 - RNA, 19 nt, Homo sapiens
  misc_RNA (1)...(19): siRNA sense strand
gagaggaagaugaggagga

SEQ ID NO: 2327149 - RNA, 19 nt, Homo sapiens
  misc_RNA (1)...(19): siRNA sense strand
augaugaagaagaggaaga

SEQ ID NO: 2327150 - RNA, 19 nt, Homo sapiens
  misc_RNA (1)...(19): siRNA sense strand
aagaagaagaggacagcca

SEQ ID NO: 2327151 - RNA, 19 nt, Homo sapiens
  misc_RNA (1)...(19): siRNA sense strand
cugaggaccaaguggaaga

SEQ ID NO: 2327152 - RNA, 19 nt, Homo sapiens
  misc_RNA (1)...(19): siRNA sense strand
aggaagaagaagaggacag

SEQ ID NO: 2327153 - RNA, 19 nt, Homo sapiens
  misc_RNA (1)...(19): siRNA sense strand
gcugaaguccugaagguca

SEQ ID NO: 2327154 - RNA, 19 nt, Homo sapiens
  misc_RNA (1)...(19): siRNA sense strand
cugaaguccugaaggucau

SEQ ID NO: 2327155 - RNA, 19 nt, Homo sapiens
  misc_RNA (1)...(19): siRNA sense strand
caagagaggaagaugagga

SEQ ID NO: 2327156 - RNA, 19 nt, Homo sapiens
  misc_RNA (1)...(19): siRNA sense strand
aggaggaugaugaagaaga

SEQ ID NO: 2327157 - RNA, 19 nt, Homo sapiens
  misc_RNA (1)...(19): siRNA sense strand
ggaccaaguggaagaccca

SEQ ID NO: 2327158 - RNA, 19 nt, Homo sapiens
  misc_RNA (1)...(19): siRNA sense strand
augaggaggaagaggagga

SEQ ID NO: 2327159 - RNA, 19 nt, Homo sapiens
  misc_RNA (1)...(19): siRNA sense strand
aggaagaugaggaggaaga

SEQ ID NO: 2327160 - RNA, 19 nt, Homo sapiens
  misc_RNA (1)...(19): siRNA sense strand
ggguuauccaagagaggaa

SEQ ID NO: 2327161 - RNA, 19 nt, Homo sapiens
  misc_RNA (1)...(19): siRNA sense strand
aggaggaagaggaggauga

SEQ ID NO: 2327162 - RNA, 19 nt, Homo sapiens
  misc_RNA (1)...(19): siRNA sense strand
augaagaagaggaagaaga

SEQ ID NO: 2327163 - RNA, 19 nt, Homo sapiens
  misc_RNA (1)...(19): siRNA sense strand
gagaggaagaugaggagga

SEQ ID NO: 2327164 - RNA, 19 nt, Homo sapiens
  misc_RNA (1)...(19): siRNA sense strand
augaugaagaagaggaaga

SEQ ID NO: 2327165 - RNA, 19 nt, Homo sapiens
  misc_RNA (1)...(19): siRNA sense strand
aagaagaagaggacagcca

SEQ ID NO: 2327166 - RNA, 19 nt, Homo sapiens
  misc_RNA (1)...(19): siRNA sense strand
cugaggaccaaguggaaga

SEQ ID NO: 2327167 - RNA, 19 nt, Homo sapiens
  misc_RNA (1)...(19): siRNA sense strand
aggaagaagaagaggacag

SEQ ID NO: 2327168 - RNA, 19 nt, Homo sapiens
  misc_RNA (1)...(19): siRNA sense strand
gcugaaguccugaagguca

SEQ ID NO: 2327169 - RNA, 19 nt, Homo sapiens
  misc_RNA (1)...(19): siRNA sense strand
cugaaguccugaaggucau

SEQ ID NO: 2327170 - RNA, 19 nt, Homo sapiens
  misc_RNA (1)...(19): siRNA sense strand
caagagaggaagaugagga

SEQ ID NO: 2327171 - RNA, 19 nt, Homo sapiens
  misc_RNA (1)...(19): siRNA sense strand
aggaggaugaugaagaaga

SEQ ID NO: 2327172 - RNA, 19 nt, Homo sapiens
  misc_RNA (1)...(19): siRNA sense strand
ggaccaaguggaagaccca

SEQ ID NO: 2327173 - RNA, 19 nt, Homo sapiens
  misc_RNA (1)...(19): siRNA sense strand
augaggaggaagaggagga

SEQ ID NO: 2327174 - RNA, 19 nt, Homo sapiens
  misc_RNA (1)...(19): siRNA sense strand
cugccaaggaugugcugaa

SEQ ID NO: 2327175 - RNA, 19 nt, Homo sapiens
  misc_RNA (1)...(19): siRNA sense strand
ugaugaggagggagagcuu

SEQ ID NO: 2327176 - RNA, 19 nt, Homo sapiens
  misc_RNA (1)...(19): siRNA sense strand
gcuacagaaaagucaguaa

SEQ ID NO: 2327177 - RNA, 19 nt, Homo sapiens
  misc_RNA (1)...(19): siRNA sense strand
cuacagaaaagucaguaaa

SEQ ID NO: 2327178 - RNA, 19 nt, Homo sapiens
  misc_RNA (1)...(19): siRNA sense strand
ucaaagcauuagaugggau

SEQ ID NO: 2327179 - RNA, 19 nt, Homo sapiens
  misc_RNA (1)...(19): siRNA sense strand
agaccaauggacccagaaa

SEQ ID NO: 2327180 - RNA, 19 nt, Homo sapiens
  misc_RNA (1)...(19): siRNA sense strand
caauggacccagaaaacaa

SEQ ID NO: 2327181 - RNA, 19 nt, Homo sapiens
  misc_RNA (1)...(19): siRNA sense strand
cggugaaggagaugaacga

SEQ ID NO: 2327182 - RNA, 19 nt, Homo sapiens
  misc_RNA (1)...(19): siRNA sense strand
ggugaagccucaaaggagu

SEQ ID NO: 2327183 - RNA, 19 nt, Homo sapiens
  misc_RNA (1)...(19): siRNA sense strand
cagcaggcggugaaggaga

SEQ ID NO: 2327184 - RNA, 19 nt, Homo sapiens
  misc_RNA (1)...(19): siRNA sense strand
aggcggugaaggagaugaa

SEQ ID NO: 2327185 - RNA, 19 nt, Homo sapiens
  misc_RNA (1)...(19): siRNA sense strand
agaaacaguaccagcagau

SEQ ID NO: 2327186 - RNA, 19 nt, Homo sapiens
  misc_RNA (1)...(19): siRNA sense strand
cagacgucgagcagaguau

SEQ ID NO: 2327187 - RNA, 19 nt, Homo sapiens
  misc_RNA (1)...(19): siRNA sense strand
ggagaaacguaaaaggaca

SEQ ID NO: 2327188 - RNA, 19 nt, Homo sapiens
  misc_RNA (1)...(19): siRNA sense strand
cuacacaggaccagggaca

SEQ ID NO: 2327189 - RNA, 19 nt, Homo sapiens
  misc_RNA (1)...(19): siRNA sense strand
ggaaaggacugccgggaug

SEQ ID NO: 2327190 - RNA, 19 nt, Homo sapiens
  misc_RNA (1)...(19): siRNA sense strand
cguaaaaggacauaugaga

SEQ ID NO: 2327191 - RNA, 19 nt, Homo sapiens
  misc_RNA (1)...(19): siRNA sense strand
cggauugaggagaaacgua

SEQ ID NO: 2327192 - RNA, 19 nt, Homo sapiens
  misc_RNA (1)...(19): siRNA sense strand
acgagaaagcugaggaaug

SEQ ID NO: 2327193 - RNA, 19 nt, Homo sapiens
  misc_RNA (1)...(19): siRNA sense strand
ggcagagccuauugggaca

SEQ ID NO: 2327194 - RNA, 19 nt, Homo sapiens
  misc_RNA (1)...(19): siRNA sense strand
aaacuaugaugcugcccaa

SEQ ID NO: 2327195 - RNA, 19 nt, Homo sapiens
  misc_RNA (1)...(19): siRNA sense strand
gcacuguauuggaggacuc

SEQ ID NO: 2327196 - RNA, 19 nt, Homo sapiens
  misc_RNA (1)...(19): siRNA sense strand
gcaaagaccccgaccgcuu

SEQ ID NO: 2327197 - RNA, 19 nt, Homo sapiens
  misc_RNA (1)...(19): siRNA sense strand
acuuugacguggagaggaa

SEQ ID NO: 2327198 - RNA, 19 nt, Homo sapiens
  misc_RNA (1)...(19): siRNA sense strand
augccuagguggugguaca

SEQ ID NO: 2327199 - RNA, 19 nt, Homo sapiens
  misc_RNA (1)...(19): siRNA sense strand
cagcaggaaugcagcggau

SEQ ID NO: 2327200 - RNA, 19 nt, Homo sapiens
  misc_RNA (1)...(19): siRNA sense strand
cagagaaugccacggguga

SEQ ID NO: 2327201 - RNA, 19 nt, Homo sapiens
  misc_RNA (1)...(19): siRNA sense strand
gaagaauacugcaccgcca

SEQ ID NO: 2327202 - RNA, 19 nt, Homo sapiens
  misc_RNA (1)...(19): siRNA sense strand
ugucgaagguggugggcag

SEQ ID NO: 2327203 - RNA, 19 nt, Homo sapiens
  misc_RNA (1)...(19): siRNA sense strand
ccggagaugacaaggagca

SEQ ID NO: 2327204 - RNA, 19 nt, Homo sapiens
  misc_RNA (1)...(19): siRNA sense strand
aggaagaagaguugaggaa

SEQ ID NO: 2327205 - RNA, 19 nt, Homo sapiens
  misc_RNA (1)...(19): siRNA sense strand
uccagugguucgagggaaa

SEQ ID NO: 2327206 - RNA, 19 nt, Homo sapiens
  misc_RNA (1)...(19): siRNA sense strand
ccaugagagacaaggccaa

SEQ ID NO: 2327207 - RNA, 19 nt, Homo sapiens
  misc_RNA (1)...(19): siRNA sense strand
caugaagcugggacagaaa

SEQ ID NO: 2327208 - RNA, 19 nt, Homo sapiens
  misc_RNA (1)...(19): siRNA sense strand
augacuaugaugauggaua

SEQ ID NO: 2327209 - RNA, 19 nt, Homo sapiens
  misc_RNA (1)...(19): siRNA sense strand
cacaagagacuuauggaga

SEQ ID NO: 2327210 - RNA, 19 nt, Homo sapiens
  misc_RNA (1)...(19): siRNA sense strand
agaacaugaagcugggaca

SEQ ID NO: 2327211 - RNA, 19 nt, Homo sapiens
  misc_RNA (1)...(19): siRNA sense strand
aggccaaggaagaagaguu

SEQ ID NO: 2327212 - RNA, 19 nt, Homo sapiens
  misc_RNA (1)...(19): siRNA sense strand
guacagaccuccaccgcca

SEQ ID NO: 2327213 - RNA, 19 nt, Homo sapiens
  misc_RNA (1)...(19): siRNA sense strand
aaggcaaggaugaagaaaa

SEQ ID NO: 2327214 - RNA, 19 nt, Homo sapiens
  misc_RNA (1)...(19): siRNA sense strand
ccguaaaacaguucccuaa

SEQ ID NO: 2327215 - RNA, 19 nt, Homo sapiens
  misc_RNA (1)...(19): siRNA sense strand
gggaaggggaggaguuaca

SEQ ID NO: 2327216 - RNA, 19 nt, Homo sapiens
  misc_RNA (1)...(19): siRNA sense strand
ccgagcugauggcggagaa

SEQ ID NO: 2327217 - RNA, 19 nt, Homo sapiens
  misc_RNA (1)...(19): siRNA sense strand
ggaaaaguggagaagcgaa

SEQ ID NO: 2327218 - RNA, 19 nt, Homo sapiens
  misc_RNA (1)...(19): siRNA sense strand
ucuacagagaccagccaua

SEQ ID NO: 2327219 - RNA, 19 nt, Homo sapiens
  misc_RNA (1)...(19): siRNA sense strand
aguuggaguuguaguacca

SEQ ID NO: 2327220 - RNA, 19 nt, Homo sapiens
  misc_RNA (1)...(19): siRNA sense strand
ccuucagcgaggacagcaa

SEQ ID NO: 2327221 - RNA, 19 nt, Homo sapiens
  misc_RNA (1)...(19): siRNA sense strand
aggagaaggcaaggaugaa

SEQ ID NO: 2327222 - RNA, 19 nt, Homo sapiens
  misc_RNA (1)...(19): siRNA sense strand
ccuuaaacgcauugccaaa

SEQ ID NO: 2327223 - RNA, 19 nt, Homo sapiens
  misc_RNA (1)...(19): siRNA sense strand
gguuauuauugcagcagaa

SEQ ID NO: 2327224 - RNA, 19 nt, Homo sapiens
  misc_RNA (1)...(19): siRNA sense strand
gggagaagucaaauggaga

SEQ ID NO: 2327225 - RNA, 19 nt, Homo sapiens
  misc_RNA (1)...(19): siRNA sense strand
agaacauccugcagcuaaa

SEQ ID NO: 2327226 - RNA, 19 nt, Homo sapiens
  misc_RNA (1)...(19): siRNA sense strand
agguuaacccagaacguaa

SEQ ID NO: 2327227 - RNA, 19 nt, Homo sapiens
  misc_RNA (1)...(19): siRNA sense strand
agagaaucguaaaugcaaa

SEQ ID NO: 2327228 - RNA, 19 nt, Homo sapiens
  misc_RNA (1)...(19): siRNA sense strand
ugguaaaccucgagacaac

SEQ ID NO: 2327229 - RNA, 19 nt, Homo sapiens
  misc_RNA (1)...(19): siRNA sense strand
uuugaaagcccaugggaga

SEQ ID NO: 2327230 - RNA, 19 nt, Homo sapiens
  misc_RNA (1)...(19): siRNA sense strand
ugauuugagcaaugguaaa

SEQ ID NO: 2327231 - RNA, 19 nt, Homo sapiens
  misc_RNA (1)...(19): siRNA sense strand
auaaaauguugguggauga

SEQ ID NO: 2327232 - RNA, 19 nt, Homo sapiens
  misc_RNA (1)...(19): siRNA sense strand
aggagagaauucagaagau

SEQ ID NO: 2327233 - RNA, 19 nt, Homo sapiens
  misc_RNA (1)...(19): siRNA sense strand
gcccaugggagaagucaaa

SEQ ID NO: 2327234 - RNA, 19 nt, Homo sapiens
  misc_RNA (1)...(19): siRNA sense strand
gguuaacccagaacguaaa

SEQ ID NO: 2327235 - RNA, 19 nt, Homo sapiens
  misc_RNA (1)...(19): siRNA sense strand
aagacaaagaaguuggaga

SEQ ID NO: 2327236 - RNA, 19 nt, Homo sapiens
  misc_RNA (1)...(19): siRNA sense strand
aauuagacagagagaauca

SEQ ID NO: 2327237 - RNA, 19 nt, Homo sapiens
  misc_RNA (1)...(19): siRNA sense strand
ugccaaagcuucuggagca

SEQ ID NO: 2327238 - RNA, 19 nt, Homo sapiens
  misc_RNA (1)...(19): siRNA sense strand
agacauaagaggccagcca

SEQ ID NO: 2327239 - RNA, 19 nt, Homo sapiens
  misc_RNA (1)...(19): siRNA sense strand
gccaaagcuucuggagcaa

SEQ ID NO: 2327240 - RNA, 19 nt, Homo sapiens
  misc_RNA (1)...(19): siRNA sense strand
gagaaucguaaaugcaaaa

SEQ ID NO: 2327241 - RNA, 19 nt, Homo sapiens
  misc_RNA (1)...(19): siRNA sense strand
gagcaaugguaaaccucga

SEQ ID NO: 2327242 - RNA, 19 nt, Homo sapiens
  misc_RNA (1)...(19): siRNA sense strand
guuugaaauuugcaacaga

SEQ ID NO: 2327243 - RNA, 19 nt, Homo sapiens
  misc_RNA (1)...(19): siRNA sense strand
ucagauaucaccaaggaga

SEQ ID NO: 2327244 - RNA, 19 nt, Homo sapiens
  misc_RNA (1)...(19): siRNA sense strand
gcuugcgauugcagaguuu

SEQ ID NO: 2327245 - RNA, 19 nt, Homo sapiens
  misc_RNA (1)...(19): siRNA sense strand
gguggaugauauuggugau

SEQ ID NO: 2327246 - RNA, 19 nt, Homo sapiens
  misc_RNA (1)...(19): siRNA sense strand
gugcguuauaucaaugaaa

SEQ ID NO: 2327247 - RNA, 19 nt, Homo sapiens
  misc_RNA (1)...(19): siRNA sense strand
cagucaacucuguuaauau

SEQ ID NO: 2327248 - RNA, 19 nt, Homo sapiens
  misc_RNA (1)...(19): siRNA sense strand
gcccaagagaaucguaaau

SEQ ID NO: 2327249 - RNA, 19 nt, Homo sapiens
  misc_RNA (1)...(19): siRNA sense strand
gugaugagauggagcgcuc

SEQ ID NO: 2327250 - RNA, 19 nt, Homo sapiens
  misc_RNA (1)...(19): siRNA sense strand
ccaaauuagacagagagaa

SEQ ID NO: 2327251 - RNA, 19 nt, Homo sapiens
  misc_RNA (1)...(19): siRNA sense strand
uuuggaaggugaagaaacu

SEQ ID NO: 2327252 - RNA, 19 nt, Homo sapiens
  misc_RNA (1)...(19): siRNA sense strand
gaguuugaaauuugcaaca

SEQ ID NO: 2327253 - RNA, 19 nt, Homo sapiens
  misc_RNA (1)...(19): siRNA sense strand
acacagaugaacugggaag

SEQ ID NO: 2327254 - RNA, 19 nt, Homo sapiens
  misc_RNA (1)...(19): siRNA sense strand
uguguagugaagagaguuu

SEQ ID NO: 2327255 - RNA, 19 nt, Homo sapiens
  misc_RNA (1)...(19): siRNA sense strand
gcaagagccuacugggcau

SEQ ID NO: 2327256 - RNA, 19 nt, Homo sapiens
  misc_RNA (1)...(19): siRNA sense strand
guuucauuguagugguuaa

SEQ ID NO: 2327257 - RNA, 19 nt, Homo sapiens
  misc_RNA (1)...(19): siRNA sense strand
cggauguguuccuggugaa

SEQ ID NO: 2327258 - RNA, 19 nt, Homo sapiens
  misc_RNA (1)...(19): siRNA sense strand
cccaaauuaucuauggcaa

SEQ ID NO: 2327259 - RNA, 19 nt, Homo sapiens
  misc_RNA (1)...(19): siRNA sense strand
aggacaauuccaagacuuu

SEQ ID NO: 2327260 - RNA, 19 nt, Homo sapiens
  misc_RNA (1)...(19): siRNA sense strand
cauaaguugcagagccuga

SEQ ID NO: 2327261 - RNA, 19 nt, Homo sapiens
  misc_RNA (1)...(19): siRNA sense strand
ccuacaaccagcaagccaa

SEQ ID NO: 2327262 - RNA, 19 nt, Homo sapiens
  misc_RNA (1)...(19): siRNA sense strand
gcuucaugcuggaggcuuc

SEQ ID NO: 2327263 - RNA, 19 nt, Homo sapiens
  misc_RNA (1)...(19): siRNA sense strand
ccugaaguuucgaaagaac

SEQ ID NO: 2327264 - RNA, 19 nt, Homo sapiens
  misc_RNA (1)...(19): siRNA sense strand
augaauggguguuuggcca

SEQ ID NO: 2327265 - RNA, 19 nt, Homo sapiens
  misc_RNA (1)...(19): siRNA sense strand
gauccauaccggugagaaa

SEQ ID NO: 2327266 - RNA, 19 nt, Homo sapiens
  misc_RNA (1)...(19): siRNA sense strand
gguccacacaggagagaaa

SEQ ID NO: 2327267 - RNA, 19 nt, Homo sapiens
  misc_RNA (1)...(19): siRNA sense strand
gguccacacaggagagaaa

SEQ ID NO: 2327268 - RNA, 19 nt, Homo sapiens
  misc_RNA (1)...(19): siRNA sense strand
aguccacacuguagagaaa

SEQ ID NO: 2327269 - RNA, 19 nt, Homo sapiens
  misc_RNA (1)...(19): siRNA sense strand
gauauaaugaagacagcaa

SEQ ID NO: 2327270 - RNA, 19 nt, Homo sapiens
  misc_RNA (1)...(19): siRNA sense strand
augugaaguaugugguaaa

SEQ ID NO: 2327271 - RNA, 19 nt, Homo sapiens
  misc_RNA (1)...(19): siRNA sense strand
aguaagaacaucagagagu

SEQ ID NO: 2327272 - RNA, 19 nt, Homo sapiens
  misc_RNA (1)...(19): siRNA sense strand
uguccacacaggagagaaa

SEQ ID NO: 2327273 - RNA, 19 nt, Homo sapiens
  misc_RNA (1)...(19): siRNA sense strand
gcaaauuacacucaggaga

SEQ ID NO: 2327274 - RNA, 19 nt, Homo sapiens
  misc_RNA (1)...(19): siRNA sense strand
ggaaagggcuucaagugga

SEQ ID NO: 2327275 - RNA, 19 nt, Homo sapiens
  misc_RNA (1)...(19): siRNA sense strand
agcacauaguguacagaaa

SEQ ID NO: 2327276 - RNA, 19 nt, Homo sapiens
  misc_RNA (1)...(19): siRNA sense strand
gaugagaauaguaagaaca

SEQ ID NO: 2327277 - RNA, 19 nt, Homo sapiens
  misc_RNA (1)...(19): siRNA sense strand
auguguggaaugugggaaa

SEQ ID NO: 2327278 - RNA, 19 nt, Homo sapiens
  misc_RNA (1)...(19): siRNA sense strand
aguccacaugggagagaaa

SEQ ID NO: 2327279 - RNA, 19 nt, Homo sapiens
  misc_RNA (1)...(19): siRNA sense strand
ccacauucaaggagggacu

SEQ ID NO: 2327280 - RNA, 19 nt, Homo sapiens
  misc_RNA (1)...(19): siRNA sense strand
guauguaaaguguguggua

SEQ ID NO: 2327281 - RNA, 19 nt, Homo sapiens
  misc_RNA (1)...(19): siRNA sense strand
augugaugcuggagaacuu

SEQ ID NO: 2327282 - RNA, 19 nt, Homo sapiens
  misc_RNA (1)...(19): siRNA sense strand
gggauuuagucguagagca

SEQ ID NO: 2327283 - RNA, 19 nt, Homo sapiens
  misc_RNA (1)...(19): siRNA sense strand
aggacgacaugaagagcuu

SEQ ID NO: 2327284 - RNA, 19 nt, Homo sapiens
  misc_RNA (1)...(19): siRNA sense strand
auacaaaugcaaugagugu

SEQ ID NO: 2327285 - RNA, 19 nt, Homo sapiens
  misc_RNA (1)...(19): siRNA sense strand
aggaaguucuacaagguga

SEQ ID NO: 2327286 - RNA, 19 nt, Homo sapiens
  misc_RNA (1)...(19): siRNA sense strand
augugauguaugugguaaa

SEQ ID NO: 2327287 - RNA, 19 nt, Homo sapiens
  misc_RNA (1)...(19): siRNA sense strand
ucuucaaacucaucagaga

SEQ ID NO: 2327288 - RNA, 19 nt, Homo sapiens
  misc_RNA (1)...(19): siRNA sense strand
agaaaugcuauaaguguga

SEQ ID NO: 2327289 - RNA, 19 nt, Homo sapiens
  misc_RNA (1)...(19): siRNA sense strand
cuucacaauuacaguauca

SEQ ID NO: 2327290 - RNA, 19 nt, Homo sapiens
  misc_RNA (1)...(19): siRNA sense strand
auuacacucaggagagaaa

SEQ ID NO: 2327291 - RNA, 19 nt, Homo sapiens
  misc_RNA (1)...(19): siRNA sense strand
ggauuuagucguagagcag

SEQ ID NO: 2327292 - RNA, 19 nt, Homo sapiens
  misc_RNA (1)...(19): siRNA sense strand
cggugagaaaccauacaaa

SEQ ID NO: 2327293 - RNA, 19 nt, Homo sapiens
  misc_RNA (1)...(19): siRNA sense strand
agguucagcuggcgaucaa

SEQ ID NO: 2327294 - RNA, 19 nt, Homo sapiens
  misc_RNA (1)...(19): siRNA sense strand
ucguagagcagaucuuaaa

SEQ ID NO: 2327295 - RNA, 19 nt, Homo sapiens
  misc_RNA (1)...(19): siRNA sense strand
ggagacuguuccagaagca

SEQ ID NO: 2327296 - RNA, 19 nt, Homo sapiens
  misc_RNA (1)...(19): siRNA sense strand
ccagguuagggcaggacua

SEQ ID NO: 2327297 - RNA, 19 nt, Homo sapiens
  misc_RNA (1)...(19): siRNA sense strand
aggagagaaaccauacaaa

SEQ ID NO: 2327298 - RNA, 19 nt, Homo sapiens
  misc_RNA (1)...(19): siRNA sense strand
aggagagaaaccauacaaa

SEQ ID NO: 2327299 - RNA, 19 nt, Homo sapiens
  misc_RNA (1)...(19): siRNA sense strand
ccuuacaagugugaagaau

SEQ ID NO: 2327300 - RNA, 19 nt, Homo sapiens
  misc_RNA (1)...(19): siRNA sense strand
ccauauaauugugaggagu

SEQ ID NO: 2327301 - RNA, 19 nt, Homo sapiens
  misc_RNA (1)...(19): siRNA sense strand
gcuugaaccuugacaugca

SEQ ID NO: 2327302 - RNA, 19 nt, Homo sapiens
  misc_RNA (1)...(19): siRNA sense strand
auacaaaugugaagagugc

SEQ ID NO: 2327303 - RNA, 19 nt, Homo sapiens
  misc_RNA (1)...(19): siRNA sense strand
cuucagucguagaucaaca

SEQ ID NO: 2327304 - RNA, 19 nt, Homo sapiens
  misc_RNA (1)...(19): siRNA sense strand
ugugaagagugugggaaga

SEQ ID NO: 2327305 - RNA, 19 nt, Homo sapiens
  misc_RNA (1)...(19): siRNA sense strand
agauaugugguaagagguu

SEQ ID NO: 2327306 - RNA, 19 nt, Homo sapiens
  misc_RNA (1)...(19): siRNA sense strand
caguaaagaaagugguuaa

SEQ ID NO: 2327307 - RNA, 19 nt, Homo sapiens
  misc_RNA (1)...(19): siRNA sense strand
gaguaaaggaagaugaauu

SEQ ID NO: 2327308 - RNA, 19 nt, Homo sapiens
  misc_RNA (1)...(19): siRNA sense strand
cagcaaagccacagaugaa

SEQ ID NO: 2327309 - RNA, 19 nt, Homo sapiens
  misc_RNA (1)...(19): siRNA sense strand
gagcaaaagauaacagaaa

SEQ ID NO: 2327310 - RNA, 19 nt, Homo sapiens
  misc_RNA (1)...(19): siRNA sense strand
gagucaggcuuuaggaaau

SEQ ID NO: 2327311 - RNA, 19 nt, Homo sapiens
  misc_RNA (1)...(19): siRNA sense strand
ugccagaauucuuggauaa

SEQ ID NO: 2327312 - RNA, 19 nt, Homo sapiens
  misc_RNA (1)...(19): siRNA sense strand
uggaagaaacacugacaaa

SEQ ID NO: 2327313 - RNA, 19 nt, Homo sapiens
  misc_RNA (1)...(19): siRNA sense strand
aggaaaaguugaugaagaa

SEQ ID NO: 2327314 - RNA, 19 nt, Homo sapiens
  misc_RNA (1)...(19): siRNA sense strand
cgguauaucuccaguaaga

SEQ ID NO: 2327315 - RNA, 19 nt, Homo sapiens
  misc_RNA (1)...(19): siRNA sense strand
cgaaacagucagcgugaua

SEQ ID NO: 2327316 - RNA, 19 nt, Homo sapiens
  misc_RNA (1)...(19): siRNA sense strand
gcauucaauuggaggagua

SEQ ID NO: 2327317 - RNA, 19 nt, Homo sapiens
  misc_RNA (1)...(19): siRNA sense strand
gguuauuugcggugaacaa

SEQ ID NO: 2327318 - RNA, 19 nt, Homo sapiens
  misc_RNA (1)...(19): siRNA sense strand
caguaaacuucaaggagau

SEQ ID NO: 2327319 - RNA, 19 nt, Homo sapiens
  misc_RNA (1)...(19): siRNA sense strand
cgauggaaacagaugauaa

SEQ ID NO: 2327320 - RNA, 19 nt, Homo sapiens
  misc_RNA (1)...(19): siRNA sense strand
gucaauaagucuccggaaa

SEQ ID NO: 2327321 - RNA, 19 nt, Homo sapiens
  misc_RNA (1)...(19): siRNA sense strand
ggaaaucagaacucagaaa

SEQ ID NO: 2327322 - RNA, 19 nt, Homo sapiens
  misc_RNA (1)...(19): siRNA sense strand
uaguagaggaagaggaaga

SEQ ID NO: 2327323 - RNA, 19 nt, Homo sapiens
  misc_RNA (1)...(19): siRNA sense strand
gaggaagggaagaaagcaa

SEQ ID NO: 2327324 - RNA, 19 nt, Homo sapiens
  misc_RNA (1)...(19): siRNA sense strand
agaaaugaaagcugagcaa

SEQ ID NO: 2327325 - RNA, 19 nt, Homo sapiens
  misc_RNA (1)...(19): siRNA sense strand
ugaccaaaggaauggguua

SEQ ID NO: 2327326 - RNA, 19 nt, Homo sapiens
  misc_RNA (1)...(19): siRNA sense strand
agauaugggaggagaauca

SEQ ID NO: 2327327 - RNA, 19 nt, Homo sapiens
  misc_RNA (1)...(19): siRNA sense strand
caaaagugguauaugguua

SEQ ID NO: 2327328 - RNA, 19 nt, Homo sapiens
  misc_RNA (1)...(19): siRNA sense strand
ggaaugcacaggaggcaaa

SEQ ID NO: 2327329 - RNA, 19 nt, Homo sapiens
  misc_RNA (1)...(19): siRNA sense strand
cgugaauagcagugauaau

SEQ ID NO: 2327330 - RNA, 19 nt, Homo sapiens
  misc_RNA (1)...(19): siRNA sense strand
aaaugaaagcugagcaaga

SEQ ID NO: 2327331 - RNA, 19 nt, Homo sapiens
  misc_RNA (1)...(19): siRNA sense strand
ccaaaguauucaagugcau

SEQ ID NO: 2327332 - RNA, 19 nt, Homo sapiens
  misc_RNA (1)...(19): siRNA sense strand
ucauggaauuguugaagaa

SEQ ID NO: 2327333 - RNA, 19 nt, Homo sapiens
  misc_RNA (1)...(19): siRNA sense strand
gcuucuugguaauaggaua

SEQ ID NO: 2327334 - RNA, 19 nt, Homo sapiens
  misc_RNA (1)...(19): siRNA sense strand
agacauagaggauagcaaa

SEQ ID NO: 2327335 - RNA, 19 nt, Homo sapiens
  misc_RNA (1)...(19): siRNA sense strand
ggaagaaucugaaagcaca

SEQ ID NO: 2327336 - RNA, 19 nt, Homo sapiens
  misc_RNA (1)...(19): siRNA sense strand
gcucacaggaggagacaga

SEQ ID NO: 2327337 - RNA, 19 nt, Homo sapiens
  misc_RNA (1)...(19): siRNA sense strand
gcaucagggucuucagcua

SEQ ID NO: 2327338 - RNA, 19 nt, Homo sapiens
  misc_RNA (1)...(19): siRNA sense strand
guacaagcucuuaaggcaa

SEQ ID NO: 2327339 - RNA, 19 nt, Homo sapiens
  misc_RNA (1)...(19): siRNA sense strand
ccaguauucugcagacaaa

SEQ ID NO: 2327340 - RNA, 19 nt, Homo sapiens
  misc_RNA (1)...(19): siRNA sense strand
gauaaaaguuucagagucu

SEQ ID NO: 2327341 - RNA, 19 nt, Homo sapiens
  misc_RNA (1)...(19): siRNA sense strand
aagaggaagaugaugauua

SEQ ID NO: 2327342 - RNA, 19 nt, Homo sapiens
  misc_RNA (1)...(19): siRNA sense strand
gaugauaacauaagagcca

SEQ ID NO: 2327343 - RNA, 19 nt, Homo sapiens
  misc_RNA (1)...(19): siRNA sense strand
gaagaaaagcauacggaau

SEQ ID NO: 2327344 - RNA, 19 nt, Homo sapiens
  misc_RNA (1)...(19): siRNA sense strand
gcagaugcuaauagaguau

SEQ ID NO: 2327345 - RNA, 19 nt, Homo sapiens
  misc_RNA (1)...(19): siRNA sense strand
gguacaagcucuuaaggca

SEQ ID NO: 2327346 - RNA, 19 nt, Homo sapiens
  misc_RNA (1)...(19): siRNA sense strand
ggaauugcuuggaguguca

SEQ ID NO: 2327347 - RNA, 19 nt, Homo sapiens
  misc_RNA (1)...(19): siRNA sense strand
cauugugacuggcgguaua

SEQ ID NO: 2327348 - RNA, 19 nt, Homo sapiens
  misc_RNA (1)...(19): siRNA sense strand
gggaaauucugcagugagu

SEQ ID NO: 2327349 - RNA, 19 nt, Homo sapiens
  misc_RNA (1)...(19): siRNA sense strand
ucuaaaugcagcucagaua

SEQ ID NO: 2327350 - RNA, 19 nt, Homo sapiens
  misc_RNA (1)...(19): siRNA sense strand
ggcucaugcuucagacaaa

SEQ ID NO: 2327351 - RNA, 19 nt, Homo sapiens
  misc_RNA (1)...(19): siRNA sense strand
aggcauagccagucaugua

SEQ ID NO: 2327352 - RNA, 19 nt, Homo sapiens
  misc_RNA (1)...(19): siRNA sense strand
ggagucaggcuuuaggaaa

SEQ ID NO: 2327353 - RNA, 19 nt, Homo sapiens
  misc_RNA (1)...(19): siRNA sense strand
ggccaaaaccucagaagaa

SEQ ID NO: 2327354 - RNA, 19 nt, Homo sapiens
  misc_RNA (1)...(19): siRNA sense strand
uggaaaaugcagugggauu

SEQ ID NO: 2327355 - RNA, 19 nt, Homo sapiens
  misc_RNA (1)...(19): siRNA sense strand
ccaaauggccauaccagaa

SEQ ID NO: 2327356 - RNA, 19 nt, Homo sapiens
  misc_RNA (1)...(19): siRNA sense strand
ucaucaaggugcuguacaa

SEQ ID NO: 2327357 - RNA, 19 nt, Homo sapiens
  misc_RNA (1)...(19): siRNA sense strand
agguggagggagagaagaa

SEQ ID NO: 2327358 - RNA, 19 nt, Homo sapiens
  misc_RNA (1)...(19): siRNA sense strand
gagacauagaggauagcaa

SEQ ID NO: 2327359 - RNA, 19 nt, Homo sapiens
  misc_RNA (1)...(19): siRNA sense strand
ugaucaaguuccaaaguuu

SEQ ID NO: 2327360 - RNA, 19 nt, Homo sapiens
  misc_RNA (1)...(19): siRNA sense strand
cagaagaauuuguucacau

SEQ ID NO: 2327361 - RNA, 19 nt, Homo sapiens
  misc_RNA (1)...(19): siRNA sense strand
ugacuaugcaugaggauga

SEQ ID NO: 2327362 - RNA, 19 nt, Homo sapiens
  misc_RNA (1)...(19): siRNA sense strand
ccacaaaugguaaugaaaa

SEQ ID NO: 2327363 - RNA, 19 nt, Homo sapiens
  misc_RNA (1)...(19): siRNA sense strand
cuggagaucuuuauggcaa

SEQ ID NO: 2327364 - RNA, 19 nt, Homo sapiens
  misc_RNA (1)...(19): siRNA sense strand
cugagaggcuggaguugaa

SEQ ID NO: 2327365 - RNA, 19 nt, Homo sapiens
  misc_RNA (1)...(19): siRNA sense strand
auggcaacacagagagaua

SEQ ID NO: 2327366 - RNA, 19 nt, Homo sapiens
  misc_RNA (1)...(19): siRNA sense strand
uccaagaaggugagaguau

SEQ ID NO: 2327367 - RNA, 19 nt, Homo sapiens
  misc_RNA (1)...(19): siRNA sense strand
ggugauacauaaacagcau

SEQ ID NO: 2327368 - RNA, 19 nt, Homo sapiens
  misc_RNA (1)...(19): siRNA sense strand
aaggaaugcagaugauuua

SEQ ID NO: 2327369 - RNA, 19 nt, Homo sapiens
  misc_RNA (1)...(19): siRNA sense strand
gauauacagauguggagaa

SEQ ID NO: 2327370 - RNA, 19 nt, Homo sapiens
  misc_RNA (1)...(19): siRNA sense strand
uggagaagccauucaacaa

SEQ ID NO: 2327371 - RNA, 19 nt, Homo sapiens
  misc_RNA (1)...(19): siRNA sense strand
cauucaacaaagacaguua

SEQ ID NO: 2327372 - RNA, 19 nt, Homo sapiens
  misc_RNA (1)...(19): siRNA sense strand
ucaguaaacuucaaggaga

SEQ ID NO: 2327373 - RNA, 19 nt, Homo sapiens
  misc_RNA (1)...(19): siRNA sense strand
cucuuaaggcaauggguua

SEQ ID NO: 2327374 - RNA, 19 nt, Homo sapiens
  misc_RNA (1)...(19): siRNA sense strand
gccaauauauuuagggaac

SEQ ID NO: 2327375 - RNA, 19 nt, Homo sapiens
  misc_RNA (1)...(19): siRNA sense strand
gguaauaggauauagccuu

SEQ ID NO: 2327376 - RNA, 19 nt, Homo sapiens
  misc_RNA (1)...(19): siRNA sense strand
aagcaaacugauacugaaa

SEQ ID NO: 2327377 - RNA, 19 nt, Homo sapiens
  misc_RNA (1)...(19): siRNA sense strand
gcagccagggcaaggaaua

SEQ ID NO: 2327378 - RNA, 19 nt, Homo sapiens
  misc_RNA (1)...(19): siRNA sense strand
gaaaacuaggggagauaaa

SEQ ID NO: 2327379 - RNA, 19 nt, Homo sapiens
  misc_RNA (1)...(19): siRNA sense strand
ucuaguaagaguagcaaau

SEQ ID NO: 2327380 - RNA, 19 nt, Homo sapiens
  misc_RNA (1)...(19): siRNA sense strand
ugaagauauccuugcuaaa

SEQ ID NO: 2327381 - RNA, 19 nt, Homo sapiens
  misc_RNA (1)...(19): siRNA sense strand
agugauggaugaugggaca

SEQ ID NO: 2327382 - RNA, 19 nt, Homo sapiens
  misc_RNA (1)...(19): siRNA sense strand
ugacaguucgcgagcuaaa

SEQ ID NO: 2327383 - RNA, 19 nt, Homo sapiens
  misc_RNA (1)...(19): siRNA sense strand
cggagaagcaggagcccua

SEQ ID NO: 2327384 - RNA, 19 nt, Homo sapiens
  misc_RNA (1)...(19): siRNA sense strand
gggccaaguacgagcgaca

SEQ ID NO: 2327385 - RNA, 19 nt, Homo sapiens
  misc_RNA (1)...(19): siRNA sense strand
ggaaggagauuguggacug

SEQ ID NO: 2327386 - RNA, 19 nt, Homo sapiens
  misc_RNA (1)...(19): siRNA sense strand
aaggaaggcuacauggaga

SEQ ID NO: 2327387 - RNA, 19 nt, Homo sapiens
  misc_RNA (1)...(19): siRNA sense strand
aggaaggcuacauggagaa

SEQ ID NO: 2327388 - RNA, 19 nt, Homo sapiens
  misc_RNA (1)...(19): siRNA sense strand
caacagaaaugaugccaag

SEQ ID NO: 2327389 - RNA, 19 nt, Homo sapiens
  misc_RNA (1)...(19): siRNA sense strand
agcccaaggccgugaugaa

SEQ ID NO: 2327390 - RNA, 19 nt, Homo sapiens
  misc_RNA (1)...(19): siRNA sense strand
ugaugaagaucgagcaccu

SEQ ID NO: 2327391 - RNA, 19 nt, Homo sapiens
  misc_RNA (1)...(19): siRNA sense strand
caugaggacgggaaggaga

SEQ ID NO: 2327392 - RNA, 19 nt, Homo sapiens
  misc_RNA (1)...(19): siRNA sense strand
ggaacuaccugaaggaagg

SEQ ID NO: 2327393 - RNA, 19 nt, Homo sapiens
  misc_RNA (1)...(19): siRNA sense strand
gcucgggaauccaccggaa

SEQ ID NO: 2327394 - RNA, 19 nt, Homo sapiens
  misc_RNA (1)...(19): siRNA sense strand
agaagaaauuuguggacca

SEQ ID NO: 2327395 - RNA, 19 nt, Homo sapiens
  misc_RNA (1)...(19): siRNA sense strand
augacuuagugcaggaaua

SEQ ID NO: 2327396 - RNA, 19 nt, Homo sapiens
  misc_RNA (1)...(19): siRNA sense strand
cuucauuuguggagugaca

SEQ ID NO: 2327397 - RNA, 19 nt, Homo sapiens
  misc_RNA (1)...(19): siRNA sense strand
cguucagacccguggauau

SEQ ID NO: 2327398 - RNA, 19 nt, Homo sapiens
  misc_RNA (1)...(19): siRNA sense strand
ggauauaccaagaguccca

SEQ ID NO: 2327399 - RNA, 19 nt, Homo sapiens
  misc_RNA (1)...(19): siRNA sense strand
accucgaagucaacagaaa

SEQ ID NO: 2327400 - RNA, 19 nt, Homo sapiens
  misc_RNA (1)...(19): siRNA sense strand
cuguauaggaaccagaauu

SEQ ID NO: 2327401 - RNA, 19 nt, Homo sapiens
  misc_RNA (1)...(19): siRNA sense strand
cagucugauugcuggaaaa

SEQ ID NO: 2327402 - RNA, 19 nt, Homo sapiens
  misc_RNA (1)...(19): siRNA sense strand
acaacaaacugcagcacgu

SEQ ID NO: 2327403 - RNA, 19 nt, Homo sapiens
  misc_RNA (1)...(19): siRNA sense strand
uggaaaagggaaagccauu

SEQ ID NO: 2327404 - RNA, 19 nt, Homo sapiens
  misc_RNA (1)...(19): siRNA sense strand
caguaaacucuuuuggauu

SEQ ID NO: 2327405 - RNA, 19 nt, Homo sapiens
  misc_RNA (1)...(19): siRNA sense strand
uggaaugucaacugggaaa

SEQ ID NO: 2327406 - RNA, 19 nt, Homo sapiens
  misc_RNA (1)...(19): siRNA sense strand
aaucaugacaucagagaau

SEQ ID NO: 2327407 - RNA, 19 nt, Homo sapiens
  misc_RNA (1)...(19): siRNA sense strand
gauugaaugcacagaagaa

SEQ ID NO: 2327408 - RNA, 19 nt, Homo sapiens
  misc_RNA (1)...(19): siRNA sense strand
agaagaagcuagaugacca

SEQ ID NO: 2327409 - RNA, 19 nt, Homo sapiens
  misc_RNA (1)...(19): siRNA sense strand
ugcuuaagcugguggagaa

SEQ ID NO: 2327410 - RNA, 19 nt, Homo sapiens
  misc_RNA (1)...(19): siRNA sense strand
cugaaagguuacaaacaau

SEQ ID NO: 2327411 - RNA, 19 nt, Homo sapiens
  misc_RNA (1)...(19): siRNA sense strand
cagaagaagaaaugaugau

SEQ ID NO: 2327412 - RNA, 19 nt, Homo sapiens
  misc_RNA (1)...(19): siRNA sense strand
cagagauccaacaaagaaa

SEQ ID NO: 2327413 - RNA, 19 nt, Homo sapiens
  misc_RNA (1)...(19): siRNA sense strand
gggccauucuccuggaaga

SEQ ID NO: 2327414 - RNA, 19 nt, Homo sapiens
  misc_RNA (1)...(19): siRNA sense strand
uguaaacauuucaggccaa

SEQ ID NO: 2327415 - RNA, 19 nt, Homo sapiens
  misc_RNA (1)...(19): siRNA sense strand
aacaagaugugaaggaaaa

SEQ ID NO: 2327416 - RNA, 19 nt, Homo sapiens
  misc_RNA (1)...(19): siRNA sense strand
agaagaauccaguggcaca

SEQ ID NO: 2327417 - RNA, 19 nt, Homo sapiens
  misc_RNA (1)...(19): siRNA sense strand
gcaacaugaaacaguggaa

SEQ ID NO: 2327418 - RNA, 19 nt, Homo sapiens
  misc_RNA (1)...(19): siRNA sense strand
aguuaauaccagagcagau

SEQ ID NO: 2327419 - RNA, 19 nt, Homo sapiens
  misc_RNA (1)...(19): siRNA sense strand
cguagaguuugcagaugaa

SEQ ID NO: 2327420 - RNA, 19 nt, Homo sapiens
  misc_RNA (1)...(19): siRNA sense strand
ggaagagauugaaugcaca

SEQ ID NO: 2327421 - RNA, 19 nt, Homo sapiens
  misc_RNA (1)...(19): siRNA sense strand
cgagaaucuuggaggccca

SEQ ID NO: 2327422 - RNA, 19 nt, Homo sapiens
  misc_RNA (1)...(19): siRNA sense strand
aaagaaacccagagaucca

SEQ ID NO: 2327423 - RNA, 19 nt, Homo sapiens
  misc_RNA (1)...(19): siRNA sense strand
cugcaguaucauaucaaua

SEQ ID NO: 2327424 - RNA, 19 nt, Homo sapiens
  misc_RNA (1)...(19): siRNA sense strand
gugacaaagaaguugauga

SEQ ID NO: 2327425 - RNA, 19 nt, Homo sapiens
  misc_RNA (1)...(19): siRNA sense strand
gugcuuugucagaaggcaa

SEQ ID NO: 2327426 - RNA, 19 nt, Homo sapiens
  misc_RNA (1)...(19): siRNA sense strand
guuuagaugaagagauguu

SEQ ID NO: 2327427 - RNA, 19 nt, Homo sapiens
  misc_RNA (1)...(19): siRNA sense strand
gcuuaagcugguggagaaa

SEQ ID NO: 2327428 - RNA, 19 nt, Homo sapiens
  misc_RNA (1)...(19): siRNA sense strand
caugcucucuggugggaaa

SEQ ID NO: 2327429 - RNA, 19 nt, Homo sapiens
  misc_RNA (1)...(19): siRNA sense strand
augugaaggugaaagugaa

SEQ ID NO: 2327430 - RNA, 19 nt, Homo sapiens
  misc_RNA (1)...(19): siRNA sense strand
ugaaggugaaagugaauuu

SEQ ID NO: 2327431 - RNA, 19 nt, Homo sapiens
  misc_RNA (1)...(19): siRNA sense strand
cgucaacaauuuuggguga

SEQ ID NO: 2327432 - RNA, 19 nt, Homo sapiens
  misc_RNA (1)...(19): siRNA sense strand
gcaaaagaccaaaacgaga

SEQ ID NO: 2327433 - RNA, 19 nt, Homo sapiens
  misc_RNA (1)...(19): siRNA sense strand
ugggaaaagaagagaacuu

SEQ ID NO: 2327434 - RNA, 19 nt, Homo sapiens
  misc_RNA (1)...(19): siRNA sense strand
uuaaagaaacccagagauc

SEQ ID NO: 2327435 - RNA, 19 nt, Homo sapiens
  misc_RNA (1)...(19): siRNA sense strand
ggguaaaacgucaacaauu

SEQ ID NO: 2327436 - RNA, 19 nt, Homo sapiens
  misc_RNA (1)...(19): siRNA sense strand
uugcagaaggcaugaauga

SEQ ID NO: 2327437 - RNA, 19 nt, Homo sapiens
  misc_RNA (1)...(19): siRNA sense strand
guauucaggcagaugcuaa

SEQ ID NO: 2327438 - RNA, 19 nt, Homo sapiens
  misc_RNA (1)...(19): siRNA sense strand
uggaacaagaugugaagga

SEQ ID NO: 2327439 - RNA, 19 nt, Homo sapiens
  misc_RNA (1)...(19): siRNA sense strand
guauaagaacaagcagaua

SEQ ID NO: 2327440 - RNA, 19 nt, Homo sapiens
  misc_RNA (1)...(19): siRNA sense strand
aaguauaagaacaagcaga

SEQ ID NO: 2327441 - RNA, 19 nt, Homo sapiens
  misc_RNA (1)...(19): siRNA sense strand
aguauaagaacaagcagau

SEQ ID NO: 2327442 - RNA, 19 nt, Homo sapiens
  misc_RNA (1)...(19): siRNA sense strand
cauuugaacaacagugaca

SEQ ID NO: 2327443 - RNA, 19 nt, Homo sapiens
  misc_RNA (1)...(19): siRNA sense strand
ggaucaggaaguauauauu

SEQ ID NO: 2327444 - RNA, 19 nt, Homo sapiens
  misc_RNA (1)...(19): siRNA sense strand
aggcagaugcuaagcuuca

SEQ ID NO: 2327445 - RNA, 19 nt, Homo sapiens
  misc_RNA (1)...(19): siRNA sense strand
aggcaauccugguauacuu

SEQ ID NO: 2327446 - RNA, 19 nt, Homo sapiens
  misc_RNA (1)...(19): siRNA sense strand
gauucaaguauuacagcuu

SEQ ID NO: 2327447 - RNA, 19 nt, Homo sapiens
  misc_RNA (1)...(19): siRNA sense strand
ggacgugggaacugagugu

SEQ ID NO: 2327448 - RNA, 19 nt, Homo sapiens
  misc_RNA (1)...(19): siRNA sense strand
cuucaaagacacauccauu

SEQ ID NO: 2327449 - RNA, 19 nt, Homo sapiens
  misc_RNA (1)...(19): siRNA sense strand
augaaacaguggaauguca

SEQ ID NO: 2327450 - RNA, 19 nt, Homo sapiens
  misc_RNA (1)...(19): siRNA sense strand
aaacaauauuggugcaccu

SEQ ID NO: 2327451 - RNA, 19 nt, Homo sapiens
  misc_RNA (1)...(19): siRNA sense strand
ccuccaaaggcaagaccau

SEQ ID NO: 2327452 - RNA, 19 nt, Homo sapiens
  misc_RNA (1)...(19): siRNA sense strand
ucuuaucacuccuggauca

SEQ ID NO: 2327453 - RNA, 19 nt, Homo sapiens
  misc_RNA (1)...(19): siRNA sense strand
agaguuugcagaugaagua

SEQ ID NO: 2327454 - RNA, 19 nt, Homo sapiens
  misc_RNA (1)...(19): siRNA sense strand
ugaacaacagugacaaaga

SEQ ID NO: 2327455 - RNA, 19 nt, Homo sapiens
  misc_RNA (1)...(19): siRNA sense strand
aagaugaggcacuugaauu

SEQ ID NO: 2327456 - RNA, 19 nt, Homo sapiens
  misc_RNA (1)...(19): siRNA sense strand
aaagaagaauccaguggca

SEQ ID NO: 2327457 - RNA, 19 nt, Homo sapiens
  misc_RNA (1)...(19): siRNA sense strand
ccugauuccaguugcagaa

SEQ ID NO: 2327458 - RNA, 19 nt, Homo sapiens
  misc_RNA (1)...(19): siRNA sense strand
acgagaguuuagaugaaga

SEQ ID NO: 2327459 - RNA, 19 nt, Homo sapiens
  misc_RNA (1)...(19): siRNA sense strand
ucagaaucaaucagcuuua

SEQ ID NO: 2327460 - RNA, 19 nt, Homo sapiens
  misc_RNA (1)...(19): siRNA sense strand
uugcaaagguugaaggaca

SEQ ID NO: 2327461 - RNA, 19 nt, Homo sapiens
  misc_RNA (1)...(19): siRNA sense strand
gguauaaagaagaaaccaa

SEQ ID NO: 2327462 - RNA, 19 nt, Homo sapiens
  misc_RNA (1)...(19): siRNA sense strand
aaauggacucagagagaaa

SEQ ID NO: 2327463 - RNA, 19 nt, Homo sapiens
  misc_RNA (1)...(19): siRNA sense strand
ggggaaagcauaagaacaa

SEQ ID NO: 2327464 - RNA, 19 nt, Homo sapiens
  misc_RNA (1)...(19): siRNA sense strand
acuagugacaugugagaaa

SEQ ID NO: 2327465 - RNA, 19 nt, Homo sapiens
  misc_RNA (1)...(19): siRNA sense strand
aaucggaagcaguggcaaa

SEQ ID NO: 2327466 - RNA, 19 nt, Homo sapiens
  misc_RNA (1)...(19): siRNA sense strand
agaacaaaccagacaugaa

SEQ ID NO: 2327467 - RNA, 19 nt, Homo sapiens
  misc_RNA (1)...(19): siRNA sense strand
gaaauaagacagugaccca

SEQ ID NO: 2327468 - RNA, 19 nt, Homo sapiens
  misc_RNA (1)...(19): siRNA sense strand
ccuaccugcuugagggauu

SEQ ID NO: 2327469 - RNA, 19 nt, Homo sapiens
  misc_RNA (1)...(19): siRNA sense strand
gaaaccaagagaaggaaaa

SEQ ID NO: 2327470 - RNA, 19 nt, Homo sapiens
  misc_RNA (1)...(19): siRNA sense strand
caagagaaggaaaaggaaa

SEQ ID NO: 2327471 - RNA, 19 nt, Homo sapiens
  misc_RNA (1)...(19): siRNA sense strand
ccauuaauaaccagcacua

SEQ ID NO: 2327472 - RNA, 19 nt, Homo sapiens
  misc_RNA (1)...(19): siRNA sense strand
ugggacgagcuuugagaua

SEQ ID NO: 2327473 - RNA, 19 nt, Homo sapiens
  misc_RNA (1)...(19): siRNA sense strand
aagaagaaaccaagagaag

SEQ ID NO: 2327474 - RNA, 19 nt, Homo sapiens
  misc_RNA (1)...(19): siRNA sense strand
gaugaugacaaaagugaaa

SEQ ID NO: 2327475 - RNA, 19 nt, Homo sapiens
  misc_RNA (1)...(19): siRNA sense strand
agguagucauucagacaau

SEQ ID NO: 2327476 - RNA, 19 nt, Homo sapiens
  misc_RNA (1)...(19): siRNA sense strand
gagucugaacccauggaua

SEQ ID NO: 2327477 - RNA, 19 nt, Homo sapiens
  misc_RNA (1)...(19): siRNA sense strand
uaaugaagauuuagcagga

SEQ ID NO: 2327478 - RNA, 19 nt, Homo sapiens
  misc_RNA (1)...(19): siRNA sense strand
aagugaaaccuguaaugaa

SEQ ID NO: 2327479 - RNA, 19 nt, Homo sapiens
  misc_RNA (1)...(19): siRNA sense strand
gauggaaauaagacaguga

SEQ ID NO: 2327480 - RNA, 19 nt, Homo sapiens
  misc_RNA (1)...(19): siRNA sense strand
uaugaaaacagaaggacua

SEQ ID NO: 2327481 - RNA, 19 nt, Homo sapiens
  misc_RNA (1)...(19): siRNA sense strand
ucucuaagcuuuggggaaa

SEQ ID NO: 2327482 - RNA, 19 nt, Homo sapiens
  misc_RNA (1)...(19): siRNA sense strand
agaaaccaagagaaggaaa

SEQ ID NO: 2327483 - RNA, 19 nt, Homo sapiens
  misc_RNA (1)...(19): siRNA sense strand
caucauugggucagaaaau

SEQ ID NO: 2327484 - RNA, 19 nt, Homo sapiens
  misc_RNA (1)...(19): siRNA sense strand
uagugacaugugagaaaua

SEQ ID NO: 2327485 - RNA, 19 nt, Homo sapiens
  misc_RNA (1)...(19): siRNA sense strand
agcaggaacuacugaugaa

SEQ ID NO: 2327486 - RNA, 19 nt, Homo sapiens
  misc_RNA (1)...(19): siRNA sense strand
cugaaaauggagacaaaau

SEQ ID NO: 2327487 - RNA, 19 nt, Homo sapiens
  misc_RNA (1)...(19): siRNA sense strand
uacugaaaauggagacaaa

SEQ ID NO: 2327488 - RNA, 19 nt, Homo sapiens
  misc_RNA (1)...(19): siRNA sense strand
gaguuagguauaaagaaga

SEQ ID NO: 2327489 - RNA, 19 nt, Homo sapiens
  misc_RNA (1)...(19): siRNA sense strand
uaaaggggccagagguuaa

SEQ ID NO: 2327490 - RNA, 19 nt, Homo sapiens
  misc_RNA (1)...(19): siRNA sense strand
cugaagagucugaacccau

SEQ ID NO: 2327491 - RNA, 19 nt, Homo sapiens
  misc_RNA (1)...(19): siRNA sense strand
caacaucaccagauagcca

SEQ ID NO: 2327492 - RNA, 19 nt, Homo sapiens
  misc_RNA (1)...(19): siRNA sense strand
ccagacaugaacuaugaaa

SEQ ID NO: 2327493 - RNA, 19 nt, Homo sapiens
  misc_RNA (1)...(19): siRNA sense strand
cuuugcagcuaguagaaga

SEQ ID NO: 2327494 - RNA, 19 nt, Homo sapiens
  misc_RNA (1)...(19): siRNA sense strand
acaaaccagacaugaacua

SEQ ID NO: 2327495 - RNA, 19 nt, Homo sapiens
  misc_RNA (1)...(19): siRNA sense strand
aacagaaggacuagugaca

SEQ ID NO: 2327496 - RNA, 19 nt, Homo sapiens
  misc_RNA (1)...(19): siRNA sense strand
agauaagacaauugaagcu

SEQ ID NO: 2327497 - RNA, 19 nt, Homo sapiens
  misc_RNA (1)...(19): siRNA sense strand
cagaaacuguaguggaggu

SEQ ID NO: 2327498 - RNA, 19 nt, Homo sapiens
  misc_RNA (1)...(19): siRNA sense strand
aguucaaggauaugccgaa

SEQ ID NO: 2327499 - RNA, 19 nt, Homo sapiens
  misc_RNA (1)...(19): siRNA sense strand
gcaucaguucacagcagua

SEQ ID NO: 2327500 - RNA, 19 nt, Homo sapiens
  misc_RNA (1)...(19): siRNA sense strand
cagcacuaguccaacaaca

SEQ ID NO: 2327501 - RNA, 19 nt, Homo sapiens
  misc_RNA (1)...(19): siRNA sense strand
uugcaaagguugaaggaca

SEQ ID NO: 2327502 - RNA, 19 nt, Homo sapiens
  misc_RNA (1)...(19): siRNA sense strand
gguauaaagaagaaaccaa

SEQ ID NO: 2327503 - RNA, 19 nt, Homo sapiens
  misc_RNA (1)...(19): siRNA sense strand
aaauggacucagagagaaa

SEQ ID NO: 2327504 - RNA, 19 nt, Homo sapiens
  misc_RNA (1)...(19): siRNA sense strand
ggggaaagcauaagaacaa

SEQ ID NO: 2327505 - RNA, 19 nt, Homo sapiens
  misc_RNA (1)...(19): siRNA sense strand
acuagugacaugugagaaa

SEQ ID NO: 2327506 - RNA, 19 nt, Homo sapiens
  misc_RNA (1)...(19): siRNA sense strand
aaucggaagcaguggcaaa

SEQ ID NO: 2327507 - RNA, 19 nt, Homo sapiens
  misc_RNA (1)...(19): siRNA sense strand
agaacaaaccagacaugaa

SEQ ID NO: 2327508 - RNA, 19 nt, Homo sapiens
  misc_RNA (1)...(19): siRNA sense strand
gaaauaagacagugaccca

SEQ ID NO: 2327509 - RNA, 19 nt, Homo sapiens
  misc_RNA (1)...(19): siRNA sense strand
ccuaccugcuugagggauu

SEQ ID NO: 2327510 - RNA, 19 nt, Homo sapiens
  misc_RNA (1)...(19): siRNA sense strand
gaaaccaagagaaggaaaa

SEQ ID NO: 2327511 - RNA, 19 nt, Homo sapiens
  misc_RNA (1)...(19): siRNA sense strand
caagagaaggaaaaggaaa

SEQ ID NO: 2327512 - RNA, 19 nt, Homo sapiens
  misc_RNA (1)...(19): siRNA sense strand
ccauuaauaaccagcacua

SEQ ID NO: 2327513 - RNA, 19 nt, Homo sapiens
  misc_RNA (1)...(19): siRNA sense strand
ugggacgagcuuugagaua

SEQ ID NO: 2327514 - RNA, 19 nt, Homo sapiens
  misc_RNA (1)...(19): siRNA sense strand
aagaagaaaccaagagaag

SEQ ID NO: 2327515 - RNA, 19 nt, Homo sapiens
  misc_RNA (1)...(19): siRNA sense strand
gaugaugacaaaagugaaa

SEQ ID NO: 2327516 - RNA, 19 nt, Homo sapiens
  misc_RNA (1)...(19): siRNA sense strand
agguagucauucagacaau

SEQ ID NO: 2327517 - RNA, 19 nt, Homo sapiens
  misc_RNA (1)...(19): siRNA sense strand
gagucugaacccauggaua

SEQ ID NO: 2327518 - RNA, 19 nt, Homo sapiens
  misc_RNA (1)...(19): siRNA sense strand
uaaugaagauuuagcagga

SEQ ID NO: 2327519 - RNA, 19 nt, Homo sapiens
  misc_RNA (1)...(19): siRNA sense strand
aagugaaaccuguaaugaa

SEQ ID NO: 2327520 - RNA, 19 nt, Homo sapiens
  misc_RNA (1)...(19): siRNA sense strand
gauggaaauaagacaguga

SEQ ID NO: 2327521 - RNA, 19 nt, Homo sapiens
  misc_RNA (1)...(19): siRNA sense strand
uaugaaaacagaaggacua

SEQ ID NO: 2327522 - RNA, 19 nt, Homo sapiens
  misc_RNA (1)...(19): siRNA sense strand
ucucuaagcuuuggggaaa

SEQ ID NO: 2327523 - RNA, 19 nt, Homo sapiens
  misc_RNA (1)...(19): siRNA sense strand
agaaaccaagagaaggaaa

SEQ ID NO: 2327524 - RNA, 19 nt, Homo sapiens
  misc_RNA (1)...(19): siRNA sense strand
caucauugggucagaaaau

SEQ ID NO: 2327525 - RNA, 19 nt, Homo sapiens
  misc_RNA (1)...(19): siRNA sense strand
uagugacaugugagaaaua

SEQ ID NO: 2327526 - RNA, 19 nt, Homo sapiens
  misc_RNA (1)...(19): siRNA sense strand
agcaggaacuacugaugaa

SEQ ID NO: 2327527 - RNA, 19 nt, Homo sapiens
  misc_RNA (1)...(19): siRNA sense strand
cugaaaauggagacaaaau

SEQ ID NO: 2327528 - RNA, 19 nt, Homo sapiens
  misc_RNA (1)...(19): siRNA sense strand
uacugaaaauggagacaaa

SEQ ID NO: 2327529 - RNA, 19 nt, Homo sapiens
  misc_RNA (1)...(19): siRNA sense strand
gaguuagguauaaagaaga

SEQ ID NO: 2327530 - RNA, 19 nt, Homo sapiens
  misc_RNA (1)...(19): siRNA sense strand
uaaaggggccagagguuaa

SEQ ID NO: 2327531 - RNA, 19 nt, Homo sapiens
  misc_RNA (1)...(19): siRNA sense strand
cugaagagucugaacccau

SEQ ID NO: 2327532 - RNA, 19 nt, Homo sapiens
  misc_RNA (1)...(19): siRNA sense strand
caacaucaccagauagcca

SEQ ID NO: 2327533 - RNA, 19 nt, Homo sapiens
  misc_RNA (1)...(19): siRNA sense strand
ccagacaugaacuaugaaa

SEQ ID NO: 2327534 - RNA, 19 nt, Homo sapiens
  misc_RNA (1)...(19): siRNA sense strand
cuuugcagcuaguagaaga

SEQ ID NO: 2327535 - RNA, 19 nt, Homo sapiens
  misc_RNA (1)...(19): siRNA sense strand
acaaaccagacaugaacua

SEQ ID NO: 2327536 - RNA, 19 nt, Homo sapiens
  misc_RNA (1)...(19): siRNA sense strand
aacagaaggacuagugaca

SEQ ID NO: 2327537 - RNA, 19 nt, Homo sapiens
  misc_RNA (1)...(19): siRNA sense strand
agauaagacaauugaagcu

SEQ ID NO: 2327538 - RNA, 19 nt, Homo sapiens
  misc_RNA (1)...(19): siRNA sense strand
cagaaacuguaguggaggu

SEQ ID NO: 2327539 - RNA, 19 nt, Homo sapiens
  misc_RNA (1)...(19): siRNA sense strand
aguucaaggauaugccgaa

SEQ ID NO: 2327540 - RNA, 19 nt, Homo sapiens
  misc_RNA (1)...(19): siRNA sense strand
gcaucaguucacagcagua

SEQ ID NO: 2327541 - RNA, 19 nt, Homo sapiens
  misc_RNA (1)...(19): siRNA sense strand
cagcacuaguccaacaaca

SEQ ID NO: 2327542 - RNA, 19 nt, Homo sapiens
  misc_RNA (1)...(19): siRNA sense strand
uggaagaaucugaggggaa

SEQ ID NO: 2327543 - RNA, 19 nt, Homo sapiens
  misc_RNA (1)...(19): siRNA sense strand
uugugaaaguggagaagau

SEQ ID NO: 2327544 - RNA, 19 nt, Homo sapiens
  misc_RNA (1)...(19): siRNA sense strand
aagaggagccagaaggaga

SEQ ID NO: 2327545 - RNA, 19 nt, Homo sapiens
  misc_RNA (1)...(19): siRNA sense strand
acaagaccucacagagaaa

SEQ ID NO: 2327546 - RNA, 19 nt, Homo sapiens
  misc_RNA (1)...(19): siRNA sense strand
cggucaaaauagaaaccaa

SEQ ID NO: 2327547 - RNA, 19 nt, Homo sapiens
  misc_RNA (1)...(19): siRNA sense strand
guccagaagaggagccaga

SEQ ID NO: 2327548 - RNA, 19 nt, Homo sapiens
  misc_RNA (1)...(19): siRNA sense strand
auggaggcccugagaagua

SEQ ID NO: 2327549 - RNA, 19 nt, Homo sapiens
  misc_RNA (1)...(19): siRNA sense strand
aucaaugacaugaaggcaa

SEQ ID NO: 2327550 - RNA, 19 nt, Homo sapiens
  misc_RNA (1)...(19): siRNA sense strand
uggagaacacgguggagga

SEQ ID NO: 2327551 - RNA, 19 nt, Homo sapiens
  misc_RNA (1)...(19): siRNA sense strand
ccaagagccaggagcacga

SEQ ID NO: 2327552 - RNA, 19 nt, Homo sapiens
  misc_RNA (1)...(19): siRNA sense strand
gugacguggaggagcugaa

SEQ ID NO: 2327553 - RNA, 19 nt, Homo sapiens
  misc_RNA (1)...(19): siRNA sense strand
cugaggaaugaucuggaua

SEQ ID NO: 2327554 - RNA, 19 nt, Homo sapiens
  misc_RNA (1)...(19): siRNA sense strand
agaaccaggcgcacggcaa

SEQ ID NO: 2327555 - RNA, 19 nt, Homo sapiens
  misc_RNA (1)...(19): siRNA sense strand
uguuugugaaaguggagaa

SEQ ID NO: 2327556 - RNA, 19 nt, Homo sapiens
  misc_RNA (1)...(19): siRNA sense strand
ugaagaggagugugggcga

SEQ ID NO: 2327557 - RNA, 19 nt, Homo sapiens
  misc_RNA (1)...(19): siRNA sense strand
uagaauacugugagggaaa

SEQ ID NO: 2327558 - RNA, 19 nt, Homo sapiens
  misc_RNA (1)...(19): siRNA sense strand
gcaaaagaugcuagagaaa

SEQ ID NO: 2327559 - RNA, 19 nt, Homo sapiens
  misc_RNA (1)...(19): siRNA sense strand
aggcagagcuggagagacu

SEQ ID NO: 2327560 - RNA, 19 nt, Homo sapiens
  misc_RNA (1)...(19): siRNA sense strand
ugaaacuagccaagggaaa

SEQ ID NO: 2327561 - RNA, 19 nt, Homo sapiens
  misc_RNA (1)...(19): siRNA sense strand
gagcagaaacagcggaaaa

SEQ ID NO: 2327562 - RNA, 19 nt, Homo sapiens
  misc_RNA (1)...(19): siRNA sense strand
aagcaugcauguagggaau

SEQ ID NO: 2327563 - RNA, 19 nt, Homo sapiens
  misc_RNA (1)...(19): siRNA sense strand
ggauaaauucacagaggga

SEQ ID NO: 2327564 - RNA, 19 nt, Homo sapiens
  misc_RNA (1)...(19): siRNA sense strand
ugauaaagaaguagagacu

SEQ ID NO: 2327565 - RNA, 19 nt, Homo sapiens
  misc_RNA (1)...(19): siRNA sense strand
aagcagagauccaggcaga

SEQ ID NO: 2327566 - RNA, 19 nt, Homo sapiens
  misc_RNA (1)...(19): siRNA sense strand
aauuaaugucggagaaaga

SEQ ID NO: 2327567 - RNA, 19 nt, Homo sapiens
  misc_RNA (1)...(19): siRNA sense strand
aaacuggagagaugagaaa

SEQ ID NO: 2327568 - RNA, 19 nt, Homo sapiens
  misc_RNA (1)...(19): siRNA sense strand
gagaagaaggagggaagaa

SEQ ID NO: 2327569 - RNA, 19 nt, Homo sapiens
  misc_RNA (1)...(19): siRNA sense strand
ggaagagauagaaagacaa

SEQ ID NO: 2327570 - RNA, 19 nt, Homo sapiens
  misc_RNA (1)...(19): siRNA sense strand
aagcaacaggaaaggauaa

SEQ ID NO: 2327571 - RNA, 19 nt, Homo sapiens
  misc_RNA (1)...(19): siRNA sense strand
agggaagaauagaugauuu

SEQ ID NO: 2327572 - RNA, 19 nt, Homo sapiens
  misc_RNA (1)...(19): siRNA sense strand
gacuagaaaggguuagaaa

SEQ ID NO: 2327573 - RNA, 19 nt, Homo sapiens
  misc_RNA (1)...(19): siRNA sense strand
agucaaaacaagagaagau

SEQ ID NO: 2327574 - RNA, 19 nt, Homo sapiens
  misc_RNA (1)...(19): siRNA sense strand
caaccaaugagcagaaaca

SEQ ID NO: 2327575 - RNA, 19 nt, Homo sapiens
  misc_RNA (1)...(19): siRNA sense strand
aguaaaugguacagcgugu

SEQ ID NO: 2327576 - RNA, 19 nt, Homo sapiens
  misc_RNA (1)...(19): siRNA sense strand
cgauuaaauagauguguga

SEQ ID NO: 2327577 - RNA, 19 nt, Homo sapiens
  misc_RNA (1)...(19): siRNA sense strand
ugucagugaugcuagcaaa

SEQ ID NO: 2327578 - RNA, 19 nt, Homo sapiens
  misc_RNA (1)...(19): siRNA sense strand
cugaaacagcacaaauuaa

SEQ ID NO: 2327579 - RNA, 19 nt, Homo sapiens
  misc_RNA (1)...(19): siRNA sense strand
cagcguguggagagauaaa

SEQ ID NO: 2327580 - RNA, 19 nt, Homo sapiens
  misc_RNA (1)...(19): siRNA sense strand
cagagggaagagauagaaa

SEQ ID NO: 2327581 - RNA, 19 nt, Homo sapiens
  misc_RNA (1)...(19): siRNA sense strand
gcgaaaucggaaaagaaaa

SEQ ID NO: 2327582 - RNA, 19 nt, Homo sapiens
  misc_RNA (1)...(19): siRNA sense strand
uaguaacaccugaagcaaa

SEQ ID NO: 2327583 - RNA, 19 nt, Homo sapiens
  misc_RNA (1)...(19): siRNA sense strand
ggagggaagaauagaugau

SEQ ID NO: 2327584 - RNA, 19 nt, Homo sapiens
  misc_RNA (1)...(19): siRNA sense strand
agacauccuacaagagaau

SEQ ID NO: 2327585 - RNA, 19 nt, Homo sapiens
  misc_RNA (1)...(19): siRNA sense strand
agcagaaugaccagcgaaa

SEQ ID NO: 2327586 - RNA, 19 nt, Homo sapiens
  misc_RNA (1)...(19): siRNA sense strand
aaagaaaagcugaaccaua

SEQ ID NO: 2327587 - RNA, 19 nt, Homo sapiens
  misc_RNA (1)...(19): siRNA sense strand
acuagaaaggguuagaaau

SEQ ID NO: 2327588 - RNA, 19 nt, Homo sapiens
  misc_RNA (1)...(19): siRNA sense strand
auagaaagacaacggaaaa

SEQ ID NO: 2327589 - RNA, 19 nt, Homo sapiens
  misc_RNA (1)...(19): siRNA sense strand
agaagaaggagggaagaau

SEQ ID NO: 2327590 - RNA, 19 nt, Homo sapiens
  misc_RNA (1)...(19): siRNA sense strand
agauagaaagacaacggaa

SEQ ID NO: 2327591 - RNA, 19 nt, Homo sapiens
  misc_RNA (1)...(19): siRNA sense strand
acgcuaaaugacagauauu

SEQ ID NO: 2327592 - RNA, 19 nt, Homo sapiens
  misc_RNA (1)...(19): siRNA sense strand
gaugauuuauuaagagcca

SEQ ID NO: 2327593 - RNA, 19 nt, Homo sapiens
  misc_RNA (1)...(19): siRNA sense strand
aggaggaagcagagaucca

SEQ ID NO: 2327594 - RNA, 19 nt, Homo sapiens
  misc_RNA (1)...(19): siRNA sense strand
cuggaguagguguuaguaa

SEQ ID NO: 2327595 - RNA, 19 nt, Homo sapiens
  misc_RNA (1)...(19): siRNA sense strand
cagcgaaaucggaaaagaa

SEQ ID NO: 2327596 - RNA, 19 nt, Homo sapiens
  misc_RNA (1)...(19): siRNA sense strand
cagaaugaccagcgaaauc

SEQ ID NO: 2327597 - RNA, 19 nt, Homo sapiens
  misc_RNA (1)...(19): siRNA sense strand
gaaaagaaaagcugaacca

SEQ ID NO: 2327598 - RNA, 19 nt, Homo sapiens
  misc_RNA (1)...(19): siRNA sense strand
ugacaaugagcaagaaacu

SEQ ID NO: 2327599 - RNA, 19 nt, Homo sapiens
  misc_RNA (1)...(19): siRNA sense strand
caacgcuaaaugacagaua

SEQ ID NO: 2327600 - RNA, 19 nt, Homo sapiens
  misc_RNA (1)...(19): siRNA sense strand
agggaaaugaucuggacuu

SEQ ID NO: 2327601 - RNA, 19 nt, Homo sapiens
  misc_RNA (1)...(19): siRNA sense strand
uagagaagaaggagggaag

SEQ ID NO: 2327602 - RNA, 19 nt, Homo sapiens
  misc_RNA (1)...(19): siRNA sense strand
cuagagaaauacaaggaac

SEQ ID NO: 2327603 - RNA, 19 nt, Homo sapiens
  misc_RNA (1)...(19): siRNA sense strand
cguguagagauaagagcau

SEQ ID NO: 2327604 - RNA, 19 nt, Homo sapiens
  misc_RNA (1)...(19): siRNA sense strand
auaccaugaacaagaagaa

SEQ ID NO: 2327605 - RNA, 19 nt, Homo sapiens
  misc_RNA (1)...(19): siRNA sense strand
ggagagacuagaaaggguu

SEQ ID NO: 2327606 - RNA, 19 nt, Homo sapiens
  misc_RNA (1)...(19): siRNA sense strand
gugaaguuuacaaggcauu

SEQ ID NO: 2327607 - RNA, 19 nt, Homo sapiens
  misc_RNA (1)...(19): siRNA sense strand
gccaaagccaguaguaaca

SEQ ID NO: 2327608 - RNA, 19 nt, Homo sapiens
  misc_RNA (1)...(19): siRNA sense strand
gaugugugacaaugagcaa

SEQ ID NO: 2327609 - RNA, 19 nt, Homo sapiens
  misc_RNA (1)...(19): siRNA sense strand
aaauguuagcaaagcggaa

SEQ ID NO: 2327610 - RNA, 19 nt, Homo sapiens
  misc_RNA (1)...(19): siRNA sense strand
caagcaugcauguagggaa

SEQ ID NO: 2327611 - RNA, 19 nt, Homo sapiens
  misc_RNA (1)...(19): siRNA sense strand
gguacagcguguggagaga

SEQ ID NO: 2327612 - RNA, 19 nt, Homo sapiens
  misc_RNA (1)...(19): siRNA sense strand
ccgccaaagccaguaguaa

SEQ ID NO: 2327613 - RNA, 19 nt, Homo sapiens
  misc_RNA (1)...(19): siRNA sense strand
cagaaguccugguccgcaa

SEQ ID NO: 2327614 - RNA, 19 nt, Homo sapiens
  misc_RNA (1)...(19): siRNA sense strand
guagcuaaguacagggcca

SEQ ID NO: 2327615 - RNA, 19 nt, Homo sapiens
  misc_RNA (1)...(19): siRNA sense strand
acaccaacucaguggacau

SEQ ID NO: 2327616 - RNA, 19 nt, Homo sapiens
  misc_RNA (1)...(19): siRNA sense strand
caguguuggcccugucaaa

SEQ ID NO: 2327617 - RNA, 19 nt, Homo sapiens
  misc_RNA (1)...(19): siRNA sense strand
cguguagagcaccgggcaa

SEQ ID NO: 2327618 - RNA, 19 nt, Homo sapiens
  misc_RNA (1)...(19): siRNA sense strand
gugaugacugcuugaugaa

SEQ ID NO: 2327619 - RNA, 19 nt, Homo sapiens
  misc_RNA (1)...(19): siRNA sense strand
gaacaaacucguagggacu

SEQ ID NO: 2327620 - RNA, 19 nt, Homo sapiens
  misc_RNA (1)...(19): siRNA sense strand
guucauugccagagagcca

SEQ ID NO: 2327621 - RNA, 19 nt, Homo sapiens
  misc_RNA (1)...(19): siRNA sense strand
aggccaaccuucaggagga

SEQ ID NO: 2327622 - RNA, 19 nt, Homo sapiens
  misc_RNA (1)...(19): siRNA sense strand
ggcaaagccgagaaggaga

SEQ ID NO: 2327623 - RNA, 19 nt, Homo sapiens
  misc_RNA (1)...(19): siRNA sense strand
gcaaacacgaagauggcca

SEQ ID NO: 2327624 - RNA, 19 nt, Homo sapiens
  misc_RNA (1)...(19): siRNA sense strand
agaacaaacucguagggac

SEQ ID NO: 2327625 - RNA, 19 nt, Homo sapiens
  misc_RNA (1)...(19): siRNA sense strand
acgaagauggccaagaaca

SEQ ID NO: 2327626 - RNA, 19 nt, Homo sapiens
  misc_RNA (1)...(19): siRNA sense strand
agagaauaguuaugggaaa

SEQ ID NO: 2327627 - RNA, 19 nt, Homo sapiens
  misc_RNA (1)...(19): siRNA sense strand
cagaauacuaugauggaaa

SEQ ID NO: 2327628 - RNA, 19 nt, Homo sapiens
  misc_RNA (1)...(19): siRNA sense strand
gauccaaagcagugguuaa

SEQ ID NO: 2327629 - RNA, 19 nt, Homo sapiens
  misc_RNA (1)...(19): siRNA sense strand
agugauaaauguuggcaua

SEQ ID NO: 2327630 - RNA, 19 nt, Homo sapiens
  misc_RNA (1)...(19): siRNA sense strand
agauagaggaccaguauua

SEQ ID NO: 2327631 - RNA, 19 nt, Homo sapiens
  misc_RNA (1)...(19): siRNA sense strand
gcaugaagauagaggacca

SEQ ID NO: 2327632 - RNA, 19 nt, Homo sapiens
  misc_RNA (1)...(19): siRNA sense strand
gagaaguggauaagagaga

SEQ ID NO: 2327633 - RNA, 19 nt, Homo sapiens
  misc_RNA (1)...(19): siRNA sense strand
ggaaaugacugaagugcca

SEQ ID NO: 2327634 - RNA, 19 nt, Homo sapiens
  misc_RNA (1)...(19): siRNA sense strand
cagcagacgucuagagcca

SEQ ID NO: 2327635 - RNA, 19 nt, Homo sapiens
  misc_RNA (1)...(19): siRNA sense strand
gagaauaguuaugggaaaa

SEQ ID NO: 2327636 - RNA, 19 nt, Homo sapiens
  misc_RNA (1)...(19): siRNA sense strand
uaagcaaguacgagaauua

SEQ ID NO: 2327637 - RNA, 19 nt, Homo sapiens
  misc_RNA (1)...(19): siRNA sense strand
gccaauaaauggugaaacu

SEQ ID NO: 2327638 - RNA, 19 nt, Homo sapiens
  misc_RNA (1)...(19): siRNA sense strand
guggauaagcugaaagaca

SEQ ID NO: 2327639 - RNA, 19 nt, Homo sapiens
  misc_RNA (1)...(19): siRNA sense strand
gggauguagugacaagaaa

SEQ ID NO: 2327640 - RNA, 19 nt, Homo sapiens
  misc_RNA (1)...(19): siRNA sense strand
guuaaaggcucgugggaug

SEQ ID NO: 2327641 - RNA, 19 nt, Homo sapiens
  misc_RNA (1)...(19): siRNA sense strand
gaaauaagcaaguacgaga

SEQ ID NO: 2327642 - RNA, 19 nt, Homo sapiens
  misc_RNA (1)...(19): siRNA sense strand
cagaaaagccuguuagaau

SEQ ID NO: 2327643 - RNA, 19 nt, Homo sapiens
  misc_RNA (1)...(19): siRNA sense strand
ucuaagugaugcagaagaa

SEQ ID NO: 2327644 - RNA, 19 nt, Homo sapiens
  misc_RNA (1)...(19): siRNA sense strand
uauuaggagaaguggauaa

SEQ ID NO: 2327645 - RNA, 19 nt, Homo sapiens
  misc_RNA (1)...(19): siRNA sense strand
cagaaggaauccaaagaga

SEQ ID NO: 2327646 - RNA, 19 nt, Homo sapiens
  misc_RNA (1)...(19): siRNA sense strand
ugaaauugcucugaggaaa

SEQ ID NO: 2327647 - RNA, 19 nt, Homo sapiens
  misc_RNA (1)...(19): siRNA sense strand
agaaaagccuguuagaaua

SEQ ID NO: 2327648 - RNA, 19 nt, Homo sapiens
  misc_RNA (1)...(19): siRNA sense strand
gaauccaaagagagaauaa

SEQ ID NO: 2327649 - RNA, 19 nt, Homo sapiens
  misc_RNA (1)...(19): siRNA sense strand
cauugaaguuggacgaaaa

SEQ ID NO: 2327650 - RNA, 19 nt, Homo sapiens
  misc_RNA (1)...(19): siRNA sense strand
auggaugauuggaaaguua

SEQ ID NO: 2327651 - RNA, 19 nt, Homo sapiens
  misc_RNA (1)...(19): siRNA sense strand
agagauugcuggugguaca

SEQ ID NO: 2327652 - RNA, 19 nt, Homo sapiens
  misc_RNA (1)...(19): siRNA sense strand
uugaaauuggagaggauaa

SEQ ID NO: 2327653 - RNA, 19 nt, Homo sapiens
  misc_RNA (1)...(19): siRNA sense strand
ugacuuaguugaaggacau

SEQ ID NO: 2327654 - RNA, 19 nt, Homo sapiens
  misc_RNA (1)...(19): siRNA sense strand
gcuccaugguagaaaguga

SEQ ID NO: 2327655 - RNA, 19 nt, Homo sapiens
  misc_RNA (1)...(19): siRNA sense strand
gagagaagcaauugaaagu

SEQ ID NO: 2327656 - RNA, 19 nt, Homo sapiens
  misc_RNA (1)...(19): siRNA sense strand
ggaaagaugaaauagguca

SEQ ID NO: 2327657 - RNA, 19 nt, Homo sapiens
  misc_RNA (1)...(19): siRNA sense strand
cuucaaaggcgguauauau

SEQ ID NO: 2327658 - RNA, 19 nt, Homo sapiens
  misc_RNA (1)...(19): siRNA sense strand
caugaggaaagaugaaaua

SEQ ID NO: 2327659 - RNA, 19 nt, Homo sapiens
  misc_RNA (1)...(19): siRNA sense strand
agcaagaugcauuggauua

SEQ ID NO: 2327660 - RNA, 19 nt, Homo sapiens
  misc_RNA (1)...(19): siRNA sense strand
gaugaaagagagauggaga

SEQ ID NO: 2327661 - RNA, 19 nt, Homo sapiens
  misc_RNA (1)...(19): siRNA sense strand
uauugaaauuggagaggau

SEQ ID NO: 2327662 - RNA, 19 nt, Homo sapiens
  misc_RNA (1)...(19): siRNA sense strand
cugacauggaagaagauaa

SEQ ID NO: 2327663 - RNA, 19 nt, Homo sapiens
  misc_RNA (1)...(19): siRNA sense strand
agaugcagcaguugaauaa

SEQ ID NO: 2327664 - RNA, 19 nt, Homo sapiens
  misc_RNA (1)...(19): siRNA sense strand
aagaggaaauagaggaguu

SEQ ID NO: 2327665 - RNA, 19 nt, Homo sapiens
  misc_RNA (1)...(19): siRNA sense strand
aggaaauagaggaguuaga

SEQ ID NO: 2327666 - RNA, 19 nt, Homo sapiens
  misc_RNA (1)...(19): siRNA sense strand
gcugaaagacaugaggaaa

SEQ ID NO: 2327667 - RNA, 19 nt, Homo sapiens
  misc_RNA (1)...(19): siRNA sense strand
gguuaaacauggaugaaag

SEQ ID NO: 2327668 - RNA, 19 nt, Homo sapiens
  misc_RNA (1)...(19): siRNA sense strand
cagauuugccagugagaca

SEQ ID NO: 2327669 - RNA, 19 nt, Homo sapiens
  misc_RNA (1)...(19): siRNA sense strand
cagacaaacgagaugacaa

SEQ ID NO: 2327670 - RNA, 19 nt, Homo sapiens
  misc_RNA (1)...(19): siRNA sense strand
ggaugaaguauguuaugaa

SEQ ID NO: 2327671 - RNA, 19 nt, Homo sapiens
  misc_RNA (1)...(19): siRNA sense strand
gaagcagugaaguggauaa

SEQ ID NO: 2327672 - RNA, 19 nt, Homo sapiens
  misc_RNA (1)...(19): siRNA sense strand
uggauaagcugaaagacau

SEQ ID NO: 2327673 - RNA, 19 nt, Homo sapiens
  misc_RNA (1)...(19): siRNA sense strand
augaaagagagauggagaa

SEQ ID NO: 2327674 - RNA, 19 nt, Homo sapiens
  misc_RNA (1)...(19): siRNA sense strand
guucgaugaccaaggcaaa

SEQ ID NO: 2327675 - RNA, 19 nt, Homo sapiens
  misc_RNA (1)...(19): siRNA sense strand
aagaauugccagacgagaa

SEQ ID NO: 2327676 - RNA, 19 nt, Homo sapiens
  misc_RNA (1)...(19): siRNA sense strand
gcuccugaaucuuaguaaa

SEQ ID NO: 2327677 - RNA, 19 nt, Homo sapiens
  misc_RNA (1)...(19): siRNA sense strand
agacaugaggaaagaugaa

SEQ ID NO: 2327678 - RNA, 19 nt, Homo sapiens
  misc_RNA (1)...(19): siRNA sense strand
caugguagaaagugagcua

SEQ ID NO: 2327679 - RNA, 19 nt, Homo sapiens
  misc_RNA (1)...(19): siRNA sense strand
aggucagagaagaggaaau

SEQ ID NO: 2327680 - RNA, 19 nt, Homo sapiens
  misc_RNA (1)...(19): siRNA sense strand
aagaaauggaagccgauua

SEQ ID NO: 2327681 - RNA, 19 nt, Homo sapiens
  misc_RNA (1)...(19): siRNA sense strand
gcuauuacaauuuggguga

SEQ ID NO: 2327682 - RNA, 19 nt, Homo sapiens
  misc_RNA (1)...(19): siRNA sense strand
acaauaucgacgugaagaa

SEQ ID NO: 2327683 - RNA, 19 nt, Homo sapiens
  misc_RNA (1)...(19): siRNA sense strand
acuuaaagauaaagcgauc

SEQ ID NO: 2327684 - RNA, 19 nt, Homo sapiens
  misc_RNA (1)...(19): siRNA sense strand
cagugaaguggauaaguua

SEQ ID NO: 2327685 - RNA, 19 nt, Homo sapiens
  misc_RNA (1)...(19): siRNA sense strand
agggaaagaccauguauuu

SEQ ID NO: 2327686 - RNA, 19 nt, Homo sapiens
  misc_RNA (1)...(19): siRNA sense strand
aggaagacuuagagggcaa

SEQ ID NO: 2327687 - RNA, 19 nt, Homo sapiens
  misc_RNA (1)...(19): siRNA sense strand
aaagaagagaugaggaaaa

SEQ ID NO: 2327688 - RNA, 19 nt, Homo sapiens
  misc_RNA (1)...(19): siRNA sense strand
cgggagagagaucggagaa

SEQ ID NO: 2327689 - RNA, 19 nt, Homo sapiens
  misc_RNA (1)...(19): siRNA sense strand
ucucagaagaggaaguaca

SEQ ID NO: 2327690 - RNA, 19 nt, Homo sapiens
  misc_RNA (1)...(19): siRNA sense strand
gaugaggaaaagaaagaaa

SEQ ID NO: 2327691 - RNA, 19 nt, Homo sapiens
  misc_RNA (1)...(19): siRNA sense strand
gggcaaaacagaggaagaa

SEQ ID NO: 2327692 - RNA, 19 nt, Homo sapiens
  misc_RNA (1)...(19): siRNA sense strand
guaagaagguggauggcuc

SEQ ID NO: 2327693 - RNA, 19 nt, Homo sapiens
  misc_RNA (1)...(19): siRNA sense strand
acugaaagaaagaagagau

SEQ ID NO: 2327694 - RNA, 19 nt, Homo sapiens
  misc_RNA (1)...(19): siRNA sense strand
cugaaagaaagaagagaug

SEQ ID NO: 2327695 - RNA, 19 nt, Homo sapiens
  misc_RNA (1)...(19): siRNA sense strand
ggcagauuacugaggaaga

SEQ ID NO: 2327696 - RNA, 19 nt, Homo sapiens
  misc_RNA (1)...(19): siRNA sense strand
acggcagauuacugaggaa

SEQ ID NO: 2327697 - RNA, 19 nt, Homo sapiens
  misc_RNA (1)...(19): siRNA sense strand
aagaggaaguacaggcagu

SEQ ID NO: 2327698 - RNA, 19 nt, Homo sapiens
  misc_RNA (1)...(19): siRNA sense strand
augaugaaguuaaugggau

SEQ ID NO: 2327699 - RNA, 19 nt, Homo sapiens
  misc_RNA (1)...(19): siRNA sense strand
ccacaaaagguaagaaggu

SEQ ID NO: 2327700 - RNA, 19 nt, Homo sapiens
  misc_RNA (1)...(19): siRNA sense strand
cuguaaaugccuaugccau

SEQ ID NO: 2327701 - RNA, 19 nt, Homo sapiens
  misc_RNA (1)...(19): siRNA sense strand
aggcaguacaugaaucgaa

SEQ ID NO: 2327702 - RNA, 19 nt, Homo sapiens
  misc_RNA (1)...(19): siRNA sense strand
aguaagaauuccacgguga

SEQ ID NO: 2327703 - RNA, 19 nt, Homo sapiens
  misc_RNA (1)...(19): siRNA sense strand
gugaugaagaagauggaca

SEQ ID NO: 2327704 - RNA, 19 nt, Homo sapiens
  misc_RNA (1)...(19): siRNA sense strand
gguaaaucgaauggaagaa

SEQ ID NO: 2327705 - RNA, 19 nt, Homo sapiens
  misc_RNA (1)...(19): siRNA sense strand
ggacaacgagaaagaggga

SEQ ID NO: 2327706 - RNA, 19 nt, Homo sapiens
  misc_RNA (1)...(19): siRNA sense strand
acaacgagaaagagggagu

SEQ ID NO: 2327707 - RNA, 19 nt, Homo sapiens
  misc_RNA (1)...(19): siRNA sense strand
cuguggacaacgagaaaga

SEQ ID NO: 2327708 - RNA, 19 nt, Homo sapiens
  misc_RNA (1)...(19): siRNA sense strand
gcucauguucaaaguaaaa

SEQ ID NO: 2327709 - RNA, 19 nt, Homo sapiens
  misc_RNA (1)...(19): siRNA sense strand
cuaauagccaaguagacaa

SEQ ID NO: 2327710 - RNA, 19 nt, Homo sapiens
  misc_RNA (1)...(19): siRNA sense strand
aucgaauggaagaaggaaa

SEQ ID NO: 2327711 - RNA, 19 nt, Homo sapiens
  misc_RNA (1)...(19): siRNA sense strand
caguggugccagugaugaa

SEQ ID NO: 2327712 - RNA, 19 nt, Homo sapiens
  misc_RNA (1)...(19): siRNA sense strand
ugaagaagauggacagccu

SEQ ID NO: 2327713 - RNA, 19 nt, Homo sapiens
  misc_RNA (1)...(19): siRNA sense strand
gggcuguggacaacgagaa

SEQ ID NO: 2327714 - RNA, 19 nt, Homo sapiens
  misc_RNA (1)...(19): siRNA sense strand
uggaaacuuacuugaagaa

SEQ ID NO: 2327715 - RNA, 19 nt, Homo sapiens
  misc_RNA (1)...(19): siRNA sense strand
agggagugcaguauagcua

SEQ ID NO: 2327716 - RNA, 19 nt, Homo sapiens
  misc_RNA (1)...(19): siRNA sense strand
ggcuguggacaacgagaaa

SEQ ID NO: 2327717 - RNA, 19 nt, Homo sapiens
  misc_RNA (1)...(19): siRNA sense strand
cuguguaguugcuguccua

SEQ ID NO: 2327718 - RNA, 19 nt, Homo sapiens
  misc_RNA (1)...(19): siRNA sense strand
cggcaguacacaauggguu

SEQ ID NO: 2327719 - RNA, 19 nt, Homo sapiens
  misc_RNA (1)...(19): siRNA sense strand
auggguaaaucgaauggaa

SEQ ID NO: 2327720 - RNA, 19 nt, Homo sapiens
  misc_RNA (1)...(19): siRNA sense strand
cgagaaagagggagugcag

SEQ ID NO: 2327721 - RNA, 19 nt, Homo sapiens
  misc_RNA (1)...(19): siRNA sense strand
auggaaacuuacuugaaga

SEQ ID NO: 2327722 - RNA, 19 nt, Homo sapiens
  misc_RNA (1)...(19): siRNA sense strand
aguaagaauuccacgguga

SEQ ID NO: 2327723 - RNA, 19 nt, Homo sapiens
  misc_RNA (1)...(19): siRNA sense strand
gugaugaagaagauggaca

SEQ ID NO: 2327724 - RNA, 19 nt, Homo sapiens
  misc_RNA (1)...(19): siRNA sense strand
gguaaaucgaauggaagaa

SEQ ID NO: 2327725 - RNA, 19 nt, Homo sapiens
  misc_RNA (1)...(19): siRNA sense strand
ggacaacgagaaagaggga

SEQ ID NO: 2327726 - RNA, 19 nt, Homo sapiens
  misc_RNA (1)...(19): siRNA sense strand
acaacgagaaagagggagu

SEQ ID NO: 2327727 - RNA, 19 nt, Homo sapiens
  misc_RNA (1)...(19): siRNA sense strand
cuguggacaacgagaaaga

SEQ ID NO: 2327728 - RNA, 19 nt, Homo sapiens
  misc_RNA (1)...(19): siRNA sense strand
gcucauguucaaaguaaaa

SEQ ID NO: 2327729 - RNA, 19 nt, Homo sapiens
  misc_RNA (1)...(19): siRNA sense strand
cuaauagccaaguagacaa

SEQ ID NO: 2327730 - RNA, 19 nt, Homo sapiens
  misc_RNA (1)...(19): siRNA sense strand
aucgaauggaagaaggaaa

SEQ ID NO: 2327731 - RNA, 19 nt, Homo sapiens
  misc_RNA (1)...(19): siRNA sense strand
caguggugccagugaugaa

SEQ ID NO: 2327732 - RNA, 19 nt, Homo sapiens
  misc_RNA (1)...(19): siRNA sense strand
ugaagaagauggacagccu

SEQ ID NO: 2327733 - RNA, 19 nt, Homo sapiens
  misc_RNA (1)...(19): siRNA sense strand
gggcuguggacaacgagaa

SEQ ID NO: 2327734 - RNA, 19 nt, Homo sapiens
  misc_RNA (1)...(19): siRNA sense strand
uggaaacuuacuugaagaa

SEQ ID NO: 2327735 - RNA, 19 nt, Homo sapiens
  misc_RNA (1)...(19): siRNA sense strand
agggagugcaguauagcua

SEQ ID NO: 2327736 - RNA, 19 nt, Homo sapiens
  misc_RNA (1)...(19): siRNA sense strand
ggcuguggacaacgagaaa

SEQ ID NO: 2327737 - RNA, 19 nt, Homo sapiens
  misc_RNA (1)...(19): siRNA sense strand
cuguguaguugcuguccua

SEQ ID NO: 2327738 - RNA, 19 nt, Homo sapiens
  misc_RNA (1)...(19): siRNA sense strand
cggcaguacacaauggguu

SEQ ID NO: 2327739 - RNA, 19 nt, Homo sapiens
  misc_RNA (1)...(19): siRNA sense strand
auggguaaaucgaauggaa

SEQ ID NO: 2327740 - RNA, 19 nt, Homo sapiens
  misc_RNA (1)...(19): siRNA sense strand
cgagaaagagggagugcag

SEQ ID NO: 2327741 - RNA, 19 nt, Homo sapiens
  misc_RNA (1)...(19): siRNA sense strand
auggaaacuuacuugaaga

SEQ ID NO: 2327742 - RNA, 19 nt, Homo sapiens
  misc_RNA (1)...(19): siRNA sense strand
guuuagagagugaaggaaa

SEQ ID NO: 2327743 - RNA, 19 nt, Homo sapiens
  misc_RNA (1)...(19): siRNA sense strand
uguugaaauuucuggcuaa

SEQ ID NO: 2327744 - RNA, 19 nt, Homo sapiens
  misc_RNA (1)...(19): siRNA sense strand
agaugaaauauaaggguca

SEQ ID NO: 2327745 - RNA, 19 nt, Homo sapiens
  misc_RNA (1)...(19): siRNA sense strand
aggaauuacuucagucaca

SEQ ID NO: 2327746 - RNA, 19 nt, Homo sapiens
  misc_RNA (1)...(19): siRNA sense strand
aagagaguuuagagaguga

SEQ ID NO: 2327747 - RNA, 19 nt, Homo sapiens
  misc_RNA (1)...(19): siRNA sense strand
aagcaaaggaaauccggaa

SEQ ID NO: 2327748 - RNA, 19 nt, Homo sapiens
  misc_RNA (1)...(19): siRNA sense strand
gggaagacugaguucacaa

SEQ ID NO: 2327749 - RNA, 19 nt, Homo sapiens
  misc_RNA (1)...(19): siRNA sense strand
uuuagagagugaaggaaaa

SEQ ID NO: 2327750 - RNA, 19 nt, Homo sapiens
  misc_RNA (1)...(19): siRNA sense strand
cacaagauuucguaggaga

SEQ ID NO: 2327751 - RNA, 19 nt, Homo sapiens
  misc_RNA (1)...(19): siRNA sense strand
gguuaaaacuaaugcagca

SEQ ID NO: 2327752 - RNA, 19 nt, Homo sapiens
  misc_RNA (1)...(19): siRNA sense strand
acccagaagcaguggauga

SEQ ID NO: 2327753 - RNA, 19 nt, Homo sapiens
  misc_RNA (1)...(19): siRNA sense strand
gugacuuugcauugauaaa

SEQ ID NO: 2327754 - RNA, 19 nt, Homo sapiens
  misc_RNA (1)...(19): siRNA sense strand
guggaaaauauguguacaa

SEQ ID NO: 2327755 - RNA, 19 nt, Homo sapiens
  misc_RNA (1)...(19): siRNA sense strand
caaagaaagaagaaccuca

SEQ ID NO: 2327756 - RNA, 19 nt, Homo sapiens
  misc_RNA (1)...(19): siRNA sense strand
uaggcagcuucaugagaaa

SEQ ID NO: 2327757 - RNA, 19 nt, Homo sapiens
  misc_RNA (1)...(19): siRNA sense strand
uguacaaaccugucaugaa

SEQ ID NO: 2327758 - RNA, 19 nt, Homo sapiens
  misc_RNA (1)...(19): siRNA sense strand
gaguuuagagagugaagga

SEQ ID NO: 2327759 - RNA, 19 nt, Homo sapiens
  misc_RNA (1)...(19): siRNA sense strand
acaaguuagaggugagguu

SEQ ID NO: 2327760 - RNA, 19 nt, Homo sapiens
  misc_RNA (1)...(19): siRNA sense strand
cuucaaaaucucacaagaa

SEQ ID NO: 2327761 - RNA, 19 nt, Homo sapiens
  misc_RNA (1)...(19): siRNA sense strand
gucgaaaagcaaaggaaau

SEQ ID NO: 2327762 - RNA, 19 nt, Homo sapiens
  misc_RNA (1)...(19): siRNA sense strand
cuaaauccaaccagccaaa

SEQ ID NO: 2327763 - RNA, 19 nt, Homo sapiens
  misc_RNA (1)...(19): siRNA sense strand
cagaagcaguggaugagga

SEQ ID NO: 2327764 - RNA, 19 nt, Homo sapiens
  misc_RNA (1)...(19): siRNA sense strand
ccacaauggaugaugcugu

SEQ ID NO: 2327765 - RNA, 19 nt, Homo sapiens
  misc_RNA (1)...(19): siRNA sense strand
ggaugaugcuguugcgggu

SEQ ID NO: 2327766 - RNA, 19 nt, Homo sapiens
  misc_RNA (1)...(19): siRNA sense strand
agcaaaggaaauccggaaa

SEQ ID NO: 2327767 - RNA, 19 nt, Homo sapiens
  misc_RNA (1)...(19): siRNA sense strand
ugucccaagaugaaauaua

SEQ ID NO: 2327768 - RNA, 19 nt, Homo sapiens
  misc_RNA (1)...(19): siRNA sense strand
aaagaagaaccucaggaau

SEQ ID NO: 2327769 - RNA, 19 nt, Homo sapiens
  misc_RNA (1)...(19): siRNA sense strand
ugucgaaaagcaaaggaaa

SEQ ID NO: 2327770 - RNA, 19 nt, Homo sapiens
  misc_RNA (1)...(19): siRNA sense strand
gaguaagccuccaugucga

SEQ ID NO: 2327771 - RNA, 19 nt, Homo sapiens
  misc_RNA (1)...(19): siRNA sense strand
augacaucaaagagaguuu

SEQ ID NO: 2327772 - RNA, 19 nt, Homo sapiens
  misc_RNA (1)...(19): siRNA sense strand
aauccggaaagaaaggaaa

SEQ ID NO: 2327773 - RNA, 19 nt, Homo sapiens
  misc_RNA (1)...(19): siRNA sense strand
acguggaagucauggacau

SEQ ID NO: 2327774 - RNA, 19 nt, Homo sapiens
  misc_RNA (1)...(19): siRNA sense strand
ggauuuacaccauggccau

SEQ ID NO: 2327775 - RNA, 19 nt, Homo sapiens
  misc_RNA (1)...(19): siRNA sense strand
cagaagaggcgaggaggga

SEQ ID NO: 2327776 - RNA, 19 nt, Homo sapiens
  misc_RNA (1)...(19): siRNA sense strand
auuugugagacaugugaaa

SEQ ID NO: 2327777 - RNA, 19 nt, Homo sapiens
  misc_RNA (1)...(19): siRNA sense strand
cagucauacacguggaagu

SEQ ID NO: 2327778 - RNA, 19 nt, Homo sapiens
  misc_RNA (1)...(19): siRNA sense strand
ucauacacguggaagucau

SEQ ID NO: 2327779 - RNA, 19 nt, Homo sapiens
  misc_RNA (1)...(19): siRNA sense strand
cggaagaagacaaggacau

SEQ ID NO: 2327780 - RNA, 19 nt, Homo sapiens
  misc_RNA (1)...(19): siRNA sense strand
agaugaagcgccagggcaa

SEQ ID NO: 2327781 - RNA, 19 nt, Homo sapiens
  misc_RNA (1)...(19): siRNA sense strand
ggaagagccuggaggagca

SEQ ID NO: 2327782 - RNA, 19 nt, Homo sapiens
  misc_RNA (1)...(19): siRNA sense strand
agaacgaggucauaggcau

SEQ ID NO: 2327783 - RNA, 19 nt, Homo sapiens
  misc_RNA (1)...(19): siRNA sense strand
augagaaagcacuggucaa

SEQ ID NO: 2327784 - RNA, 19 nt, Homo sapiens
  misc_RNA (1)...(19): siRNA sense strand
caguggccaucgagggcaa

SEQ ID NO: 2327785 - RNA, 19 nt, Homo sapiens
  misc_RNA (1)...(19): siRNA sense strand
aagagaucgaccagaggua

SEQ ID NO: 2327786 - RNA, 19 nt, Homo sapiens
  misc_RNA (1)...(19): siRNA sense strand
ucgacagcaaagugaagaa

SEQ ID NO: 2327787 - RNA, 19 nt, Homo sapiens
  misc_RNA (1)...(19): siRNA sense strand
cgaaaugggucucggucug

SEQ ID NO: 2327788 - RNA, 19 nt, Homo sapiens
  misc_RNA (1)...(19): siRNA sense strand
ggucaaccgcgaucggaca

SEQ ID NO: 2327789 - RNA, 19 nt, Homo sapiens
  misc_RNA (1)...(19): siRNA sense strand
acaacaaauuaguggacaa

SEQ ID NO: 2327790 - RNA, 19 nt, Homo sapiens
  misc_RNA (1)...(19): siRNA sense strand
uggaagauaaugagcuaga

SEQ ID NO: 2327791 - RNA, 19 nt, Homo sapiens
  misc_RNA (1)...(19): siRNA sense strand
auaaugagcuagaggaggu

SEQ ID NO: 2327792 - RNA, 19 nt, Homo sapiens
  misc_RNA (1)...(19): siRNA sense strand
cauugaaggaauaccagaa

SEQ ID NO: 2327793 - RNA, 19 nt, Homo sapiens
  misc_RNA (1)...(19): siRNA sense strand
ccgucuggauggaaaugaa

SEQ ID NO: 2327794 - RNA, 19 nt, Homo sapiens
  misc_RNA (1)...(19): siRNA sense strand
gauucagaugauuggacua

SEQ ID NO: 2327795 - RNA, 19 nt, Homo sapiens
  misc_RNA (1)...(19): siRNA sense strand
ugaaggaauaccagaaaau

SEQ ID NO: 2327796 - RNA, 19 nt, Homo sapiens
  misc_RNA (1)...(19): siRNA sense strand
agcuaaacauggccaagaa

SEQ ID NO: 2327797 - RNA, 19 nt, Homo sapiens
  misc_RNA (1)...(19): siRNA sense strand
aguacaugauucagaugau

SEQ ID NO: 2327798 - RNA, 19 nt, Homo sapiens
  misc_RNA (1)...(19): siRNA sense strand
cccuaagccagcugaagaa

SEQ ID NO: 2327799 - RNA, 19 nt, Homo sapiens
  misc_RNA (1)...(19): siRNA sense strand
ugaaaauagaggucucaaa

SEQ ID NO: 2327800 - RNA, 19 nt, Homo sapiens
  misc_RNA (1)...(19): siRNA sense strand
agaaucucaugcagcuaaa

SEQ ID NO: 2327801 - RNA, 19 nt, Homo sapiens
  misc_RNA (1)...(19): siRNA sense strand
cgucuggauggaaaugaaa

SEQ ID NO: 2327802 - RNA, 19 nt, Homo sapiens
  misc_RNA (1)...(19): siRNA sense strand
aggugcagauccagggaaa

SEQ ID NO: 2327803 - RNA, 19 nt, Homo sapiens
  misc_RNA (1)...(19): siRNA sense strand
cuggaaaggaggagcucaa

SEQ ID NO: 2327804 - RNA, 19 nt, Homo sapiens
  misc_RNA (1)...(19): siRNA sense strand
aggugaaggagcugagcaa

SEQ ID NO: 2327805 - RNA, 19 nt, Homo sapiens
  misc_RNA (1)...(19): siRNA sense strand
ccaggaggguagcagggaa

SEQ ID NO: 2327806 - RNA, 19 nt, Homo sapiens
  misc_RNA (1)...(19): siRNA sense strand
cugaguuaguaccuggaaa

SEQ ID NO: 2327807 - RNA, 19 nt, Homo sapiens
  misc_RNA (1)...(19): siRNA sense strand
gugaaggagcugagcaaag

SEQ ID NO: 2327808 - RNA, 19 nt, Homo sapiens
  misc_RNA (1)...(19): siRNA sense strand
ccucuuugaacuggagaaa

SEQ ID NO: 2327809 - RNA, 19 nt, Homo sapiens
  misc_RNA (1)...(19): siRNA sense strand
agauuauacaggugaagga

SEQ ID NO: 2327810 - RNA, 19 nt, Homo sapiens
  misc_RNA (1)...(19): siRNA sense strand
agggagaaucuguccaauu

SEQ ID NO: 2327811 - RNA, 19 nt, Homo sapiens
  misc_RNA (1)...(19): siRNA sense strand
ccagaagacaccagcacca

SEQ ID NO: 2327812 - RNA, 19 nt, Homo sapiens
  misc_RNA (1)...(19): siRNA sense strand
gccaaggccuuucggguca

SEQ ID NO: 2327813 - RNA, 19 nt, Homo sapiens
  misc_RNA (1)...(19): siRNA sense strand
cagggagacaugaggcaca

SEQ ID NO: 2327814 - RNA, 19 nt, Homo sapiens
  misc_RNA (1)...(19): siRNA sense strand
gggaagaggagaaugggga

SEQ ID NO: 2327815 - RNA, 19 nt, Homo sapiens
  misc_RNA (1)...(19): siRNA sense strand
gagcagauuauacagguga

SEQ ID NO: 2327816 - RNA, 19 nt, Homo sapiens
  misc_RNA (1)...(19): siRNA sense strand
ugaccagguguuuggaaaa

SEQ ID NO: 2327817 - RNA, 19 nt, Homo sapiens
  misc_RNA (1)...(19): siRNA sense strand
cauugugaagaaagggaga

SEQ ID NO: 2327818 - RNA, 19 nt, Homo sapiens
  misc_RNA (1)...(19): siRNA sense strand
ggcuaaaauccaagcaaaa

SEQ ID NO: 2327819 - RNA, 19 nt, Homo sapiens
  misc_RNA (1)...(19): siRNA sense strand
guuaaagaugcuauggcua

SEQ ID NO: 2327820 - RNA, 19 nt, Homo sapiens
  misc_RNA (1)...(19): siRNA sense strand
uggcuaaaauccaagcaaa

SEQ ID NO: 2327821 - RNA, 19 nt, Homo sapiens
  misc_RNA (1)...(19): siRNA sense strand
uuaucuaggacuugcaaau

SEQ ID NO: 2327822 - RNA, 19 nt, Homo sapiens
  misc_RNA (1)...(19): siRNA sense strand
ugguucagaaguacaguaa

SEQ ID NO: 2327823 - RNA, 19 nt, Homo sapiens
  misc_RNA (1)...(19): siRNA sense strand
gauugaagcgcaaagcuga

SEQ ID NO: 2327824 - RNA, 19 nt, Homo sapiens
  misc_RNA (1)...(19): siRNA sense strand
aggacuugcaaauaagaau

SEQ ID NO: 2327825 - RNA, 19 nt, Homo sapiens
  misc_RNA (1)...(19): siRNA sense strand
ggcuaaaauccaagcaaaa

SEQ ID NO: 2327826 - RNA, 19 nt, Homo sapiens
  misc_RNA (1)...(19): siRNA sense strand
guuaaagaugcuauggcua

SEQ ID NO: 2327827 - RNA, 19 nt, Homo sapiens
  misc_RNA (1)...(19): siRNA sense strand
uggcuaaaauccaagcaaa

SEQ ID NO: 2327828 - RNA, 19 nt, Homo sapiens
  misc_RNA (1)...(19): siRNA sense strand
uuaucuaggacuugcaaau

SEQ ID NO: 2327829 - RNA, 19 nt, Homo sapiens
  misc_RNA (1)...(19): siRNA sense strand
ugguucagaaguacaguaa

SEQ ID NO: 2327830 - RNA, 19 nt, Homo sapiens
  misc_RNA (1)...(19): siRNA sense strand
gauugaagcgcaaagcuga

SEQ ID NO: 2327831 - RNA, 19 nt, Homo sapiens
  misc_RNA (1)...(19): siRNA sense strand
aggacuugcaaauaagaau

SEQ ID NO: 2327832 - RNA, 19 nt, Homo sapiens
  misc_RNA (1)...(19): siRNA sense strand
ggcuaaaauccaagcaaaa

SEQ ID NO: 2327833 - RNA, 19 nt, Homo sapiens
  misc_RNA (1)...(19): siRNA sense strand
guuaaagaugcuauggcua

SEQ ID NO: 2327834 - RNA, 19 nt, Homo sapiens
  misc_RNA (1)...(19): siRNA sense strand
uggcuaaaauccaagcaaa

SEQ ID NO: 2327835 - RNA, 19 nt, Homo sapiens
  misc_RNA (1)...(19): siRNA sense strand
uuaucuaggacuugcaaau

SEQ ID NO: 2327836 - RNA, 19 nt, Homo sapiens
  misc_RNA (1)...(19): siRNA sense strand
ugguucagaaguacaguaa

SEQ ID NO: 2327837 - RNA, 19 nt, Homo sapiens
  misc_RNA (1)...(19): siRNA sense strand
gauugaagcgcaaagcuga

SEQ ID NO: 2327838 - RNA, 19 nt, Homo sapiens
  misc_RNA (1)...(19): siRNA sense strand
aggacuugcaaauaagaau

SEQ ID NO: 2327839 - RNA, 19 nt, Homo sapiens
  misc_RNA (1)...(19): siRNA sense strand
agauaaacuucuugcggaa

SEQ ID NO: 2327840 - RNA, 19 nt, Homo sapiens
  misc_RNA (1)...(19): siRNA sense strand
gccccaaaauggagagaaa

SEQ ID NO: 2327841 - RNA, 19 nt, Homo sapiens
  misc_RNA (1)...(19): siRNA sense strand
agcaaagauugaagacaaa

SEQ ID NO: 2327842 - RNA, 19 nt, Homo sapiens
  misc_RNA (1)...(19): siRNA sense strand
gugugaacuuggugaucaa

SEQ ID NO: 2327843 - RNA, 19 nt, Homo sapiens
  misc_RNA (1)...(19): siRNA sense strand
uuggaaagggagagcauua

SEQ ID NO: 2327844 - RNA, 19 nt, Homo sapiens
  misc_RNA (1)...(19): siRNA sense strand
gggaauaagggaaaagcaa

SEQ ID NO: 2327845 - RNA, 19 nt, Homo sapiens
  misc_RNA (1)...(19): siRNA sense strand
agggagagcauuaguacaa

SEQ ID NO: 2327846 - RNA, 19 nt, Homo sapiens
  misc_RNA (1)...(19): siRNA sense strand
agcuaaggauaaacagaaa

SEQ ID NO: 2327847 - RNA, 19 nt, Homo sapiens
  misc_RNA (1)...(19): siRNA sense strand
cuguagaagcaaagauuga

SEQ ID NO: 2327848 - RNA, 19 nt, Homo sapiens
  misc_RNA (1)...(19): siRNA sense strand
uguuauucaugcagagaga

SEQ ID NO: 2327849 - RNA, 19 nt, Homo sapiens
  misc_RNA (1)...(19): siRNA sense strand
gaauaagggaaaagcaauu

SEQ ID NO: 2327850 - RNA, 19 nt, Homo sapiens
  misc_RNA (1)...(19): siRNA sense strand
cuggaagagcagggaauaa

SEQ ID NO: 2327851 - RNA, 19 nt, Homo sapiens
  misc_RNA (1)...(19): siRNA sense strand
cggaggugcuucagggacu

SEQ ID NO: 2327852 - RNA, 19 nt, Homo sapiens
  misc_RNA (1)...(19): siRNA sense strand
agagcuauguucagugcaa

SEQ ID NO: 2327853 - RNA, 19 nt, Homo sapiens
  misc_RNA (1)...(19): siRNA sense strand
gcaaacucaaccuggacaa

SEQ ID NO: 2327854 - RNA, 19 nt, Homo sapiens
  misc_RNA (1)...(19): siRNA sense strand
cauuggaaagggagagcau

SEQ ID NO: 2327855 - RNA, 19 nt, Homo sapiens
  misc_RNA (1)...(19): siRNA sense strand
aguagacgaaucagauaaa

SEQ ID NO: 2327856 - RNA, 19 nt, Homo sapiens
  misc_RNA (1)...(19): siRNA sense strand
caggauaggucgaacugga

SEQ ID NO: 2327857 - RNA, 19 nt, Homo sapiens
  misc_RNA (1)...(19): siRNA sense strand
gagccuaacugaaaggaag

SEQ ID NO: 2327858 - RNA, 19 nt, Homo sapiens
  misc_RNA (1)...(19): siRNA sense strand
gcugaaacaacccgcaaau

SEQ ID NO: 2327859 - RNA, 19 nt, Homo sapiens
  misc_RNA (1)...(19): siRNA sense strand
cggcagacgcagcucgauu

SEQ ID NO: 2327860 - RNA, 19 nt, Homo sapiens
  misc_RNA (1)...(19): siRNA sense strand
uaguagacgaaucagauaa

SEQ ID NO: 2327861 - RNA, 19 nt, Homo sapiens
  misc_RNA (1)...(19): siRNA sense strand
ccggaaaacuucuggccau

SEQ ID NO: 2327862 - RNA, 19 nt, Homo sapiens
  misc_RNA (1)...(19): siRNA sense strand
cauugaaagggcuaaagaa

SEQ ID NO: 2327863 - RNA, 19 nt, Homo sapiens
  misc_RNA (1)...(19): siRNA sense strand
ccaagaagaaggugcuacu

SEQ ID NO: 2327864 - RNA, 19 nt, Homo sapiens
  misc_RNA (1)...(19): siRNA sense strand
ggaauaagggaaaagcaau

SEQ ID NO: 2327865 - RNA, 19 nt, Homo sapiens
  misc_RNA (1)...(19): siRNA sense strand
ccaugagagaacuuguuaa

SEQ ID NO: 2327866 - RNA, 19 nt, Homo sapiens
  misc_RNA (1)...(19): siRNA sense strand
aguucagagagaaaguaaa

SEQ ID NO: 2327867 - RNA, 19 nt, Homo sapiens
  misc_RNA (1)...(19): siRNA sense strand
acacaaaauucacguccaa

SEQ ID NO: 2327868 - RNA, 19 nt, Homo sapiens
  misc_RNA (1)...(19): siRNA sense strand
aagagggagcagagcaaga

SEQ ID NO: 2327869 - RNA, 19 nt, Homo sapiens
  misc_RNA (1)...(19): siRNA sense strand
gcuuguaguagacgaauca

SEQ ID NO: 2327870 - RNA, 19 nt, Homo sapiens
  misc_RNA (1)...(19): siRNA sense strand
gcuacuauacaguggaugu

SEQ ID NO: 2327871 - RNA, 19 nt, Homo sapiens
  misc_RNA (1)...(19): siRNA sense strand
cggaaucgaccuagcaagu

SEQ ID NO: 2327872 - RNA, 19 nt, Homo sapiens
  misc_RNA (1)...(19): siRNA sense strand
aggucgaacuggaagagca

SEQ ID NO: 2327873 - RNA, 19 nt, Homo sapiens
  misc_RNA (1)...(19): siRNA sense strand
agaagagagccuaacugaa

SEQ ID NO: 2327874 - RNA, 19 nt, Homo sapiens
  misc_RNA (1)...(19): siRNA sense strand
aaguucagagagaaaguaa

SEQ ID NO: 2327875 - RNA, 19 nt, Homo sapiens
  misc_RNA (1)...(19): siRNA sense strand
agguguguguggagcauca

SEQ ID NO: 2327876 - RNA, 19 nt, Homo sapiens
  misc_RNA (1)...(19): siRNA sense strand
uucagaaacuacuaagcaa

SEQ ID NO: 2327877 - RNA, 19 nt, Homo sapiens
  misc_RNA (1)...(19): siRNA sense strand
uuaagaaaccauuggaaag

SEQ ID NO: 2327878 - RNA, 19 nt, Homo sapiens
  misc_RNA (1)...(19): siRNA sense strand
cagaacagcaagaagaaag

SEQ ID NO: 2327879 - RNA, 19 nt, Homo sapiens
  misc_RNA (1)...(19): siRNA sense strand
gcaagaagaaaguagcucu

SEQ ID NO: 2327880 - RNA, 19 nt, Homo sapiens
  misc_RNA (1)...(19): siRNA sense strand
ccacaagguccgaagagcu

SEQ ID NO: 2327881 - RNA, 19 nt, Homo sapiens
  misc_RNA (1)...(19): siRNA sense strand
agagcagggaauaagggaa

SEQ ID NO: 2327882 - RNA, 19 nt, Homo sapiens
  misc_RNA (1)...(19): siRNA sense strand
uauuaagaagcguugcuaa

SEQ ID NO: 2327883 - RNA, 19 nt, Homo sapiens
  misc_RNA (1)...(19): siRNA sense strand
gagcauuaguacaacucca

SEQ ID NO: 2327884 - RNA, 19 nt, Homo sapiens
  misc_RNA (1)...(19): siRNA sense strand
ccacaguuucagagcagga

SEQ ID NO: 2327885 - RNA, 19 nt, Homo sapiens
  misc_RNA (1)...(19): siRNA sense strand
gucagaacagcaagaagaa

SEQ ID NO: 2327886 - RNA, 19 nt, Homo sapiens
  misc_RNA (1)...(19): siRNA sense strand
acugaaaggaagagggagc

SEQ ID NO: 2327887 - RNA, 19 nt, Homo sapiens
  misc_RNA (1)...(19): siRNA sense strand
gcuaaggauaaacagaaaa

SEQ ID NO: 2327888 - RNA, 19 nt, Homo sapiens
  misc_RNA (1)...(19): siRNA sense strand
agauaaacuucuugcggaa

SEQ ID NO: 2327889 - RNA, 19 nt, Homo sapiens
  misc_RNA (1)...(19): siRNA sense strand
agcaaagauugaagacaaa

SEQ ID NO: 2327890 - RNA, 19 nt, Homo sapiens
  misc_RNA (1)...(19): siRNA sense strand
gugugaacuuggugaucaa

SEQ ID NO: 2327891 - RNA, 19 nt, Homo sapiens
  misc_RNA (1)...(19): siRNA sense strand
uuggaaagggagagcauua

SEQ ID NO: 2327892 - RNA, 19 nt, Homo sapiens
  misc_RNA (1)...(19): siRNA sense strand
gggaauaagggaaaagcaa

SEQ ID NO: 2327893 - RNA, 19 nt, Homo sapiens
  misc_RNA (1)...(19): siRNA sense strand
agggagagcauuaguacaa

SEQ ID NO: 2327894 - RNA, 19 nt, Homo sapiens
  misc_RNA (1)...(19): siRNA sense strand
agcuaaggauaaacagaaa

SEQ ID NO: 2327895 - RNA, 19 nt, Homo sapiens
  misc_RNA (1)...(19): siRNA sense strand
cuguagaagcaaagauuga

SEQ ID NO: 2327896 - RNA, 19 nt, Homo sapiens
  misc_RNA (1)...(19): siRNA sense strand
uguuauucaugcagagaga

SEQ ID NO: 2327897 - RNA, 19 nt, Homo sapiens
  misc_RNA (1)...(19): siRNA sense strand
gaauaagggaaaagcaauu

SEQ ID NO: 2327898 - RNA, 19 nt, Homo sapiens
  misc_RNA (1)...(19): siRNA sense strand
cuggaagagcagggaauaa

SEQ ID NO: 2327899 - RNA, 19 nt, Homo sapiens
  misc_RNA (1)...(19): siRNA sense strand
agagcuauguucagugcaa

SEQ ID NO: 2327900 - RNA, 19 nt, Homo sapiens
  misc_RNA (1)...(19): siRNA sense strand
gcaaacucaaccuggacaa

SEQ ID NO: 2327901 - RNA, 19 nt, Homo sapiens
  misc_RNA (1)...(19): siRNA sense strand
cauuggaaagggagagcau

SEQ ID NO: 2327902 - RNA, 19 nt, Homo sapiens
  misc_RNA (1)...(19): siRNA sense strand
aguagacgaaucagauaaa

SEQ ID NO: 2327903 - RNA, 19 nt, Homo sapiens
  misc_RNA (1)...(19): siRNA sense strand
caggauaggucgaacugga

SEQ ID NO: 2327904 - RNA, 19 nt, Homo sapiens
  misc_RNA (1)...(19): siRNA sense strand
gcugaaacaacccgcaaau

SEQ ID NO: 2327905 - RNA, 19 nt, Homo sapiens
  misc_RNA (1)...(19): siRNA sense strand
uaguagacgaaucagauaa

SEQ ID NO: 2327906 - RNA, 19 nt, Homo sapiens
  misc_RNA (1)...(19): siRNA sense strand
ccggaaaacuucuggccau

SEQ ID NO: 2327907 - RNA, 19 nt, Homo sapiens
  misc_RNA (1)...(19): siRNA sense strand
cauugaaagggcuaaagaa

SEQ ID NO: 2327908 - RNA, 19 nt, Homo sapiens
  misc_RNA (1)...(19): siRNA sense strand
ggaauaagggaaaagcaau

SEQ ID NO: 2327909 - RNA, 19 nt, Homo sapiens
  misc_RNA (1)...(19): siRNA sense strand
ccaugagagaacuuguuaa

SEQ ID NO: 2327910 - RNA, 19 nt, Homo sapiens
  misc_RNA (1)...(19): siRNA sense strand
aguucagagagaaaguaaa

SEQ ID NO: 2327911 - RNA, 19 nt, Homo sapiens
  misc_RNA (1)...(19): siRNA sense strand
acacaaaauucacguccaa

SEQ ID NO: 2327912 - RNA, 19 nt, Homo sapiens
  misc_RNA (1)...(19): siRNA sense strand
gcuuguaguagacgaauca

SEQ ID NO: 2327913 - RNA, 19 nt, Homo sapiens
  misc_RNA (1)...(19): siRNA sense strand
cggaaucgaccuagcaagu

SEQ ID NO: 2327914 - RNA, 19 nt, Homo sapiens
  misc_RNA (1)...(19): siRNA sense strand
aggucgaacuggaagagca

SEQ ID NO: 2327915 - RNA, 19 nt, Homo sapiens
  misc_RNA (1)...(19): siRNA sense strand
aaguucagagagaaaguaa

SEQ ID NO: 2327916 - RNA, 19 nt, Homo sapiens
  misc_RNA (1)...(19): siRNA sense strand
uucagaaacuacuaagcaa

SEQ ID NO: 2327917 - RNA, 19 nt, Homo sapiens
  misc_RNA (1)...(19): siRNA sense strand
uuaagaaaccauuggaaag

SEQ ID NO: 2327918 - RNA, 19 nt, Homo sapiens
  misc_RNA (1)...(19): siRNA sense strand
cagaacagcaagaagaaag

SEQ ID NO: 2327919 - RNA, 19 nt, Homo sapiens
  misc_RNA (1)...(19): siRNA sense strand
gcaagaagaaaguagcucu

SEQ ID NO: 2327920 - RNA, 19 nt, Homo sapiens
  misc_RNA (1)...(19): siRNA sense strand
ccacaagguccgaagagcu

SEQ ID NO: 2327921 - RNA, 19 nt, Homo sapiens
  misc_RNA (1)...(19): siRNA sense strand
agagcagggaauaagggaa

SEQ ID NO: 2327922 - RNA, 19 nt, Homo sapiens
  misc_RNA (1)...(19): siRNA sense strand
uauuaagaagcguugcuaa

SEQ ID NO: 2327923 - RNA, 19 nt, Homo sapiens
  misc_RNA (1)...(19): siRNA sense strand
gagcauuaguacaacucca

SEQ ID NO: 2327924 - RNA, 19 nt, Homo sapiens
  misc_RNA (1)...(19): siRNA sense strand
ccacaguuucagagcagga

SEQ ID NO: 2327925 - RNA, 19 nt, Homo sapiens
  misc_RNA (1)...(19): siRNA sense strand
gucagaacagcaagaagaa

SEQ ID NO: 2327926 - RNA, 19 nt, Homo sapiens
  misc_RNA (1)...(19): siRNA sense strand
gcuaaggauaaacagaaaa

SEQ ID NO: 2327927 - RNA, 19 nt, Homo sapiens
  misc_RNA (1)...(19): siRNA sense strand
ccauaaaugugcagaggca

SEQ ID NO: 2327928 - RNA, 19 nt, Homo sapiens
  misc_RNA (1)...(19): siRNA sense strand
aagccagaacaguggguaa

SEQ ID NO: 2327929 - RNA, 19 nt, Homo sapiens
  misc_RNA (1)...(19): siRNA sense strand
gggcagaaauucauggaag

SEQ ID NO: 2327930 - RNA, 19 nt, Homo sapiens
  misc_RNA (1)...(19): siRNA sense strand
ugggcuaaucagauagaua

SEQ ID NO: 2327931 - RNA, 19 nt, Homo sapiens
  misc_RNA (1)...(19): siRNA sense strand
gaacaguggguaaagccaa

SEQ ID NO: 2327932 - RNA, 19 nt, Homo sapiens
  misc_RNA (1)...(19): siRNA sense strand
auuaaagacauucgggaga

SEQ ID NO: 2327933 - RNA, 19 nt, Homo sapiens
  misc_RNA (1)...(19): siRNA sense strand
caucaaaccaggaaccuca

SEQ ID NO: 2327934 - RNA, 19 nt, Homo sapiens
  misc_RNA (1)...(19): siRNA sense strand
uagauauggccuugguuau

SEQ ID NO: 2327935 - RNA, 19 nt, Homo sapiens
  misc_RNA (1)...(19): siRNA sense strand
agccagaacaguggguaaa

SEQ ID NO: 2327936 - RNA, 19 nt, Homo sapiens
  misc_RNA (1)...(19): siRNA sense strand
ccauaaaugugcagaggca

SEQ ID NO: 2327937 - RNA, 19 nt, Homo sapiens
  misc_RNA (1)...(19): siRNA sense strand
aagccagaacaguggguaa

SEQ ID NO: 2327938 - RNA, 19 nt, Homo sapiens
  misc_RNA (1)...(19): siRNA sense strand
gggcagaaauucauggaag

SEQ ID NO: 2327939 - RNA, 19 nt, Homo sapiens
  misc_RNA (1)...(19): siRNA sense strand
ugggcuaaucagauagaua

SEQ ID NO: 2327940 - RNA, 19 nt, Homo sapiens
  misc_RNA (1)...(19): siRNA sense strand
gaacaguggguaaagccaa

SEQ ID NO: 2327941 - RNA, 19 nt, Homo sapiens
  misc_RNA (1)...(19): siRNA sense strand
auuaaagacauucgggaga

SEQ ID NO: 2327942 - RNA, 19 nt, Homo sapiens
  misc_RNA (1)...(19): siRNA sense strand
caucaaaccaggaaccuca

SEQ ID NO: 2327943 - RNA, 19 nt, Homo sapiens
  misc_RNA (1)...(19): siRNA sense strand
uagauauggccuugguuau

SEQ ID NO: 2327944 - RNA, 19 nt, Homo sapiens
  misc_RNA (1)...(19): siRNA sense strand
agccagaacaguggguaaa

SEQ ID NO: 2327945 - RNA, 19 nt, Homo sapiens
  misc_RNA (1)...(19): siRNA sense strand
ucaaaguggaagagagcua

SEQ ID NO: 2327946 - RNA, 19 nt, Homo sapiens
  misc_RNA (1)...(19): siRNA sense strand
ccaacaagcucuucggaga

SEQ ID NO: 2327947 - RNA, 19 nt, Homo sapiens
  misc_RNA (1)...(19): siRNA sense strand
gcagaauaugagagagaca

SEQ ID NO: 2327948 - RNA, 19 nt, Homo sapiens
  misc_RNA (1)...(19): siRNA sense strand
gggcagugggagaagaaau

SEQ ID NO: 2327949 - RNA, 19 nt, Homo sapiens
  misc_RNA (1)...(19): siRNA sense strand
uugcagaauaugagagaga

SEQ ID NO: 2327950 - RNA, 19 nt, Homo sapiens
  misc_RNA (1)...(19): siRNA sense strand
auacagaugaugaggcaau

SEQ ID NO: 2327951 - RNA, 19 nt, Homo sapiens
  misc_RNA (1)...(19): siRNA sense strand
cguugagaaccaugggaau

SEQ ID NO: 2327952 - RNA, 19 nt, Homo sapiens
  misc_RNA (1)...(19): siRNA sense strand
ccauacagaugaugaggca

SEQ ID NO: 2327953 - RNA, 19 nt, Homo sapiens
  misc_RNA (1)...(19): siRNA sense strand
caaaugaaaucgauggucu

SEQ ID NO: 2327954 - RNA, 19 nt, Homo sapiens
  misc_RNA (1)...(19): siRNA sense strand
uggaggauguacaggccaa

SEQ ID NO: 2327955 - RNA, 19 nt, Homo sapiens
  misc_RNA (1)...(19): siRNA sense strand
aggaauauuuagaugccau

SEQ ID NO: 2327956 - RNA, 19 nt, Homo sapiens
  misc_RNA (1)...(19): siRNA sense strand
ccaaacaagaauacauaca

SEQ ID NO: 2327957 - RNA, 19 nt, Homo sapiens
  misc_RNA (1)...(19): siRNA sense strand
agagaacaccacaggaaaa

SEQ ID NO: 2327958 - RNA, 19 nt, Homo sapiens
  misc_RNA (1)...(19): siRNA sense strand
aggcaaagaucuaagcaug

SEQ ID NO: 2327959 - RNA, 19 nt, Homo sapiens
  misc_RNA (1)...(19): siRNA sense strand
cagugggagaagaaauuua

SEQ ID NO: 2327960 - RNA, 19 nt, Homo sapiens
  misc_RNA (1)...(19): siRNA sense strand
ccuggaaauaccauacaaa

SEQ ID NO: 2327961 - RNA, 19 nt, Homo sapiens
  misc_RNA (1)...(19): siRNA sense strand
uucaaagggcagugggaga

SEQ ID NO: 2327962 - RNA, 19 nt, Homo sapiens
  misc_RNA (1)...(19): siRNA sense strand
ugauuguguugcugccaaa

SEQ ID NO: 2327963 - RNA, 19 nt, Homo sapiens
  misc_RNA (1)...(19): siRNA sense strand
acuccuggguggaaaguca

SEQ ID NO: 2327964 - RNA, 19 nt, Homo sapiens
  misc_RNA (1)...(19): siRNA sense strand
ugggaaugguggauaucuu

SEQ ID NO: 2327965 - RNA, 19 nt, Homo sapiens
  misc_RNA (1)...(19): siRNA sense strand
cagaaaaucaaaagagaac

SEQ ID NO: 2327966 - RNA, 19 nt, Homo sapiens
  misc_RNA (1)...(19): siRNA sense strand
aaggacacguugagaacca

SEQ ID NO: 2327967 - RNA, 19 nt, Homo sapiens
  misc_RNA (1)...(19): siRNA sense strand
uguugauaggucaggaaau

SEQ ID NO: 2327968 - RNA, 19 nt, Homo sapiens
  misc_RNA (1)...(19): siRNA sense strand
gguucaaaguggaagagag

SEQ ID NO: 2327969 - RNA, 19 nt, Homo sapiens
  misc_RNA (1)...(19): siRNA sense strand
gcuaugaccucaaggacac

SEQ ID NO: 2327970 - RNA, 19 nt, Homo sapiens
  misc_RNA (1)...(19): siRNA sense strand
aagaaagucgaaagaagau

SEQ ID NO: 2327971 - RNA, 19 nt, Homo sapiens
  misc_RNA (1)...(19): siRNA sense strand
aaauugauggaauggacaa

SEQ ID NO: 2327972 - RNA, 19 nt, Homo sapiens
  misc_RNA (1)...(19): siRNA sense strand
caacagauuaagaagguuc

SEQ ID NO: 2327973 - RNA, 19 nt, Homo sapiens
  misc_RNA (1)...(19): siRNA sense strand
ugaucaagucacagagaac

SEQ ID NO: 2327974 - RNA, 19 nt, Homo sapiens
  misc_RNA (1)...(19): siRNA sense strand
augcauaugagcugaagau

SEQ ID NO: 2327975 - RNA, 19 nt, Homo sapiens
  misc_RNA (1)...(19): siRNA sense strand
gguucuucacuuugaucaa

SEQ ID NO: 2327976 - RNA, 19 nt, Homo sapiens
  misc_RNA (1)...(19): siRNA sense strand
uuaccagaccaguguggaa

SEQ ID NO: 2327977 - RNA, 19 nt, Homo sapiens
  misc_RNA (1)...(19): siRNA sense strand
aagaauacauacaagucca

SEQ ID NO: 2327978 - RNA, 19 nt, Homo sapiens
  misc_RNA (1)...(19): siRNA sense strand
gaaauugauggaauggaca

SEQ ID NO: 2327979 - RNA, 19 nt, Homo sapiens
  misc_RNA (1)...(19): siRNA sense strand
aggcaaaauaagaccaaca

SEQ ID NO: 2327980 - RNA, 19 nt, Homo sapiens
  misc_RNA (1)...(19): siRNA sense strand
uggaagagguagaggacga

SEQ ID NO: 2327981 - RNA, 19 nt, Homo sapiens
  misc_RNA (1)...(19): siRNA sense strand
guaugagcuugauggaaaa

SEQ ID NO: 2327982 - RNA, 19 nt, Homo sapiens
  misc_RNA (1)...(19): siRNA sense strand
cucuguagugaaaggguua

SEQ ID NO: 2327983 - RNA, 19 nt, Homo sapiens
  misc_RNA (1)...(19): siRNA sense strand
acgagguggaagagguaga

SEQ ID NO: 2327984 - RNA, 19 nt, Homo sapiens
  misc_RNA (1)...(19): siRNA sense strand
uggacggauaagagauauu

SEQ ID NO: 2327985 - RNA, 19 nt, Homo sapiens
  misc_RNA (1)...(19): siRNA sense strand
ggguauucaucgggagacu

SEQ ID NO: 2327986 - RNA, 19 nt, Homo sapiens
  misc_RNA (1)...(19): siRNA sense strand
aaggguuacuauugaacau

SEQ ID NO: 2327987 - RNA, 19 nt, Homo sapiens
  misc_RNA (1)...(19): siRNA sense strand
cuacagaaguuguggguac

SEQ ID NO: 2327988 - RNA, 19 nt, Homo sapiens
  misc_RNA (1)...(19): siRNA sense strand
acagaugggcacaggccaa

SEQ ID NO: 2327989 - RNA, 19 nt, Homo sapiens
  misc_RNA (1)...(19): siRNA sense strand
gccaaaagguauugccaga

SEQ ID NO: 2327990 - RNA, 19 nt, Homo sapiens
  misc_RNA (1)...(19): siRNA sense strand
ggucaguaaugaugggccu

SEQ ID NO: 2327991 - RNA, 19 nt, Homo sapiens
  misc_RNA (1)...(19): siRNA sense strand
uuucagaggucauggguac

SEQ ID NO: 2327992 - RNA, 19 nt, Homo sapiens
  misc_RNA (1)...(19): siRNA sense strand
gggcagguuaucuggguca

SEQ ID NO: 2327993 - RNA, 19 nt, Homo sapiens
  misc_RNA (1)...(19): siRNA sense strand
gguaacaacuacagagugg

SEQ ID NO: 2327994 - RNA, 19 nt, Homo sapiens
  misc_RNA (1)...(19): siRNA sense strand
cugcuggagagguggucaa

SEQ ID NO: 2327995 - RNA, 19 nt, Homo sapiens
  misc_RNA (1)...(19): siRNA sense strand
acggaaaguauuacagguu

SEQ ID NO: 2327996 - RNA, 19 nt, Homo sapiens
  misc_RNA (1)...(19): siRNA sense strand
uguccaggguauugaaagu

SEQ ID NO: 2327997 - RNA, 19 nt, Homo sapiens
  misc_RNA (1)...(19): siRNA sense strand
ccucaaggucaguaaugau

SEQ ID NO: 2327998 - RNA, 19 nt, Homo sapiens
  misc_RNA (1)...(19): siRNA sense strand
ggccuuggauggagggaac

SEQ ID NO: 2327999 - RNA, 19 nt, Homo sapiens
  misc_RNA (1)...(19): siRNA sense strand
aaggaagccugcauggaga

SEQ ID NO: 2328000 - RNA, 19 nt, Homo sapiens
  misc_RNA (1)...(19): siRNA sense strand
cugcagagagcacagguau

SEQ ID NO: 2328001 - RNA, 19 nt, Homo sapiens
  misc_RNA (1)...(19): siRNA sense strand
agacagaaauggaaggaga

SEQ ID NO: 2328002 - RNA, 19 nt, Homo sapiens
  misc_RNA (1)...(19): siRNA sense strand
ccauguaauugcugagaca

SEQ ID NO: 2328003 - RNA, 19 nt, Homo sapiens
  misc_RNA (1)...(19): siRNA sense strand
aaauggaaggagaaggaaa

SEQ ID NO: 2328004 - RNA, 19 nt, Homo sapiens
  misc_RNA (1)...(19): siRNA sense strand
aagcagaagcauccagaua

SEQ ID NO: 2328005 - RNA, 19 nt, Homo sapiens
  misc_RNA (1)...(19): siRNA sense strand
aaauugaaauggacgggaa

SEQ ID NO: 2328006 - RNA, 19 nt, Homo sapiens
  misc_RNA (1)...(19): siRNA sense strand
acuaacagcuggagagaac

SEQ ID NO: 2328007 - RNA, 19 nt, Homo sapiens
  misc_RNA (1)...(19): siRNA sense strand
agaaauggaaggagaagga

SEQ ID NO: 2328008 - RNA, 19 nt, Homo sapiens
  misc_RNA (1)...(19): siRNA sense strand
aggugaaaguauugagaac

SEQ ID NO: 2328009 - RNA, 19 nt, Homo sapiens
  misc_RNA (1)...(19): siRNA sense strand
ugaugaggaguaugagaaa

SEQ ID NO: 2328010 - RNA, 19 nt, Homo sapiens
  misc_RNA (1)...(19): siRNA sense strand
aggaaaucagaguggguau

SEQ ID NO: 2328011 - RNA, 19 nt, Homo sapiens
  misc_RNA (1)...(19): siRNA sense strand
gggaagaugaugacgacga

SEQ ID NO: 2328012 - RNA, 19 nt, Homo sapiens
  misc_RNA (1)...(19): siRNA sense strand
aggaaaugaaacuggugaa

SEQ ID NO: 2328013 - RNA, 19 nt, Homo sapiens
  misc_RNA (1)...(19): siRNA sense strand
aauggaaggagaaggaaau

SEQ ID NO: 2328014 - RNA, 19 nt, Homo sapiens
  misc_RNA (1)...(19): siRNA sense strand
uaaagaaacccaauggaga

SEQ ID NO: 2328015 - RNA, 19 nt, Homo sapiens
  misc_RNA (1)...(19): siRNA sense strand
ccuaugaauucaagaguac

SEQ ID NO: 2328016 - RNA, 19 nt, Homo sapiens
  misc_RNA (1)...(19): siRNA sense strand
gcgagaaauggcuaggauu

SEQ ID NO: 2328017 - RNA, 19 nt, Homo sapiens
  misc_RNA (1)...(19): siRNA sense strand
uggagaugagugagaagaa

SEQ ID NO: 2328018 - RNA, 19 nt, Homo sapiens
  misc_RNA (1)...(19): siRNA sense strand
cagacgaauaugaugacaa

SEQ ID NO: 2328019 - RNA, 19 nt, Homo sapiens
  misc_RNA (1)...(19): siRNA sense strand
ccugaaagauucugugacu

SEQ ID NO: 2328020 - RNA, 19 nt, Homo sapiens
  misc_RNA (1)...(19): siRNA sense strand
ggagaggcgcauugcagaa

SEQ ID NO: 2328021 - RNA, 19 nt, Homo sapiens
  misc_RNA (1)...(19): siRNA sense strand
guaauugcugagacagaaa

SEQ ID NO: 2328022 - RNA, 19 nt, Homo sapiens
  misc_RNA (1)...(19): siRNA sense strand
uaauugaugaugaggagua

SEQ ID NO: 2328023 - RNA, 19 nt, Homo sapiens
  misc_RNA (1)...(19): siRNA sense strand
ggaaaugaaacuggugaau

SEQ ID NO: 2328024 - RNA, 19 nt, Homo sapiens
  misc_RNA (1)...(19): siRNA sense strand
aauugaaauggacgggaaa

SEQ ID NO: 2328025 - RNA, 19 nt, Homo sapiens
  misc_RNA (1)...(19): siRNA sense strand
aucuggagcucgaggaaau

SEQ ID NO: 2328026 - RNA, 19 nt, Homo sapiens
  misc_RNA (1)...(19): siRNA sense strand
gacagaaauggaaggagaa

SEQ ID NO: 2328027 - RNA, 19 nt, Homo sapiens
  misc_RNA (1)...(19): siRNA sense strand
ugaauuuacugaaggaacu

SEQ ID NO: 2328028 - RNA, 19 nt, Homo sapiens
  misc_RNA (1)...(19): siRNA sense strand
gagaacaucuggagcucga

SEQ ID NO: 2328029 - RNA, 19 nt, Homo sapiens
  misc_RNA (1)...(19): siRNA sense strand
uggugaauguacuggauca

SEQ ID NO: 2328030 - RNA, 19 nt, Homo sapiens
  misc_RNA (1)...(19): siRNA sense strand
gcaucauggaggugaaagu

SEQ ID NO: 2328031 - RNA, 19 nt, Homo sapiens
  misc_RNA (1)...(19): siRNA sense strand
caggaagguucaugcuaga

SEQ ID NO: 2328032 - RNA, 19 nt, Homo sapiens
  misc_RNA (1)...(19): siRNA sense strand
ucaagaguacuguggacaa

SEQ ID NO: 2328033 - RNA, 19 nt, Homo sapiens
  misc_RNA (1)...(19): siRNA sense strand
caucagugccagacacauu

SEQ ID NO: 2328034 - RNA, 19 nt, Homo sapiens
  misc_RNA (1)...(19): siRNA sense strand
aggagaaggaaaugaaacu

SEQ ID NO: 2328035 - RNA, 19 nt, Homo sapiens
  misc_RNA (1)...(19): siRNA sense strand
cgagaaauggcuaggauuc

SEQ ID NO: 2328036 - RNA, 19 nt, Homo sapiens
  misc_RNA (1)...(19): siRNA sense strand
ugcuagagcuacuguguau

SEQ ID NO: 2328037 - RNA, 19 nt, Homo sapiens
  misc_RNA (1)...(19): siRNA sense strand
uggaagugaucauugaaga

SEQ ID NO: 2328038 - RNA, 19 nt, Homo sapiens
  misc_RNA (1)...(19): siRNA sense strand
cgacgaugaauguggggaa

SEQ ID NO: 2328039 - RNA, 19 nt, Homo sapiens
  misc_RNA (1)...(19): siRNA sense strand
guguuuaagccuggugaua

SEQ ID NO: 2328040 - RNA, 19 nt, Homo sapiens
  misc_RNA (1)...(19): siRNA sense strand
gguaauugaugaugaggag

SEQ ID NO: 2328041 - RNA, 19 nt, Homo sapiens
  misc_RNA (1)...(19): siRNA sense strand
cuucacaauaacaggaaaa

SEQ ID NO: 2328042 - RNA, 19 nt, Homo sapiens
  misc_RNA (1)...(19): siRNA sense strand
guaagaaaggggugauuuu

SEQ ID NO: 2328043 - RNA, 19 nt, Homo sapiens
  misc_RNA (1)...(19): siRNA sense strand
acaaggaagauuaagcauu

SEQ ID NO: 2328044 - RNA, 19 nt, Homo sapiens
  misc_RNA (1)...(19): siRNA sense strand
cuucuaagacugaaauuga

SEQ ID NO: 2328045 - RNA, 19 nt, Homo sapiens
  misc_RNA (1)...(19): siRNA sense strand
gaaaauaccuguuuggcca

SEQ ID NO: 2328046 - RNA, 19 nt, Homo sapiens
  misc_RNA (1)...(19): siRNA sense strand
ucaccauugcagacgaaua

SEQ ID NO: 2328047 - RNA, 19 nt, Homo sapiens
  misc_RNA (1)...(19): siRNA sense strand
ggggaugauuauugaacau

SEQ ID NO: 2328048 - RNA, 19 nt, Homo sapiens
  misc_RNA (1)...(19): siRNA sense strand
gggaccaagaugaugaaga

SEQ ID NO: 2328049 - RNA, 19 nt, Homo sapiens
  misc_RNA (1)...(19): siRNA sense strand
gcagcaacgcggugaaugu

SEQ ID NO: 2328050 - RNA, 19 nt, Homo sapiens
  misc_RNA (1)...(19): siRNA sense strand
gacaaaauugcuagagcua

SEQ ID NO: 2328051 - RNA, 19 nt, Homo sapiens
  misc_RNA (1)...(19): siRNA sense strand
ccaagacaacugugaggau

SEQ ID NO: 2328052 - RNA, 19 nt, Homo sapiens
  misc_RNA (1)...(19): siRNA sense strand
gauuauugaacaugaagga

SEQ ID NO: 2328053 - RNA, 19 nt, Homo sapiens
  misc_RNA (1)...(19): siRNA sense strand
auguaauugcugagacaga

SEQ ID NO: 2328054 - RNA, 19 nt, Homo sapiens
  misc_RNA (1)...(19): siRNA sense strand
guguuuauguggugccuga

SEQ ID NO: 2328055 - RNA, 19 nt, Homo sapiens
  misc_RNA (1)...(19): siRNA sense strand
uuauugaacaugaaggaga

SEQ ID NO: 2328056 - RNA, 19 nt, Homo sapiens
  misc_RNA (1)...(19): siRNA sense strand
caaaauugcuagagcuacu

SEQ ID NO: 2328057 - RNA, 19 nt, Homo sapiens
  misc_RNA (1)...(19): siRNA sense strand
agauuaagcauuugcgugu

SEQ ID NO: 2328058 - RNA, 19 nt, Homo sapiens
  misc_RNA (1)...(19): siRNA sense strand
agaagauggcauacuggaa

SEQ ID NO: 2328059 - RNA, 19 nt, Homo sapiens
  misc_RNA (1)...(19): siRNA sense strand
ccaagaugaugaagaagcu

SEQ ID NO: 2328060 - RNA, 19 nt, Homo sapiens
  misc_RNA (1)...(19): siRNA sense strand
agaggauggcacagcaaau

SEQ ID NO: 2328061 - RNA, 19 nt, Homo sapiens
  misc_RNA (1)...(19): siRNA sense strand
gcaucaaggcagagauaga

SEQ ID NO: 2328062 - RNA, 19 nt, Homo sapiens
  misc_RNA (1)...(19): siRNA sense strand
agaaagagauucagggcca

SEQ ID NO: 2328063 - RNA, 19 nt, Homo sapiens
  misc_RNA (1)...(19): siRNA sense strand
gggagauggcugugagaga

SEQ ID NO: 2328064 - RNA, 19 nt, Homo sapiens
  misc_RNA (1)...(19): siRNA sense strand
cggcagagaacgagagcga

SEQ ID NO: 2328065 - RNA, 19 nt, Homo sapiens
  misc_RNA (1)...(19): siRNA sense strand
gcagagaacgagagcgaga

SEQ ID NO: 2328066 - RNA, 19 nt, Homo sapiens
  misc_RNA (1)...(19): siRNA sense strand
aggagaaggccaaggauga

SEQ ID NO: 2328067 - RNA, 19 nt, Homo sapiens
  misc_RNA (1)...(19): siRNA sense strand
cgaacugacucgagaggca

SEQ ID NO: 2328068 - RNA, 19 nt, Homo sapiens
  misc_RNA (1)...(19): siRNA sense strand
gcugagaaguggcaggaga

SEQ ID NO: 2328069 - RNA, 19 nt, Homo sapiens
  misc_RNA (1)...(19): siRNA sense strand
ggagaagcuuacugcgcua

SEQ ID NO: 2328070 - RNA, 19 nt, Homo sapiens
  misc_RNA (1)...(19): siRNA sense strand
ggaugagagagaagaccaa

SEQ ID NO: 2328071 - RNA, 19 nt, Homo sapiens
  misc_RNA (1)...(19): siRNA sense strand
ccguggaaggcaagagaau

SEQ ID NO: 2328072 - RNA, 19 nt, Homo sapiens
  misc_RNA (1)...(19): siRNA sense strand
aagacaacaaggagaagaa

SEQ ID NO: 2328073 - RNA, 19 nt, Homo sapiens
  misc_RNA (1)...(19): siRNA sense strand
gaaagagggaggaggagga

SEQ ID NO: 2328074 - RNA, 19 nt, Homo sapiens
  misc_RNA (1)...(19): siRNA sense strand
agacggacaucguggccua

SEQ ID NO: 2328075 - RNA, 19 nt, Homo sapiens
  misc_RNA (1)...(19): siRNA sense strand
aggcaucaaggcagagaua

SEQ ID NO: 2328076 - RNA, 19 nt, Homo sapiens
  misc_RNA (1)...(19): siRNA sense strand
uggaagagaugcagggaug

SEQ ID NO: 2328077 - RNA, 19 nt, Homo sapiens
  misc_RNA (1)...(19): siRNA sense strand
aggccaaggaugaggcaga

SEQ ID NO: 2328078 - RNA, 19 nt, Homo sapiens
  misc_RNA (1)...(19): siRNA sense strand
cgggagaaggagcgaaaga

SEQ ID NO: 2328079 - RNA, 19 nt, Homo sapiens
  misc_RNA (1)...(19): siRNA sense strand
agagaaagagggaggagga

SEQ ID NO: 2328080 - RNA, 19 nt, Homo sapiens
  misc_RNA (1)...(19): siRNA sense strand
acaaagacuggcuggacaa

SEQ ID NO: 2328081 - RNA, 19 nt, Homo sapiens
  misc_RNA (1)...(19): siRNA sense strand
cguacgagcugcagcgcuu

SEQ ID NO: 2328082 - RNA, 19 nt, Homo sapiens
  misc_RNA (1)...(19): siRNA sense strand
cugagaaguggcaggagaa

SEQ ID NO: 2328083 - RNA, 19 nt, Homo sapiens
  misc_RNA (1)...(19): siRNA sense strand
gacuaugcuccgagacaaa

SEQ ID NO: 2328084 - RNA, 19 nt, Homo sapiens
  misc_RNA (1)...(19): siRNA sense strand
augacauuguggacggaaa

SEQ ID NO: 2328085 - RNA, 19 nt, Homo sapiens
  misc_RNA (1)...(19): siRNA sense strand
guguggagacagaagacaa

SEQ ID NO: 2328086 - RNA, 19 nt, Homo sapiens
  misc_RNA (1)...(19): siRNA sense strand
gaggagaaguucagggccu

SEQ ID NO: 2328087 - RNA, 19 nt, Homo sapiens
  misc_RNA (1)...(19): siRNA sense strand
cgauguggaagaugagauu

SEQ ID NO: 2328088 - RNA, 19 nt, Homo sapiens
  misc_RNA (1)...(19): siRNA sense strand
gacucuggguggaggagaa

SEQ ID NO: 2328089 - RNA, 19 nt, Homo sapiens
  misc_RNA (1)...(19): siRNA sense strand
cuucaaggcuguccgggaa

SEQ ID NO: 2328090 - RNA, 19 nt, Homo sapiens
  misc_RNA (1)...(19): siRNA sense strand
agagaacgagagcgagaaa

SEQ ID NO: 2328091 - RNA, 19 nt, Homo sapiens
  misc_RNA (1)...(19): siRNA sense strand
cgaaagagaaagagggagg

SEQ ID NO: 2328092 - RNA, 19 nt, Homo sapiens
  misc_RNA (1)...(19): siRNA sense strand
gagaugagcucguggcuac

SEQ ID NO: 2328093 - RNA, 19 nt, Homo sapiens
  misc_RNA (1)...(19): siRNA sense strand
agaaguggcaggagaagau

SEQ ID NO: 2328094 - RNA, 19 nt, Homo sapiens
  misc_RNA (1)...(19): siRNA sense strand
uggagaaggcggagcacga

SEQ ID NO: 2328095 - RNA, 19 nt, Homo sapiens
  misc_RNA (1)...(19): siRNA sense strand
agagagaagaccaaaguca

SEQ ID NO: 2328096 - RNA, 19 nt, Homo sapiens
  misc_RNA (1)...(19): siRNA sense strand
ugaaggagcuggcuggaga

SEQ ID NO: 2328097 - RNA, 19 nt, Homo sapiens
  misc_RNA (1)...(19): siRNA sense strand
agaggaggcacaagaagaa

SEQ ID NO: 2328098 - RNA, 19 nt, Homo sapiens
  misc_RNA (1)...(19): siRNA sense strand
cuggagagcuggcuggaga

SEQ ID NO: 2328099 - RNA, 19 nt, Homo sapiens
  misc_RNA (1)...(19): siRNA sense strand
gcgucaacauccugcucaa

SEQ ID NO: 2328100 - RNA, 19 nt, Homo sapiens
  misc_RNA (1)...(19): siRNA sense strand
uugagaagccagagcugaa

SEQ ID NO: 2328101 - RNA, 19 nt, Homo sapiens
  misc_RNA (1)...(19): siRNA sense strand
ggaugggcgagcaggaauu

SEQ ID NO: 2328102 - RNA, 19 nt, Homo sapiens
  misc_RNA (1)...(19): siRNA sense strand
gccuggagaacguggacaa

SEQ ID NO: 2328103 - RNA, 19 nt, Homo sapiens
  misc_RNA (1)...(19): siRNA sense strand
caagaagaaucaagacgca

SEQ ID NO: 2328104 - RNA, 19 nt, Homo sapiens
  misc_RNA (1)...(19): siRNA sense strand
gaugagauuuuguggguga

SEQ ID NO: 2328105 - RNA, 19 nt, Homo sapiens
  misc_RNA (1)...(19): siRNA sense strand
gggcuuacaggauggaaaa

SEQ ID NO: 2328106 - RNA, 19 nt, Homo sapiens
  misc_RNA (1)...(19): siRNA sense strand
agauggaggccuucgggaa

SEQ ID NO: 2328107 - RNA, 19 nt, Homo sapiens
  misc_RNA (1)...(19): siRNA sense strand
ggguggaggagaaggagca

SEQ ID NO: 2328108 - RNA, 19 nt, Homo sapiens
  misc_RNA (1)...(19): siRNA sense strand
gggccguggaggagaaguu

SEQ ID NO: 2328109 - RNA, 19 nt, Homo sapiens
  misc_RNA (1)...(19): siRNA sense strand
acaucaguguggagacaga

SEQ ID NO: 2328110 - RNA, 19 nt, Homo sapiens
  misc_RNA (1)...(19): siRNA sense strand
cagcuggagagauggacua

SEQ ID NO: 2328111 - RNA, 19 nt, Homo sapiens
  misc_RNA (1)...(19): siRNA sense strand
acuacgagcaugugacuau

SEQ ID NO: 2328112 - RNA, 19 nt, Homo sapiens
  misc_RNA (1)...(19): siRNA sense strand
acagaagacaacaaggaga

SEQ ID NO: 2328113 - RNA, 19 nt, Homo sapiens
  misc_RNA (1)...(19): siRNA sense strand
caacccagggaaagaguau

SEQ ID NO: 2328114 - RNA, 19 nt, Homo sapiens
  misc_RNA (1)...(19): siRNA sense strand
gagauggcugugagagaga

SEQ ID NO: 2328115 - RNA, 19 nt, Homo sapiens
  misc_RNA (1)...(19): siRNA sense strand
acaugaugggccaggagaa

SEQ ID NO: 2328116 - RNA, 19 nt, Homo sapiens
  misc_RNA (1)...(19): siRNA sense strand
ccagaugagaagucaauca

SEQ ID NO: 2328117 - RNA, 19 nt, Homo sapiens
  misc_RNA (1)...(19): siRNA sense strand
ccgaagacgugaaugugga

SEQ ID NO: 2328118 - RNA, 19 nt, Homo sapiens
  misc_RNA (1)...(19): siRNA sense strand
cuucugcaacccagggaaa

SEQ ID NO: 2328119 - RNA, 19 nt, Homo sapiens
  misc_RNA (1)...(19): siRNA sense strand
aguugguggccgaggguca

SEQ ID NO: 2328120 - RNA, 19 nt, Homo sapiens
  misc_RNA (1)...(19): siRNA sense strand
ugagagagaaggaggugga

SEQ ID NO: 2328121 - RNA, 19 nt, Homo sapiens
  misc_RNA (1)...(19): siRNA sense strand
ucgacgaaguugagagccu

SEQ ID NO: 2328122 - RNA, 19 nt, Homo sapiens
  misc_RNA (1)...(19): siRNA sense strand
agacaucaguguggagaca

SEQ ID NO: 2328123 - RNA, 19 nt, Homo sapiens
  misc_RNA (1)...(19): siRNA sense strand
ugucggagaagcugagaga

SEQ ID NO: 2328124 - RNA, 19 nt, Homo sapiens
  misc_RNA (1)...(19): siRNA sense strand
uggccugggaggagcgauu

SEQ ID NO: 2328125 - RNA, 19 nt, Homo sapiens
  misc_RNA (1)...(19): siRNA sense strand
uagcaggaguggaggaccu

SEQ ID NO: 2328126 - RNA, 19 nt, Homo sapiens
  misc_RNA (1)...(19): siRNA sense strand
ggcuggacaagguggacaa

SEQ ID NO: 2328127 - RNA, 19 nt, Homo sapiens
  misc_RNA (1)...(19): siRNA sense strand
acacaaagcaccuggagga

SEQ ID NO: 2328128 - RNA, 19 nt, Homo sapiens
  misc_RNA (1)...(19): siRNA sense strand
ucacagaccaccugggaca

SEQ ID NO: 2328129 - RNA, 19 nt, Homo sapiens
  misc_RNA (1)...(19): siRNA sense strand
agacuggacguguggacaa

SEQ ID NO: 2328130 - RNA, 19 nt, Homo sapiens
  misc_RNA (1)...(19): siRNA sense strand
aggagacaguccaggccaa

SEQ ID NO: 2328131 - RNA, 19 nt, Homo sapiens
  misc_RNA (1)...(19): siRNA sense strand
uggaggaggagaugcggaa

SEQ ID NO: 2328132 - RNA, 19 nt, Homo sapiens
  misc_RNA (1)...(19): siRNA sense strand
ccaaagagccgggagcuga

SEQ ID NO: 2328133 - RNA, 19 nt, Homo sapiens
  misc_RNA (1)...(19): siRNA sense strand
gggcaagacuggacgugug

SEQ ID NO: 2328134 - RNA, 19 nt, Homo sapiens
  misc_RNA (1)...(19): siRNA sense strand
gcuaugaagaugugcgcgu

SEQ ID NO: 2328135 - RNA, 19 nt, Homo sapiens
  misc_RNA (1)...(19): siRNA sense strand
guguaaugcaugugggaaa

SEQ ID NO: 2328136 - RNA, 19 nt, Homo sapiens
  misc_RNA (1)...(19): siRNA sense strand
gggaauaauuucaggagga

SEQ ID NO: 2328137 - RNA, 19 nt, Homo sapiens
  misc_RNA (1)...(19): siRNA sense strand
auguaaugcaugugggaaa

SEQ ID NO: 2328138 - RNA, 19 nt, Homo sapiens
  misc_RNA (1)...(19): siRNA sense strand
auuuaaugcaugugggaaa

SEQ ID NO: 2328139 - RNA, 19 nt, Homo sapiens
  misc_RNA (1)...(19): siRNA sense strand
augcaaugaaugugggaaa

SEQ ID NO: 2328140 - RNA, 19 nt, Homo sapiens
  misc_RNA (1)...(19): siRNA sense strand
augcaaugaaugugggaaa

SEQ ID NO: 2328141 - RNA, 19 nt, Homo sapiens
  misc_RNA (1)...(19): siRNA sense strand
auguaaugaaugugggaaa

SEQ ID NO: 2328142 - RNA, 19 nt, Homo sapiens
  misc_RNA (1)...(19): siRNA sense strand
aggugauaaaggagagaaa

SEQ ID NO: 2328143 - RNA, 19 nt, Homo sapiens
  misc_RNA (1)...(19): siRNA sense strand
gugauaaaggagagaaaca

SEQ ID NO: 2328144 - RNA, 19 nt, Homo sapiens
  misc_RNA (1)...(19): siRNA sense strand
ugacuaaggaacaagguaa

SEQ ID NO: 2328145 - RNA, 19 nt, Homo sapiens
  misc_RNA (1)...(19): siRNA sense strand
agagaaugcagaagagaau

SEQ ID NO: 2328146 - RNA, 19 nt, Homo sapiens
  misc_RNA (1)...(19): siRNA sense strand
ggaacaaggagaagaacca

SEQ ID NO: 2328147 - RNA, 19 nt, Homo sapiens
  misc_RNA (1)...(19): siRNA sense strand
guguaaugaauguggaaaa

SEQ ID NO: 2328148 - RNA, 19 nt, Homo sapiens
  misc_RNA (1)...(19): siRNA sense strand
aacucauacucgagagaaa

SEQ ID NO: 2328149 - RNA, 19 nt, Homo sapiens
  misc_RNA (1)...(19): siRNA sense strand
ggugcacacaggagagaaa

SEQ ID NO: 2328150 - RNA, 19 nt, Homo sapiens
  misc_RNA (1)...(19): siRNA sense strand
gagaacacacauaggagaa

SEQ ID NO: 2328151 - RNA, 19 nt, Homo sapiens
  misc_RNA (1)...(19): siRNA sense strand
augugaugcuggagaacua

SEQ ID NO: 2328152 - RNA, 19 nt, Homo sapiens
  misc_RNA (1)...(19): siRNA sense strand
cuauaaugaauuugggaga

SEQ ID NO: 2328153 - RNA, 19 nt, Homo sapiens
  misc_RNA (1)...(19): siRNA sense strand
agaaugcagaagagaauaa

SEQ ID NO: 2328154 - RNA, 19 nt, Homo sapiens
  misc_RNA (1)...(19): siRNA sense strand
gcuucagaaaggugauaaa

SEQ ID NO: 2328155 - RNA, 19 nt, Homo sapiens
  misc_RNA (1)...(19): siRNA sense strand
acacuaugauuguggugaa

SEQ ID NO: 2328156 - RNA, 19 nt, Homo sapiens
  misc_RNA (1)...(19): siRNA sense strand
gcuggaacaaggagaagaa

SEQ ID NO: 2328157 - RNA, 19 nt, Homo sapiens
  misc_RNA (1)...(19): siRNA sense strand
gggaaguuguauucaucaa

SEQ ID NO: 2328158 - RNA, 19 nt, Homo sapiens
  misc_RNA (1)...(19): siRNA sense strand
auguuaugaaugugggaaa

SEQ ID NO: 2328159 - RNA, 19 nt, Homo sapiens
  misc_RNA (1)...(19): siRNA sense strand
cagcaugagaagauucaaa

SEQ ID NO: 2328160 - RNA, 19 nt, Homo sapiens
  misc_RNA (1)...(19): siRNA sense strand
agagaauaacugugacuau

SEQ ID NO: 2328161 - RNA, 19 nt, Homo sapiens
  misc_RNA (1)...(19): siRNA sense strand
ggcucacacaggagagaaa

SEQ ID NO: 2328162 - RNA, 19 nt, Homo sapiens
  misc_RNA (1)...(19): siRNA sense strand
caauguaaucaauguggaa

SEQ ID NO: 2328163 - RNA, 19 nt, Homo sapiens
  misc_RNA (1)...(19): siRNA sense strand
uguaacacaugcaggaaaa

SEQ ID NO: 2328164 - RNA, 19 nt, Homo sapiens
  misc_RNA (1)...(19): siRNA sense strand
gaauuuagugauugugaga

SEQ ID NO: 2328165 - RNA, 19 nt, Homo sapiens
  misc_RNA (1)...(19): siRNA sense strand
ggagacuggaggaagaauu

SEQ ID NO: 2328166 - RNA, 19 nt, Homo sapiens
  misc_RNA (1)...(19): siRNA sense strand
ggucaguaucauuuaaaga

SEQ ID NO: 2328167 - RNA, 19 nt, Homo sapiens
  misc_RNA (1)...(19): siRNA sense strand
gcaucagagaauucacaua

SEQ ID NO: 2328168 - RNA, 19 nt, Homo sapiens
  misc_RNA (1)...(19): siRNA sense strand
gacuaaggaacaagguaau

SEQ ID NO: 2328169 - RNA, 19 nt, Homo sapiens
  misc_RNA (1)...(19): siRNA sense strand
ucacaauacaucagagaac

SEQ ID NO: 2328170 - RNA, 19 nt, Homo sapiens
  misc_RNA (1)...(19): siRNA sense strand
aggagaagaaccauggaga

SEQ ID NO: 2328171 - RNA, 19 nt, Homo sapiens
  misc_RNA (1)...(19): siRNA sense strand
gagaagaaccauggagacu

SEQ ID NO: 2328172 - RNA, 19 nt, Homo sapiens
  misc_RNA (1)...(19): siRNA sense strand
ucacuaaacaucagagaac

SEQ ID NO: 2328173 - RNA, 19 nt, Homo sapiens
  misc_RNA (1)...(19): siRNA sense strand
ccuuaugaauguaaugcau

SEQ ID NO: 2328174 - RNA, 19 nt, Homo sapiens
  misc_RNA (1)...(19): siRNA sense strand
auguaaugaguguggaaaa

SEQ ID NO: 2328175 - RNA, 19 nt, Homo sapiens
  misc_RNA (1)...(19): siRNA sense strand
agaaaggugauaaaggaga

SEQ ID NO: 2328176 - RNA, 19 nt, Homo sapiens
  misc_RNA (1)...(19): siRNA sense strand
gauaauucauacaggguug

SEQ ID NO: 2328177 - RNA, 19 nt, Homo sapiens
  misc_RNA (1)...(19): siRNA sense strand
ucacuaaacaucagagauc

SEQ ID NO: 2328178 - RNA, 19 nt, Homo sapiens
  misc_RNA (1)...(19): siRNA sense strand
ggaagagagagaaugcaga

SEQ ID NO: 2328179 - RNA, 19 nt, Homo sapiens
  misc_RNA (1)...(19): siRNA sense strand
gcaucagagaacucacaua

SEQ ID NO: 2328180 - RNA, 19 nt, Homo sapiens
  misc_RNA (1)...(19): siRNA sense strand
aggaaaaccuucucucaaa

SEQ ID NO: 2328181 - RNA, 19 nt, Homo sapiens
  misc_RNA (1)...(19): siRNA sense strand
agagagagaaugcagaaga

SEQ ID NO: 2328182 - RNA, 19 nt, Homo sapiens
  misc_RNA (1)...(19): siRNA sense strand
ggggaaaagcccuaugaau

SEQ ID NO: 2328183 - RNA, 19 nt, Homo sapiens
  misc_RNA (1)...(19): siRNA sense strand
gaagaauucccaagccaga

SEQ ID NO: 2328184 - RNA, 19 nt, Homo sapiens
  misc_RNA (1)...(19): siRNA sense strand
cuaugauuguggugaaagu

SEQ ID NO: 2328185 - RNA, 19 nt, Homo sapiens
  misc_RNA (1)...(19): siRNA sense strand
ucacauuacaccagagaac

SEQ ID NO: 2328186 - RNA, 19 nt, Homo sapiens
  misc_RNA (1)...(19): siRNA sense strand
augucuugagugugggaaa

SEQ ID NO: 2328187 - RNA, 19 nt, Homo sapiens
  misc_RNA (1)...(19): siRNA sense strand
agagaggagccaagaaaau

SEQ ID NO: 2328188 - RNA, 19 nt, Homo sapiens
  misc_RNA (1)...(19): siRNA sense strand
ucaccaggcaucagauaau

SEQ ID NO: 2328189 - RNA, 19 nt, Homo sapiens
  misc_RNA (1)...(19): siRNA sense strand
gugugaugauugugggaaa

SEQ ID NO: 2328190 - RNA, 19 nt, Homo sapiens
  misc_RNA (1)...(19): siRNA sense strand
auguaaugagugugggaaa

SEQ ID NO: 2328191 - RNA, 19 nt, Homo sapiens
  misc_RNA (1)...(19): siRNA sense strand
gggaaagccuucagccaga

SEQ ID NO: 2328192 - RNA, 19 nt, Homo sapiens
  misc_RNA (1)...(19): siRNA sense strand
guguaaugaauguggaaaa

SEQ ID NO: 2328193 - RNA, 19 nt, Homo sapiens
  misc_RNA (1)...(19): siRNA sense strand
guguaauguauguggaaaa

SEQ ID NO: 2328194 - RNA, 19 nt, Homo sapiens
  misc_RNA (1)...(19): siRNA sense strand
augcagugagugugggaaa

SEQ ID NO: 2328195 - RNA, 19 nt, Homo sapiens
  misc_RNA (1)...(19): siRNA sense strand
gggaaaaccuucagccaga

SEQ ID NO: 2328196 - RNA, 19 nt, Homo sapiens
  misc_RNA (1)...(19): siRNA sense strand
cugugcugcuugugggaaa

SEQ ID NO: 2328197 - RNA, 19 nt, Homo sapiens
  misc_RNA (1)...(19): siRNA sense strand
aggcagaaauaucagaaaa

SEQ ID NO: 2328198 - RNA, 19 nt, Homo sapiens
  misc_RNA (1)...(19): siRNA sense strand
gguaaagccuucaaccgaa

SEQ ID NO: 2328199 - RNA, 19 nt, Homo sapiens
  misc_RNA (1)...(19): siRNA sense strand
ggaaaagccuucagccaga

SEQ ID NO: 2328200 - RNA, 19 nt, Homo sapiens
  misc_RNA (1)...(19): siRNA sense strand
acaccaggacugaagacaa

SEQ ID NO: 2328201 - RNA, 19 nt, Homo sapiens
  misc_RNA (1)...(19): siRNA sense strand
gugaggaggcagagaugga

SEQ ID NO: 2328202 - RNA, 19 nt, Homo sapiens
  misc_RNA (1)...(19): siRNA sense strand
uguaaugagugugggaaaa

SEQ ID NO: 2328203 - RNA, 19 nt, Homo sapiens
  misc_RNA (1)...(19): siRNA sense strand
guguaaugauuguggcaag

SEQ ID NO: 2328204 - RNA, 19 nt, Homo sapiens
  misc_RNA (1)...(19): siRNA sense strand
gcucaaaucucauucacca

SEQ ID NO: 2328205 - RNA, 19 nt, Homo sapiens
  misc_RNA (1)...(19): siRNA sense strand
ccucauucagcaucagaua

SEQ ID NO: 2328206 - RNA, 19 nt, Homo sapiens
  misc_RNA (1)...(19): siRNA sense strand
cccuauaagugcagugacu

SEQ ID NO: 2328207 - RNA, 19 nt, Homo sapiens
  misc_RNA (1)...(19): siRNA sense strand
gcuuaccagugcagcgaau

SEQ ID NO: 2328208 - RNA, 19 nt, Homo sapiens
  misc_RNA (1)...(19): siRNA sense strand
gcauuuagucagagcucca

SEQ ID NO: 2328209 - RNA, 19 nt, Homo sapiens
  misc_RNA (1)...(19): siRNA sense strand
gcuuuuaggcggagcucaa

SEQ ID NO: 2328210 - RNA, 19 nt, Homo sapiens
  misc_RNA (1)...(19): siRNA sense strand
gguucacacuggagagaag

SEQ ID NO: 2328211 - RNA, 19 nt, Homo sapiens
  misc_RNA (1)...(19): siRNA sense strand
guguggcgagugugggaaa

SEQ ID NO: 2328212 - RNA, 19 nt, Homo sapiens
  misc_RNA (1)...(19): siRNA sense strand
ccguaugugugcagugagu

SEQ ID NO: 2328213 - RNA, 19 nt, Homo sapiens
  misc_RNA (1)...(19): siRNA sense strand
gcucucaguuccaggacca

SEQ ID NO: 2328214 - RNA, 19 nt, Homo sapiens
  misc_RNA (1)...(19): siRNA sense strand
agugagaagcccuaugaau

SEQ ID NO: 2328215 - RNA, 19 nt, Homo sapiens
  misc_RNA (1)...(19): siRNA sense strand
aggcgaagcucaaaccuca

SEQ ID NO: 2328216 - RNA, 19 nt, Homo sapiens
  misc_RNA (1)...(19): siRNA sense strand
acacaggagagaagccuuu

SEQ ID NO: 2328217 - RNA, 19 nt, Homo sapiens
  misc_RNA (1)...(19): siRNA sense strand
cauaugagugagaaagcuu

SEQ ID NO: 2328218 - RNA, 19 nt, Homo sapiens
  misc_RNA (1)...(19): siRNA sense strand
gaaaguucauacuggggaa

SEQ ID NO: 2328219 - RNA, 19 nt, Homo sapiens
  misc_RNA (1)...(19): siRNA sense strand
guguguaauguauguggaa

SEQ ID NO: 2328220 - RNA, 19 nt, Homo sapiens
  misc_RNA (1)...(19): siRNA sense strand
gugggaaagccuucaguca

SEQ ID NO: 2328221 - RNA, 19 nt, Homo sapiens
  misc_RNA (1)...(19): siRNA sense strand
caggcagaaauaucagaaa

SEQ ID NO: 2328222 - RNA, 19 nt, Homo sapiens
  misc_RNA (1)...(19): siRNA sense strand
gugggaaagcauuuaguca

SEQ ID NO: 2328223 - RNA, 19 nt, Homo sapiens
  misc_RNA (1)...(19): siRNA sense strand
ccguacagaugcagugucu

SEQ ID NO: 2328224 - RNA, 19 nt, Homo sapiens
  misc_RNA (1)...(19): siRNA sense strand
cccuaugaauguacugaau

SEQ ID NO: 2328225 - RNA, 19 nt, Homo sapiens
  misc_RNA (1)...(19): siRNA sense strand
gggagaaagaucuggacug

SEQ ID NO: 2328226 - RNA, 19 nt, Homo sapiens
  misc_RNA (1)...(19): siRNA sense strand
gcccaaaccugauggcaug

SEQ ID NO: 2328227 - RNA, 19 nt, Homo sapiens
  misc_RNA (1)...(19): siRNA sense strand
acacaggcgacaagcccua

SEQ ID NO: 2328228 - RNA, 19 nt, Homo sapiens
  misc_RNA (1)...(19): siRNA sense strand
guguaaugaguguggcaaa

SEQ ID NO: 2328229 - RNA, 19 nt, Homo sapiens
  misc_RNA (1)...(19): siRNA sense strand
guguaaugaguguggcaaa

SEQ ID NO: 2328230 - RNA, 19 nt, Homo sapiens
  misc_RNA (1)...(19): siRNA sense strand
cuguguagauuguggaaaa

SEQ ID NO: 2328231 - RNA, 19 nt, Homo sapiens
  misc_RNA (1)...(19): siRNA sense strand
cuguacagagugugggaau

SEQ ID NO: 2328232 - RNA, 19 nt, Homo sapiens
  misc_RNA (1)...(19): siRNA sense strand
gaguguagugaguguggaa

SEQ ID NO: 2328233 - RNA, 19 nt, Homo sapiens
  misc_RNA (1)...(19): siRNA sense strand
uggaaaagcaccaggacau

SEQ ID NO: 2328234 - RNA, 19 nt, Homo sapiens
  misc_RNA (1)...(19): siRNA sense strand
augugaggagugugggaaa

SEQ ID NO: 2328235 - RNA, 19 nt, Homo sapiens
  misc_RNA (1)...(19): siRNA sense strand
guguagugaguguggaaaa

SEQ ID NO: 2328236 - RNA, 19 nt, Homo sapiens
  misc_RNA (1)...(19): siRNA sense strand
gagagaagccugugcugga

SEQ ID NO: 2328237 - RNA, 19 nt, Homo sapiens
  misc_RNA (1)...(19): siRNA sense strand
augcuagacaccagagaau

SEQ ID NO: 2328238 - RNA, 19 nt, Homo sapiens
  misc_RNA (1)...(19): siRNA sense strand
cuguaaagauguugagacc

SEQ ID NO: 2328239 - RNA, 19 nt, Homo sapiens
  misc_RNA (1)...(19): siRNA sense strand
gcaaguaugagaaggccuu

SEQ ID NO: 2328240 - RNA, 19 nt, Homo sapiens
  misc_RNA (1)...(19): siRNA sense strand
cugaagaaagagaugggau

SEQ ID NO: 2328241 - RNA, 19 nt, Homo sapiens
  misc_RNA (1)...(19): siRNA sense strand
ugagaaggccuuugggacu

SEQ ID NO: 2328242 - RNA, 19 nt, Homo sapiens
  misc_RNA (1)...(19): siRNA sense strand
gugggaaauccuucagcua

SEQ ID NO: 2328243 - RNA, 19 nt, Homo sapiens
  misc_RNA (1)...(19): siRNA sense strand
ugaagaaagagaugggaug

SEQ ID NO: 2328244 - RNA, 19 nt, Homo sapiens
  misc_RNA (1)...(19): siRNA sense strand
agaaacccuaugaguguaa

SEQ ID NO: 2328245 - RNA, 19 nt, Homo sapiens
  misc_RNA (1)...(19): siRNA sense strand
agaaacccuaugaguguaa

SEQ ID NO: 2328246 - RNA, 19 nt, Homo sapiens
  misc_RNA (1)...(19): siRNA sense strand
ccaagaauccccugugcaa

SEQ ID NO: 2328247 - RNA, 19 nt, Homo sapiens
  misc_RNA (1)...(19): siRNA sense strand
gcguauucacacaggggaa

SEQ ID NO: 2328248 - RNA, 19 nt, Homo sapiens
  misc_RNA (1)...(19): siRNA sense strand
cccuaugaguguagcaagu

SEQ ID NO: 2328249 - RNA, 19 nt, Homo sapiens
  misc_RNA (1)...(19): siRNA sense strand
uguaaugaguguggcaaaa

SEQ ID NO: 2328250 - RNA, 19 nt, Homo sapiens
  misc_RNA (1)...(19): siRNA sense strand
augcaaaucugaucaggca

SEQ ID NO: 2328251 - RNA, 19 nt, Homo sapiens
  misc_RNA (1)...(19): siRNA sense strand
guaugugaugaguguggaa

SEQ ID NO: 2328252 - RNA, 19 nt, Homo sapiens
  misc_RNA (1)...(19): siRNA sense strand
ccuaugagaacaagcgcaa

SEQ ID NO: 2328253 - RNA, 19 nt, Homo sapiens
  misc_RNA (1)...(19): siRNA sense strand
aggaaaggccuaugagaac

SEQ ID NO: 2328254 - RNA, 19 nt, Homo sapiens
  misc_RNA (1)...(19): siRNA sense strand
augugcugauugugggaaa

SEQ ID NO: 2328255 - RNA, 19 nt, Homo sapiens
  misc_RNA (1)...(19): siRNA sense strand
gguauuucucggagcucaa

SEQ ID NO: 2328256 - RNA, 19 nt, Homo sapiens
  misc_RNA (1)...(19): siRNA sense strand
gcucaaaucucauucagca

SEQ ID NO: 2328257 - RNA, 19 nt, Homo sapiens
  misc_RNA (1)...(19): siRNA sense strand
ggggaaaagcccuacaaau

SEQ ID NO: 2328258 - RNA, 19 nt, Homo sapiens
  misc_RNA (1)...(19): siRNA sense strand
uggaaagcugguacaggaa

SEQ ID NO: 2328259 - RNA, 19 nt, Homo sapiens
  misc_RNA (1)...(19): siRNA sense strand
cggcagaaguggggcauga

SEQ ID NO: 2328260 - RNA, 19 nt, Homo sapiens
  misc_RNA (1)...(19): siRNA sense strand
agaagagaagccucguaaa

SEQ ID NO: 2328261 - RNA, 19 nt, Homo sapiens
  misc_RNA (1)...(19): siRNA sense strand
auaucagggugaagacuca

SEQ ID NO: 2328262 - RNA, 19 nt, Homo sapiens
  misc_RNA (1)...(19): siRNA sense strand
uuggaaagcugguacagga

SEQ ID NO: 2328263 - RNA, 19 nt, Homo sapiens
  misc_RNA (1)...(19): siRNA sense strand
cuucagggccaaaggcaau

SEQ ID NO: 2328264 - RNA, 19 nt, Homo sapiens
  misc_RNA (1)...(19): siRNA sense strand
gcuucagggccaaaggcaa

SEQ ID NO: 2328265 - RNA, 19 nt, Homo sapiens
  misc_RNA (1)...(19): siRNA sense strand
acacaggccugaagcccua

SEQ ID NO: 2328266 - RNA, 19 nt, Homo sapiens
  misc_RNA (1)...(19): siRNA sense strand
ggacagaaacccuacgagu

SEQ ID NO: 2328267 - RNA, 19 nt, Homo sapiens
  misc_RNA (1)...(19): siRNA sense strand
cagucagaaaggaagcuua

SEQ ID NO: 2328268 - RNA, 19 nt, Homo sapiens
  misc_RNA (1)...(19): siRNA sense strand
agaugugaucaguguggaa

SEQ ID NO: 2328269 - RNA, 19 nt, Homo sapiens
  misc_RNA (1)...(19): siRNA sense strand
gugccaggaguguggaaaa

SEQ ID NO: 2328270 - RNA, 19 nt, Homo sapiens
  misc_RNA (1)...(19): siRNA sense strand
caaucuuguuacacaucaa

SEQ ID NO: 2328271 - RNA, 19 nt, Homo sapiens
  misc_RNA (1)...(19): siRNA sense strand
aauccacacaggagagaca

SEQ ID NO: 2328272 - RNA, 19 nt, Homo sapiens
  misc_RNA (1)...(19): siRNA sense strand
gggaauaauuucaggagga

SEQ ID NO: 2328273 - RNA, 19 nt, Homo sapiens
  misc_RNA (1)...(19): siRNA sense strand
ccauaaugccucagaguau

SEQ ID NO: 2328274 - RNA, 19 nt, Homo sapiens
  misc_RNA (1)...(19): siRNA sense strand
auuuaaugccugugggaaa

SEQ ID NO: 2328275 - RNA, 19 nt, Homo sapiens
  misc_RNA (1)...(19): siRNA sense strand
auguaaugcaugugggaaa

SEQ ID NO: 2328276 - RNA, 19 nt, Homo sapiens
  misc_RNA (1)...(19): siRNA sense strand
augcaaugaaugugggaaa

SEQ ID NO: 2328277 - RNA, 19 nt, Homo sapiens
  misc_RNA (1)...(19): siRNA sense strand
augcaaugaaugugggaaa

SEQ ID NO: 2328278 - RNA, 19 nt, Homo sapiens
  misc_RNA (1)...(19): siRNA sense strand
auguaaugaaugugggaaa

SEQ ID NO: 2328279 - RNA, 19 nt, Homo sapiens
  misc_RNA (1)...(19): siRNA sense strand
aggugauaaaggagagaaa

SEQ ID NO: 2328280 - RNA, 19 nt, Homo sapiens
  misc_RNA (1)...(19): siRNA sense strand
gugauaaaggagagaaaca

SEQ ID NO: 2328281 - RNA, 19 nt, Homo sapiens
  misc_RNA (1)...(19): siRNA sense strand
auguaaugcgugugggaaa

SEQ ID NO: 2328282 - RNA, 19 nt, Homo sapiens
  misc_RNA (1)...(19): siRNA sense strand
gggaaauucuucaggcaca

SEQ ID NO: 2328283 - RNA, 19 nt, Homo sapiens
  misc_RNA (1)...(19): siRNA sense strand
gagagaacgcagaagagaa

SEQ ID NO: 2328284 - RNA, 19 nt, Homo sapiens
  misc_RNA (1)...(19): siRNA sense strand
augugaugcuggagaacua

SEQ ID NO: 2328285 - RNA, 19 nt, Homo sapiens
  misc_RNA (1)...(19): siRNA sense strand
cauggaaacaggaggaaga

SEQ ID NO: 2328286 - RNA, 19 nt, Homo sapiens
  misc_RNA (1)...(19): siRNA sense strand
aggugauguaauaggaaua

SEQ ID NO: 2328287 - RNA, 19 nt, Homo sapiens
  misc_RNA (1)...(19): siRNA sense strand
acacuaugauuguggugaa

SEQ ID NO: 2328288 - RNA, 19 nt, Homo sapiens
  misc_RNA (1)...(19): siRNA sense strand
gggaaguuguauucaucaa

SEQ ID NO: 2328289 - RNA, 19 nt, Homo sapiens
  misc_RNA (1)...(19): siRNA sense strand
agaacgcagaagagaauaa

SEQ ID NO: 2328290 - RNA, 19 nt, Homo sapiens
  misc_RNA (1)...(19): siRNA sense strand
auguuaugaaugugggaaa

SEQ ID NO: 2328291 - RNA, 19 nt, Homo sapiens
  misc_RNA (1)...(19): siRNA sense strand
gaacagaagucccaggagu

SEQ ID NO: 2328292 - RNA, 19 nt, Homo sapiens
  misc_RNA (1)...(19): siRNA sense strand
aacucauacucaagagaaa

SEQ ID NO: 2328293 - RNA, 19 nt, Homo sapiens
  misc_RNA (1)...(19): siRNA sense strand
agagaacgcagaagagaau

SEQ ID NO: 2328294 - RNA, 19 nt, Homo sapiens
  misc_RNA (1)...(19): siRNA sense strand
cagcaugagaagauucaaa

SEQ ID NO: 2328295 - RNA, 19 nt, Homo sapiens
  misc_RNA (1)...(19): siRNA sense strand
uuacacagcaucagagaau

SEQ ID NO: 2328296 - RNA, 19 nt, Homo sapiens
  misc_RNA (1)...(19): siRNA sense strand
gagaauucacauaggagau

SEQ ID NO: 2328297 - RNA, 19 nt, Homo sapiens
  misc_RNA (1)...(19): siRNA sense strand
ggcucacacaggagagaaa

SEQ ID NO: 2328298 - RNA, 19 nt, Homo sapiens
  misc_RNA (1)...(19): siRNA sense strand
cgucaagggacaaucacua

SEQ ID NO: 2328299 - RNA, 19 nt, Homo sapiens
  misc_RNA (1)...(19): siRNA sense strand
gauucaaacuuuagagcac

SEQ ID NO: 2328300 - RNA, 19 nt, Homo sapiens
  misc_RNA (1)...(19): siRNA sense strand
uguaacacaugcaggaaaa

SEQ ID NO: 2328301 - RNA, 19 nt, Homo sapiens
  misc_RNA (1)...(19): siRNA sense strand
ugacuaaggaacaagguga

SEQ ID NO: 2328302 - RNA, 19 nt, Homo sapiens
  misc_RNA (1)...(19): siRNA sense strand
gaauuuagugauugugaga

SEQ ID NO: 2328303 - RNA, 19 nt, Homo sapiens
  misc_RNA (1)...(19): siRNA sense strand
ggaaauucuucaggcacaa

SEQ ID NO: 2328304 - RNA, 19 nt, Homo sapiens
  misc_RNA (1)...(19): siRNA sense strand
gcaucagagaauucacaua

SEQ ID NO: 2328305 - RNA, 19 nt, Homo sapiens
  misc_RNA (1)...(19): siRNA sense strand
gcaucagagaauucacaua

SEQ ID NO: 2328306 - RNA, 19 nt, Homo sapiens
  misc_RNA (1)...(19): siRNA sense strand
ggugcacacaggacagaaa

SEQ ID NO: 2328307 - RNA, 19 nt, Homo sapiens
  misc_RNA (1)...(19): siRNA sense strand
ccuuaaaguacaccagaga

SEQ ID NO: 2328308 - RNA, 19 nt, Homo sapiens
  misc_RNA (1)...(19): siRNA sense strand
acaucagagaagacauaua

SEQ ID NO: 2328309 - RNA, 19 nt, Homo sapiens
  misc_RNA (1)...(19): siRNA sense strand
ggguggaaaccuuaugaau

SEQ ID NO: 2328310 - RNA, 19 nt, Homo sapiens
  misc_RNA (1)...(19): siRNA sense strand
agagaagacauauaggaga

SEQ ID NO: 2328311 - RNA, 19 nt, Homo sapiens
  misc_RNA (1)...(19): siRNA sense strand
cacuaaacaucaaagauca

SEQ ID NO: 2328312 - RNA, 19 nt, Homo sapiens
  misc_RNA (1)...(19): siRNA sense strand
ucacuaaacaucagagaac

SEQ ID NO: 2328313 - RNA, 19 nt, Homo sapiens
  misc_RNA (1)...(19): siRNA sense strand
auguaaugaguguggaaaa

SEQ ID NO: 2328314 - RNA, 19 nt, Homo sapiens
  misc_RNA (1)...(19): siRNA sense strand
cagugugauucauguggaa

SEQ ID NO: 2328315 - RNA, 19 nt, Homo sapiens
  misc_RNA (1)...(19): siRNA sense strand
agaaaggugauaaaggaga

SEQ ID NO: 2328316 - RNA, 19 nt, Homo sapiens
  misc_RNA (1)...(19): siRNA sense strand
gggcugaaacccuaugaau

SEQ ID NO: 2328317 - RNA, 19 nt, Homo sapiens
  misc_RNA (1)...(19): siRNA sense strand
caauguaaugaauguggaa

SEQ ID NO: 2328318 - RNA, 19 nt, Homo sapiens
  misc_RNA (1)...(19): siRNA sense strand
aggaacaaggugauguaau

SEQ ID NO: 2328319 - RNA, 19 nt, Homo sapiens
  misc_RNA (1)...(19): siRNA sense strand
agagagagaacgcagaaga

SEQ ID NO: 2328320 - RNA, 19 nt, Homo sapiens
  misc_RNA (1)...(19): siRNA sense strand
gggcagaaacccuuugcau

SEQ ID NO: 2328321 - RNA, 19 nt, Homo sapiens
  misc_RNA (1)...(19): siRNA sense strand
ggggaaaagcccuaugaau

SEQ ID NO: 2328322 - RNA, 19 nt, Homo sapiens
  misc_RNA (1)...(19): siRNA sense strand
ucaauacacagaagagaga

SEQ ID NO: 2328323 - RNA, 19 nt, Homo sapiens
  misc_RNA (1)...(19): siRNA sense strand
cuaugauuguggugaaagu

SEQ ID NO: 2328324 - RNA, 19 nt, Homo sapiens
  misc_RNA (1)...(19): siRNA sense strand
agauuaaaguguuggacaa

SEQ ID NO: 2328325 - RNA, 19 nt, Homo sapiens
  misc_RNA (1)...(19): siRNA sense strand
agauuaagcacgugagcaa

SEQ ID NO: 2328326 - RNA, 19 nt, Homo sapiens
  misc_RNA (1)...(19): siRNA sense strand
cguccugggugaugagaaa

SEQ ID NO: 2328327 - RNA, 19 nt, Homo sapiens
  misc_RNA (1)...(19): siRNA sense strand
ggacaaucagauaaagaaa

SEQ ID NO: 2328328 - RNA, 19 nt, Homo sapiens
  misc_RNA (1)...(19): siRNA sense strand
caggauaaauuaaggguca

SEQ ID NO: 2328329 - RNA, 19 nt, Homo sapiens
  misc_RNA (1)...(19): siRNA sense strand
gagaugaaauccagcgcaa

SEQ ID NO: 2328330 - RNA, 19 nt, Homo sapiens
  misc_RNA (1)...(19): siRNA sense strand
gcaggugguaagagagaaa

SEQ ID NO: 2328331 - RNA, 19 nt, Homo sapiens
  misc_RNA (1)...(19): siRNA sense strand
caucaaaagcaaagagcua

SEQ ID NO: 2328332 - RNA, 19 nt, Homo sapiens
  misc_RNA (1)...(19): siRNA sense strand
uaacaaacgaggacagcaa

SEQ ID NO: 2328333 - RNA, 19 nt, Homo sapiens
  misc_RNA (1)...(19): siRNA sense strand
ggaaagagauagagaccuc

SEQ ID NO: 2328334 - RNA, 19 nt, Homo sapiens
  misc_RNA (1)...(19): siRNA sense strand
augcuaaacugcuuggaaa

SEQ ID NO: 2328335 - RNA, 19 nt, Homo sapiens
  misc_RNA (1)...(19): siRNA sense strand
augcgaaacuggagaagau

SEQ ID NO: 2328336 - RNA, 19 nt, Homo sapiens
  misc_RNA (1)...(19): siRNA sense strand
cauaaacuguugaaggcua

SEQ ID NO: 2328337 - RNA, 19 nt, Homo sapiens
  misc_RNA (1)...(19): siRNA sense strand
ucacagaccuggaggagca

SEQ ID NO: 2328338 - RNA, 19 nt, Homo sapiens
  misc_RNA (1)...(19): siRNA sense strand
ggacgugaagaaagugaaa

SEQ ID NO: 2328339 - RNA, 19 nt, Homo sapiens
  misc_RNA (1)...(19): siRNA sense strand
acaucaagccugagaacau

SEQ ID NO: 2328340 - RNA, 19 nt, Homo sapiens
  misc_RNA (1)...(19): siRNA sense strand
agaacaugaugcagagaca

SEQ ID NO: 2328341 - RNA, 19 nt, Homo sapiens
  misc_RNA (1)...(19): siRNA sense strand
agggaaaccucgugaagga

SEQ ID NO: 2328342 - RNA, 19 nt, Homo sapiens
  misc_RNA (1)...(19): siRNA sense strand
acagaaugcaguagcuuaa

SEQ ID NO: 2328343 - RNA, 19 nt, Homo sapiens
  misc_RNA (1)...(19): siRNA sense strand
uuuauuuagucgacggaaa

SEQ ID NO: 2328344 - RNA, 19 nt, Homo sapiens
  misc_RNA (1)...(19): siRNA sense strand
aguacacgcucgaggaauu

SEQ ID NO: 2328345 - RNA, 19 nt, Homo sapiens
  misc_RNA (1)...(19): siRNA sense strand
uugaugaaccagagaagaa

SEQ ID NO: 2328346 - RNA, 19 nt, Homo sapiens
  misc_RNA (1)...(19): siRNA sense strand
ugagaugauuuaugggaga

SEQ ID NO: 2328347 - RNA, 19 nt, Homo sapiens
  misc_RNA (1)...(19): siRNA sense strand
ugucagagguggaggcugu

SEQ ID NO: 2328348 - RNA, 19 nt, Homo sapiens
  misc_RNA (1)...(19): siRNA sense strand
cuacaagacucucaggaca

SEQ ID NO: 2328349 - RNA, 19 nt, Homo sapiens
  misc_RNA (1)...(19): siRNA sense strand
aaaucaaagagcaggagua

SEQ ID NO: 2328350 - RNA, 19 nt, Homo sapiens
  misc_RNA (1)...(19): siRNA sense strand
cgaaacuggagaagaucaa

SEQ ID NO: 2328351 - RNA, 19 nt, Homo sapiens
  misc_RNA (1)...(19): siRNA sense strand
gaaagaagcugguggaagc

SEQ ID NO: 2328352 - RNA, 19 nt, Homo sapiens
  misc_RNA (1)...(19): siRNA sense strand
augaaggugcccaggaaua

SEQ ID NO: 2328353 - RNA, 19 nt, Homo sapiens
  misc_RNA (1)...(19): siRNA sense strand
acaagauggagcaggaaau

SEQ ID NO: 2328354 - RNA, 19 nt, Homo sapiens
  misc_RNA (1)...(19): siRNA sense strand
agcagaaacuggagcucaa

SEQ ID NO: 2328355 - RNA, 19 nt, Homo sapiens
  misc_RNA (1)...(19): siRNA sense strand
gugcagagcuagaggaagc

SEQ ID NO: 2328356 - RNA, 19 nt, Homo sapiens
  misc_RNA (1)...(19): siRNA sense strand
aggcuaaggaucaagggaa

SEQ ID NO: 2328357 - RNA, 19 nt, Homo sapiens
  misc_RNA (1)...(19): siRNA sense strand
gaggaagagcggaacauau

SEQ ID NO: 2328358 - RNA, 19 nt, Homo sapiens
  misc_RNA (1)...(19): siRNA sense strand
gcaaagagcuacaagacuc

SEQ ID NO: 2328359 - RNA, 19 nt, Homo sapiens
  misc_RNA (1)...(19): siRNA sense strand
ucaaagagcaggaguacca

SEQ ID NO: 2328360 - RNA, 19 nt, Homo sapiens
  misc_RNA (1)...(19): siRNA sense strand
aggcucaaguggaagaaau

SEQ ID NO: 2328361 - RNA, 19 nt, Homo sapiens
  misc_RNA (1)...(19): siRNA sense strand
gcggaaagcgacagaaugu

SEQ ID NO: 2328362 - RNA, 19 nt, Homo sapiens
  misc_RNA (1)...(19): siRNA sense strand
auaaacuguugaaggcuaa

SEQ ID NO: 2328363 - RNA, 19 nt, Homo sapiens
  misc_RNA (1)...(19): siRNA sense strand
acgugaagaaagugaaaca

SEQ ID NO: 2328364 - RNA, 19 nt, Homo sapiens
  misc_RNA (1)...(19): siRNA sense strand
ucucaaucgugcaggugaa

SEQ ID NO: 2328365 - RNA, 19 nt, Homo sapiens
  misc_RNA (1)...(19): siRNA sense strand
acaaggagacacuggagaa

SEQ ID NO: 2328366 - RNA, 19 nt, Homo sapiens
  misc_RNA (1)...(19): siRNA sense strand
ggaacagaggauuguggaa

SEQ ID NO: 2328367 - RNA, 19 nt, Homo sapiens
  misc_RNA (1)...(19): siRNA sense strand
aggagcagcuggagaagau

SEQ ID NO: 2328368 - RNA, 19 nt, Homo sapiens
  misc_RNA (1)...(19): siRNA sense strand
uggcagugaaggagcacaa

SEQ ID NO: 2328369 - RNA, 19 nt, Homo sapiens
  misc_RNA (1)...(19): siRNA sense strand
ccgagagggagcuggagaa

SEQ ID NO: 2328370 - RNA, 19 nt, Homo sapiens
  misc_RNA (1)...(19): siRNA sense strand
aggagacacuggagaacau

SEQ ID NO: 2328371 - RNA, 19 nt, Homo sapiens
  misc_RNA (1)...(19): siRNA sense strand
ggacugaacaugcgagcca

SEQ ID NO: 2328372 - RNA, 19 nt, Homo sapiens
  misc_RNA (1)...(19): siRNA sense strand
uguugaaggcuaaggauca

SEQ ID NO: 2328373 - RNA, 19 nt, Homo sapiens
  misc_RNA (1)...(19): siRNA sense strand
ccaaauuacagcagcagau

SEQ ID NO: 2328374 - RNA, 19 nt, Homo sapiens
  misc_RNA (1)...(19): siRNA sense strand
ugggagaguuucuagggaa

SEQ ID NO: 2328375 - RNA, 19 nt, Homo sapiens
  misc_RNA (1)...(19): siRNA sense strand
acucaugauagcaggagaa

SEQ ID NO: 2328376 - RNA, 19 nt, Homo sapiens
  misc_RNA (1)...(19): siRNA sense strand
agaaagagagacugaaguu

SEQ ID NO: 2328377 - RNA, 19 nt, Homo sapiens
  misc_RNA (1)...(19): siRNA sense strand
aaugaaugcccgaagcuua

SEQ ID NO: 2328378 - RNA, 19 nt, Homo sapiens
  misc_RNA (1)...(19): siRNA sense strand
uggaagagcaagccaaauu

SEQ ID NO: 2328379 - RNA, 19 nt, Homo sapiens
  misc_RNA (1)...(19): siRNA sense strand
cuucaacuccagaggaauu

SEQ ID NO: 2328380 - RNA, 19 nt, Homo sapiens
  misc_RNA (1)...(19): siRNA sense strand
cauauuaucucgaagcaca

SEQ ID NO: 2328381 - RNA, 19 nt, Homo sapiens
  misc_RNA (1)...(19): siRNA sense strand
cagaauauccgccaggcaa

SEQ ID NO: 2328382 - RNA, 19 nt, Homo sapiens
  misc_RNA (1)...(19): siRNA sense strand
agacugaacgagagcucaa

SEQ ID NO: 2328383 - RNA, 19 nt, Homo sapiens
  misc_RNA (1)...(19): siRNA sense strand
ggagaaagcucgcugugca

SEQ ID NO: 2328384 - RNA, 19 nt, Homo sapiens
  misc_RNA (1)...(19): siRNA sense strand
cugcauccggaaagagaua

SEQ ID NO: 2328385 - RNA, 19 nt, Homo sapiens
  misc_RNA (1)...(19): siRNA sense strand
gugguaagagagaaagcaa

SEQ ID NO: 2328386 - RNA, 19 nt, Homo sapiens
  misc_RNA (1)...(19): siRNA sense strand
guggaagaaaugagguuga

SEQ ID NO: 2328387 - RNA, 19 nt, Homo sapiens
  misc_RNA (1)...(19): siRNA sense strand
gaaucugagcugagagagu

SEQ ID NO: 2328388 - RNA, 19 nt, Homo sapiens
  misc_RNA (1)...(19): siRNA sense strand
gccugaagugggagaauau

SEQ ID NO: 2328389 - RNA, 19 nt, Homo sapiens
  misc_RNA (1)...(19): siRNA sense strand
agaauauccgccaggcaaa

SEQ ID NO: 2328390 - RNA, 19 nt, Homo sapiens
  misc_RNA (1)...(19): siRNA sense strand
ugaggagcucgaagagaaa

SEQ ID NO: 2328391 - RNA, 19 nt, Homo sapiens
  misc_RNA (1)...(19): siRNA sense strand
acaugaaggcccaagaaga

SEQ ID NO: 2328392 - RNA, 19 nt, Homo sapiens
  misc_RNA (1)...(19): siRNA sense strand
uggaggagcagcuggagaa

SEQ ID NO: 2328393 - RNA, 19 nt, Homo sapiens
  misc_RNA (1)...(19): siRNA sense strand
gagaaacagagcagggcga

SEQ ID NO: 2328394 - RNA, 19 nt, Homo sapiens
  misc_RNA (1)...(19): siRNA sense strand
uggaagacgaagaaggauc

SEQ ID NO: 2328395 - RNA, 19 nt, Homo sapiens
  misc_RNA (1)...(19): siRNA sense strand
ccugggagguguuuggcau

SEQ ID NO: 2328396 - RNA, 19 nt, Homo sapiens
  misc_RNA (1)...(19): siRNA sense strand
accguguggccgugggaaa

SEQ ID NO: 2328397 - RNA, 19 nt, Homo sapiens
  misc_RNA (1)...(19): siRNA sense strand
ugagugaccuggaggcaca

SEQ ID NO: 2328398 - RNA, 19 nt, Homo sapiens
  misc_RNA (1)...(19): siRNA sense strand
caagggagguggaggugga

SEQ ID NO: 2328399 - RNA, 19 nt, Homo sapiens
  misc_RNA (1)...(19): siRNA sense strand
agaaauggaucaaauggau

SEQ ID NO: 2328400 - RNA, 19 nt, Homo sapiens
  misc_RNA (1)...(19): siRNA sense strand
gugugauaaggaagacaua

SEQ ID NO: 2328401 - RNA, 19 nt, Homo sapiens
  misc_RNA (1)...(19): siRNA sense strand
acgcaaaucuggagcugcu

SEQ ID NO: 2328402 - RNA, 19 nt, Homo sapiens
  misc_RNA (1)...(19): siRNA sense strand
cagaaauggaucaaaugga

SEQ ID NO: 2328403 - RNA, 19 nt, Homo sapiens
  misc_RNA (1)...(19): siRNA sense strand
gcugaaagagugaaggcau

SEQ ID NO: 2328404 - RNA, 19 nt, Homo sapiens
  misc_RNA (1)...(19): siRNA sense strand
gaguggaguucgugcgcuu

SEQ ID NO: 2328405 - RNA, 19 nt, Homo sapiens
  misc_RNA (1)...(19): siRNA sense strand
cugaaagagugaaggcaug

SEQ ID NO: 2328406 - RNA, 19 nt, Homo sapiens
  misc_RNA (1)...(19): siRNA sense strand
cagggaagauuguggacca

SEQ ID NO: 2328407 - RNA, 19 nt, Homo sapiens
  misc_RNA (1)...(19): siRNA sense strand
cagaggacccugagcguga

SEQ ID NO: 2328408 - RNA, 19 nt, Homo sapiens
  misc_RNA (1)...(19): siRNA sense strand
gugaugaccacgagggcca

SEQ ID NO: 2328409 - RNA, 19 nt, Homo sapiens
  misc_RNA (1)...(19): siRNA sense strand
augccacaggccagggaaa

SEQ ID NO: 2328410 - RNA, 19 nt, Homo sapiens
  misc_RNA (1)...(19): siRNA sense strand
aggaaaugcccaaggaaaa

SEQ ID NO: 2328411 - RNA, 19 nt, Homo sapiens
  misc_RNA (1)...(19): siRNA sense strand
ggaucauguucguggcaca

SEQ ID NO: 2328412 - RNA, 19 nt, Homo sapiens
  misc_RNA (1)...(19): siRNA sense strand
ccacaggacuucaaggcuu

SEQ ID NO: 2328413 - RNA, 19 nt, Homo sapiens
  misc_RNA (1)...(19): siRNA sense strand
agacuuuggcugugggcau

SEQ ID NO: 2328414 - RNA, 19 nt, Homo sapiens
  misc_RNA (1)...(19): siRNA sense strand
ccaaguuccuggagcgcca

SEQ ID NO: 2328415 - RNA, 19 nt, Homo sapiens
  misc_RNA (1)...(19): siRNA sense strand
aggauaugccacaggacuu

SEQ ID NO: 2328416 - RNA, 19 nt, Homo sapiens
  misc_RNA (1)...(19): siRNA sense strand
cggccaaguguguuccaua

SEQ ID NO: 2328417 - RNA, 19 nt, Homo sapiens
  misc_RNA (1)...(19): siRNA sense strand
cgaagaagcaggauggccu

SEQ ID NO: 2328418 - RNA, 19 nt, Homo sapiens
  misc_RNA (1)...(19): siRNA sense strand
caaggaaaccaaagccaca

SEQ ID NO: 2328419 - RNA, 19 nt, Homo sapiens
  misc_RNA (1)...(19): siRNA sense strand
ccacaaugggcacagaaaa

SEQ ID NO: 2328420 - RNA, 19 nt, Homo sapiens
  misc_RNA (1)...(19): siRNA sense strand
cuaaagagcuccaucucca

SEQ ID NO: 2328421 - RNA, 19 nt, Homo sapiens
  misc_RNA (1)...(19): siRNA sense strand
gaagaagcaggauggccua

SEQ ID NO: 2328422 - RNA, 19 nt, Homo sapiens
  misc_RNA (1)...(19): siRNA sense strand
ccuucaacgagguggggaa

SEQ ID NO: 2328423 - RNA, 19 nt, Homo sapiens
  misc_RNA (1)...(19): siRNA sense strand
gacaaagaggcaaggacca

SEQ ID NO: 2328424 - RNA, 19 nt, Homo sapiens
  misc_RNA (1)...(19): siRNA sense strand
cauccauggcugcgggcau

SEQ ID NO: 2328425 - RNA, 19 nt, Homo sapiens
  misc_RNA (1)...(19): siRNA sense strand
agggaagaagccagaggau

SEQ ID NO: 2328426 - RNA, 19 nt, Homo sapiens
  misc_RNA (1)...(19): siRNA sense strand
cuuuagugaaguugggaaa

SEQ ID NO: 2328427 - RNA, 19 nt, Homo sapiens
  misc_RNA (1)...(19): siRNA sense strand
cuguggaguuaaagcagaa

SEQ ID NO: 2328428 - RNA, 19 nt, Homo sapiens
  misc_RNA (1)...(19): siRNA sense strand
cuacuggagaggaggaaca

SEQ ID NO: 2328429 - RNA, 19 nt, Homo sapiens
  misc_RNA (1)...(19): siRNA sense strand
gagcuaaacuucaggacug

SEQ ID NO: 2328430 - RNA, 19 nt, Homo sapiens
  misc_RNA (1)...(19): siRNA sense strand
caauaguaauggaugagga

SEQ ID NO: 2328431 - RNA, 19 nt, Homo sapiens
  misc_RNA (1)...(19): siRNA sense strand
aauaguaauggaugaggaa

SEQ ID NO: 2328432 - RNA, 19 nt, Homo sapiens
  misc_RNA (1)...(19): siRNA sense strand
cuguaugagccgagcaguu

SEQ ID NO: 2328433 - RNA, 19 nt, Homo sapiens
  misc_RNA (1)...(19): siRNA sense strand
uaauggaugaggaaggcaa

SEQ ID NO: 2328434 - RNA, 19 nt, Homo sapiens
  misc_RNA (1)...(19): siRNA sense strand
cuggaguauuacaggagau

SEQ ID NO: 2328435 - RNA, 19 nt, Homo sapiens
  misc_RNA (1)...(19): siRNA sense strand
uggaguuaaagcagaauuu

SEQ ID NO: 2328436 - RNA, 19 nt, Homo sapiens
  misc_RNA (1)...(19): siRNA sense strand
ggugaauucagaaccacaa

SEQ ID NO: 2328437 - RNA, 19 nt, Homo sapiens
  misc_RNA (1)...(19): siRNA sense strand
gccucgacuacgauggaaa

SEQ ID NO: 2328438 - RNA, 19 nt, Homo sapiens
  misc_RNA (1)...(19): siRNA sense strand
aggcaaacucuguugucuu

SEQ ID NO: 2328439 - RNA, 19 nt, Homo sapiens
  misc_RNA (1)...(19): siRNA sense strand
gcuuuagugaaguugggaa

SEQ ID NO: 2328440 - RNA, 19 nt, Homo sapiens
  misc_RNA (1)...(19): siRNA sense strand
caggaaagcuugucugggu

SEQ ID NO: 2328441 - RNA, 19 nt, Homo sapiens
  misc_RNA (1)...(19): siRNA sense strand
gugacaaaauggugugcua

SEQ ID NO: 2328442 - RNA, 19 nt, Homo sapiens
  misc_RNA (1)...(19): siRNA sense strand
cugugguucuugugggauu

SEQ ID NO: 2328443 - RNA, 19 nt, Homo sapiens
  misc_RNA (1)...(19): siRNA sense strand
cugccuuuccagugacaaa

SEQ ID NO: 2328444 - RNA, 19 nt, Homo sapiens
  misc_RNA (1)...(19): siRNA sense strand
caacuuaauugaaaggaga

SEQ ID NO: 2328445 - RNA, 19 nt, Homo sapiens
  misc_RNA (1)...(19): siRNA sense strand
cugaaaugcagaugcccaa

SEQ ID NO: 2328446 - RNA, 19 nt, Homo sapiens
  misc_RNA (1)...(19): siRNA sense strand
caucagaaggugcgggagu

SEQ ID NO: 2328447 - RNA, 19 nt, Homo sapiens
  misc_RNA (1)...(19): siRNA sense strand
cugagagggaguuggauga

SEQ ID NO: 2328448 - RNA, 19 nt, Homo sapiens
  misc_RNA (1)...(19): siRNA sense strand
ccaagaaggaucuggaccu

SEQ ID NO: 2328449 - RNA, 19 nt, Homo sapiens
  misc_RNA (1)...(19): siRNA sense strand
gggagguguugaaggugca

SEQ ID NO: 2328450 - RNA, 19 nt, Homo sapiens
  misc_RNA (1)...(19): siRNA sense strand
cgggaguaccuguccgaga

SEQ ID NO: 2328451 - RNA, 19 nt, Homo sapiens
  misc_RNA (1)...(19): siRNA sense strand
ugaaaggagacgaagguuc

SEQ ID NO: 2328452 - RNA, 19 nt, Homo sapiens
  misc_RNA (1)...(19): siRNA sense strand
gcacauugcagaagaggca

SEQ ID NO: 2328453 - RNA, 19 nt, Homo sapiens
  misc_RNA (1)...(19): siRNA sense strand
aggaaauccaacucaaaga

SEQ ID NO: 2328454 - RNA, 19 nt, Homo sapiens
  misc_RNA (1)...(19): siRNA sense strand
gcacauugcagaagaggca

SEQ ID NO: 2328455 - RNA, 19 nt, Homo sapiens
  misc_RNA (1)...(19): siRNA sense strand
cuuggaacgcacagaggaa

SEQ ID NO: 2328456 - RNA, 19 nt, Homo sapiens
  misc_RNA (1)...(19): siRNA sense strand
uggugaucauugaaggaga

SEQ ID NO: 2328457 - RNA, 19 nt, Homo sapiens
  misc_RNA (1)...(19): siRNA sense strand
aggaaauccaacucaaaga

SEQ ID NO: 2328458 - RNA, 19 nt, Homo sapiens
  misc_RNA (1)...(19): siRNA sense strand
ugaccagcgaagagagaga

SEQ ID NO: 2328459 - RNA, 19 nt, Homo sapiens
  misc_RNA (1)...(19): siRNA sense strand
agggaaaaccugcggagaa

SEQ ID NO: 2328460 - RNA, 19 nt, Homo sapiens
  misc_RNA (1)...(19): siRNA sense strand
agaagaaggaggagcugga

SEQ ID NO: 2328461 - RNA, 19 nt, Homo sapiens
  misc_RNA (1)...(19): siRNA sense strand
ucaagaagaagaaggagga

SEQ ID NO: 2328462 - RNA, 19 nt, Homo sapiens
  misc_RNA (1)...(19): siRNA sense strand
acucggagauccagaggga

SEQ ID NO: 2328463 - RNA, 19 nt, Homo sapiens
  misc_RNA (1)...(19): siRNA sense strand
agaagaagaaggaggagcu

SEQ ID NO: 2328464 - RNA, 19 nt, Homo sapiens
  misc_RNA (1)...(19): siRNA sense strand
ucaucaagaagaagaagga

SEQ ID NO: 2328465 - RNA, 19 nt, Homo sapiens
  misc_RNA (1)...(19): siRNA sense strand
guauaugacaauuggccaa

SEQ ID NO: 2328466 - RNA, 19 nt, Homo sapiens
  misc_RNA (1)...(19): siRNA sense strand
cgugagaagacuggagaga

SEQ ID NO: 2328467 - RNA, 19 nt, Homo sapiens
  misc_RNA (1)...(19): siRNA sense strand
gggaagaagagcaggucag

SEQ ID NO: 2328468 - RNA, 19 nt, Homo sapiens
  misc_RNA (1)...(19): siRNA sense strand
ucucaaggucagaggaauc

SEQ ID NO: 2328469 - RNA, 19 nt, Homo sapiens
  misc_RNA (1)...(19): siRNA sense strand
acuuauuuaucaaggacga

SEQ ID NO: 2328470 - RNA, 19 nt, Homo sapiens
  misc_RNA (1)...(19): siRNA sense strand
ccagagagacauuaccaga

SEQ ID NO: 2328471 - RNA, 19 nt, Homo sapiens
  misc_RNA (1)...(19): siRNA sense strand
aagaggaaccagagcgcaa

SEQ ID NO: 2328472 - RNA, 19 nt, Homo sapiens
  misc_RNA (1)...(19): siRNA sense strand
ggaagaagaagauucggaa

SEQ ID NO: 2328473 - RNA, 19 nt, Homo sapiens
  misc_RNA (1)...(19): siRNA sense strand
aaccagagcgcaagcgaaa

SEQ ID NO: 2328474 - RNA, 19 nt, Homo sapiens
  misc_RNA (1)...(19): siRNA sense strand
ggaaacagcagcagcagga

SEQ ID NO: 2328475 - RNA, 19 nt, Homo sapiens
  misc_RNA (1)...(19): siRNA sense strand
ucaugaagcuggugagccu

SEQ ID NO: 2328476 - RNA, 19 nt, Homo sapiens
  misc_RNA (1)...(19): siRNA sense strand
cugaagaacagauccggaa

SEQ ID NO: 2328477 - RNA, 19 nt, Homo sapiens
  misc_RNA (1)...(19): siRNA sense strand
ccuugcggcuccaggacaa

SEQ ID NO: 2328478 - RNA, 19 nt, Homo sapiens
  misc_RNA (1)...(19): siRNA sense strand
gcgaaggcugcaagggcuu

SEQ ID NO: 2328479 - RNA, 19 nt, Homo sapiens
  misc_RNA (1)...(19): siRNA sense strand
cuguaaaggaggagggucc

SEQ ID NO: 2328480 - RNA, 19 nt, Homo sapiens
  misc_RNA (1)...(19): siRNA sense strand
gaaccagagcgcaagcgaa

SEQ ID NO: 2328481 - RNA, 19 nt, Homo sapiens
  misc_RNA (1)...(19): siRNA sense strand
aagaagaagauucggaaac

SEQ ID NO: 2328482 - RNA, 19 nt, Homo sapiens
  misc_RNA (1)...(19): siRNA sense strand
ccagagcgcaagcgaaaga

SEQ ID NO: 2328483 - RNA, 19 nt, Homo sapiens
  misc_RNA (1)...(19): siRNA sense strand
cccagaucccgaagaggaa

SEQ ID NO: 2328484 - RNA, 19 nt, Homo sapiens
  misc_RNA (1)...(19): siRNA sense strand
cggaagaagaagauucgga

SEQ ID NO: 2328485 - RNA, 19 nt, Homo sapiens
  misc_RNA (1)...(19): siRNA sense strand
ucaagaggccgcaggacca

SEQ ID NO: 2328486 - RNA, 19 nt, Homo sapiens
  misc_RNA (1)...(19): siRNA sense strand
caaacuaaacaauaggaga

SEQ ID NO: 2328487 - RNA, 19 nt, Homo sapiens
  misc_RNA (1)...(19): siRNA sense strand
aggcaauaugguagcaaaa

SEQ ID NO: 2328488 - RNA, 19 nt, Homo sapiens
  misc_RNA (1)...(19): siRNA sense strand
ucaaugauguggaccguga

SEQ ID NO: 2328489 - RNA, 19 nt, Homo sapiens
  misc_RNA (1)...(19): siRNA sense strand
auaucuacccaaagccaaa

SEQ ID NO: 2328490 - RNA, 19 nt, Homo sapiens
  misc_RNA (1)...(19): siRNA sense strand
agccaaacucagauaucua

SEQ ID NO: 2328491 - RNA, 19 nt, Homo sapiens
  misc_RNA (1)...(19): siRNA sense strand
ccacugacauggauggcua

SEQ ID NO: 2328492 - RNA, 19 nt, Homo sapiens
  misc_RNA (1)...(19): siRNA sense strand
uugugaaguuuguggucaa

SEQ ID NO: 2328493 - RNA, 19 nt, Homo sapiens
  misc_RNA (1)...(19): siRNA sense strand
uggaagugccagagagugu

SEQ ID NO: 2328494 - RNA, 19 nt, Homo sapiens
  misc_RNA (1)...(19): siRNA sense strand
caucaaaguagcaacccua

SEQ ID NO: 2328495 - RNA, 19 nt, Homo sapiens
  misc_RNA (1)...(19): siRNA sense strand
ugguauaagcaacagacua

SEQ ID NO: 2328496 - RNA, 19 nt, Homo sapiens
  misc_RNA (1)...(19): siRNA sense strand
gaccauauccagcaggcaa

SEQ ID NO: 2328497 - RNA, 19 nt, Homo sapiens
  misc_RNA (1)...(19): siRNA sense strand
ggagaaaccaugagggugg

SEQ ID NO: 2328498 - RNA, 19 nt, Homo sapiens
  misc_RNA (1)...(19): siRNA sense strand
ccccagggaaugaggauua

SEQ ID NO: 2328499 - RNA, 19 nt, Homo sapiens
  misc_RNA (1)...(19): siRNA sense strand
gccacaagguuccaggaga

SEQ ID NO: 2328500 - RNA, 19 nt, Homo sapiens
  misc_RNA (1)...(19): siRNA sense strand
agauaagauuacugagcuc

SEQ ID NO: 2328501 - RNA, 19 nt, Homo sapiens
  misc_RNA (1)...(19): siRNA sense strand
ggaaugaggauuagccuuc

SEQ ID NO: 2328502 - RNA, 19 nt, Homo sapiens
  misc_RNA (1)...(19): siRNA sense strand
gggaaugaggauuagccuu

SEQ ID NO: 2328503 - RNA, 19 nt, Homo sapiens
  misc_RNA (1)...(19): siRNA sense strand
gauuaugaguuucuggcca

SEQ ID NO: 2328504 - RNA, 19 nt, Homo sapiens
  misc_RNA (1)...(19): siRNA sense strand
auguaaagaaugugggaaa

SEQ ID NO: 2328505 - RNA, 19 nt, Homo sapiens
  misc_RNA (1)...(19): siRNA sense strand
gugcaaugaaugugacaaa

SEQ ID NO: 2328506 - RNA, 19 nt, Homo sapiens
  misc_RNA (1)...(19): siRNA sense strand
augcaaugaaugugggaaa

SEQ ID NO: 2328507 - RNA, 19 nt, Homo sapiens
  misc_RNA (1)...(19): siRNA sense strand
gugucaugaaugugggaaa

SEQ ID NO: 2328508 - RNA, 19 nt, Homo sapiens
  misc_RNA (1)...(19): siRNA sense strand
ggaaauaaagguaaccgaa

SEQ ID NO: 2328509 - RNA, 19 nt, Homo sapiens
  misc_RNA (1)...(19): siRNA sense strand
guguaaugagugugggaga

SEQ ID NO: 2328510 - RNA, 19 nt, Homo sapiens
  misc_RNA (1)...(19): siRNA sense strand
uacucauacuggagagaaa

SEQ ID NO: 2328511 - RNA, 19 nt, Homo sapiens
  misc_RNA (1)...(19): siRNA sense strand
cagagguaauaguggaaaa

SEQ ID NO: 2328512 - RNA, 19 nt, Homo sapiens
  misc_RNA (1)...(19): siRNA sense strand
augugaugaaugugggaaa

SEQ ID NO: 2328513 - RNA, 19 nt, Homo sapiens
  misc_RNA (1)...(19): siRNA sense strand
aacucauacucaagagaaa

SEQ ID NO: 2328514 - RNA, 19 nt, Homo sapiens
  misc_RNA (1)...(19): siRNA sense strand
ggauguaaugauuguggaa

SEQ ID NO: 2328515 - RNA, 19 nt, Homo sapiens
  misc_RNA (1)...(19): siRNA sense strand
agacacugccaaaggaaau

SEQ ID NO: 2328516 - RNA, 19 nt, Homo sapiens
  misc_RNA (1)...(19): siRNA sense strand
ccuuauaaaccaucaaaga

SEQ ID NO: 2328517 - RNA, 19 nt, Homo sapiens
  misc_RNA (1)...(19): siRNA sense strand
gggacagagccauggauca

SEQ ID NO: 2328518 - RNA, 19 nt, Homo sapiens
  misc_RNA (1)...(19): siRNA sense strand
cccuauaagugcaaugaau

SEQ ID NO: 2328519 - RNA, 19 nt, Homo sapiens
  misc_RNA (1)...(19): siRNA sense strand
guggaaaauccuucagaua

SEQ ID NO: 2328520 - RNA, 19 nt, Homo sapiens
  misc_RNA (1)...(19): siRNA sense strand
cuuuauggaacaucagaaa

SEQ ID NO: 2328521 - RNA, 19 nt, Homo sapiens
  misc_RNA (1)...(19): siRNA sense strand
uagagagacagcaggcaaa

SEQ ID NO: 2328522 - RNA, 19 nt, Homo sapiens
  misc_RNA (1)...(19): siRNA sense strand
gcauaagagaauucauaca

SEQ ID NO: 2328523 - RNA, 19 nt, Homo sapiens
  misc_RNA (1)...(19): siRNA sense strand
ccaguuagagcaagggaca

SEQ ID NO: 2328524 - RNA, 19 nt, Homo sapiens
  misc_RNA (1)...(19): siRNA sense strand
ccuuacaaaugcaaugaau

SEQ ID NO: 2328525 - RNA, 19 nt, Homo sapiens
  misc_RNA (1)...(19): siRNA sense strand
ccuuaaucagcaucagaaa

SEQ ID NO: 2328526 - RNA, 19 nt, Homo sapiens
  misc_RNA (1)...(19): siRNA sense strand
gagcauucaaccagaacau

SEQ ID NO: 2328527 - RNA, 19 nt, Homo sapiens
  misc_RNA (1)...(19): siRNA sense strand
aggaugugauaguggacuu

SEQ ID NO: 2328528 - RNA, 19 nt, Homo sapiens
  misc_RNA (1)...(19): siRNA sense strand
gacccuggccagagagauu

SEQ ID NO: 2328529 - RNA, 19 nt, Homo sapiens
  misc_RNA (1)...(19): siRNA sense strand
ucaacaaacaucagagacu

SEQ ID NO: 2328530 - RNA, 19 nt, Homo sapiens
  misc_RNA (1)...(19): siRNA sense strand
gggaauaugaaggcaguuu

SEQ ID NO: 2328531 - RNA, 19 nt, Homo sapiens
  misc_RNA (1)...(19): siRNA sense strand
gcacauaucucauucagca

SEQ ID NO: 2328532 - RNA, 19 nt, Homo sapiens
  misc_RNA (1)...(19): siRNA sense strand
ucuuguaagugcaaugaau

SEQ ID NO: 2328533 - RNA, 19 nt, Homo sapiens
  misc_RNA (1)...(19): siRNA sense strand
aggcaaaccaacagacacu

SEQ ID NO: 2328534 - RNA, 19 nt, Homo sapiens
  misc_RNA (1)...(19): siRNA sense strand
aagaauucauacuggagau

SEQ ID NO: 2328535 - RNA, 19 nt, Homo sapiens
  misc_RNA (1)...(19): siRNA sense strand
gagaaaucuuguaagugca

SEQ ID NO: 2328536 - RNA, 19 nt, Homo sapiens
  misc_RNA (1)...(19): siRNA sense strand
uuguaaugaguguggaaaa

SEQ ID NO: 2328537 - RNA, 19 nt, Homo sapiens
  misc_RNA (1)...(19): siRNA sense strand
cagacacugccaaaggaaa

SEQ ID NO: 2328538 - RNA, 19 nt, Homo sapiens
  misc_RNA (1)...(19): siRNA sense strand
uucuaaaccugaugugauu

SEQ ID NO: 2328539 - RNA, 19 nt, Homo sapiens
  misc_RNA (1)...(19): siRNA sense strand
gggaaaagugucaauguga

SEQ ID NO: 2328540 - RNA, 19 nt, Homo sapiens
  misc_RNA (1)...(19): siRNA sense strand
gugaaaaccuuauaaacca

SEQ ID NO: 2328541 - RNA, 19 nt, Homo sapiens
  misc_RNA (1)...(19): siRNA sense strand
cagaauucaaacccaguua

SEQ ID NO: 2328542 - RNA, 19 nt, Homo sapiens
  misc_RNA (1)...(19): siRNA sense strand
ugucaugaaugugggaaaa

SEQ ID NO: 2328543 - RNA, 19 nt, Homo sapiens
  misc_RNA (1)...(19): siRNA sense strand
uugcuagaaaguugggaau

SEQ ID NO: 2328544 - RNA, 19 nt, Homo sapiens
  misc_RNA (1)...(19): siRNA sense strand
uuagagagacagcaggcaa

SEQ ID NO: 2328545 - RNA, 19 nt, Homo sapiens
  misc_RNA (1)...(19): siRNA sense strand
cuuauucagcauaggaaga

SEQ ID NO: 2328546 - RNA, 19 nt, Homo sapiens
  misc_RNA (1)...(19): siRNA sense strand
aaggcaguuuagagagaca

SEQ ID NO: 2328547 - RNA, 19 nt, Homo sapiens
  misc_RNA (1)...(19): siRNA sense strand
aaaugugaucaguguggaa

SEQ ID NO: 2328548 - RNA, 19 nt, Homo sapiens
  misc_RNA (1)...(19): siRNA sense strand
acuuguaaugaguguggaa

SEQ ID NO: 2328549 - RNA, 19 nt, Homo sapiens
  misc_RNA (1)...(19): siRNA sense strand
cuauaagugcaaugaaugu

SEQ ID NO: 2328550 - RNA, 19 nt, Homo sapiens
  misc_RNA (1)...(19): siRNA sense strand
agagauuuguucagggaug

SEQ ID NO: 2328551 - RNA, 19 nt, Homo sapiens
  misc_RNA (1)...(19): siRNA sense strand
aagaagagcuaucuccaga

SEQ ID NO: 2328552 - RNA, 19 nt, Homo sapiens
  misc_RNA (1)...(19): siRNA sense strand
cuuucaaggaugugauagu

SEQ ID NO: 2328553 - RNA, 19 nt, Homo sapiens
  misc_RNA (1)...(19): siRNA sense strand
ccguacgaaugcaaugaau

SEQ ID NO: 2328554 - RNA, 19 nt, Homo sapiens
  misc_RNA (1)...(19): siRNA sense strand
aaacccuaccaguguaaua

SEQ ID NO: 2328555 - RNA, 19 nt, Homo sapiens
  misc_RNA (1)...(19): siRNA sense strand
aguuagagcaagggacaga

SEQ ID NO: 2328556 - RNA, 19 nt, Homo sapiens
  misc_RNA (1)...(19): siRNA sense strand
acccuaugauugugcagaa

SEQ ID NO: 2328557 - RNA, 19 nt, Homo sapiens
  misc_RNA (1)...(19): siRNA sense strand
guguaaggaaugugggaaa

SEQ ID NO: 2328558 - RNA, 19 nt, Homo sapiens
  misc_RNA (1)...(19): siRNA sense strand
gggaaagccuucagccaga

SEQ ID NO: 2328559 - RNA, 19 nt, Homo sapiens
  misc_RNA (1)...(19): siRNA sense strand
ucagaaaacacgagagaau

SEQ ID NO: 2328560 - RNA, 19 nt, Homo sapiens
  misc_RNA (1)...(19): siRNA sense strand
gugcgaucucugugggaaa

SEQ ID NO: 2328561 - RNA, 19 nt, Homo sapiens
  misc_RNA (1)...(19): siRNA sense strand
ggaaagaggcccuacgagu

SEQ ID NO: 2328562 - RNA, 19 nt, Homo sapiens
  misc_RNA (1)...(19): siRNA sense strand
agcaaauggcugugaucua

SEQ ID NO: 2328563 - RNA, 19 nt, Homo sapiens
  misc_RNA (1)...(19): siRNA sense strand
gggaaauccuucaaccaga

SEQ ID NO: 2328564 - RNA, 19 nt, Homo sapiens
  misc_RNA (1)...(19): siRNA sense strand
agggaaugcgggaaagauu

SEQ ID NO: 2328565 - RNA, 19 nt, Homo sapiens
  misc_RNA (1)...(19): siRNA sense strand
ggacaaaccuuccuccaga

SEQ ID NO: 2328566 - RNA, 19 nt, Homo sapiens
  misc_RNA (1)...(19): siRNA sense strand
augccagaagugugggaaa

SEQ ID NO: 2328567 - RNA, 19 nt, Homo sapiens
  misc_RNA (1)...(19): siRNA sense strand
agaacagguuagagucaca

SEQ ID NO: 2328568 - RNA, 19 nt, Homo sapiens
  misc_RNA (1)...(19): siRNA sense strand
aauucauacaggagagaga

SEQ ID NO: 2328569 - RNA, 19 nt, Homo sapiens
  misc_RNA (1)...(19): siRNA sense strand
augaugagcucuucggaca

SEQ ID NO: 2328570 - RNA, 19 nt, Homo sapiens
  misc_RNA (1)...(19): siRNA sense strand
aggaaagagguuuggagca

SEQ ID NO: 2328571 - RNA, 19 nt, Homo sapiens
  misc_RNA (1)...(19): siRNA sense strand
gcugugaucuacaaggaga

SEQ ID NO: 2328572 - RNA, 19 nt, Homo sapiens
  misc_RNA (1)...(19): siRNA sense strand
cgagagaauucauacagga

SEQ ID NO: 2328573 - RNA, 19 nt, Homo sapiens
  misc_RNA (1)...(19): siRNA sense strand
ggucacaccucauccgaca

SEQ ID NO: 2328574 - RNA, 19 nt, Homo sapiens
  misc_RNA (1)...(19): siRNA sense strand
ugauccagcaccagagaau

SEQ ID NO: 2328575 - RNA, 19 nt, Homo sapiens
  misc_RNA (1)...(19): siRNA sense strand
gugagcaggacgaagaaaa

SEQ ID NO: 2328576 - RNA, 19 nt, Homo sapiens
  misc_RNA (1)...(19): siRNA sense strand
ugggaagaaaccauacaaa

SEQ ID NO: 2328577 - RNA, 19 nt, Homo sapiens
  misc_RNA (1)...(19): siRNA sense strand
augcgauugugcagaaaca

SEQ ID NO: 2328578 - RNA, 19 nt, Homo sapiens
  misc_RNA (1)...(19): siRNA sense strand
ccucagaaaacacgagaga

SEQ ID NO: 2328579 - RNA, 19 nt, Homo sapiens
  misc_RNA (1)...(19): siRNA sense strand
aguaagaaauacagcacaa

SEQ ID NO: 2328580 - RNA, 19 nt, Homo sapiens
  misc_RNA (1)...(19): siRNA sense strand
gugucaggaaugugggaaa

SEQ ID NO: 2328581 - RNA, 19 nt, Homo sapiens
  misc_RNA (1)...(19): siRNA sense strand
uggaaaugcugguguuaga

SEQ ID NO: 2328582 - RNA, 19 nt, Homo sapiens
  misc_RNA (1)...(19): siRNA sense strand
ccagaaagaauauuggaau

SEQ ID NO: 2328583 - RNA, 19 nt, Homo sapiens
  misc_RNA (1)...(19): siRNA sense strand
gaacaaagaaugaggucac

SEQ ID NO: 2328584 - RNA, 19 nt, Homo sapiens
  misc_RNA (1)...(19): siRNA sense strand
cagaaauggcaucgagcuu

SEQ ID NO: 2328585 - RNA, 19 nt, Homo sapiens
  misc_RNA (1)...(19): siRNA sense strand
ggccagagauccacucaaa

SEQ ID NO: 2328586 - RNA, 19 nt, Homo sapiens
  misc_RNA (1)...(19): siRNA sense strand
uggaacacucacaaagaaa

SEQ ID NO: 2328587 - RNA, 19 nt, Homo sapiens
  misc_RNA (1)...(19): siRNA sense strand
augaaagagcugugcauga

SEQ ID NO: 2328588 - RNA, 19 nt, Homo sapiens
  misc_RNA (1)...(19): siRNA sense strand
agucagaguaagaaauaca

SEQ ID NO: 2328589 - RNA, 19 nt, Homo sapiens
  misc_RNA (1)...(19): siRNA sense strand
ccagucagaguaagaaaua

SEQ ID NO: 2328590 - RNA, 19 nt, Homo sapiens
  misc_RNA (1)...(19): siRNA sense strand
guagcuuaugcaagagaaa

SEQ ID NO: 2328591 - RNA, 19 nt, Homo sapiens
  misc_RNA (1)...(19): siRNA sense strand
gaaaggaggcagugcucuu

SEQ ID NO: 2328592 - RNA, 19 nt, Homo sapiens
  misc_RNA (1)...(19): siRNA sense strand
ccaaggaagaaaagaaaga

SEQ ID NO: 2328593 - RNA, 19 nt, Homo sapiens
  misc_RNA (1)...(19): siRNA sense strand
aaaacaaugggcagggaaa

SEQ ID NO: 2328594 - RNA, 19 nt, Homo sapiens
  misc_RNA (1)...(19): siRNA sense strand
uauggaucuucaugggaaa

SEQ ID NO: 2328595 - RNA, 19 nt, Homo sapiens
  misc_RNA (1)...(19): siRNA sense strand
cagaagaagggaagcaugu

SEQ ID NO: 2328596 - RNA, 19 nt, Homo sapiens
  misc_RNA (1)...(19): siRNA sense strand
uggaauucuugcagaggga

SEQ ID NO: 2328597 - RNA, 19 nt, Homo sapiens
  misc_RNA (1)...(19): siRNA sense strand
gagggagccugauggaaca

SEQ ID NO: 2328598 - RNA, 19 nt, Homo sapiens
  misc_RNA (1)...(19): siRNA sense strand
cucuaggguuaaagcuaaa

SEQ ID NO: 2328599 - RNA, 19 nt, Homo sapiens
  misc_RNA (1)...(19): siRNA sense strand
agaacugggugcagaagca

SEQ ID NO: 2328600 - RNA, 19 nt, Homo sapiens
  misc_RNA (1)...(19): siRNA sense strand
augauguaaugcaggauau

SEQ ID NO: 2328601 - RNA, 19 nt, Homo sapiens
  misc_RNA (1)...(19): siRNA sense strand
gacuagugggucugugaaa

SEQ ID NO: 2328602 - RNA, 19 nt, Homo sapiens
  misc_RNA (1)...(19): siRNA sense strand
ucagccaacuucagaaauu

SEQ ID NO: 2328603 - RNA, 19 nt, Homo sapiens
  misc_RNA (1)...(19): siRNA sense strand
auguaaugcaggauaucua

SEQ ID NO: 2328604 - RNA, 19 nt, Homo sapiens
  misc_RNA (1)...(19): siRNA sense strand
ugaaagagaacuccaguca

SEQ ID NO: 2328605 - RNA, 19 nt, Homo sapiens
  misc_RNA (1)...(19): siRNA sense strand
ccacagaagaagggaagca

SEQ ID NO: 2328606 - RNA, 19 nt, Homo sapiens
  misc_RNA (1)...(19): siRNA sense strand
aaugaaaauugcccagaaa

SEQ ID NO: 2328607 - RNA, 19 nt, Homo sapiens
  misc_RNA (1)...(19): siRNA sense strand
ccaaagaauucacacagga

SEQ ID NO: 2328608 - RNA, 19 nt, Homo sapiens
  misc_RNA (1)...(19): siRNA sense strand
gagaaacuuuaguaggcga

SEQ ID NO: 2328609 - RNA, 19 nt, Homo sapiens
  misc_RNA (1)...(19): siRNA sense strand
cuucagaaauugugccauc

SEQ ID NO: 2328610 - RNA, 19 nt, Homo sapiens
  misc_RNA (1)...(19): siRNA sense strand
guguguuccagaaagaaua

SEQ ID NO: 2328611 - RNA, 19 nt, Homo sapiens
  misc_RNA (1)...(19): siRNA sense strand
agaaucaaacacuggaaga

SEQ ID NO: 2328612 - RNA, 19 nt, Homo sapiens
  misc_RNA (1)...(19): siRNA sense strand
gaagcaucauccacagaau

SEQ ID NO: 2328613 - RNA, 19 nt, Homo sapiens
  misc_RNA (1)...(19): siRNA sense strand
gggcuggaacacucacaaa

SEQ ID NO: 2328614 - RNA, 19 nt, Homo sapiens
  misc_RNA (1)...(19): siRNA sense strand
cccuauaaaugucaacaau

SEQ ID NO: 2328615 - RNA, 19 nt, Homo sapiens
  misc_RNA (1)...(19): siRNA sense strand
gcuuuagucauaacacaaa

SEQ ID NO: 2328616 - RNA, 19 nt, Homo sapiens
  misc_RNA (1)...(19): siRNA sense strand
gcuugagacuaucagccaa

SEQ ID NO: 2328617 - RNA, 19 nt, Homo sapiens
  misc_RNA (1)...(19): siRNA sense strand
cugauggaacaaagaauga

SEQ ID NO: 2328618 - RNA, 19 nt, Homo sapiens
  misc_RNA (1)...(19): siRNA sense strand
ggaacaaagaaugagguca

SEQ ID NO: 2328619 - RNA, 19 nt, Homo sapiens
  misc_RNA (1)...(19): siRNA sense strand
ccggaccgcuugagacuau

SEQ ID NO: 2328620 - RNA, 19 nt, Homo sapiens
  misc_RNA (1)...(19): siRNA sense strand
augcucauggugugggaaa

SEQ ID NO: 2328621 - RNA, 19 nt, Homo sapiens
  misc_RNA (1)...(19): siRNA sense strand
gguguguuccagaaagaau

SEQ ID NO: 2328622 - RNA, 19 nt, Homo sapiens
  misc_RNA (1)...(19): siRNA sense strand
uggguguguuccagaaaga

SEQ ID NO: 2328623 - RNA, 19 nt, Homo sapiens
  misc_RNA (1)...(19): siRNA sense strand
cuagugggucugugaaaga

SEQ ID NO: 2328624 - RNA, 19 nt, Homo sapiens
  misc_RNA (1)...(19): siRNA sense strand
acaaagaaacccagccugu

SEQ ID NO: 2328625 - RNA, 19 nt, Homo sapiens
  misc_RNA (1)...(19): siRNA sense strand
gaaucaaacacuggaagau

SEQ ID NO: 2328626 - RNA, 19 nt, Homo sapiens
  misc_RNA (1)...(19): siRNA sense strand
ccuuuuaagugucaggaau

SEQ ID NO: 2328627 - RNA, 19 nt, Homo sapiens
  misc_RNA (1)...(19): siRNA sense strand
uuauuaaacaccagagaac

SEQ ID NO: 2328628 - RNA, 19 nt, Homo sapiens
  misc_RNA (1)...(19): siRNA sense strand
aggaagaguggcaauuauu

SEQ ID NO: 2328629 - RNA, 19 nt, Homo sapiens
  misc_RNA (1)...(19): siRNA sense strand
auguaaugaaugugggaaa

SEQ ID NO: 2328630 - RNA, 19 nt, Homo sapiens
  misc_RNA (1)...(19): siRNA sense strand
guguaaugagugugguaaa

SEQ ID NO: 2328631 - RNA, 19 nt, Homo sapiens
  misc_RNA (1)...(19): siRNA sense strand
acacaggagaggaaggaau

SEQ ID NO: 2328632 - RNA, 19 nt, Homo sapiens
  misc_RNA (1)...(19): siRNA sense strand
auguaaugaauguggcaaa

SEQ ID NO: 2328633 - RNA, 19 nt, Homo sapiens
  misc_RNA (1)...(19): siRNA sense strand
gugcagugaauguggaaga

SEQ ID NO: 2328634 - RNA, 19 nt, Homo sapiens
  misc_RNA (1)...(19): siRNA sense strand
gcuucaagaacucggaaau

SEQ ID NO: 2328635 - RNA, 19 nt, Homo sapiens
  misc_RNA (1)...(19): siRNA sense strand
cccuaugagugcagugaau

SEQ ID NO: 2328636 - RNA, 19 nt, Homo sapiens
  misc_RNA (1)...(19): siRNA sense strand
gcguuuaaccagagcucau

SEQ ID NO: 2328637 - RNA, 19 nt, Homo sapiens
  misc_RNA (1)...(19): siRNA sense strand
cauggaugcuggagggcga

SEQ ID NO: 2328638 - RNA, 19 nt, Homo sapiens
  misc_RNA (1)...(19): siRNA sense strand
gauuauaucuggaucacca

SEQ ID NO: 2328639 - RNA, 19 nt, Homo sapiens
  misc_RNA (1)...(19): siRNA sense strand
augcagcgagugugagaaa

SEQ ID NO: 2328640 - RNA, 19 nt, Homo sapiens
  misc_RNA (1)...(19): siRNA sense strand
cugaaaccucacagagcaa

SEQ ID NO: 2328641 - RNA, 19 nt, Homo sapiens
  misc_RNA (1)...(19): siRNA sense strand
ggaacaaagggaaggcgca

SEQ ID NO: 2328642 - RNA, 19 nt, Homo sapiens
  misc_RNA (1)...(19): siRNA sense strand
cggaaauccugaaaccuca

SEQ ID NO: 2328643 - RNA, 19 nt, Homo sapiens
  misc_RNA (1)...(19): siRNA sense strand
gaacaaagggaaggcgcau

SEQ ID NO: 2328644 - RNA, 19 nt, Homo sapiens
  misc_RNA (1)...(19): siRNA sense strand
uggaucaccaccagagcaa

SEQ ID NO: 2328645 - RNA, 19 nt, Homo sapiens
  misc_RNA (1)...(19): siRNA sense strand
gugcagugaaugugggaag

SEQ ID NO: 2328646 - RNA, 19 nt, Homo sapiens
  misc_RNA (1)...(19): siRNA sense strand
cagcaucagaagagccaca

SEQ ID NO: 2328647 - RNA, 19 nt, Homo sapiens
  misc_RNA (1)...(19): siRNA sense strand
cuacaagugcagcgagugu

SEQ ID NO: 2328648 - RNA, 19 nt, Homo sapiens
  misc_RNA (1)...(19): siRNA sense strand
cuacaagugcagcgagugu

SEQ ID NO: 2328649 - RNA, 19 nt, Homo sapiens
  misc_RNA (1)...(19): siRNA sense strand
acacaggcgugaaacccua

SEQ ID NO: 2328650 - RNA, 19 nt, Homo sapiens
  misc_RNA (1)...(19): siRNA sense strand
gccuucagccagagugcaa

SEQ ID NO: 2328651 - RNA, 19 nt, Homo sapiens
  misc_RNA (1)...(19): siRNA sense strand
ucacaaaccaucagaggac

SEQ ID NO: 2328652 - RNA, 19 nt, Homo sapiens
  misc_RNA (1)...(19): siRNA sense strand
cugaaaggccacagcauua

SEQ ID NO: 2328653 - RNA, 19 nt, Homo sapiens
  misc_RNA (1)...(19): siRNA sense strand
cuuacaagcucaagaggca

SEQ ID NO: 2328654 - RNA, 19 nt, Homo sapiens
  misc_RNA (1)...(19): siRNA sense strand
gcagcaagcaauaugacaa

SEQ ID NO: 2328655 - RNA, 19 nt, Homo sapiens
  misc_RNA (1)...(19): siRNA sense strand
ccaagaaacaccugcagga

SEQ ID NO: 2328656 - RNA, 19 nt, Homo sapiens
  misc_RNA (1)...(19): siRNA sense strand
gcacaugguuaaaaggcau

SEQ ID NO: 2328657 - RNA, 19 nt, Homo sapiens
  misc_RNA (1)...(19): siRNA sense strand
uguugagggaggaggccaa

SEQ ID NO: 2328658 - RNA, 19 nt, Homo sapiens
  misc_RNA (1)...(19): siRNA sense strand
aaaggaagcacgacgauga

SEQ ID NO: 2328659 - RNA, 19 nt, Homo sapiens
  misc_RNA (1)...(19): siRNA sense strand
ccgaacaucugaaaggcca

SEQ ID NO: 2328660 - RNA, 19 nt, Homo sapiens
  misc_RNA (1)...(19): siRNA sense strand
uguccaaacucuuaaggca

SEQ ID NO: 2328661 - RNA, 19 nt, Homo sapiens
  misc_RNA (1)...(19): siRNA sense strand
ccuuaaauauggaugaggu

SEQ ID NO: 2328662 - RNA, 19 nt, Homo sapiens
  misc_RNA (1)...(19): siRNA sense strand
ucuuuggacaggagggaga

SEQ ID NO: 2328663 - RNA, 19 nt, Homo sapiens
  misc_RNA (1)...(19): siRNA sense strand
cuaacaguggacacagaua

SEQ ID NO: 2328664 - RNA, 19 nt, Homo sapiens
  misc_RNA (1)...(19): siRNA sense strand
acuacugacaccagccaaa

SEQ ID NO: 2328665 - RNA, 19 nt, Homo sapiens
  misc_RNA (1)...(19): siRNA sense strand
gauguggacacuuggaaaa

SEQ ID NO: 2328666 - RNA, 19 nt, Homo sapiens
  misc_RNA (1)...(19): siRNA sense strand
gcuccuuaaauauggauga

SEQ ID NO: 2328667 - RNA, 19 nt, Homo sapiens
  misc_RNA (1)...(19): siRNA sense strand
cuuaccagccagagacaga

SEQ ID NO: 2328668 - RNA, 19 nt, Homo sapiens
  misc_RNA (1)...(19): siRNA sense strand
gagucacaccggcgagaga

SEQ ID NO: 2328669 - RNA, 19 nt, Homo sapiens
  misc_RNA (1)...(19): siRNA sense strand
ccacagacgcagagcaaga

SEQ ID NO: 2328670 - RNA, 19 nt, Homo sapiens
  misc_RNA (1)...(19): siRNA sense strand
guauggaggaagaggaaga

SEQ ID NO: 2328671 - RNA, 19 nt, Homo sapiens
  misc_RNA (1)...(19): siRNA sense strand
accuauaacuguacagaau

SEQ ID NO: 2328672 - RNA, 19 nt, Homo sapiens
  misc_RNA (1)...(19): siRNA sense strand
aggcauuguauuuggagaa

SEQ ID NO: 2328673 - RNA, 19 nt, Homo sapiens
  misc_RNA (1)...(19): siRNA sense strand
agguggagaucgagagcga

SEQ ID NO: 2328674 - RNA, 19 nt, Homo sapiens
  misc_RNA (1)...(19): siRNA sense strand
ugagggaucacgagcgaaa

SEQ ID NO: 2328675 - RNA, 19 nt, Homo sapiens
  misc_RNA (1)...(19): siRNA sense strand
gaucaagcacacaggugaa

SEQ ID NO: 2328676 - RNA, 19 nt, Homo sapiens
  misc_RNA (1)...(19): siRNA sense strand
aaaugaggcaccagcguaa

SEQ ID NO: 2328677 - RNA, 19 nt, Homo sapiens
  misc_RNA (1)...(19): siRNA sense strand
aggaaagcccggagaaacu

SEQ ID NO: 2328678 - RNA, 19 nt, Homo sapiens
  misc_RNA (1)...(19): siRNA sense strand
cuucgaaccagcagggcua

SEQ ID NO: 2328679 - RNA, 19 nt, Homo sapiens
  misc_RNA (1)...(19): siRNA sense strand
agaaagaguucgagaccuc

SEQ ID NO: 2328680 - RNA, 19 nt, Homo sapiens
  misc_RNA (1)...(19): siRNA sense strand
gcacaugaagagacaccaa

SEQ ID NO: 2328681 - RNA, 19 nt, Homo sapiens
  misc_RNA (1)...(19): siRNA sense strand
gguagaagaaagacacaca

SEQ ID NO: 2328682 - RNA, 19 nt, Homo sapiens
  misc_RNA (1)...(19): siRNA sense strand
cauacggaauuaaggaaaa

SEQ ID NO: 2328683 - RNA, 19 nt, Homo sapiens
  misc_RNA (1)...(19): siRNA sense strand
cagagaagguccuggugca

SEQ ID NO: 2328684 - RNA, 19 nt, Homo sapiens
  misc_RNA (1)...(19): siRNA sense strand
acccaaagaaggccagaaa

SEQ ID NO: 2328685 - RNA, 19 nt, Homo sapiens
  misc_RNA (1)...(19): siRNA sense strand
acauuuguauggaggaaga

SEQ ID NO: 2328686 - RNA, 19 nt, Homo sapiens
  misc_RNA (1)...(19): siRNA sense strand
gcccggagaaacuggauaa

SEQ ID NO: 2328687 - RNA, 19 nt, Homo sapiens
  misc_RNA (1)...(19): siRNA sense strand
gcgccaaggaguuccgcaa

SEQ ID NO: 2328688 - RNA, 19 nt, Homo sapiens
  misc_RNA (1)...(19): siRNA sense strand
acauacggaauuaaggaaa

SEQ ID NO: 2328689 - RNA, 19 nt, Homo sapiens
  misc_RNA (1)...(19): siRNA sense strand
cuguagaccagcagagcau

SEQ ID NO: 2328690 - RNA, 19 nt, Homo sapiens
  misc_RNA (1)...(19): siRNA sense strand
acacaggagugaaggcguu

SEQ ID NO: 2328691 - RNA, 19 nt, Homo sapiens
  misc_RNA (1)...(19): siRNA sense strand
auuauaaaccagacccaaa

SEQ ID NO: 2328692 - RNA, 19 nt, Homo sapiens
  misc_RNA (1)...(19): siRNA sense strand
agacauuuguauggaggaa

SEQ ID NO: 2328693 - RNA, 19 nt, Homo sapiens
  misc_RNA (1)...(19): siRNA sense strand
ugaugaauguggaaagagu

SEQ ID NO: 2328694 - RNA, 19 nt, Homo sapiens
  misc_RNA (1)...(19): siRNA sense strand
acaggaaagcccggagaaa

SEQ ID NO: 2328695 - RNA, 19 nt, Homo sapiens
  misc_RNA (1)...(19): siRNA sense strand
ugucaaugaagcagauaga

SEQ ID NO: 2328696 - RNA, 19 nt, Homo sapiens
  misc_RNA (1)...(19): siRNA sense strand
cuaccugcccuguguguaa

SEQ ID NO: 2328697 - RNA, 19 nt, Homo sapiens
  misc_RNA (1)...(19): siRNA sense strand
uggaggaagaggaagaaca

SEQ ID NO: 2328698 - RNA, 19 nt, Homo sapiens
  misc_RNA (1)...(19): siRNA sense strand
aagaaugguccuaccuaua

SEQ ID NO: 2328699 - RNA, 19 nt, Homo sapiens
  misc_RNA (1)...(19): siRNA sense strand
ucugaugggaugaauguaa

SEQ ID NO: 2328700 - RNA, 19 nt, Homo sapiens
  misc_RNA (1)...(19): siRNA sense strand
aggaacacaugaagacuca

SEQ ID NO: 2328701 - RNA, 19 nt, Homo sapiens
  misc_RNA (1)...(19): siRNA sense strand
acagaauguaguuguguau

SEQ ID NO: 2328702 - RNA, 19 nt, Homo sapiens
  misc_RNA (1)...(19): siRNA sense strand
guggaucuguggaggcauu

SEQ ID NO: 2328703 - RNA, 19 nt, Homo sapiens
  misc_RNA (1)...(19): siRNA sense strand
guaucaaguacaaggucuu

SEQ ID NO: 2328704 - RNA, 19 nt, Homo sapiens
  misc_RNA (1)...(19): siRNA sense strand
acaugaaaacccacagaua

SEQ ID NO: 2328705 - RNA, 19 nt, Homo sapiens
  misc_RNA (1)...(19): siRNA sense strand
aggugugacuauugcaaca

SEQ ID NO: 2328706 - RNA, 19 nt, Homo sapiens
  misc_RNA (1)...(19): siRNA sense strand
cggaaggacugcagccugu

SEQ ID NO: 2328707 - RNA, 19 nt, Homo sapiens
  misc_RNA (1)...(19): siRNA sense strand
aggaaauuacccugacuau

SEQ ID NO: 2328708 - RNA, 19 nt, Homo sapiens
  misc_RNA (1)...(19): siRNA sense strand
augaaaaggaagagaaucu

SEQ ID NO: 2328709 - RNA, 19 nt, Homo sapiens
  misc_RNA (1)...(19): siRNA sense strand
ccuggaagcagaugaagau

SEQ ID NO: 2328710 - RNA, 19 nt, Homo sapiens
  misc_RNA (1)...(19): siRNA sense strand
gccuaugacucgaagcuca

SEQ ID NO: 2328711 - RNA, 19 nt, Homo sapiens
  misc_RNA (1)...(19): siRNA sense strand
aguuacaguuggcugcuaa

SEQ ID NO: 2328712 - RNA, 19 nt, Homo sapiens
  misc_RNA (1)...(19): siRNA sense strand
cuucauaaaugcacccaca

SEQ ID NO: 2328713 - RNA, 19 nt, Homo sapiens
  misc_RNA (1)...(19): siRNA sense strand
uuguauggaggaagaggaa

SEQ ID NO: 2328714 - RNA, 19 nt, Homo sapiens
  misc_RNA (1)...(19): siRNA sense strand
augaauguggaaagaguuu

SEQ ID NO: 2328715 - RNA, 19 nt, Homo sapiens
  misc_RNA (1)...(19): siRNA sense strand
cuguggaggcauuguauuu

SEQ ID NO: 2328716 - RNA, 19 nt, Homo sapiens
  misc_RNA (1)...(19): siRNA sense strand
acaugaaaaggaagagaau

SEQ ID NO: 2328717 - RNA, 19 nt, Homo sapiens
  misc_RNA (1)...(19): siRNA sense strand
cucaaaugcagguggagau

SEQ ID NO: 2328718 - RNA, 19 nt, Homo sapiens
  misc_RNA (1)...(19): siRNA sense strand
ccaaagaaggccagaaagc

SEQ ID NO: 2328719 - RNA, 19 nt, Homo sapiens
  misc_RNA (1)...(19): siRNA sense strand
uaggauacacacaggugaa

SEQ ID NO: 2328720 - RNA, 19 nt, Homo sapiens
  misc_RNA (1)...(19): siRNA sense strand
cugucaucgugcauauaaa

SEQ ID NO: 2328721 - RNA, 19 nt, Homo sapiens
  misc_RNA (1)...(19): siRNA sense strand
uggaccaaauguacagauu

SEQ ID NO: 2328722 - RNA, 19 nt, Homo sapiens
  misc_RNA (1)...(19): siRNA sense strand
aaaugcagguggagaucga

SEQ ID NO: 2328723 - RNA, 19 nt, Homo sapiens
  misc_RNA (1)...(19): siRNA sense strand
cggcacauggccacacaua

SEQ ID NO: 2328724 - RNA, 19 nt, Homo sapiens
  misc_RNA (1)...(19): siRNA sense strand
cugaaggaacacaugaaga

SEQ ID NO: 2328725 - RNA, 19 nt, Homo sapiens
  misc_RNA (1)...(19): siRNA sense strand
cugcagacccacaugauca

SEQ ID NO: 2328726 - RNA, 19 nt, Homo sapiens
  misc_RNA (1)...(19): siRNA sense strand
cuauaacuguacagaaugu

SEQ ID NO: 2328727 - RNA, 19 nt, Homo sapiens
  misc_RNA (1)...(19): siRNA sense strand
acguagaccaguuugaaga

SEQ ID NO: 2328728 - RNA, 19 nt, Homo sapiens
  misc_RNA (1)...(19): siRNA sense strand
ggccauaggaagacucaca

SEQ ID NO: 2328729 - RNA, 19 nt, Homo sapiens
  misc_RNA (1)...(19): siRNA sense strand
caaugaagcagauagacca

SEQ ID NO: 2328730 - RNA, 19 nt, Homo sapiens
  misc_RNA (1)...(19): siRNA sense strand
cauaugagcaugaagccuu

SEQ ID NO: 2328731 - RNA, 19 nt, Homo sapiens
  misc_RNA (1)...(19): siRNA sense strand
aggaagaggaagaacauuc

SEQ ID NO: 2328732 - RNA, 19 nt, Homo sapiens
  misc_RNA (1)...(19): siRNA sense strand
auuaacaacuccagccuga

SEQ ID NO: 2328733 - RNA, 19 nt, Homo sapiens
  misc_RNA (1)...(19): siRNA sense strand
gguaucaaguacaaggucu

SEQ ID NO: 2328734 - RNA, 19 nt, Homo sapiens
  misc_RNA (1)...(19): siRNA sense strand
aggcaauaagagaaagaaa

SEQ ID NO: 2328735 - RNA, 19 nt, Homo sapiens
  misc_RNA (1)...(19): siRNA sense strand
aggaagaggaggaggaagu

SEQ ID NO: 2328736 - RNA, 19 nt, Homo sapiens
  misc_RNA (1)...(19): siRNA sense strand
aggaagaggaagaggagga

SEQ ID NO: 2328737 - RNA, 19 nt, Homo sapiens
  misc_RNA (1)...(19): siRNA sense strand
gggaauuaauguuugauga

SEQ ID NO: 2328738 - RNA, 19 nt, Homo sapiens
  misc_RNA (1)...(19): siRNA sense strand
uuuaauggcugcuggacaa

SEQ ID NO: 2328739 - RNA, 19 nt, Homo sapiens
  misc_RNA (1)...(19): siRNA sense strand
aagaggaagaagaggaaga

SEQ ID NO: 2328740 - RNA, 19 nt, Homo sapiens
  misc_RNA (1)...(19): siRNA sense strand
ggauugcguaucagagaaa

SEQ ID NO: 2328741 - RNA, 19 nt, Homo sapiens
  misc_RNA (1)...(19): siRNA sense strand
cgguauugaugcaggcuga

SEQ ID NO: 2328742 - RNA, 19 nt, Homo sapiens
  misc_RNA (1)...(19): siRNA sense strand
gugccaaauauacggguua

SEQ ID NO: 2328743 - RNA, 19 nt, Homo sapiens
  misc_RNA (1)...(19): siRNA sense strand
ggaaguagaaaaugaggaa

SEQ ID NO: 2328744 - RNA, 19 nt, Homo sapiens
  misc_RNA (1)...(19): siRNA sense strand
gcuguuuagccaagugaaa

SEQ ID NO: 2328745 - RNA, 19 nt, Homo sapiens
  misc_RNA (1)...(19): siRNA sense strand
ugaagaggaagaagaggaa

SEQ ID NO: 2328746 - RNA, 19 nt, Homo sapiens
  misc_RNA (1)...(19): siRNA sense strand
ccuaaauccaacacugaaa

SEQ ID NO: 2328747 - RNA, 19 nt, Homo sapiens
  misc_RNA (1)...(19): siRNA sense strand
ggccgaagucccacaguua

SEQ ID NO: 2328748 - RNA, 19 nt, Homo sapiens
  misc_RNA (1)...(19): siRNA sense strand
aggaagaagaggaagagga

SEQ ID NO: 2328749 - RNA, 19 nt, Homo sapiens
  misc_RNA (1)...(19): siRNA sense strand
acaguuagcugcagcaaaa

SEQ ID NO: 2328750 - RNA, 19 nt, Homo sapiens
  misc_RNA (1)...(19): siRNA sense strand
gaaauacgaaugugcuuua

SEQ ID NO: 2328751 - RNA, 19 nt, Homo sapiens
  misc_RNA (1)...(19): siRNA sense strand
cauucuugguggagagguu

SEQ ID NO: 2328752 - RNA, 19 nt, Homo sapiens
  misc_RNA (1)...(19): siRNA sense strand
gcgcguaugcacaggcaau

SEQ ID NO: 2328753 - RNA, 19 nt, Homo sapiens
  misc_RNA (1)...(19): siRNA sense strand
cagcagaaguugggaagca

SEQ ID NO: 2328754 - RNA, 19 nt, Homo sapiens
  misc_RNA (1)...(19): siRNA sense strand
auuuagaacagcaggugaa

SEQ ID NO: 2328755 - RNA, 19 nt, Homo sapiens
  misc_RNA (1)...(19): siRNA sense strand
cagcagcagcagaugcaaa

SEQ ID NO: 2328756 - RNA, 19 nt, Homo sapiens
  misc_RNA (1)...(19): siRNA sense strand
gagaaauacgaaugugcuu

SEQ ID NO: 2328757 - RNA, 19 nt, Homo sapiens
  misc_RNA (1)...(19): siRNA sense strand
aggaggaggaaguagaaaa

SEQ ID NO: 2328758 - RNA, 19 nt, Homo sapiens
  misc_RNA (1)...(19): siRNA sense strand
ugggaaacuuugaggcacu

SEQ ID NO: 2328759 - RNA, 19 nt, Homo sapiens
  misc_RNA (1)...(19): siRNA sense strand
cuucauuuaugccgagaau

SEQ ID NO: 2328760 - RNA, 19 nt, Homo sapiens
  misc_RNA (1)...(19): siRNA sense strand
aaguagaaaaugaggaaca

SEQ ID NO: 2328761 - RNA, 19 nt, Homo sapiens
  misc_RNA (1)...(19): siRNA sense strand
gcuacaguuuccacagcaa

SEQ ID NO: 2328762 - RNA, 19 nt, Homo sapiens
  misc_RNA (1)...(19): siRNA sense strand
gugacagagaugaccuaaa

SEQ ID NO: 2328763 - RNA, 19 nt, Homo sapiens
  misc_RNA (1)...(19): siRNA sense strand
acagaaugaaguagcuaau

SEQ ID NO: 2328764 - RNA, 19 nt, Homo sapiens
  misc_RNA (1)...(19): siRNA sense strand
aagaggaagaggaggagga

SEQ ID NO: 2328765 - RNA, 19 nt, Homo sapiens
  misc_RNA (1)...(19): siRNA sense strand
gaaugaggguaguacagau

SEQ ID NO: 2328766 - RNA, 19 nt, Homo sapiens
  misc_RNA (1)...(19): siRNA sense strand
aggaggaaguagaaaauga

SEQ ID NO: 2328767 - RNA, 19 nt, Homo sapiens
  misc_RNA (1)...(19): siRNA sense strand
acugaaacagaaugaagua

SEQ ID NO: 2328768 - RNA, 19 nt, Homo sapiens
  misc_RNA (1)...(19): siRNA sense strand
gggcuuugguuacguucua

SEQ ID NO: 2328769 - RNA, 19 nt, Homo sapiens
  misc_RNA (1)...(19): siRNA sense strand
augaagaggaagaagagga

SEQ ID NO: 2328770 - RNA, 19 nt, Homo sapiens
  misc_RNA (1)...(19): siRNA sense strand
ggguaguacagaugagaag

SEQ ID NO: 2328771 - RNA, 19 nt, Homo sapiens
  misc_RNA (1)...(19): siRNA sense strand
ggaaaggagccuggguuga

SEQ ID NO: 2328772 - RNA, 19 nt, Homo sapiens
  misc_RNA (1)...(19): siRNA sense strand
cguagagugugcaggagga

SEQ ID NO: 2328773 - RNA, 19 nt, Homo sapiens
  misc_RNA (1)...(19): siRNA sense strand
ggaggaggaaguagaaaau

SEQ ID NO: 2328774 - RNA, 19 nt, Homo sapiens
  misc_RNA (1)...(19): siRNA sense strand
gggacauacaaaugccaau

SEQ ID NO: 2328775 - RNA, 19 nt, Homo sapiens
  misc_RNA (1)...(19): siRNA sense strand
cuggauuuguugauaguga

SEQ ID NO: 2328776 - RNA, 19 nt, Homo sapiens
  misc_RNA (1)...(19): siRNA sense strand
uugauuaacuugugugcca

SEQ ID NO: 2328777 - RNA, 19 nt, Homo sapiens
  misc_RNA (1)...(19): siRNA sense strand
gggauguguguuugcaauu

SEQ ID NO: 2328778 - RNA, 19 nt, Homo sapiens
  misc_RNA (1)...(19): siRNA sense strand
aagaggaggaggaaguaga

SEQ ID NO: 2328779 - RNA, 19 nt, Homo sapiens
  misc_RNA (1)...(19): siRNA sense strand
gggaaaggagccuggguug

SEQ ID NO: 2328780 - RNA, 19 nt, Homo sapiens
  misc_RNA (1)...(19): siRNA sense strand
cuuauugggauguguguuu

SEQ ID NO: 2328781 - RNA, 19 nt, Homo sapiens
  misc_RNA (1)...(19): siRNA sense strand
agaaagaaagagauguguu

SEQ ID NO: 2328782 - RNA, 19 nt, Homo sapiens
  misc_RNA (1)...(19): siRNA sense strand
ccucaucuguaaagaacca

SEQ ID NO: 2328783 - RNA, 19 nt, Homo sapiens
  misc_RNA (1)...(19): siRNA sense strand
cgaguuugucggaaauaau

SEQ ID NO: 2328784 - RNA, 19 nt, Homo sapiens
  misc_RNA (1)...(19): siRNA sense strand
ugauuguuccagagccaaa

SEQ ID NO: 2328785 - RNA, 19 nt, Homo sapiens
  misc_RNA (1)...(19): siRNA sense strand
uuuaugaagaggaagaaga

SEQ ID NO: 2328786 - RNA, 19 nt, Homo sapiens
  misc_RNA (1)...(19): siRNA sense strand
ucagauucaucaccggaaa

SEQ ID NO: 2328787 - RNA, 19 nt, Homo sapiens
  misc_RNA (1)...(19): siRNA sense strand
gcagaugcaaagucagaca

SEQ ID NO: 2328788 - RNA, 19 nt, Homo sapiens
  misc_RNA (1)...(19): siRNA sense strand
ggcaauaagagaaagaaag

SEQ ID NO: 2328789 - RNA, 19 nt, Homo sapiens
  misc_RNA (1)...(19): siRNA sense strand
uguccagguucaacaguau

SEQ ID NO: 2328790 - RNA, 19 nt, Homo sapiens
  misc_RNA (1)...(19): siRNA sense strand
cagcuaacccucaauaaga

SEQ ID NO: 2328791 - RNA, 19 nt, Homo sapiens
  misc_RNA (1)...(19): siRNA sense strand
gggagcuuguccagcagaa

SEQ ID NO: 2328792 - RNA, 19 nt, Homo sapiens
  misc_RNA (1)...(19): siRNA sense strand
ugaugauucuucagauuca

SEQ ID NO: 2328793 - RNA, 19 nt, Homo sapiens
  misc_RNA (1)...(19): siRNA sense strand
guauaagacuaccucccaa

SEQ ID NO: 2328794 - RNA, 19 nt, Homo sapiens
  misc_RNA (1)...(19): siRNA sense strand
agccaaagaguggaggaua

SEQ ID NO: 2328795 - RNA, 19 nt, Homo sapiens
  misc_RNA (1)...(19): siRNA sense strand
cuaugaaggcaaucguaga

SEQ ID NO: 2328796 - RNA, 19 nt, Homo sapiens
  misc_RNA (1)...(19): siRNA sense strand
gguucuggauugcguauca

SEQ ID NO: 2328797 - RNA, 19 nt, Homo sapiens
  misc_RNA (1)...(19): siRNA sense strand
gugaaagugacuccagaga

SEQ ID NO: 2328798 - RNA, 19 nt, Homo sapiens
  misc_RNA (1)...(19): siRNA sense strand
guuguaaugugcugggugu

SEQ ID NO: 2328799 - RNA, 19 nt, Homo sapiens
  misc_RNA (1)...(19): siRNA sense strand
gcguaugcacaggcaauaa

SEQ ID NO: 2328800 - RNA, 19 nt, Homo sapiens
  misc_RNA (1)...(19): siRNA sense strand
acaggcaauaagagaaaga

SEQ ID NO: 2328801 - RNA, 19 nt, Homo sapiens
  misc_RNA (1)...(19): siRNA sense strand
ccacauuugaggagaagaa

SEQ ID NO: 2328802 - RNA, 19 nt, Homo sapiens
  misc_RNA (1)...(19): siRNA sense strand
uagaauagcauguggcgaa

SEQ ID NO: 2328803 - RNA, 19 nt, Homo sapiens
  misc_RNA (1)...(19): siRNA sense strand
guaaauuugaagaggguca

SEQ ID NO: 2328804 - RNA, 19 nt, Homo sapiens
  misc_RNA (1)...(19): siRNA sense strand
agaaagaaccugaaggaac

SEQ ID NO: 2328805 - RNA, 19 nt, Homo sapiens
  misc_RNA (1)...(19): siRNA sense strand
ggguggugcacuuaagaaa

SEQ ID NO: 2328806 - RNA, 19 nt, Homo sapiens
  misc_RNA (1)...(19): siRNA sense strand
ugaugaaggcaaagaagau

SEQ ID NO: 2328807 - RNA, 19 nt, Homo sapiens
  misc_RNA (1)...(19): siRNA sense strand
aauuaaaggcagaaaggca

SEQ ID NO: 2328808 - RNA, 19 nt, Homo sapiens
  misc_RNA (1)...(19): siRNA sense strand
auucaagggaaguaagcaa

SEQ ID NO: 2328809 - RNA, 19 nt, Homo sapiens
  misc_RNA (1)...(19): siRNA sense strand
aaaagaugaugaaggcaaa

SEQ ID NO: 2328810 - RNA, 19 nt, Homo sapiens
  misc_RNA (1)...(19): siRNA sense strand
uguccuagcuagaugguca

SEQ ID NO: 2328811 - RNA, 19 nt, Homo sapiens
  misc_RNA (1)...(19): siRNA sense strand
auucugaacuugagcuuau

SEQ ID NO: 2328812 - RNA, 19 nt, Homo sapiens
  misc_RNA (1)...(19): siRNA sense strand
agagaaagaaccugaagga

SEQ ID NO: 2328813 - RNA, 19 nt, Homo sapiens
  misc_RNA (1)...(19): siRNA sense strand
guacaauaugucaagaaga

SEQ ID NO: 2328814 - RNA, 19 nt, Homo sapiens
  misc_RNA (1)...(19): siRNA sense strand
cagaauaccucaaacgucu

SEQ ID NO: 2328815 - RNA, 19 nt, Homo sapiens
  misc_RNA (1)...(19): siRNA sense strand
auaccacauuugaggagaa

SEQ ID NO: 2328816 - RNA, 19 nt, Homo sapiens
  misc_RNA (1)...(19): siRNA sense strand
agaaaggaccaaaugccaa

SEQ ID NO: 2328817 - RNA, 19 nt, Homo sapiens
  misc_RNA (1)...(19): siRNA sense strand
augaaggcaaagaagauua

SEQ ID NO: 2328818 - RNA, 19 nt, Homo sapiens
  misc_RNA (1)...(19): siRNA sense strand
caaguguggccaaggauau

SEQ ID NO: 2328819 - RNA, 19 nt, Homo sapiens
  misc_RNA (1)...(19): siRNA sense strand
uaaaagaugaugaaggcaa

SEQ ID NO: 2328820 - RNA, 19 nt, Homo sapiens
  misc_RNA (1)...(19): siRNA sense strand
agaauagcauguggcgaaa

SEQ ID NO: 2328821 - RNA, 19 nt, Homo sapiens
  misc_RNA (1)...(19): siRNA sense strand
cugaaagauaugagcaugu

SEQ ID NO: 2328822 - RNA, 19 nt, Homo sapiens
  misc_RNA (1)...(19): siRNA sense strand
gagaaagaaccugaaggaa

SEQ ID NO: 2328823 - RNA, 19 nt, Homo sapiens
  misc_RNA (1)...(19): siRNA sense strand
guaagcaauggcauagaaa

SEQ ID NO: 2328824 - RNA, 19 nt, Homo sapiens
  misc_RNA (1)...(19): siRNA sense strand
aagaacgcguacaggaaga

SEQ ID NO: 2328825 - RNA, 19 nt, Homo sapiens
  misc_RNA (1)...(19): siRNA sense strand
uggcagaccuugaauggga

SEQ ID NO: 2328826 - RNA, 19 nt, Homo sapiens
  misc_RNA (1)...(19): siRNA sense strand
aggcagaaaggcauccaaa

SEQ ID NO: 2328827 - RNA, 19 nt, Homo sapiens
  misc_RNA (1)...(19): siRNA sense strand
acuuaagaaaggaccaaau

SEQ ID NO: 2328828 - RNA, 19 nt, Homo sapiens
  misc_RNA (1)...(19): siRNA sense strand
cauguuuaugucugggaaa

SEQ ID NO: 2328829 - RNA, 19 nt, Homo sapiens
  misc_RNA (1)...(19): siRNA sense strand
ggucagauggcuuguuuua

SEQ ID NO: 2328830 - RNA, 19 nt, Homo sapiens
  misc_RNA (1)...(19): siRNA sense strand
gcacuuaagaaaggaccaa

SEQ ID NO: 2328831 - RNA, 19 nt, Homo sapiens
  misc_RNA (1)...(19): siRNA sense strand
agacauuacccuauagugu

SEQ ID NO: 2328832 - RNA, 19 nt, Homo sapiens
  misc_RNA (1)...(19): siRNA sense strand
gaggagaagaagaggucgu

SEQ ID NO: 2328833 - RNA, 19 nt, Homo sapiens
  misc_RNA (1)...(19): siRNA sense strand
auggaaaggugcaguaucu

SEQ ID NO: 2328834 - RNA, 19 nt, Homo sapiens
  misc_RNA (1)...(19): siRNA sense strand
ggaaugggaaggagcaacu

SEQ ID NO: 2328835 - RNA, 19 nt, Homo sapiens
  misc_RNA (1)...(19): siRNA sense strand
ugucugggaaagaaauaaa

SEQ ID NO: 2328836 - RNA, 19 nt, Homo sapiens
  misc_RNA (1)...(19): siRNA sense strand
gggaaguaagcaauggcau

SEQ ID NO: 2328837 - RNA, 19 nt, Homo sapiens
  misc_RNA (1)...(19): siRNA sense strand
aagcauugcaagucaugaa

SEQ ID NO: 2328838 - RNA, 19 nt, Homo sapiens
  misc_RNA (1)...(19): siRNA sense strand
uagcagaucaggaguuaca

SEQ ID NO: 2328839 - RNA, 19 nt, Homo sapiens
  misc_RNA (1)...(19): siRNA sense strand
ucagaagcucccaaugaaa

SEQ ID NO: 2328840 - RNA, 19 nt, Homo sapiens
  misc_RNA (1)...(19): siRNA sense strand
ggugcaguaucuuguggaa

SEQ ID NO: 2328841 - RNA, 19 nt, Homo sapiens
  misc_RNA (1)...(19): siRNA sense strand
cuguacaauaugucaagaa

SEQ ID NO: 2328842 - RNA, 19 nt, Homo sapiens
  misc_RNA (1)...(19): siRNA sense strand
acaaguguggccaaggaua

SEQ ID NO: 2328843 - RNA, 19 nt, Homo sapiens
  misc_RNA (1)...(19): siRNA sense strand
cugggaaagaaauaaagaa

SEQ ID NO: 2328844 - RNA, 19 nt, Homo sapiens
  misc_RNA (1)...(19): siRNA sense strand
gaaauaaagaagaagaagc

SEQ ID NO: 2328845 - RNA, 19 nt, Homo sapiens
  misc_RNA (1)...(19): siRNA sense strand
auuaaaggcagaaaggcau

SEQ ID NO: 2328846 - RNA, 19 nt, Homo sapiens
  misc_RNA (1)...(19): siRNA sense strand
ggucuguacaauaugucaa

SEQ ID NO: 2328847 - RNA, 19 nt, Homo sapiens
  misc_RNA (1)...(19): siRNA sense strand
ugaaugggaugcaggucau

SEQ ID NO: 2328848 - RNA, 19 nt, Homo sapiens
  misc_RNA (1)...(19): siRNA sense strand
gagacugguauuugaagau

SEQ ID NO: 2328849 - RNA, 19 nt, Homo sapiens
  misc_RNA (1)...(19): siRNA sense strand
cauuacaguggguagauau

SEQ ID NO: 2328850 - RNA, 19 nt, Homo sapiens
  misc_RNA (1)...(19): siRNA sense strand
auguaaauuugaagagggu

SEQ ID NO: 2328851 - RNA, 19 nt, Homo sapiens
  misc_RNA (1)...(19): siRNA sense strand
acucaaucaucuaaagaac

SEQ ID NO: 2328852 - RNA, 19 nt, Homo sapiens
  misc_RNA (1)...(19): siRNA sense strand
uugaagagggucaggaugu

SEQ ID NO: 2328853 - RNA, 19 nt, Homo sapiens
  misc_RNA (1)...(19): siRNA sense strand
ccaaagcauugcaagucau

SEQ ID NO: 2328854 - RNA, 19 nt, Homo sapiens
  misc_RNA (1)...(19): siRNA sense strand
gguagauauagcacaccua

SEQ ID NO: 2328855 - RNA, 19 nt, Homo sapiens
  misc_RNA (1)...(19): siRNA sense strand
ugaacucaacacagagauu

SEQ ID NO: 2328856 - RNA, 19 nt, Homo sapiens
  misc_RNA (1)...(19): siRNA sense strand
ggggaaauggucuguacaa

SEQ ID NO: 2328857 - RNA, 19 nt, Homo sapiens
  misc_RNA (1)...(19): siRNA sense strand
aaugcuauuuggagacaga

SEQ ID NO: 2328858 - RNA, 19 nt, Homo sapiens
  misc_RNA (1)...(19): siRNA sense strand
auuacaguggguagauaua

SEQ ID NO: 2328859 - RNA, 19 nt, Homo sapiens
  misc_RNA (1)...(19): siRNA sense strand
gggcugaagucaagggcgu

SEQ ID NO: 2328860 - RNA, 19 nt, Homo sapiens
  misc_RNA (1)...(19): siRNA sense strand
ggucaucacuggaggccac

SEQ ID NO: 2328861 - RNA, 19 nt, Homo sapiens
  misc_RNA (1)...(19): siRNA sense strand
agagaaacgaagaagcagu

SEQ ID NO: 2328862 - RNA, 19 nt, Homo sapiens
  misc_RNA (1)...(19): siRNA sense strand
ccuuaauagccgagucucu

SEQ ID NO: 2328863 - RNA, 19 nt, Homo sapiens
  misc_RNA (1)...(19): siRNA sense strand
agaagagagaccagaacaa

SEQ ID NO: 2328864 - RNA, 19 nt, Homo sapiens
  misc_RNA (1)...(19): siRNA sense strand
gcgagauccaguacgucaa

SEQ ID NO: 2328865 - RNA, 19 nt, Homo sapiens
  misc_RNA (1)...(19): siRNA sense strand
gcaagcaaaagaagagaga

SEQ ID NO: 2328866 - RNA, 19 nt, Homo sapiens
  misc_RNA (1)...(19): siRNA sense strand
aggaagaagaggaggagaa

SEQ ID NO: 2328867 - RNA, 19 nt, Homo sapiens
  misc_RNA (1)...(19): siRNA sense strand
aggaaaaggaggaggaaga

SEQ ID NO: 2328868 - RNA, 19 nt, Homo sapiens
  misc_RNA (1)...(19): siRNA sense strand
aggaggaagaggaggaaaa

SEQ ID NO: 2328869 - RNA, 19 nt, Homo sapiens
  misc_RNA (1)...(19): siRNA sense strand
cggaggaggaggaagaaga

SEQ ID NO: 2328870 - RNA, 19 nt, Homo sapiens
  misc_RNA (1)...(19): siRNA sense strand
aggaggaggaagaggguca

SEQ ID NO: 2328871 - RNA, 19 nt, Homo sapiens
  misc_RNA (1)...(19): siRNA sense strand
aggagaaagaagaggagga

SEQ ID NO: 2328872 - RNA, 19 nt, Homo sapiens
  misc_RNA (1)...(19): siRNA sense strand
aaucggaggaggaggaaga

SEQ ID NO: 2328873 - RNA, 19 nt, Homo sapiens
  misc_RNA (1)...(19): siRNA sense strand
aggaggaagcagaagaaga

SEQ ID NO: 2328874 - RNA, 19 nt, Homo sapiens
  misc_RNA (1)...(19): siRNA sense strand
ccaaaucggaggaggagga

SEQ ID NO: 2328875 - RNA, 19 nt, Homo sapiens
  misc_RNA (1)...(19): siRNA sense strand
uugcagaucaugagugaau

SEQ ID NO: 2328876 - RNA, 19 nt, Homo sapiens
  misc_RNA (1)...(19): siRNA sense strand
ccaagauggcaaugaggau

SEQ ID NO: 2328877 - RNA, 19 nt, Homo sapiens
  misc_RNA (1)...(19): siRNA sense strand
aggaagagggucaagguca

SEQ ID NO: 2328878 - RNA, 19 nt, Homo sapiens
  misc_RNA (1)...(19): siRNA sense strand
gaagaagaggcucggguga

SEQ ID NO: 2328879 - RNA, 19 nt, Homo sapiens
  misc_RNA (1)...(19): siRNA sense strand
aagaagaggaggaagagga

SEQ ID NO: 2328880 - RNA, 19 nt, Homo sapiens
  misc_RNA (1)...(19): siRNA sense strand
augaagaggaggaagcaga

SEQ ID NO: 2328881 - RNA, 19 nt, Homo sapiens
  misc_RNA (1)...(19): siRNA sense strand
aggaggaagaagaggagga

SEQ ID NO: 2328882 - RNA, 19 nt, Homo sapiens
  misc_RNA (1)...(19): siRNA sense strand
aagaggaggaagaggagga

SEQ ID NO: 2328883 - RNA, 19 nt, Homo sapiens
  misc_RNA (1)...(19): siRNA sense strand
uagcagaugaagaggagga

SEQ ID NO: 2328884 - RNA, 19 nt, Homo sapiens
  misc_RNA (1)...(19): siRNA sense strand
agggcaaaggcgucauaaa

SEQ ID NO: 2328885 - RNA, 19 nt, Homo sapiens
  misc_RNA (1)...(19): siRNA sense strand
agaggaggaagcagaagaa

SEQ ID NO: 2328886 - RNA, 19 nt, Homo sapiens
  misc_RNA (1)...(19): siRNA sense strand
ggaagagggucaaggucag

SEQ ID NO: 2328887 - RNA, 19 nt, Homo sapiens
  misc_RNA (1)...(19): siRNA sense strand
cugugaagguuuccugcaa

SEQ ID NO: 2328888 - RNA, 19 nt, Homo sapiens
  misc_RNA (1)...(19): siRNA sense strand
agugaauaccugugggauc

SEQ ID NO: 2328889 - RNA, 19 nt, Homo sapiens
  misc_RNA (1)...(19): siRNA sense strand
augaagcgaaccagaacua

SEQ ID NO: 2328890 - RNA, 19 nt, Homo sapiens
  misc_RNA (1)...(19): siRNA sense strand
auggcuuucuccaggguua

SEQ ID NO: 2328891 - RNA, 19 nt, Homo sapiens
  misc_RNA (1)...(19): siRNA sense strand
aggaggaggaagaagagga

SEQ ID NO: 2328892 - RNA, 19 nt, Homo sapiens
  misc_RNA (1)...(19): siRNA sense strand
aggcuuucguccugagcuu

SEQ ID NO: 2328893 - RNA, 19 nt, Homo sapiens
  misc_RNA (1)...(19): siRNA sense strand
uggcaaugcacuuuacaga

SEQ ID NO: 2328894 - RNA, 19 nt, Homo sapiens
  misc_RNA (1)...(19): siRNA sense strand
ggacaagaaggccugccaa

SEQ ID NO: 2328895 - RNA, 19 nt, Homo sapiens
  misc_RNA (1)...(19): siRNA sense strand
uuaucaaaguagaaggcaa

SEQ ID NO: 2328896 - RNA, 19 nt, Homo sapiens
  misc_RNA (1)...(19): siRNA sense strand
aggagaaauuugaagagau

SEQ ID NO: 2328897 - RNA, 19 nt, Homo sapiens
  misc_RNA (1)...(19): siRNA sense strand
agaaauacgaaaaggagaa

SEQ ID NO: 2328898 - RNA, 19 nt, Homo sapiens
  misc_RNA (1)...(19): siRNA sense strand
ugaugaaauuggagaugga

SEQ ID NO: 2328899 - RNA, 19 nt, Homo sapiens
  misc_RNA (1)...(19): siRNA sense strand
cuggacaagaucagcgaua

SEQ ID NO: 2328900 - RNA, 19 nt, Homo sapiens
  misc_RNA (1)...(19): siRNA sense strand
ggaggaaauaagaugauca

SEQ ID NO: 2328901 - RNA, 19 nt, Homo sapiens
  misc_RNA (1)...(19): siRNA sense strand
aggaggggcugcugagaua

SEQ ID NO: 2328902 - RNA, 19 nt, Homo sapiens
  misc_RNA (1)...(19): siRNA sense strand
ucguaagccuggagaaucu

SEQ ID NO: 2328903 - RNA, 19 nt, Homo sapiens
  misc_RNA (1)...(19): siRNA sense strand
aaacaaagcauaagcugga

SEQ ID NO: 2328904 - RNA, 19 nt, Homo sapiens
  misc_RNA (1)...(19): siRNA sense strand
ggaugaugaaauuggagau

SEQ ID NO: 2328905 - RNA, 19 nt, Homo sapiens
  misc_RNA (1)...(19): siRNA sense strand
uguaagaacuccagagcug

SEQ ID NO: 2328906 - RNA, 19 nt, Homo sapiens
  misc_RNA (1)...(19): siRNA sense strand
uguccaagucucaggauga

SEQ ID NO: 2328907 - RNA, 19 nt, Homo sapiens
  misc_RNA (1)...(19): siRNA sense strand
ggagaucucauuugggaca

SEQ ID NO: 2328908 - RNA, 19 nt, Homo sapiens
  misc_RNA (1)...(19): siRNA sense strand
gaggaaauaagaugaucau

SEQ ID NO: 2328909 - RNA, 19 nt, Homo sapiens
  misc_RNA (1)...(19): siRNA sense strand
ccgacagauggcugagauu

SEQ ID NO: 2328910 - RNA, 19 nt, Homo sapiens
  misc_RNA (1)...(19): siRNA sense strand
acguugacuuugagcuuau

SEQ ID NO: 2328911 - RNA, 19 nt, Homo sapiens
  misc_RNA (1)...(19): siRNA sense strand
gagccagacaggugaagga

SEQ ID NO: 2328912 - RNA, 19 nt, Homo sapiens
  misc_RNA (1)...(19): siRNA sense strand
gagaacaucacuuggacca

SEQ ID NO: 2328913 - RNA, 19 nt, Homo sapiens
  misc_RNA (1)...(19): siRNA sense strand
agaugaugguggauaagga

SEQ ID NO: 2328914 - RNA, 19 nt, Homo sapiens
  misc_RNA (1)...(19): siRNA sense strand
guagcaaauacaaugagaa

SEQ ID NO: 2328915 - RNA, 19 nt, Homo sapiens
  misc_RNA (1)...(19): siRNA sense strand
guuagaagaagcggagcaa

SEQ ID NO: 2328916 - RNA, 19 nt, Homo sapiens
  misc_RNA (1)...(19): siRNA sense strand
gaucauugaggaggcgaaa

SEQ ID NO: 2328917 - RNA, 19 nt, Homo sapiens
  misc_RNA (1)...(19): siRNA sense strand
agacguugacuuugagcuu

SEQ ID NO: 2328918 - RNA, 19 nt, Homo sapiens
  misc_RNA (1)...(19): siRNA sense strand
uggacaaggauuucaguca

SEQ ID NO: 2328919 - RNA, 19 nt, Homo sapiens
  misc_RNA (1)...(19): siRNA sense strand
ccuuagaacaguaugccau

SEQ ID NO: 2328920 - RNA, 19 nt, Homo sapiens
  misc_RNA (1)...(19): siRNA sense strand
ugggacaacuaaggauaaa

SEQ ID NO: 2328921 - RNA, 19 nt, Homo sapiens
  misc_RNA (1)...(19): siRNA sense strand
gcaucgacuguuugcacaa

SEQ ID NO: 2328922 - RNA, 19 nt, Homo sapiens
  misc_RNA (1)...(19): siRNA sense strand
uagcaaauacaaugagaac

SEQ ID NO: 2328923 - RNA, 19 nt, Homo sapiens
  misc_RNA (1)...(19): siRNA sense strand
ggcugagauugcugugaau

SEQ ID NO: 2328924 - RNA, 19 nt, Homo sapiens
  misc_RNA (1)...(19): siRNA sense strand
gaccgaaguccgagccaga

SEQ ID NO: 2328925 - RNA, 19 nt, Homo sapiens
  misc_RNA (1)...(19): siRNA sense strand
uguuagaagaagcggagca

SEQ ID NO: 2328926 - RNA, 19 nt, Homo sapiens
  misc_RNA (1)...(19): siRNA sense strand
agucucaggaugaugaaau

SEQ ID NO: 2328927 - RNA, 19 nt, Homo sapiens
  misc_RNA (1)...(19): siRNA sense strand
gucucaggaugaugaaauu

SEQ ID NO: 2328928 - RNA, 19 nt, Homo sapiens
  misc_RNA (1)...(19): siRNA sense strand
ugauuaagggcgugauugu

SEQ ID NO: 2328929 - RNA, 19 nt, Homo sapiens
  misc_RNA (1)...(19): siRNA sense strand
ccgacgcacuggaggucau

SEQ ID NO: 2328930 - RNA, 19 nt, Homo sapiens
  misc_RNA (1)...(19): siRNA sense strand
gccuggagaaucugaagaa

SEQ ID NO: 2328931 - RNA, 19 nt, Homo sapiens
  misc_RNA (1)...(19): siRNA sense strand
gcguccuuguugacauaaa

SEQ ID NO: 2328932 - RNA, 19 nt, Homo sapiens
  misc_RNA (1)...(19): siRNA sense strand
cagaaauacgaaaaggaga

SEQ ID NO: 2328933 - RNA, 19 nt, Homo sapiens
  misc_RNA (1)...(19): siRNA sense strand
caguaugccaugagagcgu

SEQ ID NO: 2328934 - RNA, 19 nt, Homo sapiens
  misc_RNA (1)...(19): siRNA sense strand
agauugaugacauucguaa

SEQ ID NO: 2328935 - RNA, 19 nt, Homo sapiens
  misc_RNA (1)...(19): siRNA sense strand
cgaagauuauaaagcccuu

SEQ ID NO: 2328936 - RNA, 19 nt, Homo sapiens
  misc_RNA (1)...(19): siRNA sense strand
uggucaucgagcaguguaa

SEQ ID NO: 2328937 - RNA, 19 nt, Homo sapiens
  misc_RNA (1)...(19): siRNA sense strand
ucaaggaucaggaccgcaa

SEQ ID NO: 2328938 - RNA, 19 nt, Homo sapiens
  misc_RNA (1)...(19): siRNA sense strand
aggauuuggaagaggauau

SEQ ID NO: 2328939 - RNA, 19 nt, Homo sapiens
  misc_RNA (1)...(19): siRNA sense strand
aggauauucccaagcgaaa

SEQ ID NO: 2328940 - RNA, 19 nt, Homo sapiens
  misc_RNA (1)...(19): siRNA sense strand
aagcgaaaggacaggacua

SEQ ID NO: 2328941 - RNA, 19 nt, Homo sapiens
  misc_RNA (1)...(19): siRNA sense strand
gggaagcaacaguggcgua

SEQ ID NO: 2328942 - RNA, 19 nt, Homo sapiens
  misc_RNA (1)...(19): siRNA sense strand
ccagggaggaggaaagcau

SEQ ID NO: 2328943 - RNA, 19 nt, Homo sapiens
  misc_RNA (1)...(19): siRNA sense strand
auacagaggguuuuggaaa

SEQ ID NO: 2328944 - RNA, 19 nt, Homo sapiens
  misc_RNA (1)...(19): siRNA sense strand
agggaaugaagaagaggau

SEQ ID NO: 2328945 - RNA, 19 nt, Homo sapiens
  misc_RNA (1)...(19): siRNA sense strand
ggacaggacuagaggacgg

SEQ ID NO: 2328946 - RNA, 19 nt, Homo sapiens
  misc_RNA (1)...(19): siRNA sense strand
cugccgugauagaugcuaa

SEQ ID NO: 2328947 - RNA, 19 nt, Homo sapiens
  misc_RNA (1)...(19): siRNA sense strand
acaguggcguauaggaaaa

SEQ ID NO: 2328948 - RNA, 19 nt, Homo sapiens
  misc_RNA (1)...(19): siRNA sense strand
gaggauauucccaagcgaa

SEQ ID NO: 2328949 - RNA, 19 nt, Homo sapiens
  misc_RNA (1)...(19): siRNA sense strand
ggguugagaagaaggugga

SEQ ID NO: 2328950 - RNA, 19 nt, Homo sapiens
  misc_RNA (1)...(19): siRNA sense strand
gcccagaacaacugcuaca

SEQ ID NO: 2328951 - RNA, 19 nt, Homo sapiens
  misc_RNA (1)...(19): siRNA sense strand
agauaaaaccugaagugga

SEQ ID NO: 2328952 - RNA, 19 nt, Homo sapiens
  misc_RNA (1)...(19): siRNA sense strand
gcaccacgcuggaagccuu

SEQ ID NO: 2328953 - RNA, 19 nt, Homo sapiens
  misc_RNA (1)...(19): siRNA sense strand
aauaauaaacccagggaga

SEQ ID NO: 2328954 - RNA, 19 nt, Homo sapiens
  misc_RNA (1)...(19): siRNA sense strand
cggaaaacaaagagaaaga

SEQ ID NO: 2328955 - RNA, 19 nt, Homo sapiens
  misc_RNA (1)...(19): siRNA sense strand
cuucagaggaugaggagga

SEQ ID NO: 2328956 - RNA, 19 nt, Homo sapiens
  misc_RNA (1)...(19): siRNA sense strand
agaagaugaaggaggguga

SEQ ID NO: 2328957 - RNA, 19 nt, Homo sapiens
  misc_RNA (1)...(19): siRNA sense strand
auggaaagacacagaugaa

SEQ ID NO: 2328958 - RNA, 19 nt, Homo sapiens
  misc_RNA (1)...(19): siRNA sense strand
aagagaaagaaacagcaaa

SEQ ID NO: 2328959 - RNA, 19 nt, Homo sapiens
  misc_RNA (1)...(19): siRNA sense strand
agaaaguaacaagaggaaa

SEQ ID NO: 2328960 - RNA, 19 nt, Homo sapiens
  misc_RNA (1)...(19): siRNA sense strand
gagcacaauacuugggaac

SEQ ID NO: 2328961 - RNA, 19 nt, Homo sapiens
  misc_RNA (1)...(19): siRNA sense strand
gaugaaggagggugaaaau

SEQ ID NO: 2328962 - RNA, 19 nt, Homo sapiens
  misc_RNA (1)...(19): siRNA sense strand
ugaccugguucuugcaaaa

SEQ ID NO: 2328963 - RNA, 19 nt, Homo sapiens
  misc_RNA (1)...(19): siRNA sense strand
aaaagagagagcagagcaa

SEQ ID NO: 2328964 - RNA, 19 nt, Homo sapiens
  misc_RNA (1)...(19): siRNA sense strand
gaaaagaucauuggggcaa

SEQ ID NO: 2328965 - RNA, 19 nt, Homo sapiens
  misc_RNA (1)...(19): siRNA sense strand
aggaugaggaggaguaugu

SEQ ID NO: 2328966 - RNA, 19 nt, Homo sapiens
  misc_RNA (1)...(19): siRNA sense strand
gcgcgugguuaagggacaa

SEQ ID NO: 2328967 - RNA, 19 nt, Homo sapiens
  misc_RNA (1)...(19): siRNA sense strand
cuacugaaguggaaaggcu

SEQ ID NO: 2328968 - RNA, 19 nt, Homo sapiens
  misc_RNA (1)...(19): siRNA sense strand
cccagggagaagucagaaa

SEQ ID NO: 2328969 - RNA, 19 nt, Homo sapiens
  misc_RNA (1)...(19): siRNA sense strand
aagaugaaggagggugaaa

SEQ ID NO: 2328970 - RNA, 19 nt, Homo sapiens
  misc_RNA (1)...(19): siRNA sense strand
aaugaaauggaaagacaca

SEQ ID NO: 2328971 - RNA, 19 nt, Homo sapiens
  misc_RNA (1)...(19): siRNA sense strand
uagugaaacagaagagaaa

SEQ ID NO: 2328972 - RNA, 19 nt, Homo sapiens
  misc_RNA (1)...(19): siRNA sense strand
cuaaaugggagaagaggaa

SEQ ID NO: 2328973 - RNA, 19 nt, Homo sapiens
  misc_RNA (1)...(19): siRNA sense strand
cuuuaaagccugaagaaaa

SEQ ID NO: 2328974 - RNA, 19 nt, Homo sapiens
  misc_RNA (1)...(19): siRNA sense strand
uggaagaagagaagacaau

SEQ ID NO: 2328975 - RNA, 19 nt, Homo sapiens
  misc_RNA (1)...(19): siRNA sense strand
ugaaagaauuagagguaac

SEQ ID NO: 2328976 - RNA, 19 nt, Homo sapiens
  misc_RNA (1)...(19): siRNA sense strand
cugggaaaugugagugaaa

SEQ ID NO: 2328977 - RNA, 19 nt, Homo sapiens
  misc_RNA (1)...(19): siRNA sense strand
gggaaaugugagugaaacu

SEQ ID NO: 2328978 - RNA, 19 nt, Homo sapiens
  misc_RNA (1)...(19): siRNA sense strand
agaacauccaguagugaaa

SEQ ID NO: 2328979 - RNA, 19 nt, Homo sapiens
  misc_RNA (1)...(19): siRNA sense strand
cugaagaaaaggaugaaaa

SEQ ID NO: 2328980 - RNA, 19 nt, Homo sapiens
  misc_RNA (1)...(19): siRNA sense strand
acuuaaugguaaagaagga

SEQ ID NO: 2328981 - RNA, 19 nt, Homo sapiens
  misc_RNA (1)...(19): siRNA sense strand
acauuaagaagaagaccaa

SEQ ID NO: 2328982 - RNA, 19 nt, Homo sapiens
  misc_RNA (1)...(19): siRNA sense strand
ccaaagaaaauucgaggaa

SEQ ID NO: 2328983 - RNA, 19 nt, Homo sapiens
  misc_RNA (1)...(19): siRNA sense strand
aggaguauuuccagacaau

SEQ ID NO: 2328984 - RNA, 19 nt, Homo sapiens
  misc_RNA (1)...(19): siRNA sense strand
uggaaauagagaagcugaa

SEQ ID NO: 2328985 - RNA, 19 nt, Homo sapiens
  misc_RNA (1)...(19): siRNA sense strand
gaucaguuacacagccaaa

SEQ ID NO: 2328986 - RNA, 19 nt, Homo sapiens
  misc_RNA (1)...(19): siRNA sense strand
aggagaacuaaaugggaga

SEQ ID NO: 2328987 - RNA, 19 nt, Homo sapiens
  misc_RNA (1)...(19): siRNA sense strand
ggggcgaacuuaaugguaa

SEQ ID NO: 2328988 - RNA, 19 nt, Homo sapiens
  misc_RNA (1)...(19): siRNA sense strand
ccauuagaaaucaaagcua

SEQ ID NO: 2328989 - RNA, 19 nt, Homo sapiens
  misc_RNA (1)...(19): siRNA sense strand
ugacaauuucguuaaggaa

SEQ ID NO: 2328990 - RNA, 19 nt, Homo sapiens
  misc_RNA (1)...(19): siRNA sense strand
aauucaaggaugacaguuu

SEQ ID NO: 2328991 - RNA, 19 nt, Homo sapiens
  misc_RNA (1)...(19): siRNA sense strand
gaagaaggcugguggagug

SEQ ID NO: 2328992 - RNA, 19 nt, Homo sapiens
  misc_RNA (1)...(19): siRNA sense strand
ugauagcugcagagaagaa

SEQ ID NO: 2328993 - RNA, 19 nt, Homo sapiens
  misc_RNA (1)...(19): siRNA sense strand
cauuguagaagcacugaaa

SEQ ID NO: 2328994 - RNA, 19 nt, Homo sapiens
  misc_RNA (1)...(19): siRNA sense strand
gcccaggacgauucagaaa

SEQ ID NO: 2328995 - RNA, 19 nt, Homo sapiens
  misc_RNA (1)...(19): siRNA sense strand
aauuggauuuggagacauu

SEQ ID NO: 2328996 - RNA, 19 nt, Homo sapiens
  misc_RNA (1)...(19): siRNA sense strand
auuaagaagaagaccaaga

SEQ ID NO: 2328997 - RNA, 19 nt, Homo sapiens
  misc_RNA (1)...(19): siRNA sense strand
acuauauuguggaguauga

SEQ ID NO: 2328998 - RNA, 19 nt, Homo sapiens
  misc_RNA (1)...(19): siRNA sense strand
agguacuaaugaagaugaa

SEQ ID NO: 2328999 - RNA, 19 nt, Homo sapiens
  misc_RNA (1)...(19): siRNA sense strand
aaguaaggagacuggagaa

SEQ ID NO: 2329000 - RNA, 19 nt, Homo sapiens
  misc_RNA (1)...(19): siRNA sense strand
aagauuuggaagaagagaa

SEQ ID NO: 2329001 - RNA, 19 nt, Homo sapiens
  misc_RNA (1)...(19): siRNA sense strand
guggcuggaaggagaacua

SEQ ID NO: 2329002 - RNA, 19 nt, Homo sapiens
  misc_RNA (1)...(19): siRNA sense strand
ugaaagugggagauauuau

SEQ ID NO: 2329003 - RNA, 19 nt, Homo sapiens
  misc_RNA (1)...(19): siRNA sense strand
uggagaaaucaucaggaau

SEQ ID NO: 2329004 - RNA, 19 nt, Homo sapiens
  misc_RNA (1)...(19): siRNA sense strand
aaucaucaggaaugugaaa

SEQ ID NO: 2329005 - RNA, 19 nt, Homo sapiens
  misc_RNA (1)...(19): siRNA sense strand
gacaaugagaaguaaucua

SEQ ID NO: 2329006 - RNA, 19 nt, Homo sapiens
  misc_RNA (1)...(19): siRNA sense strand
agauggaaauagagaagcu

SEQ ID NO: 2329007 - RNA, 19 nt, Homo sapiens
  misc_RNA (1)...(19): siRNA sense strand
uuggagaaaucaucaggaa

SEQ ID NO: 2329008 - RNA, 19 nt, Homo sapiens
  misc_RNA (1)...(19): siRNA sense strand
gaaauagagaagcugaaaa

SEQ ID NO: 2329009 - RNA, 19 nt, Homo sapiens
  misc_RNA (1)...(19): siRNA sense strand
ggggaaguuucuagcauuu

SEQ ID NO: 2329010 - RNA, 19 nt, Homo sapiens
  misc_RNA (1)...(19): siRNA sense strand
acgggaaagaacuggaaaa

SEQ ID NO: 2329011 - RNA, 19 nt, Homo sapiens
  misc_RNA (1)...(19): siRNA sense strand
gaagacaaugagaaguaau

SEQ ID NO: 2329012 - RNA, 19 nt, Homo sapiens
  misc_RNA (1)...(19): siRNA sense strand
uuaaugaagagguagaaga

SEQ ID NO: 2329013 - RNA, 19 nt, Homo sapiens
  misc_RNA (1)...(19): siRNA sense strand
aagaauuagagguaacaga

SEQ ID NO: 2329014 - RNA, 19 nt, Homo sapiens
  misc_RNA (1)...(19): siRNA sense strand
aguuacacagccaaagaaa

SEQ ID NO: 2329015 - RNA, 19 nt, Homo sapiens
  misc_RNA (1)...(19): siRNA sense strand
gugaaacuucggacaagaa

SEQ ID NO: 2329016 - RNA, 19 nt, Homo sapiens
  misc_RNA (1)...(19): siRNA sense strand
cuggaacaguguacccaaa

SEQ ID NO: 2329017 - RNA, 19 nt, Homo sapiens
  misc_RNA (1)...(19): siRNA sense strand
cuccuauagccaagauuaa

SEQ ID NO: 2329018 - RNA, 19 nt, Homo sapiens
  misc_RNA (1)...(19): siRNA sense strand
ugaauaacaaguugggacu

SEQ ID NO: 2329019 - RNA, 19 nt, Homo sapiens
  misc_RNA (1)...(19): siRNA sense strand
agguaacagaugaugguga

SEQ ID NO: 2329020 - RNA, 19 nt, Homo sapiens
  misc_RNA (1)...(19): siRNA sense strand
cggacaagaacauccagua

SEQ ID NO: 2329021 - RNA, 19 nt, Homo sapiens
  misc_RNA (1)...(19): siRNA sense strand
cgucuaggaaugcgcgcaa

SEQ ID NO: 2329022 - RNA, 19 nt, Homo sapiens
  misc_RNA (1)...(19): siRNA sense strand
gcucauccuucuugggcca

SEQ ID NO: 2329023 - RNA, 19 nt, Homo sapiens
  misc_RNA (1)...(19): siRNA sense strand
gcgacauggacguguuuga

SEQ ID NO: 2329024 - RNA, 19 nt, Homo sapiens
  misc_RNA (1)...(19): siRNA sense strand
ccagcaagacagugacagu

SEQ ID NO: 2329025 - RNA, 19 nt, Homo sapiens
  misc_RNA (1)...(19): siRNA sense strand
cgucuaggaaugcgcgcaa

SEQ ID NO: 2329026 - RNA, 19 nt, Homo sapiens
  misc_RNA (1)...(19): siRNA sense strand
gcucauccuucuugggcca

SEQ ID NO: 2329027 - RNA, 19 nt, Homo sapiens
  misc_RNA (1)...(19): siRNA sense strand
gcgacauggacguguuuga

SEQ ID NO: 2329028 - RNA, 19 nt, Homo sapiens
  misc_RNA (1)...(19): siRNA sense strand
ccagcaagacagugacagu

SEQ ID NO: 2329029 - RNA, 19 nt, Homo sapiens
  misc_RNA (1)...(19): siRNA sense strand
gaaagaaauugcuggccaa

SEQ ID NO: 2329030 - RNA, 19 nt, Homo sapiens
  misc_RNA (1)...(19): siRNA sense strand
gcaaagagauugaggagcu

SEQ ID NO: 2329031 - RNA, 19 nt, Homo sapiens
  misc_RNA (1)...(19): siRNA sense strand
gugaugaagaagaggaaga

SEQ ID NO: 2329032 - RNA, 19 nt, Homo sapiens
  misc_RNA (1)...(19): siRNA sense strand
gggugaugaagaagaggaa

SEQ ID NO: 2329033 - RNA, 19 nt, Homo sapiens
  misc_RNA (1)...(19): siRNA sense strand
agaucgagguugaggagga

SEQ ID NO: 2329034 - RNA, 19 nt, Homo sapiens
  misc_RNA (1)...(19): siRNA sense strand
ccggaugacaguaccgaaa

SEQ ID NO: 2329035 - RNA, 19 nt, Homo sapiens
  misc_RNA (1)...(19): siRNA sense strand
gggcauaaggacaaagcca

SEQ ID NO: 2329036 - RNA, 19 nt, Homo sapiens
  misc_RNA (1)...(19): siRNA sense strand
aggcagagccacagaagca

SEQ ID NO: 2329037 - RNA, 19 nt, Homo sapiens
  misc_RNA (1)...(19): siRNA sense strand
agaaagaaauugcuggcca

SEQ ID NO: 2329038 - RNA, 19 nt, Homo sapiens
  misc_RNA (1)...(19): siRNA sense strand
aggaagaggaugaugagga

SEQ ID NO: 2329039 - RNA, 19 nt, Homo sapiens
  misc_RNA (1)...(19): siRNA sense strand
cugcauaugguguggacuu

SEQ ID NO: 2329040 - RNA, 19 nt, Homo sapiens
  misc_RNA (1)...(19): siRNA sense strand
agacauauccacaggucca

SEQ ID NO: 2329041 - RNA, 19 nt, Homo sapiens
  misc_RNA (1)...(19): siRNA sense strand
aggaugaagaagagaucga

SEQ ID NO: 2329042 - RNA, 19 nt, Homo sapiens
  misc_RNA (1)...(19): siRNA sense strand
ggcauaaggacaaagccaa

SEQ ID NO: 2329043 - RNA, 19 nt, Homo sapiens
  misc_RNA (1)...(19): siRNA sense strand
augaugaggaugaagaaga

SEQ ID NO: 2329044 - RNA, 19 nt, Homo sapiens
  misc_RNA (1)...(19): siRNA sense strand
augaagaagaggaagagga

SEQ ID NO: 2329045 - RNA, 19 nt, Homo sapiens
  misc_RNA (1)...(19): siRNA sense strand
aggacaucgccaaggaaaa

SEQ ID NO: 2329046 - RNA, 19 nt, Homo sapiens
  misc_RNA (1)...(19): siRNA sense strand
agauauauccagagaggag

SEQ ID NO: 2329047 - RNA, 19 nt, Homo sapiens
  misc_RNA (1)...(19): siRNA sense strand
agguacagccacaggcaca

SEQ ID NO: 2329048 - RNA, 19 nt, Homo sapiens
  misc_RNA (1)...(19): siRNA sense strand
gugaaaacagagcgagaga

SEQ ID NO: 2329049 - RNA, 19 nt, Homo sapiens
  misc_RNA (1)...(19): siRNA sense strand
aguuacaggugaaggccca

SEQ ID NO: 2329050 - RNA, 19 nt, Homo sapiens
  misc_RNA (1)...(19): siRNA sense strand
aggaugaugaggaugaaga

SEQ ID NO: 2329051 - RNA, 19 nt, Homo sapiens
  misc_RNA (1)...(19): siRNA sense strand
agucagcauggaagagauu

SEQ ID NO: 2329052 - RNA, 19 nt, Homo sapiens
  misc_RNA (1)...(19): siRNA sense strand
agaagcaggugcagccaca

SEQ ID NO: 2329053 - RNA, 19 nt, Homo sapiens
  misc_RNA (1)...(19): siRNA sense strand
agaagcaggugcagccaca

SEQ ID NO: 2329054 - RNA, 19 nt, Homo sapiens
  misc_RNA (1)...(19): siRNA sense strand
agguccagacacagacaua

SEQ ID NO: 2329055 - RNA, 19 nt, Homo sapiens
  misc_RNA (1)...(19): siRNA sense strand
uggccuagaugugggagaa

SEQ ID NO: 2329056 - RNA, 19 nt, Homo sapiens
  misc_RNA (1)...(19): siRNA sense strand
cagcaaagagauugaggag

SEQ ID NO: 2329057 - RNA, 19 nt, Homo sapiens
  misc_RNA (1)...(19): siRNA sense strand
uggaaaagaccuugccaga

SEQ ID NO: 2329058 - RNA, 19 nt, Homo sapiens
  misc_RNA (1)...(19): siRNA sense strand
uggguugcuucgaggguga

SEQ ID NO: 2329059 - RNA, 19 nt, Homo sapiens
  misc_RNA (1)...(19): siRNA sense strand
gcccagaggacaucgccaa

SEQ ID NO: 2329060 - RNA, 19 nt, Homo sapiens
  misc_RNA (1)...(19): siRNA sense strand
ggacaaagccaaggagcug

SEQ ID NO: 2329061 - RNA, 19 nt, Homo sapiens
  misc_RNA (1)...(19): siRNA sense strand
gaaggaaccuccagggcag

SEQ ID NO: 2329062 - RNA, 19 nt, Homo sapiens
  misc_RNA (1)...(19): siRNA sense strand
ccuagaugugggagaaugu

SEQ ID NO: 2329063 - RNA, 19 nt, Homo sapiens
  misc_RNA (1)...(19): siRNA sense strand
gcaaguuuguggagcacgu

SEQ ID NO: 2329064 - RNA, 19 nt, Homo sapiens
  misc_RNA (1)...(19): siRNA sense strand
cagggcaguuacaggugaa

SEQ ID NO: 2329065 - RNA, 19 nt, Homo sapiens
  misc_RNA (1)...(19): siRNA sense strand
gauccaacaccgcaggaca

SEQ ID NO: 2329066 - RNA, 19 nt, Homo sapiens
  misc_RNA (1)...(19): siRNA sense strand
gcaaacagccaccagccaa

SEQ ID NO: 2329067 - RNA, 19 nt, Homo sapiens
  misc_RNA (1)...(19): siRNA sense strand
cguugaagccgcugugcca

SEQ ID NO: 2329068 - RNA, 19 nt, Homo sapiens
  misc_RNA (1)...(19): siRNA sense strand
gagaagaugcugccgcuga

SEQ ID NO: 2329069 - RNA, 19 nt, Homo sapiens
  misc_RNA (1)...(19): siRNA sense strand
aagcaaagggagagaaaga

SEQ ID NO: 2329070 - RNA, 19 nt, Homo sapiens
  misc_RNA (1)...(19): siRNA sense strand
cagauaaagcaaagggaga

SEQ ID NO: 2329071 - RNA, 19 nt, Homo sapiens
  misc_RNA (1)...(19): siRNA sense strand
gaaagagagaggaggaaaa

SEQ ID NO: 2329072 - RNA, 19 nt, Homo sapiens
  misc_RNA (1)...(19): siRNA sense strand
gugaaagauuggagaagca

SEQ ID NO: 2329073 - RNA, 19 nt, Homo sapiens
  misc_RNA (1)...(19): siRNA sense strand
ggaaaaggagcuugugaaa

SEQ ID NO: 2329074 - RNA, 19 nt, Homo sapiens
  misc_RNA (1)...(19): siRNA sense strand
ugguggaggccgaguguaa

SEQ ID NO: 2329075 - RNA, 19 nt, Homo sapiens
  misc_RNA (1)...(19): siRNA sense strand
aggaaaagauguacgaaau

SEQ ID NO: 2329076 - RNA, 19 nt, Homo sapiens
  misc_RNA (1)...(19): siRNA sense strand
uggauaacgcugaggaaaa

SEQ ID NO: 2329077 - RNA, 19 nt, Homo sapiens
  misc_RNA (1)...(19): siRNA sense strand
gcaaaaguucagauggaaa

SEQ ID NO: 2329078 - RNA, 19 nt, Homo sapiens
  misc_RNA (1)...(19): siRNA sense strand
caaagaagggcguguaaaa

SEQ ID NO: 2329079 - RNA, 19 nt, Homo sapiens
  misc_RNA (1)...(19): siRNA sense strand
ccaaagauaaggacagaca

SEQ ID NO: 2329080 - RNA, 19 nt, Homo sapiens
  misc_RNA (1)...(19): siRNA sense strand
gggcaaaaguucagaugga

SEQ ID NO: 2329081 - RNA, 19 nt, Homo sapiens
  misc_RNA (1)...(19): siRNA sense strand
ggaaaagauguacgaaaua

SEQ ID NO: 2329082 - RNA, 19 nt, Homo sapiens
  misc_RNA (1)...(19): siRNA sense strand
aagaaccagcugagagaaa

SEQ ID NO: 2329083 - RNA, 19 nt, Homo sapiens
  misc_RNA (1)...(19): siRNA sense strand
ucuuagauccucagacaaa

SEQ ID NO: 2329084 - RNA, 19 nt, Homo sapiens
  misc_RNA (1)...(19): siRNA sense strand
uaaagcaaagggagagaaa

SEQ ID NO: 2329085 - RNA, 19 nt, Homo sapiens
  misc_RNA (1)...(19): siRNA sense strand
agggagagaaagaauaaua

SEQ ID NO: 2329086 - RNA, 19 nt, Homo sapiens
  misc_RNA (1)...(19): siRNA sense strand
augaugaagaggaagauaa

SEQ ID NO: 2329087 - RNA, 19 nt, Homo sapiens
  misc_RNA (1)...(19): siRNA sense strand
agaugaugguaaagguuau

SEQ ID NO: 2329088 - RNA, 19 nt, Homo sapiens
  misc_RNA (1)...(19): siRNA sense strand
cgaaugugucugaaggaau

SEQ ID NO: 2329089 - RNA, 19 nt, Homo sapiens
  misc_RNA (1)...(19): siRNA sense strand
cugaaggaauugugagacu

SEQ ID NO: 2329090 - RNA, 19 nt, Homo sapiens
  misc_RNA (1)...(19): siRNA sense strand
caggaaaagauguacgaaa

SEQ ID NO: 2329091 - RNA, 19 nt, Homo sapiens
  misc_RNA (1)...(19): siRNA sense strand
ugaugcagaagaagagaaa

SEQ ID NO: 2329092 - RNA, 19 nt, Homo sapiens
  misc_RNA (1)...(19): siRNA sense strand
cagccaauaagguggaaau

SEQ ID NO: 2329093 - RNA, 19 nt, Homo sapiens
  misc_RNA (1)...(19): siRNA sense strand
agaaagagagaggaggaaa

SEQ ID NO: 2329094 - RNA, 19 nt, Homo sapiens
  misc_RNA (1)...(19): siRNA sense strand
agauacaggacuuggaaca

SEQ ID NO: 2329095 - RNA, 19 nt, Homo sapiens
  misc_RNA (1)...(19): siRNA sense strand
agucagaagaaguugaaaa

SEQ ID NO: 2329096 - RNA, 19 nt, Homo sapiens
  misc_RNA (1)...(19): siRNA sense strand
agguggaaauugagaaaau

SEQ ID NO: 2329097 - RNA, 19 nt, Homo sapiens
  misc_RNA (1)...(19): siRNA sense strand
acacggaugaagagaaaga

SEQ ID NO: 2329098 - RNA, 19 nt, Homo sapiens
  misc_RNA (1)...(19): siRNA sense strand
gagugaaguggaagccuua

SEQ ID NO: 2329099 - RNA, 19 nt, Homo sapiens
  misc_RNA (1)...(19): siRNA sense strand
augaagaggaagauaauga

SEQ ID NO: 2329100 - RNA, 19 nt, Homo sapiens
  misc_RNA (1)...(19): siRNA sense strand
ccaaagaaugugcagaaaa

SEQ ID NO: 2329101 - RNA, 19 nt, Homo sapiens
  misc_RNA (1)...(19): siRNA sense strand
agaaaugugccgucgggaa

SEQ ID NO: 2329102 - RNA, 19 nt, Homo sapiens
  misc_RNA (1)...(19): siRNA sense strand
ccauuaacccugugccauu

SEQ ID NO: 2329103 - RNA, 19 nt, Homo sapiens
  misc_RNA (1)...(19): siRNA sense strand
ggagugaaguggaagccuu

SEQ ID NO: 2329104 - RNA, 19 nt, Homo sapiens
  misc_RNA (1)...(19): siRNA sense strand
aagaugaugaagaggaaga

SEQ ID NO: 2329105 - RNA, 19 nt, Homo sapiens
  misc_RNA (1)...(19): siRNA sense strand
uguguaugaugaagagauu

SEQ ID NO: 2329106 - RNA, 19 nt, Homo sapiens
  misc_RNA (1)...(19): siRNA sense strand
gcucagaagaaaaugcaaa

SEQ ID NO: 2329107 - RNA, 19 nt, Homo sapiens
  misc_RNA (1)...(19): siRNA sense strand
ucaagaaccagcugagaga

SEQ ID NO: 2329108 - RNA, 19 nt, Homo sapiens
  misc_RNA (1)...(19): siRNA sense strand
ugaugaagaggaagauaau

SEQ ID NO: 2329109 - RNA, 19 nt, Homo sapiens
  misc_RNA (1)...(19): siRNA sense strand
ggagaauaggcgucuacaa

SEQ ID NO: 2329110 - RNA, 19 nt, Homo sapiens
  misc_RNA (1)...(19): siRNA sense strand
ggaacaccauuuagggcuu

SEQ ID NO: 2329111 - RNA, 19 nt, Homo sapiens
  misc_RNA (1)...(19): siRNA sense strand
ucagaaagagagaggagga

SEQ ID NO: 2329112 - RNA, 19 nt, Homo sapiens
  misc_RNA (1)...(19): siRNA sense strand
cagaaagagagaggaggaa

SEQ ID NO: 2329113 - RNA, 19 nt, Homo sapiens
  misc_RNA (1)...(19): siRNA sense strand
aggaggagauggacaagau

SEQ ID NO: 2329114 - RNA, 19 nt, Homo sapiens
  misc_RNA (1)...(19): siRNA sense strand
uaagguggaaauugagaaa

SEQ ID NO: 2329115 - RNA, 19 nt, Homo sapiens
  misc_RNA (1)...(19): siRNA sense strand
gguucaagggaaagagacu

SEQ ID NO: 2329116 - RNA, 19 nt, Homo sapiens
  misc_RNA (1)...(19): siRNA sense strand
gggaaaaggagcuugugaa

SEQ ID NO: 2329117 - RNA, 19 nt, Homo sapiens
  misc_RNA (1)...(19): siRNA sense strand
agagagaggaggaaaacua

SEQ ID NO: 2329118 - RNA, 19 nt, Homo sapiens
  misc_RNA (1)...(19): siRNA sense strand
cagaagaugaugaagagga

SEQ ID NO: 2329119 - RNA, 19 nt, Homo sapiens
  misc_RNA (1)...(19): siRNA sense strand
cgucuuccggugugaaaua

SEQ ID NO: 2329120 - RNA, 19 nt, Homo sapiens
  misc_RNA (1)...(19): siRNA sense strand
cucugugucuuuagaaaua

SEQ ID NO: 2329121 - RNA, 19 nt, Homo sapiens
  misc_RNA (1)...(19): siRNA sense strand
uuggaaagugaaucagaaa

SEQ ID NO: 2329122 - RNA, 19 nt, Homo sapiens
  misc_RNA (1)...(19): siRNA sense strand
ggaagauaaugaugaaccu

SEQ ID NO: 2329123 - RNA, 19 nt, Homo sapiens
  misc_RNA (1)...(19): siRNA sense strand
agaaaagacgguuggaaga

SEQ ID NO: 2329124 - RNA, 19 nt, Homo sapiens
  misc_RNA (1)...(19): siRNA sense strand
guaaaaggcauaagcucaa

SEQ ID NO: 2329125 - RNA, 19 nt, Homo sapiens
  misc_RNA (1)...(19): siRNA sense strand
gcugagagaaauggagcua

SEQ ID NO: 2329126 - RNA, 19 nt, Homo sapiens
  misc_RNA (1)...(19): siRNA sense strand
auauaagccuugaagcaca

SEQ ID NO: 2329127 - RNA, 19 nt, Homo sapiens
  misc_RNA (1)...(19): siRNA sense strand
gagaaagagacgcucaaga

SEQ ID NO: 2329128 - RNA, 19 nt, Homo sapiens
  misc_RNA (1)...(19): siRNA sense strand
cacuaugaguauugggcaa

SEQ ID NO: 2329129 - RNA, 19 nt, Homo sapiens
  misc_RNA (1)...(19): siRNA sense strand
agaugguggaacagcuuaa

SEQ ID NO: 2329130 - RNA, 19 nt, Homo sapiens
  misc_RNA (1)...(19): siRNA sense strand
cugcaaaguuguuggagca

SEQ ID NO: 2329131 - RNA, 19 nt, Homo sapiens
  misc_RNA (1)...(19): siRNA sense strand
ggggaagacaauagugaaa

SEQ ID NO: 2329132 - RNA, 19 nt, Homo sapiens
  misc_RNA (1)...(19): siRNA sense strand
ugggaaugcugaaaggaga

SEQ ID NO: 2329133 - RNA, 19 nt, Homo sapiens
  misc_RNA (1)...(19): siRNA sense strand
aaugggucuuagaggguaa

SEQ ID NO: 2329134 - RNA, 19 nt, Homo sapiens
  misc_RNA (1)...(19): siRNA sense strand
ggugugaaggguggagaaa

SEQ ID NO: 2329135 - RNA, 19 nt, Homo sapiens
  misc_RNA (1)...(19): siRNA sense strand
caguagggucugaugaaaa

SEQ ID NO: 2329136 - RNA, 19 nt, Homo sapiens
  misc_RNA (1)...(19): siRNA sense strand
gggaaugcugaaaggagau

SEQ ID NO: 2329137 - RNA, 19 nt, Homo sapiens
  misc_RNA (1)...(19): siRNA sense strand
uugcaaagcucaagggcug

SEQ ID NO: 2329138 - RNA, 19 nt, Homo sapiens
  misc_RNA (1)...(19): siRNA sense strand
aaagauugaaggaagguga

SEQ ID NO: 2329139 - RNA, 19 nt, Homo sapiens
  misc_RNA (1)...(19): siRNA sense strand
agaagcacuuuguuggcua

SEQ ID NO: 2329140 - RNA, 19 nt, Homo sapiens
  misc_RNA (1)...(19): siRNA sense strand
cagccgcauuuaugggaau

SEQ ID NO: 2329141 - RNA, 19 nt, Homo sapiens
  misc_RNA (1)...(19): siRNA sense strand
gccaaaagauugaaggaag

SEQ ID NO: 2329142 - RNA, 19 nt, Homo sapiens
  misc_RNA (1)...(19): siRNA sense strand
agacaauagugaaagcaug

SEQ ID NO: 2329143 - RNA, 19 nt, Homo sapiens
  misc_RNA (1)...(19): siRNA sense strand
acuaagacauggacccuga

SEQ ID NO: 2329144 - RNA, 19 nt, Homo sapiens
  misc_RNA (1)...(19): siRNA sense strand
aggguaaaauccaguacaa

SEQ ID NO: 2329145 - RNA, 19 nt, Homo sapiens
  misc_RNA (1)...(19): siRNA sense strand
cugacagaguggccagaca

SEQ ID NO: 2329146 - RNA, 19 nt, Homo sapiens
  misc_RNA (1)...(19): siRNA sense strand
augggaaagaucuggaaaa

SEQ ID NO: 2329147 - RNA, 19 nt, Homo sapiens
  misc_RNA (1)...(19): siRNA sense strand
gauaauuuggggaagacaa

SEQ ID NO: 2329148 - RNA, 19 nt, Homo sapiens
  misc_RNA (1)...(19): siRNA sense strand
ggguuauggaacagagaaa

SEQ ID NO: 2329149 - RNA, 19 nt, Homo sapiens
  misc_RNA (1)...(19): siRNA sense strand
cgaaaauggcagaggaauu

SEQ ID NO: 2329150 - RNA, 19 nt, Homo sapiens
  misc_RNA (1)...(19): siRNA sense strand
acaugaauggagugagaaa

SEQ ID NO: 2329151 - RNA, 19 nt, Homo sapiens
  misc_RNA (1)...(19): siRNA sense strand
cagcagacaaagagguauu

SEQ ID NO: 2329152 - RNA, 19 nt, Homo sapiens
  misc_RNA (1)...(19): siRNA sense strand
ugggauaucaagaguauaa

SEQ ID NO: 2329153 - RNA, 19 nt, Homo sapiens
  misc_RNA (1)...(19): siRNA sense strand
aggcagugaugaagauauu

SEQ ID NO: 2329154 - RNA, 19 nt, Homo sapiens
  misc_RNA (1)...(19): siRNA sense strand
aaaugaaggcagugaugaa

SEQ ID NO: 2329155 - RNA, 19 nt, Homo sapiens
  misc_RNA (1)...(19): siRNA sense strand
gugaaauuguugaagcgaa

SEQ ID NO: 2329156 - RNA, 19 nt, Homo sapiens
  misc_RNA (1)...(19): siRNA sense strand
uggacauggugguggaaaa

SEQ ID NO: 2329157 - RNA, 19 nt, Homo sapiens
  misc_RNA (1)...(19): siRNA sense strand
guauaaugucuauggugaa

SEQ ID NO: 2329158 - RNA, 19 nt, Homo sapiens
  misc_RNA (1)...(19): siRNA sense strand
gcagagaaauguaugacga

SEQ ID NO: 2329159 - RNA, 19 nt, Homo sapiens
  misc_RNA (1)...(19): siRNA sense strand
agacaaacaaggagcaguu

SEQ ID NO: 2329160 - RNA, 19 nt, Homo sapiens
  misc_RNA (1)...(19): siRNA sense strand
agugagaccagaugauaaa

SEQ ID NO: 2329161 - RNA, 19 nt, Homo sapiens
  misc_RNA (1)...(19): siRNA sense strand
guacaaaggaagauccaca

SEQ ID NO: 2329162 - RNA, 19 nt, Homo sapiens
  misc_RNA (1)...(19): siRNA sense strand
cagccaaguuugaagagau

SEQ ID NO: 2329163 - RNA, 19 nt, Homo sapiens
  misc_RNA (1)...(19): siRNA sense strand
aagaagaaacggaccacaa

SEQ ID NO: 2329164 - RNA, 19 nt, Homo sapiens
  misc_RNA (1)...(19): siRNA sense strand
ugaccaaggaagaagaaaa

SEQ ID NO: 2329165 - RNA, 19 nt, Homo sapiens
  misc_RNA (1)...(19): siRNA sense strand
agaagaugaagauggcaua

SEQ ID NO: 2329166 - RNA, 19 nt, Homo sapiens
  misc_RNA (1)...(19): siRNA sense strand
gcggugugguggaaggauu

SEQ ID NO: 2329167 - RNA, 19 nt, Homo sapiens
  misc_RNA (1)...(19): siRNA sense strand
aguauaaugucuaugguga

SEQ ID NO: 2329168 - RNA, 19 nt, Homo sapiens
  misc_RNA (1)...(19): siRNA sense strand
agaaguauaccaagccaaa

SEQ ID NO: 2329169 - RNA, 19 nt, Homo sapiens
  misc_RNA (1)...(19): siRNA sense strand
augaagaacccauggacau

SEQ ID NO: 2329170 - RNA, 19 nt, Homo sapiens
  misc_RNA (1)...(19): siRNA sense strand
aaacugaugaacagacaaa

SEQ ID NO: 2329171 - RNA, 19 nt, Homo sapiens
  misc_RNA (1)...(19): siRNA sense strand
cuuuagaaggcuccagaaa

SEQ ID NO: 2329172 - RNA, 19 nt, Homo sapiens
  misc_RNA (1)...(19): siRNA sense strand
aggaagaagaaaagaaaca

SEQ ID NO: 2329173 - RNA, 19 nt, Homo sapiens
  misc_RNA (1)...(19): siRNA sense strand
gaagauuguauuagugaca

SEQ ID NO: 2329174 - RNA, 19 nt, Homo sapiens
  misc_RNA (1)...(19): siRNA sense strand
gguacaaaucaaacaugaa

SEQ ID NO: 2329175 - RNA, 19 nt, Homo sapiens
  misc_RNA (1)...(19): siRNA sense strand
ccaaaggagcacagauguu

SEQ ID NO: 2329176 - RNA, 19 nt, Homo sapiens
  misc_RNA (1)...(19): siRNA sense strand
ugucaauugcaaaggaaaa

SEQ ID NO: 2329177 - RNA, 19 nt, Homo sapiens
  misc_RNA (1)...(19): siRNA sense strand
ugaagagauguguggacua

SEQ ID NO: 2329178 - RNA, 19 nt, Homo sapiens
  misc_RNA (1)...(19): siRNA sense strand
aagugagaccagaugauaa

SEQ ID NO: 2329179 - RNA, 19 nt, Homo sapiens
  misc_RNA (1)...(19): siRNA sense strand
auuuaaggacuguggguga

SEQ ID NO: 2329180 - RNA, 19 nt, Homo sapiens
  misc_RNA (1)...(19): siRNA sense strand
cguaguaacaacaguuuau

SEQ ID NO: 2329181 - RNA, 19 nt, Homo sapiens
  misc_RNA (1)...(19): siRNA sense strand
uuucaauggcuucgagcaa

SEQ ID NO: 2329182 - RNA, 19 nt, Homo sapiens
  misc_RNA (1)...(19): siRNA sense strand
guggacuagugaugggaau

SEQ ID NO: 2329183 - RNA, 19 nt, Homo sapiens
  misc_RNA (1)...(19): siRNA sense strand
caguagaguccaucgaaga

SEQ ID NO: 2329184 - RNA, 19 nt, Homo sapiens
  misc_RNA (1)...(19): siRNA sense strand
uaacagaaugguugcaaga

SEQ ID NO: 2329185 - RNA, 19 nt, Homo sapiens
  misc_RNA (1)...(19): siRNA sense strand
caaggaagaagaaaagaaa

SEQ ID NO: 2329186 - RNA, 19 nt, Homo sapiens
  misc_RNA (1)...(19): siRNA sense strand
ccaaggaagaagaaaagaa

SEQ ID NO: 2329187 - RNA, 19 nt, Homo sapiens
  misc_RNA (1)...(19): siRNA sense strand
ucaauggcuucgagcaaau

SEQ ID NO: 2329188 - RNA, 19 nt, Homo sapiens
  misc_RNA (1)...(19): siRNA sense strand
gugucaauugcaaaggaaa

SEQ ID NO: 2329189 - RNA, 19 nt, Homo sapiens
  misc_RNA (1)...(19): siRNA sense strand
ggcucuaaagcuagcauua

SEQ ID NO: 2329190 - RNA, 19 nt, Homo sapiens
  misc_RNA (1)...(19): siRNA sense strand
caguggagcuaaagcaagu

SEQ ID NO: 2329191 - RNA, 19 nt, Homo sapiens
  misc_RNA (1)...(19): siRNA sense strand
accaauggacacugauaaa

SEQ ID NO: 2329192 - RNA, 19 nt, Homo sapiens
  misc_RNA (1)...(19): siRNA sense strand
gagaaguauaccaagccaa

SEQ ID NO: 2329193 - RNA, 19 nt, Homo sapiens
  misc_RNA (1)...(19): siRNA sense strand
aaucaaacaugaauggagu

SEQ ID NO: 2329194 - RNA, 19 nt, Homo sapiens
  misc_RNA (1)...(19): siRNA sense strand
caggaaguacugccagaaa

SEQ ID NO: 2329195 - RNA, 19 nt, Homo sapiens
  misc_RNA (1)...(19): siRNA sense strand
ugcacgagaauaugagaua

SEQ ID NO: 2329196 - RNA, 19 nt, Homo sapiens
  misc_RNA (1)...(19): siRNA sense strand
acacugauaaagagagcau

SEQ ID NO: 2329197 - RNA, 19 nt, Homo sapiens
  misc_RNA (1)...(19): siRNA sense strand
gugccagguccaaaugaaa

SEQ ID NO: 2329198 - RNA, 19 nt, Homo sapiens
  misc_RNA (1)...(19): siRNA sense strand
uuccaaaggaugugguuau

SEQ ID NO: 2329199 - RNA, 19 nt, Homo sapiens
  misc_RNA (1)...(19): siRNA sense strand
auuaagagagcuccaguaa

SEQ ID NO: 2329200 - RNA, 19 nt, Homo sapiens
  misc_RNA (1)...(19): siRNA sense strand
gcuccagaaaugggaauua

SEQ ID NO: 2329201 - RNA, 19 nt, Homo sapiens
  misc_RNA (1)...(19): siRNA sense strand
caguuugggugcagaucau

SEQ ID NO: 2329202 - RNA, 19 nt, Homo sapiens
  misc_RNA (1)...(19): siRNA sense strand
ggaaguacugccagaaacu

SEQ ID NO: 2329203 - RNA, 19 nt, Homo sapiens
  misc_RNA (1)...(19): siRNA sense strand
cacgagaauaugagauaga

SEQ ID NO: 2329204 - RNA, 19 nt, Homo sapiens
  misc_RNA (1)...(19): siRNA sense strand
gaugaagaacccauggaca

SEQ ID NO: 2329205 - RNA, 19 nt, Homo sapiens
  misc_RNA (1)...(19): siRNA sense strand
gugaacaucuccagccaca

SEQ ID NO: 2329206 - RNA, 19 nt, Homo sapiens
  misc_RNA (1)...(19): siRNA sense strand
cgcugaaggagguggaagu

SEQ ID NO: 2329207 - RNA, 19 nt, Homo sapiens
  misc_RNA (1)...(19): siRNA sense strand
cagagcagcuucagcgcaa

SEQ ID NO: 2329208 - RNA, 19 nt, Homo sapiens
  misc_RNA (1)...(19): siRNA sense strand
ggaaggugguagaggagcu

SEQ ID NO: 2329209 - RNA, 19 nt, Homo sapiens
  misc_RNA (1)...(19): siRNA sense strand
ccaucuauucagagacgua

SEQ ID NO: 2329210 - RNA, 19 nt, Homo sapiens
  misc_RNA (1)...(19): siRNA sense strand
ccggugugguggauggcaa

SEQ ID NO: 2329211 - RNA, 19 nt, Homo sapiens
  misc_RNA (1)...(19): siRNA sense strand
agagaguggagcaggaaca

SEQ ID NO: 2329212 - RNA, 19 nt, Homo sapiens
  misc_RNA (1)...(19): siRNA sense strand
gggcauaugcugugugggu

SEQ ID NO: 2329213 - RNA, 19 nt, Homo sapiens
  misc_RNA (1)...(19): siRNA sense strand
agaacaacagucaggccaa

SEQ ID NO: 2329214 - RNA, 19 nt, Homo sapiens
  misc_RNA (1)...(19): siRNA sense strand
gggaaguggucacaggaag

SEQ ID NO: 2329215 - RNA, 19 nt, Homo sapiens
  misc_RNA (1)...(19): siRNA sense strand
gccagagaguggagcagga

SEQ ID NO: 2329216 - RNA, 19 nt, Homo sapiens
  misc_RNA (1)...(19): siRNA sense strand
ggcugacgcaggaggaauu

SEQ ID NO: 2329217 - RNA, 19 nt, Homo sapiens
  misc_RNA (1)...(19): siRNA sense strand
gcauaugcugugugggucu

SEQ ID NO: 2329218 - RNA, 19 nt, Homo sapiens
  misc_RNA (1)...(19): siRNA sense strand
ucucagaggucaugcugca

SEQ ID NO: 2329219 - RNA, 19 nt, Homo sapiens
  misc_RNA (1)...(19): siRNA sense strand
cccuggaggaggugaauca

SEQ ID NO: 2329220 - RNA, 19 nt, Homo sapiens
  misc_RNA (1)...(19): siRNA sense strand
ccagaaaggccagccgcaa

SEQ ID NO: 2329221 - RNA, 19 nt, Homo sapiens
  misc_RNA (1)...(19): siRNA sense strand
cugaagacgucgcgagaca

SEQ ID NO: 2329222 - RNA, 19 nt, Homo sapiens
  misc_RNA (1)...(19): siRNA sense strand
cgagacaaguugcgcaaau

SEQ ID NO: 2329223 - RNA, 19 nt, Homo sapiens
  misc_RNA (1)...(19): siRNA sense strand
acgccgugcugguggacaa

SEQ ID NO: 2329224 - RNA, 19 nt, Homo sapiens
  misc_RNA (1)...(19): siRNA sense strand
agaagauggagaagaccaa

SEQ ID NO: 2329225 - RNA, 19 nt, Homo sapiens
  misc_RNA (1)...(19): siRNA sense strand
cgguggagguugaggaggu

SEQ ID NO: 2329226 - RNA, 19 nt, Homo sapiens
  misc_RNA (1)...(19): siRNA sense strand
gagaagauggagaagacca

SEQ ID NO: 2329227 - RNA, 19 nt, Homo sapiens
  misc_RNA (1)...(19): siRNA sense strand
gccucaagaccaaggaaaa

SEQ ID NO: 2329228 - RNA, 19 nt, Homo sapiens
  misc_RNA (1)...(19): siRNA sense strand
gcgagaaacugaagacguc

SEQ ID NO: 2329229 - RNA, 19 nt, Homo sapiens
  misc_RNA (1)...(19): siRNA sense strand
gagaaggugcgcaagguca

SEQ ID NO: 2329230 - RNA, 19 nt, Homo sapiens
  misc_RNA (1)...(19): siRNA sense strand
ccaaggaaaaccuggagaa

SEQ ID NO: 2329231 - RNA, 19 nt, Homo sapiens
  misc_RNA (1)...(19): siRNA sense strand
aggaaaaccuggagaagac

SEQ ID NO: 2329232 - RNA, 19 nt, Homo sapiens
  misc_RNA (1)...(19): siRNA sense strand
cuggagaagcgcaugaaca

SEQ ID NO: 2329233 - RNA, 19 nt, Homo sapiens
  misc_RNA (1)...(19): siRNA sense strand
ugccagagaaggagggcga

SEQ ID NO: 2329234 - RNA, 19 nt, Homo sapiens
  misc_RNA (1)...(19): siRNA sense strand
cuggagaagacgcggcaca

SEQ ID NO: 2329235 - RNA, 19 nt, Homo sapiens
  misc_RNA (1)...(19): siRNA sense strand
ugaaagagucggaggcgcu

SEQ ID NO: 2329236 - RNA, 19 nt, Homo sapiens
  misc_RNA (1)...(19): siRNA sense strand
cgccucaagaccaaggaaa

SEQ ID NO: 2329237 - RNA, 19 nt, Homo sapiens
  misc_RNA (1)...(19): siRNA sense strand
acgaggcgguggagguuga

SEQ ID NO: 2329238 - RNA, 19 nt, Homo sapiens
  misc_RNA (1)...(19): siRNA sense strand
agaagauccgcgagggcca

SEQ ID NO: 2329239 - RNA, 19 nt, Homo sapiens
  misc_RNA (1)...(19): siRNA sense strand
gcuuggagcugcagggcaa

SEQ ID NO: 2329240 - RNA, 19 nt, Homo sapiens
  misc_RNA (1)...(19): siRNA sense strand
gcaucauccucaucggcua

SEQ ID NO: 2329241 - RNA, 19 nt, Homo sapiens
  misc_RNA (1)...(19): siRNA sense strand
ggaagaacagugaggccca

SEQ ID NO: 2329242 - RNA, 19 nt, Homo sapiens
  misc_RNA (1)...(19): siRNA sense strand
guguacagcagcagcgaca

SEQ ID NO: 2329243 - RNA, 19 nt, Homo sapiens
  misc_RNA (1)...(19): siRNA sense strand
ggccugaggaugaggaacu

SEQ ID NO: 2329244 - RNA, 19 nt, Homo sapiens
  misc_RNA (1)...(19): siRNA sense strand
cagcccagucccagaggua

SEQ ID NO: 2329245 - RNA, 19 nt, Homo sapiens
  misc_RNA (1)...(19): siRNA sense strand
agauccuggugcuggacaa

SEQ ID NO: 2329246 - RNA, 19 nt, Homo sapiens
  misc_RNA (1)...(19): siRNA sense strand
gaugaggaacuuuggagga

SEQ ID NO: 2329247 - RNA, 19 nt, Homo sapiens
  misc_RNA (1)...(19): siRNA sense strand
guaugaaauuggaagcaca

SEQ ID NO: 2329248 - RNA, 19 nt, Homo sapiens
  misc_RNA (1)...(19): siRNA sense strand
gugacaaucuguuuggcaa

SEQ ID NO: 2329249 - RNA, 19 nt, Homo sapiens
  misc_RNA (1)...(19): siRNA sense strand
ccuauugggaacugugaaa

SEQ ID NO: 2329250 - RNA, 19 nt, Homo sapiens
  misc_RNA (1)...(19): siRNA sense strand
gaacaagaauggcagcaca

SEQ ID NO: 2329251 - RNA, 19 nt, Homo sapiens
  misc_RNA (1)...(19): siRNA sense strand
aggccaugguggugagguu

SEQ ID NO: 2329252 - RNA, 19 nt, Homo sapiens
  misc_RNA (1)...(19): siRNA sense strand
aacacgagaucgauggcaa

SEQ ID NO: 2329253 - RNA, 19 nt, Homo sapiens
  misc_RNA (1)...(19): siRNA sense strand
acaugaugaugaaguacau

SEQ ID NO: 2329254 - RNA, 19 nt, Homo sapiens
  misc_RNA (1)...(19): siRNA sense strand
ggacagucgaggaugugau

SEQ ID NO: 2329255 - RNA, 19 nt, Homo sapiens
  misc_RNA (1)...(19): siRNA sense strand
acgcugaccuguuucgcaa

SEQ ID NO: 2329256 - RNA, 19 nt, Homo sapiens
  misc_RNA (1)...(19): siRNA sense strand
uugaaauucccaaagaaga

SEQ ID NO: 2329257 - RNA, 19 nt, Homo sapiens
  misc_RNA (1)...(19): siRNA sense strand
gggaauaaguaccagacca

SEQ ID NO: 2329258 - RNA, 19 nt, Homo sapiens
  misc_RNA (1)...(19): siRNA sense strand
acugaugaguacugcgcua

SEQ ID NO: 2329259 - RNA, 19 nt, Homo sapiens
  misc_RNA (1)...(19): siRNA sense strand
ggguauuccagaagaacca

SEQ ID NO: 2329260 - RNA, 19 nt, Homo sapiens
  misc_RNA (1)...(19): siRNA sense strand
guaucacaccaaaggacaa

SEQ ID NO: 2329261 - RNA, 19 nt, Homo sapiens
  misc_RNA (1)...(19): siRNA sense strand
gagaaauugaggaaaccau

SEQ ID NO: 2329262 - RNA, 19 nt, Homo sapiens
  misc_RNA (1)...(19): siRNA sense strand
cacugaaagcuuugguaau

SEQ ID NO: 2329263 - RNA, 19 nt, Homo sapiens
  misc_RNA (1)...(19): siRNA sense strand
ccaaaggacaagaagguuc

SEQ ID NO: 2329264 - RNA, 19 nt, Homo sapiens
  misc_RNA (1)...(19): siRNA sense strand
uguaccaagcauaggagaa

SEQ ID NO: 2329265 - RNA, 19 nt, Homo sapiens
  misc_RNA (1)...(19): siRNA sense strand
caguaauucuucuaggcuu

SEQ ID NO: 2329266 - RNA, 19 nt, Homo sapiens
  misc_RNA (1)...(19): siRNA sense strand
gcguuguuacuguggagaa

SEQ ID NO: 2329267 - RNA, 19 nt, Homo sapiens
  misc_RNA (1)...(19): siRNA sense strand
gaucauagcaccuuggaug

SEQ ID NO: 2329268 - RNA, 19 nt, Homo sapiens
  misc_RNA (1)...(19): siRNA sense strand
gguaaugaucauagcaccu

SEQ ID NO: 2329269 - RNA, 19 nt, Homo sapiens
  misc_RNA (1)...(19): siRNA sense strand
aggucugucuugccggaua

SEQ ID NO: 2329270 - RNA, 19 nt, Homo sapiens
  misc_RNA (1)...(19): siRNA sense strand
aagcuuugguaaugaucau

SEQ ID NO: 2329271 - RNA, 19 nt, Homo sapiens
  misc_RNA (1)...(19): siRNA sense strand
gccuaaacugagugagaaa

SEQ ID NO: 2329272 - RNA, 19 nt, Homo sapiens
  misc_RNA (1)...(19): siRNA sense strand
aggagaaggaacaggccaa

SEQ ID NO: 2329273 - RNA, 19 nt, Homo sapiens
  misc_RNA (1)...(19): siRNA sense strand
cggaaagccaagaaaccaa

SEQ ID NO: 2329274 - RNA, 19 nt, Homo sapiens
  misc_RNA (1)...(19): siRNA sense strand
aagaacaagaacaggacaa

SEQ ID NO: 2329275 - RNA, 19 nt, Homo sapiens
  misc_RNA (1)...(19): siRNA sense strand
acuaagaagagaagacaca

SEQ ID NO: 2329276 - RNA, 19 nt, Homo sapiens
  misc_RNA (1)...(19): siRNA sense strand
caccaaaggccgaaagcau

SEQ ID NO: 2329277 - RNA, 19 nt, Homo sapiens
  misc_RNA (1)...(19): siRNA sense strand
gagaagacaggcugggaca

SEQ ID NO: 2329278 - RNA, 19 nt, Homo sapiens
  misc_RNA (1)...(19): siRNA sense strand
agaacauggacaaggaaga

SEQ ID NO: 2329279 - RNA, 19 nt, Homo sapiens
  misc_RNA (1)...(19): siRNA sense strand
gagcgaugagaaagaacaa

SEQ ID NO: 2329280 - RNA, 19 nt, Homo sapiens
  misc_RNA (1)...(19): siRNA sense strand
agaucauggccuucggaaa

SEQ ID NO: 2329281 - RNA, 19 nt, Homo sapiens
  misc_RNA (1)...(19): siRNA sense strand
aaucaaagccagaaccaga

SEQ ID NO: 2329282 - RNA, 19 nt, Homo sapiens
  misc_RNA (1)...(19): siRNA sense strand
aggagagcgaugagaaaga

SEQ ID NO: 2329283 - RNA, 19 nt, Homo sapiens
  misc_RNA (1)...(19): siRNA sense strand
ggaaagaguacaagucgga

SEQ ID NO: 2329284 - RNA, 19 nt, Homo sapiens
  misc_RNA (1)...(19): siRNA sense strand
aggaggaggaggaaucaaa

SEQ ID NO: 2329285 - RNA, 19 nt, Homo sapiens
  misc_RNA (1)...(19): siRNA sense strand
gggaagaggaggaggaacg

SEQ ID NO: 2329286 - RNA, 19 nt, Homo sapiens
  misc_RNA (1)...(19): siRNA sense strand
gcaagaaucgggaggccuu

SEQ ID NO: 2329287 - RNA, 19 nt, Homo sapiens
  misc_RNA (1)...(19): siRNA sense strand
aagaagaucauuaaggaca

SEQ ID NO: 2329288 - RNA, 19 nt, Homo sapiens
  misc_RNA (1)...(19): siRNA sense strand
agaagaucauuaaggacau

SEQ ID NO: 2329289 - RNA, 19 nt, Homo sapiens
  misc_RNA (1)...(19): siRNA sense strand
agaaagaacaagaacagga

SEQ ID NO: 2329290 - RNA, 19 nt, Homo sapiens
  misc_RNA (1)...(19): siRNA sense strand
ucaaggaacugcugaggga

SEQ ID NO: 2329291 - RNA, 19 nt, Homo sapiens
  misc_RNA (1)...(19): siRNA sense strand
gcaaccgggagaaggcaaa

SEQ ID NO: 2329292 - RNA, 19 nt, Homo sapiens
  misc_RNA (1)...(19): siRNA sense strand
aguucuauguggaggaguu

SEQ ID NO: 2329293 - RNA, 19 nt, Homo sapiens
  misc_RNA (1)...(19): siRNA sense strand
acuacaaugcugacgacaa

SEQ ID NO: 2329294 - RNA, 19 nt, Homo sapiens
  misc_RNA (1)...(19): siRNA sense strand
aggcaaagcaggcauucaa

SEQ ID NO: 2329295 - RNA, 19 nt, Homo sapiens
  misc_RNA (1)...(19): siRNA sense strand
agaaggaggagaaggagga

SEQ ID NO: 2329296 - RNA, 19 nt, Homo sapiens
  misc_RNA (1)...(19): siRNA sense strand
ggaagagguccgugagcgu

SEQ ID NO: 2329297 - RNA, 19 nt, Homo sapiens
  misc_RNA (1)...(19): siRNA sense strand
ggagaaagcuggcaaggag

SEQ ID NO: 2329298 - RNA, 19 nt, Homo sapiens
  misc_RNA (1)...(19): siRNA sense strand
uggccaagaaggagaagga

SEQ ID NO: 2329299 - RNA, 19 nt, Homo sapiens
  misc_RNA (1)...(19): siRNA sense strand
agucagaagaagaggagcu

SEQ ID NO: 2329300 - RNA, 19 nt, Homo sapiens
  misc_RNA (1)...(19): siRNA sense strand
gagaaagcuggcaaggaga

SEQ ID NO: 2329301 - RNA, 19 nt, Homo sapiens
  misc_RNA (1)...(19): siRNA sense strand
ggcccaaggaucuggauga

SEQ ID NO: 2329302 - RNA, 19 nt, Homo sapiens
  misc_RNA (1)...(19): siRNA sense strand
cgaugagaaagaacaagaa

SEQ ID NO: 2329303 - RNA, 19 nt, Homo sapiens
  misc_RNA (1)...(19): siRNA sense strand
ccaaagaggccaagcagac

SEQ ID NO: 2329304 - RNA, 19 nt, Homo sapiens
  misc_RNA (1)...(19): siRNA sense strand
ggacgagcugcaugagaca

SEQ ID NO: 2329305 - RNA, 19 nt, Homo sapiens
  misc_RNA (1)...(19): siRNA sense strand
aagcaguccgugugggaga

SEQ ID NO: 2329306 - RNA, 19 nt, Homo sapiens
  misc_RNA (1)...(19): siRNA sense strand
agagggaagaggaggagga

SEQ ID NO: 2329307 - RNA, 19 nt, Homo sapiens
  misc_RNA (1)...(19): siRNA sense strand
ggaaaggcaagaagcacca

SEQ ID NO: 2329308 - RNA, 19 nt, Homo sapiens
  misc_RNA (1)...(19): siRNA sense strand
gaaucaagaaggagaagac

SEQ ID NO: 2329309 - RNA, 19 nt, Homo sapiens
  misc_RNA (1)...(19): siRNA sense strand
ggcugggacacgucagaaa

SEQ ID NO: 2329310 - RNA, 19 nt, Homo sapiens
  misc_RNA (1)...(19): siRNA sense strand
gggacacgucagaaaguga

SEQ ID NO: 2329311 - RNA, 19 nt, Homo sapiens
  misc_RNA (1)...(19): siRNA sense strand
uggagagggaagaggagga

SEQ ID NO: 2329312 - RNA, 19 nt, Homo sapiens
  misc_RNA (1)...(19): siRNA sense strand
caauagucugcuggagaaa

SEQ ID NO: 2329313 - RNA, 19 nt, Homo sapiens
  misc_RNA (1)...(19): siRNA sense strand
augagaaagaacaagaaca

SEQ ID NO: 2329314 - RNA, 19 nt, Homo sapiens
  misc_RNA (1)...(19): siRNA sense strand
aacaagaggcugcagggaa

SEQ ID NO: 2329315 - RNA, 19 nt, Homo sapiens
  misc_RNA (1)...(19): siRNA sense strand
uugccuaaacugagugaga

SEQ ID NO: 2329316 - RNA, 19 nt, Homo sapiens
  misc_RNA (1)...(19): siRNA sense strand
aaggaacugcugagggaca

SEQ ID NO: 2329317 - RNA, 19 nt, Homo sapiens
  misc_RNA (1)...(19): siRNA sense strand
guuacagugccuugccuaa

SEQ ID NO: 2329318 - RNA, 19 nt, Homo sapiens
  misc_RNA (1)...(19): siRNA sense strand
gccaagaaggagaaggaac

SEQ ID NO: 2329319 - RNA, 19 nt, Homo sapiens
  misc_RNA (1)...(19): siRNA sense strand
aagcauggcaggaaaggca

SEQ ID NO: 2329320 - RNA, 19 nt, Homo sapiens
  misc_RNA (1)...(19): siRNA sense strand
aggaggaaucaaagccaga

SEQ ID NO: 2329321 - RNA, 19 nt, Homo sapiens
  misc_RNA (1)...(19): siRNA sense strand
aggaacugcugagggacaa

SEQ ID NO: 2329322 - RNA, 19 nt, Homo sapiens
  misc_RNA (1)...(19): siRNA sense strand
gucgaauaguccugagagu

SEQ ID NO: 2329323 - RNA, 19 nt, Homo sapiens
  misc_RNA (1)...(19): siRNA sense strand
uggaagaaguagaagguga

SEQ ID NO: 2329324 - RNA, 19 nt, Homo sapiens
  misc_RNA (1)...(19): siRNA sense strand
gcaaaggagaaaagagaaa

SEQ ID NO: 2329325 - RNA, 19 nt, Homo sapiens
  misc_RNA (1)...(19): siRNA sense strand
cagaauaaucaguugguuu

SEQ ID NO: 2329326 - RNA, 19 nt, Homo sapiens
  misc_RNA (1)...(19): siRNA sense strand
auccaauaauccagagaaa

SEQ ID NO: 2329327 - RNA, 19 nt, Homo sapiens
  misc_RNA (1)...(19): siRNA sense strand
gggccaauucagaggaaaa

SEQ ID NO: 2329328 - RNA, 19 nt, Homo sapiens
  misc_RNA (1)...(19): siRNA sense strand
agaaguaaugacagugaaa

SEQ ID NO: 2329329 - RNA, 19 nt, Homo sapiens
  misc_RNA (1)...(19): siRNA sense strand
cagaaggacuuuauggaca

SEQ ID NO: 2329330 - RNA, 19 nt, Homo sapiens
  misc_RNA (1)...(19): siRNA sense strand
gaccaaacucagagaucaa

SEQ ID NO: 2329331 - RNA, 19 nt, Homo sapiens
  misc_RNA (1)...(19): siRNA sense strand
ccaauaauccagagaaacu

SEQ ID NO: 2329332 - RNA, 19 nt, Homo sapiens
  misc_RNA (1)...(19): siRNA sense strand
ggaagaaguagaaggugau

SEQ ID NO: 2329333 - RNA, 19 nt, Homo sapiens
  misc_RNA (1)...(19): siRNA sense strand
aaaugaguccaaagagaaa

SEQ ID NO: 2329334 - RNA, 19 nt, Homo sapiens
  misc_RNA (1)...(19): siRNA sense strand
aggcacagcuucagaacuu

SEQ ID NO: 2329335 - RNA, 19 nt, Homo sapiens
  misc_RNA (1)...(19): siRNA sense strand
cagugaugauucuaaguua

SEQ ID NO: 2329336 - RNA, 19 nt, Homo sapiens
  misc_RNA (1)...(19): siRNA sense strand
gccaagaagcaauucgaaa

SEQ ID NO: 2329337 - RNA, 19 nt, Homo sapiens
  misc_RNA (1)...(19): siRNA sense strand
ccaagaagcaauucgaaaa

SEQ ID NO: 2329338 - RNA, 19 nt, Homo sapiens
  misc_RNA (1)...(19): siRNA sense strand
gcuacugcuuauagagaga

SEQ ID NO: 2329339 - RNA, 19 nt, Homo sapiens
  misc_RNA (1)...(19): siRNA sense strand
aaauauguggagaggaaau

SEQ ID NO: 2329340 - RNA, 19 nt, Homo sapiens
  misc_RNA (1)...(19): siRNA sense strand
ccacugaugaagaagggaa

SEQ ID NO: 2329341 - RNA, 19 nt, Homo sapiens
  misc_RNA (1)...(19): siRNA sense strand
cagcaaaggagaaaagaga

SEQ ID NO: 2329342 - RNA, 19 nt, Homo sapiens
  misc_RNA (1)...(19): siRNA sense strand
ggaccaagucagagcaucu

SEQ ID NO: 2329343 - RNA, 19 nt, Homo sapiens
  misc_RNA (1)...(19): siRNA sense strand
gaaaggagaaagugcgcuu

SEQ ID NO: 2329344 - RNA, 19 nt, Homo sapiens
  misc_RNA (1)...(19): siRNA sense strand
ccuacagaauggugcuaau

SEQ ID NO: 2329345 - RNA, 19 nt, Homo sapiens
  misc_RNA (1)...(19): siRNA sense strand
gaaucagagaagcuggaua

SEQ ID NO: 2329346 - RNA, 19 nt, Homo sapiens
  misc_RNA (1)...(19): siRNA sense strand
cuaaaauggcugaggcuuu

SEQ ID NO: 2329347 - RNA, 19 nt, Homo sapiens
  misc_RNA (1)...(19): siRNA sense strand
gaugaaacuuaucaggaca

SEQ ID NO: 2329348 - RNA, 19 nt, Homo sapiens
  misc_RNA (1)...(19): siRNA sense strand
gcuucagaacuuuguuaaa

SEQ ID NO: 2329349 - RNA, 19 nt, Homo sapiens
  misc_RNA (1)...(19): siRNA sense strand
uauaugagccugaaggaga

SEQ ID NO: 2329350 - RNA, 19 nt, Homo sapiens
  misc_RNA (1)...(19): siRNA sense strand
caaccaaagagauguccaa

SEQ ID NO: 2329351 - RNA, 19 nt, Homo sapiens
  misc_RNA (1)...(19): siRNA sense strand
aaugaagagaugcgggaau

SEQ ID NO: 2329352 - RNA, 19 nt, Homo sapiens
  misc_RNA (1)...(19): siRNA sense strand
acuaaaucguuuccagcaa

SEQ ID NO: 2329353 - RNA, 19 nt, Homo sapiens
  misc_RNA (1)...(19): siRNA sense strand
caauuaaggcacagcuuca

SEQ ID NO: 2329354 - RNA, 19 nt, Homo sapiens
  misc_RNA (1)...(19): siRNA sense strand
auaugagccugaaggagaa

SEQ ID NO: 2329355 - RNA, 19 nt, Homo sapiens
  misc_RNA (1)...(19): siRNA sense strand
cuuauagagagaaggguga

SEQ ID NO: 2329356 - RNA, 19 nt, Homo sapiens
  misc_RNA (1)...(19): siRNA sense strand
cacugaugaagaagggaaa

SEQ ID NO: 2329357 - RNA, 19 nt, Homo sapiens
  misc_RNA (1)...(19): siRNA sense strand
augcccaaguacaaagaaa

SEQ ID NO: 2329358 - RNA, 19 nt, Homo sapiens
  misc_RNA (1)...(19): siRNA sense strand
ggaugcagcaaaggagaaa

SEQ ID NO: 2329359 - RNA, 19 nt, Homo sapiens
  misc_RNA (1)...(19): siRNA sense strand
guugaagaccucaggcuuu

SEQ ID NO: 2329360 - RNA, 19 nt, Homo sapiens
  misc_RNA (1)...(19): siRNA sense strand
gaaaagagaaauggagcaa

SEQ ID NO: 2329361 - RNA, 19 nt, Homo sapiens
  misc_RNA (1)...(19): siRNA sense strand
gaggcauauaucagagcaa

SEQ ID NO: 2329362 - RNA, 19 nt, Homo sapiens
  misc_RNA (1)...(19): siRNA sense strand
aguagaaggugauguggca

SEQ ID NO: 2329363 - RNA, 19 nt, Homo sapiens
  misc_RNA (1)...(19): siRNA sense strand
gcugcaaauggcauaguua

SEQ ID NO: 2329364 - RNA, 19 nt, Homo sapiens
  misc_RNA (1)...(19): siRNA sense strand
agagaagcuggauaagaaa

SEQ ID NO: 2329365 - RNA, 19 nt, Homo sapiens
  misc_RNA (1)...(19): siRNA sense strand
caagaaugaaugaagagau

SEQ ID NO: 2329366 - RNA, 19 nt, Homo sapiens
  misc_RNA (1)...(19): siRNA sense strand
cccaaauggcauccaauaa

SEQ ID NO: 2329367 - RNA, 19 nt, Homo sapiens
  misc_RNA (1)...(19): siRNA sense strand
ccuaaaacgaggugccaau

SEQ ID NO: 2329368 - RNA, 19 nt, Homo sapiens
  misc_RNA (1)...(19): siRNA sense strand
acguuuagcaagaaugaau

SEQ ID NO: 2329369 - RNA, 19 nt, Homo sapiens
  misc_RNA (1)...(19): siRNA sense strand
agcaagauucacagaaauu

SEQ ID NO: 2329370 - RNA, 19 nt, Homo sapiens
  misc_RNA (1)...(19): siRNA sense strand
gcucaguauucuaguaaug

SEQ ID NO: 2329371 - RNA, 19 nt, Homo sapiens
  misc_RNA (1)...(19): siRNA sense strand
cuucuuucaucaaggauau

SEQ ID NO: 2329372 - RNA, 19 nt, Homo sapiens
  misc_RNA (1)...(19): siRNA sense strand
gcccaaguacaaagaaaca

SEQ ID NO: 2329373 - RNA, 19 nt, Homo sapiens
  misc_RNA (1)...(19): siRNA sense strand
aggcauggauuaaggcugu

SEQ ID NO: 2329374 - RNA, 19 nt, Homo sapiens
  misc_RNA (1)...(19): siRNA sense strand
ggcauauaucagagcaaaa

SEQ ID NO: 2329375 - RNA, 19 nt, Homo sapiens
  misc_RNA (1)...(19): siRNA sense strand
gcgggaaucagaaggacuu

SEQ ID NO: 2329376 - RNA, 19 nt, Homo sapiens
  misc_RNA (1)...(19): siRNA sense strand
guacaaagaaacaaacaac

SEQ ID NO: 2329377 - RNA, 19 nt, Homo sapiens
  misc_RNA (1)...(19): siRNA sense strand
gugaaacuuuguauugcaa

SEQ ID NO: 2329378 - RNA, 19 nt, Homo sapiens
  misc_RNA (1)...(19): siRNA sense strand
acuugauaagcuugugaaa

SEQ ID NO: 2329379 - RNA, 19 nt, Homo sapiens
  misc_RNA (1)...(19): siRNA sense strand
caggacaaagacaggagaa

SEQ ID NO: 2329380 - RNA, 19 nt, Homo sapiens
  misc_RNA (1)...(19): siRNA sense strand
aggcauauaucagagcaaa

SEQ ID NO: 2329381 - RNA, 19 nt, Homo sapiens
  misc_RNA (1)...(19): siRNA sense strand
cagaaguaaugacagugaa

SEQ ID NO: 2329382 - RNA, 19 nt, Homo sapiens
  misc_RNA (1)...(19): siRNA sense strand
agagaucaauuaaggcaca

SEQ ID NO: 2329383 - RNA, 19 nt, Homo sapiens
  misc_RNA (1)...(19): siRNA sense strand
caugaaggaucuuggugca

SEQ ID NO: 2329384 - RNA, 19 nt, Homo sapiens
  misc_RNA (1)...(19): siRNA sense strand
ccgauuaaaccgaggagaa

SEQ ID NO: 2329385 - RNA, 19 nt, Homo sapiens
  misc_RNA (1)...(19): siRNA sense strand
ggaaggaagcaaagggaca

SEQ ID NO: 2329386 - RNA, 19 nt, Homo sapiens
  misc_RNA (1)...(19): siRNA sense strand
gaucagaagcggagaaaau

SEQ ID NO: 2329387 - RNA, 19 nt, Homo sapiens
  misc_RNA (1)...(19): siRNA sense strand
cagaauuagugcacaacaa

SEQ ID NO: 2329388 - RNA, 19 nt, Homo sapiens
  misc_RNA (1)...(19): siRNA sense strand
agacaaugaaagugaaaca

SEQ ID NO: 2329389 - RNA, 19 nt, Homo sapiens
  misc_RNA (1)...(19): siRNA sense strand
gauucuagcagguuggaaa

SEQ ID NO: 2329390 - RNA, 19 nt, Homo sapiens
  misc_RNA (1)...(19): siRNA sense strand
ccuaagggaacaagaggaa

SEQ ID NO: 2329391 - RNA, 19 nt, Homo sapiens
  misc_RNA (1)...(19): siRNA sense strand
cugaacaaugccagggaua

SEQ ID NO: 2329392 - RNA, 19 nt, Homo sapiens
  misc_RNA (1)...(19): siRNA sense strand
uuucagaauuagugcacaa

SEQ ID NO: 2329393 - RNA, 19 nt, Homo sapiens
  misc_RNA (1)...(19): siRNA sense strand
cgaccuagcaguugaugaa

SEQ ID NO: 2329394 - RNA, 19 nt, Homo sapiens
  misc_RNA (1)...(19): siRNA sense strand
cuauaagagcuauggaaca

SEQ ID NO: 2329395 - RNA, 19 nt, Homo sapiens
  misc_RNA (1)...(19): siRNA sense strand
gggaaauugcauauaaaga

SEQ ID NO: 2329396 - RNA, 19 nt, Homo sapiens
  misc_RNA (1)...(19): siRNA sense strand
ccaaaagaaaguacgaaaa

SEQ ID NO: 2329397 - RNA, 19 nt, Homo sapiens
  misc_RNA (1)...(19): siRNA sense strand
gauacaagugccauggaua

SEQ ID NO: 2329398 - RNA, 19 nt, Homo sapiens
  misc_RNA (1)...(19): siRNA sense strand
agacuauugugauggcaua

SEQ ID NO: 2329399 - RNA, 19 nt, Homo sapiens
  misc_RNA (1)...(19): siRNA sense strand
gcuggugaggcgagaauua

SEQ ID NO: 2329400 - RNA, 19 nt, Homo sapiens
  misc_RNA (1)...(19): siRNA sense strand
augcgaagucugugguuua

SEQ ID NO: 2329401 - RNA, 19 nt, Homo sapiens
  misc_RNA (1)...(19): siRNA sense strand
ggagugagaaugaggacau

SEQ ID NO: 2329402 - RNA, 19 nt, Homo sapiens
  misc_RNA (1)...(19): siRNA sense strand
ucuucaggcugcagauaaa

SEQ ID NO: 2329403 - RNA, 19 nt, Homo sapiens
  misc_RNA (1)...(19): siRNA sense strand
gaaaaugguuuauggguca

SEQ ID NO: 2329404 - RNA, 19 nt, Homo sapiens
  misc_RNA (1)...(19): siRNA sense strand
ccgcaaauaccgucaaaca

SEQ ID NO: 2329405 - RNA, 19 nt, Homo sapiens
  misc_RNA (1)...(19): siRNA sense strand
acaaauaccuugaagucca

SEQ ID NO: 2329406 - RNA, 19 nt, Homo sapiens
  misc_RNA (1)...(19): siRNA sense strand
acaaagaaagaacgaggaa

SEQ ID NO: 2329407 - RNA, 19 nt, Homo sapiens
  misc_RNA (1)...(19): siRNA sense strand
ccugggaccuugaaagcaa

SEQ ID NO: 2329408 - RNA, 19 nt, Homo sapiens
  misc_RNA (1)...(19): siRNA sense strand
aagcacuacuucacagaaa

SEQ ID NO: 2329409 - RNA, 19 nt, Homo sapiens
  misc_RNA (1)...(19): siRNA sense strand
ugauacugcuuuugagaaa

SEQ ID NO: 2329410 - RNA, 19 nt, Homo sapiens
  misc_RNA (1)...(19): siRNA sense strand
caagacaaugaaagugaaa

SEQ ID NO: 2329411 - RNA, 19 nt, Homo sapiens
  misc_RNA (1)...(19): siRNA sense strand
cgauuaaaccgaggagaau

SEQ ID NO: 2329412 - RNA, 19 nt, Homo sapiens
  misc_RNA (1)...(19): siRNA sense strand
ggaacuacucagagagaac

SEQ ID NO: 2329413 - RNA, 19 nt, Homo sapiens
  misc_RNA (1)...(19): siRNA sense strand
ccacagggaaauugcauau

SEQ ID NO: 2329414 - RNA, 19 nt, Homo sapiens
  misc_RNA (1)...(19): siRNA sense strand
cagaaggagauguuagaga

SEQ ID NO: 2329415 - RNA, 19 nt, Homo sapiens
  misc_RNA (1)...(19): siRNA sense strand
cuauaaugacagcgugcaa

SEQ ID NO: 2329416 - RNA, 19 nt, Homo sapiens
  misc_RNA (1)...(19): siRNA sense strand
aggagauguuagagaagga

SEQ ID NO: 2329417 - RNA, 19 nt, Homo sapiens
  misc_RNA (1)...(19): siRNA sense strand
cugugaagguuauucuaua

SEQ ID NO: 2329418 - RNA, 19 nt, Homo sapiens
  misc_RNA (1)...(19): siRNA sense strand
gauuaaaccgaggagaaua

SEQ ID NO: 2329419 - RNA, 19 nt, Homo sapiens
  misc_RNA (1)...(19): siRNA sense strand
gggaaugaugguugaacga

SEQ ID NO: 2329420 - RNA, 19 nt, Homo sapiens
  misc_RNA (1)...(19): siRNA sense strand
gaauauggcaagugcuuca

SEQ ID NO: 2329421 - RNA, 19 nt, Homo sapiens
  misc_RNA (1)...(19): siRNA sense strand
agauguuagagaaggacaa

SEQ ID NO: 2329422 - RNA, 19 nt, Homo sapiens
  misc_RNA (1)...(19): siRNA sense strand
guggaaugauacugugaga

SEQ ID NO: 2329423 - RNA, 19 nt, Homo sapiens
  misc_RNA (1)...(19): siRNA sense strand
cgccaaacaacaacauaua

SEQ ID NO: 2329424 - RNA, 19 nt, Homo sapiens
  misc_RNA (1)...(19): siRNA sense strand
uugcaaaguugguguucau

SEQ ID NO: 2329425 - RNA, 19 nt, Homo sapiens
  misc_RNA (1)...(19): siRNA sense strand
cccaauauuugcaggacuu

SEQ ID NO: 2329426 - RNA, 19 nt, Homo sapiens
  misc_RNA (1)...(19): siRNA sense strand
guauaagaagaauguggaa

SEQ ID NO: 2329427 - RNA, 19 nt, Homo sapiens
  misc_RNA (1)...(19): siRNA sense strand
gaacaaugccagggauaca

SEQ ID NO: 2329428 - RNA, 19 nt, Homo sapiens
  misc_RNA (1)...(19): siRNA sense strand
agaagaaagugaaguccga

SEQ ID NO: 2329429 - RNA, 19 nt, Homo sapiens
  misc_RNA (1)...(19): siRNA sense strand
caacuuuacguguggaaca

SEQ ID NO: 2329430 - RNA, 19 nt, Homo sapiens
  misc_RNA (1)...(19): siRNA sense strand
cuauugacuauaagagcua

SEQ ID NO: 2329431 - RNA, 19 nt, Homo sapiens
  misc_RNA (1)...(19): siRNA sense strand
gagcacaacuguagcugga

SEQ ID NO: 2329432 - RNA, 19 nt, Homo sapiens
  misc_RNA (1)...(19): siRNA sense strand
guacagaaggacagaucca

SEQ ID NO: 2329433 - RNA, 19 nt, Homo sapiens
  misc_RNA (1)...(19): siRNA sense strand
ccaaaauagucgccaaaca

SEQ ID NO: 2329434 - RNA, 19 nt, Homo sapiens
  misc_RNA (1)...(19): siRNA sense strand
gggagacuguauacgacaa

SEQ ID NO: 2329435 - RNA, 19 nt, Homo sapiens
  misc_RNA (1)...(19): siRNA sense strand
uguaaguucuucagugaga

SEQ ID NO: 2329436 - RNA, 19 nt, Homo sapiens
  misc_RNA (1)...(19): siRNA sense strand
ggaguuauaacaaggcaau

SEQ ID NO: 2329437 - RNA, 19 nt, Homo sapiens
  misc_RNA (1)...(19): siRNA sense strand
gaaacaggcaagaacucaa

SEQ ID NO: 2329438 - RNA, 19 nt, Homo sapiens
  misc_RNA (1)...(19): siRNA sense strand
ccucagacacaaaggggaa

SEQ ID NO: 2329439 - RNA, 19 nt, Homo sapiens
  misc_RNA (1)...(19): siRNA sense strand
gaagaucagaagcggagaa

SEQ ID NO: 2329440 - RNA, 19 nt, Homo sapiens
  misc_RNA (1)...(19): siRNA sense strand
auauaaagauggcguucau

SEQ ID NO: 2329441 - RNA, 19 nt, Homo sapiens
  misc_RNA (1)...(19): siRNA sense strand
ucacaaagaacucgaggca

SEQ ID NO: 2329442 - RNA, 19 nt, Homo sapiens
  misc_RNA (1)...(19): siRNA sense strand
aggagaauauguagacguu

SEQ ID NO: 2329443 - RNA, 19 nt, Homo sapiens
  misc_RNA (1)...(19): siRNA sense strand
gcaucaaccaccagaacca

SEQ ID NO: 2329444 - RNA, 19 nt, Homo sapiens
  misc_RNA (1)...(19): siRNA sense strand
acaaagaacucgaggcacc

SEQ ID NO: 2329445 - RNA, 19 nt, Homo sapiens
  misc_RNA (1)...(19): siRNA sense strand
auuaaaccgaggagaauau

SEQ ID NO: 2329446 - RNA, 19 nt, Homo sapiens
  misc_RNA (1)...(19): siRNA sense strand
uuggaaucauggaaacaua

SEQ ID NO: 2329447 - RNA, 19 nt, Homo sapiens
  misc_RNA (1)...(19): siRNA sense strand
aguuguggacuguggacua

SEQ ID NO: 2329448 - RNA, 19 nt, Homo sapiens
  misc_RNA (1)...(19): siRNA sense strand
ccacuuuagcacagaagaa

SEQ ID NO: 2329449 - RNA, 19 nt, Homo sapiens
  misc_RNA (1)...(19): siRNA sense strand
cggaaaagcagaucggcua

SEQ ID NO: 2329450 - RNA, 19 nt, Homo sapiens
  misc_RNA (1)...(19): siRNA sense strand
cuugauggcuauaguaaaa

SEQ ID NO: 2329451 - RNA, 19 nt, Homo sapiens
  misc_RNA (1)...(19): siRNA sense strand
ugacagaccuggaggacac

SEQ ID NO: 2329452 - RNA, 19 nt, Homo sapiens
  misc_RNA (1)...(19): siRNA sense strand
cuguaaaaguaaagaagca

SEQ ID NO: 2329453 - RNA, 19 nt, Homo sapiens
  misc_RNA (1)...(19): siRNA sense strand
agaacaucuucaaagcaaa

SEQ ID NO: 2329454 - RNA, 19 nt, Homo sapiens
  misc_RNA (1)...(19): siRNA sense strand
cgaagaagguccagcacuc

SEQ ID NO: 2329455 - RNA, 19 nt, Homo sapiens
  misc_RNA (1)...(19): siRNA sense strand
cugucaaacugcugagacu

SEQ ID NO: 2329456 - RNA, 19 nt, Homo sapiens
  misc_RNA (1)...(19): siRNA sense strand
gcaaagcacccaauggaca

SEQ ID NO: 2329457 - RNA, 19 nt, Homo sapiens
  misc_RNA (1)...(19): siRNA sense strand
ucaccaaagccaagaucau

SEQ ID NO: 2329458 - RNA, 19 nt, Homo sapiens
  misc_RNA (1)...(19): siRNA sense strand
ccucguagccggagacacu

SEQ ID NO: 2329459 - RNA, 19 nt, Homo sapiens
  misc_RNA (1)...(19): siRNA sense strand
gaaacuugauagcuggaga

SEQ ID NO: 2329460 - RNA, 19 nt, Homo sapiens
  misc_RNA (1)...(19): siRNA sense strand
agcaggaagugcagaacau

SEQ ID NO: 2329461 - RNA, 19 nt, Homo sapiens
  misc_RNA (1)...(19): siRNA sense strand
ccauccuggcugagaagua

SEQ ID NO: 2329462 - RNA, 19 nt, Homo sapiens
  misc_RNA (1)...(19): siRNA sense strand
ggcaaauaucagaucaaaa

SEQ ID NO: 2329463 - RNA, 19 nt, Homo sapiens
  misc_RNA (1)...(19): siRNA sense strand
gaacaaagcccaagaaccg

SEQ ID NO: 2329464 - RNA, 19 nt, Homo sapiens
  misc_RNA (1)...(19): siRNA sense strand
cuggcaaauaucagaucaa

SEQ ID NO: 2329465 - RNA, 19 nt, Homo sapiens
  misc_RNA (1)...(19): siRNA sense strand
cuggcugucucuaggcuaa

SEQ ID NO: 2329466 - RNA, 19 nt, Homo sapiens
  misc_RNA (1)...(19): siRNA sense strand
gaucauuggauuugguucu

SEQ ID NO: 2329467 - RNA, 19 nt, Homo sapiens
  misc_RNA (1)...(19): siRNA sense strand
ccgcaacuguaaaaguaaa

SEQ ID NO: 2329468 - RNA, 19 nt, Homo sapiens
  misc_RNA (1)...(19): siRNA sense strand
cugagugccuggagaccau

SEQ ID NO: 2329469 - RNA, 19 nt, Homo sapiens
  misc_RNA (1)...(19): siRNA sense strand
ccaucuuggcaaagcucaa

SEQ ID NO: 2329470 - RNA, 19 nt, Homo sapiens
  misc_RNA (1)...(19): siRNA sense strand
caaacagauacacggaaaa

SEQ ID NO: 2329471 - RNA, 19 nt, Homo sapiens
  misc_RNA (1)...(19): siRNA sense strand
aggcuaagcagaaucguga

SEQ ID NO: 2329472 - RNA, 19 nt, Homo sapiens
  misc_RNA (1)...(19): siRNA sense strand
cggccaagacuguguucga

SEQ ID NO: 2329473 - RNA, 19 nt, Homo sapiens
  misc_RNA (1)...(19): siRNA sense strand
aauuuaggucggauguuua

SEQ ID NO: 2329474 - RNA, 19 nt, Homo sapiens
  misc_RNA (1)...(19): siRNA sense strand
aggugcagcagguggucaa

SEQ ID NO: 2329475 - RNA, 19 nt, Homo sapiens
  misc_RNA (1)...(19): siRNA sense strand
ucuccuuggucaugacauu

SEQ ID NO: 2329476 - RNA, 19 nt, Homo sapiens
  misc_RNA (1)...(19): siRNA sense strand
gaggacaccaagcgggaca

SEQ ID NO: 2329477 - RNA, 19 nt, Homo sapiens
  misc_RNA (1)...(19): siRNA sense strand
accugaaccugcagaccaa

SEQ ID NO: 2329478 - RNA, 19 nt, Homo sapiens
  misc_RNA (1)...(19): siRNA sense strand
cggucuucaucucggauau

SEQ ID NO: 2329479 - RNA, 19 nt, Homo sapiens
  misc_RNA (1)...(19): siRNA sense strand
cagaagucaccaaagccaa

SEQ ID NO: 2329480 - RNA, 19 nt, Homo sapiens
  misc_RNA (1)...(19): siRNA sense strand
ucuugauggcuauaguaaa

SEQ ID NO: 2329481 - RNA, 19 nt, Homo sapiens
  misc_RNA (1)...(19): siRNA sense strand
cuguguuggugaacucaaa

SEQ ID NO: 2329482 - RNA, 19 nt, Homo sapiens
  misc_RNA (1)...(19): siRNA sense strand
cgaggauucugaugaacaa

SEQ ID NO: 2329483 - RNA, 19 nt, Homo sapiens
  misc_RNA (1)...(19): siRNA sense strand
cugcagggcccaaggucaa

SEQ ID NO: 2329484 - RNA, 19 nt, Homo sapiens
  misc_RNA (1)...(19): siRNA sense strand
cagcgaggauucugaugaa

SEQ ID NO: 2329485 - RNA, 19 nt, Homo sapiens
  misc_RNA (1)...(19): siRNA sense strand
ccaagagccugcagggaac

SEQ ID NO: 2329486 - RNA, 19 nt, Homo sapiens
  misc_RNA (1)...(19): siRNA sense strand
gcgaggauucugaugaaca

SEQ ID NO: 2329487 - RNA, 19 nt, Homo sapiens
  misc_RNA (1)...(19): siRNA sense strand
acagagaggggaaguauaa

SEQ ID NO: 2329488 - RNA, 19 nt, Homo sapiens
  misc_RNA (1)...(19): siRNA sense strand
accaagagccugcagggaa

SEQ ID NO: 2329489 - RNA, 19 nt, Homo sapiens
  misc_RNA (1)...(19): siRNA sense strand
ugaaaucagaagagacagu

SEQ ID NO: 2329490 - RNA, 19 nt, Homo sapiens
  misc_RNA (1)...(19): siRNA sense strand
gaggggaaguauaaggaca

SEQ ID NO: 2329491 - RNA, 19 nt, Homo sapiens
  misc_RNA (1)...(19): siRNA sense strand
gcccaaggucaacggaaca

SEQ ID NO: 2329492 - RNA, 19 nt, Homo sapiens
  misc_RNA (1)...(19): siRNA sense strand
aggaggugucauacgcaua

SEQ ID NO: 2329493 - RNA, 19 nt, Homo sapiens
  misc_RNA (1)...(19): siRNA sense strand
gguucaggcaggagagaau

SEQ ID NO: 2329494 - RNA, 19 nt, Homo sapiens
  misc_RNA (1)...(19): siRNA sense strand
aggagggaguccacagaaa

SEQ ID NO: 2329495 - RNA, 19 nt, Homo sapiens
  misc_RNA (1)...(19): siRNA sense strand
uggucaaacucgagugauc

SEQ ID NO: 2329496 - RNA, 19 nt, Homo sapiens
  misc_RNA (1)...(19): siRNA sense strand
ggucggaugucauguuuga

SEQ ID NO: 2329497 - RNA, 19 nt, Homo sapiens
  misc_RNA (1)...(19): siRNA sense strand
ugaaaucagaagagacagu

SEQ ID NO: 2329498 - RNA, 19 nt, Homo sapiens
  misc_RNA (1)...(19): siRNA sense strand
cugcaauguuggucggaug

SEQ ID NO: 2329499 - RNA, 19 nt, Homo sapiens
  misc_RNA (1)...(19): siRNA sense strand
gguucaggcaggagagaau

SEQ ID NO: 2329500 - RNA, 19 nt, Homo sapiens
  misc_RNA (1)...(19): siRNA sense strand
aggagggaguccacagaaa

SEQ ID NO: 2329501 - RNA, 19 nt, Homo sapiens
  misc_RNA (1)...(19): siRNA sense strand
uggucaaacucgagugauc

SEQ ID NO: 2329502 - RNA, 19 nt, Homo sapiens
  misc_RNA (1)...(19): siRNA sense strand
ggucggaugucauguuuga

SEQ ID NO: 2329503 - RNA, 19 nt, Homo sapiens
  misc_RNA (1)...(19): siRNA sense strand
ugaaaucagaagagacagu

SEQ ID NO: 2329504 - RNA, 19 nt, Homo sapiens
  misc_RNA (1)...(19): siRNA sense strand
cugcaauguuggucggaug

SEQ ID NO: 2329505 - RNA, 19 nt, Homo sapiens
  misc_RNA (1)...(19): siRNA sense strand
uacuagugguaaaggacaa

SEQ ID NO: 2329506 - RNA, 19 nt, Homo sapiens
  misc_RNA (1)...(19): siRNA sense strand
uguuugaagauauggagaa

SEQ ID NO: 2329507 - RNA, 19 nt, Homo sapiens
  misc_RNA (1)...(19): siRNA sense strand
guggauuauuugaugacau

SEQ ID NO: 2329508 - RNA, 19 nt, Homo sapiens
  misc_RNA (1)...(19): siRNA sense strand
cacucaacgaagaggaaau

SEQ ID NO: 2329509 - RNA, 19 nt, Homo sapiens
  misc_RNA (1)...(19): siRNA sense strand
agcaaaauucagagagauu

SEQ ID NO: 2329510 - RNA, 19 nt, Homo sapiens
  misc_RNA (1)...(19): siRNA sense strand
auucagagagauugcagaa

SEQ ID NO: 2329511 - RNA, 19 nt, Homo sapiens
  misc_RNA (1)...(19): siRNA sense strand
agacgaaaagaguaugaua

SEQ ID NO: 2329512 - RNA, 19 nt, Homo sapiens
  misc_RNA (1)...(19): siRNA sense strand
ccuuauaugaagaaccaga

SEQ ID NO: 2329513 - RNA, 19 nt, Homo sapiens
  misc_RNA (1)...(19): siRNA sense strand
gagcaguuccggagguacu

SEQ ID NO: 2329514 - RNA, 19 nt, Homo sapiens
  misc_RNA (1)...(19): siRNA sense strand
agaaagagaaagagagaga

SEQ ID NO: 2329515 - RNA, 19 nt, Homo sapiens
  misc_RNA (1)...(19): siRNA sense strand
cagaagaauuacagagcau

SEQ ID NO: 2329516 - RNA, 19 nt, Homo sapiens
  misc_RNA (1)...(19): siRNA sense strand
gggaagaggaagugagcca

SEQ ID NO: 2329517 - RNA, 19 nt, Homo sapiens
  misc_RNA (1)...(19): siRNA sense strand
cgggagaauuguagauuau

SEQ ID NO: 2329518 - RNA, 19 nt, Homo sapiens
  misc_RNA (1)...(19): siRNA sense strand
gaggaagaagaaagagaaa

SEQ ID NO: 2329519 - RNA, 19 nt, Homo sapiens
  misc_RNA (1)...(19): siRNA sense strand
cuugaaauguggaagcaaa

SEQ ID NO: 2329520 - RNA, 19 nt, Homo sapiens
  misc_RNA (1)...(19): siRNA sense strand
agaagaaacgggaggaaga

SEQ ID NO: 2329521 - RNA, 19 nt, Homo sapiens
  misc_RNA (1)...(19): siRNA sense strand
cuggagaaacagaaggaaa

SEQ ID NO: 2329522 - RNA, 19 nt, Homo sapiens
  misc_RNA (1)...(19): siRNA sense strand
agaaacaggaagaggaaga

SEQ ID NO: 2329523 - RNA, 19 nt, Homo sapiens
  misc_RNA (1)...(19): siRNA sense strand
acaugaagaaagagaagaa

SEQ ID NO: 2329524 - RNA, 19 nt, Homo sapiens
  misc_RNA (1)...(19): siRNA sense strand
ggagaagaacagagauaca

SEQ ID NO: 2329525 - RNA, 19 nt, Homo sapiens
  misc_RNA (1)...(19): siRNA sense strand
guguagaagacaagacaau

SEQ ID NO: 2329526 - RNA, 19 nt, Homo sapiens
  misc_RNA (1)...(19): siRNA sense strand
agaaagaaaucgaggaccu

SEQ ID NO: 2329527 - RNA, 19 nt, Homo sapiens
  misc_RNA (1)...(19): siRNA sense strand
cgguauaagagaaaucaaa

SEQ ID NO: 2329528 - RNA, 19 nt, Homo sapiens
  misc_RNA (1)...(19): siRNA sense strand
gcaaaagagaucauagaua

SEQ ID NO: 2329529 - RNA, 19 nt, Homo sapiens
  misc_RNA (1)...(19): siRNA sense strand
cuacaagcguggagaggga

SEQ ID NO: 2329530 - RNA, 19 nt, Homo sapiens
  misc_RNA (1)...(19): siRNA sense strand
uuggagaagaacagagaua

SEQ ID NO: 2329531 - RNA, 19 nt, Homo sapiens
  misc_RNA (1)...(19): siRNA sense strand
agaaagagagagagagcga

SEQ ID NO: 2329532 - RNA, 19 nt, Homo sapiens
  misc_RNA (1)...(19): siRNA sense strand
ggcagaaggucgaggagga

SEQ ID NO: 2329533 - RNA, 19 nt, Homo sapiens
  misc_RNA (1)...(19): siRNA sense strand
cguauaagaucguggucga

SEQ ID NO: 2329534 - RNA, 19 nt, Homo sapiens
  misc_RNA (1)...(19): siRNA sense strand
aggaagaagaaacgaggaa

SEQ ID NO: 2329535 - RNA, 19 nt, Homo sapiens
  misc_RNA (1)...(19): siRNA sense strand
uggacuugauugagaagaa

SEQ ID NO: 2329536 - RNA, 19 nt, Homo sapiens
  misc_RNA (1)...(19): siRNA sense strand
acacagacaacgugccaaa

SEQ ID NO: 2329537 - RNA, 19 nt, Homo sapiens
  misc_RNA (1)...(19): siRNA sense strand
aaagagaaagagagagaga

SEQ ID NO: 2329538 - RNA, 19 nt, Homo sapiens
  misc_RNA (1)...(19): siRNA sense strand
uggagaaacagaaggaaaa

SEQ ID NO: 2329539 - RNA, 19 nt, Homo sapiens
  misc_RNA (1)...(19): siRNA sense strand
cuacaagaguucagagaag

SEQ ID NO: 2329540 - RNA, 19 nt, Homo sapiens
  misc_RNA (1)...(19): siRNA sense strand
ggguaaucaagaagaucaa

SEQ ID NO: 2329541 - RNA, 19 nt, Homo sapiens
  misc_RNA (1)...(19): siRNA sense strand
auugacaaguggaggaaau

SEQ ID NO: 2329542 - RNA, 19 nt, Homo sapiens
  misc_RNA (1)...(19): siRNA sense strand
gggaaggauuaguguggga

SEQ ID NO: 2329543 - RNA, 19 nt, Homo sapiens
  misc_RNA (1)...(19): siRNA sense strand
cuggauagacaauggagaa

SEQ ID NO: 2329544 - RNA, 19 nt, Homo sapiens
  misc_RNA (1)...(19): siRNA sense strand
ccaggaaccgagauggaaa

SEQ ID NO: 2329545 - RNA, 19 nt, Homo sapiens
  misc_RNA (1)...(19): siRNA sense strand
aaccaaaugccgagaguuu

SEQ ID NO: 2329546 - RNA, 19 nt, Homo sapiens
  misc_RNA (1)...(19): siRNA sense strand
aaacuaugcaaacgagaaa

SEQ ID NO: 2329547 - RNA, 19 nt, Homo sapiens
  misc_RNA (1)...(19): siRNA sense strand
aagaagaaagagaaagaga

SEQ ID NO: 2329548 - RNA, 19 nt, Homo sapiens
  misc_RNA (1)...(19): siRNA sense strand
cucaauuugcuaagagaaa

SEQ ID NO: 2329549 - RNA, 19 nt, Homo sapiens
  misc_RNA (1)...(19): siRNA sense strand
cuucagaggaggacccaua

SEQ ID NO: 2329550 - RNA, 19 nt, Homo sapiens
  misc_RNA (1)...(19): siRNA sense strand
cgggucuggcugagagaaa

SEQ ID NO: 2329551 - RNA, 19 nt, Homo sapiens
  misc_RNA (1)...(19): siRNA sense strand
gaguggagggccaggaauu

SEQ ID NO: 2329552 - RNA, 19 nt, Homo sapiens
  misc_RNA (1)...(19): siRNA sense strand
acuuacaagcagagcacaa

SEQ ID NO: 2329553 - RNA, 19 nt, Homo sapiens
  misc_RNA (1)...(19): siRNA sense strand
uggagaagcuacacaguca

SEQ ID NO: 2329554 - RNA, 19 nt, Homo sapiens
  misc_RNA (1)...(19): siRNA sense strand
agagagagagcgaagagaa

SEQ ID NO: 2329555 - RNA, 19 nt, Homo sapiens
  misc_RNA (1)...(19): siRNA sense strand
cagaagagccagaaggaag

SEQ ID NO: 2329556 - RNA, 19 nt, Homo sapiens
  misc_RNA (1)...(19): siRNA sense strand
uguuugauguggagugcaa

SEQ ID NO: 2329557 - RNA, 19 nt, Homo sapiens
  misc_RNA (1)...(19): siRNA sense strand
ccucaucaguggugaaagu

SEQ ID NO: 2329558 - RNA, 19 nt, Homo sapiens
  misc_RNA (1)...(19): siRNA sense strand
gguaaaaccgaaagcacua

SEQ ID NO: 2329559 - RNA, 19 nt, Homo sapiens
  misc_RNA (1)...(19): siRNA sense strand
agucaacagucuuuggaau

SEQ ID NO: 2329560 - RNA, 19 nt, Homo sapiens
  misc_RNA (1)...(19): siRNA sense strand
uggugauaauacagaagaa

SEQ ID NO: 2329561 - RNA, 19 nt, Homo sapiens
  misc_RNA (1)...(19): siRNA sense strand
ggacauguggauuaaggaa

SEQ ID NO: 2329562 - RNA, 19 nt, Homo sapiens
  misc_RNA (1)...(19): siRNA sense strand
ggaacaugaagaaagagaa

SEQ ID NO: 2329563 - RNA, 19 nt, Homo sapiens
  misc_RNA (1)...(19): siRNA sense strand
aggaagaggaagaaaagaa

SEQ ID NO: 2329564 - RNA, 19 nt, Homo sapiens
  misc_RNA (1)...(19): siRNA sense strand
acaccagaguggagggcca

SEQ ID NO: 2329565 - RNA, 19 nt, Homo sapiens
  misc_RNA (1)...(19): siRNA sense strand
uguaaauuccugugcagaa

SEQ ID NO: 2329566 - RNA, 19 nt, Homo sapiens
  misc_RNA (1)...(19): siRNA sense strand
ugauacagaugaugagcuu

SEQ ID NO: 2329567 - RNA, 19 nt, Homo sapiens
  misc_RNA (1)...(19): siRNA sense strand
acauguggauuaaggaaga

SEQ ID NO: 2329568 - RNA, 19 nt, Homo sapiens
  misc_RNA (1)...(19): siRNA sense strand
cuggauguguagaagacaa

SEQ ID NO: 2329569 - RNA, 19 nt, Homo sapiens
  misc_RNA (1)...(19): siRNA sense strand
cagcaggaucaaaggcaau

SEQ ID NO: 2329570 - RNA, 19 nt, Homo sapiens
  misc_RNA (1)...(19): siRNA sense strand
acaagaguucagagaagaa

SEQ ID NO: 2329571 - RNA, 19 nt, Homo sapiens
  misc_RNA (1)...(19): siRNA sense strand
acucggaugugguggaaca

SEQ ID NO: 2329572 - RNA, 19 nt, Homo sapiens
  misc_RNA (1)...(19): siRNA sense strand
caacuugcucaaagacaaa

SEQ ID NO: 2329573 - RNA, 19 nt, Homo sapiens
  misc_RNA (1)...(19): siRNA sense strand
cggcaauggacgugaugca

SEQ ID NO: 2329574 - RNA, 19 nt, Homo sapiens
  misc_RNA (1)...(19): siRNA sense strand
gaucaaaggcaaugaggac

SEQ ID NO: 2329575 - RNA, 19 nt, Homo sapiens
  misc_RNA (1)...(19): siRNA sense strand
cggagaguuuacagacaau

SEQ ID NO: 2329576 - RNA, 19 nt, Homo sapiens
  misc_RNA (1)...(19): siRNA sense strand
gggaaguuauuacggcaau

SEQ ID NO: 2329577 - RNA, 19 nt, Homo sapiens
  misc_RNA (1)...(19): siRNA sense strand
cagauugcucggagaguuu

SEQ ID NO: 2329578 - RNA, 19 nt, Homo sapiens
  misc_RNA (1)...(19): siRNA sense strand
cccgugaacuggagaaaca

SEQ ID NO: 2329579 - RNA, 19 nt, Homo sapiens
  misc_RNA (1)...(19): siRNA sense strand
aaaauaagcagguggaaga

SEQ ID NO: 2329580 - RNA, 19 nt, Homo sapiens
  misc_RNA (1)...(19): siRNA sense strand
gcucaagggcaccguagaa

SEQ ID NO: 2329581 - RNA, 19 nt, Homo sapiens
  misc_RNA (1)...(19): siRNA sense strand
ucagcaugaucgugaagaa

SEQ ID NO: 2329582 - RNA, 19 nt, Homo sapiens
  misc_RNA (1)...(19): siRNA sense strand
guagaagacaagacaauca

SEQ ID NO: 2329583 - RNA, 19 nt, Homo sapiens
  misc_RNA (1)...(19): siRNA sense strand
acaauugcuggcagagaaa

SEQ ID NO: 2329584 - RNA, 19 nt, Homo sapiens
  misc_RNA (1)...(19): siRNA sense strand
agaagaaacaggaagagga

SEQ ID NO: 2329585 - RNA, 19 nt, Homo sapiens
  misc_RNA (1)...(19): siRNA sense strand
gagaaagacacuauggcua

SEQ ID NO: 2329586 - RNA, 19 nt, Homo sapiens
  misc_RNA (1)...(19): siRNA sense strand
gauuaugggugguugccaa

SEQ ID NO: 2329587 - RNA, 19 nt, Homo sapiens
  misc_RNA (1)...(19): siRNA sense strand
cacaaagggaagguggaaa

SEQ ID NO: 2329588 - RNA, 19 nt, Homo sapiens
  misc_RNA (1)...(19): siRNA sense strand
cagaagagaugcagccagu

SEQ ID NO: 2329589 - RNA, 19 nt, Homo sapiens
  misc_RNA (1)...(19): siRNA sense strand
ccacuuaucuacagccuca

SEQ ID NO: 2329590 - RNA, 19 nt, Homo sapiens
  misc_RNA (1)...(19): siRNA sense strand
gggcaucuucuaugggaca

SEQ ID NO: 2329591 - RNA, 19 nt, Homo sapiens
  misc_RNA (1)...(19): siRNA sense strand
ucuacugggccuagugcaa

SEQ ID NO: 2329592 - RNA, 19 nt, Homo sapiens
  misc_RNA (1)...(19): siRNA sense strand
agaaacucauggagccaga

SEQ ID NO: 2329593 - RNA, 19 nt, Homo sapiens
  misc_RNA (1)...(19): siRNA sense strand
gaaucuucagacaaggaua

SEQ ID NO: 2329594 - RNA, 19 nt, Homo sapiens
  misc_RNA (1)...(19): siRNA sense strand
caguggaaucuucagacaa

SEQ ID NO: 2329595 - RNA, 19 nt, Homo sapiens
  misc_RNA (1)...(19): siRNA sense strand
ccauuaauuuauagccuga

SEQ ID NO: 2329596 - RNA, 19 nt, Homo sapiens
  misc_RNA (1)...(19): siRNA sense strand
acgucaaaguugcucuaaa

SEQ ID NO: 2329597 - RNA, 19 nt, Homo sapiens
  misc_RNA (1)...(19): siRNA sense strand
uagcuaugaaccagggcaa

SEQ ID NO: 2329598 - RNA, 19 nt, Homo sapiens
  misc_RNA (1)...(19): siRNA sense strand
gagaauuccuccuucguga

SEQ ID NO: 2329599 - RNA, 19 nt, Homo sapiens
  misc_RNA (1)...(19): siRNA sense strand
gcaugaugggugugaccuu

SEQ ID NO: 2329600 - RNA, 19 nt, Homo sapiens
  misc_RNA (1)...(19): siRNA sense strand
uuaaagaagaacagcaucu

SEQ ID NO: 2329601 - RNA, 19 nt, Homo sapiens
  misc_RNA (1)...(19): siRNA sense strand
cagaauucagagaggaaga

SEQ ID NO: 2329602 - RNA, 19 nt, Homo sapiens
  misc_RNA (1)...(19): siRNA sense strand
ugcagaauucagagaggaa

SEQ ID NO: 2329603 - RNA, 19 nt, Homo sapiens
  misc_RNA (1)...(19): siRNA sense strand
gagagaagcugcugccaac

SEQ ID NO: 2329604 - RNA, 19 nt, Homo sapiens
  misc_RNA (1)...(19): siRNA sense strand
agagagaagcugcugccaa

SEQ ID NO: 2329605 - RNA, 19 nt, Homo sapiens
  misc_RNA (1)...(19): siRNA sense strand
gaacagacuuagaggagcu

SEQ ID NO: 2329606 - RNA, 19 nt, Homo sapiens
  misc_RNA (1)...(19): siRNA sense strand
gcuacaaugcagagacaca

SEQ ID NO: 2329607 - RNA, 19 nt, Homo sapiens
  misc_RNA (1)...(19): siRNA sense strand
cuauaagugcacaaagcaa

SEQ ID NO: 2329608 - RNA, 19 nt, Homo sapiens
  misc_RNA (1)...(19): siRNA sense strand
acgauuuggucgaggcuca

SEQ ID NO: 2329609 - RNA, 19 nt, Homo sapiens
  misc_RNA (1)...(19): siRNA sense strand
agauugaguugcugcguga

SEQ ID NO: 2329610 - RNA, 19 nt, Homo sapiens
  misc_RNA (1)...(19): siRNA sense strand
gggacaaguaugagaagcu

SEQ ID NO: 2329611 - RNA, 19 nt, Homo sapiens
  misc_RNA (1)...(19): siRNA sense strand
uggaagaaaacaagaucaa

SEQ ID NO: 2329612 - RNA, 19 nt, Homo sapiens
  misc_RNA (1)...(19): siRNA sense strand
cuguggaccuggagcuaga

SEQ ID NO: 2329613 - RNA, 19 nt, Homo sapiens
  misc_RNA (1)...(19): siRNA sense strand
cggacgggauccuagggaa

SEQ ID NO: 2329614 - RNA, 19 nt, Homo sapiens
  misc_RNA (1)...(19): siRNA sense strand
augcagagacacagaaacu

SEQ ID NO: 2329615 - RNA, 19 nt, Homo sapiens
  misc_RNA (1)...(19): siRNA sense strand
agaaacagcuggagcagac

SEQ ID NO: 2329616 - RNA, 19 nt, Homo sapiens
  misc_RNA (1)...(19): siRNA sense strand
acuuagaggagcugagucu

SEQ ID NO: 2329617 - RNA, 19 nt, Homo sapiens
  misc_RNA (1)...(19): siRNA sense strand
ccgccuacuuugcugggaa

SEQ ID NO: 2329618 - RNA, 19 nt, Homo sapiens
  misc_RNA (1)...(19): siRNA sense strand
ggacgggauccuagggaag

SEQ ID NO: 2329619 - RNA, 19 nt, Homo sapiens
  misc_RNA (1)...(19): siRNA sense strand
gaaaacaagaucaagguga

SEQ ID NO: 2329620 - RNA, 19 nt, Homo sapiens
  misc_RNA (1)...(19): siRNA sense strand
ugagaaacccuccuggcua

SEQ ID NO: 2329621 - RNA, 19 nt, Homo sapiens
  misc_RNA (1)...(19): siRNA sense strand
aggaugaagagcugaugaa

SEQ ID NO: 2329622 - RNA, 19 nt, Homo sapiens
  misc_RNA (1)...(19): siRNA sense strand
ccgauauguacaacagaau

SEQ ID NO: 2329623 - RNA, 19 nt, Homo sapiens
  misc_RNA (1)...(19): siRNA sense strand
agaugauggccgauaugua

SEQ ID NO: 2329624 - RNA, 19 nt, Homo sapiens
  misc_RNA (1)...(19): siRNA sense strand
ucucuaaguaccuggacau

SEQ ID NO: 2329625 - RNA, 19 nt, Homo sapiens
  misc_RNA (1)...(19): siRNA sense strand
ugucuaugcaggaugaaga

SEQ ID NO: 2329626 - RNA, 19 nt, Homo sapiens
  misc_RNA (1)...(19): siRNA sense strand
agcuggagguggagaugau

SEQ ID NO: 2329627 - RNA, 19 nt, Homo sapiens
  misc_RNA (1)...(19): siRNA sense strand
auggaguuauguugggaua

SEQ ID NO: 2329628 - RNA, 19 nt, Homo sapiens
  misc_RNA (1)...(19): siRNA sense strand
ugcccagauuguacagaaa

SEQ ID NO: 2329629 - RNA, 19 nt, Homo sapiens
  misc_RNA (1)...(19): siRNA sense strand
gaaauaaacgucagcggaa

SEQ ID NO: 2329630 - RNA, 19 nt, Homo sapiens
  misc_RNA (1)...(19): siRNA sense strand
ccgcagagcuggaaacgga

SEQ ID NO: 2329631 - RNA, 19 nt, Homo sapiens
  misc_RNA (1)...(19): siRNA sense strand
ggaugaaagaagaaaagaa

SEQ ID NO: 2329632 - RNA, 19 nt, Homo sapiens
  misc_RNA (1)...(19): siRNA sense strand
uggaagaagucacugggaa

SEQ ID NO: 2329633 - RNA, 19 nt, Homo sapiens
  misc_RNA (1)...(19): siRNA sense strand
ggauugggauugaggagga

SEQ ID NO: 2329634 - RNA, 19 nt, Homo sapiens
  misc_RNA (1)...(19): siRNA sense strand
cagaaggagaugauggaga

SEQ ID NO: 2329635 - RNA, 19 nt, Homo sapiens
  misc_RNA (1)...(19): siRNA sense strand
cgugauugggauugggauu

SEQ ID NO: 2329636 - RNA, 19 nt, Homo sapiens
  misc_RNA (1)...(19): siRNA sense strand
acgaugaguuuaauggcua

SEQ ID NO: 2329637 - RNA, 19 nt, Homo sapiens
  misc_RNA (1)...(19): siRNA sense strand
ggaagaagucacugggaag

SEQ ID NO: 2329638 - RNA, 19 nt, Homo sapiens
  misc_RNA (1)...(19): siRNA sense strand
caaauacacucauggccaa

SEQ ID NO: 2329639 - RNA, 19 nt, Homo sapiens
  misc_RNA (1)...(19): siRNA sense strand
gaacauuccuacagaccga

SEQ ID NO: 2329640 - RNA, 19 nt, Homo sapiens
  misc_RNA (1)...(19): siRNA sense strand
cgcagaugguggagaagau

SEQ ID NO: 2329641 - RNA, 19 nt, Homo sapiens
  misc_RNA (1)...(19): siRNA sense strand
ccgugaagcuggaguccga

SEQ ID NO: 2329642 - RNA, 19 nt, Homo sapiens
  misc_RNA (1)...(19): siRNA sense strand
ggaggaagccaaugggaac

SEQ ID NO: 2329643 - RNA, 19 nt, Homo sapiens
  misc_RNA (1)...(19): siRNA sense strand
gcguggaugcccugaagaa

SEQ ID NO: 2329644 - RNA, 19 nt, Homo sapiens
  misc_RNA (1)...(19): siRNA sense strand
gcaaauacacucauggcca

SEQ ID NO: 2329645 - RNA, 19 nt, Homo sapiens
  misc_RNA (1)...(19): siRNA sense strand
gggccaacgguguggagau

SEQ ID NO: 2329646 - RNA, 19 nt, Homo sapiens
  misc_RNA (1)...(19): siRNA sense strand
agacgggagcaaagggaga

SEQ ID NO: 2329647 - RNA, 19 nt, Homo sapiens
  misc_RNA (1)...(19): siRNA sense strand
gggcugaagaacaucgcaa

SEQ ID NO: 2329648 - RNA, 19 nt, Homo sapiens
  misc_RNA (1)...(19): siRNA sense strand
gaggaagcgcugugagagu

SEQ ID NO: 2329649 - RNA, 19 nt, Homo sapiens
  misc_RNA (1)...(19): siRNA sense strand
cagaagucacagaagaaga

SEQ ID NO: 2329650 - RNA, 19 nt, Homo sapiens
  misc_RNA (1)...(19): siRNA sense strand
ucggaaagcccucgagcau

SEQ ID NO: 2329651 - RNA, 19 nt, Homo sapiens
  misc_RNA (1)...(19): siRNA sense strand
ccugaagaugcuagaauca

SEQ ID NO: 2329652 - RNA, 19 nt, Homo sapiens
  misc_RNA (1)...(19): siRNA sense strand
aaguggacccuacgagaaa

SEQ ID NO: 2329653 - RNA, 19 nt, Homo sapiens
  misc_RNA (1)...(19): siRNA sense strand
aagaagaguggcugagcau

SEQ ID NO: 2329654 - RNA, 19 nt, Homo sapiens
  misc_RNA (1)...(19): siRNA sense strand
agcaggaggaggugaggaa

SEQ ID NO: 2329655 - RNA, 19 nt, Homo sapiens
  misc_RNA (1)...(19): siRNA sense strand
ccugaagaagugugagcau

SEQ ID NO: 2329656 - RNA, 19 nt, Homo sapiens
  misc_RNA (1)...(19): siRNA sense strand
gugaggaagcgcugugaga

SEQ ID NO: 2329657 - RNA, 19 nt, Homo sapiens
  misc_RNA (1)...(19): siRNA sense strand
gcacaggugagcuggacau

SEQ ID NO: 2329658 - RNA, 19 nt, Homo sapiens
  misc_RNA (1)...(19): siRNA sense strand
gcugaagaacaucgcaaau

SEQ ID NO: 2329659 - RNA, 19 nt, Homo sapiens
  misc_RNA (1)...(19): siRNA sense strand
uggaggaagccaaugggaa

SEQ ID NO: 2329660 - RNA, 19 nt, Homo sapiens
  misc_RNA (1)...(19): siRNA sense strand
gagaaauaucguauggaac

SEQ ID NO: 2329661 - RNA, 19 nt, Homo sapiens
  misc_RNA (1)...(19): siRNA sense strand
cugcuaagcuggaggaagc

SEQ ID NO: 2329662 - RNA, 19 nt, Homo sapiens
  misc_RNA (1)...(19): siRNA sense strand
ccgagaaugaugaguacga

SEQ ID NO: 2329663 - RNA, 19 nt, Homo sapiens
  misc_RNA (1)...(19): siRNA sense strand
cgaugaguuuaauggcuau

SEQ ID NO: 2329664 - RNA, 19 nt, Homo sapiens
  misc_RNA (1)...(19): siRNA sense strand
cggaagaucaccaaggcca

SEQ ID NO: 2329665 - RNA, 19 nt, Homo sapiens
  misc_RNA (1)...(19): siRNA sense strand
gcacugaggagcagcagga

SEQ ID NO: 2329666 - RNA, 19 nt, Homo sapiens
  misc_RNA (1)...(19): siRNA sense strand
ccuacgagaaagaugauga

SEQ ID NO: 2329667 - RNA, 19 nt, Homo sapiens
  misc_RNA (1)...(19): siRNA sense strand
gaagaagaguggcugagca

SEQ ID NO: 2329668 - RNA, 19 nt, Homo sapiens
  misc_RNA (1)...(19): siRNA sense strand
caucagagccgcagagcug

SEQ ID NO: 2329669 - RNA, 19 nt, Homo sapiens
  misc_RNA (1)...(19): siRNA sense strand
gcagaggugcuguggcuca

SEQ ID NO: 2329670 - RNA, 19 nt, Homo sapiens
  misc_RNA (1)...(19): siRNA sense strand
cugugaagcuggagugggu

SEQ ID NO: 2329671 - RNA, 19 nt, Homo sapiens
  misc_RNA (1)...(19): siRNA sense strand
ucgaggagcagaaggagau

SEQ ID NO: 2329672 - RNA, 19 nt, Homo sapiens
  misc_RNA (1)...(19): siRNA sense strand
ggauaaaaggauggaugaa

SEQ ID NO: 2329673 - RNA, 19 nt, Homo sapiens
  misc_RNA (1)...(19): siRNA sense strand
ggauggaugaaagaagaaa

SEQ ID NO: 2329674 - RNA, 19 nt, Homo sapiens
  misc_RNA (1)...(19): siRNA sense strand
aguccgagaaugaugagua

SEQ ID NO: 2329675 - RNA, 19 nt, Homo sapiens
  misc_RNA (1)...(19): siRNA sense strand
acgagaaagaugaugagga

SEQ ID NO: 2329676 - RNA, 19 nt, Homo sapiens
  misc_RNA (1)...(19): siRNA sense strand
agaaagaugaugaggaagc

SEQ ID NO: 2329677 - RNA, 19 nt, Homo sapiens
  misc_RNA (1)...(19): siRNA sense strand
aggauggaugaaagaagaa

SEQ ID NO: 2329678 - RNA, 19 nt, Homo sapiens
  misc_RNA (1)...(19): siRNA sense strand
aggaacacucugauggaca

SEQ ID NO: 2329679 - RNA, 19 nt, Homo sapiens
  misc_RNA (1)...(19): siRNA sense strand
ggcagaucgaggagcagaa

SEQ ID NO: 2329680 - RNA, 19 nt, Homo sapiens
  misc_RNA (1)...(19): siRNA sense strand
ggcugaagaacaucgcaaa

SEQ ID NO: 2329681 - RNA, 19 nt, Homo sapiens
  misc_RNA (1)...(19): siRNA sense strand
agcaaagggagaaagaaga

SEQ ID NO: 2329682 - RNA, 19 nt, Homo sapiens
  misc_RNA (1)...(19): siRNA sense strand
guguggagaucaaccguga

SEQ ID NO: 2329683 - RNA, 19 nt, Homo sapiens
  misc_RNA (1)...(19): siRNA sense strand
cugaggagcagcaggagga

SEQ ID NO: 2329684 - RNA, 19 nt, Homo sapiens
  misc_RNA (1)...(19): siRNA sense strand
gauggaugaaagaagaaaa

SEQ ID NO: 2329685 - RNA, 19 nt, Homo sapiens
  misc_RNA (1)...(19): siRNA sense strand
cugauggacaugaggcuga

SEQ ID NO: 2329686 - RNA, 19 nt, Homo sapiens
  misc_RNA (1)...(19): siRNA sense strand
accaaguacacucgugaua

SEQ ID NO: 2329687 - RNA, 19 nt, Homo sapiens
  misc_RNA (1)...(19): siRNA sense strand
uugaauucggagugauuua

SEQ ID NO: 2329688 - RNA, 19 nt, Homo sapiens
  misc_RNA (1)...(19): siRNA sense strand
acacagguucauugcagaa

SEQ ID NO: 2329689 - RNA, 19 nt, Homo sapiens
  misc_RNA (1)...(19): siRNA sense strand
cgacuguggcgguuagcau

SEQ ID NO: 2329690 - RNA, 19 nt, Homo sapiens
  misc_RNA (1)...(19): siRNA sense strand
cugaguugcgagagagguu

SEQ ID NO: 2329691 - RNA, 19 nt, Homo sapiens
  misc_RNA (1)...(19): siRNA sense strand
gggagauggcgaugcucau

SEQ ID NO: 2329692 - RNA, 19 nt, Homo sapiens
  misc_RNA (1)...(19): siRNA sense strand
auuucugaguugcgagaga

SEQ ID NO: 2329693 - RNA, 19 nt, Homo sapiens
  misc_RNA (1)...(19): siRNA sense strand
ccuccaaauaucucaucaa

SEQ ID NO: 2329694 - RNA, 19 nt, Homo sapiens
  misc_RNA (1)...(19): siRNA sense strand
ccaacuaaauacuaccgua

SEQ ID NO: 2329695 - RNA, 19 nt, Homo sapiens
  misc_RNA (1)...(19): siRNA sense strand
aguccuaauaguagaagaa

SEQ ID NO: 2329696 - RNA, 19 nt, Homo sapiens
  misc_RNA (1)...(19): siRNA sense strand
cgucaaaguauuuagcuga

SEQ ID NO: 2329697 - RNA, 19 nt, Homo sapiens
  misc_RNA (1)...(19): siRNA sense strand
caguaggaauagacguaga

SEQ ID NO: 2329698 - RNA, 19 nt, Homo sapiens
  misc_RNA (1)...(19): siRNA sense strand
cguagacacacgagcauau

SEQ ID NO: 2329699 - RNA, 19 nt, Homo sapiens
  misc_RNA (1)...(19): siRNA sense strand
ucuacaaaccacaaagaca

SEQ ID NO: 2329700 - RNA, 19 nt, Homo sapiens
  misc_RNA (1)...(19): siRNA sense strand
aguccuaggcacagcucua

SEQ ID NO: 2329701 - RNA, 19 nt, Homo sapiens
  misc_RNA (1)...(19): siRNA sense strand
augcauacaccacaugaaa

SEQ ID NO: 2329702 - RNA, 19 nt, Homo sapiens
  misc_RNA (1)...(19): siRNA sense strand
ccacacuagcagagaccaa

SEQ ID NO: 2329703 - RNA, 19 nt, Homo sapiens
  misc_RNA (1)...(19): siRNA sense strand
caucaugacccuuggccau

SEQ ID NO: 2329704 - RNA, 19 nt, Homo sapiens
  misc_RNA (1)...(19): siRNA sense strand
gcuauauacaacuacgcaa

SEQ ID NO: 2329705 - RNA, 19 nt, Homo sapiens
  misc_RNA (1)...(19): siRNA sense strand
aggcaguugagguggauua

SEQ ID NO: 2329706 - RNA, 19 nt, Homo sapiens
  misc_RNA (1)...(19): siRNA sense strand
acaauauacucuccggaca

SEQ ID NO: 2329707 - RNA, 19 nt, Homo sapiens
  misc_RNA (1)...(19): siRNA sense strand
cuauuaaccuacugggaga

SEQ ID NO: 2329708 - RNA, 19 nt, Homo sapiens
  misc_RNA (1)...(19): siRNA sense strand
cuaucaaacuccugagcca

SEQ ID NO: 2329709 - RNA, 19 nt, Homo sapiens
  misc_RNA (1)...(19): siRNA sense strand
ucacaacacccuaggcuca

SEQ ID NO: 2329710 - RNA, 19 nt, Homo sapiens
  misc_RNA (1)...(19): siRNA sense strand
cauacuagucacagcccua

SEQ ID NO: 2329711 - RNA, 19 nt, Homo sapiens
  misc_RNA (1)...(19): siRNA sense strand
ugacaaaacacauagccua

SEQ ID NO: 2329712 - RNA, 19 nt, Homo sapiens
  misc_RNA (1)...(19): siRNA sense strand
ccucguaguaacagccauu

SEQ ID NO: 2329713 - RNA, 19 nt, Homo sapiens
  misc_RNA (1)...(19): siRNA sense strand
ccuacgacaaacagaccua

SEQ ID NO: 2329714 - RNA, 19 nt, Homo sapiens
  misc_RNA (1)...(19): siRNA sense strand
cauauuuaccacaacacaa

SEQ ID NO: 2329715 - RNA, 19 nt, Homo sapiens
  misc_RNA (1)...(19): siRNA sense strand
cguacauaaccuaaaccua

SEQ ID NO: 2329716 - RNA, 19 nt, Homo sapiens
  misc_RNA (1)...(19): siRNA sense strand
uacuaugccuagaaggaau

SEQ ID NO: 2329717 - RNA, 19 nt, Homo sapiens
  misc_RNA (1)...(19): siRNA sense strand
cugagagggcguaggaauu

SEQ ID NO: 2329718 - RNA, 19 nt, Homo sapiens
  misc_RNA (1)...(19): siRNA sense strand
ccuagcagcagcaggcaaa

SEQ ID NO: 2329719 - RNA, 19 nt, Homo sapiens
  misc_RNA (1)...(19): siRNA sense strand
auauaaacucagacccaaa

SEQ ID NO: 2329720 - RNA, 19 nt, Homo sapiens
  misc_RNA (1)...(19): siRNA sense strand
caaccuuaacaaugaacaa

SEQ ID NO: 2329721 - RNA, 19 nt, Homo sapiens
  misc_RNA (1)...(19): siRNA sense strand
cuauagcacucgaauaauu

SEQ ID NO: 2329722 - RNA, 19 nt, Homo sapiens
  misc_RNA (1)...(19): siRNA sense strand
cuauaguuguagcaggaau

SEQ ID NO: 2329723 - RNA, 19 nt, Homo sapiens
  misc_RNA (1)...(19): siRNA sense strand
ccuagcauuagcaggaaua

SEQ ID NO: 2329724 - RNA, 19 nt, Homo sapiens
  misc_RNA (1)...(19): siRNA sense strand
gaacugacacugagccaca

SEQ ID NO: 2329725 - RNA, 19 nt, Homo sapiens
  misc_RNA (1)...(19): siRNA sense strand
cacuauaguuguagcagga

SEQ ID NO: 2329726 - RNA, 19 nt, Homo sapiens
  misc_RNA (1)...(19): siRNA sense strand
caacaauauucaugugccu

SEQ ID NO: 2329727 - RNA, 19 nt, Homo sapiens
  misc_RNA (1)...(19): siRNA sense strand
auucaugugccuagaccaa

SEQ ID NO: 2329728 - RNA, 19 nt, Homo sapiens
  misc_RNA (1)...(19): siRNA sense strand
ucaacuaggacucauaaua

SEQ ID NO: 2329729 - RNA, 19 nt, Homo sapiens
  misc_RNA (1)...(19): siRNA sense strand
auauauaaacucagaccca

SEQ ID NO: 2329730 - RNA, 19 nt, Homo sapiens
  misc_RNA (1)...(19): siRNA sense strand
cauuggcagccuagcauua

SEQ ID NO: 2329731 - RNA, 19 nt, Homo sapiens
  misc_RNA (1)...(19): siRNA sense strand
gccuagaccaagaaguuau

SEQ ID NO: 2329732 - RNA, 19 nt, Homo sapiens
  misc_RNA (1)...(19): siRNA sense strand
cagccuagcauuagcagga

SEQ ID NO: 2329733 - RNA, 19 nt, Homo sapiens
  misc_RNA (1)...(19): siRNA sense strand
cacaaacgccugagcccua

SEQ ID NO: 2329734 - RNA, 19 nt, Homo sapiens
  misc_RNA (1)...(19): siRNA sense strand
cgccuauagcacucgaaua

SEQ ID NO: 2329735 - RNA, 19 nt, Homo sapiens
  misc_RNA (1)...(19): siRNA sense strand
ucaacuaccuaaccaacaa

SEQ ID NO: 2329736 - RNA, 19 nt, Homo sapiens
  misc_RNA (1)...(19): siRNA sense strand
aagccuauucgcaggauuu

SEQ ID NO: 2329737 - RNA, 19 nt, Homo sapiens
  misc_RNA (1)...(19): siRNA sense strand
ggauuggugcuguggguga

SEQ ID NO: 2329738 - RNA, 19 nt, Homo sapiens
  misc_RNA (1)...(19): siRNA sense strand
cuuuaauaguguaggaagc

SEQ ID NO: 2329739 - RNA, 19 nt, Homo sapiens
  misc_RNA (1)...(19): siRNA sense strand
uagcgauggagguaggauu

SEQ ID NO: 2329740 - RNA, 19 nt, Homo sapiens
  misc_RNA (1)...(19): siRNA sense strand
caccgaaucuggagagcuu

SEQ ID NO: 2329741 - RNA, 19 nt, Homo sapiens
  misc_RNA (1)...(19): siRNA sense strand
uggagaacuaccuggauau

SEQ ID NO: 2329742 - RNA, 19 nt, Homo sapiens
  misc_RNA (1)...(19): siRNA sense strand
ccaugaacggagagaccau

SEQ ID NO: 2329743 - RNA, 19 nt, Homo sapiens
  misc_RNA (1)...(19): siRNA sense strand
ccuacauccugcagagcga

SEQ ID NO: 2329744 - RNA, 19 nt, Homo sapiens
  misc_RNA (1)...(19): siRNA sense strand
gcgagaacucagauggcga

SEQ ID NO: 2329745 - RNA, 19 nt, Homo sapiens
  misc_RNA (1)...(19): siRNA sense strand
aagaaguccuugaggcgca

SEQ ID NO: 2329746 - RNA, 19 nt, Homo sapiens
  misc_RNA (1)...(19): siRNA sense strand
gccaacauccagagcgaca

SEQ ID NO: 2329747 - RNA, 19 nt, Homo sapiens
  misc_RNA (1)...(19): siRNA sense strand
cugaagaagcacaaccuca

SEQ ID NO: 2329748 - RNA, 19 nt, Homo sapiens
  misc_RNA (1)...(19): siRNA sense strand
aggaggaagccuugagcaa

SEQ ID NO: 2329749 - RNA, 19 nt, Homo sapiens
  misc_RNA (1)...(19): siRNA sense strand
gagaaaagucaggaagaaa

SEQ ID NO: 2329750 - RNA, 19 nt, Homo sapiens
  misc_RNA (1)...(19): siRNA sense strand
auauagaugcagaagagaa

SEQ ID NO: 2329751 - RNA, 19 nt, Homo sapiens
  misc_RNA (1)...(19): siRNA sense strand
cugaagaccaaccgaggua

SEQ ID NO: 2329752 - RNA, 19 nt, Homo sapiens
  misc_RNA (1)...(19): siRNA sense strand
ccacgauggugcuggaacu

SEQ ID NO: 2329753 - RNA, 19 nt, Homo sapiens
  misc_RNA (1)...(19): siRNA sense strand
uaaccaaggaggaggagga

SEQ ID NO: 2329754 - RNA, 19 nt, Homo sapiens
  misc_RNA (1)...(19): siRNA sense strand
ucguaugauaacagaguuu

SEQ ID NO: 2329755 - RNA, 19 nt, Homo sapiens
  misc_RNA (1)...(19): siRNA sense strand
ggagguuaugagagcuuua

SEQ ID NO: 2329756 - RNA, 19 nt, Homo sapiens
  misc_RNA (1)...(19): siRNA sense strand
uaugagagcuuuaccgaga

SEQ ID NO: 2329757 - RNA, 19 nt, Homo sapiens
  misc_RNA (1)...(19): siRNA sense strand
cgugaaacacuguggcguu

SEQ ID NO: 2329758 - RNA, 19 nt, Homo sapiens
  misc_RNA (1)...(19): siRNA sense strand
cuucugaaugcgugaaaca

SEQ ID NO: 2329759 - RNA, 19 nt, Homo sapiens
  misc_RNA (1)...(19): siRNA sense strand
agagaaaagucaggaagaa

SEQ ID NO: 2329760 - RNA, 19 nt, Homo sapiens
  misc_RNA (1)...(19): siRNA sense strand
gggucuaaugguuggacuu

SEQ ID NO: 2329761 - RNA, 19 nt, Homo sapiens
  misc_RNA (1)...(19): siRNA sense strand
caguaauguugcugauucu

SEQ ID NO: 2329762 - RNA, 19 nt, Homo sapiens
  misc_RNA (1)...(19): siRNA sense strand
aguaacugucccaagauua

SEQ ID NO: 2329763 - RNA, 19 nt, Homo sapiens
  misc_RNA (1)...(19): siRNA sense strand
uauuaacuguugugagcau

SEQ ID NO: 2329764 - RNA, 19 nt, Homo sapiens
  misc_RNA (1)...(19): siRNA sense strand
gaaucgauauagaugcaga

SEQ ID NO: 2329765 - RNA, 19 nt, Homo sapiens
  misc_RNA (1)...(19): siRNA sense strand
agcaagaagcucacagaca

SEQ ID NO: 2329766 - RNA, 19 nt, Homo sapiens
  misc_RNA (1)...(19): siRNA sense strand
ggugauggcuguugggcug

SEQ ID NO: 2329767 - RNA, 19 nt, Homo sapiens
  misc_RNA (1)...(19): siRNA sense strand
ccuugggauuggaccuuua

SEQ ID NO: 2329768 - RNA, 19 nt, Homo sapiens
  misc_RNA (1)...(19): siRNA sense strand
ugaugguguugaagaagau

SEQ ID NO: 2329769 - RNA, 19 nt, Homo sapiens
  misc_RNA (1)...(19): siRNA sense strand
acguggaugccucaagaaa

SEQ ID NO: 2329770 - RNA, 19 nt, Homo sapiens
  misc_RNA (1)...(19): siRNA sense strand
ccaaggaggaggaggaagc

SEQ ID NO: 2329771 - RNA, 19 nt, Homo sapiens
  misc_RNA (1)...(19): siRNA sense strand
gugaugaccaugccggaau

SEQ ID NO: 2329772 - RNA, 19 nt, Homo sapiens
  misc_RNA (1)...(19): siRNA sense strand
gcaagaagcucacagacac

SEQ ID NO: 2329773 - RNA, 19 nt, Homo sapiens
  misc_RNA (1)...(19): siRNA sense strand
cgaaaggccauguggagga

SEQ ID NO: 2329774 - RNA, 19 nt, Homo sapiens
  misc_RNA (1)...(19): siRNA sense strand
ccacaugucauuugggacu

SEQ ID NO: 2329775 - RNA, 19 nt, Homo sapiens
  misc_RNA (1)...(19): siRNA sense strand
ccaccuucugcgaggauuu

SEQ ID NO: 2329776 - RNA, 19 nt, Homo sapiens
  misc_RNA (1)...(19): siRNA sense strand
ccauguggaggaaggaaca

SEQ ID NO: 2329777 - RNA, 19 nt, Homo sapiens
  misc_RNA (1)...(19): siRNA sense strand
acaagacgcaggaggcaga

SEQ ID NO: 2329778 - RNA, 19 nt, Homo sapiens
  misc_RNA (1)...(19): siRNA sense strand
ggaggaaggaacaggacac

SEQ ID NO: 2329779 - RNA, 19 nt, Homo sapiens
  misc_RNA (1)...(19): siRNA sense strand
cgaaaggccauguggagga

SEQ ID NO: 2329780 - RNA, 19 nt, Homo sapiens
  misc_RNA (1)...(19): siRNA sense strand
ccacaugucauuugggacu

SEQ ID NO: 2329781 - RNA, 19 nt, Homo sapiens
  misc_RNA (1)...(19): siRNA sense strand
ccaccuucugcgaggauuu

SEQ ID NO: 2329782 - RNA, 19 nt, Homo sapiens
  misc_RNA (1)...(19): siRNA sense strand
ccauguggaggaaggaaca

SEQ ID NO: 2329783 - RNA, 19 nt, Homo sapiens
  misc_RNA (1)...(19): siRNA sense strand
acaagacgcaggaggcaga

SEQ ID NO: 2329784 - RNA, 19 nt, Homo sapiens
  misc_RNA (1)...(19): siRNA sense strand
ggaggaaggaacaggacac

SEQ ID NO: 2329785 - RNA, 19 nt, Homo sapiens
  misc_RNA (1)...(19): siRNA sense strand
cggagauccuacagggaau

SEQ ID NO: 2329786 - RNA, 19 nt, Homo sapiens
  misc_RNA (1)...(19): siRNA sense strand
cgaaagagcugagcggaga

SEQ ID NO: 2329787 - RNA, 19 nt, Homo sapiens
  misc_RNA (1)...(19): siRNA sense strand
ucaggagggcagagaacaa

SEQ ID NO: 2329788 - RNA, 19 nt, Homo sapiens
  misc_RNA (1)...(19): siRNA sense strand
agacagagaggcaggcaga

SEQ ID NO: 2329789 - RNA, 19 nt, Homo sapiens
  misc_RNA (1)...(19): siRNA sense strand
ccuaugagacagagaggca

SEQ ID NO: 2329790 - RNA, 19 nt, Homo sapiens
  misc_RNA (1)...(19): siRNA sense strand
cagagaggaaagcgagaau

SEQ ID NO: 2329791 - RNA, 19 nt, Homo sapiens
  misc_RNA (1)...(19): siRNA sense strand
ugacuuuagaugaguggaa

SEQ ID NO: 2329792 - RNA, 19 nt, Homo sapiens
  misc_RNA (1)...(19): siRNA sense strand
gugauagguuugaucgaga

SEQ ID NO: 2329793 - RNA, 19 nt, Homo sapiens
  misc_RNA (1)...(19): siRNA sense strand
gguagaagaagaaacccaa

SEQ ID NO: 2329794 - RNA, 19 nt, Homo sapiens
  misc_RNA (1)...(19): siRNA sense strand
gcuuuugaccagagaggaa

SEQ ID NO: 2329795 - RNA, 19 nt, Homo sapiens
  misc_RNA (1)...(19): siRNA sense strand
cuuccaaagccguggugau

SEQ ID NO: 2329796 - RNA, 19 nt, Homo sapiens
  misc_RNA (1)...(19): siRNA sense strand
ucgcagaaggagcgcaaga

SEQ ID NO: 2329797 - RNA, 19 nt, Homo sapiens
  misc_RNA (1)...(19): siRNA sense strand
agucgcagaaggagcgcaa

SEQ ID NO: 2329798 - RNA, 19 nt, Homo sapiens
  misc_RNA (1)...(19): siRNA sense strand
guuggagguagaagaagaa

SEQ ID NO: 2329799 - RNA, 19 nt, Homo sapiens
  misc_RNA (1)...(19): siRNA sense strand
gaucaggagggcagagaac

SEQ ID NO: 2329800 - RNA, 19 nt, Homo sapiens
  misc_RNA (1)...(19): siRNA sense strand
gcggagauccuacagggaa

SEQ ID NO: 2329801 - RNA, 19 nt, Homo sapiens
  misc_RNA (1)...(19): siRNA sense strand
agguagaagaagaaaccca

SEQ ID NO: 2329802 - RNA, 19 nt, Homo sapiens
  misc_RNA (1)...(19): siRNA sense strand
ggaaggaucaggagggcag

SEQ ID NO: 2329803 - RNA, 19 nt, Homo sapiens
  misc_RNA (1)...(19): siRNA sense strand
ggagcagcaaggauggaau

SEQ ID NO: 2329804 - RNA, 19 nt, Homo sapiens
  misc_RNA (1)...(19): siRNA sense strand
agauauggugggaaugaca

SEQ ID NO: 2329805 - RNA, 19 nt, Homo sapiens
  misc_RNA (1)...(19): siRNA sense strand
ggcccugggaacagaguuu

SEQ ID NO: 2329806 - RNA, 19 nt, Homo sapiens
  misc_RNA (1)...(19): siRNA sense strand
cugaguuggagguagaaga

SEQ ID NO: 2329807 - RNA, 19 nt, Homo sapiens
  misc_RNA (1)...(19): siRNA sense strand
auaccgacccuaugagaca

SEQ ID NO: 2329808 - RNA, 19 nt, Homo sapiens
  misc_RNA (1)...(19): siRNA sense strand
aagaugacuaugaggacga

SEQ ID NO: 2329809 - RNA, 19 nt, Homo sapiens
  misc_RNA (1)...(19): siRNA sense strand
gcacggaggugaaagagga

SEQ ID NO: 2329810 - RNA, 19 nt, Homo sapiens
  misc_RNA (1)...(19): siRNA sense strand
gcaaguauuuccugcagca

SEQ ID NO: 2329811 - RNA, 19 nt, Homo sapiens
  misc_RNA (1)...(19): siRNA sense strand
agaccucauccuugcguaa

SEQ ID NO: 2329812 - RNA, 19 nt, Homo sapiens
  misc_RNA (1)...(19): siRNA sense strand
cggaggugaaagaggaugu

SEQ ID NO: 2329813 - RNA, 19 nt, Homo sapiens
  misc_RNA (1)...(19): siRNA sense strand
aggccaagaaugacagcga

SEQ ID NO: 2329814 - RNA, 19 nt, Homo sapiens
  misc_RNA (1)...(19): siRNA sense strand
agacgggcacggaggugaa

SEQ ID NO: 2329815 - RNA, 19 nt, Homo sapiens
  misc_RNA (1)...(19): siRNA sense strand
ugaaagaggauguggugac

SEQ ID NO: 2329816 - RNA, 19 nt, Homo sapiens
  misc_RNA (1)...(19): siRNA sense strand
gcgucaugaaggaggccau

SEQ ID NO: 2329817 - RNA, 19 nt, Homo sapiens
  misc_RNA (1)...(19): siRNA sense strand
caggugacauagaugccaa

SEQ ID NO: 2329818 - RNA, 19 nt, Homo sapiens
  misc_RNA (1)...(19): siRNA sense strand
ccugaaugcuaccgggauc

SEQ ID NO: 2329819 - RNA, 19 nt, Homo sapiens
  misc_RNA (1)...(19): siRNA sense strand
cugcaaaaguggaaaauaa

SEQ ID NO: 2329820 - RNA, 19 nt, Homo sapiens
  misc_RNA (1)...(19): siRNA sense strand
cguuaagagacaaaggaaa

SEQ ID NO: 2329821 - RNA, 19 nt, Homo sapiens
  misc_RNA (1)...(19): siRNA sense strand
ccaaaaggaugcagggcaa

SEQ ID NO: 2329822 - RNA, 19 nt, Homo sapiens
  misc_RNA (1)...(19): siRNA sense strand
acuaaggaaaugagugaua

SEQ ID NO: 2329823 - RNA, 19 nt, Homo sapiens
  misc_RNA (1)...(19): siRNA sense strand
ggaugaaaccagagggauc

SEQ ID NO: 2329824 - RNA, 19 nt, Homo sapiens
  misc_RNA (1)...(19): siRNA sense strand
acacaaaugaagugguuau

SEQ ID NO: 2329825 - RNA, 19 nt, Homo sapiens
  misc_RNA (1)...(19): siRNA sense strand
gugucagagcucagggaaa

SEQ ID NO: 2329826 - RNA, 19 nt, Homo sapiens
  misc_RNA (1)...(19): siRNA sense strand
aggaauuaauggaagauga

SEQ ID NO: 2329827 - RNA, 19 nt, Homo sapiens
  misc_RNA (1)...(19): siRNA sense strand
acauagcaguggagaaaga

SEQ ID NO: 2329828 - RNA, 19 nt, Homo sapiens
  misc_RNA (1)...(19): siRNA sense strand
ccguaaaugccgaggagga

SEQ ID NO: 2329829 - RNA, 19 nt, Homo sapiens
  misc_RNA (1)...(19): siRNA sense strand
cuacuaaggaaaugaguga

SEQ ID NO: 2329830 - RNA, 19 nt, Homo sapiens
  misc_RNA (1)...(19): siRNA sense strand
guacgauaccucaggagaa

SEQ ID NO: 2329831 - RNA, 19 nt, Homo sapiens
  misc_RNA (1)...(19): siRNA sense strand
ccucagacaaccaggauuu

SEQ ID NO: 2329832 - RNA, 19 nt, Homo sapiens
  misc_RNA (1)...(19): siRNA sense strand
cgucaaaggaguucuaaaa

SEQ ID NO: 2329833 - RNA, 19 nt, Homo sapiens
  misc_RNA (1)...(19): siRNA sense strand
ccgaaagcauuugaggaaa

SEQ ID NO: 2329834 - RNA, 19 nt, Homo sapiens
  misc_RNA (1)...(19): siRNA sense strand
aguaagaauccuaagauca

SEQ ID NO: 2329835 - RNA, 19 nt, Homo sapiens
  misc_RNA (1)...(19): siRNA sense strand
aguggaaauacuugacaaa

SEQ ID NO: 2329836 - RNA, 19 nt, Homo sapiens
  misc_RNA (1)...(19): siRNA sense strand
aguuauggcaggagacuuu

SEQ ID NO: 2329837 - RNA, 19 nt, Homo sapiens
  misc_RNA (1)...(19): siRNA sense strand
guuaagagacaaaggaaac

SEQ ID NO: 2329838 - RNA, 19 nt, Homo sapiens
  misc_RNA (1)...(19): siRNA sense strand
uggaaguucugauggaaga

SEQ ID NO: 2329839 - RNA, 19 nt, Homo sapiens
  misc_RNA (1)...(19): siRNA sense strand
cuucuaugguguuucgaaa

SEQ ID NO: 2329840 - RNA, 19 nt, Homo sapiens
  misc_RNA (1)...(19): siRNA sense strand
uaauggaagaugagaugaa

SEQ ID NO: 2329841 - RNA, 19 nt, Homo sapiens
  misc_RNA (1)...(19): siRNA sense strand
cuacaagaaaugauugcaa

SEQ ID NO: 2329842 - RNA, 19 nt, Homo sapiens
  misc_RNA (1)...(19): siRNA sense strand
cagugguggccaagauuua

SEQ ID NO: 2329843 - RNA, 19 nt, Homo sapiens
  misc_RNA (1)...(19): siRNA sense strand
caggagacuuuaaagaaaa

SEQ ID NO: 2329844 - RNA, 19 nt, Homo sapiens
  misc_RNA (1)...(19): siRNA sense strand
gaacaagcucagugaccuu

SEQ ID NO: 2329845 - RNA, 19 nt, Homo sapiens
  misc_RNA (1)...(19): siRNA sense strand
aggcuaugguugaacaaga

SEQ ID NO: 2329846 - RNA, 19 nt, Homo sapiens
  misc_RNA (1)...(19): siRNA sense strand
caacagaagagaacaaaau

SEQ ID NO: 2329847 - RNA, 19 nt, Homo sapiens
  misc_RNA (1)...(19): siRNA sense strand
cuguguaugagcuggauua

SEQ ID NO: 2329848 - RNA, 19 nt, Homo sapiens
  misc_RNA (1)...(19): siRNA sense strand
gaguuaagccugaugcuga

SEQ ID NO: 2329849 - RNA, 19 nt, Homo sapiens
  misc_RNA (1)...(19): siRNA sense strand
caaaaucgcauaaaggaaa

SEQ ID NO: 2329850 - RNA, 19 nt, Homo sapiens
  misc_RNA (1)...(19): siRNA sense strand
gggcaagcacauggugaua

SEQ ID NO: 2329851 - RNA, 19 nt, Homo sapiens
  misc_RNA (1)...(19): siRNA sense strand
ucauaagaauggaguagca

SEQ ID NO: 2329852 - RNA, 19 nt, Homo sapiens
  misc_RNA (1)...(19): siRNA sense strand
aggaaauacuaaacaagca

SEQ ID NO: 2329853 - RNA, 19 nt, Homo sapiens
  misc_RNA (1)...(19): siRNA sense strand
ggaaauacuaaacaagcau

SEQ ID NO: 2329854 - RNA, 19 nt, Homo sapiens
  misc_RNA (1)...(19): siRNA sense strand
uccgaaagcauuugaggaa

SEQ ID NO: 2329855 - RNA, 19 nt, Homo sapiens
  misc_RNA (1)...(19): siRNA sense strand
uacguaagauagaggacua

SEQ ID NO: 2329856 - RNA, 19 nt, Homo sapiens
  misc_RNA (1)...(19): siRNA sense strand
gcaaacacgaauuagucaa

SEQ ID NO: 2329857 - RNA, 19 nt, Homo sapiens
  misc_RNA (1)...(19): siRNA sense strand
cagaugagagugaagaaaa

SEQ ID NO: 2329858 - RNA, 19 nt, Homo sapiens
  misc_RNA (1)...(19): siRNA sense strand
ccguuaagagacaaaggaa

SEQ ID NO: 2329859 - RNA, 19 nt, Homo sapiens
  misc_RNA (1)...(19): siRNA sense strand
aggaaauguacaaagugaa

SEQ ID NO: 2329860 - RNA, 19 nt, Homo sapiens
  misc_RNA (1)...(19): siRNA sense strand
augaagugguuaucaggua

SEQ ID NO: 2329861 - RNA, 19 nt, Homo sapiens
  misc_RNA (1)...(19): siRNA sense strand
caguggaaauacuugacaa

SEQ ID NO: 2329862 - RNA, 19 nt, Homo sapiens
  misc_RNA (1)...(19): siRNA sense strand
aguuaagccugaugcugaa

SEQ ID NO: 2329863 - RNA, 19 nt, Homo sapiens
  misc_RNA (1)...(19): siRNA sense strand
ugguugaacaagaguauuu

SEQ ID NO: 2329864 - RNA, 19 nt, Homo sapiens
  misc_RNA (1)...(19): siRNA sense strand
gugcagacagucauugaaa

SEQ ID NO: 2329865 - RNA, 19 nt, Homo sapiens
  misc_RNA (1)...(19): siRNA sense strand
ugagcuggauuauggcaaa

SEQ ID NO: 2329866 - RNA, 19 nt, Homo sapiens
  misc_RNA (1)...(19): siRNA sense strand
caacaguuauggcaggaga

SEQ ID NO: 2329867 - RNA, 19 nt, Homo sapiens
  misc_RNA (1)...(19): siRNA sense strand
ggccagugcacuuccgaaa

SEQ ID NO: 2329868 - RNA, 19 nt, Homo sapiens
  misc_RNA (1)...(19): siRNA sense strand
uugcaaaggaaaaugguua

SEQ ID NO: 2329869 - RNA, 19 nt, Homo sapiens
  misc_RNA (1)...(19): siRNA sense strand
aagaguauuugcagguaga

SEQ ID NO: 2329870 - RNA, 19 nt, Homo sapiens
  misc_RNA (1)...(19): siRNA sense strand
gaugcagugcugugguuaa

SEQ ID NO: 2329871 - RNA, 19 nt, Homo sapiens
  misc_RNA (1)...(19): siRNA sense strand
ggauuauggcaaacacgaa

SEQ ID NO: 2329872 - RNA, 19 nt, Homo sapiens
  misc_RNA (1)...(19): siRNA sense strand
caucuguauuggugguuga

SEQ ID NO: 2329873 - RNA, 19 nt, Homo sapiens
  misc_RNA (1)...(19): siRNA sense strand
guaugugggcaaagacuau

SEQ ID NO: 2329874 - RNA, 19 nt, Homo sapiens
  misc_RNA (1)...(19): siRNA sense strand
acaagucacuagagguuca

SEQ ID NO: 2329875 - RNA, 19 nt, Homo sapiens
  misc_RNA (1)...(19): siRNA sense strand
acuaguagaucuggagaga

SEQ ID NO: 2329876 - RNA, 19 nt, Homo sapiens
  misc_RNA (1)...(19): siRNA sense strand
gguaugugggcaaagacua

SEQ ID NO: 2329877 - RNA, 19 nt, Homo sapiens
  misc_RNA (1)...(19): siRNA sense strand
uggagaaagaccaagugua

SEQ ID NO: 2329878 - RNA, 19 nt, Homo sapiens
  misc_RNA (1)...(19): siRNA sense strand
gcagacagucauugaaaau

SEQ ID NO: 2329879 - RNA, 19 nt, Homo sapiens
  misc_RNA (1)...(19): siRNA sense strand
accggaaaguaguggucua

SEQ ID NO: 2329880 - RNA, 19 nt, Homo sapiens
  misc_RNA (1)...(19): siRNA sense strand
agaucuuugcaguggaaau

SEQ ID NO: 2329881 - RNA, 19 nt, Homo sapiens
  misc_RNA (1)...(19): siRNA sense strand
gaaggaaaaccaaaagcaa

SEQ ID NO: 2329882 - RNA, 19 nt, Homo sapiens
  misc_RNA (1)...(19): siRNA sense strand
ggcaguugcuggccguaaa

SEQ ID NO: 2329883 - RNA, 19 nt, Homo sapiens
  misc_RNA (1)...(19): siRNA sense strand
cauacaaauuaaacccgaa

SEQ ID NO: 2329884 - RNA, 19 nt, Homo sapiens
  misc_RNA (1)...(19): siRNA sense strand
aaggaaagacgguggagga

SEQ ID NO: 2329885 - RNA, 19 nt, Homo sapiens
  misc_RNA (1)...(19): siRNA sense strand
acugaaugggugaaaggaa

SEQ ID NO: 2329886 - RNA, 19 nt, Homo sapiens
  misc_RNA (1)...(19): siRNA sense strand
aggaaagacgguggaggaa

SEQ ID NO: 2329887 - RNA, 19 nt, Homo sapiens
  misc_RNA (1)...(19): siRNA sense strand
cagcauguggugacguaau

SEQ ID NO: 2329888 - RNA, 19 nt, Homo sapiens
  misc_RNA (1)...(19): siRNA sense strand
cugccuuccucccgugaaa

SEQ ID NO: 2329889 - RNA, 19 nt, Homo sapiens
  misc_RNA (1)...(19): siRNA sense strand
aauugaaacaagaacccaa

SEQ ID NO: 2329890 - RNA, 19 nt, Homo sapiens
  misc_RNA (1)...(19): siRNA sense strand
gaaagacgguggaggaagc

SEQ ID NO: 2329891 - RNA, 19 nt, Homo sapiens
  misc_RNA (1)...(19): siRNA sense strand
gcaacuacgugacucgcua

SEQ ID NO: 2329892 - RNA, 19 nt, Homo sapiens
  misc_RNA (1)...(19): siRNA sense strand
caacaagggcugggaggca

SEQ ID NO: 2329893 - RNA, 19 nt, Homo sapiens
  misc_RNA (1)...(19): siRNA sense strand
uuucggagccugugggcau

SEQ ID NO: 2329894 - RNA, 19 nt, Homo sapiens
  misc_RNA (1)...(19): siRNA sense strand
aggcaguggccaaggaaag

SEQ ID NO: 2329895 - RNA, 19 nt, Homo sapiens
  misc_RNA (1)...(19): siRNA sense strand
gggcaugaacccuggaccu

SEQ ID NO: 2329896 - RNA, 19 nt, Homo sapiens
  misc_RNA (1)...(19): siRNA sense strand
agaagugaguggugcccga

SEQ ID NO: 2329897 - RNA, 19 nt, Homo sapiens
  misc_RNA (1)...(19): siRNA sense strand
ggaaagaauugauugccaa

SEQ ID NO: 2329898 - RNA, 19 nt, Homo sapiens
  misc_RNA (1)...(19): siRNA sense strand
ggagacuggaagauggaaa

SEQ ID NO: 2329899 - RNA, 19 nt, Homo sapiens
  misc_RNA (1)...(19): siRNA sense strand
gggaaagaauugauugcca

SEQ ID NO: 2329900 - RNA, 19 nt, Homo sapiens
  misc_RNA (1)...(19): siRNA sense strand
aagauaaaguauugggaac

SEQ ID NO: 2329901 - RNA, 19 nt, Homo sapiens
  misc_RNA (1)...(19): siRNA sense strand
gcgaugaaggagaaguaau

SEQ ID NO: 2329902 - RNA, 19 nt, Homo sapiens
  misc_RNA (1)...(19): siRNA sense strand
gaagauaaaguauugggaa

SEQ ID NO: 2329903 - RNA, 19 nt, Homo sapiens
  misc_RNA (1)...(19): siRNA sense strand
auuaauuccacaaggcaua

SEQ ID NO: 2329904 - RNA, 19 nt, Homo sapiens
  misc_RNA (1)...(19): siRNA sense strand
agaguguuacagugggaaa

SEQ ID NO: 2329905 - RNA, 19 nt, Homo sapiens
  misc_RNA (1)...(19): siRNA sense strand
gagacuggaagauggaaaa

SEQ ID NO: 2329906 - RNA, 19 nt, Homo sapiens
  misc_RNA (1)...(19): siRNA sense strand
caaacuuggugucugggua

SEQ ID NO: 2329907 - RNA, 19 nt, Homo sapiens
  misc_RNA (1)...(19): siRNA sense strand
ggacaccauucaagaggca

SEQ ID NO: 2329908 - RNA, 19 nt, Homo sapiens
  misc_RNA (1)...(19): siRNA sense strand
uguuacagugggaaagaau

SEQ ID NO: 2329909 - RNA, 19 nt, Homo sapiens
  misc_RNA (1)...(19): siRNA sense strand
cugugcaacugucggaaau

SEQ ID NO: 2329910 - RNA, 19 nt, Homo sapiens
  misc_RNA (1)...(19): siRNA sense strand
aaaucaacacugaagguga

SEQ ID NO: 2329911 - RNA, 19 nt, Homo sapiens
  misc_RNA (1)...(19): siRNA sense strand
acaccauucaagaggcaau

SEQ ID NO: 2329912 - RNA, 19 nt, Homo sapiens
  misc_RNA (1)...(19): siRNA sense strand
ggaaauagaggcuucgugu

SEQ ID NO: 2329913 - RNA, 19 nt, Homo sapiens
  misc_RNA (1)...(19): siRNA sense strand
augcuggauucaaggucua

SEQ ID NO: 2329914 - RNA, 19 nt, Homo sapiens
  misc_RNA (1)...(19): siRNA sense strand
cuacagacagaguguuaca

SEQ ID NO: 2329915 - RNA, 19 nt, Homo sapiens
  misc_RNA (1)...(19): siRNA sense strand
cgaucuuggcacucacuaa

SEQ ID NO: 2329916 - RNA, 19 nt, Homo sapiens
  misc_RNA (1)...(19): siRNA sense strand
ccuccaucaucaaaggaca

SEQ ID NO: 2329917 - RNA, 19 nt, Homo sapiens
  misc_RNA (1)...(19): siRNA sense strand
agauaaaguauugggaacu

SEQ ID NO: 2329918 - RNA, 19 nt, Homo sapiens
  misc_RNA (1)...(19): siRNA sense strand
gugccagcgaugaaggaga

SEQ ID NO: 2329919 - RNA, 19 nt, Homo sapiens
  misc_RNA (1)...(19): siRNA sense strand
agagaagaacuauggaucu

SEQ ID NO: 2329920 - RNA, 19 nt, Homo sapiens
  misc_RNA (1)...(19): siRNA sense strand
agcauuaccaggagaguga

SEQ ID NO: 2329921 - RNA, 19 nt, Homo sapiens
  misc_RNA (1)...(19): siRNA sense strand
aggagagugacaaggguga

SEQ ID NO: 2329922 - RNA, 19 nt, Homo sapiens
  misc_RNA (1)...(19): siRNA sense strand
cuaccaugaaugaaaugaa

SEQ ID NO: 2329923 - RNA, 19 nt, Homo sapiens
  misc_RNA (1)...(19): siRNA sense strand
uggauagacuguuggugca

SEQ ID NO: 2329924 - RNA, 19 nt, Homo sapiens
  misc_RNA (1)...(19): siRNA sense strand
gugagauggaggaaggaaa

SEQ ID NO: 2329925 - RNA, 19 nt, Homo sapiens
  misc_RNA (1)...(19): siRNA sense strand
gugaaggccaagaggguca

SEQ ID NO: 2329926 - RNA, 19 nt, Homo sapiens
  misc_RNA (1)...(19): siRNA sense strand
accaacacgaagugagaua

SEQ ID NO: 2329927 - RNA, 19 nt, Homo sapiens
  misc_RNA (1)...(19): siRNA sense strand
agguugagcugguccggaa

SEQ ID NO: 2329928 - RNA, 19 nt, Homo sapiens
  misc_RNA (1)...(19): siRNA sense strand
ccacaccagugaaggccaa

SEQ ID NO: 2329929 - RNA, 19 nt, Homo sapiens
  misc_RNA (1)...(19): siRNA sense strand
caggaguuugagagcaaua

SEQ ID NO: 2329930 - RNA, 19 nt, Homo sapiens
  misc_RNA (1)...(19): siRNA sense strand
aggcagauccacauagaca

SEQ ID NO: 2329931 - RNA, 19 nt, Homo sapiens
  misc_RNA (1)...(19): siRNA sense strand
acgaugagcuccuggccau

SEQ ID NO: 2329932 - RNA, 19 nt, Homo sapiens
  misc_RNA (1)...(19): siRNA sense strand
gcagaaagugccagcgaug

SEQ ID NO: 2329933 - RNA, 19 nt, Homo sapiens
  misc_RNA (1)...(19): siRNA sense strand
cguugauccugcagcccaa

SEQ ID NO: 2329934 - RNA, 19 nt, Homo sapiens
  misc_RNA (1)...(19): siRNA sense strand
aggcagaggagguggacac

SEQ ID NO: 2329935 - RNA, 19 nt, Homo sapiens
  misc_RNA (1)...(19): siRNA sense strand
ccuacuggugcaugagcaa

SEQ ID NO: 2329936 - RNA, 19 nt, Homo sapiens
  misc_RNA (1)...(19): siRNA sense strand
gcaagcugcuggauggcau

SEQ ID NO: 2329937 - RNA, 19 nt, Homo sapiens
  misc_RNA (1)...(19): siRNA sense strand
uggugaagucggucaguga

SEQ ID NO: 2329938 - RNA, 19 nt, Homo sapiens
  misc_RNA (1)...(19): siRNA sense strand
cagugaaggccaagagggu

SEQ ID NO: 2329939 - RNA, 19 nt, Homo sapiens
  misc_RNA (1)...(19): siRNA sense strand
acaucgaggccgacaccua

SEQ ID NO: 2329940 - RNA, 19 nt, Homo sapiens
  misc_RNA (1)...(19): siRNA sense strand
agucugaaccggacggcuu

SEQ ID NO: 2329941 - RNA, 19 nt, Homo sapiens
  misc_RNA (1)...(19): siRNA sense strand
gugaagucggucagugaga

SEQ ID NO: 2329942 - RNA, 19 nt, Homo sapiens
  misc_RNA (1)...(19): siRNA sense strand
caggacacauacaggcaga

SEQ ID NO: 2329943 - RNA, 19 nt, Homo sapiens
  misc_RNA (1)...(19): siRNA sense strand
cguucaggguauaaaugau

SEQ ID NO: 2329944 - RNA, 19 nt, Homo sapiens
  misc_RNA (1)...(19): siRNA sense strand
uggacaaggacgaggguca

SEQ ID NO: 2329945 - RNA, 19 nt, Homo sapiens
  misc_RNA (1)...(19): siRNA sense strand
uggcaggagcucuggacaa

SEQ ID NO: 2329946 - RNA, 19 nt, Homo sapiens
  misc_RNA (1)...(19): siRNA sense strand
acggcuacauugagaguca

SEQ ID NO: 2329947 - RNA, 19 nt, Homo sapiens
  misc_RNA (1)...(19): siRNA sense strand
acaucaagaacaaggagau

SEQ ID NO: 2329948 - RNA, 19 nt, Homo sapiens
  misc_RNA (1)...(19): siRNA sense strand
acaccaugauugagaaccu

SEQ ID NO: 2329949 - RNA, 19 nt, Homo sapiens
  misc_RNA (1)...(19): siRNA sense strand
uggacaaggacgaggguca

SEQ ID NO: 2329950 - RNA, 19 nt, Homo sapiens
  misc_RNA (1)...(19): siRNA sense strand
uggcaggagcucuggacaa

SEQ ID NO: 2329951 - RNA, 19 nt, Homo sapiens
  misc_RNA (1)...(19): siRNA sense strand
acggcuacauugagaguca

SEQ ID NO: 2329952 - RNA, 19 nt, Homo sapiens
  misc_RNA (1)...(19): siRNA sense strand
acaucaagaacaaggagau

SEQ ID NO: 2329953 - RNA, 19 nt, Homo sapiens
  misc_RNA (1)...(19): siRNA sense strand
acaccaugauugagaaccu

SEQ ID NO: 2329954 - RNA, 19 nt, Homo sapiens
  misc_RNA (1)...(19): siRNA sense strand
gcaagaagcuggagcgcua

SEQ ID NO: 2329955 - RNA, 19 nt, Homo sapiens
  misc_RNA (1)...(19): siRNA sense strand
gggaaaagaggaugggaga

SEQ ID NO: 2329956 - RNA, 19 nt, Homo sapiens
  misc_RNA (1)...(19): siRNA sense strand
acuucacacucuugggaaa

SEQ ID NO: 2329957 - RNA, 19 nt, Homo sapiens
  misc_RNA (1)...(19): siRNA sense strand
cugaugagccagauagcaa

SEQ ID NO: 2329958 - RNA, 19 nt, Homo sapiens
  misc_RNA (1)...(19): siRNA sense strand
cggcaguccugaugagcca

SEQ ID NO: 2329959 - RNA, 19 nt, Homo sapiens
  misc_RNA (1)...(19): siRNA sense strand
accaagaagaagaagagaa

SEQ ID NO: 2329960 - RNA, 19 nt, Homo sapiens
  misc_RNA (1)...(19): siRNA sense strand
gcuacgagggcuauggcua

SEQ ID NO: 2329961 - RNA, 19 nt, Homo sapiens
  misc_RNA (1)...(19): siRNA sense strand
agaggaugggagagaagaa

SEQ ID NO: 2329962 - RNA, 19 nt, Homo sapiens
  misc_RNA (1)...(19): siRNA sense strand
gagaagaaggcaaagagga

SEQ ID NO: 2329963 - RNA, 19 nt, Homo sapiens
  misc_RNA (1)...(19): siRNA sense strand
ccaagaagacagaggagcu

SEQ ID NO: 2329964 - RNA, 19 nt, Homo sapiens
  misc_RNA (1)...(19): siRNA sense strand
cagaguggacggagaggau

SEQ ID NO: 2329965 - RNA, 19 nt, Homo sapiens
  misc_RNA (1)...(19): siRNA sense strand
gaguggacggagaggauga

SEQ ID NO: 2329966 - RNA, 19 nt, Homo sapiens
  misc_RNA (1)...(19): siRNA sense strand
cgaaccaagaagaagaaga

SEQ ID NO: 2329967 - RNA, 19 nt, Homo sapiens
  misc_RNA (1)...(19): siRNA sense strand
aggagaaggagcaggagga

SEQ ID NO: 2329968 - RNA, 19 nt, Homo sapiens
  misc_RNA (1)...(19): siRNA sense strand
cagcaaaucuacagagacc

SEQ ID NO: 2329969 - RNA, 19 nt, Homo sapiens
  misc_RNA (1)...(19): siRNA sense strand
ccgaggaggagaaggagca

SEQ ID NO: 2329970 - RNA, 19 nt, Homo sapiens
  misc_RNA (1)...(19): siRNA sense strand
ggcaauggcaugaagcaga

SEQ ID NO: 2329971 - RNA, 19 nt, Homo sapiens
  misc_RNA (1)...(19): siRNA sense strand
ggcaagaagagucaggaca

SEQ ID NO: 2329972 - RNA, 19 nt, Homo sapiens
  misc_RNA (1)...(19): siRNA sense strand
auagaggcuacgagggcua

SEQ ID NO: 2329973 - RNA, 19 nt, Homo sapiens
  misc_RNA (1)...(19): siRNA sense strand
acuaacaagaccaagaaga

SEQ ID NO: 2329974 - RNA, 19 nt, Homo sapiens
  misc_RNA (1)...(19): siRNA sense strand
acuuggaacucugggacaa

SEQ ID NO: 2329975 - RNA, 19 nt, Homo sapiens
  misc_RNA (1)...(19): siRNA sense strand
ccgcauuuggagacagaca

SEQ ID NO: 2329976 - RNA, 19 nt, Homo sapiens
  misc_RNA (1)...(19): siRNA sense strand
aagaagaagaagagaaagc

SEQ ID NO: 2329977 - RNA, 19 nt, Homo sapiens
  misc_RNA (1)...(19): siRNA sense strand
aggcaggcaagaagaguca

SEQ ID NO: 2329978 - RNA, 19 nt, Homo sapiens
  misc_RNA (1)...(19): siRNA sense strand
ugaagaagguggaggcagc

SEQ ID NO: 2329979 - RNA, 19 nt, Homo sapiens
  misc_RNA (1)...(19): siRNA sense strand
cugagauggaaauggccua

SEQ ID NO: 2329980 - RNA, 19 nt, Homo sapiens
  misc_RNA (1)...(19): siRNA sense strand
gagaagggcuccagagugg

SEQ ID NO: 2329981 - RNA, 19 nt, Homo sapiens
  misc_RNA (1)...(19): siRNA sense strand
ggaccuucuaugaggacga

SEQ ID NO: 2329982 - RNA, 19 nt, Homo sapiens
  misc_RNA (1)...(19): siRNA sense strand
aggaaauugccauggagca

SEQ ID NO: 2329983 - RNA, 19 nt, Homo sapiens
  misc_RNA (1)...(19): siRNA sense strand
uggcuauggcuauggcuau

SEQ ID NO: 2329984 - RNA, 19 nt, Homo sapiens
  misc_RNA (1)...(19): siRNA sense strand
aggaggagaaggagcagga

SEQ ID NO: 2329985 - RNA, 19 nt, Homo sapiens
  misc_RNA (1)...(19): siRNA sense strand
aggagcaggaggaggcuga

SEQ ID NO: 2329986 - RNA, 19 nt, Homo sapiens
  misc_RNA (1)...(19): siRNA sense strand
aggaagaagaggaggaaga

SEQ ID NO: 2329987 - RNA, 19 nt, Homo sapiens
  misc_RNA (1)...(19): siRNA sense strand
aggaagaggaagaggauga

SEQ ID NO: 2329988 - RNA, 19 nt, Homo sapiens
  misc_RNA (1)...(19): siRNA sense strand
augaagaggaggaggaaga

SEQ ID NO: 2329989 - RNA, 19 nt, Homo sapiens
  misc_RNA (1)...(19): siRNA sense strand
agggagagguggagaggga

SEQ ID NO: 2329990 - RNA, 19 nt, Homo sapiens
  misc_RNA (1)...(19): siRNA sense strand
aggaagaagaacuggaaga

SEQ ID NO: 2329991 - RNA, 19 nt, Homo sapiens
  misc_RNA (1)...(19): siRNA sense strand
gggaagaagaagaagagga

SEQ ID NO: 2329992 - RNA, 19 nt, Homo sapiens
  misc_RNA (1)...(19): siRNA sense strand
aggaugaggaggaggaaga

SEQ ID NO: 2329993 - RNA, 19 nt, Homo sapiens
  misc_RNA (1)...(19): siRNA sense strand
aggaggaggaagaggaaga

SEQ ID NO: 2329994 - RNA, 19 nt, Homo sapiens
  misc_RNA (1)...(19): siRNA sense strand
aguuagaggaagaagaaga

SEQ ID NO: 2329995 - RNA, 19 nt, Homo sapiens
  misc_RNA (1)...(19): siRNA sense strand
aagaagaggaagaggagga

SEQ ID NO: 2329996 - RNA, 19 nt, Homo sapiens
  misc_RNA (1)...(19): siRNA sense strand
aagaagaagaagaggagga

SEQ ID NO: 2329997 - RNA, 19 nt, Homo sapiens
  misc_RNA (1)...(19): siRNA sense strand
aagaggaagaagaggaaga

SEQ ID NO: 2329998 - RNA, 19 nt, Homo sapiens
  misc_RNA (1)...(19): siRNA sense strand
aagaggaagaggaggaaga

SEQ ID NO: 2329999 - RNA, 19 nt, Homo sapiens
  misc_RNA (1)...(19): siRNA sense strand
aggaagaggaggaagacuu

SEQ ID NO: 2330000 - RNA, 19 nt, Homo sapiens
  misc_RNA (1)...(19): siRNA sense strand
agacagagacagaggccga

SEQ ID NO: 2330001 - RNA, 19 nt, Homo sapiens
  misc_RNA (1)...(19): siRNA sense strand
aggaaaaggagcaggauga

SEQ ID NO: 2330002 - RNA, 19 nt, Homo sapiens
  misc_RNA (1)...(19): siRNA sense strand
ggaccaagguguaugcgau

SEQ ID NO: 2330003 - RNA, 19 nt, Homo sapiens
  misc_RNA (1)...(19): siRNA sense strand
acuuugaggaagaggaaga

SEQ ID NO: 2330004 - RNA, 19 nt, Homo sapiens
  misc_RNA (1)...(19): siRNA sense strand
aggaagaggaugaagagga

SEQ ID NO: 2330005 - RNA, 19 nt, Homo sapiens
  misc_RNA (1)...(19): siRNA sense strand
agucagcauuggaaggaau

SEQ ID NO: 2330006 - RNA, 19 nt, Homo sapiens
  misc_RNA (1)...(19): siRNA sense strand
aggaagaagaggaagagga

SEQ ID NO: 2330007 - RNA, 19 nt, Homo sapiens
  misc_RNA (1)...(19): siRNA sense strand
aggaagaagaagaagagga

SEQ ID NO: 2330008 - RNA, 19 nt, Homo sapiens
  misc_RNA (1)...(19): siRNA sense strand
cugcagaagaagagaugga

SEQ ID NO: 2330009 - RNA, 19 nt, Homo sapiens
  misc_RNA (1)...(19): siRNA sense strand
gugaugaagaggaggagga

SEQ ID NO: 2330010 - RNA, 19 nt, Homo sapiens
  misc_RNA (1)...(19): siRNA sense strand
gcagaagaagagauggaga

SEQ ID NO: 2330011 - RNA, 19 nt, Homo sapiens
  misc_RNA (1)...(19): siRNA sense strand
agauggagacagagacaga

SEQ ID NO: 2330012 - RNA, 19 nt, Homo sapiens
  misc_RNA (1)...(19): siRNA sense strand
cagcgaaggaggagccuga

SEQ ID NO: 2330013 - RNA, 19 nt, Homo sapiens
  misc_RNA (1)...(19): siRNA sense strand
ggaagaggaagaaggggaa

SEQ ID NO: 2330014 - RNA, 19 nt, Homo sapiens
  misc_RNA (1)...(19): siRNA sense strand
ccacagagcuauuccagca

SEQ ID NO: 2330015 - RNA, 19 nt, Homo sapiens
  misc_RNA (1)...(19): siRNA sense strand
aagaagaggaagaagagga

SEQ ID NO: 2330016 - RNA, 19 nt, Homo sapiens
  misc_RNA (1)...(19): siRNA sense strand
agaaggugaguuagaggaa

SEQ ID NO: 2330017 - RNA, 19 nt, Homo sapiens
  misc_RNA (1)...(19): siRNA sense strand
aagaagaacuggaagaggu

SEQ ID NO: 2330018 - RNA, 19 nt, Homo sapiens
  misc_RNA (1)...(19): siRNA sense strand
ucaucaaggaggagacuca

SEQ ID NO: 2330019 - RNA, 19 nt, Homo sapiens
  misc_RNA (1)...(19): siRNA sense strand
uggaagaggauuugacagu

SEQ ID NO: 2330020 - RNA, 19 nt, Homo sapiens
  misc_RNA (1)...(19): siRNA sense strand
agacuuugaggaagaggaa

SEQ ID NO: 2330021 - RNA, 19 nt, Homo sapiens
  misc_RNA (1)...(19): siRNA sense strand
gugaguuagaggaagaaga

SEQ ID NO: 2330022 - RNA, 19 nt, Homo sapiens
  misc_RNA (1)...(19): siRNA sense strand
uagaggaagaagaagaaga

SEQ ID NO: 2330023 - RNA, 19 nt, Homo sapiens
  misc_RNA (1)...(19): siRNA sense strand
ggaagaagaagaagaggag

SEQ ID NO: 2330024 - RNA, 19 nt, Homo sapiens
  misc_RNA (1)...(19): siRNA sense strand
aagaagaggaggaugagga

SEQ ID NO: 2330025 - RNA, 19 nt, Homo sapiens
  misc_RNA (1)...(19): siRNA sense strand
aagaggaggaugaggagga

SEQ ID NO: 2330026 - RNA, 19 nt, Homo sapiens
  misc_RNA (1)...(19): siRNA sense strand
ggaggagacucacaggaga

SEQ ID NO: 2330027 - RNA, 19 nt, Homo sapiens
  misc_RNA (1)...(19): siRNA sense strand
aagaggaagaggaugaaga

SEQ ID NO: 2330028 - RNA, 19 nt, Homo sapiens
  misc_RNA (1)...(19): siRNA sense strand
aagaggaagaagaggagga

SEQ ID NO: 2330029 - RNA, 19 nt, Homo sapiens
  misc_RNA (1)...(19): siRNA sense strand
aagaauuugaggaagaaga

SEQ ID NO: 2330030 - RNA, 19 nt, Homo sapiens
  misc_RNA (1)...(19): siRNA sense strand
agagauggagacagagaca

SEQ ID NO: 2330031 - RNA, 19 nt, Homo sapiens
  misc_RNA (1)...(19): siRNA sense strand
aggaagaaggggaagaaga

SEQ ID NO: 2330032 - RNA, 19 nt, Homo sapiens
  misc_RNA (1)...(19): siRNA sense strand
aggaggaagaagaguuuga

SEQ ID NO: 2330033 - RNA, 19 nt, Homo sapiens
  misc_RNA (1)...(19): siRNA sense strand
augaggaggaggaagaaga

SEQ ID NO: 2330034 - RNA, 19 nt, Homo sapiens
  misc_RNA (1)...(19): siRNA sense strand
guacgagggagcagagacu

SEQ ID NO: 2330035 - RNA, 19 nt, Homo sapiens
  misc_RNA (1)...(19): siRNA sense strand
gcugggagcaggagcuaca

SEQ ID NO: 2330036 - RNA, 19 nt, Homo sapiens
  misc_RNA (1)...(19): siRNA sense strand
ggucauggguguacagcag

SEQ ID NO: 2330037 - RNA, 19 nt, Homo sapiens
  misc_RNA (1)...(19): siRNA sense strand
gcagugaugaagaggagga

SEQ ID NO: 2330038 - RNA, 19 nt, Homo sapiens
  misc_RNA (1)...(19): siRNA sense strand
aggaagaagaguuugagga

SEQ ID NO: 2330039 - RNA, 19 nt, Homo sapiens
  misc_RNA (1)...(19): siRNA sense strand
agaggaggaggaagaggaa

SEQ ID NO: 2330040 - RNA, 19 nt, Homo sapiens
  misc_RNA (1)...(19): siRNA sense strand
uugaagaggaagaagagga

SEQ ID NO: 2330041 - RNA, 19 nt, Homo sapiens
  misc_RNA (1)...(19): siRNA sense strand
aggaggagccugaagaacu

SEQ ID NO: 2330042 - RNA, 19 nt, Homo sapiens
  misc_RNA (1)...(19): siRNA sense strand
ggaagaagaggaagaggag

SEQ ID NO: 2330043 - RNA, 19 nt, Homo sapiens
  misc_RNA (1)...(19): siRNA sense strand
ccaagguguaugcgauauu

SEQ ID NO: 2330044 - RNA, 19 nt, Homo sapiens
  misc_RNA (1)...(19): siRNA sense strand
caauaguauacaagggauc

SEQ ID NO: 2330045 - RNA, 19 nt, Homo sapiens
  misc_RNA (1)...(19): siRNA sense strand
ccaauaguauacaagggau

SEQ ID NO: 2330046 - RNA, 19 nt, Homo sapiens
  misc_RNA (1)...(19): siRNA sense strand
ggagacaagaggagcagca

SEQ ID NO: 2330047 - RNA, 19 nt, Homo sapiens
  misc_RNA (1)...(19): siRNA sense strand
cggacgaccucaacgcaca

SEQ ID NO: 2330048 - RNA, 19 nt, Homo sapiens
  misc_RNA (1)...(19): siRNA sense strand
augaagauguggaugggaa

SEQ ID NO: 2330049 - RNA, 19 nt, Homo sapiens
  misc_RNA (1)...(19): siRNA sense strand
gcaccagcucagagggaga

SEQ ID NO: 2330050 - RNA, 19 nt, Homo sapiens
  misc_RNA (1)...(19): siRNA sense strand
gagacuucauccugggcua

SEQ ID NO: 2330051 - RNA, 19 nt, Homo sapiens
  misc_RNA (1)...(19): siRNA sense strand
cggugaggaugcagggugu

SEQ ID NO: 2330052 - RNA, 19 nt, Homo sapiens
  misc_RNA (1)...(19): siRNA sense strand
ugaagauguggaugggaau

SEQ ID NO: 2330053 - RNA, 19 nt, Homo sapiens
  misc_RNA (1)...(19): siRNA sense strand
gcgcagacaugaucgccau

SEQ ID NO: 2330054 - RNA, 19 nt, Homo sapiens
  misc_RNA (1)...(19): siRNA sense strand
gaagugaacuccaugcuca

SEQ ID NO: 2330055 - RNA, 19 nt, Homo sapiens
  misc_RNA (1)...(19): siRNA sense strand
cggagcagcgcaaagacaa

SEQ ID NO: 2330056 - RNA, 19 nt, Homo sapiens
  misc_RNA (1)...(19): siRNA sense strand
aagacaacuuccagaccau

SEQ ID NO: 2330057 - RNA, 19 nt, Homo sapiens
  misc_RNA (1)...(19): siRNA sense strand
uggaauacacagucagcga

SEQ ID NO: 2330058 - RNA, 19 nt, Homo sapiens
  misc_RNA (1)...(19): siRNA sense strand
cuggcaaguccaagcgaca

SEQ ID NO: 2330059 - RNA, 19 nt, Homo sapiens
  misc_RNA (1)...(19): siRNA sense strand
gcaccaguauuguggcuca

SEQ ID NO: 2330060 - RNA, 19 nt, Homo sapiens
  misc_RNA (1)...(19): siRNA sense strand
aagaaugggcagauugcau

SEQ ID NO: 2330061 - RNA, 19 nt, Homo sapiens
  misc_RNA (1)...(19): siRNA sense strand
gcugacaguggaugugcaa

SEQ ID NO: 2330062 - RNA, 19 nt, Homo sapiens
  misc_RNA (1)...(19): siRNA sense strand
gcccaguaguucauggcua

SEQ ID NO: 2330063 - RNA, 19 nt, Homo sapiens
  misc_RNA (1)...(19): siRNA sense strand
gagcaaagccacaucagga

SEQ ID NO: 2330064 - RNA, 19 nt, Homo sapiens
  misc_RNA (1)...(19): siRNA sense strand
agauacgggcauagaggau

SEQ ID NO: 2330065 - RNA, 19 nt, Homo sapiens
  misc_RNA (1)...(19): siRNA sense strand
cagagaugccagaagaagu

SEQ ID NO: 2330066 - RNA, 19 nt, Homo sapiens
  misc_RNA (1)...(19): siRNA sense strand
gaagaaaucggcaaggcca

SEQ ID NO: 2330067 - RNA, 19 nt, Homo sapiens
  misc_RNA (1)...(19): siRNA sense strand
acagagaagugcaggcaga

SEQ ID NO: 2330068 - RNA, 19 nt, Homo sapiens
  misc_RNA (1)...(19): siRNA sense strand
cauccacagcccugggaaa

SEQ ID NO: 2330069 - RNA, 19 nt, Homo sapiens
  misc_RNA (1)...(19): siRNA sense strand
caaaggggauggagggaga

SEQ ID NO: 2330070 - RNA, 19 nt, Homo sapiens
  misc_RNA (1)...(19): siRNA sense strand
cgugagggaugaaggggaa

SEQ ID NO: 2330071 - RNA, 19 nt, Homo sapiens
  misc_RNA (1)...(19): siRNA sense strand
guuacaaaucacaguugaa

SEQ ID NO: 2330072 - RNA, 19 nt, Homo sapiens
  misc_RNA (1)...(19): siRNA sense strand
uggaagaugcaaaggccau

SEQ ID NO: 2330073 - RNA, 19 nt, Homo sapiens
  misc_RNA (1)...(19): siRNA sense strand
gacgccaggaagagggaua

SEQ ID NO: 2330074 - RNA, 19 nt, Homo sapiens
  misc_RNA (1)...(19): siRNA sense strand
gcaucagagacgccaggaa

SEQ ID NO: 2330075 - RNA, 19 nt, Homo sapiens
  misc_RNA (1)...(19): siRNA sense strand
uuucaguccuugagggcca

SEQ ID NO: 2330076 - RNA, 19 nt, Homo sapiens
  misc_RNA (1)...(19): siRNA sense strand
gaagaaaucggcaaggcca

SEQ ID NO: 2330077 - RNA, 19 nt, Homo sapiens
  misc_RNA (1)...(19): siRNA sense strand
guuccgggcaggagacaga

SEQ ID NO: 2330078 - RNA, 19 nt, Homo sapiens
  misc_RNA (1)...(19): siRNA sense strand
cggcaaagccagagcacug

SEQ ID NO: 2330079 - RNA, 19 nt, Homo sapiens
  misc_RNA (1)...(19): siRNA sense strand
ggaagagcuuaaaugguga

SEQ ID NO: 2330080 - RNA, 19 nt, Homo sapiens
  misc_RNA (1)...(19): siRNA sense strand
cggcagucggauagacaau

SEQ ID NO: 2330081 - RNA, 19 nt, Homo sapiens
  misc_RNA (1)...(19): siRNA sense strand
agacagggcuugaugccau

SEQ ID NO: 2330082 - RNA, 19 nt, Homo sapiens
  misc_RNA (1)...(19): siRNA sense strand
agacaauaccacaacaaca

SEQ ID NO: 2330083 - RNA, 19 nt, Homo sapiens
  misc_RNA (1)...(19): siRNA sense strand
gagcuuaaauggugaggac

SEQ ID NO: 2330084 - RNA, 19 nt, Homo sapiens
  misc_RNA (1)...(19): siRNA sense strand
cuuccaacagugacaguaa

SEQ ID NO: 2330085 - RNA, 19 nt, Homo sapiens
  misc_RNA (1)...(19): siRNA sense strand
cggauagacaauaccacaa

SEQ ID NO: 2330086 - RNA, 19 nt, Homo sapiens
  misc_RNA (1)...(19): siRNA sense strand
ccauugggucggagauaca

SEQ ID NO: 2330087 - RNA, 19 nt, Homo sapiens
  misc_RNA (1)...(19): siRNA sense strand
gcuuaaauggugaggacuc

SEQ ID NO: 2330088 - RNA, 19 nt, Homo sapiens
  misc_RNA (1)...(19): siRNA sense strand
gaccaagauaauagagcca

SEQ ID NO: 2330089 - RNA, 19 nt, Homo sapiens
  misc_RNA (1)...(19): siRNA sense strand
acacaguugaagaggaagu

SEQ ID NO: 2330090 - RNA, 19 nt, Homo sapiens
  misc_RNA (1)...(19): siRNA sense strand
cuuuauugaagaagugaca

SEQ ID NO: 2330091 - RNA, 19 nt, Homo sapiens
  misc_RNA (1)...(19): siRNA sense strand
gcuagaacugcaugacaca

SEQ ID NO: 2330092 - RNA, 19 nt, Homo sapiens
  misc_RNA (1)...(19): siRNA sense strand
uuauugaagaagugacaga

SEQ ID NO: 2330093 - RNA, 19 nt, Homo sapiens
  misc_RNA (1)...(19): siRNA sense strand
ugaagaagugacagaugau

SEQ ID NO: 2330094 - RNA, 19 nt, Homo sapiens
  misc_RNA (1)...(19): siRNA sense strand
agauaauagagccaaugaa

SEQ ID NO: 2330095 - RNA, 19 nt, Homo sapiens
  misc_RNA (1)...(19): siRNA sense strand
uguucaagggcgucuguaa

SEQ ID NO: 2330096 - RNA, 19 nt, Homo sapiens
  misc_RNA (1)...(19): siRNA sense strand
gauucaacgcagaagguau

SEQ ID NO: 2330097 - RNA, 19 nt, Homo sapiens
  misc_RNA (1)...(19): siRNA sense strand
aucuaaugaaagugggaaa

SEQ ID NO: 2330098 - RNA, 19 nt, Homo sapiens
  misc_RNA (1)...(19): siRNA sense strand
ggauggucuaguaaggaua

SEQ ID NO: 2330099 - RNA, 19 nt, Homo sapiens
  misc_RNA (1)...(19): siRNA sense strand
aagaauaacuucagaccac

SEQ ID NO: 2330100 - RNA, 19 nt, Homo sapiens
  misc_RNA (1)...(19): siRNA sense strand
gcugaagagcgcuggagga

SEQ ID NO: 2330101 - RNA, 19 nt, Homo sapiens
  misc_RNA (1)...(19): siRNA sense strand
uucaaguacugguggguga

SEQ ID NO: 2330102 - RNA, 19 nt, Homo sapiens
  misc_RNA (1)...(19): siRNA sense strand
gcauuuaaaucaagugcag

SEQ ID NO: 2330103 - RNA, 19 nt, Homo sapiens
  misc_RNA (1)...(19): siRNA sense strand
caacugauguagugcugga

SEQ ID NO: 2330104 - RNA, 19 nt, Homo sapiens
  misc_RNA (1)...(19): siRNA sense strand
auucaacgcagaagguauu

SEQ ID NO: 2330105 - RNA, 19 nt, Homo sapiens
  misc_RNA (1)...(19): siRNA sense strand
cugauguagugcuggaagu

SEQ ID NO: 2330106 - RNA, 19 nt, Homo sapiens
  misc_RNA (1)...(19): siRNA sense strand
gaagagcgcuggaggacuc

SEQ ID NO: 2330107 - RNA, 19 nt, Homo sapiens
  misc_RNA (1)...(19): siRNA sense strand
uuucagcauagcagauaaa

SEQ ID NO: 2330108 - RNA, 19 nt, Homo sapiens
  misc_RNA (1)...(19): siRNA sense strand
agagaacaauggagccaga

SEQ ID NO: 2330109 - RNA, 19 nt, Homo sapiens
  misc_RNA (1)...(19): siRNA sense strand
agagaacaauggagccaga

SEQ ID NO: 2330110 - RNA, 19 nt, Homo sapiens
  misc_RNA (1)...(19): siRNA sense strand
ccugaauggcuaagagaaa

SEQ ID NO: 2330111 - RNA, 19 nt, Homo sapiens
  misc_RNA (1)...(19): siRNA sense strand
uguuaaugaaggagagaaa

SEQ ID NO: 2330112 - RNA, 19 nt, Homo sapiens
  misc_RNA (1)...(19): siRNA sense strand
cgaagaaauaacugaagaa

SEQ ID NO: 2330113 - RNA, 19 nt, Homo sapiens
  misc_RNA (1)...(19): siRNA sense strand
gaaaaugaaaggagagcaa

SEQ ID NO: 2330114 - RNA, 19 nt, Homo sapiens
  misc_RNA (1)...(19): siRNA sense strand
uggaaugauuaauggagaa

SEQ ID NO: 2330115 - RNA, 19 nt, Homo sapiens
  misc_RNA (1)...(19): siRNA sense strand
gaacaaaaugggacagcaa

SEQ ID NO: 2330116 - RNA, 19 nt, Homo sapiens
  misc_RNA (1)...(19): siRNA sense strand
aggagagaccaaugauaaa

SEQ ID NO: 2330117 - RNA, 19 nt, Homo sapiens
  misc_RNA (1)...(19): siRNA sense strand
aguagauagugaagaugaa

SEQ ID NO: 2330118 - RNA, 19 nt, Homo sapiens
  misc_RNA (1)...(19): siRNA sense strand
ggaaugauuaauggagaaa

SEQ ID NO: 2330119 - RNA, 19 nt, Homo sapiens
  misc_RNA (1)...(19): siRNA sense strand
caggaagaagagaguuuaa

SEQ ID NO: 2330120 - RNA, 19 nt, Homo sapiens
  misc_RNA (1)...(19): siRNA sense strand
agacuauucuugaugggaa

SEQ ID NO: 2330121 - RNA, 19 nt, Homo sapiens
  misc_RNA (1)...(19): siRNA sense strand
aaaugaaaggagagcaaga

SEQ ID NO: 2330122 - RNA, 19 nt, Homo sapiens
  misc_RNA (1)...(19): siRNA sense strand
cugcauugcccuuggugua

SEQ ID NO: 2330123 - RNA, 19 nt, Homo sapiens
  misc_RNA (1)...(19): siRNA sense strand
uaacaacaauacaaggcaa

SEQ ID NO: 2330124 - RNA, 19 nt, Homo sapiens
  misc_RNA (1)...(19): siRNA sense strand
uuaaugaaggagagaaaga

SEQ ID NO: 2330125 - RNA, 19 nt, Homo sapiens
  misc_RNA (1)...(19): siRNA sense strand
gggaauaugaaguagccau

SEQ ID NO: 2330126 - RNA, 19 nt, Homo sapiens
  misc_RNA (1)...(19): siRNA sense strand
uccaaaaggugcuaggaua

SEQ ID NO: 2330127 - RNA, 19 nt, Homo sapiens
  misc_RNA (1)...(19): siRNA sense strand
gagcaacaugggagacuau

SEQ ID NO: 2330128 - RNA, 19 nt, Homo sapiens
  misc_RNA (1)...(19): siRNA sense strand
cacuagaaauucagagagu

SEQ ID NO: 2330129 - RNA, 19 nt, Homo sapiens
  misc_RNA (1)...(19): siRNA sense strand
cuagaaauucagagagucu

SEQ ID NO: 2330130 - RNA, 19 nt, Homo sapiens
  misc_RNA (1)...(19): siRNA sense strand
ccucuugccacuagaaauu

SEQ ID NO: 2330131 - RNA, 19 nt, Homo sapiens
  misc_RNA (1)...(19): siRNA sense strand
aaggauacuccaaaugaaa

SEQ ID NO: 2330132 - RNA, 19 nt, Homo sapiens
  misc_RNA (1)...(19): siRNA sense strand
agaaauggaaguagauagu

SEQ ID NO: 2330133 - RNA, 19 nt, Homo sapiens
  misc_RNA (1)...(19): siRNA sense strand
uggagaaaccaaugaaaau

SEQ ID NO: 2330134 - RNA, 19 nt, Homo sapiens
  misc_RNA (1)...(19): siRNA sense strand
guagaacagcaaagaacau

SEQ ID NO: 2330135 - RNA, 19 nt, Homo sapiens
  misc_RNA (1)...(19): siRNA sense strand
uagauaaagcuguuaccaa

SEQ ID NO: 2330136 - RNA, 19 nt, Homo sapiens
  misc_RNA (1)...(19): siRNA sense strand
aguaacagccauaugguga

SEQ ID NO: 2330137 - RNA, 19 nt, Homo sapiens
  misc_RNA (1)...(19): siRNA sense strand
aagagaaagcuuuggaaac

SEQ ID NO: 2330138 - RNA, 19 nt, Homo sapiens
  misc_RNA (1)...(19): siRNA sense strand
gauuaauggagaaaccaau

SEQ ID NO: 2330139 - RNA, 19 nt, Homo sapiens
  misc_RNA (1)...(19): siRNA sense strand
caacaauacaaggcaacaa

SEQ ID NO: 2330140 - RNA, 19 nt, Homo sapiens
  misc_RNA (1)...(19): siRNA sense strand
aagaauguccaauaagcaa

SEQ ID NO: 2330141 - RNA, 19 nt, Homo sapiens
  misc_RNA (1)...(19): siRNA sense strand
agagaaagaagugaugaaa

SEQ ID NO: 2330142 - RNA, 19 nt, Homo sapiens
  misc_RNA (1)...(19): siRNA sense strand
uccaggaagaagagaguuu

SEQ ID NO: 2330143 - RNA, 19 nt, Homo sapiens
  misc_RNA (1)...(19): siRNA sense strand
ccaaaugaaaaccgacaaa

SEQ ID NO: 2330144 - RNA, 19 nt, Homo sapiens
  misc_RNA (1)...(19): siRNA sense strand
cugacaaucaaaugaauca

SEQ ID NO: 2330145 - RNA, 19 nt, Homo sapiens
  misc_RNA (1)...(19): siRNA sense strand
agauaaagcuguuaccaag

SEQ ID NO: 2330146 - RNA, 19 nt, Homo sapiens
  misc_RNA (1)...(19): siRNA sense strand
auggaaugauuaauggaga

SEQ ID NO: 2330147 - RNA, 19 nt, Homo sapiens
  misc_RNA (1)...(19): siRNA sense strand
aaguagccaugcaggaaau

SEQ ID NO: 2330148 - RNA, 19 nt, Homo sapiens
  misc_RNA (1)...(19): siRNA sense strand
gggaaguagaacagcaaag

SEQ ID NO: 2330149 - RNA, 19 nt, Homo sapiens
  misc_RNA (1)...(19): siRNA sense strand
gagaaagaagugaugaaac

SEQ ID NO: 2330150 - RNA, 19 nt, Homo sapiens
  misc_RNA (1)...(19): siRNA sense strand
cccugcaaacgaagaaaua

SEQ ID NO: 2330151 - RNA, 19 nt, Homo sapiens
  misc_RNA (1)...(19): siRNA sense strand
aggcaaguucccacaggua

SEQ ID NO: 2330152 - RNA, 19 nt, Homo sapiens
  misc_RNA (1)...(19): siRNA sense strand
ccaaaacgaacaaaagcaa

SEQ ID NO: 2330153 - RNA, 19 nt, Homo sapiens
  misc_RNA (1)...(19): siRNA sense strand
acaaaaugggacagcaaau

SEQ ID NO: 2330154 - RNA, 19 nt, Homo sapiens
  misc_RNA (1)...(19): siRNA sense strand
guaacagccauauggugaa

SEQ ID NO: 2330155 - RNA, 19 nt, Homo sapiens
  misc_RNA (1)...(19): siRNA sense strand
ugauuaauggagaaaccaa

SEQ ID NO: 2330156 - RNA, 19 nt, Homo sapiens
  misc_RNA (1)...(19): siRNA sense strand
ccaguuaagagaacaccua

SEQ ID NO: 2330157 - RNA, 19 nt, Homo sapiens
  misc_RNA (1)...(19): siRNA sense strand
cugcaaacgaagaaauaac

SEQ ID NO: 2330158 - RNA, 19 nt, Homo sapiens
  misc_RNA (1)...(19): siRNA sense strand
cuuacaugucucaucgaaa

SEQ ID NO: 2330159 - RNA, 19 nt, Homo sapiens
  misc_RNA (1)...(19): siRNA sense strand
uagagaaaaugaaaggaga

SEQ ID NO: 2330160 - RNA, 19 nt, Homo sapiens
  misc_RNA (1)...(19): siRNA sense strand
agaaaaggauacuccaaau

SEQ ID NO: 2330161 - RNA, 19 nt, Homo sapiens
  misc_RNA (1)...(19): siRNA sense strand
augaaaggagagcaagaau

SEQ ID NO: 2330162 - RNA, 19 nt, Homo sapiens
  misc_RNA (1)...(19): siRNA sense strand
cuauagauuucuucgaacu

SEQ ID NO: 2330163 - RNA, 19 nt, Homo sapiens
  misc_RNA (1)...(19): siRNA sense strand
cguccaggaagaagagagu

SEQ ID NO: 2330164 - RNA, 19 nt, Homo sapiens
  misc_RNA (1)...(19): siRNA sense strand
aagccaacacagaucuaua

SEQ ID NO: 2330165 - RNA, 19 nt, Homo sapiens
  misc_RNA (1)...(19): siRNA sense strand
acaggagagaccaaugaua

SEQ ID NO: 2330166 - RNA, 19 nt, Homo sapiens
  misc_RNA (1)...(19): siRNA sense strand
caagaaaagaaaaggauac

SEQ ID NO: 2330167 - RNA, 19 nt, Homo sapiens
  misc_RNA (1)...(19): siRNA sense strand
cggugauaauagaacgaua

SEQ ID NO: 2330168 - RNA, 19 nt, Homo sapiens
  misc_RNA (1)...(19): siRNA sense strand
gguguaugagagugagaaa

SEQ ID NO: 2330169 - RNA, 19 nt, Homo sapiens
  misc_RNA (1)...(19): siRNA sense strand
ccaaaaucccggugauaau

SEQ ID NO: 2330170 - RNA, 19 nt, Homo sapiens
  misc_RNA (1)...(19): siRNA sense strand
cagagguguaugagaguga

SEQ ID NO: 2330171 - RNA, 19 nt, Homo sapiens
  misc_RNA (1)...(19): siRNA sense strand
cuucgaacaaagaguagaa

SEQ ID NO: 2330172 - RNA, 19 nt, Homo sapiens
  misc_RNA (1)...(19): siRNA sense strand
gaguagaagauguccgacu

SEQ ID NO: 2330173 - RNA, 19 nt, Homo sapiens
  misc_RNA (1)...(19): siRNA sense strand
ccuucuuccuguuggugaa

SEQ ID NO: 2330174 - RNA, 19 nt, Homo sapiens
  misc_RNA (1)...(19): siRNA sense strand
gagugagaaagaugaagau

SEQ ID NO: 2330175 - RNA, 19 nt, Homo sapiens
  misc_RNA (1)...(19): siRNA sense strand
ugagagugagaaagaugaa

SEQ ID NO: 2330176 - RNA, 19 nt, Homo sapiens
  misc_RNA (1)...(19): siRNA sense strand
augaagaauggaagagaau

SEQ ID NO: 2330177 - RNA, 19 nt, Homo sapiens
  misc_RNA (1)...(19): siRNA sense strand
cugaagaugaagaauggaa

SEQ ID NO: 2330178 - RNA, 19 nt, Homo sapiens
  misc_RNA (1)...(19): siRNA sense strand
ggauguaaucacuggcaca

SEQ ID NO: 2330179 - RNA, 19 nt, Homo sapiens
  misc_RNA (1)...(19): siRNA sense strand
uugacaugguggugaauga

SEQ ID NO: 2330180 - RNA, 19 nt, Homo sapiens
  misc_RNA (1)...(19): siRNA sense strand
ccuaaauaucgguuuguuu

SEQ ID NO: 2330181 - RNA, 19 nt, Homo sapiens
  misc_RNA (1)...(19): siRNA sense strand
agaaacugcaggaggagau

SEQ ID NO: 2330182 - RNA, 19 nt, Homo sapiens
  misc_RNA (1)...(19): siRNA sense strand
ccaaagaaacaaaguccca

SEQ ID NO: 2330183 - RNA, 19 nt, Homo sapiens
  misc_RNA (1)...(19): siRNA sense strand
ccagaugccuuuaggucca

SEQ ID NO: 2330184 - RNA, 19 nt, Homo sapiens
  misc_RNA (1)...(19): siRNA sense strand
uggaagagaauacgaacau

SEQ ID NO: 2330185 - RNA, 19 nt, Homo sapiens
  misc_RNA (1)...(19): siRNA sense strand
cuuuagguccaaugggauu

SEQ ID NO: 2330186 - RNA, 19 nt, Homo sapiens
  misc_RNA (1)...(19): siRNA sense strand
gauuacaaguggacccuga

SEQ ID NO: 2330187 - RNA, 19 nt, Homo sapiens
  misc_RNA (1)...(19): siRNA sense strand
cgagagucugcaagaaaga

SEQ ID NO: 2330188 - RNA, 19 nt, Homo sapiens
  misc_RNA (1)...(19): siRNA sense strand
gcugggaauuccugggcca

SEQ ID NO: 2330189 - RNA, 19 nt, Homo sapiens
  misc_RNA (1)...(19): siRNA sense strand
ccuuaggggucuuuggaau

SEQ ID NO: 2330190 - RNA, 19 nt, Homo sapiens
  misc_RNA (1)...(19): siRNA sense strand
aggaagcagagaacagcaa

SEQ ID NO: 2330191 - RNA, 19 nt, Homo sapiens
  misc_RNA (1)...(19): siRNA sense strand
ccaaaguacuggacagagc

SEQ ID NO: 2330192 - RNA, 19 nt, Homo sapiens
  misc_RNA (1)...(19): siRNA sense strand
cauuauuuggagugaacuu

SEQ ID NO: 2330193 - RNA, 19 nt, Homo sapiens
  misc_RNA (1)...(19): siRNA sense strand
ugaaaggaugaaagaaagu

SEQ ID NO: 2330194 - RNA, 19 nt, Homo sapiens
  misc_RNA (1)...(19): siRNA sense strand
gcagagaacagcaagucca

SEQ ID NO: 2330195 - RNA, 19 nt, Homo sapiens
  misc_RNA (1)...(19): siRNA sense strand
acaaaagcaucgaguagau

SEQ ID NO: 2330196 - RNA, 19 nt, Homo sapiens
  misc_RNA (1)...(19): siRNA sense strand
agagucugcaagaaagaua

SEQ ID NO: 2330197 - RNA, 19 nt, Homo sapiens
  misc_RNA (1)...(19): siRNA sense strand
ccagcuuucaccaguguaa

SEQ ID NO: 2330198 - RNA, 19 nt, Homo sapiens
  misc_RNA (1)...(19): siRNA sense strand
augaagaauggaagagaau

SEQ ID NO: 2330199 - RNA, 19 nt, Homo sapiens
  misc_RNA (1)...(19): siRNA sense strand
cugaagaugaagaauggaa

SEQ ID NO: 2330200 - RNA, 19 nt, Homo sapiens
  misc_RNA (1)...(19): siRNA sense strand
ggauguaaucacuggcaca

SEQ ID NO: 2330201 - RNA, 19 nt, Homo sapiens
  misc_RNA (1)...(19): siRNA sense strand
uugacaugguggugaauga

SEQ ID NO: 2330202 - RNA, 19 nt, Homo sapiens
  misc_RNA (1)...(19): siRNA sense strand
ccuaaauaucgguuuguuu

SEQ ID NO: 2330203 - RNA, 19 nt, Homo sapiens
  misc_RNA (1)...(19): siRNA sense strand
agaaacugcaggaggagau

SEQ ID NO: 2330204 - RNA, 19 nt, Homo sapiens
  misc_RNA (1)...(19): siRNA sense strand
ccaaagaaacaaaguccca

SEQ ID NO: 2330205 - RNA, 19 nt, Homo sapiens
  misc_RNA (1)...(19): siRNA sense strand
ccagaugccuuuaggucca

SEQ ID NO: 2330206 - RNA, 19 nt, Homo sapiens
  misc_RNA (1)...(19): siRNA sense strand
uggaagagaauacgaacau

SEQ ID NO: 2330207 - RNA, 19 nt, Homo sapiens
  misc_RNA (1)...(19): siRNA sense strand
cuuuagguccaaugggauu

SEQ ID NO: 2330208 - RNA, 19 nt, Homo sapiens
  misc_RNA (1)...(19): siRNA sense strand
gauuacaaguggacccuga

SEQ ID NO: 2330209 - RNA, 19 nt, Homo sapiens
  misc_RNA (1)...(19): siRNA sense strand
cgagagucugcaagaaaga

SEQ ID NO: 2330210 - RNA, 19 nt, Homo sapiens
  misc_RNA (1)...(19): siRNA sense strand
gcugggaauuccugggcca

SEQ ID NO: 2330211 - RNA, 19 nt, Homo sapiens
  misc_RNA (1)...(19): siRNA sense strand
ccuuaggggucuuuggaau

SEQ ID NO: 2330212 - RNA, 19 nt, Homo sapiens
  misc_RNA (1)...(19): siRNA sense strand
aggaagcagagaacagcaa

SEQ ID NO: 2330213 - RNA, 19 nt, Homo sapiens
  misc_RNA (1)...(19): siRNA sense strand
ccaaaguacuggacagagc

SEQ ID NO: 2330214 - RNA, 19 nt, Homo sapiens
  misc_RNA (1)...(19): siRNA sense strand
cauuauuuggagugaacuu

SEQ ID NO: 2330215 - RNA, 19 nt, Homo sapiens
  misc_RNA (1)...(19): siRNA sense strand
ugaaaggaugaaagaaagu

SEQ ID NO: 2330216 - RNA, 19 nt, Homo sapiens
  misc_RNA (1)...(19): siRNA sense strand
gcagagaacagcaagucca

SEQ ID NO: 2330217 - RNA, 19 nt, Homo sapiens
  misc_RNA (1)...(19): siRNA sense strand
acaaaagcaucgaguagau

SEQ ID NO: 2330218 - RNA, 19 nt, Homo sapiens
  misc_RNA (1)...(19): siRNA sense strand
agagucugcaagaaagaua

SEQ ID NO: 2330219 - RNA, 19 nt, Homo sapiens
  misc_RNA (1)...(19): siRNA sense strand
ccagcuuucaccaguguaa

SEQ ID NO: 2330220 - RNA, 19 nt, Homo sapiens
  misc_RNA (1)...(19): siRNA sense strand
augaagaauggaagagaau

SEQ ID NO: 2330221 - RNA, 19 nt, Homo sapiens
  misc_RNA (1)...(19): siRNA sense strand
cugaagaugaagaauggaa

SEQ ID NO: 2330222 - RNA, 19 nt, Homo sapiens
  misc_RNA (1)...(19): siRNA sense strand
ggauguaaucacuggcaca

SEQ ID NO: 2330223 - RNA, 19 nt, Homo sapiens
  misc_RNA (1)...(19): siRNA sense strand
uugacaugguggugaauga

SEQ ID NO: 2330224 - RNA, 19 nt, Homo sapiens
  misc_RNA (1)...(19): siRNA sense strand
ccuaaauaucgguuuguuu

SEQ ID NO: 2330225 - RNA, 19 nt, Homo sapiens
  misc_RNA (1)...(19): siRNA sense strand
agaaacugcaggaggagau

SEQ ID NO: 2330226 - RNA, 19 nt, Homo sapiens
  misc_RNA (1)...(19): siRNA sense strand
ccaaagaaacaaaguccca

SEQ ID NO: 2330227 - RNA, 19 nt, Homo sapiens
  misc_RNA (1)...(19): siRNA sense strand
ccagaugccuuuaggucca

SEQ ID NO: 2330228 - RNA, 19 nt, Homo sapiens
  misc_RNA (1)...(19): siRNA sense strand
uggaagagaauacgaacau

SEQ ID NO: 2330229 - RNA, 19 nt, Homo sapiens
  misc_RNA (1)...(19): siRNA sense strand
cuuuagguccaaugggauu

SEQ ID NO: 2330230 - RNA, 19 nt, Homo sapiens
  misc_RNA (1)...(19): siRNA sense strand
cgagagucugcaagaaaga

SEQ ID NO: 2330231 - RNA, 19 nt, Homo sapiens
  misc_RNA (1)...(19): siRNA sense strand
gcugggaauuccugggcca

SEQ ID NO: 2330232 - RNA, 19 nt, Homo sapiens
  misc_RNA (1)...(19): siRNA sense strand
ccuuaggggucuuuggaau

SEQ ID NO: 2330233 - RNA, 19 nt, Homo sapiens
  misc_RNA (1)...(19): siRNA sense strand
aggaagcagagaacagcaa

SEQ ID NO: 2330234 - RNA, 19 nt, Homo sapiens
  misc_RNA (1)...(19): siRNA sense strand
ccaaaguacuggacagagc

SEQ ID NO: 2330235 - RNA, 19 nt, Homo sapiens
  misc_RNA (1)...(19): siRNA sense strand
cauuauuuggagugaacuu

SEQ ID NO: 2330236 - RNA, 19 nt, Homo sapiens
  misc_RNA (1)...(19): siRNA sense strand
ugaaaggaugaaagaaagu

SEQ ID NO: 2330237 - RNA, 19 nt, Homo sapiens
  misc_RNA (1)...(19): siRNA sense strand
gcagagaacagcaagucca

SEQ ID NO: 2330238 - RNA, 19 nt, Homo sapiens
  misc_RNA (1)...(19): siRNA sense strand
acaaaagcaucgaguagau

SEQ ID NO: 2330239 - RNA, 19 nt, Homo sapiens
  misc_RNA (1)...(19): siRNA sense strand
agagucugcaagaaagaua

SEQ ID NO: 2330240 - RNA, 19 nt, Homo sapiens
  misc_RNA (1)...(19): siRNA sense strand
ccagcuuucaccaguguaa

SEQ ID NO: 2330241 - RNA, 19 nt, Homo sapiens
  misc_RNA (1)...(19): siRNA sense strand
gaggauugcaagagagaaa

SEQ ID NO: 2330242 - RNA, 19 nt, Homo sapiens
  misc_RNA (1)...(19): siRNA sense strand
ccauuaaguguuacagaaa

SEQ ID NO: 2330243 - RNA, 19 nt, Homo sapiens
  misc_RNA (1)...(19): siRNA sense strand
cuugaggguuacagggaaa

SEQ ID NO: 2330244 - RNA, 19 nt, Homo sapiens
  misc_RNA (1)...(19): siRNA sense strand
cgguagagaauuugaauga

SEQ ID NO: 2330245 - RNA, 19 nt, Homo sapiens
  misc_RNA (1)...(19): siRNA sense strand
ggaaggaacaucagcggua

SEQ ID NO: 2330246 - RNA, 19 nt, Homo sapiens
  misc_RNA (1)...(19): siRNA sense strand
aggaagaagcuuaugaauu

SEQ ID NO: 2330247 - RNA, 19 nt, Homo sapiens
  misc_RNA (1)...(19): siRNA sense strand
gaaucaaguucuucgggaa

SEQ ID NO: 2330248 - RNA, 19 nt, Homo sapiens
  misc_RNA (1)...(19): siRNA sense strand
uggugaagcacuuaagaaa

SEQ ID NO: 2330249 - RNA, 19 nt, Homo sapiens
  misc_RNA (1)...(19): siRNA sense strand
cuauaagcaugcuggaaau

SEQ ID NO: 2330250 - RNA, 19 nt, Homo sapiens
  misc_RNA (1)...(19): siRNA sense strand
aagaguuaguaguagguua

SEQ ID NO: 2330251 - RNA, 19 nt, Homo sapiens
  misc_RNA (1)...(19): siRNA sense strand
agaagaaaccaaaggggaa

SEQ ID NO: 2330252 - RNA, 19 nt, Homo sapiens
  misc_RNA (1)...(19): siRNA sense strand
ucuauaagcaugcuggaaa

SEQ ID NO: 2330253 - RNA, 19 nt, Homo sapiens
  misc_RNA (1)...(19): siRNA sense strand
gugcaaaauacaugcuaaa

SEQ ID NO: 2330254 - RNA, 19 nt, Homo sapiens
  misc_RNA (1)...(19): siRNA sense strand
gcucaaaguuuacaaggga

SEQ ID NO: 2330255 - RNA, 19 nt, Homo sapiens
  misc_RNA (1)...(19): siRNA sense strand
auagagaagcuuuggaaca

SEQ ID NO: 2330256 - RNA, 19 nt, Homo sapiens
  misc_RNA (1)...(19): siRNA sense strand
agacaagaaguaugaugaa

SEQ ID NO: 2330257 - RNA, 19 nt, Homo sapiens
  misc_RNA (1)...(19): siRNA sense strand
ggugaagcacuuaagaaau

SEQ ID NO: 2330258 - RNA, 19 nt, Homo sapiens
  misc_RNA (1)...(19): siRNA sense strand
gcugaagaaaugugcucaa

SEQ ID NO: 2330259 - RNA, 19 nt, Homo sapiens
  misc_RNA (1)...(19): siRNA sense strand
acaagguggauuaugaaua

SEQ ID NO: 2330260 - RNA, 19 nt, Homo sapiens
  misc_RNA (1)...(19): siRNA sense strand
acaaagaaaagguggcaau

SEQ ID NO: 2330261 - RNA, 19 nt, Homo sapiens
  misc_RNA (1)...(19): siRNA sense strand
cgaccugcgcagagagcau

SEQ ID NO: 2330262 - RNA, 19 nt, Homo sapiens
  misc_RNA (1)...(19): siRNA sense strand
agaguuaguaguagguuau

SEQ ID NO: 2330263 - RNA, 19 nt, Homo sapiens
  misc_RNA (1)...(19): siRNA sense strand
cagacaagaaguaugauga

SEQ ID NO: 2330264 - RNA, 19 nt, Homo sapiens
  misc_RNA (1)...(19): siRNA sense strand
uggcacaacauuaugacaa

SEQ ID NO: 2330265 - RNA, 19 nt, Homo sapiens
  misc_RNA (1)...(19): siRNA sense strand
guuuacaagggaaggaaca

SEQ ID NO: 2330266 - RNA, 19 nt, Homo sapiens
  misc_RNA (1)...(19): siRNA sense strand
gauucaaaugcgagaucuu

SEQ ID NO: 2330267 - RNA, 19 nt, Homo sapiens
  misc_RNA (1)...(19): siRNA sense strand
auuaugaaauggcagcaaa

SEQ ID NO: 2330268 - RNA, 19 nt, Homo sapiens
  misc_RNA (1)...(19): siRNA sense strand
uggcaaucauagaagaguu

SEQ ID NO: 2330269 - RNA, 19 nt, Homo sapiens
  misc_RNA (1)...(19): siRNA sense strand
caucuauugcuuuggagua

SEQ ID NO: 2330270 - RNA, 19 nt, Homo sapiens
  misc_RNA (1)...(19): siRNA sense strand
ucccaaauuugcagagcau

SEQ ID NO: 2330271 - RNA, 19 nt, Homo sapiens
  misc_RNA (1)...(19): siRNA sense strand
cugcaagguggauggauga

SEQ ID NO: 2330272 - RNA, 19 nt, Homo sapiens
  misc_RNA (1)...(19): siRNA sense strand
auuacaaaggcuuggaaaa

SEQ ID NO: 2330273 - RNA, 19 nt, Homo sapiens
  misc_RNA (1)...(19): siRNA sense strand
ucguagagguuugagaaau

SEQ ID NO: 2330274 - RNA, 19 nt, Homo sapiens
  misc_RNA (1)...(19): siRNA sense strand
guuaguaguagguuaugaa

SEQ ID NO: 2330275 - RNA, 19 nt, Homo sapiens
  misc_RNA (1)...(19): siRNA sense strand
cuucaaaucuuaagggacc

SEQ ID NO: 2330276 - RNA, 19 nt, Homo sapiens
  misc_RNA (1)...(19): siRNA sense strand
gcugcaagguggauggaug

SEQ ID NO: 2330277 - RNA, 19 nt, Homo sapiens
  misc_RNA (1)...(19): siRNA sense strand
guuacagggaaacgaggua

SEQ ID NO: 2330278 - RNA, 19 nt, Homo sapiens
  misc_RNA (1)...(19): siRNA sense strand
auggagaaaccuuggcuau

SEQ ID NO: 2330279 - RNA, 19 nt, Homo sapiens
  misc_RNA (1)...(19): siRNA sense strand
cuauagagaagcuuuggaa

SEQ ID NO: 2330280 - RNA, 19 nt, Homo sapiens
  misc_RNA (1)...(19): siRNA sense strand
ugauuaaagaagcugaaga

SEQ ID NO: 2330281 - RNA, 19 nt, Homo sapiens
  misc_RNA (1)...(19): siRNA sense strand
cgugaaagcuaaaaucuau

SEQ ID NO: 2330282 - RNA, 19 nt, Homo sapiens
  misc_RNA (1)...(19): siRNA sense strand
cuaaaaugggauaaagaca

SEQ ID NO: 2330283 - RNA, 19 nt, Homo sapiens
  misc_RNA (1)...(19): siRNA sense strand
gaggauugcaagagagaaa

SEQ ID NO: 2330284 - RNA, 19 nt, Homo sapiens
  misc_RNA (1)...(19): siRNA sense strand
gcugaaauuuauagagcaa

SEQ ID NO: 2330285 - RNA, 19 nt, Homo sapiens
  misc_RNA (1)...(19): siRNA sense strand
aagaaaagcagcagagaaa

SEQ ID NO: 2330286 - RNA, 19 nt, Homo sapiens
  misc_RNA (1)...(19): siRNA sense strand
agaacuuauuccagagaaa

SEQ ID NO: 2330287 - RNA, 19 nt, Homo sapiens
  misc_RNA (1)...(19): siRNA sense strand
ccauuaaguguuacagaaa

SEQ ID NO: 2330288 - RNA, 19 nt, Homo sapiens
  misc_RNA (1)...(19): siRNA sense strand
cuugaggguuacagggaaa

SEQ ID NO: 2330289 - RNA, 19 nt, Homo sapiens
  misc_RNA (1)...(19): siRNA sense strand
gugaagaacaagauagaga

SEQ ID NO: 2330290 - RNA, 19 nt, Homo sapiens
  misc_RNA (1)...(19): siRNA sense strand
agaacuuggugaagaacaa

SEQ ID NO: 2330291 - RNA, 19 nt, Homo sapiens
  misc_RNA (1)...(19): siRNA sense strand
agaacaagauagagacuca

SEQ ID NO: 2330292 - RNA, 19 nt, Homo sapiens
  misc_RNA (1)...(19): siRNA sense strand
cgguagagaauuugaauga

SEQ ID NO: 2330293 - RNA, 19 nt, Homo sapiens
  misc_RNA (1)...(19): siRNA sense strand
ggaaggaacaucagcggua

SEQ ID NO: 2330294 - RNA, 19 nt, Homo sapiens
  misc_RNA (1)...(19): siRNA sense strand
aggaagaagcuuaugaauu

SEQ ID NO: 2330295 - RNA, 19 nt, Homo sapiens
  misc_RNA (1)...(19): siRNA sense strand
gaaucaaguucuucgggaa

SEQ ID NO: 2330296 - RNA, 19 nt, Homo sapiens
  misc_RNA (1)...(19): siRNA sense strand
uggugaagcacuuaagaaa

SEQ ID NO: 2330297 - RNA, 19 nt, Homo sapiens
  misc_RNA (1)...(19): siRNA sense strand
cuauaagcaugcuggaaau

SEQ ID NO: 2330298 - RNA, 19 nt, Homo sapiens
  misc_RNA (1)...(19): siRNA sense strand
aagaguuaguaguagguua

SEQ ID NO: 2330299 - RNA, 19 nt, Homo sapiens
  misc_RNA (1)...(19): siRNA sense strand
agaagaaggaugaugauga

SEQ ID NO: 2330300 - RNA, 19 nt, Homo sapiens
  misc_RNA (1)...(19): siRNA sense strand
ggagauaggagguccaaaa

SEQ ID NO: 2330301 - RNA, 19 nt, Homo sapiens
  misc_RNA (1)...(19): siRNA sense strand
aagaauugcuauagagauc

SEQ ID NO: 2330302 - RNA, 19 nt, Homo sapiens
  misc_RNA (1)...(19): siRNA sense strand
cugcagugugugaaaguaa

SEQ ID NO: 2330303 - RNA, 19 nt, Homo sapiens
  misc_RNA (1)...(19): siRNA sense strand
agaagaaaccaaaggggaa

SEQ ID NO: 2330304 - RNA, 19 nt, Homo sapiens
  misc_RNA (1)...(19): siRNA sense strand
uaaacaaagaagagcucaa

SEQ ID NO: 2330305 - RNA, 19 nt, Homo sapiens
  misc_RNA (1)...(19): siRNA sense strand
cguugaagaacuuggugaa

SEQ ID NO: 2330306 - RNA, 19 nt, Homo sapiens
  misc_RNA (1)...(19): siRNA sense strand
ucuauaagcaugcuggaaa

SEQ ID NO: 2330307 - RNA, 19 nt, Homo sapiens
  misc_RNA (1)...(19): siRNA sense strand
gugcaaaauacaugcuaaa

SEQ ID NO: 2330308 - RNA, 19 nt, Homo sapiens
  misc_RNA (1)...(19): siRNA sense strand
gcucaaaguuuacaaggga

SEQ ID NO: 2330309 - RNA, 19 nt, Homo sapiens
  misc_RNA (1)...(19): siRNA sense strand
auagagaagcuuuggaaca

SEQ ID NO: 2330310 - RNA, 19 nt, Homo sapiens
  misc_RNA (1)...(19): siRNA sense strand
ccuaggagacuguaaagaa

SEQ ID NO: 2330311 - RNA, 19 nt, Homo sapiens
  misc_RNA (1)...(19): siRNA sense strand
agacaagaaguaugaugaa

SEQ ID NO: 2330312 - RNA, 19 nt, Homo sapiens
  misc_RNA (1)...(19): siRNA sense strand
ggugaagcacuuaagaaau

SEQ ID NO: 2330313 - RNA, 19 nt, Homo sapiens
  misc_RNA (1)...(19): siRNA sense strand
ugauacaguuagaacagua

SEQ ID NO: 2330314 - RNA, 19 nt, Homo sapiens
  misc_RNA (1)...(19): siRNA sense strand
gcugaagaaaugugcucaa

SEQ ID NO: 2330315 - RNA, 19 nt, Homo sapiens
  misc_RNA (1)...(19): siRNA sense strand
cuucaaggcagcaagaauu

SEQ ID NO: 2330316 - RNA, 19 nt, Homo sapiens
  misc_RNA (1)...(19): siRNA sense strand
gcuaaagaagcuacguaau

SEQ ID NO: 2330317 - RNA, 19 nt, Homo sapiens
  misc_RNA (1)...(19): siRNA sense strand
agaacuggccaaugaaauu

SEQ ID NO: 2330318 - RNA, 19 nt, Homo sapiens
  misc_RNA (1)...(19): siRNA sense strand
acaagguggauuaugaaua

SEQ ID NO: 2330319 - RNA, 19 nt, Homo sapiens
  misc_RNA (1)...(19): siRNA sense strand
auaaagaacacgaagcuga

SEQ ID NO: 2330320 - RNA, 19 nt, Homo sapiens
  misc_RNA (1)...(19): siRNA sense strand
gcagcagagaaaucagaaa

SEQ ID NO: 2330321 - RNA, 19 nt, Homo sapiens
  misc_RNA (1)...(19): siRNA sense strand
cuguaaagaagcugcugaa

SEQ ID NO: 2330322 - RNA, 19 nt, Homo sapiens
  misc_RNA (1)...(19): siRNA sense strand
augaagaggauaugaagau

SEQ ID NO: 2330323 - RNA, 19 nt, Homo sapiens
  misc_RNA (1)...(19): siRNA sense strand
cugcagaagcugaagaacu

SEQ ID NO: 2330324 - RNA, 19 nt, Homo sapiens
  misc_RNA (1)...(19): siRNA sense strand
acaaagaaaagguggcaau

SEQ ID NO: 2330325 - RNA, 19 nt, Homo sapiens
  misc_RNA (1)...(19): siRNA sense strand
cagauuaucagcugccaaa

SEQ ID NO: 2330326 - RNA, 19 nt, Homo sapiens
  misc_RNA (1)...(19): siRNA sense strand
ggcaacaacacuugaugaa

SEQ ID NO: 2330327 - RNA, 19 nt, Homo sapiens
  misc_RNA (1)...(19): siRNA sense strand
cgaccugcgcagagagcau

SEQ ID NO: 2330328 - RNA, 19 nt, Homo sapiens
  misc_RNA (1)...(19): siRNA sense strand
cugagaaggaagaggaaga

SEQ ID NO: 2330329 - RNA, 19 nt, Homo sapiens
  misc_RNA (1)...(19): siRNA sense strand
gggaaauagcccugcccaa

SEQ ID NO: 2330330 - RNA, 19 nt, Homo sapiens
  misc_RNA (1)...(19): siRNA sense strand
cagcgguacccaaggacaa

SEQ ID NO: 2330331 - RNA, 19 nt, Homo sapiens
  misc_RNA (1)...(19): siRNA sense strand
agacgagagugaaggggaa

SEQ ID NO: 2330332 - RNA, 19 nt, Homo sapiens
  misc_RNA (1)...(19): siRNA sense strand
aggaagaggaagaccugua

SEQ ID NO: 2330333 - RNA, 19 nt, Homo sapiens
  misc_RNA (1)...(19): siRNA sense strand
ccaacaacuggcagcggua

SEQ ID NO: 2330334 - RNA, 19 nt, Homo sapiens
  misc_RNA (1)...(19): siRNA sense strand
guacguuccucaugagcca

SEQ ID NO: 2330335 - RNA, 19 nt, Homo sapiens
  misc_RNA (1)...(19): siRNA sense strand
gggaaccagugauggagga

SEQ ID NO: 2330336 - RNA, 19 nt, Homo sapiens
  misc_RNA (1)...(19): siRNA sense strand
aagcaauaccugacagcaa

SEQ ID NO: 2330337 - RNA, 19 nt, Homo sapiens
  misc_RNA (1)...(19): siRNA sense strand
aaaggaagggagaggaaaa

SEQ ID NO: 2330338 - RNA, 19 nt, Homo sapiens
  misc_RNA (1)...(19): siRNA sense strand
uggaaagugccuugacaau

SEQ ID NO: 2330339 - RNA, 19 nt, Homo sapiens
  misc_RNA (1)...(19): siRNA sense strand
gcaaagaaaucccagagca

SEQ ID NO: 2330340 - RNA, 19 nt, Homo sapiens
  misc_RNA (1)...(19): siRNA sense strand
ccgagaaauaauacagcau

SEQ ID NO: 2330341 - RNA, 19 nt, Homo sapiens
  misc_RNA (1)...(19): siRNA sense strand
agcgaaaaguccaagauaa

SEQ ID NO: 2330342 - RNA, 19 nt, Homo sapiens
  misc_RNA (1)...(19): siRNA sense strand
guaaagaagcaauaccuga

SEQ ID NO: 2330343 - RNA, 19 nt, Homo sapiens
  misc_RNA (1)...(19): siRNA sense strand
caugcacgaagaagggaaa

SEQ ID NO: 2330344 - RNA, 19 nt, Homo sapiens
  misc_RNA (1)...(19): siRNA sense strand
aacacggguccgagaaaua

SEQ ID NO: 2330345 - RNA, 19 nt, Homo sapiens
  misc_RNA (1)...(19): siRNA sense strand
gcaugaagcagauuggagu

SEQ ID NO: 2330346 - RNA, 19 nt, Homo sapiens
  misc_RNA (1)...(19): siRNA sense strand
agauaaacagaaaucggua

SEQ ID NO: 2330347 - RNA, 19 nt, Homo sapiens
  misc_RNA (1)...(19): siRNA sense strand
agaauuggcaugaagcaga

SEQ ID NO: 2330348 - RNA, 19 nt, Homo sapiens
  misc_RNA (1)...(19): siRNA sense strand
ccaugcacgaagaagggaa

SEQ ID NO: 2330349 - RNA, 19 nt, Homo sapiens
  misc_RNA (1)...(19): siRNA sense strand
aaaacaaacagcagcagaa

SEQ ID NO: 2330350 - RNA, 19 nt, Homo sapiens
  misc_RNA (1)...(19): siRNA sense strand
cuauggagugugucaguau

SEQ ID NO: 2330351 - RNA, 19 nt, Homo sapiens
  misc_RNA (1)...(19): siRNA sense strand
cagcagcagaagaagcgaa

SEQ ID NO: 2330352 - RNA, 19 nt, Homo sapiens
  misc_RNA (1)...(19): siRNA sense strand
uguacagugcaaaggaaga

SEQ ID NO: 2330353 - RNA, 19 nt, Homo sapiens
  misc_RNA (1)...(19): siRNA sense strand
gcgaaauaguggaguggau

SEQ ID NO: 2330354 - RNA, 19 nt, Homo sapiens
  misc_RNA (1)...(19): siRNA sense strand
guggaguaucugagaaaua

SEQ ID NO: 2330355 - RNA, 19 nt, Homo sapiens
  misc_RNA (1)...(19): siRNA sense strand
cgguggaguaucugagaaa

SEQ ID NO: 2330356 - RNA, 19 nt, Homo sapiens
  misc_RNA (1)...(19): siRNA sense strand
caguuaacguccugggauu

SEQ ID NO: 2330357 - RNA, 19 nt, Homo sapiens
  misc_RNA (1)...(19): siRNA sense strand
ggaccaagaaugaggacga

SEQ ID NO: 2330358 - RNA, 19 nt, Homo sapiens
  misc_RNA (1)...(19): siRNA sense strand
aaauaaaguccaagggcuu

SEQ ID NO: 2330359 - RNA, 19 nt, Homo sapiens
  misc_RNA (1)...(19): siRNA sense strand
gggaagaauaccaggaacu

SEQ ID NO: 2330360 - RNA, 19 nt, Homo sapiens
  misc_RNA (1)...(19): siRNA sense strand
gcacuaaagaaaauggaaa

SEQ ID NO: 2330361 - RNA, 19 nt, Homo sapiens
  misc_RNA (1)...(19): siRNA sense strand
uuacgaaccuuguggaaaa

SEQ ID NO: 2330362 - RNA, 19 nt, Homo sapiens
  misc_RNA (1)...(19): siRNA sense strand
ccaagaaugaggacgagaa

SEQ ID NO: 2330363 - RNA, 19 nt, Homo sapiens
  misc_RNA (1)...(19): siRNA sense strand
aggagagaaggaugagaaa

SEQ ID NO: 2330364 - RNA, 19 nt, Homo sapiens
  misc_RNA (1)...(19): siRNA sense strand
ggaaaagacucuaagcaca

SEQ ID NO: 2330365 - RNA, 19 nt, Homo sapiens
  misc_RNA (1)...(19): siRNA sense strand
gcucagaaagaguguaaca

SEQ ID NO: 2330366 - RNA, 19 nt, Homo sapiens
  misc_RNA (1)...(19): siRNA sense strand
agaaugaggacgagaagga

SEQ ID NO: 2330367 - RNA, 19 nt, Homo sapiens
  misc_RNA (1)...(19): siRNA sense strand
aggaguaggaggaaagaca

SEQ ID NO: 2330368 - RNA, 19 nt, Homo sapiens
  misc_RNA (1)...(19): siRNA sense strand
aggagaagacguuuacaaa

SEQ ID NO: 2330369 - RNA, 19 nt, Homo sapiens
  misc_RNA (1)...(19): siRNA sense strand
aggaaggagagaaggauga

SEQ ID NO: 2330370 - RNA, 19 nt, Homo sapiens
  misc_RNA (1)...(19): siRNA sense strand
cuucuuauaucaugggcua

SEQ ID NO: 2330371 - RNA, 19 nt, Homo sapiens
  misc_RNA (1)...(19): siRNA sense strand
gacaaagacuugaaagcca

SEQ ID NO: 2330372 - RNA, 19 nt, Homo sapiens
  misc_RNA (1)...(19): siRNA sense strand
acagugaggaauauggaaa

SEQ ID NO: 2330373 - RNA, 19 nt, Homo sapiens
  misc_RNA (1)...(19): siRNA sense strand
aggaaagacacgacuggaa

SEQ ID NO: 2330374 - RNA, 19 nt, Homo sapiens
  misc_RNA (1)...(19): siRNA sense strand
ggucagcacuaaagaaaau

SEQ ID NO: 2330375 - RNA, 19 nt, Homo sapiens
  misc_RNA (1)...(19): siRNA sense strand
aacaaaaccuggaugaaaa

SEQ ID NO: 2330376 - RNA, 19 nt, Homo sapiens
  misc_RNA (1)...(19): siRNA sense strand
ggagagaaggggagcagaa

SEQ ID NO: 2330377 - RNA, 19 nt, Homo sapiens
  misc_RNA (1)...(19): siRNA sense strand
aagcugagaagguggaauu

SEQ ID NO: 2330378 - RNA, 19 nt, Homo sapiens
  misc_RNA (1)...(19): siRNA sense strand
cuggagaggguguaacaaa

SEQ ID NO: 2330379 - RNA, 19 nt, Homo sapiens
  misc_RNA (1)...(19): siRNA sense strand
gaggaugauuugggaacaa

SEQ ID NO: 2330380 - RNA, 19 nt, Homo sapiens
  misc_RNA (1)...(19): siRNA sense strand
gugcucagaaagaguguaa

SEQ ID NO: 2330381 - RNA, 19 nt, Homo sapiens
  misc_RNA (1)...(19): siRNA sense strand
gagaaggggagcagaaaau

SEQ ID NO: 2330382 - RNA, 19 nt, Homo sapiens
  misc_RNA (1)...(19): siRNA sense strand
augaaaggguagugaucca

SEQ ID NO: 2330383 - RNA, 19 nt, Homo sapiens
  misc_RNA (1)...(19): siRNA sense strand
uggaaaggagacugaagua

SEQ ID NO: 2330384 - RNA, 19 nt, Homo sapiens
  misc_RNA (1)...(19): siRNA sense strand
caguauuggccaacagaga

SEQ ID NO: 2330385 - RNA, 19 nt, Homo sapiens
  misc_RNA (1)...(19): siRNA sense strand
gggaggauggaguggauca

SEQ ID NO: 2330386 - RNA, 19 nt, Homo sapiens
  misc_RNA (1)...(19): siRNA sense strand
ccuugaagcuacacaggau

SEQ ID NO: 2330387 - RNA, 19 nt, Homo sapiens
  misc_RNA (1)...(19): siRNA sense strand
cgacaugcgcagcgacuuu

SEQ ID NO: 2330388 - RNA, 19 nt, Homo sapiens
  misc_RNA (1)...(19): siRNA sense strand
cgaggaggauggagagaag

SEQ ID NO: 2330389 - RNA, 19 nt, Homo sapiens
  misc_RNA (1)...(19): siRNA sense strand
ccagaaaacaagcacaaaa

SEQ ID NO: 2330390 - RNA, 19 nt, Homo sapiens
  misc_RNA (1)...(19): siRNA sense strand
cuggccaagucgagaagaa

SEQ ID NO: 2330391 - RNA, 19 nt, Homo sapiens
  misc_RNA (1)...(19): siRNA sense strand
augucaagucgguggagua

SEQ ID NO: 2330392 - RNA, 19 nt, Homo sapiens
  misc_RNA (1)...(19): siRNA sense strand
ccgaggaaggagagaagga

SEQ ID NO: 2330393 - RNA, 19 nt, Homo sapiens
  misc_RNA (1)...(19): siRNA sense strand
ucccaagggucgucagaau

SEQ ID NO: 2330394 - RNA, 19 nt, Homo sapiens
  misc_RNA (1)...(19): siRNA sense strand
gcaacagauaaaagacaaa

SEQ ID NO: 2330395 - RNA, 19 nt, Homo sapiens
  misc_RNA (1)...(19): siRNA sense strand
ucccaugacaguagacaaa

SEQ ID NO: 2330396 - RNA, 19 nt, Homo sapiens
  misc_RNA (1)...(19): siRNA sense strand
ccacagaggccuuggcuuc

SEQ ID NO: 2330397 - RNA, 19 nt, Homo sapiens
  misc_RNA (1)...(19): siRNA sense strand
gcaugcugcaacagauaaa

SEQ ID NO: 2330398 - RNA, 19 nt, Homo sapiens
  misc_RNA (1)...(19): siRNA sense strand
cagaugacuuugacagcuu

SEQ ID NO: 2330399 - RNA, 19 nt, Homo sapiens
  misc_RNA (1)...(19): siRNA sense strand
aaggagagaaggaugagaa

SEQ ID NO: 2330400 - RNA, 19 nt, Homo sapiens
  misc_RNA (1)...(19): siRNA sense strand
ccuuauaccaggaguagga

SEQ ID NO: 2330401 - RNA, 19 nt, Homo sapiens
  misc_RNA (1)...(19): siRNA sense strand
gagagaaggacuccgaaaa

SEQ ID NO: 2330402 - RNA, 19 nt, Homo sapiens
  misc_RNA (1)...(19): siRNA sense strand
ccucucuaaugaagaacaa

SEQ ID NO: 2330403 - RNA, 19 nt, Homo sapiens
  misc_RNA (1)...(19): siRNA sense strand
acgaaaaugugaucaguau

SEQ ID NO: 2330404 - RNA, 19 nt, Homo sapiens
  misc_RNA (1)...(19): siRNA sense strand
cagcaacuggagaaugaaa

SEQ ID NO: 2330405 - RNA, 19 nt, Homo sapiens
  misc_RNA (1)...(19): siRNA sense strand
gauucaaagcugagaaggu

SEQ ID NO: 2330406 - RNA, 19 nt, Homo sapiens
  misc_RNA (1)...(19): siRNA sense strand
ggaaaggagacugaaguau

SEQ ID NO: 2330407 - RNA, 19 nt, Homo sapiens
  misc_RNA (1)...(19): siRNA sense strand
cagaauaaucggagccaug

SEQ ID NO: 2330408 - RNA, 19 nt, Homo sapiens
  misc_RNA (1)...(19): siRNA sense strand
cacaguagggugaaguuaa

SEQ ID NO: 2330409 - RNA, 19 nt, Homo sapiens
  misc_RNA (1)...(19): siRNA sense strand
ugggauuccugaagcauau

SEQ ID NO: 2330410 - RNA, 19 nt, Homo sapiens
  misc_RNA (1)...(19): siRNA sense strand
cgagaagaauccaugaacu

SEQ ID NO: 2330411 - RNA, 19 nt, Homo sapiens
  misc_RNA (1)...(19): siRNA sense strand
caguucaucuauaaagcaa

SEQ ID NO: 2330412 - RNA, 19 nt, Homo sapiens
  misc_RNA (1)...(19): siRNA sense strand
uggagaggguguaacaaaa

SEQ ID NO: 2330413 - RNA, 19 nt, Homo sapiens
  misc_RNA (1)...(19): siRNA sense strand
gguccugagcacuggguca

SEQ ID NO: 2330414 - RNA, 19 nt, Homo sapiens
  misc_RNA (1)...(19): siRNA sense strand
cgucagaaugaaaggguag

SEQ ID NO: 2330415 - RNA, 19 nt, Homo sapiens
  misc_RNA (1)...(19): siRNA sense strand
gauaaaagacaaaagcaca

SEQ ID NO: 2330416 - RNA, 19 nt, Homo sapiens
  misc_RNA (1)...(19): siRNA sense strand
gguugaagggugucguaca

SEQ ID NO: 2330417 - RNA, 19 nt, Homo sapiens
  misc_RNA (1)...(19): siRNA sense strand
uacaaaggacagcgacaaa

SEQ ID NO: 2330418 - RNA, 19 nt, Homo sapiens
  misc_RNA (1)...(19): siRNA sense strand
gagagaaggaugagaaaag

SEQ ID NO: 2330419 - RNA, 19 nt, Homo sapiens
  misc_RNA (1)...(19): siRNA sense strand
guuaagaccuuuaccagga

SEQ ID NO: 2330420 - RNA, 19 nt, Homo sapiens
  misc_RNA (1)...(19): siRNA sense strand
gaaugaaaggguagugauc

SEQ ID NO: 2330421 - RNA, 19 nt, Homo sapiens
  misc_RNA (1)...(19): siRNA sense strand
auaucaggacacagcguaa

SEQ ID NO: 2330422 - RNA, 19 nt, Homo sapiens
  misc_RNA (1)...(19): siRNA sense strand
uggaagccauucuuggaaa

SEQ ID NO: 2330423 - RNA, 19 nt, Homo sapiens
  misc_RNA (1)...(19): siRNA sense strand
cuggagaacgggaaggaga

SEQ ID NO: 2330424 - RNA, 19 nt, Homo sapiens
  misc_RNA (1)...(19): siRNA sense strand
gcuacuacaaccagagcga

SEQ ID NO: 2330425 - RNA, 19 nt, Homo sapiens
  misc_RNA (1)...(19): siRNA sense strand
gcggagcaguugagagccu

SEQ ID NO: 2330426 - RNA, 19 nt, Homo sapiens
  misc_RNA (1)...(19): siRNA sense strand
gcagauaccuggagaacgg

SEQ ID NO: 2330427 - RNA, 19 nt, Homo sapiens
  misc_RNA (1)...(19): siRNA sense strand
cugcagaaccugagcuaca

SEQ ID NO: 2330428 - RNA, 19 nt, Homo sapiens
  misc_RNA (1)...(19): siRNA sense strand
ggaaggacaugaugagcga

SEQ ID NO: 2330429 - RNA, 19 nt, Homo sapiens
  misc_RNA (1)...(19): siRNA sense strand
aggagaagauucagccaga

SEQ ID NO: 2330430 - RNA, 19 nt, Homo sapiens
  misc_RNA (1)...(19): siRNA sense strand
uggaccaguucaagagcaa

SEQ ID NO: 2330431 - RNA, 19 nt, Homo sapiens
  misc_RNA (1)...(19): siRNA sense strand
cagaaaucuuagagcugau

SEQ ID NO: 2330432 - RNA, 19 nt, Homo sapiens
  misc_RNA (1)...(19): siRNA sense strand
uggugaaggagcagguuau

SEQ ID NO: 2330433 - RNA, 19 nt, Homo sapiens
  misc_RNA (1)...(19): siRNA sense strand
aacuaaaggagaagauuca

SEQ ID NO: 2330434 - RNA, 19 nt, Homo sapiens
  misc_RNA (1)...(19): siRNA sense strand
ggauggacugaaugcgcua

SEQ ID NO: 2330435 - RNA, 19 nt, Homo sapiens
  misc_RNA (1)...(19): siRNA sense strand
gcacuuacaaccaagccua

SEQ ID NO: 2330436 - RNA, 19 nt, Homo sapiens
  misc_RNA (1)...(19): siRNA sense strand
cccucauaugaaagagaaa

SEQ ID NO: 2330437 - RNA, 19 nt, Homo sapiens
  misc_RNA (1)...(19): siRNA sense strand
aagagaguccucagggaga

SEQ ID NO: 2330438 - RNA, 19 nt, Homo sapiens
  misc_RNA (1)...(19): siRNA sense strand
agaggaugaaccaggaaga

SEQ ID NO: 2330439 - RNA, 19 nt, Homo sapiens
  misc_RNA (1)...(19): siRNA sense strand
ccugcauuacggagacuua

SEQ ID NO: 2330440 - RNA, 19 nt, Homo sapiens
  misc_RNA (1)...(19): siRNA sense strand
uggaacuaaaggagaagau

SEQ ID NO: 2330441 - RNA, 19 nt, Homo sapiens
  misc_RNA (1)...(19): siRNA sense strand
agaagagaguccucaggga

SEQ ID NO: 2330442 - RNA, 19 nt, Homo sapiens
  misc_RNA (1)...(19): siRNA sense strand
cugcagaaccugagcuaca

SEQ ID NO: 2330443 - RNA, 19 nt, Homo sapiens
  misc_RNA (1)...(19): siRNA sense strand
ggaaggacaugaugagcga

SEQ ID NO: 2330444 - RNA, 19 nt, Homo sapiens
  misc_RNA (1)...(19): siRNA sense strand
aggagaagauucagccaga

SEQ ID NO: 2330445 - RNA, 19 nt, Homo sapiens
  misc_RNA (1)...(19): siRNA sense strand
uggaccaguucaagagcaa

SEQ ID NO: 2330446 - RNA, 19 nt, Homo sapiens
  misc_RNA (1)...(19): siRNA sense strand
cagaaaucuuagagcugau

SEQ ID NO: 2330447 - RNA, 19 nt, Homo sapiens
  misc_RNA (1)...(19): siRNA sense strand
uggugaaggagcagguuau

SEQ ID NO: 2330448 - RNA, 19 nt, Homo sapiens
  misc_RNA (1)...(19): siRNA sense strand
aacuaaaggagaagauuca

SEQ ID NO: 2330449 - RNA, 19 nt, Homo sapiens
  misc_RNA (1)...(19): siRNA sense strand
ggauggacugaaugcgcua

SEQ ID NO: 2330450 - RNA, 19 nt, Homo sapiens
  misc_RNA (1)...(19): siRNA sense strand
gcacuuacaaccaagccua

SEQ ID NO: 2330451 - RNA, 19 nt, Homo sapiens
  misc_RNA (1)...(19): siRNA sense strand
cccucauaugaaagagaaa

SEQ ID NO: 2330452 - RNA, 19 nt, Homo sapiens
  misc_RNA (1)...(19): siRNA sense strand
aagagaguccucagggaga

SEQ ID NO: 2330453 - RNA, 19 nt, Homo sapiens
  misc_RNA (1)...(19): siRNA sense strand
agaggaugaaccaggaaga

SEQ ID NO: 2330454 - RNA, 19 nt, Homo sapiens
  misc_RNA (1)...(19): siRNA sense strand
ccugcauuacggagacuua

SEQ ID NO: 2330455 - RNA, 19 nt, Homo sapiens
  misc_RNA (1)...(19): siRNA sense strand
uggaacuaaaggagaagau

SEQ ID NO: 2330456 - RNA, 19 nt, Homo sapiens
  misc_RNA (1)...(19): siRNA sense strand
agaagagaguccucaggga

SEQ ID NO: 2330457 - RNA, 19 nt, Homo sapiens
  misc_RNA (1)...(19): siRNA sense strand
ggucaaggccgaaggguuc

SEQ ID NO: 2330458 - RNA, 19 nt, Homo sapiens
  misc_RNA (1)...(19): siRNA sense strand
ucaaggaaguggaggugca

SEQ ID NO: 2330459 - RNA, 19 nt, Homo sapiens
  misc_RNA (1)...(19): siRNA sense strand
uguacgagugcgagaaaca

SEQ ID NO: 2330460 - RNA, 19 nt, Homo sapiens
  misc_RNA (1)...(19): siRNA sense strand
aggucaaggccgaaggguu

SEQ ID NO: 2330461 - RNA, 19 nt, Homo sapiens
  misc_RNA (1)...(19): siRNA sense strand
uggagguuggccagggaaa

SEQ ID NO: 2330462 - RNA, 19 nt, Homo sapiens
  misc_RNA (1)...(19): siRNA sense strand
gcuaucgggauguggucaa

SEQ ID NO: 2330463 - RNA, 19 nt, Homo sapiens
  misc_RNA (1)...(19): siRNA sense strand
gcgagaaacacccacgaga

SEQ ID NO: 2330464 - RNA, 19 nt, Homo sapiens
  misc_RNA (1)...(19): siRNA sense strand
aggaaguggaggugcagga

SEQ ID NO: 2330465 - RNA, 19 nt, Homo sapiens
  misc_RNA (1)...(19): siRNA sense strand
acaccaaguuuguucccaa

SEQ ID NO: 2330466 - RNA, 19 nt, Homo sapiens
  misc_RNA (1)...(19): siRNA sense strand
gggugauccuagggaguga

SEQ ID NO: 2330467 - RNA, 19 nt, Homo sapiens
  misc_RNA (1)...(19): siRNA sense strand
ccaccuauuucucugggaa

SEQ ID NO: 2330468 - RNA, 19 nt, Homo sapiens
  misc_RNA (1)...(19): siRNA sense strand
gauccuucucugagcguuu

SEQ ID NO: 2330469 - RNA, 19 nt, Homo sapiens
  misc_RNA (1)...(19): siRNA sense strand
acuacaaguccuuugguga

SEQ ID NO: 2330470 - RNA, 19 nt, Homo sapiens
  misc_RNA (1)...(19): siRNA sense strand
acaccaaguuuguucccaa

SEQ ID NO: 2330471 - RNA, 19 nt, Homo sapiens
  misc_RNA (1)...(19): siRNA sense strand
gggugauccuagggaguga

SEQ ID NO: 2330472 - RNA, 19 nt, Homo sapiens
  misc_RNA (1)...(19): siRNA sense strand
ccaccuauuucucugggaa

SEQ ID NO: 2330473 - RNA, 19 nt, Homo sapiens
  misc_RNA (1)...(19): siRNA sense strand
gauccuucucugagcguuu

SEQ ID NO: 2330474 - RNA, 19 nt, Homo sapiens
  misc_RNA (1)...(19): siRNA sense strand
acuacaaguccuuugguga

SEQ ID NO: 2330475 - RNA, 19 nt, Homo sapiens
  misc_RNA (1)...(19): siRNA sense strand
gcugauaaaucgaagccaa

SEQ ID NO: 2330476 - RNA, 19 nt, Homo sapiens
  misc_RNA (1)...(19): siRNA sense strand
auuaaagguucaugggcaa

SEQ ID NO: 2330477 - RNA, 19 nt, Homo sapiens
  misc_RNA (1)...(19): siRNA sense strand
agacgugacaagugauaaa

SEQ ID NO: 2330478 - RNA, 19 nt, Homo sapiens
  misc_RNA (1)...(19): siRNA sense strand
aggaaguuguggagcagua

SEQ ID NO: 2330479 - RNA, 19 nt, Homo sapiens
  misc_RNA (1)...(19): siRNA sense strand
cugauaaaucgaagccaaa

SEQ ID NO: 2330480 - RNA, 19 nt, Homo sapiens
  misc_RNA (1)...(19): siRNA sense strand
cagaaguaccucagacaau

SEQ ID NO: 2330481 - RNA, 19 nt, Homo sapiens
  misc_RNA (1)...(19): siRNA sense strand
cagaggaaguuguggagca

SEQ ID NO: 2330482 - RNA, 19 nt, Homo sapiens
  misc_RNA (1)...(19): siRNA sense strand
cuguaauggcugugaacau

SEQ ID NO: 2330483 - RNA, 19 nt, Homo sapiens
  misc_RNA (1)...(19): siRNA sense strand
cauuaaagguucaugggca

SEQ ID NO: 2330484 - RNA, 19 nt, Homo sapiens
  misc_RNA (1)...(19): siRNA sense strand
ggaaacagcuugaucgucu

SEQ ID NO: 2330485 - RNA, 19 nt, Homo sapiens
  misc_RNA (1)...(19): siRNA sense strand
aagugggaaaggagaguaa

SEQ ID NO: 2330486 - RNA, 19 nt, Homo sapiens
  misc_RNA (1)...(19): siRNA sense strand
ggagcagccaagagagaga

SEQ ID NO: 2330487 - RNA, 19 nt, Homo sapiens
  misc_RNA (1)...(19): siRNA sense strand
guaucuacagagagaggaa

SEQ ID NO: 2330488 - RNA, 19 nt, Homo sapiens
  misc_RNA (1)...(19): siRNA sense strand
cagccaagagagagacaga

SEQ ID NO: 2330489 - RNA, 19 nt, Homo sapiens
  misc_RNA (1)...(19): siRNA sense strand
gugggaaaggagaguaauu

SEQ ID NO: 2330490 - RNA, 19 nt, Homo sapiens
  misc_RNA (1)...(19): siRNA sense strand
uuuguacauuggagggaaa

SEQ ID NO: 2330491 - RNA, 19 nt, Homo sapiens
  misc_RNA (1)...(19): siRNA sense strand
agagagaggaaguggaucu

SEQ ID NO: 2330492 - RNA, 19 nt, Homo sapiens
  misc_RNA (1)...(19): siRNA sense strand
gcgaaaagcugacugccua

SEQ ID NO: 2330493 - RNA, 19 nt, Homo sapiens
  misc_RNA (1)...(19): siRNA sense strand
agacaagaaaggauguuga

SEQ ID NO: 2330494 - RNA, 19 nt, Homo sapiens
  misc_RNA (1)...(19): siRNA sense strand
aguuggacacaaaguaaua

SEQ ID NO: 2330495 - RNA, 19 nt, Homo sapiens
  misc_RNA (1)...(19): siRNA sense strand
ggaagagaguggguggaga

SEQ ID NO: 2330496 - RNA, 19 nt, Homo sapiens
  misc_RNA (1)...(19): siRNA sense strand
gccaagagagagacagaca

SEQ ID NO: 2330497 - RNA, 19 nt, Homo sapiens
  misc_RNA (1)...(19): siRNA sense strand
ugggauagggaaauaacua

SEQ ID NO: 2330498 - RNA, 19 nt, Homo sapiens
  misc_RNA (1)...(19): siRNA sense strand
aaggauaucuugugggaug

SEQ ID NO: 2330499 - RNA, 19 nt, Homo sapiens
  misc_RNA (1)...(19): siRNA sense strand
gcugaguaacaaggagaaa

SEQ ID NO: 2330500 - RNA, 19 nt, Homo sapiens
  misc_RNA (1)...(19): siRNA sense strand
acagcuaaauggugggcca

SEQ ID NO: 2330501 - RNA, 19 nt, Homo sapiens
  misc_RNA (1)...(19): siRNA sense strand
guaacaaggagaaagcuga

SEQ ID NO: 2330502 - RNA, 19 nt, Homo sapiens
  misc_RNA (1)...(19): siRNA sense strand
agugauaaacugaaagacu

SEQ ID NO: 2330503 - RNA, 19 nt, Homo sapiens
  misc_RNA (1)...(19): siRNA sense strand
guugagaaaugguggcauc

SEQ ID NO: 2330504 - RNA, 19 nt, Homo sapiens
  misc_RNA (1)...(19): siRNA sense strand
aaaaggaggcccugguuaa

SEQ ID NO: 2330505 - RNA, 19 nt, Homo sapiens
  misc_RNA (1)...(19): siRNA sense strand
cagaaugguauggaauaaa

SEQ ID NO: 2330506 - RNA, 19 nt, Homo sapiens
  misc_RNA (1)...(19): siRNA sense strand
cagcaaugcccucucgcaa

SEQ ID NO: 2330507 - RNA, 19 nt, Homo sapiens
  misc_RNA (1)...(19): siRNA sense strand
gugaacugcuccugcccaa

SEQ ID NO: 2330508 - RNA, 19 nt, Homo sapiens
  misc_RNA (1)...(19): siRNA sense strand
augccgcagucgagaggaa

SEQ ID NO: 2330509 - RNA, 19 nt, Homo sapiens
  misc_RNA (1)...(19): siRNA sense strand
cuguguuucagcugggaua

SEQ ID NO: 2330510 - RNA, 19 nt, Homo sapiens
  misc_RNA (1)...(19): siRNA sense strand
cauuggagggaaagaacau

SEQ ID NO: 2330511 - RNA, 19 nt, Homo sapiens
  misc_RNA (1)...(19): siRNA sense strand
ugggagaagaugaguaagu

SEQ ID NO: 2330512 - RNA, 19 nt, Homo sapiens
  misc_RNA (1)...(19): siRNA sense strand
ccagaagaugagagggaug

SEQ ID NO: 2330513 - RNA, 19 nt, Homo sapiens
  misc_RNA (1)...(19): siRNA sense strand
caucaagugggaaaggaga

SEQ ID NO: 2330514 - RNA, 19 nt, Homo sapiens
  misc_RNA (1)...(19): siRNA sense strand
ugagagggaugcaggucau

SEQ ID NO: 2330515 - RNA, 19 nt, Homo sapiens
  misc_RNA (1)...(19): siRNA sense strand
acuggaugccuguggauuu

SEQ ID NO: 2330516 - RNA, 19 nt, Homo sapiens
  misc_RNA (1)...(19): siRNA sense strand
cgaaagagaaguuagaggu

SEQ ID NO: 2330517 - RNA, 19 nt, Homo sapiens
  misc_RNA (1)...(19): siRNA sense strand
aguuagaggugacguggga

SEQ ID NO: 2330518 - RNA, 19 nt, Homo sapiens
  misc_RNA (1)...(19): siRNA sense strand
gagaagaugaguaagucca

SEQ ID NO: 2330519 - RNA, 19 nt, Homo sapiens
  misc_RNA (1)...(19): siRNA sense strand
augaguaaguccaaacaca

SEQ ID NO: 2330520 - RNA, 19 nt, Homo sapiens
  misc_RNA (1)...(19): siRNA sense strand
agggagcagccaagagaga

SEQ ID NO: 2330521 - RNA, 19 nt, Homo sapiens
  misc_RNA (1)...(19): siRNA sense strand
ugguacuacuucagauaca

SEQ ID NO: 2330522 - RNA, 19 nt, Homo sapiens
  misc_RNA (1)...(19): siRNA sense strand
guacauuggagggaaagaa

SEQ ID NO: 2330523 - RNA, 19 nt, Homo sapiens
  misc_RNA (1)...(19): siRNA sense strand
gguuaaacauagggagccu

SEQ ID NO: 2330524 - RNA, 19 nt, Homo sapiens
  misc_RNA (1)...(19): siRNA sense strand
ugaguaaguccaaacacaa

SEQ ID NO: 2330525 - RNA, 19 nt, Homo sapiens
  misc_RNA (1)...(19): siRNA sense strand
cugcugaguucacagguau

SEQ ID NO: 2330526 - RNA, 19 nt, Homo sapiens
  misc_RNA (1)...(19): siRNA sense strand
cgacuguggaccuugacaa

SEQ ID NO: 2330527 - RNA, 19 nt, Homo sapiens
  misc_RNA (1)...(19): siRNA sense strand
gcaucaacgaauaaaagaa

SEQ ID NO: 2330528 - RNA, 19 nt, Homo sapiens
  misc_RNA (1)...(19): siRNA sense strand
agacagacacgauggauac

SEQ ID NO: 2330529 - RNA, 19 nt, Homo sapiens
  misc_RNA (1)...(19): siRNA sense strand
ucuacagugccacgggaaa

SEQ ID NO: 2330530 - RNA, 19 nt, Homo sapiens
  misc_RNA (1)...(19): siRNA sense strand
ucauguaaccucagagauc

SEQ ID NO: 2330531 - RNA, 19 nt, Homo sapiens
  misc_RNA (1)...(19): siRNA sense strand
ccgcuuaugcaaaggccau

SEQ ID NO: 2330532 - RNA, 19 nt, Homo sapiens
  misc_RNA (1)...(19): siRNA sense strand
gcacagagagacugagcag

SEQ ID NO: 2330533 - RNA, 19 nt, Homo sapiens
  misc_RNA (1)...(19): siRNA sense strand
gagcaguaugggaucgaca

SEQ ID NO: 2330534 - RNA, 19 nt, Homo sapiens
  misc_RNA (1)...(19): siRNA sense strand
agauggcaguucugaucaa

SEQ ID NO: 2330535 - RNA, 19 nt, Homo sapiens
  misc_RNA (1)...(19): siRNA sense strand
ccagauuacuacaagugga

SEQ ID NO: 2330536 - RNA, 19 nt, Homo sapiens
  misc_RNA (1)...(19): siRNA sense strand
agaaggauaucuuguggga

SEQ ID NO: 2330537 - RNA, 19 nt, Homo sapiens
  misc_RNA (1)...(19): siRNA sense strand
cugcugaguaacaaggaga

SEQ ID NO: 2330538 - RNA, 19 nt, Homo sapiens
  misc_RNA (1)...(19): siRNA sense strand
cuguaaagccaaagaagaa

SEQ ID NO: 2330539 - RNA, 19 nt, Homo sapiens
  misc_RNA (1)...(19): siRNA sense strand
aggcagaugcagaggcaaa

SEQ ID NO: 2330540 - RNA, 19 nt, Homo sapiens
  misc_RNA (1)...(19): siRNA sense strand
uggaagaaguagaaggcca

SEQ ID NO: 2330541 - RNA, 19 nt, Homo sapiens
  misc_RNA (1)...(19): siRNA sense strand
acacagugggacagugaaa

SEQ ID NO: 2330542 - RNA, 19 nt, Homo sapiens
  misc_RNA (1)...(19): siRNA sense strand
cagaaguggcugacgagaa

SEQ ID NO: 2330543 - RNA, 19 nt, Homo sapiens
  misc_RNA (1)...(19): siRNA sense strand
ggaagaaguagaaggccau

SEQ ID NO: 2330544 - RNA, 19 nt, Homo sapiens
  misc_RNA (1)...(19): siRNA sense strand
gggaugacuuugaugccaa

SEQ ID NO: 2330545 - RNA, 19 nt, Homo sapiens
  misc_RNA (1)...(19): siRNA sense strand
gggcaaagaugcaccgucu

SEQ ID NO: 2330546 - RNA, 19 nt, Homo sapiens
  misc_RNA (1)...(19): siRNA sense strand
agaagaaugaccagguauu

SEQ ID NO: 2330547 - RNA, 19 nt, Homo sapiens
  misc_RNA (1)...(19): siRNA sense strand
cuuuaggccucgacgcaaa

SEQ ID NO: 2330548 - RNA, 19 nt, Homo sapiens
  misc_RNA (1)...(19): siRNA sense strand
ccacagggaagcuggaaaa

SEQ ID NO: 2330549 - RNA, 19 nt, Homo sapiens
  misc_RNA (1)...(19): siRNA sense strand
cugaaguugacgagaguga

SEQ ID NO: 2330550 - RNA, 19 nt, Homo sapiens
  misc_RNA (1)...(19): siRNA sense strand
agucaaacuugguagcuga

SEQ ID NO: 2330551 - RNA, 19 nt, Homo sapiens
  misc_RNA (1)...(19): siRNA sense strand
gaaaggaggcagaugcaga

SEQ ID NO: 2330552 - RNA, 19 nt, Homo sapiens
  misc_RNA (1)...(19): siRNA sense strand
caacauauggggagucaaa

SEQ ID NO: 2330553 - RNA, 19 nt, Homo sapiens
  misc_RNA (1)...(19): siRNA sense strand
acacagaacuauugagcag

SEQ ID NO: 2330554 - RNA, 19 nt, Homo sapiens
  misc_RNA (1)...(19): siRNA sense strand
ugaaaugggaacaaccaaa

SEQ ID NO: 2330555 - RNA, 19 nt, Homo sapiens
  misc_RNA (1)...(19): siRNA sense strand
caguuuacacagugggaca

SEQ ID NO: 2330556 - RNA, 19 nt, Homo sapiens
  misc_RNA (1)...(19): siRNA sense strand
acuauugagcagaacauaa

SEQ ID NO: 2330557 - RNA, 19 nt, Homo sapiens
  misc_RNA (1)...(19): siRNA sense strand
agaaugacgaugagaagga

SEQ ID NO: 2330558 - RNA, 19 nt, Homo sapiens
  misc_RNA (1)...(19): siRNA sense strand
augaagaaacugaagcaga

SEQ ID NO: 2330559 - RNA, 19 nt, Homo sapiens
  misc_RNA (1)...(19): siRNA sense strand
ccucagaagguaaauaaaa

SEQ ID NO: 2330560 - RNA, 19 nt, Homo sapiens
  misc_RNA (1)...(19): siRNA sense strand
gaacuauugagcagaacau

SEQ ID NO: 2330561 - RNA, 19 nt, Homo sapiens
  misc_RNA (1)...(19): siRNA sense strand
augaugaagauuuggauga

SEQ ID NO: 2330562 - RNA, 19 nt, Homo sapiens
  misc_RNA (1)...(19): siRNA sense strand
augaagauuuggaugacuu

SEQ ID NO: 2330563 - RNA, 19 nt, Homo sapiens
  misc_RNA (1)...(19): siRNA sense strand
cuccagaagcccaaggauu

SEQ ID NO: 2330564 - RNA, 19 nt, Homo sapiens
  misc_RNA (1)...(19): siRNA sense strand
uuuacaaacacgcagauua

SEQ ID NO: 2330565 - RNA, 19 nt, Homo sapiens
  misc_RNA (1)...(19): siRNA sense strand
gcaccaagaucuaugcugu

SEQ ID NO: 2330566 - RNA, 19 nt, Homo sapiens
  misc_RNA (1)...(19): siRNA sense strand
uggcagaaguggcugacga

SEQ ID NO: 2330567 - RNA, 19 nt, Homo sapiens
  misc_RNA (1)...(19): siRNA sense strand
gcuccuucccaaucagaaa

SEQ ID NO: 2330568 - RNA, 19 nt, Homo sapiens
  misc_RNA (1)...(19): siRNA sense strand
cagcacaacagaaugguga

SEQ ID NO: 2330569 - RNA, 19 nt, Homo sapiens
  misc_RNA (1)...(19): siRNA sense strand
agauggacaugaagaaacu

SEQ ID NO: 2330570 - RNA, 19 nt, Homo sapiens
  misc_RNA (1)...(19): siRNA sense strand
ggauuagacaucacaacau

SEQ ID NO: 2330571 - RNA, 19 nt, Homo sapiens
  misc_RNA (1)...(19): siRNA sense strand
aaacugaagcagagcaugu

SEQ ID NO: 2330572 - RNA, 19 nt, Homo sapiens
  misc_RNA (1)...(19): siRNA sense strand
cggaaaggaggcagaugca

SEQ ID NO: 2330573 - RNA, 19 nt, Homo sapiens
  misc_RNA (1)...(19): siRNA sense strand
agaucggaagugugagauu

SEQ ID NO: 2330574 - RNA, 19 nt, Homo sapiens
  misc_RNA (1)...(19): siRNA sense strand
agaaacugaagcagagcau

SEQ ID NO: 2330575 - RNA, 19 nt, Homo sapiens
  misc_RNA (1)...(19): siRNA sense strand
ggaggcagaugcagaggca

SEQ ID NO: 2330576 - RNA, 19 nt, Homo sapiens
  misc_RNA (1)...(19): siRNA sense strand
agccaaagaagaagcacuu

SEQ ID NO: 2330577 - RNA, 19 nt, Homo sapiens
  misc_RNA (1)...(19): siRNA sense strand
ugguagacaaguuuaagaa

SEQ ID NO: 2330578 - RNA, 19 nt, Homo sapiens
  misc_RNA (1)...(19): siRNA sense strand
gguucagagcugccaggaa

SEQ ID NO: 2330579 - RNA, 19 nt, Homo sapiens
  misc_RNA (1)...(19): siRNA sense strand
aguauugacauuucagcua

SEQ ID NO: 2330580 - RNA, 19 nt, Homo sapiens
  misc_RNA (1)...(19): siRNA sense strand
acagaaagacaccgaacca

SEQ ID NO: 2330581 - RNA, 19 nt, Homo sapiens
  misc_RNA (1)...(19): siRNA sense strand
aagaagaagcacuuacaca

SEQ ID NO: 2330582 - RNA, 19 nt, Homo sapiens
  misc_RNA (1)...(19): siRNA sense strand
gaggcaaaccacagggaag

SEQ ID NO: 2330583 - RNA, 19 nt, Homo sapiens
  misc_RNA (1)...(19): siRNA sense strand
cgaaggaccugcagaggag

SEQ ID NO: 2330584 - RNA, 19 nt, Homo sapiens
  misc_RNA (1)...(19): siRNA sense strand
acaacagaauggugacacu

SEQ ID NO: 2330585 - RNA, 19 nt, Homo sapiens
  misc_RNA (1)...(19): siRNA sense strand
cugccagccacaaugaaua

SEQ ID NO: 2330586 - RNA, 19 nt, Homo sapiens
  misc_RNA (1)...(19): siRNA sense strand
ucuccuacauuuagccaau

SEQ ID NO: 2330587 - RNA, 19 nt, Homo sapiens
  misc_RNA (1)...(19): siRNA sense strand
guucagagcugccaggaag

SEQ ID NO: 2330588 - RNA, 19 nt, Homo sapiens
  misc_RNA (1)...(19): siRNA sense strand
ucucgaguugccagaguua

SEQ ID NO: 2330589 - RNA, 19 nt, Homo sapiens
  misc_RNA (1)...(19): siRNA sense strand
gucuaugaaaccuggagaa

SEQ ID NO: 2330590 - RNA, 19 nt, Homo sapiens
  misc_RNA (1)...(19): siRNA sense strand
ugaagaaacugaagcagag

SEQ ID NO: 2330591 - RNA, 19 nt, Homo sapiens
  misc_RNA (1)...(19): siRNA sense strand
gcugacgagaagaugcuua

SEQ ID NO: 2330592 - RNA, 19 nt, Homo sapiens
  misc_RNA (1)...(19): siRNA sense strand
ccacaaaaccuauggacua

SEQ ID NO: 2330593 - RNA, 19 nt, Homo sapiens
  misc_RNA (1)...(19): siRNA sense strand
caguaagauuggaggaagu

SEQ ID NO: 2330594 - RNA, 19 nt, Homo sapiens
  misc_RNA (1)...(19): siRNA sense strand
aggcauugcugcagacaga

SEQ ID NO: 2330595 - RNA, 19 nt, Homo sapiens
  misc_RNA (1)...(19): siRNA sense strand
agucuaugcugucgacaaa

SEQ ID NO: 2330596 - RNA, 19 nt, Homo sapiens
  misc_RNA (1)...(19): siRNA sense strand
aagaaaagaaccagagauu

SEQ ID NO: 2330597 - RNA, 19 nt, Homo sapiens
  misc_RNA (1)...(19): siRNA sense strand
ggugaaagugagugaucau

SEQ ID NO: 2330598 - RNA, 19 nt, Homo sapiens
  misc_RNA (1)...(19): siRNA sense strand
uggaguaauuaguguaaca

SEQ ID NO: 2330599 - RNA, 19 nt, Homo sapiens
  misc_RNA (1)...(19): siRNA sense strand
gggaagccacccagagaau

SEQ ID NO: 2330600 - RNA, 19 nt, Homo sapiens
  misc_RNA (1)...(19): siRNA sense strand
cgacaaagacacaggcaug

SEQ ID NO: 2330601 - RNA, 19 nt, Homo sapiens
  misc_RNA (1)...(19): siRNA sense strand
ugcauaugcgagagagaaa

SEQ ID NO: 2330602 - RNA, 19 nt, Homo sapiens
  misc_RNA (1)...(19): siRNA sense strand
uggugagauuggaguaauu

SEQ ID NO: 2330603 - RNA, 19 nt, Homo sapiens
  misc_RNA (1)...(19): siRNA sense strand
cccuggacguggaggagaa

SEQ ID NO: 2330604 - RNA, 19 nt, Homo sapiens
  misc_RNA (1)...(19): siRNA sense strand
cugucaguaaugagaguua

SEQ ID NO: 2330605 - RNA, 19 nt, Homo sapiens
  misc_RNA (1)...(19): siRNA sense strand
agauagaugguguuguuua

SEQ ID NO: 2330606 - RNA, 19 nt, Homo sapiens
  misc_RNA (1)...(19): siRNA sense strand
cuuggaacucugagggauu

SEQ ID NO: 2330607 - RNA, 19 nt, Homo sapiens
  misc_RNA (1)...(19): siRNA sense strand
aagagauccagaagguaaa

SEQ ID NO: 2330608 - RNA, 19 nt, Homo sapiens
  misc_RNA (1)...(19): siRNA sense strand
gagaagagguccuaggccu

SEQ ID NO: 2330609 - RNA, 19 nt, Homo sapiens
  misc_RNA (1)...(19): siRNA sense strand
gcaacauuacuuuggaaga

SEQ ID NO: 2330610 - RNA, 19 nt, Homo sapiens
  misc_RNA (1)...(19): siRNA sense strand
aaggguaugcugagggcua

SEQ ID NO: 2330611 - RNA, 19 nt, Homo sapiens
  misc_RNA (1)...(19): siRNA sense strand
aguacagauuccacugaaa

SEQ ID NO: 2330612 - RNA, 19 nt, Homo sapiens
  misc_RNA (1)...(19): siRNA sense strand
ccgacuggccauagagcau

SEQ ID NO: 2330613 - RNA, 19 nt, Homo sapiens
  misc_RNA (1)...(19): siRNA sense strand
uaaccaucgaagagaacaa

SEQ ID NO: 2330614 - RNA, 19 nt, Homo sapiens
  misc_RNA (1)...(19): siRNA sense strand
caaacgagauagauggugu

SEQ ID NO: 2330615 - RNA, 19 nt, Homo sapiens
  misc_RNA (1)...(19): siRNA sense strand
ccuuacaaaccauacaaua

SEQ ID NO: 2330616 - RNA, 19 nt, Homo sapiens
  misc_RNA (1)...(19): siRNA sense strand
cuacagaugccgacagcga

SEQ ID NO: 2330617 - RNA, 19 nt, Homo sapiens
  misc_RNA (1)...(19): siRNA sense strand
gcuggaccgagaagagaaa

SEQ ID NO: 2330618 - RNA, 19 nt, Homo sapiens
  misc_RNA (1)...(19): siRNA sense strand
gaccgagaagagaaagaaa

SEQ ID NO: 2330619 - RNA, 19 nt, Homo sapiens
  misc_RNA (1)...(19): siRNA sense strand
agaguuacauugagagucu

SEQ ID NO: 2330620 - RNA, 19 nt, Homo sapiens
  misc_RNA (1)...(19): siRNA sense strand
cggugugggucccggaaaa

SEQ ID NO: 2330621 - RNA, 19 nt, Homo sapiens
  misc_RNA (1)...(19): siRNA sense strand
cagcgaggagagaggccaa

SEQ ID NO: 2330622 - RNA, 19 nt, Homo sapiens
  misc_RNA (1)...(19): siRNA sense strand
agugagugaucaugguuau

SEQ ID NO: 2330623 - RNA, 19 nt, Homo sapiens
  misc_RNA (1)...(19): siRNA sense strand
ggugcuuuggacagggaaa

SEQ ID NO: 2330624 - RNA, 19 nt, Homo sapiens
  misc_RNA (1)...(19): siRNA sense strand
aaucaaugucacuguguau

SEQ ID NO: 2330625 - RNA, 19 nt, Homo sapiens
  misc_RNA (1)...(19): siRNA sense strand
cccucacaguguuggauaa

SEQ ID NO: 2330626 - RNA, 19 nt, Homo sapiens
  misc_RNA (1)...(19): siRNA sense strand
ccuucaggauugacccuaa

SEQ ID NO: 2330627 - RNA, 19 nt, Homo sapiens
  misc_RNA (1)...(19): siRNA sense strand
ucacagacucacaaaucaa

SEQ ID NO: 2330628 - RNA, 19 nt, Homo sapiens
  misc_RNA (1)...(19): siRNA sense strand
ggucacagggaugggcaua

SEQ ID NO: 2330629 - RNA, 19 nt, Homo sapiens
  misc_RNA (1)...(19): siRNA sense strand
uggacguggaggagaauga

SEQ ID NO: 2330630 - RNA, 19 nt, Homo sapiens
  misc_RNA (1)...(19): siRNA sense strand
cuacucagcuggaccgaga

SEQ ID NO: 2330631 - RNA, 19 nt, Homo sapiens
  misc_RNA (1)...(19): siRNA sense strand
ccacagucauggugaaccu

SEQ ID NO: 2330632 - RNA, 19 nt, Homo sapiens
  misc_RNA (1)...(19): siRNA sense strand
uggugaaccuauuugucaa

SEQ ID NO: 2330633 - RNA, 19 nt, Homo sapiens
  misc_RNA (1)...(19): siRNA sense strand
acauagcaaacgagauaga

SEQ ID NO: 2330634 - RNA, 19 nt, Homo sapiens
  misc_RNA (1)...(19): siRNA sense strand
cggaaaaugcaccuguaaa

SEQ ID NO: 2330635 - RNA, 19 nt, Homo sapiens
  misc_RNA (1)...(19): siRNA sense strand
gguucagaccuaucgcuua

SEQ ID NO: 2330636 - RNA, 19 nt, Homo sapiens
  misc_RNA (1)...(19): siRNA sense strand
ugacaaugauaaugcucca

SEQ ID NO: 2330637 - RNA, 19 nt, Homo sapiens
  misc_RNA (1)...(19): siRNA sense strand
acucauaggaagguagaau

SEQ ID NO: 2330638 - RNA, 19 nt, Homo sapiens
  misc_RNA (1)...(19): siRNA sense strand
gguuugugaaggugaagau

SEQ ID NO: 2330639 - RNA, 19 nt, Homo sapiens
  misc_RNA (1)...(19): siRNA sense strand
ggcauauacaucuguuuaa

SEQ ID NO: 2330640 - RNA, 19 nt, Homo sapiens
  misc_RNA (1)...(19): siRNA sense strand
gagaaagccaauggauauu

SEQ ID NO: 2330641 - RNA, 19 nt, Homo sapiens
  misc_RNA (1)...(19): siRNA sense strand
cguggaggagaaugagaau

SEQ ID NO: 2330642 - RNA, 19 nt, Homo sapiens
  misc_RNA (1)...(19): siRNA sense strand
ugaaagaacuggaacccgu

SEQ ID NO: 2330643 - RNA, 19 nt, Homo sapiens
  misc_RNA (1)...(19): siRNA sense strand
ccuucaacccuuaauagaa

SEQ ID NO: 2330644 - RNA, 19 nt, Homo sapiens
  misc_RNA (1)...(19): siRNA sense strand
ucaacaaggacuucagcuu

SEQ ID NO: 2330645 - RNA, 19 nt, Homo sapiens
  misc_RNA (1)...(19): siRNA sense strand
uuacagcaucauagggaga

SEQ ID NO: 2330646 - RNA, 19 nt, Homo sapiens
  misc_RNA (1)...(19): siRNA sense strand
ccuaaaacuggcaacauua

SEQ ID NO: 2330647 - RNA, 19 nt, Homo sapiens
  misc_RNA (1)...(19): siRNA sense strand
uuacuuuggaagaggcauu

SEQ ID NO: 2330648 - RNA, 19 nt, Homo sapiens
  misc_RNA (1)...(19): siRNA sense strand
cagugacauuaaugacaau

SEQ ID NO: 2330649 - RNA, 19 nt, Homo sapiens
  misc_RNA (1)...(19): siRNA sense strand
ugguguuguuuaucugaaa

SEQ ID NO: 2330650 - RNA, 19 nt, Homo sapiens
  misc_RNA (1)...(19): siRNA sense strand
accuauggacuaugagcua

SEQ ID NO: 2330651 - RNA, 19 nt, Homo sapiens
  misc_RNA (1)...(19): siRNA sense strand
guuuaaggaaaggggaaaa

SEQ ID NO: 2330652 - RNA, 19 nt, Homo sapiens
  misc_RNA (1)...(19): siRNA sense strand
cauccuugcuaauggacca

SEQ ID NO: 2330653 - RNA, 19 nt, Homo sapiens
  misc_RNA (1)...(19): siRNA sense strand
acaggaauucugacaguuu

SEQ ID NO: 2330654 - RNA, 19 nt, Homo sapiens
  misc_RNA (1)...(19): siRNA sense strand
gguuuaucaacaaggacuu

SEQ ID NO: 2330655 - RNA, 19 nt, Homo sapiens
  misc_RNA (1)...(19): siRNA sense strand
ucgauagugaggaggauga

SEQ ID NO: 2330656 - RNA, 19 nt, Homo sapiens
  misc_RNA (1)...(19): siRNA sense strand
ucgauagugaggaggauga

SEQ ID NO: 2330657 - RNA, 19 nt, Homo sapiens
  misc_RNA (1)...(19): siRNA sense strand
ucgauagugaggaggauga

SEQ ID NO: 2330658 - RNA, 19 nt, Homo sapiens
  misc_RNA (1)...(19): siRNA sense strand
cagauaacaucaagcccaa

SEQ ID NO: 2330659 - RNA, 19 nt, Homo sapiens
  misc_RNA (1)...(19): siRNA sense strand
ccuggaaauaaaucagaua

SEQ ID NO: 2330660 - RNA, 19 nt, Homo sapiens
  misc_RNA (1)...(19): siRNA sense strand
guggaaaguuggggacaaa

SEQ ID NO: 2330661 - RNA, 19 nt, Homo sapiens
  misc_RNA (1)...(19): siRNA sense strand
gaaugaaaaugaaagccaa

SEQ ID NO: 2330662 - RNA, 19 nt, Homo sapiens
  misc_RNA (1)...(19): siRNA sense strand
uggaaauagagaggagcaa

SEQ ID NO: 2330663 - RNA, 19 nt, Homo sapiens
  misc_RNA (1)...(19): siRNA sense strand
uugugaaacuucggguaaa

SEQ ID NO: 2330664 - RNA, 19 nt, Homo sapiens
  misc_RNA (1)...(19): siRNA sense strand
augauacagcacugauaaa

SEQ ID NO: 2330665 - RNA, 19 nt, Homo sapiens
  misc_RNA (1)...(19): siRNA sense strand
ggauauggaaauagagagg

SEQ ID NO: 2330666 - RNA, 19 nt, Homo sapiens
  misc_RNA (1)...(19): siRNA sense strand
gcucuaaagaauggugaca

SEQ ID NO: 2330667 - RNA, 19 nt, Homo sapiens
  misc_RNA (1)...(19): siRNA sense strand
uuacacuggauauggaaau

SEQ ID NO: 2330668 - RNA, 19 nt, Homo sapiens
  misc_RNA (1)...(19): siRNA sense strand
cagauaacaucaagcccaa

SEQ ID NO: 2330669 - RNA, 19 nt, Homo sapiens
  misc_RNA (1)...(19): siRNA sense strand
ccuggaaauaaaucagaua

SEQ ID NO: 2330670 - RNA, 19 nt, Homo sapiens
  misc_RNA (1)...(19): siRNA sense strand
guggaaaguuggggacaaa

SEQ ID NO: 2330671 - RNA, 19 nt, Homo sapiens
  misc_RNA (1)...(19): siRNA sense strand
gaaugaaaaugaaagccaa

SEQ ID NO: 2330672 - RNA, 19 nt, Homo sapiens
  misc_RNA (1)...(19): siRNA sense strand
uggaaauagagaggagcaa

SEQ ID NO: 2330673 - RNA, 19 nt, Homo sapiens
  misc_RNA (1)...(19): siRNA sense strand
uugugaaacuucggguaaa

SEQ ID NO: 2330674 - RNA, 19 nt, Homo sapiens
  misc_RNA (1)...(19): siRNA sense strand
augauacagcacugauaaa

SEQ ID NO: 2330675 - RNA, 19 nt, Homo sapiens
  misc_RNA (1)...(19): siRNA sense strand
ggauauggaaauagagagg

SEQ ID NO: 2330676 - RNA, 19 nt, Homo sapiens
  misc_RNA (1)...(19): siRNA sense strand
gcucuaaagaauggugaca

SEQ ID NO: 2330677 - RNA, 19 nt, Homo sapiens
  misc_RNA (1)...(19): siRNA sense strand
uuacacuggauauggaaau

SEQ ID NO: 2330678 - RNA, 19 nt, Homo sapiens
  misc_RNA (1)...(19): siRNA sense strand
cagauaacaucaagcccaa

SEQ ID NO: 2330679 - RNA, 19 nt, Homo sapiens
  misc_RNA (1)...(19): siRNA sense strand
ccuggaaauaaaucagaua

SEQ ID NO: 2330680 - RNA, 19 nt, Homo sapiens
  misc_RNA (1)...(19): siRNA sense strand
guggaaaguuggggacaaa

SEQ ID NO: 2330681 - RNA, 19 nt, Homo sapiens
  misc_RNA (1)...(19): siRNA sense strand
gaaugaaaaugaaagccaa

SEQ ID NO: 2330682 - RNA, 19 nt, Homo sapiens
  misc_RNA (1)...(19): siRNA sense strand
uggaaauagagaggagcaa

SEQ ID NO: 2330683 - RNA, 19 nt, Homo sapiens
  misc_RNA (1)...(19): siRNA sense strand
uugugaaacuucggguaaa

SEQ ID NO: 2330684 - RNA, 19 nt, Homo sapiens
  misc_RNA (1)...(19): siRNA sense strand
augauacagcacugauaaa

SEQ ID NO: 2330685 - RNA, 19 nt, Homo sapiens
  misc_RNA (1)...(19): siRNA sense strand
ggauauggaaauagagagg

SEQ ID NO: 2330686 - RNA, 19 nt, Homo sapiens
  misc_RNA (1)...(19): siRNA sense strand
gcucuaaagaauggugaca

SEQ ID NO: 2330687 - RNA, 19 nt, Homo sapiens
  misc_RNA (1)...(19): siRNA sense strand
uuacacuggauauggaaau

SEQ ID NO: 2330688 - RNA, 19 nt, Homo sapiens
  misc_RNA (1)...(19): siRNA sense strand
cagauaacaucaagcccaa

SEQ ID NO: 2330689 - RNA, 19 nt, Homo sapiens
  misc_RNA (1)...(19): siRNA sense strand
ccuggaaauaaaucagaua

SEQ ID NO: 2330690 - RNA, 19 nt, Homo sapiens
  misc_RNA (1)...(19): siRNA sense strand
guggaaaguuggggacaaa

SEQ ID NO: 2330691 - RNA, 19 nt, Homo sapiens
  misc_RNA (1)...(19): siRNA sense strand
gaaugaaaaugaaagccaa

SEQ ID NO: 2330692 - RNA, 19 nt, Homo sapiens
  misc_RNA (1)...(19): siRNA sense strand
uggaaauagagaggagcaa

SEQ ID NO: 2330693 - RNA, 19 nt, Homo sapiens
  misc_RNA (1)...(19): siRNA sense strand
uugugaaacuucggguaaa

SEQ ID NO: 2330694 - RNA, 19 nt, Homo sapiens
  misc_RNA (1)...(19): siRNA sense strand
augauacagcacugauaaa

SEQ ID NO: 2330695 - RNA, 19 nt, Homo sapiens
  misc_RNA (1)...(19): siRNA sense strand
ggauauggaaauagagagg

SEQ ID NO: 2330696 - RNA, 19 nt, Homo sapiens
  misc_RNA (1)...(19): siRNA sense strand
gcucuaaagaauggugaca

SEQ ID NO: 2330697 - RNA, 19 nt, Homo sapiens
  misc_RNA (1)...(19): siRNA sense strand
uuacacuggauauggaaau

SEQ ID NO: 2330698 - RNA, 19 nt, Homo sapiens
  misc_RNA (1)...(19): siRNA sense strand
gcacuuaagcaaacgggaa

SEQ ID NO: 2330699 - RNA, 19 nt, Homo sapiens
  misc_RNA (1)...(19): siRNA sense strand
cacuuaagcaaacgggaau

SEQ ID NO: 2330700 - RNA, 19 nt, Homo sapiens
  misc_RNA (1)...(19): siRNA sense strand
aggucacgccagaggauga

SEQ ID NO: 2330701 - RNA, 19 nt, Homo sapiens
  misc_RNA (1)...(19): siRNA sense strand
gcacuuaagcaaacgggaa

SEQ ID NO: 2330702 - RNA, 19 nt, Homo sapiens
  misc_RNA (1)...(19): siRNA sense strand
cacuuaagcaaacgggaau

SEQ ID NO: 2330703 - RNA, 19 nt, Homo sapiens
  misc_RNA (1)...(19): siRNA sense strand
aggucacgccagaggauga

SEQ ID NO: 2330704 - RNA, 19 nt, Homo sapiens
  misc_RNA (1)...(19): siRNA sense strand
gcacuuaagcaaacgggaa

SEQ ID NO: 2330705 - RNA, 19 nt, Homo sapiens
  misc_RNA (1)...(19): siRNA sense strand
cacuuaagcaaacgggaau

SEQ ID NO: 2330706 - RNA, 19 nt, Homo sapiens
  misc_RNA (1)...(19): siRNA sense strand
aggucacgccagaggauga

SEQ ID NO: 2330707 - RNA, 19 nt, Homo sapiens
  misc_RNA (1)...(19): siRNA sense strand
gcacuuaagcaaacgggaa

SEQ ID NO: 2330708 - RNA, 19 nt, Homo sapiens
  misc_RNA (1)...(19): siRNA sense strand
cacuuaagcaaacgggaau

SEQ ID NO: 2330709 - RNA, 19 nt, Homo sapiens
  misc_RNA (1)...(19): siRNA sense strand
aggucacgccagaggauga

SEQ ID NO: 2330710 - RNA, 19 nt, Homo sapiens
  misc_RNA (1)...(19): siRNA sense strand
caguaaugguagaagaauu

SEQ ID NO: 2330711 - RNA, 19 nt, Homo sapiens
  misc_RNA (1)...(19): siRNA sense strand
gguugaaagacguagaaaa

SEQ ID NO: 2330712 - RNA, 19 nt, Homo sapiens
  misc_RNA (1)...(19): siRNA sense strand
aggagaaacagaaaggaau

SEQ ID NO: 2330713 - RNA, 19 nt, Homo sapiens
  misc_RNA (1)...(19): siRNA sense strand
cggguaaauccaucagaua

SEQ ID NO: 2330714 - RNA, 19 nt, Homo sapiens
  misc_RNA (1)...(19): siRNA sense strand
uguuugaagaugaggaaga

SEQ ID NO: 2330715 - RNA, 19 nt, Homo sapiens
  misc_RNA (1)...(19): siRNA sense strand
ggcuacuguuggugguaaa

SEQ ID NO: 2330716 - RNA, 19 nt, Homo sapiens
  misc_RNA (1)...(19): siRNA sense strand
cugcuguaauuguggagaa

SEQ ID NO: 2330717 - RNA, 19 nt, Homo sapiens
  misc_RNA (1)...(19): siRNA sense strand
uuguagaguuacugaugaa

SEQ ID NO: 2330718 - RNA, 19 nt, Homo sapiens
  misc_RNA (1)...(19): siRNA sense strand
gcugaagcaaccagaagaa

SEQ ID NO: 2330719 - RNA, 19 nt, Homo sapiens
  misc_RNA (1)...(19): siRNA sense strand
uaggagaaacagaaaggaa

SEQ ID NO: 2330720 - RNA, 19 nt, Homo sapiens
  misc_RNA (1)...(19): siRNA sense strand
caacaaaagcauuauggaa

SEQ ID NO: 2330721 - RNA, 19 nt, Homo sapiens
  misc_RNA (1)...(19): siRNA sense strand
agaaauuaauugacgccau

SEQ ID NO: 2330722 - RNA, 19 nt, Homo sapiens
  misc_RNA (1)...(19): siRNA sense strand
acuuaagagcuguagaaga

SEQ ID NO: 2330723 - RNA, 19 nt, Homo sapiens
  misc_RNA (1)...(19): siRNA sense strand
gcugucaaauuaugggcaa

SEQ ID NO: 2330724 - RNA, 19 nt, Homo sapiens
  misc_RNA (1)...(19): siRNA sense strand
cuucaaggaaagucagauu

SEQ ID NO: 2330725 - RNA, 19 nt, Homo sapiens
  misc_RNA (1)...(19): siRNA sense strand
gcgcaucaacagaagaaaa

SEQ ID NO: 2330726 - RNA, 19 nt, Homo sapiens
  misc_RNA (1)...(19): siRNA sense strand
agacacugauaauggaaca

SEQ ID NO: 2330727 - RNA, 19 nt, Homo sapiens
  misc_RNA (1)...(19): siRNA sense strand
uugaagaugaggaagaauu

SEQ ID NO: 2330728 - RNA, 19 nt, Homo sapiens
  misc_RNA (1)...(19): siRNA sense strand
gguggugucuccugggcaa

SEQ ID NO: 2330729 - RNA, 19 nt, Homo sapiens
  misc_RNA (1)...(19): siRNA sense strand
acaucaacucgaacaguaa

SEQ ID NO: 2330730 - RNA, 19 nt, Homo sapiens
  misc_RNA (1)...(19): siRNA sense strand
gaggaagaauugaaccaca

SEQ ID NO: 2330731 - RNA, 19 nt, Homo sapiens
  misc_RNA (1)...(19): siRNA sense strand
ggaggagaaucuaugccua

SEQ ID NO: 2330732 - RNA, 19 nt, Homo sapiens
  misc_RNA (1)...(19): siRNA sense strand
ggaugccauuggaggagaa

SEQ ID NO: 2330733 - RNA, 19 nt, Homo sapiens
  misc_RNA (1)...(19): siRNA sense strand
ggcaaaacgacgugguauu

SEQ ID NO: 2330734 - RNA, 19 nt, Homo sapiens
  misc_RNA (1)...(19): siRNA sense strand
uuggaaacuuggaacggaa

SEQ ID NO: 2330735 - RNA, 19 nt, Homo sapiens
  misc_RNA (1)...(19): siRNA sense strand
caguguacagacaggcaaa

SEQ ID NO: 2330736 - RNA, 19 nt, Homo sapiens
  misc_RNA (1)...(19): siRNA sense strand
ccuaagagguugaaagacg

SEQ ID NO: 2330737 - RNA, 19 nt, Homo sapiens
  misc_RNA (1)...(19): siRNA sense strand
cugucaaauuaugggcaaa

SEQ ID NO: 2330738 - RNA, 19 nt, Homo sapiens
  misc_RNA (1)...(19): siRNA sense strand
caguaaagaacuaccagau

SEQ ID NO: 2330739 - RNA, 19 nt, Homo sapiens
  misc_RNA (1)...(19): siRNA sense strand
ccuuuguaccuguuauaaa

SEQ ID NO: 2330740 - RNA, 19 nt, Homo sapiens
  misc_RNA (1)...(19): siRNA sense strand
cccuaagagcugucaaauu

SEQ ID NO: 2330741 - RNA, 19 nt, Homo sapiens
  misc_RNA (1)...(19): siRNA sense strand
aggaacaucauaaagacaa

SEQ ID NO: 2330742 - RNA, 19 nt, Homo sapiens
  misc_RNA (1)...(19): siRNA sense strand
ccaugaaaccauuuggagu

SEQ ID NO: 2330743 - RNA, 19 nt, Homo sapiens
  misc_RNA (1)...(19): siRNA sense strand
aguaaagaacuaccagauu

SEQ ID NO: 2330744 - RNA, 19 nt, Homo sapiens
  misc_RNA (1)...(19): siRNA sense strand
ucuagaguggguuggauua

SEQ ID NO: 2330745 - RNA, 19 nt, Homo sapiens
  misc_RNA (1)...(19): siRNA sense strand
cuaaaggagggaaugaaaa

SEQ ID NO: 2330746 - RNA, 19 nt, Homo sapiens
  misc_RNA (1)...(19): siRNA sense strand
ggcuggugguucuugguaa

SEQ ID NO: 2330747 - RNA, 19 nt, Homo sapiens
  misc_RNA (1)...(19): siRNA sense strand
caaccagaagaaagcaauu

SEQ ID NO: 2330748 - RNA, 19 nt, Homo sapiens
  misc_RNA (1)...(19): siRNA sense strand
agcaacucauguaaagaaa

SEQ ID NO: 2330749 - RNA, 19 nt, Homo sapiens
  misc_RNA (1)...(19): siRNA sense strand
cuccagagacacugauaau

SEQ ID NO: 2330750 - RNA, 19 nt, Homo sapiens
  misc_RNA (1)...(19): siRNA sense strand
gaguguaccaccagcccaa

SEQ ID NO: 2330751 - RNA, 19 nt, Homo sapiens
  misc_RNA (1)...(19): siRNA sense strand
agauggcauuagaaacuua

SEQ ID NO: 2330752 - RNA, 19 nt, Homo sapiens
  misc_RNA (1)...(19): siRNA sense strand
agguguauucgcagcuuaa

SEQ ID NO: 2330753 - RNA, 19 nt, Homo sapiens
  misc_RNA (1)...(19): siRNA sense strand
guagaguuacugaugaaau

SEQ ID NO: 2330754 - RNA, 19 nt, Homo sapiens
  misc_RNA (1)...(19): siRNA sense strand
ccguguacuuguuggaaac

SEQ ID NO: 2330755 - RNA, 19 nt, Homo sapiens
  misc_RNA (1)...(19): siRNA sense strand
aguagaaaaugcagaaagu

SEQ ID NO: 2330756 - RNA, 19 nt, Homo sapiens
  misc_RNA (1)...(19): siRNA sense strand
ggaacaucauaaagacaac

SEQ ID NO: 2330757 - RNA, 19 nt, Homo sapiens
  misc_RNA (1)...(19): siRNA sense strand
gcuccagagacacugauaa

SEQ ID NO: 2330758 - RNA, 19 nt, Homo sapiens
  misc_RNA (1)...(19): siRNA sense strand
cauuuggaguguuugaaga

SEQ ID NO: 2330759 - RNA, 19 nt, Homo sapiens
  misc_RNA (1)...(19): siRNA sense strand
acagacaggcaaacaauau

SEQ ID NO: 2330760 - RNA, 19 nt, Homo sapiens
  misc_RNA (1)...(19): siRNA sense strand
cugcaaacaccgugcugga

SEQ ID NO: 2330761 - RNA, 19 nt, Homo sapiens
  misc_RNA (1)...(19): siRNA sense strand
gauauaagguguauucgca

SEQ ID NO: 2330762 - RNA, 19 nt, Homo sapiens
  misc_RNA (1)...(19): siRNA sense strand
acaacagaauucuacguau

SEQ ID NO: 2330763 - RNA, 19 nt, Homo sapiens
  misc_RNA (1)...(19): siRNA sense strand
gggacaaccgcaucugaau

SEQ ID NO: 2330764 - RNA, 19 nt, Homo sapiens
  misc_RNA (1)...(19): siRNA sense strand
uaaagaacuaccagauuca

SEQ ID NO: 2330765 - RNA, 19 nt, Homo sapiens
  misc_RNA (1)...(19): siRNA sense strand
aacaguaaugguagaagaa

SEQ ID NO: 2330766 - RNA, 19 nt, Homo sapiens
  misc_RNA (1)...(19): siRNA sense strand
ccuucaaguuccagagcaa

SEQ ID NO: 2330767 - RNA, 19 nt, Homo sapiens
  misc_RNA (1)...(19): siRNA sense strand
augacaaggcccuggacaa

SEQ ID NO: 2330768 - RNA, 19 nt, Homo sapiens
  misc_RNA (1)...(19): siRNA sense strand
ccagcaagcucaagcgcca

SEQ ID NO: 2330769 - RNA, 19 nt, Homo sapiens
  misc_RNA (1)...(19): siRNA sense strand
aggaggaggacgaggagga

SEQ ID NO: 2330770 - RNA, 19 nt, Homo sapiens
  misc_RNA (1)...(19): siRNA sense strand
aggaggaggaggaggagga

SEQ ID NO: 2330771 - RNA, 19 nt, Homo sapiens
  misc_RNA (1)...(19): siRNA sense strand
aggaggaggaggaggagga

SEQ ID NO: 2330772 - RNA, 19 nt, Homo sapiens
  misc_RNA (1)...(19): siRNA sense strand
aggaggaggaggaggagga

SEQ ID NO: 2330773 - RNA, 19 nt, Homo sapiens
  misc_RNA (1)...(19): siRNA sense strand
aggacgaggaggaggagga

SEQ ID NO: 2330774 - RNA, 19 nt, Homo sapiens
  misc_RNA (1)...(19): siRNA sense strand
acgaggaggaggaggagga

SEQ ID NO: 2330775 - RNA, 19 nt, Homo sapiens
  misc_RNA (1)...(19): siRNA sense strand
gucccaagcaggagaacau

SEQ ID NO: 2330776 - RNA, 19 nt, Homo sapiens
  misc_RNA (1)...(19): siRNA sense strand
ccuucaaccugcugcgcau

SEQ ID NO: 2330777 - RNA, 19 nt, Homo sapiens
  misc_RNA (1)...(19): siRNA sense strand
uguccgagccgguggagau

SEQ ID NO: 2330778 - RNA, 19 nt, Homo sapiens
  misc_RNA (1)...(19): siRNA sense strand
aggaggacgaggaggagga

SEQ ID NO: 2330779 - RNA, 19 nt, Homo sapiens
  misc_RNA (1)...(19): siRNA sense strand
ucaugaauuuccugggcga

SEQ ID NO: 2330780 - RNA, 19 nt, Homo sapiens
  misc_RNA (1)...(19): siRNA sense strand
aggagcugcuacuggagaa

SEQ ID NO: 2330781 - RNA, 19 nt, Homo sapiens
  misc_RNA (1)...(19): siRNA sense strand
cuggagaaacacaugaaaa

SEQ ID NO: 2330782 - RNA, 19 nt, Homo sapiens
  misc_RNA (1)...(19): siRNA sense strand
ccuucaaguuccagagcaa

SEQ ID NO: 2330783 - RNA, 19 nt, Homo sapiens
  misc_RNA (1)...(19): siRNA sense strand
augacaaggcccuggacaa

SEQ ID NO: 2330784 - RNA, 19 nt, Homo sapiens
  misc_RNA (1)...(19): siRNA sense strand
ccagcaagcucaagcgcca

SEQ ID NO: 2330785 - RNA, 19 nt, Homo sapiens
  misc_RNA (1)...(19): siRNA sense strand
aggaggaggacgaggagga

SEQ ID NO: 2330786 - RNA, 19 nt, Homo sapiens
  misc_RNA (1)...(19): siRNA sense strand
aggaggaggaggaggagga

SEQ ID NO: 2330787 - RNA, 19 nt, Homo sapiens
  misc_RNA (1)...(19): siRNA sense strand
aggaggaggaggaggagga

SEQ ID NO: 2330788 - RNA, 19 nt, Homo sapiens
  misc_RNA (1)...(19): siRNA sense strand
aggaggaggaggaggagga

SEQ ID NO: 2330789 - RNA, 19 nt, Homo sapiens
  misc_RNA (1)...(19): siRNA sense strand
aggacgaggaggaggagga

SEQ ID NO: 2330790 - RNA, 19 nt, Homo sapiens
  misc_RNA (1)...(19): siRNA sense strand
acgaggaggaggaggagga

SEQ ID NO: 2330791 - RNA, 19 nt, Homo sapiens
  misc_RNA (1)...(19): siRNA sense strand
gucccaagcaggagaacau

SEQ ID NO: 2330792 - RNA, 19 nt, Homo sapiens
  misc_RNA (1)...(19): siRNA sense strand
ccuucaaccugcugcgcau

SEQ ID NO: 2330793 - RNA, 19 nt, Homo sapiens
  misc_RNA (1)...(19): siRNA sense strand
uguccgagccgguggagau

SEQ ID NO: 2330794 - RNA, 19 nt, Homo sapiens
  misc_RNA (1)...(19): siRNA sense strand
aggaggacgaggaggagga

SEQ ID NO: 2330795 - RNA, 19 nt, Homo sapiens
  misc_RNA (1)...(19): siRNA sense strand
ucaugaauuuccugggcga

SEQ ID NO: 2330796 - RNA, 19 nt, Homo sapiens
  misc_RNA (1)...(19): siRNA sense strand
aggagcugcuacuggagaa

SEQ ID NO: 2330797 - RNA, 19 nt, Homo sapiens
  misc_RNA (1)...(19): siRNA sense strand
cuggagaaacacaugaaaa

SEQ ID NO: 2330798 - RNA, 19 nt, Homo sapiens
  misc_RNA (1)...(19): siRNA sense strand
gagcaauguuacaggccaa

SEQ ID NO: 2330799 - RNA, 19 nt, Homo sapiens
  misc_RNA (1)...(19): siRNA sense strand
caggaaagcuacugggcau

SEQ ID NO: 2330800 - RNA, 19 nt, Homo sapiens
  misc_RNA (1)...(19): siRNA sense strand
caggaaauggagaaggaaa

SEQ ID NO: 2330801 - RNA, 19 nt, Homo sapiens
  misc_RNA (1)...(19): siRNA sense strand
ggaaaugagaagugggacu

SEQ ID NO: 2330802 - RNA, 19 nt, Homo sapiens
  misc_RNA (1)...(19): siRNA sense strand
aggaaauggagaaggaaaa

SEQ ID NO: 2330803 - RNA, 19 nt, Homo sapiens
  misc_RNA (1)...(19): siRNA sense strand
ccacuaaagaggagcccaa

SEQ ID NO: 2330804 - RNA, 19 nt, Homo sapiens
  misc_RNA (1)...(19): siRNA sense strand
aggacaaacagaagaagaa

SEQ ID NO: 2330805 - RNA, 19 nt, Homo sapiens
  misc_RNA (1)...(19): siRNA sense strand
ccuaugagggaaagugaua

SEQ ID NO: 2330806 - RNA, 19 nt, Homo sapiens
  misc_RNA (1)...(19): siRNA sense strand
gguacagacuccaagggaa

SEQ ID NO: 2330807 - RNA, 19 nt, Homo sapiens
  misc_RNA (1)...(19): siRNA sense strand
augaugagguagugaaaca

SEQ ID NO: 2330808 - RNA, 19 nt, Homo sapiens
  misc_RNA (1)...(19): siRNA sense strand
cagcuacaguggagggaga

SEQ ID NO: 2330809 - RNA, 19 nt, Homo sapiens
  misc_RNA (1)...(19): siRNA sense strand
agagaaaggaacuggccaa

SEQ ID NO: 2330810 - RNA, 19 nt, Homo sapiens
  misc_RNA (1)...(19): siRNA sense strand
ggucaaaugaagcgcaaca

SEQ ID NO: 2330811 - RNA, 19 nt, Homo sapiens
  misc_RNA (1)...(19): siRNA sense strand
cauagaggcagaaggacua

SEQ ID NO: 2330812 - RNA, 19 nt, Homo sapiens
  misc_RNA (1)...(19): siRNA sense strand
aggaaaagaagguggaaca

SEQ ID NO: 2330813 - RNA, 19 nt, Homo sapiens
  misc_RNA (1)...(19): siRNA sense strand
caggagaaucagugcguau

SEQ ID NO: 2330814 - RNA, 19 nt, Homo sapiens
  misc_RNA (1)...(19): siRNA sense strand
aggaaagagcccaggagau

SEQ ID NO: 2330815 - RNA, 19 nt, Homo sapiens
  misc_RNA (1)...(19): siRNA sense strand
ggcagaaggacuaaaggaa

SEQ ID NO: 2330816 - RNA, 19 nt, Homo sapiens
  misc_RNA (1)...(19): siRNA sense strand
cagcugagccacaaagcaa

SEQ ID NO: 2330817 - RNA, 19 nt, Homo sapiens
  misc_RNA (1)...(19): siRNA sense strand
aggaggaggcugaaaucaa

SEQ ID NO: 2330818 - RNA, 19 nt, Homo sapiens
  misc_RNA (1)...(19): siRNA sense strand
gagcauuugaugacgaauu

SEQ ID NO: 2330819 - RNA, 19 nt, Homo sapiens
  misc_RNA (1)...(19): siRNA sense strand
gcgaacaaacaaaagaaaa

SEQ ID NO: 2330820 - RNA, 19 nt, Homo sapiens
  misc_RNA (1)...(19): siRNA sense strand
gccgagaacaggaaagcua

SEQ ID NO: 2330821 - RNA, 19 nt, Homo sapiens
  misc_RNA (1)...(19): siRNA sense strand
aaccagagccagaaggaau

SEQ ID NO: 2330822 - RNA, 19 nt, Homo sapiens
  misc_RNA (1)...(19): siRNA sense strand
cgucagaucuacagcgaac

SEQ ID NO: 2330823 - RNA, 19 nt, Homo sapiens
  misc_RNA (1)...(19): siRNA sense strand
gugaagaucagaaggaagu

SEQ ID NO: 2330824 - RNA, 19 nt, Homo sapiens
  misc_RNA (1)...(19): siRNA sense strand
cgaugagggagguggcaga

SEQ ID NO: 2330825 - RNA, 19 nt, Homo sapiens
  misc_RNA (1)...(19): siRNA sense strand
aagugauacuagacaagaa

SEQ ID NO: 2330826 - RNA, 19 nt, Homo sapiens
  misc_RNA (1)...(19): siRNA sense strand
uguccaaggugaaugguga

SEQ ID NO: 2330827 - RNA, 19 nt, Homo sapiens
  misc_RNA (1)...(19): siRNA sense strand
ucauagaggcagaaggacu

SEQ ID NO: 2330828 - RNA, 19 nt, Homo sapiens
  misc_RNA (1)...(19): siRNA sense strand
cccuggaacugguggguca

SEQ ID NO: 2330829 - RNA, 19 nt, Homo sapiens
  misc_RNA (1)...(19): siRNA sense strand
agucaggauacgacaggaa

SEQ ID NO: 2330830 - RNA, 19 nt, Homo sapiens
  misc_RNA (1)...(19): siRNA sense strand
ggaaagugaugaugaggag

SEQ ID NO: 2330831 - RNA, 19 nt, Homo sapiens
  misc_RNA (1)...(19): siRNA sense strand
cgaaugaugagguagugaa

SEQ ID NO: 2330832 - RNA, 19 nt, Homo sapiens
  misc_RNA (1)...(19): siRNA sense strand
gccagauagcugugaaaca

SEQ ID NO: 2330833 - RNA, 19 nt, Homo sapiens
  misc_RNA (1)...(19): siRNA sense strand
guacagacuccaagggaag

SEQ ID NO: 2330834 - RNA, 19 nt, Homo sapiens
  misc_RNA (1)...(19): siRNA sense strand
aaggaucagaagaggaaau

SEQ ID NO: 2330835 - RNA, 19 nt, Homo sapiens
  misc_RNA (1)...(19): siRNA sense strand
gggaaagugaugaugagga

SEQ ID NO: 2330836 - RNA, 19 nt, Homo sapiens
  misc_RNA (1)...(19): siRNA sense strand
ggagaugauacauuagaga

SEQ ID NO: 2330837 - RNA, 19 nt, Homo sapiens
  misc_RNA (1)...(19): siRNA sense strand
uuuacauggucuuggaaaa

SEQ ID NO: 2330838 - RNA, 19 nt, Homo sapiens
  misc_RNA (1)...(19): siRNA sense strand
cuuuaagggcuuugaagga

SEQ ID NO: 2330839 - RNA, 19 nt, Homo sapiens
  misc_RNA (1)...(19): siRNA sense strand
ccucacaggcgaacaaaca

SEQ ID NO: 2330840 - RNA, 19 nt, Homo sapiens
  misc_RNA (1)...(19): siRNA sense strand
gguggacaaggaugagaaa

SEQ ID NO: 2330841 - RNA, 19 nt, Homo sapiens
  misc_RNA (1)...(19): siRNA sense strand
ggccaagggaagaagcuuu

SEQ ID NO: 2330842 - RNA, 19 nt, Homo sapiens
  misc_RNA (1)...(19): siRNA sense strand
gaaauuaccccgagagcca

SEQ ID NO: 2330843 - RNA, 19 nt, Homo sapiens
  misc_RNA (1)...(19): siRNA sense strand
agugauacuagacaagaaa

SEQ ID NO: 2330844 - RNA, 19 nt, Homo sapiens
  misc_RNA (1)...(19): siRNA sense strand
gacuaaaggaaaugagaag

SEQ ID NO: 2330845 - RNA, 19 nt, Homo sapiens
  misc_RNA (1)...(19): siRNA sense strand
gagaggagccagaggacac

SEQ ID NO: 2330846 - RNA, 19 nt, Homo sapiens
  misc_RNA (1)...(19): siRNA sense strand
ggaaaguguacgucagauc

SEQ ID NO: 2330847 - RNA, 19 nt, Homo sapiens
  misc_RNA (1)...(19): siRNA sense strand
cugagagauuaguggagca

SEQ ID NO: 2330848 - RNA, 19 nt, Homo sapiens
  misc_RNA (1)...(19): siRNA sense strand
gaaacaucuucgaacgcau

SEQ ID NO: 2330849 - RNA, 19 nt, Homo sapiens
  misc_RNA (1)...(19): siRNA sense strand
caggucaaaugaagcgcaa

SEQ ID NO: 2330850 - RNA, 19 nt, Homo sapiens
  misc_RNA (1)...(19): siRNA sense strand
cugccagauagcugugaaa

SEQ ID NO: 2330851 - RNA, 19 nt, Homo sapiens
  misc_RNA (1)...(19): siRNA sense strand
ccucuaggaaacuggaaga

SEQ ID NO: 2330852 - RNA, 19 nt, Homo sapiens
  misc_RNA (1)...(19): siRNA sense strand
gggaagacugggcuccaaa

SEQ ID NO: 2330853 - RNA, 19 nt, Homo sapiens
  misc_RNA (1)...(19): siRNA sense strand
ucacaggcgaacaaacaaa

SEQ ID NO: 2330854 - RNA, 19 nt, Homo sapiens
  misc_RNA (1)...(19): siRNA sense strand
gcguauacagcguggucca

SEQ ID NO: 2330855 - RNA, 19 nt, Homo sapiens
  misc_RNA (1)...(19): siRNA sense strand
agaaggaaucuguacaaaa

SEQ ID NO: 2330856 - RNA, 19 nt, Homo sapiens
  misc_RNA (1)...(19): siRNA sense strand
cuaugaaggauccuguaaa

SEQ ID NO: 2330857 - RNA, 19 nt, Homo sapiens
  misc_RNA (1)...(19): siRNA sense strand
gacaaacagaagaagaaga

SEQ ID NO: 2330858 - RNA, 19 nt, Homo sapiens
  misc_RNA (1)...(19): siRNA sense strand
gcgucugguuacaaggaca

SEQ ID NO: 2330859 - RNA, 19 nt, Homo sapiens
  misc_RNA (1)...(19): siRNA sense strand
gggaaagugauacuagaca

SEQ ID NO: 2330860 - RNA, 19 nt, Homo sapiens
  misc_RNA (1)...(19): siRNA sense strand
cgguggacaaggaugagaa

SEQ ID NO: 2330861 - RNA, 19 nt, Homo sapiens
  misc_RNA (1)...(19): siRNA sense strand
ggguuuaacaugaaagaau

SEQ ID NO: 2330862 - RNA, 19 nt, Homo sapiens
  misc_RNA (1)...(19): siRNA sense strand
agccaaagguucaggaaaa

SEQ ID NO: 2330863 - RNA, 19 nt, Homo sapiens
  misc_RNA (1)...(19): siRNA sense strand
uggaaaaguugaaggguuu

SEQ ID NO: 2330864 - RNA, 19 nt, Homo sapiens
  misc_RNA (1)...(19): siRNA sense strand
agaacauaaagcugagaaa

SEQ ID NO: 2330865 - RNA, 19 nt, Homo sapiens
  misc_RNA (1)...(19): siRNA sense strand
gguucauccaguugagaaa

SEQ ID NO: 2330866 - RNA, 19 nt, Homo sapiens
  misc_RNA (1)...(19): siRNA sense strand
acgauaacccagaggaaca

SEQ ID NO: 2330867 - RNA, 19 nt, Homo sapiens
  misc_RNA (1)...(19): siRNA sense strand
aggagaagcuagaccaaaa

SEQ ID NO: 2330868 - RNA, 19 nt, Homo sapiens
  misc_RNA (1)...(19): siRNA sense strand
cggaaggucuuaugggcuu

SEQ ID NO: 2330869 - RNA, 19 nt, Homo sapiens
  misc_RNA (1)...(19): siRNA sense strand
cuccaaagccacagccaaa

SEQ ID NO: 2330870 - RNA, 19 nt, Homo sapiens
  misc_RNA (1)...(19): siRNA sense strand
caacaaucucagucuguaa

SEQ ID NO: 2330871 - RNA, 19 nt, Homo sapiens
  misc_RNA (1)...(19): siRNA sense strand
ucucaauaccaaagccuaa

SEQ ID NO: 2330872 - RNA, 19 nt, Homo sapiens
  misc_RNA (1)...(19): siRNA sense strand
gaggacaauaccugcgaaa

SEQ ID NO: 2330873 - RNA, 19 nt, Homo sapiens
  misc_RNA (1)...(19): siRNA sense strand
aguuuaugguuauggaaga

SEQ ID NO: 2330874 - RNA, 19 nt, Homo sapiens
  misc_RNA (1)...(19): siRNA sense strand
cagccaaagguucaggaaa

SEQ ID NO: 2330875 - RNA, 19 nt, Homo sapiens
  misc_RNA (1)...(19): siRNA sense strand
guguagagcaagcuguuua

SEQ ID NO: 2330876 - RNA, 19 nt, Homo sapiens
  misc_RNA (1)...(19): siRNA sense strand
ccuaugaagcuuugguaca

SEQ ID NO: 2330877 - RNA, 19 nt, Homo sapiens
  misc_RNA (1)...(19): siRNA sense strand
ggcugacaguguagagcaa

SEQ ID NO: 2330878 - RNA, 19 nt, Homo sapiens
  misc_RNA (1)...(19): siRNA sense strand
gugacauuggguuggaaua

SEQ ID NO: 2330879 - RNA, 19 nt, Homo sapiens
  misc_RNA (1)...(19): siRNA sense strand
agaugaugauagugauuca

SEQ ID NO: 2330880 - RNA, 19 nt, Homo sapiens
  misc_RNA (1)...(19): siRNA sense strand
caguaagccagcugccaaa

SEQ ID NO: 2330881 - RNA, 19 nt, Homo sapiens
  misc_RNA (1)...(19): siRNA sense strand
cuuacgagcaaauggaauu

SEQ ID NO: 2330882 - RNA, 19 nt, Homo sapiens
  misc_RNA (1)...(19): siRNA sense strand
ggaagaaguguguccguga

SEQ ID NO: 2330883 - RNA, 19 nt, Homo sapiens
  misc_RNA (1)...(19): siRNA sense strand
gagcaguugaaauggaaga

SEQ ID NO: 2330884 - RNA, 19 nt, Homo sapiens
  misc_RNA (1)...(19): siRNA sense strand
uaacgauaacccagaggaa

SEQ ID NO: 2330885 - RNA, 19 nt, Homo sapiens
  misc_RNA (1)...(19): siRNA sense strand
ucgaagaccaugaacguau

SEQ ID NO: 2330886 - RNA, 19 nt, Homo sapiens
  misc_RNA (1)...(19): siRNA sense strand
auaccaaagccuaacuuaa

SEQ ID NO: 2330887 - RNA, 19 nt, Homo sapiens
  misc_RNA (1)...(19): siRNA sense strand
cagaacaacuauggaguca

SEQ ID NO: 2330888 - RNA, 19 nt, Homo sapiens
  misc_RNA (1)...(19): siRNA sense strand
ccgagaagagaguaguauu

SEQ ID NO: 2330889 - RNA, 19 nt, Homo sapiens
  misc_RNA (1)...(19): siRNA sense strand
aguuagaugaugauaguga

SEQ ID NO: 2330890 - RNA, 19 nt, Homo sapiens
  misc_RNA (1)...(19): siRNA sense strand
uaucccaccaggagagaaa

SEQ ID NO: 2330891 - RNA, 19 nt, Homo sapiens
  misc_RNA (1)...(19): siRNA sense strand
gcugaguggcuauuugaaa

SEQ ID NO: 2330892 - RNA, 19 nt, Homo sapiens
  misc_RNA (1)...(19): siRNA sense strand
ccgcaauguccauagugaa

SEQ ID NO: 2330893 - RNA, 19 nt, Homo sapiens
  misc_RNA (1)...(19): siRNA sense strand
cccaaaauggccaggauaa

SEQ ID NO: 2330894 - RNA, 19 nt, Homo sapiens
  misc_RNA (1)...(19): siRNA sense strand
acgauguuguugaguggaa

SEQ ID NO: 2330895 - RNA, 19 nt, Homo sapiens
  misc_RNA (1)...(19): siRNA sense strand
ccucaagacaagaagagca

SEQ ID NO: 2330896 - RNA, 19 nt, Homo sapiens
  misc_RNA (1)...(19): siRNA sense strand
guugaaggguuuuggucua

SEQ ID NO: 2330897 - RNA, 19 nt, Homo sapiens
  misc_RNA (1)...(19): siRNA sense strand
uguccauagugaagacuuu

SEQ ID NO: 2330898 - RNA, 19 nt, Homo sapiens
  misc_RNA (1)...(19): siRNA sense strand
cuacauacaaucugaggga

SEQ ID NO: 2330899 - RNA, 19 nt, Homo sapiens
  misc_RNA (1)...(19): siRNA sense strand
agaagaauccaaugaaagu

SEQ ID NO: 2330900 - RNA, 19 nt, Homo sapiens
  misc_RNA (1)...(19): siRNA sense strand
aaucuguaggccaggguua

SEQ ID NO: 2330901 - RNA, 19 nt, Homo sapiens
  misc_RNA (1)...(19): siRNA sense strand
ccauauugccguucaacuu

SEQ ID NO: 2330902 - RNA, 19 nt, Homo sapiens
  misc_RNA (1)...(19): siRNA sense strand
cugagaaugaugagcgcuu

SEQ ID NO: 2330903 - RNA, 19 nt, Homo sapiens
  misc_RNA (1)...(19): siRNA sense strand
cauccagaguguuagguca

SEQ ID NO: 2330904 - RNA, 19 nt, Homo sapiens
  misc_RNA (1)...(19): siRNA sense strand
aacgaaaguuagaugauga

SEQ ID NO: 2330905 - RNA, 19 nt, Homo sapiens
  misc_RNA (1)...(19): siRNA sense strand
gcaccaaguagcagccuca

SEQ ID NO: 2330906 - RNA, 19 nt, Homo sapiens
  misc_RNA (1)...(19): siRNA sense strand
ccugguaacuacauacaau

SEQ ID NO: 2330907 - RNA, 19 nt, Homo sapiens
  misc_RNA (1)...(19): siRNA sense strand
aacauaaagcugagaaagu

SEQ ID NO: 2330908 - RNA, 19 nt, Homo sapiens
  misc_RNA (1)...(19): siRNA sense strand
cacaauugacagugaggau

SEQ ID NO: 2330909 - RNA, 19 nt, Homo sapiens
  misc_RNA (1)...(19): siRNA sense strand
uuacaguguuggucaguca

SEQ ID NO: 2330910 - RNA, 19 nt, Homo sapiens
  misc_RNA (1)...(19): siRNA sense strand
aaccaggacuaucggacaa

SEQ ID NO: 2330911 - RNA, 19 nt, Homo sapiens
  misc_RNA (1)...(19): siRNA sense strand
uggaauacuguaaagaaca

SEQ ID NO: 2330912 - RNA, 19 nt, Homo sapiens
  misc_RNA (1)...(19): siRNA sense strand
ugauagugagguugaccaa

SEQ ID NO: 2330913 - RNA, 19 nt, Homo sapiens
  misc_RNA (1)...(19): siRNA sense strand
ccgagauccucuuuaugaa

SEQ ID NO: 2330914 - RNA, 19 nt, Homo sapiens
  misc_RNA (1)...(19): siRNA sense strand
cuacaggagucaacaugau

SEQ ID NO: 2330915 - RNA, 19 nt, Homo sapiens
  misc_RNA (1)...(19): siRNA sense strand
caggagagaaauugagaag

SEQ ID NO: 2330916 - RNA, 19 nt, Homo sapiens
  misc_RNA (1)...(19): siRNA sense strand
ugguuauggaagagugaca

SEQ ID NO: 2330917 - RNA, 19 nt, Homo sapiens
  misc_RNA (1)...(19): siRNA sense strand
cugaguggcuauuugaaaa

SEQ ID NO: 2330918 - RNA, 19 nt, Homo sapiens
  misc_RNA (1)...(19): siRNA sense strand
agaaugcaucugagaauga

SEQ ID NO: 2330919 - RNA, 19 nt, Homo sapiens
  misc_RNA (1)...(19): siRNA sense strand
gagucaaaucuguaggcca

SEQ ID NO: 2330920 - RNA, 19 nt, Homo sapiens
  misc_RNA (1)...(19): siRNA sense strand
uagcaaaggcaggagaaaa

SEQ ID NO: 2330921 - RNA, 19 nt, Homo sapiens
  misc_RNA (1)...(19): siRNA sense strand
acaagaagagcaugggacu

SEQ ID NO: 2330922 - RNA, 19 nt, Homo sapiens
  misc_RNA (1)...(19): siRNA sense strand
ggguuuaacaugaaagaau

SEQ ID NO: 2330923 - RNA, 19 nt, Homo sapiens
  misc_RNA (1)...(19): siRNA sense strand
agccaaagguucaggaaaa

SEQ ID NO: 2330924 - RNA, 19 nt, Homo sapiens
  misc_RNA (1)...(19): siRNA sense strand
uggaaaaguugaaggguuu

SEQ ID NO: 2330925 - RNA, 19 nt, Homo sapiens
  misc_RNA (1)...(19): siRNA sense strand
agaacauaaagcugagaaa

SEQ ID NO: 2330926 - RNA, 19 nt, Homo sapiens
  misc_RNA (1)...(19): siRNA sense strand
gguucauccaguugagaaa

SEQ ID NO: 2330927 - RNA, 19 nt, Homo sapiens
  misc_RNA (1)...(19): siRNA sense strand
acgauaacccagaggaaca

SEQ ID NO: 2330928 - RNA, 19 nt, Homo sapiens
  misc_RNA (1)...(19): siRNA sense strand
aggagaagcuagaccaaaa

SEQ ID NO: 2330929 - RNA, 19 nt, Homo sapiens
  misc_RNA (1)...(19): siRNA sense strand
cggaaggucuuaugggcuu

SEQ ID NO: 2330930 - RNA, 19 nt, Homo sapiens
  misc_RNA (1)...(19): siRNA sense strand
cuccaaagccacagccaaa

SEQ ID NO: 2330931 - RNA, 19 nt, Homo sapiens
  misc_RNA (1)...(19): siRNA sense strand
caacaaucucagucuguaa

SEQ ID NO: 2330932 - RNA, 19 nt, Homo sapiens
  misc_RNA (1)...(19): siRNA sense strand
ucucaauaccaaagccuaa

SEQ ID NO: 2330933 - RNA, 19 nt, Homo sapiens
  misc_RNA (1)...(19): siRNA sense strand
gaggacaauaccugcgaaa

SEQ ID NO: 2330934 - RNA, 19 nt, Homo sapiens
  misc_RNA (1)...(19): siRNA sense strand
aguuuaugguuauggaaga

SEQ ID NO: 2330935 - RNA, 19 nt, Homo sapiens
  misc_RNA (1)...(19): siRNA sense strand
cagccaaagguucaggaaa

SEQ ID NO: 2330936 - RNA, 19 nt, Homo sapiens
  misc_RNA (1)...(19): siRNA sense strand
guguagagcaagcuguuua

SEQ ID NO: 2330937 - RNA, 19 nt, Homo sapiens
  misc_RNA (1)...(19): siRNA sense strand
ccuaugaagcuuugguaca

SEQ ID NO: 2330938 - RNA, 19 nt, Homo sapiens
  misc_RNA (1)...(19): siRNA sense strand
ggcugacaguguagagcaa

SEQ ID NO: 2330939 - RNA, 19 nt, Homo sapiens
  misc_RNA (1)...(19): siRNA sense strand
gugacauuggguuggaaua

SEQ ID NO: 2330940 - RNA, 19 nt, Homo sapiens
  misc_RNA (1)...(19): siRNA sense strand
agaugaugauagugauuca

SEQ ID NO: 2330941 - RNA, 19 nt, Homo sapiens
  misc_RNA (1)...(19): siRNA sense strand
caguaagccagcugccaaa

SEQ ID NO: 2330942 - RNA, 19 nt, Homo sapiens
  misc_RNA (1)...(19): siRNA sense strand
cuuacgagcaaauggaauu

SEQ ID NO: 2330943 - RNA, 19 nt, Homo sapiens
  misc_RNA (1)...(19): siRNA sense strand
ggaagaaguguguccguga

SEQ ID NO: 2330944 - RNA, 19 nt, Homo sapiens
  misc_RNA (1)...(19): siRNA sense strand
gagcaguugaaauggaaga

SEQ ID NO: 2330945 - RNA, 19 nt, Homo sapiens
  misc_RNA (1)...(19): siRNA sense strand
uaacgauaacccagaggaa

SEQ ID NO: 2330946 - RNA, 19 nt, Homo sapiens
  misc_RNA (1)...(19): siRNA sense strand
ucgaagaccaugaacguau

SEQ ID NO: 2330947 - RNA, 19 nt, Homo sapiens
  misc_RNA (1)...(19): siRNA sense strand
auaccaaagccuaacuuaa

SEQ ID NO: 2330948 - RNA, 19 nt, Homo sapiens
  misc_RNA (1)...(19): siRNA sense strand
cagaacaacuauggaguca

SEQ ID NO: 2330949 - RNA, 19 nt, Homo sapiens
  misc_RNA (1)...(19): siRNA sense strand
ccgagaagagaguaguauu

SEQ ID NO: 2330950 - RNA, 19 nt, Homo sapiens
  misc_RNA (1)...(19): siRNA sense strand
aguuagaugaugauaguga

SEQ ID NO: 2330951 - RNA, 19 nt, Homo sapiens
  misc_RNA (1)...(19): siRNA sense strand
uaucccaccaggagagaaa

SEQ ID NO: 2330952 - RNA, 19 nt, Homo sapiens
  misc_RNA (1)...(19): siRNA sense strand
gcugaguggcuauuugaaa

SEQ ID NO: 2330953 - RNA, 19 nt, Homo sapiens
  misc_RNA (1)...(19): siRNA sense strand
ccgcaauguccauagugaa

SEQ ID NO: 2330954 - RNA, 19 nt, Homo sapiens
  misc_RNA (1)...(19): siRNA sense strand
cccaaaauggccaggauaa

SEQ ID NO: 2330955 - RNA, 19 nt, Homo sapiens
  misc_RNA (1)...(19): siRNA sense strand
acgauguuguugaguggaa

SEQ ID NO: 2330956 - RNA, 19 nt, Homo sapiens
  misc_RNA (1)...(19): siRNA sense strand
ccucaagacaagaagagca

SEQ ID NO: 2330957 - RNA, 19 nt, Homo sapiens
  misc_RNA (1)...(19): siRNA sense strand
guugaaggguuuuggucua

SEQ ID NO: 2330958 - RNA, 19 nt, Homo sapiens
  misc_RNA (1)...(19): siRNA sense strand
uguccauagugaagacuuu

SEQ ID NO: 2330959 - RNA, 19 nt, Homo sapiens
  misc_RNA (1)...(19): siRNA sense strand
cuacauacaaucugaggga

SEQ ID NO: 2330960 - RNA, 19 nt, Homo sapiens
  misc_RNA (1)...(19): siRNA sense strand
agaagaauccaaugaaagu

SEQ ID NO: 2330961 - RNA, 19 nt, Homo sapiens
  misc_RNA (1)...(19): siRNA sense strand
aaucuguaggccaggguua

SEQ ID NO: 2330962 - RNA, 19 nt, Homo sapiens
  misc_RNA (1)...(19): siRNA sense strand
ccauauugccguucaacuu

SEQ ID NO: 2330963 - RNA, 19 nt, Homo sapiens
  misc_RNA (1)...(19): siRNA sense strand
cugagaaugaugagcgcuu

SEQ ID NO: 2330964 - RNA, 19 nt, Homo sapiens
  misc_RNA (1)...(19): siRNA sense strand
cauccagaguguuagguca

SEQ ID NO: 2330965 - RNA, 19 nt, Homo sapiens
  misc_RNA (1)...(19): siRNA sense strand
aacgaaaguuagaugauga

SEQ ID NO: 2330966 - RNA, 19 nt, Homo sapiens
  misc_RNA (1)...(19): siRNA sense strand
gcaccaaguagcagccuca

SEQ ID NO: 2330967 - RNA, 19 nt, Homo sapiens
  misc_RNA (1)...(19): siRNA sense strand
ccugguaacuacauacaau

SEQ ID NO: 2330968 - RNA, 19 nt, Homo sapiens
  misc_RNA (1)...(19): siRNA sense strand
aacauaaagcugagaaagu

SEQ ID NO: 2330969 - RNA, 19 nt, Homo sapiens
  misc_RNA (1)...(19): siRNA sense strand
cacaauugacagugaggau

SEQ ID NO: 2330970 - RNA, 19 nt, Homo sapiens
  misc_RNA (1)...(19): siRNA sense strand
uuacaguguuggucaguca

SEQ ID NO: 2330971 - RNA, 19 nt, Homo sapiens
  misc_RNA (1)...(19): siRNA sense strand
aaccaggacuaucggacaa

SEQ ID NO: 2330972 - RNA, 19 nt, Homo sapiens
  misc_RNA (1)...(19): siRNA sense strand
uggaauacuguaaagaaca

SEQ ID NO: 2330973 - RNA, 19 nt, Homo sapiens
  misc_RNA (1)...(19): siRNA sense strand
ugauagugagguugaccaa

SEQ ID NO: 2330974 - RNA, 19 nt, Homo sapiens
  misc_RNA (1)...(19): siRNA sense strand
ccgagauccucuuuaugaa

SEQ ID NO: 2330975 - RNA, 19 nt, Homo sapiens
  misc_RNA (1)...(19): siRNA sense strand
cuacaggagucaacaugau

SEQ ID NO: 2330976 - RNA, 19 nt, Homo sapiens
  misc_RNA (1)...(19): siRNA sense strand
caggagagaaauugagaag

SEQ ID NO: 2330977 - RNA, 19 nt, Homo sapiens
  misc_RNA (1)...(19): siRNA sense strand
ugguuauggaagagugaca

SEQ ID NO: 2330978 - RNA, 19 nt, Homo sapiens
  misc_RNA (1)...(19): siRNA sense strand
cugaguggcuauuugaaaa

SEQ ID NO: 2330979 - RNA, 19 nt, Homo sapiens
  misc_RNA (1)...(19): siRNA sense strand
agaaugcaucugagaauga

SEQ ID NO: 2330980 - RNA, 19 nt, Homo sapiens
  misc_RNA (1)...(19): siRNA sense strand
gagucaaaucuguaggcca

SEQ ID NO: 2330981 - RNA, 19 nt, Homo sapiens
  misc_RNA (1)...(19): siRNA sense strand
uagcaaaggcaggagaaaa

SEQ ID NO: 2330982 - RNA, 19 nt, Homo sapiens
  misc_RNA (1)...(19): siRNA sense strand
acaagaagagcaugggacu

SEQ ID NO: 2330983 - RNA, 19 nt, Homo sapiens
  misc_RNA (1)...(19): siRNA sense strand
agguagaugucgugggcaa

SEQ ID NO: 2330984 - RNA, 19 nt, Homo sapiens
  misc_RNA (1)...(19): siRNA sense strand
cagaguacucagaggccaa

SEQ ID NO: 2330985 - RNA, 19 nt, Homo sapiens
  misc_RNA (1)...(19): siRNA sense strand
ucucaaagcucgugggcag

SEQ ID NO: 2330986 - RNA, 19 nt, Homo sapiens
  misc_RNA (1)...(19): siRNA sense strand
gugacuggcuccuggguga

SEQ ID NO: 2330987 - RNA, 19 nt, Homo sapiens
  misc_RNA (1)...(19): siRNA sense strand
agaagaagaaacugcucaa

SEQ ID NO: 2330988 - RNA, 19 nt, Homo sapiens
  misc_RNA (1)...(19): siRNA sense strand
uugugaaccugaagggcau

SEQ ID NO: 2330989 - RNA, 19 nt, Homo sapiens
  misc_RNA (1)...(19): siRNA sense strand
gaucaaugagacagccaga

SEQ ID NO: 2330990 - RNA, 19 nt, Homo sapiens
  misc_RNA (1)...(19): siRNA sense strand
ccucaagagccugaagaau

SEQ ID NO: 2330991 - RNA, 19 nt, Homo sapiens
  misc_RNA (1)...(19): siRNA sense strand
ugaacgacuccaugaucaa

SEQ ID NO: 2330992 - RNA, 19 nt, Homo sapiens
  misc_RNA (1)...(19): siRNA sense strand
gagauaagauggaagaugc

SEQ ID NO: 2330993 - RNA, 19 nt, Homo sapiens
  misc_RNA (1)...(19): siRNA sense strand
agcacagauuugagguaga

SEQ ID NO: 2330994 - RNA, 19 nt, Homo sapiens
  misc_RNA (1)...(19): siRNA sense strand
ccgcaggccuugaacgacu

SEQ ID NO: 2330995 - RNA, 19 nt, Homo sapiens
  misc_RNA (1)...(19): siRNA sense strand
agaggagaagcuucggaaa

SEQ ID NO: 2330996 - RNA, 19 nt, Homo sapiens
  misc_RNA (1)...(19): siRNA sense strand
ggaagcugccccagagcaa

SEQ ID NO: 2330997 - RNA, 19 nt, Homo sapiens
  misc_RNA (1)...(19): siRNA sense strand
gccucaagagccugaagaa

SEQ ID NO: 2330998 - RNA, 19 nt, Homo sapiens
  misc_RNA (1)...(19): siRNA sense strand
gauggugggcagugugaca

SEQ ID NO: 2330999 - RNA, 19 nt, Homo sapiens
  misc_RNA (1)...(19): siRNA sense strand
gcuuggugguugcggucau

SEQ ID NO: 2331000 - RNA, 19 nt, Homo sapiens
  misc_RNA (1)...(19): siRNA sense strand
agguagaugucgugggcaa

SEQ ID NO: 2331001 - RNA, 19 nt, Homo sapiens
  misc_RNA (1)...(19): siRNA sense strand
cagaguacucagaggccaa

SEQ ID NO: 2331002 - RNA, 19 nt, Homo sapiens
  misc_RNA (1)...(19): siRNA sense strand
ucucaaagcucgugggcag

SEQ ID NO: 2331003 - RNA, 19 nt, Homo sapiens
  misc_RNA (1)...(19): siRNA sense strand
gugacuggcuccuggguga

SEQ ID NO: 2331004 - RNA, 19 nt, Homo sapiens
  misc_RNA (1)...(19): siRNA sense strand
agaagaagaaacugcucaa

SEQ ID NO: 2331005 - RNA, 19 nt, Homo sapiens
  misc_RNA (1)...(19): siRNA sense strand
uugugaaccugaagggcau

SEQ ID NO: 2331006 - RNA, 19 nt, Homo sapiens
  misc_RNA (1)...(19): siRNA sense strand
gaucaaugagacagccaga

SEQ ID NO: 2331007 - RNA, 19 nt, Homo sapiens
  misc_RNA (1)...(19): siRNA sense strand
ccucaagagccugaagaau

SEQ ID NO: 2331008 - RNA, 19 nt, Homo sapiens
  misc_RNA (1)...(19): siRNA sense strand
ugaacgacuccaugaucaa

SEQ ID NO: 2331009 - RNA, 19 nt, Homo sapiens
  misc_RNA (1)...(19): siRNA sense strand
gagauaagauggaagaugc

SEQ ID NO: 2331010 - RNA, 19 nt, Homo sapiens
  misc_RNA (1)...(19): siRNA sense strand
agcacagauuugagguaga

SEQ ID NO: 2331011 - RNA, 19 nt, Homo sapiens
  misc_RNA (1)...(19): siRNA sense strand
ccgcaggccuugaacgacu

SEQ ID NO: 2331012 - RNA, 19 nt, Homo sapiens
  misc_RNA (1)...(19): siRNA sense strand
agaggagaagcuucggaaa

SEQ ID NO: 2331013 - RNA, 19 nt, Homo sapiens
  misc_RNA (1)...(19): siRNA sense strand
ggaagcugccccagagcaa

SEQ ID NO: 2331014 - RNA, 19 nt, Homo sapiens
  misc_RNA (1)...(19): siRNA sense strand
gccucaagagccugaagaa

SEQ ID NO: 2331015 - RNA, 19 nt, Homo sapiens
  misc_RNA (1)...(19): siRNA sense strand
gauggugggcagugugaca

SEQ ID NO: 2331016 - RNA, 19 nt, Homo sapiens
  misc_RNA (1)...(19): siRNA sense strand
gcuuggugguugcggucau

SEQ ID NO: 2331017 - RNA, 19 nt, Homo sapiens
  misc_RNA (1)...(19): siRNA sense strand
agguagaugucgugggcaa

SEQ ID NO: 2331018 - RNA, 19 nt, Homo sapiens
  misc_RNA (1)...(19): siRNA sense strand
cagaguacucagaggccaa

SEQ ID NO: 2331019 - RNA, 19 nt, Homo sapiens
  misc_RNA (1)...(19): siRNA sense strand
ucucaaagcucgugggcag

SEQ ID NO: 2331020 - RNA, 19 nt, Homo sapiens
  misc_RNA (1)...(19): siRNA sense strand
gugacuggcuccuggguga

SEQ ID NO: 2331021 - RNA, 19 nt, Homo sapiens
  misc_RNA (1)...(19): siRNA sense strand
agaagaagaaacugcucaa

SEQ ID NO: 2331022 - RNA, 19 nt, Homo sapiens
  misc_RNA (1)...(19): siRNA sense strand
uugugaaccugaagggcau

SEQ ID NO: 2331023 - RNA, 19 nt, Homo sapiens
  misc_RNA (1)...(19): siRNA sense strand
gaucaaugagacagccaga

SEQ ID NO: 2331024 - RNA, 19 nt, Homo sapiens
  misc_RNA (1)...(19): siRNA sense strand
ccucaagagccugaagaau

SEQ ID NO: 2331025 - RNA, 19 nt, Homo sapiens
  misc_RNA (1)...(19): siRNA sense strand
ugaacgacuccaugaucaa

SEQ ID NO: 2331026 - RNA, 19 nt, Homo sapiens
  misc_RNA (1)...(19): siRNA sense strand
gagauaagauggaagaugc

SEQ ID NO: 2331027 - RNA, 19 nt, Homo sapiens
  misc_RNA (1)...(19): siRNA sense strand
agcacagauuugagguaga

SEQ ID NO: 2331028 - RNA, 19 nt, Homo sapiens
  misc_RNA (1)...(19): siRNA sense strand
ccgcaggccuugaacgacu

SEQ ID NO: 2331029 - RNA, 19 nt, Homo sapiens
  misc_RNA (1)...(19): siRNA sense strand
agaggagaagcuucggaaa

SEQ ID NO: 2331030 - RNA, 19 nt, Homo sapiens
  misc_RNA (1)...(19): siRNA sense strand
ggaagcugccccagagcaa

SEQ ID NO: 2331031 - RNA, 19 nt, Homo sapiens
  misc_RNA (1)...(19): siRNA sense strand
gccucaagagccugaagaa

SEQ ID NO: 2331032 - RNA, 19 nt, Homo sapiens
  misc_RNA (1)...(19): siRNA sense strand
gauggugggcagugugaca

SEQ ID NO: 2331033 - RNA, 19 nt, Homo sapiens
  misc_RNA (1)...(19): siRNA sense strand
gcuuggugguugcggucau

SEQ ID NO: 2331034 - RNA, 19 nt, Homo sapiens
  misc_RNA (1)...(19): siRNA sense strand
acaacuugggauagagaaa

SEQ ID NO: 2331035 - RNA, 19 nt, Homo sapiens
  misc_RNA (1)...(19): siRNA sense strand
ugguagaagaacugaagaa

SEQ ID NO: 2331036 - RNA, 19 nt, Homo sapiens
  misc_RNA (1)...(19): siRNA sense strand
agaaggaguuagagcggca

SEQ ID NO: 2331037 - RNA, 19 nt, Homo sapiens
  misc_RNA (1)...(19): siRNA sense strand
aaagaaaccuugagagcag

SEQ ID NO: 2331038 - RNA, 19 nt, Homo sapiens
  misc_RNA (1)...(19): siRNA sense strand
ggauagagaaagaagcugu

SEQ ID NO: 2331039 - RNA, 19 nt, Homo sapiens
  misc_RNA (1)...(19): siRNA sense strand
ccaaagaaaccuugagagc

SEQ ID NO: 2331040 - RNA, 19 nt, Homo sapiens
  misc_RNA (1)...(19): siRNA sense strand
gaaacuuggcuguggagca

SEQ ID NO: 2331041 - RNA, 19 nt, Homo sapiens
  misc_RNA (1)...(19): siRNA sense strand
ggcuauugguagaagaacu

SEQ ID NO: 2331042 - RNA, 19 nt, Homo sapiens
  misc_RNA (1)...(19): siRNA sense strand
gcagaaggaccuggggaaa

SEQ ID NO: 2331043 - RNA, 19 nt, Homo sapiens
  misc_RNA (1)...(19): siRNA sense strand
aaacaguauugguugcaga

SEQ ID NO: 2331044 - RNA, 19 nt, Homo sapiens
  misc_RNA (1)...(19): siRNA sense strand
aauacaagcuuuuggacau

SEQ ID NO: 2331045 - RNA, 19 nt, Homo sapiens
  misc_RNA (1)...(19): siRNA sense strand
ggggagugaagaagggauu

SEQ ID NO: 2331046 - RNA, 19 nt, Homo sapiens
  misc_RNA (1)...(19): siRNA sense strand
ggaagauaauaaaucccau

SEQ ID NO: 2331047 - RNA, 19 nt, Homo sapiens
  misc_RNA (1)...(19): siRNA sense strand
cugaagaaaaggaauguuu

SEQ ID NO: 2331048 - RNA, 19 nt, Homo sapiens
  misc_RNA (1)...(19): siRNA sense strand
uauuccaagcccaaagaaa

SEQ ID NO: 2331049 - RNA, 19 nt, Homo sapiens
  misc_RNA (1)...(19): siRNA sense strand
gacaaaacaaagaggaaaa

SEQ ID NO: 2331050 - RNA, 19 nt, Homo sapiens
  misc_RNA (1)...(19): siRNA sense strand
aagauaagaaacugggaau

SEQ ID NO: 2331051 - RNA, 19 nt, Homo sapiens
  misc_RNA (1)...(19): siRNA sense strand
guguagaagauaagaaacu

SEQ ID NO: 2331052 - RNA, 19 nt, Homo sapiens
  misc_RNA (1)...(19): siRNA sense strand
cguugcaggaggugugaaa

SEQ ID NO: 2331053 - RNA, 19 nt, Homo sapiens
  misc_RNA (1)...(19): siRNA sense strand
cuguguagaagauaagaaa

SEQ ID NO: 2331054 - RNA, 19 nt, Homo sapiens
  misc_RNA (1)...(19): siRNA sense strand
uggagaggugugaguguaa

SEQ ID NO: 2331055 - RNA, 19 nt, Homo sapiens
  misc_RNA (1)...(19): siRNA sense strand
gaagauaagaaacugggaa

SEQ ID NO: 2331056 - RNA, 19 nt, Homo sapiens
  misc_RNA (1)...(19): siRNA sense strand
cagacaaaacaaagaggaa

SEQ ID NO: 2331057 - RNA, 19 nt, Homo sapiens
  misc_RNA (1)...(19): siRNA sense strand
caaugaagcuggaaggcag

SEQ ID NO: 2331058 - RNA, 19 nt, Homo sapiens
  misc_RNA (1)...(19): siRNA sense strand
gggacacaaggcagagaau

SEQ ID NO: 2331059 - RNA, 19 nt, Homo sapiens
  misc_RNA (1)...(19): siRNA sense strand
ucggaaacaccacgggcaa

SEQ ID NO: 2331060 - RNA, 19 nt, Homo sapiens
  misc_RNA (1)...(19): siRNA sense strand
agacaaaacaaagaggaaa

SEQ ID NO: 2331061 - RNA, 19 nt, Homo sapiens
  misc_RNA (1)...(19): siRNA sense strand
cggaaacaccacgggcaaa

SEQ ID NO: 2331062 - RNA, 19 nt, Homo sapiens
  misc_RNA (1)...(19): siRNA sense strand
ugugaaaacaugcuggaaa

SEQ ID NO: 2331063 - RNA, 19 nt, Homo sapiens
  misc_RNA (1)...(19): siRNA sense strand
gagcugugcaagaggaaac

SEQ ID NO: 2331064 - RNA, 19 nt, Homo sapiens
  misc_RNA (1)...(19): siRNA sense strand
gacaaaacaaagaggaaaa

SEQ ID NO: 2331065 - RNA, 19 nt, Homo sapiens
  misc_RNA (1)...(19): siRNA sense strand
aagauaagaaacugggaau

SEQ ID NO: 2331066 - RNA, 19 nt, Homo sapiens
  misc_RNA (1)...(19): siRNA sense strand
guguagaagauaagaaacu

SEQ ID NO: 2331067 - RNA, 19 nt, Homo sapiens
  misc_RNA (1)...(19): siRNA sense strand
cguugcaggaggugugaaa

SEQ ID NO: 2331068 - RNA, 19 nt, Homo sapiens
  misc_RNA (1)...(19): siRNA sense strand
cuguguagaagauaagaaa

SEQ ID NO: 2331069 - RNA, 19 nt, Homo sapiens
  misc_RNA (1)...(19): siRNA sense strand
uggagaggugugaguguaa

SEQ ID NO: 2331070 - RNA, 19 nt, Homo sapiens
  misc_RNA (1)...(19): siRNA sense strand
gaagauaagaaacugggaa

SEQ ID NO: 2331071 - RNA, 19 nt, Homo sapiens
  misc_RNA (1)...(19): siRNA sense strand
cagacaaaacaaagaggaa

SEQ ID NO: 2331072 - RNA, 19 nt, Homo sapiens
  misc_RNA (1)...(19): siRNA sense strand
caaugaagcuggaaggcag

SEQ ID NO: 2331073 - RNA, 19 nt, Homo sapiens
  misc_RNA (1)...(19): siRNA sense strand
gggacacaaggcagagaau

SEQ ID NO: 2331074 - RNA, 19 nt, Homo sapiens
  misc_RNA (1)...(19): siRNA sense strand
ucggaaacaccacgggcaa

SEQ ID NO: 2331075 - RNA, 19 nt, Homo sapiens
  misc_RNA (1)...(19): siRNA sense strand
agacaaaacaaagaggaaa

SEQ ID NO: 2331076 - RNA, 19 nt, Homo sapiens
  misc_RNA (1)...(19): siRNA sense strand
cggaaacaccacgggcaaa

SEQ ID NO: 2331077 - RNA, 19 nt, Homo sapiens
  misc_RNA (1)...(19): siRNA sense strand
ugugaaaacaugcuggaaa

SEQ ID NO: 2331078 - RNA, 19 nt, Homo sapiens
  misc_RNA (1)...(19): siRNA sense strand
gagcugugcaagaggaaac

SEQ ID NO: 2331079 - RNA, 19 nt, Homo sapiens
  misc_RNA (1)...(19): siRNA sense strand
acaagacaggcaagaacaa

SEQ ID NO: 2331080 - RNA, 19 nt, Homo sapiens
  misc_RNA (1)...(19): siRNA sense strand
cgugaagaacauugaugau

SEQ ID NO: 2331081 - RNA, 19 nt, Homo sapiens
  misc_RNA (1)...(19): siRNA sense strand
cugucaucgugaagaacau

SEQ ID NO: 2331082 - RNA, 19 nt, Homo sapiens
  misc_RNA (1)...(19): siRNA sense strand
uggcuggaauugaccgcua

SEQ ID NO: 2331083 - RNA, 19 nt, Homo sapiens
  misc_RNA (1)...(19): siRNA sense strand
gagagauacaagacaggca

SEQ ID NO: 2331084 - RNA, 19 nt, Homo sapiens
  misc_RNA (1)...(19): siRNA sense strand
agagauacaagacaggcaa

SEQ ID NO: 2331085 - RNA, 19 nt, Homo sapiens
  misc_RNA (1)...(19): siRNA sense strand
gaagagagauacaagacag

SEQ ID NO: 2331086 - RNA, 19 nt, Homo sapiens
  misc_RNA (1)...(19): siRNA sense strand
gagcgugagaacagggaau

SEQ ID NO: 2331087 - RNA, 19 nt, Homo sapiens
  misc_RNA (1)...(19): siRNA sense strand
cgauagugugacugccaaa

SEQ ID NO: 2331088 - RNA, 19 nt, Homo sapiens
  misc_RNA (1)...(19): siRNA sense strand
gcgucuauuaugaguggaa

SEQ ID NO: 2331089 - RNA, 19 nt, Homo sapiens
  misc_RNA (1)...(19): siRNA sense strand
caguaugagcuaacggaca

SEQ ID NO: 2331090 - RNA, 19 nt, Homo sapiens
  misc_RNA (1)...(19): siRNA sense strand
acacaggauucuaguggga

SEQ ID NO: 2331091 - RNA, 19 nt, Homo sapiens
  misc_RNA (1)...(19): siRNA sense strand
cguugauuaugcaaggcaa

SEQ ID NO: 2331092 - RNA, 19 nt, Homo sapiens
  misc_RNA (1)...(19): siRNA sense strand
cgggaugacgauaguguga

SEQ ID NO: 2331093 - RNA, 19 nt, Homo sapiens
  misc_RNA (1)...(19): siRNA sense strand
cugccaaagaucuuagcaa

SEQ ID NO: 2331094 - RNA, 19 nt, Homo sapiens
  misc_RNA (1)...(19): siRNA sense strand
aagacaauguggagcucau

SEQ ID NO: 2331095 - RNA, 19 nt, Homo sapiens
  misc_RNA (1)...(19): siRNA sense strand
cgaugaaguugacaggcga

SEQ ID NO: 2331096 - RNA, 19 nt, Homo sapiens
  misc_RNA (1)...(19): siRNA sense strand
uaugaguggaagacguaaa

SEQ ID NO: 2331097 - RNA, 19 nt, Homo sapiens
  misc_RNA (1)...(19): siRNA sense strand
gcggaauucaucagagcca

SEQ ID NO: 2331098 - RNA, 19 nt, Homo sapiens
  misc_RNA (1)...(19): siRNA sense strand
uggcaaaagcugcuaagaa

SEQ ID NO: 2331099 - RNA, 19 nt, Homo sapiens
  misc_RNA (1)...(19): siRNA sense strand
agcacagcguugagaguca

SEQ ID NO: 2331100 - RNA, 19 nt, Homo sapiens
  misc_RNA (1)...(19): siRNA sense strand
aggcugaauuauuggcagu

SEQ ID NO: 2331101 - RNA, 19 nt, Homo sapiens
  misc_RNA (1)...(19): siRNA sense strand
agaacagggaaucuugaaa

SEQ ID NO: 2331102 - RNA, 19 nt, Homo sapiens
  misc_RNA (1)...(19): siRNA sense strand
guauaauaacggugcuaac

SEQ ID NO: 2331103 - RNA, 19 nt, Homo sapiens
  misc_RNA (1)...(19): siRNA sense strand
aagugaggcaucugaaaca

SEQ ID NO: 2331104 - RNA, 19 nt, Homo sapiens
  misc_RNA (1)...(19): siRNA sense strand
uauaauaccucaaauggca

SEQ ID NO: 2331105 - RNA, 19 nt, Homo sapiens
  misc_RNA (1)...(19): siRNA sense strand
gcaaaagcugcuaagaaga

SEQ ID NO: 2331106 - RNA, 19 nt, Homo sapiens
  misc_RNA (1)...(19): siRNA sense strand
gagcgugagaacagggaau

SEQ ID NO: 2331107 - RNA, 19 nt, Homo sapiens
  misc_RNA (1)...(19): siRNA sense strand
cgauagugugacugccaaa

SEQ ID NO: 2331108 - RNA, 19 nt, Homo sapiens
  misc_RNA (1)...(19): siRNA sense strand
gcgucuauuaugaguggaa

SEQ ID NO: 2331109 - RNA, 19 nt, Homo sapiens
  misc_RNA (1)...(19): siRNA sense strand
caguaugagcuaacggaca

SEQ ID NO: 2331110 - RNA, 19 nt, Homo sapiens
  misc_RNA (1)...(19): siRNA sense strand
acacaggauucuaguggga

SEQ ID NO: 2331111 - RNA, 19 nt, Homo sapiens
  misc_RNA (1)...(19): siRNA sense strand
cguugauuaugcaaggcaa

SEQ ID NO: 2331112 - RNA, 19 nt, Homo sapiens
  misc_RNA (1)...(19): siRNA sense strand
cgggaugacgauaguguga

SEQ ID NO: 2331113 - RNA, 19 nt, Homo sapiens
  misc_RNA (1)...(19): siRNA sense strand
cugccaaagaucuuagcaa

SEQ ID NO: 2331114 - RNA, 19 nt, Homo sapiens
  misc_RNA (1)...(19): siRNA sense strand
aagacaauguggagcucau

SEQ ID NO: 2331115 - RNA, 19 nt, Homo sapiens
  misc_RNA (1)...(19): siRNA sense strand
cgaugaaguugacaggcga

SEQ ID NO: 2331116 - RNA, 19 nt, Homo sapiens
  misc_RNA (1)...(19): siRNA sense strand
uaugaguggaagacguaaa

SEQ ID NO: 2331117 - RNA, 19 nt, Homo sapiens
  misc_RNA (1)...(19): siRNA sense strand
gcggaauucaucagagcca

SEQ ID NO: 2331118 - RNA, 19 nt, Homo sapiens
  misc_RNA (1)...(19): siRNA sense strand
uggcaaaagcugcuaagaa

SEQ ID NO: 2331119 - RNA, 19 nt, Homo sapiens
  misc_RNA (1)...(19): siRNA sense strand
agcacagcguugagaguca

SEQ ID NO: 2331120 - RNA, 19 nt, Homo sapiens
  misc_RNA (1)...(19): siRNA sense strand
aggcugaauuauuggcagu

SEQ ID NO: 2331121 - RNA, 19 nt, Homo sapiens
  misc_RNA (1)...(19): siRNA sense strand
agaacagggaaucuugaaa

SEQ ID NO: 2331122 - RNA, 19 nt, Homo sapiens
  misc_RNA (1)...(19): siRNA sense strand
guauaauaacggugcuaac

SEQ ID NO: 2331123 - RNA, 19 nt, Homo sapiens
  misc_RNA (1)...(19): siRNA sense strand
aagugaggcaucugaaaca

SEQ ID NO: 2331124 - RNA, 19 nt, Homo sapiens
  misc_RNA (1)...(19): siRNA sense strand
uauaauaccucaaauggca

SEQ ID NO: 2331125 - RNA, 19 nt, Homo sapiens
  misc_RNA (1)...(19): siRNA sense strand
gcaaaagcugcuaagaaga

SEQ ID NO: 2331126 - RNA, 19 nt, Homo sapiens
  misc_RNA (1)...(19): siRNA sense strand
gagcgugagaacagggaau

SEQ ID NO: 2331127 - RNA, 19 nt, Homo sapiens
  misc_RNA (1)...(19): siRNA sense strand
cgauagugugacugccaaa

SEQ ID NO: 2331128 - RNA, 19 nt, Homo sapiens
  misc_RNA (1)...(19): siRNA sense strand
gcgucuauuaugaguggaa

SEQ ID NO: 2331129 - RNA, 19 nt, Homo sapiens
  misc_RNA (1)...(19): siRNA sense strand
caguaugagcuaacggaca

SEQ ID NO: 2331130 - RNA, 19 nt, Homo sapiens
  misc_RNA (1)...(19): siRNA sense strand
acacaggauucuaguggga

SEQ ID NO: 2331131 - RNA, 19 nt, Homo sapiens
  misc_RNA (1)...(19): siRNA sense strand
cguugauuaugcaaggcaa

SEQ ID NO: 2331132 - RNA, 19 nt, Homo sapiens
  misc_RNA (1)...(19): siRNA sense strand
cgggaugacgauaguguga

SEQ ID NO: 2331133 - RNA, 19 nt, Homo sapiens
  misc_RNA (1)...(19): siRNA sense strand
cugccaaagaucuuagcaa

SEQ ID NO: 2331134 - RNA, 19 nt, Homo sapiens
  misc_RNA (1)...(19): siRNA sense strand
aagacaauguggagcucau

SEQ ID NO: 2331135 - RNA, 19 nt, Homo sapiens
  misc_RNA (1)...(19): siRNA sense strand
cgaugaaguugacaggcga

SEQ ID NO: 2331136 - RNA, 19 nt, Homo sapiens
  misc_RNA (1)...(19): siRNA sense strand
uaugaguggaagacguaaa

SEQ ID NO: 2331137 - RNA, 19 nt, Homo sapiens
  misc_RNA (1)...(19): siRNA sense strand
gcggaauucaucagagcca

SEQ ID NO: 2331138 - RNA, 19 nt, Homo sapiens
  misc_RNA (1)...(19): siRNA sense strand
uggcaaaagcugcuaagaa

SEQ ID NO: 2331139 - RNA, 19 nt, Homo sapiens
  misc_RNA (1)...(19): siRNA sense strand
agcacagcguugagaguca

SEQ ID NO: 2331140 - RNA, 19 nt, Homo sapiens
  misc_RNA (1)...(19): siRNA sense strand
aggcugaauuauuggcagu

SEQ ID NO: 2331141 - RNA, 19 nt, Homo sapiens
  misc_RNA (1)...(19): siRNA sense strand
agaacagggaaucuugaaa

SEQ ID NO: 2331142 - RNA, 19 nt, Homo sapiens
  misc_RNA (1)...(19): siRNA sense strand
guauaauaacggugcuaac

SEQ ID NO: 2331143 - RNA, 19 nt, Homo sapiens
  misc_RNA (1)...(19): siRNA sense strand
aagugaggcaucugaaaca

SEQ ID NO: 2331144 - RNA, 19 nt, Homo sapiens
  misc_RNA (1)...(19): siRNA sense strand
uauaauaccucaaauggca

SEQ ID NO: 2331145 - RNA, 19 nt, Homo sapiens
  misc_RNA (1)...(19): siRNA sense strand
gcaaaagcugcuaagaaga

SEQ ID NO: 2331146 - RNA, 19 nt, Homo sapiens
  misc_RNA (1)...(19): siRNA sense strand
gagcgugagaacagggaau

SEQ ID NO: 2331147 - RNA, 19 nt, Homo sapiens
  misc_RNA (1)...(19): siRNA sense strand
cgauagugugacugccaaa

SEQ ID NO: 2331148 - RNA, 19 nt, Homo sapiens
  misc_RNA (1)...(19): siRNA sense strand
gcgucuauuaugaguggaa

SEQ ID NO: 2331149 - RNA, 19 nt, Homo sapiens
  misc_RNA (1)...(19): siRNA sense strand
caguaugagcuaacggaca

SEQ ID NO: 2331150 - RNA, 19 nt, Homo sapiens
  misc_RNA (1)...(19): siRNA sense strand
acacaggauucuaguggga

SEQ ID NO: 2331151 - RNA, 19 nt, Homo sapiens
  misc_RNA (1)...(19): siRNA sense strand
cguugauuaugcaaggcaa

SEQ ID NO: 2331152 - RNA, 19 nt, Homo sapiens
  misc_RNA (1)...(19): siRNA sense strand
cgggaugacgauaguguga

SEQ ID NO: 2331153 - RNA, 19 nt, Homo sapiens
  misc_RNA (1)...(19): siRNA sense strand
cugccaaagaucuuagcaa

SEQ ID NO: 2331154 - RNA, 19 nt, Homo sapiens
  misc_RNA (1)...(19): siRNA sense strand
aagacaauguggagcucau

SEQ ID NO: 2331155 - RNA, 19 nt, Homo sapiens
  misc_RNA (1)...(19): siRNA sense strand
cgaugaaguugacaggcga

SEQ ID NO: 2331156 - RNA, 19 nt, Homo sapiens
  misc_RNA (1)...(19): siRNA sense strand
uaugaguggaagacguaaa

SEQ ID NO: 2331157 - RNA, 19 nt, Homo sapiens
  misc_RNA (1)...(19): siRNA sense strand
gcggaauucaucagagcca

SEQ ID NO: 2331158 - RNA, 19 nt, Homo sapiens
  misc_RNA (1)...(19): siRNA sense strand
uggcaaaagcugcuaagaa

SEQ ID NO: 2331159 - RNA, 19 nt, Homo sapiens
  misc_RNA (1)...(19): siRNA sense strand
agcacagcguugagaguca

SEQ ID NO: 2331160 - RNA, 19 nt, Homo sapiens
  misc_RNA (1)...(19): siRNA sense strand
aggcugaauuauuggcagu

SEQ ID NO: 2331161 - RNA, 19 nt, Homo sapiens
  misc_RNA (1)...(19): siRNA sense strand
agaacagggaaucuugaaa

SEQ ID NO: 2331162 - RNA, 19 nt, Homo sapiens
  misc_RNA (1)...(19): siRNA sense strand
guauaauaacggugcuaac

SEQ ID NO: 2331163 - RNA, 19 nt, Homo sapiens
  misc_RNA (1)...(19): siRNA sense strand
aagugaggcaucugaaaca

SEQ ID NO: 2331164 - RNA, 19 nt, Homo sapiens
  misc_RNA (1)...(19): siRNA sense strand
uauaauaccucaaauggca

SEQ ID NO: 2331165 - RNA, 19 nt, Homo sapiens
  misc_RNA (1)...(19): siRNA sense strand
gcaaaagcugcuaagaaga

SEQ ID NO: 2331166 - RNA, 19 nt, Homo sapiens
  misc_RNA (1)...(19): siRNA sense strand
gugcaagggaggaggagga

SEQ ID NO: 2331167 - RNA, 19 nt, Homo sapiens
  misc_RNA (1)...(19): siRNA sense strand
cggacgacguggucagcau

SEQ ID NO: 2331168 - RNA, 19 nt, Homo sapiens
  misc_RNA (1)...(19): siRNA sense strand
agguggaggagaagcggaa

SEQ ID NO: 2331169 - RNA, 19 nt, Homo sapiens
  misc_RNA (1)...(19): siRNA sense strand
aggaggacgacgaggagau

SEQ ID NO: 2331170 - RNA, 19 nt, Homo sapiens
  misc_RNA (1)...(19): siRNA sense strand
gggaagaggaugaggaggc

SEQ ID NO: 2331171 - RNA, 19 nt, Homo sapiens
  misc_RNA (1)...(19): siRNA sense strand
agaauuacaucgagcacgu

SEQ ID NO: 2331172 - RNA, 19 nt, Homo sapiens
  misc_RNA (1)...(19): siRNA sense strand
cugcgagauuucaguccaa

SEQ ID NO: 2331173 - RNA, 19 nt, Homo sapiens
  misc_RNA (1)...(19): siRNA sense strand
gcggcagcagagacggaaa

SEQ ID NO: 2331174 - RNA, 19 nt, Homo sapiens
  misc_RNA (1)...(19): siRNA sense strand
gagcaggaggagcuggaga

SEQ ID NO: 2331175 - RNA, 19 nt, Homo sapiens
  misc_RNA (1)...(19): siRNA sense strand
agcaggaggagcuggagaa

SEQ ID NO: 2331176 - RNA, 19 nt, Homo sapiens
  misc_RNA (1)...(19): siRNA sense strand
aggaggagcucgagaggca

SEQ ID NO: 2331177 - RNA, 19 nt, Homo sapiens
  misc_RNA (1)...(19): siRNA sense strand
ucgaggagcugcagagcca

SEQ ID NO: 2331178 - RNA, 19 nt, Homo sapiens
  misc_RNA (1)...(19): siRNA sense strand
agcaagaagucgagcgaag

SEQ ID NO: 2331179 - RNA, 19 nt, Homo sapiens
  misc_RNA (1)...(19): siRNA sense strand
ccucugacaagcugagcaa

SEQ ID NO: 2331180 - RNA, 19 nt, Homo sapiens
  misc_RNA (1)...(19): siRNA sense strand
ucugacaagcugagcaaga

SEQ ID NO: 2331181 - RNA, 19 nt, Homo sapiens
  misc_RNA (1)...(19): siRNA sense strand
agagcgacgagauggacaa

SEQ ID NO: 2331182 - RNA, 19 nt, Homo sapiens
  misc_RNA (1)...(19): siRNA sense strand
agaagauagaagacaacaa

SEQ ID NO: 2331183 - RNA, 19 nt, Homo sapiens
  misc_RNA (1)...(19): siRNA sense strand
auggagagaagaaggcaua

SEQ ID NO: 2331184 - RNA, 19 nt, Homo sapiens
  misc_RNA (1)...(19): siRNA sense strand
cccaaauauccucggaaga

SEQ ID NO: 2331185 - RNA, 19 nt, Homo sapiens
  misc_RNA (1)...(19): siRNA sense strand
uguucauuguggauguuaa

SEQ ID NO: 2331186 - RNA, 19 nt, Homo sapiens
  misc_RNA (1)...(19): siRNA sense strand
ccgaaagcgaagaaggaag

SEQ ID NO: 2331187 - RNA, 19 nt, Homo sapiens
  misc_RNA (1)...(19): siRNA sense strand
cgccgaaagcgaagaagga

SEQ ID NO: 2331188 - RNA, 19 nt, Homo sapiens
  misc_RNA (1)...(19): siRNA sense strand
aggcaguguugaaaggugu

SEQ ID NO: 2331189 - RNA, 19 nt, Homo sapiens
  misc_RNA (1)...(19): siRNA sense strand
cuccuaaagcugaagccaa

SEQ ID NO: 2331190 - RNA, 19 nt, Homo sapiens
  misc_RNA (1)...(19): siRNA sense strand
ggagaaacaagcuugacca

SEQ ID NO: 2331191 - RNA, 19 nt, Homo sapiens
  misc_RNA (1)...(19): siRNA sense strand
gugaaaauggggagagaau

SEQ ID NO: 2331192 - RNA, 19 nt, Homo sapiens
  misc_RNA (1)...(19): siRNA sense strand
uggagaagcugcagagcca

SEQ ID NO: 2331193 - RNA, 19 nt, Homo sapiens
  misc_RNA (1)...(19): siRNA sense strand
ucaacaagcucauggggaa

SEQ ID NO: 2331194 - RNA, 19 nt, Homo sapiens
  misc_RNA (1)...(19): siRNA sense strand
ucucacaaguggacgccaa

SEQ ID NO: 2331195 - RNA, 19 nt, Homo sapiens
  misc_RNA (1)...(19): siRNA sense strand
gcaugaaagaccagcugau

SEQ ID NO: 2331196 - RNA, 19 nt, Homo sapiens
  misc_RNA (1)...(19): siRNA sense strand
cagcagaucuaccuggaga

SEQ ID NO: 2331197 - RNA, 19 nt, Homo sapiens
  misc_RNA (1)...(19): siRNA sense strand
gggaaguggccaacgagga

SEQ ID NO: 2331198 - RNA, 19 nt, Homo sapiens
  misc_RNA (1)...(19): siRNA sense strand
cagccugcccgaagaggaa

SEQ ID NO: 2331199 - RNA, 19 nt, Homo sapiens
  misc_RNA (1)...(19): siRNA sense strand
ccaaggguggcaaggacaa

SEQ ID NO: 2331200 - RNA, 19 nt, Homo sapiens
  misc_RNA (1)...(19): siRNA sense strand
ccaagaagcaaaagaggga

SEQ ID NO: 2331201 - RNA, 19 nt, Homo sapiens
  misc_RNA (1)...(19): siRNA sense strand
ggucagugagugugagaag

SEQ ID NO: 2331202 - RNA, 19 nt, Homo sapiens
  misc_RNA (1)...(19): siRNA sense strand
gaggagugagauugaguca

SEQ ID NO: 2331203 - RNA, 19 nt, Homo sapiens
  misc_RNA (1)...(19): siRNA sense strand
ccaaccaguuccagaggca

SEQ ID NO: 2331204 - RNA, 19 nt, Homo sapiens
  misc_RNA (1)...(19): siRNA sense strand
cgccaaggucagugagugu

SEQ ID NO: 2331205 - RNA, 19 nt, Homo sapiens
  misc_RNA (1)...(19): siRNA sense strand
gggaaagaugagagcaccu

SEQ ID NO: 2331206 - RNA, 19 nt, Homo sapiens
  misc_RNA (1)...(19): siRNA sense strand
aagcuggcacugaggacua

SEQ ID NO: 2331207 - RNA, 19 nt, Homo sapiens
  misc_RNA (1)...(19): siRNA sense strand
gggagguggugaaaagaca

SEQ ID NO: 2331208 - RNA, 19 nt, Homo sapiens
  misc_RNA (1)...(19): siRNA sense strand
cuuuaugagcugaugcaga

SEQ ID NO: 2331209 - RNA, 19 nt, Homo sapiens
  misc_RNA (1)...(19): siRNA sense strand
cgcucaagaucaugcugaa

SEQ ID NO: 2331210 - RNA, 19 nt, Homo sapiens
  misc_RNA (1)...(19): siRNA sense strand
ucagggagaucgcagggaa

SEQ ID NO: 2331211 - RNA, 19 nt, Homo sapiens
  misc_RNA (1)...(19): siRNA sense strand
ucgugagggaaguggccaa

SEQ ID NO: 2331212 - RNA, 19 nt, Homo sapiens
  misc_RNA (1)...(19): siRNA sense strand
caacaagcucauggggaaa

SEQ ID NO: 2331213 - RNA, 19 nt, Homo sapiens
  misc_RNA (1)...(19): siRNA sense strand
agaaauacgucuuugcuuc

SEQ ID NO: 2331214 - RNA, 19 nt, Homo sapiens
  misc_RNA (1)...(19): siRNA sense strand
agaaaaguacgguguguuu

SEQ ID NO: 2331215 - RNA, 19 nt, Homo sapiens
  misc_RNA (1)...(19): siRNA sense strand
gccacgaguuugaagcuga

SEQ ID NO: 2331216 - RNA, 19 nt, Homo sapiens
  misc_RNA (1)...(19): siRNA sense strand
cagccuacgccaagaagca

SEQ ID NO: 2331217 - RNA, 19 nt, Homo sapiens
  misc_RNA (1)...(19): siRNA sense strand
agagauggaugaagccgau

SEQ ID NO: 2331218 - RNA, 19 nt, Homo sapiens
  misc_RNA (1)...(19): siRNA sense strand
gggaagaaccagcagguga

SEQ ID NO: 2331219 - RNA, 19 nt, Homo sapiens
  misc_RNA (1)...(19): siRNA sense strand
gcgacaucugcgagggcua

SEQ ID NO: 2331220 - RNA, 19 nt, Homo sapiens
  misc_RNA (1)...(19): siRNA sense strand
gcgcagacauguucagcga

SEQ ID NO: 2331221 - RNA, 19 nt, Homo sapiens
  misc_RNA (1)...(19): siRNA sense strand
gagucaagugcuggagaaa

SEQ ID NO: 2331222 - RNA, 19 nt, Homo sapiens
  misc_RNA (1)...(19): siRNA sense strand
cugcagaagaugauugaca

SEQ ID NO: 2331223 - RNA, 19 nt, Homo sapiens
  misc_RNA (1)...(19): siRNA sense strand
ccaucuaccuucuggcaca

SEQ ID NO: 2331224 - RNA, 19 nt, Homo sapiens
  misc_RNA (1)...(19): siRNA sense strand
cagagaaagaaguugcaga

SEQ ID NO: 2331225 - RNA, 19 nt, Homo sapiens
  misc_RNA (1)...(19): siRNA sense strand
ucgggaacaucgaggacau

SEQ ID NO: 2331226 - RNA, 19 nt, Homo sapiens
  misc_RNA (1)...(19): siRNA sense strand
ccaaaagccagcagcgaau

SEQ ID NO: 2331227 - RNA, 19 nt, Homo sapiens
  misc_RNA (1)...(19): siRNA sense strand
ccaugaagaacguggccca

SEQ ID NO: 2331228 - RNA, 19 nt, Homo sapiens
  misc_RNA (1)...(19): siRNA sense strand
uagaggacugggagggaga

SEQ ID NO: 2331229 - RNA, 19 nt, Homo sapiens
  misc_RNA (1)...(19): siRNA sense strand
acauaggggcagugcacaa

SEQ ID NO: 2331230 - RNA, 19 nt, Homo sapiens
  misc_RNA (1)...(19): siRNA sense strand
cuggagaagacacagagaa

SEQ ID NO: 2331231 - RNA, 19 nt, Homo sapiens
  misc_RNA (1)...(19): siRNA sense strand
agaaagaaguugcagaagc

SEQ ID NO: 2331232 - RNA, 19 nt, Homo sapiens
  misc_RNA (1)...(19): siRNA sense strand
gggaagaaccagcagguga

SEQ ID NO: 2331233 - RNA, 19 nt, Homo sapiens
  misc_RNA (1)...(19): siRNA sense strand
gcgacaucugcgagggcua

SEQ ID NO: 2331234 - RNA, 19 nt, Homo sapiens
  misc_RNA (1)...(19): siRNA sense strand
gcgcagacauguucagcga

SEQ ID NO: 2331235 - RNA, 19 nt, Homo sapiens
  misc_RNA (1)...(19): siRNA sense strand
gagucaagugcuggagaaa

SEQ ID NO: 2331236 - RNA, 19 nt, Homo sapiens
  misc_RNA (1)...(19): siRNA sense strand
cugcagaagaugauugaca

SEQ ID NO: 2331237 - RNA, 19 nt, Homo sapiens
  misc_RNA (1)...(19): siRNA sense strand
cagagaaagaaguugcaga

SEQ ID NO: 2331238 - RNA, 19 nt, Homo sapiens
  misc_RNA (1)...(19): siRNA sense strand
ucgggaacaucgaggacau

SEQ ID NO: 2331239 - RNA, 19 nt, Homo sapiens
  misc_RNA (1)...(19): siRNA sense strand
ccaaaagccagcagcgaau

SEQ ID NO: 2331240 - RNA, 19 nt, Homo sapiens
  misc_RNA (1)...(19): siRNA sense strand
ccaugaagaacguggccca

SEQ ID NO: 2331241 - RNA, 19 nt, Homo sapiens
  misc_RNA (1)...(19): siRNA sense strand
uagaggacugggagggaga

SEQ ID NO: 2331242 - RNA, 19 nt, Homo sapiens
  misc_RNA (1)...(19): siRNA sense strand
acauaggggcagugcacaa

SEQ ID NO: 2331243 - RNA, 19 nt, Homo sapiens
  misc_RNA (1)...(19): siRNA sense strand
cuggagaagacacagagaa

SEQ ID NO: 2331244 - RNA, 19 nt, Homo sapiens
  misc_RNA (1)...(19): siRNA sense strand
agaaagaaguugcagaagc

SEQ ID NO: 2331245 - RNA, 19 nt, Homo sapiens
  misc_RNA (1)...(19): siRNA sense strand
ugaaaauaguggaagguaa

SEQ ID NO: 2331246 - RNA, 19 nt, Homo sapiens
  misc_RNA (1)...(19): siRNA sense strand
augaagaagaugaggagaa

SEQ ID NO: 2331247 - RNA, 19 nt, Homo sapiens
  misc_RNA (1)...(19): siRNA sense strand
ggcagaaauuuaugagcaa

SEQ ID NO: 2331248 - RNA, 19 nt, Homo sapiens
  misc_RNA (1)...(19): siRNA sense strand
auguagaagcuguaagaaa

SEQ ID NO: 2331249 - RNA, 19 nt, Homo sapiens
  misc_RNA (1)...(19): siRNA sense strand
uggaauuagaagagggaga

SEQ ID NO: 2331250 - RNA, 19 nt, Homo sapiens
  misc_RNA (1)...(19): siRNA sense strand
guugagaaaaggaggaaaa

SEQ ID NO: 2331251 - RNA, 19 nt, Homo sapiens
  misc_RNA (1)...(19): siRNA sense strand
gggcagaagaaguaacaca

SEQ ID NO: 2331252 - RNA, 19 nt, Homo sapiens
  misc_RNA (1)...(19): siRNA sense strand
ucgaaaagauaaagaccaa

SEQ ID NO: 2331253 - RNA, 19 nt, Homo sapiens
  misc_RNA (1)...(19): siRNA sense strand
cugaagaccggcaguguaa

SEQ ID NO: 2331254 - RNA, 19 nt, Homo sapiens
  misc_RNA (1)...(19): siRNA sense strand
agaaugaggagcaggaaga

SEQ ID NO: 2331255 - RNA, 19 nt, Homo sapiens
  misc_RNA (1)...(19): siRNA sense strand
cuuaaggaccggagcagua

SEQ ID NO: 2331256 - RNA, 19 nt, Homo sapiens
  misc_RNA (1)...(19): siRNA sense strand
gcuacgagaacuaguaaau

SEQ ID NO: 2331257 - RNA, 19 nt, Homo sapiens
  misc_RNA (1)...(19): siRNA sense strand
aaguuuacccagauggaaa

SEQ ID NO: 2331258 - RNA, 19 nt, Homo sapiens
  misc_RNA (1)...(19): siRNA sense strand
aagaagaugaggagaagau

SEQ ID NO: 2331259 - RNA, 19 nt, Homo sapiens
  misc_RNA (1)...(19): siRNA sense strand
uucaagaaguggaaaggaa

SEQ ID NO: 2331260 - RNA, 19 nt, Homo sapiens
  misc_RNA (1)...(19): siRNA sense strand
aagauaaagaccaaaggaa

SEQ ID NO: 2331261 - RNA, 19 nt, Homo sapiens
  misc_RNA (1)...(19): siRNA sense strand
ccuuuaaaccuuuggcaga

SEQ ID NO: 2331262 - RNA, 19 nt, Homo sapiens
  misc_RNA (1)...(19): siRNA sense strand
cagaaauuuaugagcaaca

SEQ ID NO: 2331263 - RNA, 19 nt, Homo sapiens
  misc_RNA (1)...(19): siRNA sense strand
ucaccaaacaugaagaaaa

SEQ ID NO: 2331264 - RNA, 19 nt, Homo sapiens
  misc_RNA (1)...(19): siRNA sense strand
gguuagacacacagcugaa

SEQ ID NO: 2331265 - RNA, 19 nt, Homo sapiens
  misc_RNA (1)...(19): siRNA sense strand
ggaucuuguuuaugaggau

SEQ ID NO: 2331266 - RNA, 19 nt, Homo sapiens
  misc_RNA (1)...(19): siRNA sense strand
guucaaagggagacuguca

SEQ ID NO: 2331267 - RNA, 19 nt, Homo sapiens
  misc_RNA (1)...(19): siRNA sense strand
caccaaacaugaagaaaau

SEQ ID NO: 2331268 - RNA, 19 nt, Homo sapiens
  misc_RNA (1)...(19): siRNA sense strand
aguaagagugaguugauau

SEQ ID NO: 2331269 - RNA, 19 nt, Homo sapiens
  misc_RNA (1)...(19): siRNA sense strand
aggccaaagaggaugaaga

SEQ ID NO: 2331270 - RNA, 19 nt, Homo sapiens
  misc_RNA (1)...(19): siRNA sense strand
gauugcaggauuugggaau

SEQ ID NO: 2331271 - RNA, 19 nt, Homo sapiens
  misc_RNA (1)...(19): siRNA sense strand
gaaggaaugaguagcgaca

SEQ ID NO: 2331272 - RNA, 19 nt, Homo sapiens
  misc_RNA (1)...(19): siRNA sense strand
ucaagaaguggaaaggaau

SEQ ID NO: 2331273 - RNA, 19 nt, Homo sapiens
  misc_RNA (1)...(19): siRNA sense strand
agauaaagaccaaaggaag

SEQ ID NO: 2331274 - RNA, 19 nt, Homo sapiens
  misc_RNA (1)...(19): siRNA sense strand
caaaggaagcaacaggcaa

SEQ ID NO: 2331275 - RNA, 19 nt, Homo sapiens
  misc_RNA (1)...(19): siRNA sense strand
aggaaugcauggcggacau

SEQ ID NO: 2331276 - RNA, 19 nt, Homo sapiens
  misc_RNA (1)...(19): siRNA sense strand
cuuuaaaccuuuggcagaa

SEQ ID NO: 2331277 - RNA, 19 nt, Homo sapiens
  misc_RNA (1)...(19): siRNA sense strand
uggcagaaauuuaugagca

SEQ ID NO: 2331278 - RNA, 19 nt, Homo sapiens
  misc_RNA (1)...(19): siRNA sense strand
ugaaugaagagguagccaa

SEQ ID NO: 2331279 - RNA, 19 nt, Homo sapiens
  misc_RNA (1)...(19): siRNA sense strand
uuauaacacugauggguca

SEQ ID NO: 2331280 - RNA, 19 nt, Homo sapiens
  misc_RNA (1)...(19): siRNA sense strand
gguuccaguaguagaauau

SEQ ID NO: 2331281 - RNA, 19 nt, Homo sapiens
  misc_RNA (1)...(19): siRNA sense strand
aaaggaagcaacaggcaau

SEQ ID NO: 2331282 - RNA, 19 nt, Homo sapiens
  misc_RNA (1)...(19): siRNA sense strand
caguguagcagguagucua

SEQ ID NO: 2331283 - RNA, 19 nt, Homo sapiens
  misc_RNA (1)...(19): siRNA sense strand
ggagaaugcuggggcuaua

SEQ ID NO: 2331284 - RNA, 19 nt, Homo sapiens
  misc_RNA (1)...(19): siRNA sense strand
agguaguagccaugguuau

SEQ ID NO: 2331285 - RNA, 19 nt, Homo sapiens
  misc_RNA (1)...(19): siRNA sense strand
ggguuccaguaguagaaua

SEQ ID NO: 2331286 - RNA, 19 nt, Homo sapiens
  misc_RNA (1)...(19): siRNA sense strand
cagaugacugauuuggaaa

SEQ ID NO: 2331287 - RNA, 19 nt, Homo sapiens
  misc_RNA (1)...(19): siRNA sense strand
aggaaugaguagcgacagu

SEQ ID NO: 2331288 - RNA, 19 nt, Homo sapiens
  misc_RNA (1)...(19): siRNA sense strand
ugaaugugacacugagaau

SEQ ID NO: 2331289 - RNA, 19 nt, Homo sapiens
  misc_RNA (1)...(19): siRNA sense strand
ccacaaaaugauacaguga

SEQ ID NO: 2331290 - RNA, 19 nt, Homo sapiens
  misc_RNA (1)...(19): siRNA sense strand
gaguagcgacagugacauu

SEQ ID NO: 2331291 - RNA, 19 nt, Homo sapiens
  misc_RNA (1)...(19): siRNA sense strand
ggcagaagaaguaacacaa

SEQ ID NO: 2331292 - RNA, 19 nt, Homo sapiens
  misc_RNA (1)...(19): siRNA sense strand
agaaguaacacaacagcuu

SEQ ID NO: 2331293 - RNA, 19 nt, Homo sapiens
  misc_RNA (1)...(19): siRNA sense strand
gcaguggacccuggagaaa

SEQ ID NO: 2331294 - RNA, 19 nt, Homo sapiens
  misc_RNA (1)...(19): siRNA sense strand
acacugagaaugaggagca

SEQ ID NO: 2331295 - RNA, 19 nt, Homo sapiens
  misc_RNA (1)...(19): siRNA sense strand
agaugagcguguucgggaa

SEQ ID NO: 2331296 - RNA, 19 nt, Homo sapiens
  misc_RNA (1)...(19): siRNA sense strand
ccuuaugauguuucagcaa

SEQ ID NO: 2331297 - RNA, 19 nt, Homo sapiens
  misc_RNA (1)...(19): siRNA sense strand
ugaauaucguguagagaug

SEQ ID NO: 2331298 - RNA, 19 nt, Homo sapiens
  misc_RNA (1)...(19): siRNA sense strand
aagaugaggagaagauuca

SEQ ID NO: 2331299 - RNA, 19 nt, Homo sapiens
  misc_RNA (1)...(19): siRNA sense strand
gacacacagcugaagaaua

SEQ ID NO: 2331300 - RNA, 19 nt, Homo sapiens
  misc_RNA (1)...(19): siRNA sense strand
uuagagaauuucagcacuu

SEQ ID NO: 2331301 - RNA, 19 nt, Homo sapiens
  misc_RNA (1)...(19): siRNA sense strand
uggaaauggaguugugcga

SEQ ID NO: 2331302 - RNA, 19 nt, Homo sapiens
  misc_RNA (1)...(19): siRNA sense strand
aagagaggccaaagaggau

SEQ ID NO: 2331303 - RNA, 19 nt, Homo sapiens
  misc_RNA (1)...(19): siRNA sense strand
uggagaaaaugauguggaa

SEQ ID NO: 2331304 - RNA, 19 nt, Homo sapiens
  misc_RNA (1)...(19): siRNA sense strand
ccggagcaguauagaaaau

SEQ ID NO: 2331305 - RNA, 19 nt, Homo sapiens
  misc_RNA (1)...(19): siRNA sense strand
gaagacaucucuaacccaa

SEQ ID NO: 2331306 - RNA, 19 nt, Homo sapiens
  misc_RNA (1)...(19): siRNA sense strand
gcaacaaguaauacagaag

SEQ ID NO: 2331307 - RNA, 19 nt, Homo sapiens
  misc_RNA (1)...(19): siRNA sense strand
gggaauauggagagaauca

SEQ ID NO: 2331308 - RNA, 19 nt, Homo sapiens
  misc_RNA (1)...(19): siRNA sense strand
ggaaggagggaaagagaau

SEQ ID NO: 2331309 - RNA, 19 nt, Homo sapiens
  misc_RNA (1)...(19): siRNA sense strand
gaucaaagcaaguuggaga

SEQ ID NO: 2331310 - RNA, 19 nt, Homo sapiens
  misc_RNA (1)...(19): siRNA sense strand
gcguaaucauccagaaaga

SEQ ID NO: 2331311 - RNA, 19 nt, Homo sapiens
  misc_RNA (1)...(19): siRNA sense strand
agacaagcacucagauaaa

SEQ ID NO: 2331312 - RNA, 19 nt, Homo sapiens
  misc_RNA (1)...(19): siRNA sense strand
ggacuaaaaccuugugaaa

SEQ ID NO: 2331313 - RNA, 19 nt, Homo sapiens
  misc_RNA (1)...(19): siRNA sense strand
acucaaaugcaaaggcuua

SEQ ID NO: 2331314 - RNA, 19 nt, Homo sapiens
  misc_RNA (1)...(19): siRNA sense strand
uggaaggugaauagagaua

SEQ ID NO: 2331315 - RNA, 19 nt, Homo sapiens
  misc_RNA (1)...(19): siRNA sense strand
aggaagagaaggauguuaa

SEQ ID NO: 2331316 - RNA, 19 nt, Homo sapiens
  misc_RNA (1)...(19): siRNA sense strand
ggagaguagauccgagaua

SEQ ID NO: 2331317 - RNA, 19 nt, Homo sapiens
  misc_RNA (1)...(19): siRNA sense strand
cagaaagggagaaggugaa

SEQ ID NO: 2331318 - RNA, 19 nt, Homo sapiens
  misc_RNA (1)...(19): siRNA sense strand
ucauauuauuggagcagaa

SEQ ID NO: 2331319 - RNA, 19 nt, Homo sapiens
  misc_RNA (1)...(19): siRNA sense strand
gugaaagagccucgaaauu

SEQ ID NO: 2331320 - RNA, 19 nt, Homo sapiens
  misc_RNA (1)...(19): siRNA sense strand
aguuauugcaggaagauua

SEQ ID NO: 2331321 - RNA, 19 nt, Homo sapiens
  misc_RNA (1)...(19): siRNA sense strand
aaagcaaguuggagaaaca

SEQ ID NO: 2331322 - RNA, 19 nt, Homo sapiens
  misc_RNA (1)...(19): siRNA sense strand
acagaauggccaacagaaa

SEQ ID NO: 2331323 - RNA, 19 nt, Homo sapiens
  misc_RNA (1)...(19): siRNA sense strand
cugggaauauggagagaau

SEQ ID NO: 2331324 - RNA, 19 nt, Homo sapiens
  misc_RNA (1)...(19): siRNA sense strand
cgucaugacaacagugcaa

SEQ ID NO: 2331325 - RNA, 19 nt, Homo sapiens
  misc_RNA (1)...(19): siRNA sense strand
aaaugaaggcuguucgaaa

SEQ ID NO: 2331326 - RNA, 19 nt, Homo sapiens
  misc_RNA (1)...(19): siRNA sense strand
agaguagauccgagauaua

SEQ ID NO: 2331327 - RNA, 19 nt, Homo sapiens
  misc_RNA (1)...(19): siRNA sense strand
acuaaaggaaguuggagaa

SEQ ID NO: 2331328 - RNA, 19 nt, Homo sapiens
  misc_RNA (1)...(19): siRNA sense strand
guugaagagcucaggaauu

SEQ ID NO: 2331329 - RNA, 19 nt, Homo sapiens
  misc_RNA (1)...(19): siRNA sense strand
aggagauaaugaugaagaa

SEQ ID NO: 2331330 - RNA, 19 nt, Homo sapiens
  misc_RNA (1)...(19): siRNA sense strand
agaagguggaggaaaguua

SEQ ID NO: 2331331 - RNA, 19 nt, Homo sapiens
  misc_RNA (1)...(19): siRNA sense strand
ugacuaaacuugaugcaga

SEQ ID NO: 2331332 - RNA, 19 nt, Homo sapiens
  misc_RNA (1)...(19): siRNA sense strand
ggaaguuggagaagauuau

SEQ ID NO: 2331333 - RNA, 19 nt, Homo sapiens
  misc_RNA (1)...(19): siRNA sense strand
gagaggagaaauugaaaca

SEQ ID NO: 2331334 - RNA, 19 nt, Homo sapiens
  misc_RNA (1)...(19): siRNA sense strand
agaagagcguucaggaaga

SEQ ID NO: 2331335 - RNA, 19 nt, Homo sapiens
  misc_RNA (1)...(19): siRNA sense strand
cauaccaauuccaaagaaa

SEQ ID NO: 2331336 - RNA, 19 nt, Homo sapiens
  misc_RNA (1)...(19): siRNA sense strand
aaagacaggaagugauuaa

SEQ ID NO: 2331337 - RNA, 19 nt, Homo sapiens
  misc_RNA (1)...(19): siRNA sense strand
gaccaggagaggagaaauu

SEQ ID NO: 2331338 - RNA, 19 nt, Homo sapiens
  misc_RNA (1)...(19): siRNA sense strand
agaaagaugacaauggauu

SEQ ID NO: 2331339 - RNA, 19 nt, Homo sapiens
  misc_RNA (1)...(19): siRNA sense strand
acagaaagggagaagguga

SEQ ID NO: 2331340 - RNA, 19 nt, Homo sapiens
  misc_RNA (1)...(19): siRNA sense strand
acugaguaccucugggaaa

SEQ ID NO: 2331341 - RNA, 19 nt, Homo sapiens
  misc_RNA (1)...(19): siRNA sense strand
auaaagaaggggaagaaaa

SEQ ID NO: 2331342 - RNA, 19 nt, Homo sapiens
  misc_RNA (1)...(19): siRNA sense strand
acugaagguucuugaucaa

SEQ ID NO: 2331343 - RNA, 19 nt, Homo sapiens
  misc_RNA (1)...(19): siRNA sense strand
ugcaagaugcugaaaguaa

SEQ ID NO: 2331344 - RNA, 19 nt, Homo sapiens
  misc_RNA (1)...(19): siRNA sense strand
cugaaagcgagcugacuaa

SEQ ID NO: 2331345 - RNA, 19 nt, Homo sapiens
  misc_RNA (1)...(19): siRNA sense strand
cagacagagauuugggauu

SEQ ID NO: 2331346 - RNA, 19 nt, Homo sapiens
  misc_RNA (1)...(19): siRNA sense strand
agaggaaaacccagagaaa

SEQ ID NO: 2331347 - RNA, 19 nt, Homo sapiens
  misc_RNA (1)...(19): siRNA sense strand
agacaauggcgcucagauu

SEQ ID NO: 2331348 - RNA, 19 nt, Homo sapiens
  misc_RNA (1)...(19): siRNA sense strand
caagcaaaguaugaagaaa

SEQ ID NO: 2331349 - RNA, 19 nt, Homo sapiens
  misc_RNA (1)...(19): siRNA sense strand
gagaaguguuacugggacu

SEQ ID NO: 2331350 - RNA, 19 nt, Homo sapiens
  misc_RNA (1)...(19): siRNA sense strand
caguguagcuuuuggagaa

SEQ ID NO: 2331351 - RNA, 19 nt, Homo sapiens
  misc_RNA (1)...(19): siRNA sense strand
gcgaguauccagagaagga

SEQ ID NO: 2331352 - RNA, 19 nt, Homo sapiens
  misc_RNA (1)...(19): siRNA sense strand
acuuaaagaagguggagga

SEQ ID NO: 2331353 - RNA, 19 nt, Homo sapiens
  misc_RNA (1)...(19): siRNA sense strand
gcagaaacguaguauggga

SEQ ID NO: 2331354 - RNA, 19 nt, Homo sapiens
  misc_RNA (1)...(19): siRNA sense strand
cgagagucaccaacagaua

SEQ ID NO: 2331355 - RNA, 19 nt, Homo sapiens
  misc_RNA (1)...(19): siRNA sense strand
caacagugcaauuggcaga

SEQ ID NO: 2331356 - RNA, 19 nt, Homo sapiens
  misc_RNA (1)...(19): siRNA sense strand
cugaaaauauuaaggccua

SEQ ID NO: 2331357 - RNA, 19 nt, Homo sapiens
  misc_RNA (1)...(19): siRNA sense strand
agcagaaaguugagcgcau

SEQ ID NO: 2331358 - RNA, 19 nt, Homo sapiens
  misc_RNA (1)...(19): siRNA sense strand
ugaaaaugacuuagagaca

SEQ ID NO: 2331359 - RNA, 19 nt, Homo sapiens
  misc_RNA (1)...(19): siRNA sense strand
aggaaguuggagaagauua

SEQ ID NO: 2331360 - RNA, 19 nt, Homo sapiens
  misc_RNA (1)...(19): siRNA sense strand
caacauuucccaagauaca

SEQ ID NO: 2331361 - RNA, 19 nt, Homo sapiens
  misc_RNA (1)...(19): siRNA sense strand
aggcuguagaggaagauaa

SEQ ID NO: 2331362 - RNA, 19 nt, Homo sapiens
  misc_RNA (1)...(19): siRNA sense strand
acacguugcugcuggaaga

SEQ ID NO: 2331363 - RNA, 19 nt, Homo sapiens
  misc_RNA (1)...(19): siRNA sense strand
cagauaagaagcagaaagu

SEQ ID NO: 2331364 - RNA, 19 nt, Homo sapiens
  misc_RNA (1)...(19): siRNA sense strand
ccguauagcaccucauauu

SEQ ID NO: 2331365 - RNA, 19 nt, Homo sapiens
  misc_RNA (1)...(19): siRNA sense strand
gcugaaagcgagcugacua

SEQ ID NO: 2331366 - RNA, 19 nt, Homo sapiens
  misc_RNA (1)...(19): siRNA sense strand
guucauaaccagaaaguag

SEQ ID NO: 2331367 - RNA, 19 nt, Homo sapiens
  misc_RNA (1)...(19): siRNA sense strand
agaaagaguccauccagaa

SEQ ID NO: 2331368 - RNA, 19 nt, Homo sapiens
  misc_RNA (1)...(19): siRNA sense strand
cucgaaauuuggagcacaa

SEQ ID NO: 2331369 - RNA, 19 nt, Homo sapiens
  misc_RNA (1)...(19): siRNA sense strand
ccagaguggguuagcaaau

SEQ ID NO: 2331370 - RNA, 19 nt, Homo sapiens
  misc_RNA (1)...(19): siRNA sense strand
guuagcaaaugaaggaaca

SEQ ID NO: 2331371 - RNA, 19 nt, Homo sapiens
  misc_RNA (1)...(19): siRNA sense strand
ucaaagugaggaugaacaa

SEQ ID NO: 2331372 - RNA, 19 nt, Homo sapiens
  misc_RNA (1)...(19): siRNA sense strand
gagcaguuaacaaggaaga

SEQ ID NO: 2331373 - RNA, 19 nt, Homo sapiens
  misc_RNA (1)...(19): siRNA sense strand
gaaagaacaggaacggcua

SEQ ID NO: 2331374 - RNA, 19 nt, Homo sapiens
  misc_RNA (1)...(19): siRNA sense strand
uccaagaggccaagaaaca

SEQ ID NO: 2331375 - RNA, 19 nt, Homo sapiens
  misc_RNA (1)...(19): siRNA sense strand
gcacaaacggggucggauu

SEQ ID NO: 2331376 - RNA, 19 nt, Homo sapiens
  misc_RNA (1)...(19): siRNA sense strand
guacaguguugguucgaca

SEQ ID NO: 2331377 - RNA, 19 nt, Homo sapiens
  misc_RNA (1)...(19): siRNA sense strand
ccgcaaaugugcugggaca

SEQ ID NO: 2331378 - RNA, 19 nt, Homo sapiens
  misc_RNA (1)...(19): siRNA sense strand
ccaacaaacaguacgggua

SEQ ID NO: 2331379 - RNA, 19 nt, Homo sapiens
  misc_RNA (1)...(19): siRNA sense strand
gcaacgaggagcuggccaa

SEQ ID NO: 2331380 - RNA, 19 nt, Homo sapiens
  misc_RNA (1)...(19): siRNA sense strand
ccaugaucgaggugaacaa

SEQ ID NO: 2331381 - RNA, 19 nt, Homo sapiens
  misc_RNA (1)...(19): siRNA sense strand
ugccaaaacaugaaggaaa

SEQ ID NO: 2331382 - RNA, 19 nt, Homo sapiens
  misc_RNA (1)...(19): siRNA sense strand
ucuccaugaucgaggugaa

SEQ ID NO: 2331383 - RNA, 19 nt, Homo sapiens
  misc_RNA (1)...(19): siRNA sense strand
gugcagagcaagcgggugu

SEQ ID NO: 2331384 - RNA, 19 nt, Homo sapiens
  misc_RNA (1)...(19): siRNA sense strand
ccuucaagacuguguucaa

SEQ ID NO: 2331385 - RNA, 19 nt, Homo sapiens
  misc_RNA (1)...(19): siRNA sense strand
gccaagauccgcacgguga

SEQ ID NO: 2331386 - RNA, 19 nt, Homo sapiens
  misc_RNA (1)...(19): siRNA sense strand
ucuaacaaucgaagcccaa

SEQ ID NO: 2331387 - RNA, 19 nt, Homo sapiens
  misc_RNA (1)...(19): siRNA sense strand
gggaugaggagcuggccaa

SEQ ID NO: 2331388 - RNA, 19 nt, Homo sapiens
  misc_RNA (1)...(19): siRNA sense strand
ccaugacgcuggaccgcua

SEQ ID NO: 2331389 - RNA, 19 nt, Homo sapiens
  misc_RNA (1)...(19): siRNA sense strand
ggcuggaggacuugggaca

SEQ ID NO: 2331390 - RNA, 19 nt, Homo sapiens
  misc_RNA (1)...(19): siRNA sense strand
ucucuaugcuuuugggcaa

SEQ ID NO: 2331391 - RNA, 19 nt, Homo sapiens
  misc_RNA (1)...(19): siRNA sense strand
ccuacaugcugcuggccau

SEQ ID NO: 2331392 - RNA, 19 nt, Homo sapiens
  misc_RNA (1)...(19): siRNA sense strand
gggacuuggagcuggcaga

SEQ ID NO: 2331393 - RNA, 19 nt, Homo sapiens
  misc_RNA (1)...(19): siRNA sense strand
accuaaaagucaagacaca

SEQ ID NO: 2331394 - RNA, 19 nt, Homo sapiens
  misc_RNA (1)...(19): siRNA sense strand
aaguaaagugucugagcaa

SEQ ID NO: 2331395 - RNA, 19 nt, Homo sapiens
  misc_RNA (1)...(19): siRNA sense strand
aaguggaauuaguggauau

SEQ ID NO: 2331396 - RNA, 19 nt, Homo sapiens
  misc_RNA (1)...(19): siRNA sense strand
gaaagaaaggacagccuga

SEQ ID NO: 2331397 - RNA, 19 nt, Homo sapiens
  misc_RNA (1)...(19): siRNA sense strand
aggcaaaguuaucagagga

SEQ ID NO: 2331398 - RNA, 19 nt, Homo sapiens
  misc_RNA (1)...(19): siRNA sense strand
agugcaaagaagaagaaaa

SEQ ID NO: 2331399 - RNA, 19 nt, Homo sapiens
  misc_RNA (1)...(19): siRNA sense strand
ccagaaugggcuuacggaa

SEQ ID NO: 2331400 - RNA, 19 nt, Homo sapiens
  misc_RNA (1)...(19): siRNA sense strand
acuaugaguaaaggagaaa

SEQ ID NO: 2331401 - RNA, 19 nt, Homo sapiens
  misc_RNA (1)...(19): siRNA sense strand
ggcaaaguuaucagaggau

SEQ ID NO: 2331402 - RNA, 19 nt, Homo sapiens
  misc_RNA (1)...(19): siRNA sense strand
uggccaagacagcuaacaa

SEQ ID NO: 2331403 - RNA, 19 nt, Homo sapiens
  misc_RNA (1)...(19): siRNA sense strand
cggaaagaaaggacagccu

SEQ ID NO: 2331404 - RNA, 19 nt, Homo sapiens
  misc_RNA (1)...(19): siRNA sense strand
ugugaagcuuaaugaagau

SEQ ID NO: 2331405 - RNA, 19 nt, Homo sapiens
  misc_RNA (1)...(19): siRNA sense strand
agauaaacccaaagaaacc

SEQ ID NO: 2331406 - RNA, 19 nt, Homo sapiens
  misc_RNA (1)...(19): siRNA sense strand
cguuuuaaggguacugaaa

SEQ ID NO: 2331407 - RNA, 19 nt, Homo sapiens
  misc_RNA (1)...(19): siRNA sense strand
uggaaaagagaaaggcaaa

SEQ ID NO: 2331408 - RNA, 19 nt, Homo sapiens
  misc_RNA (1)...(19): siRNA sense strand
agguguacagaaagaaaua

SEQ ID NO: 2331409 - RNA, 19 nt, Homo sapiens
  misc_RNA (1)...(19): siRNA sense strand
acaaguuggaaaagagaaa

SEQ ID NO: 2331410 - RNA, 19 nt, Homo sapiens
  misc_RNA (1)...(19): siRNA sense strand
acuacaaaggucagcaaau

SEQ ID NO: 2331411 - RNA, 19 nt, Homo sapiens
  misc_RNA (1)...(19): siRNA sense strand
ccagguaguucgaggacac

SEQ ID NO: 2331412 - RNA, 19 nt, Homo sapiens
  misc_RNA (1)...(19): siRNA sense strand
acgacgagguccagguagu

SEQ ID NO: 2331413 - RNA, 19 nt, Homo sapiens
  misc_RNA (1)...(19): siRNA sense strand
caacuguccacgugggcau

SEQ ID NO: 2331414 - RNA, 19 nt, Homo sapiens
  misc_RNA (1)...(19): siRNA sense strand
agaagaagcucuaugccaa

SEQ ID NO: 2331415 - RNA, 19 nt, Homo sapiens
  misc_RNA (1)...(19): siRNA sense strand
agaugaaggaggagcagaa

SEQ ID NO: 2331416 - RNA, 19 nt, Homo sapiens
  misc_RNA (1)...(19): siRNA sense strand
uggcugaggaggagaacaa

SEQ ID NO: 2331417 - RNA, 19 nt, Homo sapiens
  misc_RNA (1)...(19): siRNA sense strand
acacagagaugaaggagga

SEQ ID NO: 2331418 - RNA, 19 nt, Homo sapiens
  misc_RNA (1)...(19): siRNA sense strand
aggaggagcagaagagcaa

SEQ ID NO: 2331419 - RNA, 19 nt, Homo sapiens
  misc_RNA (1)...(19): siRNA sense strand
agaacaaggccaaggcaga

SEQ ID NO: 2331420 - RNA, 19 nt, Homo sapiens
  misc_RNA (1)...(19): siRNA sense strand
uguuugaguuuaagggaga

SEQ ID NO: 2331421 - RNA, 19 nt, Homo sapiens
  misc_RNA (1)...(19): siRNA sense strand
ccacugacacagagaugaa

SEQ ID NO: 2331422 - RNA, 19 nt, Homo sapiens
  misc_RNA (1)...(19): siRNA sense strand
agguggagacagaagcaua

SEQ ID NO: 2331423 - RNA, 19 nt, Homo sapiens
  misc_RNA (1)...(19): siRNA sense strand
gagagagggcacagguaca

SEQ ID NO: 2331424 - RNA, 19 nt, Homo sapiens
  misc_RNA (1)...(19): siRNA sense strand
agaugaauucagaagagaa

SEQ ID NO: 2331425 - RNA, 19 nt, Homo sapiens
  misc_RNA (1)...(19): siRNA sense strand
ccaauauguuugagaggcu

SEQ ID NO: 2331426 - RNA, 19 nt, Homo sapiens
  misc_RNA (1)...(19): siRNA sense strand
ccauggagggaguggacau

SEQ ID NO: 2331427 - RNA, 19 nt, Homo sapiens
  misc_RNA (1)...(19): siRNA sense strand
aggaggagaacaaggccaa

SEQ ID NO: 2331428 - RNA, 19 nt, Homo sapiens
  misc_RNA (1)...(19): siRNA sense strand
gggagaagaucugacggaa

SEQ ID NO: 2331429 - RNA, 19 nt, Homo sapiens
  misc_RNA (1)...(19): siRNA sense strand
gagaugaaggcgaccgaga

SEQ ID NO: 2331430 - RNA, 19 nt, Homo sapiens
  misc_RNA (1)...(19): siRNA sense strand
aggacaagcucuuugacca

SEQ ID NO: 2331431 - RNA, 19 nt, Homo sapiens
  misc_RNA (1)...(19): siRNA sense strand
agaucugacggaagaggaa

SEQ ID NO: 2331432 - RNA, 19 nt, Homo sapiens
  misc_RNA (1)...(19): siRNA sense strand
ccacuacacuggcuggcua

SEQ ID NO: 2331433 - RNA, 19 nt, Homo sapiens
  misc_RNA (1)...(19): siRNA sense strand
ggagaagaucugacggaag

SEQ ID NO: 2331434 - RNA, 19 nt, Homo sapiens
  misc_RNA (1)...(19): siRNA sense strand
gaaggguacuacaaggaca

SEQ ID NO: 2331435 - RNA, 19 nt, Homo sapiens
  misc_RNA (1)...(19): siRNA sense strand
caguauaagaagaucgugu

SEQ ID NO: 2331436 - RNA, 19 nt, Homo sapiens
  misc_RNA (1)...(19): siRNA sense strand
gagaagaagcucuaugcca

SEQ ID NO: 2331437 - RNA, 19 nt, Homo sapiens
  misc_RNA (1)...(19): siRNA sense strand
cagagaugaaggaggagca

SEQ ID NO: 2331438 - RNA, 19 nt, Homo sapiens
  misc_RNA (1)...(19): siRNA sense strand
gcaacaacgagaagggccu

SEQ ID NO: 2331439 - RNA, 19 nt, Homo sapiens
  misc_RNA (1)...(19): siRNA sense strand
cagaauaugccuacgguuc

SEQ ID NO: 2331440 - RNA, 19 nt, Homo sapiens
  misc_RNA (1)...(19): siRNA sense strand
ccaaacaggacgaaggcgu

SEQ ID NO: 2331441 - RNA, 19 nt, Homo sapiens
  misc_RNA (1)...(19): siRNA sense strand
aggacgaaggcgugcugaa

SEQ ID NO: 2331442 - RNA, 19 nt, Homo sapiens
  misc_RNA (1)...(19): siRNA sense strand
agguugcacuggaagggua

SEQ ID NO: 2331443 - RNA, 19 nt, Homo sapiens
  misc_RNA (1)...(19): siRNA sense strand
cauggagaaaggagaacau

SEQ ID NO: 2331444 - RNA, 19 nt, Homo sapiens
  misc_RNA (1)...(19): siRNA sense strand
guuccaaaucccaccaaau

SEQ ID NO: 2331445 - RNA, 19 nt, Homo sapiens
  misc_RNA (1)...(19): siRNA sense strand
ucuccuuugaccugggaaa

SEQ ID NO: 2331446 - RNA, 19 nt, Homo sapiens
  misc_RNA (1)...(19): siRNA sense strand
aaggguacuacaaggacaa

SEQ ID NO: 2331447 - RNA, 19 nt, Homo sapiens
  misc_RNA (1)...(19): siRNA sense strand
ggcaguguugggaaggaaa

SEQ ID NO: 2331448 - RNA, 19 nt, Homo sapiens
  misc_RNA (1)...(19): siRNA sense strand
gagucuugggagaugaauu

SEQ ID NO: 2331449 - RNA, 19 nt, Homo sapiens
  misc_RNA (1)...(19): siRNA sense strand
ccaaaugcugagcugaaau

SEQ ID NO: 2331450 - RNA, 19 nt, Homo sapiens
  misc_RNA (1)...(19): siRNA sense strand
uggaggagguggugggaga

SEQ ID NO: 2331451 - RNA, 19 nt, Homo sapiens
  misc_RNA (1)...(19): siRNA sense strand
ggggauagugugagaaauu

SEQ ID NO: 2331452 - RNA, 19 nt, Homo sapiens
  misc_RNA (1)...(19): siRNA sense strand
gcaucauugcugaggucaa

SEQ ID NO: 2331453 - RNA, 19 nt, Homo sapiens
  misc_RNA (1)...(19): siRNA sense strand
aguaugaggaugaaaucaa

SEQ ID NO: 2331454 - RNA, 19 nt, Homo sapiens
  misc_RNA (1)...(19): siRNA sense strand
cugaagaacaugcaggaca

SEQ ID NO: 2331455 - RNA, 19 nt, Homo sapiens
  misc_RNA (1)...(19): siRNA sense strand
acaacuugcagcaggaaau

SEQ ID NO: 2331456 - RNA, 19 nt, Homo sapiens
  misc_RNA (1)...(19): siRNA sense strand
ccaacugaagagugaucaa

SEQ ID NO: 2331457 - RNA, 19 nt, Homo sapiens
  misc_RNA (1)...(19): siRNA sense strand
ggauagugugagaaauuca

SEQ ID NO: 2331458 - RNA, 19 nt, Homo sapiens
  misc_RNA (1)...(19): siRNA sense strand
agagcagcguggcgagaau

SEQ ID NO: 2331459 - RNA, 19 nt, Homo sapiens
  misc_RNA (1)...(19): siRNA sense strand
cccauaauuuagagcccua

SEQ ID NO: 2331460 - RNA, 19 nt, Homo sapiens
  misc_RNA (1)...(19): siRNA sense strand
uggacgugguaguggcuuu

SEQ ID NO: 2331461 - RNA, 19 nt, Homo sapiens
  misc_RNA (1)...(19): siRNA sense strand
aguccuuguaccagagcaa

SEQ ID NO: 2331462 - RNA, 19 nt, Homo sapiens
  misc_RNA (1)...(19): siRNA sense strand
cagacucaaaucagugaaa

SEQ ID NO: 2331463 - RNA, 19 nt, Homo sapiens
  misc_RNA (1)...(19): siRNA sense strand
agagcaaagcugaggccga

SEQ ID NO: 2331464 - RNA, 19 nt, Homo sapiens
  misc_RNA (1)...(19): siRNA sense strand
cuuugguggugguggcuuu

SEQ ID NO: 2331465 - RNA, 19 nt, Homo sapiens
  misc_RNA (1)...(19): siRNA sense strand
cuuugguggugguggcuuu

SEQ ID NO: 2331466 - RNA, 19 nt, Homo sapiens
  misc_RNA (1)...(19): siRNA sense strand
aaaucaagucacucaacaa

SEQ ID NO: 2331467 - RNA, 19 nt, Homo sapiens
  misc_RNA (1)...(19): siRNA sense strand
gagcaaguaugaagagcug

SEQ ID NO: 2331468 - RNA, 19 nt, Homo sapiens
  misc_RNA (1)...(19): siRNA sense strand
aagcaggaugucuggagaa

SEQ ID NO: 2331469 - RNA, 19 nt, Homo sapiens
  misc_RNA (1)...(19): siRNA sense strand
guggaggauuaccggaaca

SEQ ID NO: 2331470 - RNA, 19 nt, Homo sapiens
  misc_RNA (1)...(19): siRNA sense strand
acaaaugcagagaaugaau

SEQ ID NO: 2331471 - RNA, 19 nt, Homo sapiens
  misc_RNA (1)...(19): siRNA sense strand
gcaaguaugaagagcugca

SEQ ID NO: 2331472 - RNA, 19 nt, Homo sapiens
  misc_RNA (1)...(19): siRNA sense strand
gcgacuaccaggagcugau

SEQ ID NO: 2331473 - RNA, 19 nt, Homo sapiens
  misc_RNA (1)...(19): siRNA sense strand
ggcuagaggagguggacgu

SEQ ID NO: 2331474 - RNA, 19 nt, Homo sapiens
  misc_RNA (1)...(19): siRNA sense strand
gguggcaguuccagcguga

SEQ ID NO: 2331475 - RNA, 19 nt, Homo sapiens
  misc_RNA (1)...(19): siRNA sense strand
agauugacccugagaucca

SEQ ID NO: 2331476 - RNA, 19 nt, Homo sapiens
  misc_RNA (1)...(19): siRNA sense strand
augaagagcugcagaucac

SEQ ID NO: 2331477 - RNA, 19 nt, Homo sapiens
  misc_RNA (1)...(19): siRNA sense strand
uggugcuggugguggauuu

SEQ ID NO: 2331478 - RNA, 19 nt, Homo sapiens
  misc_RNA (1)...(19): siRNA sense strand
auauagcccagaagagcaa

SEQ ID NO: 2331479 - RNA, 19 nt, Homo sapiens
  misc_RNA (1)...(19): siRNA sense strand
agaacaagcugaaugaccu

SEQ ID NO: 2331480 - RNA, 19 nt, Homo sapiens
  misc_RNA (1)...(19): siRNA sense strand
cauaugaugcacagagaaa

SEQ ID NO: 2331481 - RNA, 19 nt, Homo sapiens
  misc_RNA (1)...(19): siRNA sense strand
gcagaauaggcaaggagaa

SEQ ID NO: 2331482 - RNA, 19 nt, Homo sapiens
  misc_RNA (1)...(19): siRNA sense strand
augcaaagcccucggacaa

SEQ ID NO: 2331483 - RNA, 19 nt, Homo sapiens
  misc_RNA (1)...(19): siRNA sense strand
cggacaaagccuagaaaau

SEQ ID NO: 2331484 - RNA, 19 nt, Homo sapiens
  misc_RNA (1)...(19): siRNA sense strand
gggcaugaugugcagaaua

SEQ ID NO: 2331485 - RNA, 19 nt, Homo sapiens
  misc_RNA (1)...(19): siRNA sense strand
ggucaggauggaaggagua

SEQ ID NO: 2331486 - RNA, 19 nt, Homo sapiens
  misc_RNA (1)...(19): siRNA sense strand
gaaacagauccuaaggcua

SEQ ID NO: 2331487 - RNA, 19 nt, Homo sapiens
  misc_RNA (1)...(19): siRNA sense strand
gcaggaaggauaugagcau

SEQ ID NO: 2331488 - RNA, 19 nt, Homo sapiens
  misc_RNA (1)...(19): siRNA sense strand
cagcaagauuagauacaca

SEQ ID NO: 2331489 - RNA, 19 nt, Homo sapiens
  misc_RNA (1)...(19): siRNA sense strand
gccucaaaucaauggaaua

SEQ ID NO: 2331490 - RNA, 19 nt, Homo sapiens
  misc_RNA (1)...(19): siRNA sense strand
aaucaguuccagagaagaa

SEQ ID NO: 2331491 - RNA, 19 nt, Homo sapiens
  misc_RNA (1)...(19): siRNA sense strand
acagaaacggacugaagaa

SEQ ID NO: 2331492 - RNA, 19 nt, Homo sapiens
  misc_RNA (1)...(19): siRNA sense strand
gcgcacaagauuuggagau

SEQ ID NO: 2331493 - RNA, 19 nt, Homo sapiens
  misc_RNA (1)...(19): siRNA sense strand
gagcaaacucuucguaaaa

SEQ ID NO: 2331494 - RNA, 19 nt, Homo sapiens
  misc_RNA (1)...(19): siRNA sense strand
gguacuacuacuauugaaa

SEQ ID NO: 2331495 - RNA, 19 nt, Homo sapiens
  misc_RNA (1)...(19): siRNA sense strand
agaugauggcugaugacaa

SEQ ID NO: 2331496 - RNA, 19 nt, Homo sapiens
  misc_RNA (1)...(19): siRNA sense strand
uggagaacuacuugaaaga

SEQ ID NO: 2331497 - RNA, 19 nt, Homo sapiens
  misc_RNA (1)...(19): siRNA sense strand
aguugguguuguugcauua

SEQ ID NO: 2331498 - RNA, 19 nt, Homo sapiens
  misc_RNA (1)...(19): siRNA sense strand
agaagauccaugaugcaaa

SEQ ID NO: 2331499 - RNA, 19 nt, Homo sapiens
  misc_RNA (1)...(19): siRNA sense strand
aggaagagacgguuuaaaa

SEQ ID NO: 2331500 - RNA, 19 nt, Homo sapiens
  misc_RNA (1)...(19): siRNA sense strand
cacaagauuuggagaugau

SEQ ID NO: 2331501 - RNA, 19 nt, Homo sapiens
  misc_RNA (1)...(19): siRNA sense strand
cuugaaagagaaacaacua

SEQ ID NO: 2331502 - RNA, 19 nt, Homo sapiens
  misc_RNA (1)...(19): siRNA sense strand
agaagauaccauugaaagu

SEQ ID NO: 2331503 - RNA, 19 nt, Homo sapiens
  misc_RNA (1)...(19): siRNA sense strand
ugaacguggcacacaaaua

SEQ ID NO: 2331504 - RNA, 19 nt, Homo sapiens
  misc_RNA (1)...(19): siRNA sense strand
cauuaaugugccugaugaa

SEQ ID NO: 2331505 - RNA, 19 nt, Homo sapiens
  misc_RNA (1)...(19): siRNA sense strand
cagaaacggacugaagaaa

SEQ ID NO: 2331506 - RNA, 19 nt, Homo sapiens
  misc_RNA (1)...(19): siRNA sense strand
acacaaauacacuauggaa

SEQ ID NO: 2331507 - RNA, 19 nt, Homo sapiens
  misc_RNA (1)...(19): siRNA sense strand
aaauaugaccucaggacca

SEQ ID NO: 2331508 - RNA, 19 nt, Homo sapiens
  misc_RNA (1)...(19): siRNA sense strand
uggaauacuuugacccaca

SEQ ID NO: 2331509 - RNA, 19 nt, Homo sapiens
  misc_RNA (1)...(19): siRNA sense strand
agaaacggacugaagaaaa

SEQ ID NO: 2331510 - RNA, 19 nt, Homo sapiens
  misc_RNA (1)...(19): siRNA sense strand
ggaacacuucauugaggua

SEQ ID NO: 2331511 - RNA, 19 nt, Homo sapiens
  misc_RNA (1)...(19): siRNA sense strand
caugaauggccguaggcuu

SEQ ID NO: 2331512 - RNA, 19 nt, Homo sapiens
  misc_RNA (1)...(19): siRNA sense strand
ggacugaagaaaagcaaca

SEQ ID NO: 2331513 - RNA, 19 nt, Homo sapiens
  misc_RNA (1)...(19): siRNA sense strand
uauaaaccacgcagagcaa

SEQ ID NO: 2331514 - RNA, 19 nt, Homo sapiens
  misc_RNA (1)...(19): siRNA sense strand
acuacuugaaagagaaaca

SEQ ID NO: 2331515 - RNA, 19 nt, Homo sapiens
  misc_RNA (1)...(19): siRNA sense strand
gugcccucuuggagacaaa

SEQ ID NO: 2331516 - RNA, 19 nt, Homo sapiens
  misc_RNA (1)...(19): siRNA sense strand
cuggugaucuugaguguca

SEQ ID NO: 2331517 - RNA, 19 nt, Homo sapiens
  misc_RNA (1)...(19): siRNA sense strand
gggaguugccacauacaau

SEQ ID NO: 2331518 - RNA, 19 nt, Homo sapiens
  misc_RNA (1)...(19): siRNA sense strand
gagggacgacaguggaauu

SEQ ID NO: 2331519 - RNA, 19 nt, Homo sapiens
  misc_RNA (1)...(19): siRNA sense strand
agagaaaugaauggaaaga

SEQ ID NO: 2331520 - RNA, 19 nt, Homo sapiens
  misc_RNA (1)...(19): siRNA sense strand
cagaauaggcaaggagaac

SEQ ID NO: 2331521 - RNA, 19 nt, Homo sapiens
  misc_RNA (1)...(19): siRNA sense strand
cauguuuacuggugaucuu

SEQ ID NO: 2331522 - RNA, 19 nt, Homo sapiens
  misc_RNA (1)...(19): siRNA sense strand
cuacgcuggaggugguuua

SEQ ID NO: 2331523 - RNA, 19 nt, Homo sapiens
  misc_RNA (1)...(19): siRNA sense strand
aaaggugauucauggucaa

SEQ ID NO: 2331524 - RNA, 19 nt, Homo sapiens
  misc_RNA (1)...(19): siRNA sense strand
caggauggaaggaguagau

SEQ ID NO: 2331525 - RNA, 19 nt, Homo sapiens
  misc_RNA (1)...(19): siRNA sense strand
ccuucaaacugcuuaggga

SEQ ID NO: 2331526 - RNA, 19 nt, Homo sapiens
  misc_RNA (1)...(19): siRNA sense strand
agacaaacucuacgugguu

SEQ ID NO: 2331527 - RNA, 19 nt, Homo sapiens
  misc_RNA (1)...(19): siRNA sense strand
ucaaagaagcuugugagaa

SEQ ID NO: 2331528 - RNA, 19 nt, Homo sapiens
  misc_RNA (1)...(19): siRNA sense strand
ugagaaacgcgcacaagau

SEQ ID NO: 2331529 - RNA, 19 nt, Homo sapiens
  misc_RNA (1)...(19): siRNA sense strand
augaaagguacuacuacua

SEQ ID NO: 2331530 - RNA, 19 nt, Homo sapiens
  misc_RNA (1)...(19): siRNA sense strand
gcuccaauuuucucauaaa

SEQ ID NO: 2331531 - RNA, 19 nt, Homo sapiens
  misc_RNA (1)...(19): siRNA sense strand
gaugcaaagcccucggaca

SEQ ID NO: 2331532 - RNA, 19 nt, Homo sapiens
  misc_RNA (1)...(19): siRNA sense strand
cauaugaugcacagagaaa

SEQ ID NO: 2331533 - RNA, 19 nt, Homo sapiens
  misc_RNA (1)...(19): siRNA sense strand
gcagaauaggcaaggagaa

SEQ ID NO: 2331534 - RNA, 19 nt, Homo sapiens
  misc_RNA (1)...(19): siRNA sense strand
augcaaagcccucggacaa

SEQ ID NO: 2331535 - RNA, 19 nt, Homo sapiens
  misc_RNA (1)...(19): siRNA sense strand
cggacaaagccuagaaaau

SEQ ID NO: 2331536 - RNA, 19 nt, Homo sapiens
  misc_RNA (1)...(19): siRNA sense strand
gggcaugaugugcagaaua

SEQ ID NO: 2331537 - RNA, 19 nt, Homo sapiens
  misc_RNA (1)...(19): siRNA sense strand
ggucaggauggaaggagua

SEQ ID NO: 2331538 - RNA, 19 nt, Homo sapiens
  misc_RNA (1)...(19): siRNA sense strand
gaaacagauccuaaggcua

SEQ ID NO: 2331539 - RNA, 19 nt, Homo sapiens
  misc_RNA (1)...(19): siRNA sense strand
gcaggaaggauaugagcau

SEQ ID NO: 2331540 - RNA, 19 nt, Homo sapiens
  misc_RNA (1)...(19): siRNA sense strand
cagcaagauuagauacaca

SEQ ID NO: 2331541 - RNA, 19 nt, Homo sapiens
  misc_RNA (1)...(19): siRNA sense strand
gccucaaaucaauggaaua

SEQ ID NO: 2331542 - RNA, 19 nt, Homo sapiens
  misc_RNA (1)...(19): siRNA sense strand
aaucaguuccagagaagaa

SEQ ID NO: 2331543 - RNA, 19 nt, Homo sapiens
  misc_RNA (1)...(19): siRNA sense strand
acagaaacggacugaagaa

SEQ ID NO: 2331544 - RNA, 19 nt, Homo sapiens
  misc_RNA (1)...(19): siRNA sense strand
gcgcacaagauuuggagau

SEQ ID NO: 2331545 - RNA, 19 nt, Homo sapiens
  misc_RNA (1)...(19): siRNA sense strand
gagcaaacucuucguaaaa

SEQ ID NO: 2331546 - RNA, 19 nt, Homo sapiens
  misc_RNA (1)...(19): siRNA sense strand
gguacuacuacuauugaaa

SEQ ID NO: 2331547 - RNA, 19 nt, Homo sapiens
  misc_RNA (1)...(19): siRNA sense strand
agaugauggcugaugacaa

SEQ ID NO: 2331548 - RNA, 19 nt, Homo sapiens
  misc_RNA (1)...(19): siRNA sense strand
uggagaacuacuugaaaga

SEQ ID NO: 2331549 - RNA, 19 nt, Homo sapiens
  misc_RNA (1)...(19): siRNA sense strand
aguugguguuguugcauua

SEQ ID NO: 2331550 - RNA, 19 nt, Homo sapiens
  misc_RNA (1)...(19): siRNA sense strand
agaagauccaugaugcaaa

SEQ ID NO: 2331551 - RNA, 19 nt, Homo sapiens
  misc_RNA (1)...(19): siRNA sense strand
aggaagagacgguuuaaaa

SEQ ID NO: 2331552 - RNA, 19 nt, Homo sapiens
  misc_RNA (1)...(19): siRNA sense strand
cacaagauuuggagaugau

SEQ ID NO: 2331553 - RNA, 19 nt, Homo sapiens
  misc_RNA (1)...(19): siRNA sense strand
cuugaaagagaaacaacua

SEQ ID NO: 2331554 - RNA, 19 nt, Homo sapiens
  misc_RNA (1)...(19): siRNA sense strand
agaagauaccauugaaagu

SEQ ID NO: 2331555 - RNA, 19 nt, Homo sapiens
  misc_RNA (1)...(19): siRNA sense strand
ugaacguggcacacaaaua

SEQ ID NO: 2331556 - RNA, 19 nt, Homo sapiens
  misc_RNA (1)...(19): siRNA sense strand
cauuaaugugccugaugaa

SEQ ID NO: 2331557 - RNA, 19 nt, Homo sapiens
  misc_RNA (1)...(19): siRNA sense strand
cagaaacggacugaagaaa

SEQ ID NO: 2331558 - RNA, 19 nt, Homo sapiens
  misc_RNA (1)...(19): siRNA sense strand
acacaaauacacuauggaa

SEQ ID NO: 2331559 - RNA, 19 nt, Homo sapiens
  misc_RNA (1)...(19): siRNA sense strand
aaauaugaccucaggacca

SEQ ID NO: 2331560 - RNA, 19 nt, Homo sapiens
  misc_RNA (1)...(19): siRNA sense strand
uggaauacuuugacccaca

SEQ ID NO: 2331561 - RNA, 19 nt, Homo sapiens
  misc_RNA (1)...(19): siRNA sense strand
agaaacggacugaagaaaa

SEQ ID NO: 2331562 - RNA, 19 nt, Homo sapiens
  misc_RNA (1)...(19): siRNA sense strand
ggaacacuucauugaggua

SEQ ID NO: 2331563 - RNA, 19 nt, Homo sapiens
  misc_RNA (1)...(19): siRNA sense strand
caugaauggccguaggcuu

SEQ ID NO: 2331564 - RNA, 19 nt, Homo sapiens
  misc_RNA (1)...(19): siRNA sense strand
ggacugaagaaaagcaaca

SEQ ID NO: 2331565 - RNA, 19 nt, Homo sapiens
  misc_RNA (1)...(19): siRNA sense strand
uauaaaccacgcagagcaa

SEQ ID NO: 2331566 - RNA, 19 nt, Homo sapiens
  misc_RNA (1)...(19): siRNA sense strand
acuacuugaaagagaaaca

SEQ ID NO: 2331567 - RNA, 19 nt, Homo sapiens
  misc_RNA (1)...(19): siRNA sense strand
gugcccucuuggagacaaa

SEQ ID NO: 2331568 - RNA, 19 nt, Homo sapiens
  misc_RNA (1)...(19): siRNA sense strand
cuggugaucuugaguguca

SEQ ID NO: 2331569 - RNA, 19 nt, Homo sapiens
  misc_RNA (1)...(19): siRNA sense strand
gggaguugccacauacaau

SEQ ID NO: 2331570 - RNA, 19 nt, Homo sapiens
  misc_RNA (1)...(19): siRNA sense strand
gagggacgacaguggaauu

SEQ ID NO: 2331571 - RNA, 19 nt, Homo sapiens
  misc_RNA (1)...(19): siRNA sense strand
agagaaaugaauggaaaga

SEQ ID NO: 2331572 - RNA, 19 nt, Homo sapiens
  misc_RNA (1)...(19): siRNA sense strand
cagaauaggcaaggagaac

SEQ ID NO: 2331573 - RNA, 19 nt, Homo sapiens
  misc_RNA (1)...(19): siRNA sense strand
cuacgcuggaggugguuua

SEQ ID NO: 2331574 - RNA, 19 nt, Homo sapiens
  misc_RNA (1)...(19): siRNA sense strand
cauguuuacuggugaucuu

SEQ ID NO: 2331575 - RNA, 19 nt, Homo sapiens
  misc_RNA (1)...(19): siRNA sense strand
aaaggugauucauggucaa

SEQ ID NO: 2331576 - RNA, 19 nt, Homo sapiens
  misc_RNA (1)...(19): siRNA sense strand
caggauggaaggaguagau

SEQ ID NO: 2331577 - RNA, 19 nt, Homo sapiens
  misc_RNA (1)...(19): siRNA sense strand
ccuucaaacugcuuaggga

SEQ ID NO: 2331578 - RNA, 19 nt, Homo sapiens
  misc_RNA (1)...(19): siRNA sense strand
agacaaacucuacgugguu

SEQ ID NO: 2331579 - RNA, 19 nt, Homo sapiens
  misc_RNA (1)...(19): siRNA sense strand
ucaaagaagcuugugagaa

SEQ ID NO: 2331580 - RNA, 19 nt, Homo sapiens
  misc_RNA (1)...(19): siRNA sense strand
ugagaaacgcgcacaagau

SEQ ID NO: 2331581 - RNA, 19 nt, Homo sapiens
  misc_RNA (1)...(19): siRNA sense strand
augaaagguacuacuacua

SEQ ID NO: 2331582 - RNA, 19 nt, Homo sapiens
  misc_RNA (1)...(19): siRNA sense strand
gcuccaauuuucucauaaa

SEQ ID NO: 2331583 - RNA, 19 nt, Homo sapiens
  misc_RNA (1)...(19): siRNA sense strand
gaugcaaagcccucggaca

SEQ ID NO: 2331584 - RNA, 19 nt, Homo sapiens
  misc_RNA (1)...(19): siRNA sense strand
agucauaauuugggacaua

SEQ ID NO: 2331585 - RNA, 19 nt, Homo sapiens
  misc_RNA (1)...(19): siRNA sense strand
cgucugagggaguaggaaa

SEQ ID NO: 2331586 - RNA, 19 nt, Homo sapiens
  misc_RNA (1)...(19): siRNA sense strand
ccugaaaacuguagugcaa

SEQ ID NO: 2331587 - RNA, 19 nt, Homo sapiens
  misc_RNA (1)...(19): siRNA sense strand
ucgugaagauggaagcaua

SEQ ID NO: 2331588 - RNA, 19 nt, Homo sapiens
  misc_RNA (1)...(19): siRNA sense strand
ggggaaauuuugagaguca

SEQ ID NO: 2331589 - RNA, 19 nt, Homo sapiens
  misc_RNA (1)...(19): siRNA sense strand
cuucuaaguuugcgagaga

SEQ ID NO: 2331590 - RNA, 19 nt, Homo sapiens
  misc_RNA (1)...(19): siRNA sense strand
gccaaauuccugagggauu

SEQ ID NO: 2331591 - RNA, 19 nt, Homo sapiens
  misc_RNA (1)...(19): siRNA sense strand
cagaauaugcacacaacaa

SEQ ID NO: 2331592 - RNA, 19 nt, Homo sapiens
  misc_RNA (1)...(19): siRNA sense strand
uguucaugguggugagauu

SEQ ID NO: 2331593 - RNA, 19 nt, Homo sapiens
  misc_RNA (1)...(19): siRNA sense strand
ucuaaguuugcgagagaaa

SEQ ID NO: 2331594 - RNA, 19 nt, Homo sapiens
  misc_RNA (1)...(19): siRNA sense strand
aagagaacaucaaggaaca

SEQ ID NO: 2331595 - RNA, 19 nt, Homo sapiens
  misc_RNA (1)...(19): siRNA sense strand
gguucaagcaauaaagaca

SEQ ID NO: 2331596 - RNA, 19 nt, Homo sapiens
  misc_RNA (1)...(19): siRNA sense strand
gugaagaagggcuggcaau

SEQ ID NO: 2331597 - RNA, 19 nt, Homo sapiens
  misc_RNA (1)...(19): siRNA sense strand
aggcaucugacaagggaaa

SEQ ID NO: 2331598 - RNA, 19 nt, Homo sapiens
  misc_RNA (1)...(19): siRNA sense strand
ggaugugagugauggcaga

SEQ ID NO: 2331599 - RNA, 19 nt, Homo sapiens
  misc_RNA (1)...(19): siRNA sense strand
gguucuacauggucagcua

SEQ ID NO: 2331600 - RNA, 19 nt, Homo sapiens
  misc_RNA (1)...(19): siRNA sense strand
cuauggaugcagagaauau

SEQ ID NO: 2331601 - RNA, 19 nt, Homo sapiens
  misc_RNA (1)...(19): siRNA sense strand
gcaaauggauacuggugca

SEQ ID NO: 2331602 - RNA, 19 nt, Homo sapiens
  misc_RNA (1)...(19): siRNA sense strand
agagaagggaagaaaguga

SEQ ID NO: 2331603 - RNA, 19 nt, Homo sapiens
  misc_RNA (1)...(19): siRNA sense strand
aggcagagaagggaagaaa

SEQ ID NO: 2331604 - RNA, 19 nt, Homo sapiens
  misc_RNA (1)...(19): siRNA sense strand
ggauuagcuccaugaguau

SEQ ID NO: 2331605 - RNA, 19 nt, Homo sapiens
  misc_RNA (1)...(19): siRNA sense strand
uaaacagggaagugaagaa

SEQ ID NO: 2331606 - RNA, 19 nt, Homo sapiens
  misc_RNA (1)...(19): siRNA sense strand
cagaaaaugggcaaaguua

SEQ ID NO: 2331607 - RNA, 19 nt, Homo sapiens
  misc_RNA (1)...(19): siRNA sense strand
ggggaaggcaguugaaaau

SEQ ID NO: 2331608 - RNA, 19 nt, Homo sapiens
  misc_RNA (1)...(19): siRNA sense strand
cgaucaaagagaacaucaa

SEQ ID NO: 2331609 - RNA, 19 nt, Homo sapiens
  misc_RNA (1)...(19): siRNA sense strand
ugcaagaggcauuugauaa

SEQ ID NO: 2331610 - RNA, 19 nt, Homo sapiens
  misc_RNA (1)...(19): siRNA sense strand
augaugaagaggaggauga

SEQ ID NO: 2331611 - RNA, 19 nt, Homo sapiens
  misc_RNA (1)...(19): siRNA sense strand
aggaggaugaggagauaau

SEQ ID NO: 2331612 - RNA, 19 nt, Homo sapiens
  misc_RNA (1)...(19): siRNA sense strand
guucgaugccggagacuau

SEQ ID NO: 2331613 - RNA, 19 nt, Homo sapiens
  misc_RNA (1)...(19): siRNA sense strand
gaggagauaaugaggcaga

SEQ ID NO: 2331614 - RNA, 19 nt, Homo sapiens
  misc_RNA (1)...(19): siRNA sense strand
gugccgaugccgagaaaca

SEQ ID NO: 2331615 - RNA, 19 nt, Homo sapiens
  misc_RNA (1)...(19): siRNA sense strand
gcucagaagagguuggcca

SEQ ID NO: 2331616 - RNA, 19 nt, Homo sapiens
  misc_RNA (1)...(19): siRNA sense strand
aagcaaaaguccaggagga

SEQ ID NO: 2331617 - RNA, 19 nt, Homo sapiens
  misc_RNA (1)...(19): siRNA sense strand
aaagaaacgaucaaagaga

SEQ ID NO: 2331618 - RNA, 19 nt, Homo sapiens
  misc_RNA (1)...(19): siRNA sense strand
aagaggaggaugaggagau

SEQ ID NO: 2331619 - RNA, 19 nt, Homo sapiens
  misc_RNA (1)...(19): siRNA sense strand
ugauaaacagggaagugaa

SEQ ID NO: 2331620 - RNA, 19 nt, Homo sapiens
  misc_RNA (1)...(19): siRNA sense strand
cuggagaaaugaaacauau

SEQ ID NO: 2331621 - RNA, 19 nt, Homo sapiens
  misc_RNA (1)...(19): siRNA sense strand
guaauauugugcaaggaca

SEQ ID NO: 2331622 - RNA, 19 nt, Homo sapiens
  misc_RNA (1)...(19): siRNA sense strand
guaaucaaauggaggccuu

SEQ ID NO: 2331623 - RNA, 19 nt, Homo sapiens
  misc_RNA (1)...(19): siRNA sense strand
gagauaaugaggcagagaa

SEQ ID NO: 2331624 - RNA, 19 nt, Homo sapiens
  misc_RNA (1)...(19): siRNA sense strand
cagaauagcaguuggagcu

SEQ ID NO: 2331625 - RNA, 19 nt, Homo sapiens
  misc_RNA (1)...(19): siRNA sense strand
agauggaagcauaguuauu

SEQ ID NO: 2331626 - RNA, 19 nt, Homo sapiens
  misc_RNA (1)...(19): siRNA sense strand
guucaagcaauaaagacaa

SEQ ID NO: 2331627 - RNA, 19 nt, Homo sapiens
  misc_RNA (1)...(19): siRNA sense strand
uaaacugucacaugggaaa

SEQ ID NO: 2331628 - RNA, 19 nt, Homo sapiens
  misc_RNA (1)...(19): siRNA sense strand
cagcagaauaugcacacaa

SEQ ID NO: 2331629 - RNA, 19 nt, Homo sapiens
  misc_RNA (1)...(19): siRNA sense strand
agccaauauuugaggagga

SEQ ID NO: 2331630 - RNA, 19 nt, Homo sapiens
  misc_RNA (1)...(19): siRNA sense strand
gcuacaaacccuugcaacu

SEQ ID NO: 2331631 - RNA, 19 nt, Homo sapiens
  misc_RNA (1)...(19): siRNA sense strand
caaaaguccaggaggaaga

SEQ ID NO: 2331632 - RNA, 19 nt, Homo sapiens
  misc_RNA (1)...(19): siRNA sense strand
uggaguaauaggagcugaa

SEQ ID NO: 2331633 - RNA, 19 nt, Homo sapiens
  misc_RNA (1)...(19): siRNA sense strand
acaaauaugucucugggau

SEQ ID NO: 2331634 - RNA, 19 nt, Homo sapiens
  misc_RNA (1)...(19): siRNA sense strand
caguauauugugagugcau

SEQ ID NO: 2331635 - RNA, 19 nt, Homo sapiens
  misc_RNA (1)...(19): siRNA sense strand
ggauaacagcaguugagau

SEQ ID NO: 2331636 - RNA, 19 nt, Homo sapiens
  misc_RNA (1)...(19): siRNA sense strand
gggaagaaagugauccuga

SEQ ID NO: 2331637 - RNA, 19 nt, Homo sapiens
  misc_RNA (1)...(19): siRNA sense strand
ucguggagguuauggacau

SEQ ID NO: 2331638 - RNA, 19 nt, Homo sapiens
  misc_RNA (1)...(19): siRNA sense strand
agguugaauauuuggaaca

SEQ ID NO: 2331639 - RNA, 19 nt, Homo sapiens
  misc_RNA (1)...(19): siRNA sense strand
ggcaaauacuuuaaugagu

SEQ ID NO: 2331640 - RNA, 19 nt, Homo sapiens
  misc_RNA (1)...(19): siRNA sense strand
gaguaauaggagcugaauu

SEQ ID NO: 2331641 - RNA, 19 nt, Homo sapiens
  misc_RNA (1)...(19): siRNA sense strand
cuaccagccuugaaguauu

SEQ ID NO: 2331642 - RNA, 19 nt, Homo sapiens
  misc_RNA (1)...(19): siRNA sense strand
gcaacuaaccucuuggcuu

SEQ ID NO: 2331643 - RNA, 19 nt, Homo sapiens
  misc_RNA (1)...(19): siRNA sense strand
agaggaggaugaggagaua

SEQ ID NO: 2331644 - RNA, 19 nt, Homo sapiens
  misc_RNA (1)...(19): siRNA sense strand
gagugauggcagauguauu

SEQ ID NO: 2331645 - RNA, 19 nt, Homo sapiens
  misc_RNA (1)...(19): siRNA sense strand
caauauuugaggaggaauc

SEQ ID NO: 2331646 - RNA, 19 nt, Homo sapiens
  misc_RNA (1)...(19): siRNA sense strand
caagcuaugacgagacgua

SEQ ID NO: 2331647 - RNA, 19 nt, Homo sapiens
  misc_RNA (1)...(19): siRNA sense strand
agucauaauuugggacaua

SEQ ID NO: 2331648 - RNA, 19 nt, Homo sapiens
  misc_RNA (1)...(19): siRNA sense strand
cgucugagggaguaggaaa

SEQ ID NO: 2331649 - RNA, 19 nt, Homo sapiens
  misc_RNA (1)...(19): siRNA sense strand
ccugaaaacuguagugcaa

SEQ ID NO: 2331650 - RNA, 19 nt, Homo sapiens
  misc_RNA (1)...(19): siRNA sense strand
ucgugaagauggaagcaua

SEQ ID NO: 2331651 - RNA, 19 nt, Homo sapiens
  misc_RNA (1)...(19): siRNA sense strand
ggggaaauuuugagaguca

SEQ ID NO: 2331652 - RNA, 19 nt, Homo sapiens
  misc_RNA (1)...(19): siRNA sense strand
cuucuaaguuugcgagaga

SEQ ID NO: 2331653 - RNA, 19 nt, Homo sapiens
  misc_RNA (1)...(19): siRNA sense strand
gccaaauuccugagggauu

SEQ ID NO: 2331654 - RNA, 19 nt, Homo sapiens
  misc_RNA (1)...(19): siRNA sense strand
cagaauaugcacacaacaa

SEQ ID NO: 2331655 - RNA, 19 nt, Homo sapiens
  misc_RNA (1)...(19): siRNA sense strand
uguucaugguggugagauu

SEQ ID NO: 2331656 - RNA, 19 nt, Homo sapiens
  misc_RNA (1)...(19): siRNA sense strand
ucuaaguuugcgagagaaa

SEQ ID NO: 2331657 - RNA, 19 nt, Homo sapiens
  misc_RNA (1)...(19): siRNA sense strand
aagagaacaucaaggaaca

SEQ ID NO: 2331658 - RNA, 19 nt, Homo sapiens
  misc_RNA (1)...(19): siRNA sense strand
gguucaagcaauaaagaca

SEQ ID NO: 2331659 - RNA, 19 nt, Homo sapiens
  misc_RNA (1)...(19): siRNA sense strand
gugaagaagggcuggcaau

SEQ ID NO: 2331660 - RNA, 19 nt, Homo sapiens
  misc_RNA (1)...(19): siRNA sense strand
aggcaucugacaagggaaa

SEQ ID NO: 2331661 - RNA, 19 nt, Homo sapiens
  misc_RNA (1)...(19): siRNA sense strand
ggaugugagugauggcaga

SEQ ID NO: 2331662 - RNA, 19 nt, Homo sapiens
  misc_RNA (1)...(19): siRNA sense strand
gguucuacauggucagcua

SEQ ID NO: 2331663 - RNA, 19 nt, Homo sapiens
  misc_RNA (1)...(19): siRNA sense strand
cuauggaugcagagaauau

SEQ ID NO: 2331664 - RNA, 19 nt, Homo sapiens
  misc_RNA (1)...(19): siRNA sense strand
gcaaauggauacuggugca

SEQ ID NO: 2331665 - RNA, 19 nt, Homo sapiens
  misc_RNA (1)...(19): siRNA sense strand
agagaagggaagaaaguga

SEQ ID NO: 2331666 - RNA, 19 nt, Homo sapiens
  misc_RNA (1)...(19): siRNA sense strand
aggcagagaagggaagaaa

SEQ ID NO: 2331667 - RNA, 19 nt, Homo sapiens
  misc_RNA (1)...(19): siRNA sense strand
ggauuagcuccaugaguau

SEQ ID NO: 2331668 - RNA, 19 nt, Homo sapiens
  misc_RNA (1)...(19): siRNA sense strand
uaaacagggaagugaagaa

SEQ ID NO: 2331669 - RNA, 19 nt, Homo sapiens
  misc_RNA (1)...(19): siRNA sense strand
cagaaaaugggcaaaguua

SEQ ID NO: 2331670 - RNA, 19 nt, Homo sapiens
  misc_RNA (1)...(19): siRNA sense strand
ggggaaggcaguugaaaau

SEQ ID NO: 2331671 - RNA, 19 nt, Homo sapiens
  misc_RNA (1)...(19): siRNA sense strand
cgaucaaagagaacaucaa

SEQ ID NO: 2331672 - RNA, 19 nt, Homo sapiens
  misc_RNA (1)...(19): siRNA sense strand
ugcaagaggcauuugauaa

SEQ ID NO: 2331673 - RNA, 19 nt, Homo sapiens
  misc_RNA (1)...(19): siRNA sense strand
augaugaagaggaggauga

SEQ ID NO: 2331674 - RNA, 19 nt, Homo sapiens
  misc_RNA (1)...(19): siRNA sense strand
aggaggaugaggagauaau

SEQ ID NO: 2331675 - RNA, 19 nt, Homo sapiens
  misc_RNA (1)...(19): siRNA sense strand
guucgaugccggagacuau

SEQ ID NO: 2331676 - RNA, 19 nt, Homo sapiens
  misc_RNA (1)...(19): siRNA sense strand
gaggagauaaugaggcaga

SEQ ID NO: 2331677 - RNA, 19 nt, Homo sapiens
  misc_RNA (1)...(19): siRNA sense strand
gugccgaugccgagaaaca

SEQ ID NO: 2331678 - RNA, 19 nt, Homo sapiens
  misc_RNA (1)...(19): siRNA sense strand
gcucagaagagguuggcca

SEQ ID NO: 2331679 - RNA, 19 nt, Homo sapiens
  misc_RNA (1)...(19): siRNA sense strand
aagcaaaaguccaggagga

SEQ ID NO: 2331680 - RNA, 19 nt, Homo sapiens
  misc_RNA (1)...(19): siRNA sense strand
aaagaaacgaucaaagaga

SEQ ID NO: 2331681 - RNA, 19 nt, Homo sapiens
  misc_RNA (1)...(19): siRNA sense strand
aagaggaggaugaggagau

SEQ ID NO: 2331682 - RNA, 19 nt, Homo sapiens
  misc_RNA (1)...(19): siRNA sense strand
ugauaaacagggaagugaa

SEQ ID NO: 2331683 - RNA, 19 nt, Homo sapiens
  misc_RNA (1)...(19): siRNA sense strand
cuggagaaaugaaacauau

SEQ ID NO: 2331684 - RNA, 19 nt, Homo sapiens
  misc_RNA (1)...(19): siRNA sense strand
guaauauugugcaaggaca

SEQ ID NO: 2331685 - RNA, 19 nt, Homo sapiens
  misc_RNA (1)...(19): siRNA sense strand
guaaucaaauggaggccuu

SEQ ID NO: 2331686 - RNA, 19 nt, Homo sapiens
  misc_RNA (1)...(19): siRNA sense strand
gagauaaugaggcagagaa

SEQ ID NO: 2331687 - RNA, 19 nt, Homo sapiens
  misc_RNA (1)...(19): siRNA sense strand
cagaauagcaguuggagcu

SEQ ID NO: 2331688 - RNA, 19 nt, Homo sapiens
  misc_RNA (1)...(19): siRNA sense strand
agauggaagcauaguuauu

SEQ ID NO: 2331689 - RNA, 19 nt, Homo sapiens
  misc_RNA (1)...(19): siRNA sense strand
guucaagcaauaaagacaa

SEQ ID NO: 2331690 - RNA, 19 nt, Homo sapiens
  misc_RNA (1)...(19): siRNA sense strand
uaaacugucacaugggaaa

SEQ ID NO: 2331691 - RNA, 19 nt, Homo sapiens
  misc_RNA (1)...(19): siRNA sense strand
cagcagaauaugcacacaa

SEQ ID NO: 2331692 - RNA, 19 nt, Homo sapiens
  misc_RNA (1)...(19): siRNA sense strand
agccaauauuugaggagga

SEQ ID NO: 2331693 - RNA, 19 nt, Homo sapiens
  misc_RNA (1)...(19): siRNA sense strand
gcuacaaacccuugcaacu

SEQ ID NO: 2331694 - RNA, 19 nt, Homo sapiens
  misc_RNA (1)...(19): siRNA sense strand
caaaaguccaggaggaaga

SEQ ID NO: 2331695 - RNA, 19 nt, Homo sapiens
  misc_RNA (1)...(19): siRNA sense strand
uggaguaauaggagcugaa

SEQ ID NO: 2331696 - RNA, 19 nt, Homo sapiens
  misc_RNA (1)...(19): siRNA sense strand
acaaauaugucucugggau

SEQ ID NO: 2331697 - RNA, 19 nt, Homo sapiens
  misc_RNA (1)...(19): siRNA sense strand
caguauauugugagugcau

SEQ ID NO: 2331698 - RNA, 19 nt, Homo sapiens
  misc_RNA (1)...(19): siRNA sense strand
ggauaacagcaguugagau

SEQ ID NO: 2331699 - RNA, 19 nt, Homo sapiens
  misc_RNA (1)...(19): siRNA sense strand
gggaagaaagugauccuga

SEQ ID NO: 2331700 - RNA, 19 nt, Homo sapiens
  misc_RNA (1)...(19): siRNA sense strand
ucguggagguuauggacau

SEQ ID NO: 2331701 - RNA, 19 nt, Homo sapiens
  misc_RNA (1)...(19): siRNA sense strand
agguugaauauuuggaaca

SEQ ID NO: 2331702 - RNA, 19 nt, Homo sapiens
  misc_RNA (1)...(19): siRNA sense strand
ggcaaauacuuuaaugagu

SEQ ID NO: 2331703 - RNA, 19 nt, Homo sapiens
  misc_RNA (1)...(19): siRNA sense strand
gaguaauaggagcugaauu

SEQ ID NO: 2331704 - RNA, 19 nt, Homo sapiens
  misc_RNA (1)...(19): siRNA sense strand
cuaccagccuugaaguauu

SEQ ID NO: 2331705 - RNA, 19 nt, Homo sapiens
  misc_RNA (1)...(19): siRNA sense strand
gcaacuaaccucuuggcuu

SEQ ID NO: 2331706 - RNA, 19 nt, Homo sapiens
  misc_RNA (1)...(19): siRNA sense strand
agaggaggaugaggagaua

SEQ ID NO: 2331707 - RNA, 19 nt, Homo sapiens
  misc_RNA (1)...(19): siRNA sense strand
gagugauggcagauguauu

SEQ ID NO: 2331708 - RNA, 19 nt, Homo sapiens
  misc_RNA (1)...(19): siRNA sense strand
caauauuugaggaggaauc

SEQ ID NO: 2331709 - RNA, 19 nt, Homo sapiens
  misc_RNA (1)...(19): siRNA sense strand
caagcuaugacgagacgua

SEQ ID NO: 2331710 - RNA, 19 nt, Homo sapiens
  misc_RNA (1)...(19): siRNA sense strand
gggagaagccggaggaguu

SEQ ID NO: 2331711 - RNA, 19 nt, Homo sapiens
  misc_RNA (1)...(19): siRNA sense strand
ggcagaagcaagagagcua

SEQ ID NO: 2331712 - RNA, 19 nt, Homo sapiens
  misc_RNA (1)...(19): siRNA sense strand
aggagaaggcuaaggagaa

SEQ ID NO: 2331713 - RNA, 19 nt, Homo sapiens
  misc_RNA (1)...(19): siRNA sense strand
acaaugaggaggaggagaa

SEQ ID NO: 2331714 - RNA, 19 nt, Homo sapiens
  misc_RNA (1)...(19): siRNA sense strand
agaugaaggagaaggcuaa

SEQ ID NO: 2331715 - RNA, 19 nt, Homo sapiens
  misc_RNA (1)...(19): siRNA sense strand
gagaagagugugcgagaga

SEQ ID NO: 2331716 - RNA, 19 nt, Homo sapiens
  misc_RNA (1)...(19): siRNA sense strand
gaagagugugcgagagaga

SEQ ID NO: 2331717 - RNA, 19 nt, Homo sapiens
  misc_RNA (1)...(19): siRNA sense strand
ucacuuacguggacaggaa

SEQ ID NO: 2331718 - RNA, 19 nt, Homo sapiens
  misc_RNA (1)...(19): siRNA sense strand
aggaaaacucauacggaaa

SEQ ID NO: 2331719 - RNA, 19 nt, Homo sapiens
  misc_RNA (1)...(19): siRNA sense strand
aacaaagccagaagagaaa

SEQ ID NO: 2331720 - RNA, 19 nt, Homo sapiens
  misc_RNA (1)...(19): siRNA sense strand
cagaugaaggagaaggcua

SEQ ID NO: 2331721 - RNA, 19 nt, Homo sapiens
  misc_RNA (1)...(19): siRNA sense strand
ccaagcagccucaggagaa

SEQ ID NO: 2331722 - RNA, 19 nt, Homo sapiens
  misc_RNA (1)...(19): siRNA sense strand
aggugcagcuccagagaau

SEQ ID NO: 2331723 - RNA, 19 nt, Homo sapiens
  misc_RNA (1)...(19): siRNA sense strand
ggaagaagugacagaggca

SEQ ID NO: 2331724 - RNA, 19 nt, Homo sapiens
  misc_RNA (1)...(19): siRNA sense strand
agcuagaagcggugaauuu

SEQ ID NO: 2331725 - RNA, 19 nt, Homo sapiens
  misc_RNA (1)...(19): siRNA sense strand
gggaggugcacgacagcua

SEQ ID NO: 2331726 - RNA, 19 nt, Homo sapiens
  misc_RNA (1)...(19): siRNA sense strand
gggcugagcacguugaaaa

SEQ ID NO: 2331727 - RNA, 19 nt, Homo sapiens
  misc_RNA (1)...(19): siRNA sense strand
ccgucagaauucagaaaca

SEQ ID NO: 2331728 - RNA, 19 nt, Homo sapiens
  misc_RNA (1)...(19): siRNA sense strand
ggaggagaaugaugggcau

SEQ ID NO: 2331729 - RNA, 19 nt, Homo sapiens
  misc_RNA (1)...(19): siRNA sense strand
cagagggcgagcagaguua

SEQ ID NO: 2331730 - RNA, 19 nt, Homo sapiens
  misc_RNA (1)...(19): siRNA sense strand
gcgcgaggaguacgggaua

SEQ ID NO: 2331731 - RNA, 19 nt, Homo sapiens
  misc_RNA (1)...(19): siRNA sense strand
aggcuuccgaggagagaaa

SEQ ID NO: 2331732 - RNA, 19 nt, Homo sapiens
  misc_RNA (1)...(19): siRNA sense strand
uagauaaggaagcgagaca

SEQ ID NO: 2331733 - RNA, 19 nt, Homo sapiens
  misc_RNA (1)...(19): siRNA sense strand
augaggaggaggagaauga

SEQ ID NO: 2331734 - RNA, 19 nt, Homo sapiens
  misc_RNA (1)...(19): siRNA sense strand
aggagaagagugugcgaga

SEQ ID NO: 2331735 - RNA, 19 nt, Homo sapiens
  misc_RNA (1)...(19): siRNA sense strand
gaggagcggcagagaguga

SEQ ID NO: 2331736 - RNA, 19 nt, Homo sapiens
  misc_RNA (1)...(19): siRNA sense strand
ucacuacuacagagggaaa

SEQ ID NO: 2331737 - RNA, 19 nt, Homo sapiens
  misc_RNA (1)...(19): siRNA sense strand
ugacagaaaccguagcaga

SEQ ID NO: 2331738 - RNA, 19 nt, Homo sapiens
  misc_RNA (1)...(19): siRNA sense strand
aggaaaacaaagacugaaa

SEQ ID NO: 2331739 - RNA, 19 nt, Homo sapiens
  misc_RNA (1)...(19): siRNA sense strand
uauuggaaggagaaaguaa

SEQ ID NO: 2331740 - RNA, 19 nt, Homo sapiens
  misc_RNA (1)...(19): siRNA sense strand
ggacagaagagcagaggug

SEQ ID NO: 2331741 - RNA, 19 nt, Homo sapiens
  misc_RNA (1)...(19): siRNA sense strand
aggccauguuugauaagaa

SEQ ID NO: 2331742 - RNA, 19 nt, Homo sapiens
  misc_RNA (1)...(19): siRNA sense strand
cauucaaaguggaggaggu

SEQ ID NO: 2331743 - RNA, 19 nt, Homo sapiens
  misc_RNA (1)...(19): siRNA sense strand
ggcgauuccaugacagaaa

SEQ ID NO: 2331744 - RNA, 19 nt, Homo sapiens
  misc_RNA (1)...(19): siRNA sense strand
gaaagaaaacagaagugaa

SEQ ID NO: 2331745 - RNA, 19 nt, Homo sapiens
  misc_RNA (1)...(19): siRNA sense strand
gggagacggugcagcugua

SEQ ID NO: 2331746 - RNA, 19 nt, Homo sapiens
  misc_RNA (1)...(19): siRNA sense strand
gcuucuugggcucgggaua

SEQ ID NO: 2331747 - RNA, 19 nt, Homo sapiens
  misc_RNA (1)...(19): siRNA sense strand
aggacucacugaaggagaa

SEQ ID NO: 2331748 - RNA, 19 nt, Homo sapiens
  misc_RNA (1)...(19): siRNA sense strand
cgguagagaggcagaagca

SEQ ID NO: 2331749 - RNA, 19 nt, Homo sapiens
  misc_RNA (1)...(19): siRNA sense strand
ggggaaaggaaaacaaaga

SEQ ID NO: 2331750 - RNA, 19 nt, Homo sapiens
  misc_RNA (1)...(19): siRNA sense strand
cugaaauacuuguggaguc

SEQ ID NO: 2331751 - RNA, 19 nt, Homo sapiens
  misc_RNA (1)...(19): siRNA sense strand
cuggaaagaacaagcuaga

SEQ ID NO: 2331752 - RNA, 19 nt, Homo sapiens
  misc_RNA (1)...(19): siRNA sense strand
cuacagagggaaaaugaaa

SEQ ID NO: 2331753 - RNA, 19 nt, Homo sapiens
  misc_RNA (1)...(19): siRNA sense strand
caggaaaacucauacggaa

SEQ ID NO: 2331754 - RNA, 19 nt, Homo sapiens
  misc_RNA (1)...(19): siRNA sense strand
gagaaaccuaagaugggaa

SEQ ID NO: 2331755 - RNA, 19 nt, Homo sapiens
  misc_RNA (1)...(19): siRNA sense strand
ucggaaagcacacggucaa

SEQ ID NO: 2331756 - RNA, 19 nt, Homo sapiens
  misc_RNA (1)...(19): siRNA sense strand
ugaguaacguagaggcgau

SEQ ID NO: 2331757 - RNA, 19 nt, Homo sapiens
  misc_RNA (1)...(19): siRNA sense strand
gagggaaaaugaaaggaau

SEQ ID NO: 2331758 - RNA, 19 nt, Homo sapiens
  misc_RNA (1)...(19): siRNA sense strand
agucacaggugcuggagga

SEQ ID NO: 2331759 - RNA, 19 nt, Homo sapiens
  misc_RNA (1)...(19): siRNA sense strand
acguggagaucguggagga

SEQ ID NO: 2331760 - RNA, 19 nt, Homo sapiens
  misc_RNA (1)...(19): siRNA sense strand
ucaaaguggaggaggucga

SEQ ID NO: 2331761 - RNA, 19 nt, Homo sapiens
  misc_RNA (1)...(19): siRNA sense strand
gagaacagggcaaggagca

SEQ ID NO: 2331762 - RNA, 19 nt, Homo sapiens
  misc_RNA (1)...(19): siRNA sense strand
aaggagaaggcuaaggaga

SEQ ID NO: 2331763 - RNA, 19 nt, Homo sapiens
  misc_RNA (1)...(19): siRNA sense strand
cagaaaccguagcagaaaa

SEQ ID NO: 2331764 - RNA, 19 nt, Homo sapiens
  misc_RNA (1)...(19): siRNA sense strand
gaaacagaccagaaaccau

SEQ ID NO: 2331765 - RNA, 19 nt, Homo sapiens
  misc_RNA (1)...(19): siRNA sense strand
gucagaauucagaaacaaa

SEQ ID NO: 2331766 - RNA, 19 nt, Homo sapiens
  misc_RNA (1)...(19): siRNA sense strand
gccacuacccagcaggaaa

SEQ ID NO: 2331767 - RNA, 19 nt, Homo sapiens
  misc_RNA (1)...(19): siRNA sense strand
ccuauggccuuuuaagaaa

SEQ ID NO: 2331768 - RNA, 19 nt, Homo sapiens
  misc_RNA (1)...(19): siRNA sense strand
accaaaagccggagauaca

SEQ ID NO: 2331769 - RNA, 19 nt, Homo sapiens
  misc_RNA (1)...(19): siRNA sense strand
ucaaaugagaggaccguca

SEQ ID NO: 2331770 - RNA, 19 nt, Homo sapiens
  misc_RNA (1)...(19): siRNA sense strand
ccgagcagaugauaggaga

SEQ ID NO: 2331771 - RNA, 19 nt, Homo sapiens
  misc_RNA (1)...(19): siRNA sense strand
gggagaagccggaggaguu

SEQ ID NO: 2331772 - RNA, 19 nt, Homo sapiens
  misc_RNA (1)...(19): siRNA sense strand
ggcagaagcaagagagcua

SEQ ID NO: 2331773 - RNA, 19 nt, Homo sapiens
  misc_RNA (1)...(19): siRNA sense strand
aggagaaggcuaaggagaa

SEQ ID NO: 2331774 - RNA, 19 nt, Homo sapiens
  misc_RNA (1)...(19): siRNA sense strand
acaaugaggaggaggagaa

SEQ ID NO: 2331775 - RNA, 19 nt, Homo sapiens
  misc_RNA (1)...(19): siRNA sense strand
agaugaaggagaaggcuaa

SEQ ID NO: 2331776 - RNA, 19 nt, Homo sapiens
  misc_RNA (1)...(19): siRNA sense strand
gagaagagugugcgagaga

SEQ ID NO: 2331777 - RNA, 19 nt, Homo sapiens
  misc_RNA (1)...(19): siRNA sense strand
gaagagugugcgagagaga

SEQ ID NO: 2331778 - RNA, 19 nt, Homo sapiens
  misc_RNA (1)...(19): siRNA sense strand
ucacuuacguggacaggaa

SEQ ID NO: 2331779 - RNA, 19 nt, Homo sapiens
  misc_RNA (1)...(19): siRNA sense strand
aggaaaacucauacggaaa

SEQ ID NO: 2331780 - RNA, 19 nt, Homo sapiens
  misc_RNA (1)...(19): siRNA sense strand
aacaaagccagaagagaaa

SEQ ID NO: 2331781 - RNA, 19 nt, Homo sapiens
  misc_RNA (1)...(19): siRNA sense strand
cagaugaaggagaaggcua

SEQ ID NO: 2331782 - RNA, 19 nt, Homo sapiens
  misc_RNA (1)...(19): siRNA sense strand
ccaagcagccucaggagaa

SEQ ID NO: 2331783 - RNA, 19 nt, Homo sapiens
  misc_RNA (1)...(19): siRNA sense strand
aggugcagcuccagagaau

SEQ ID NO: 2331784 - RNA, 19 nt, Homo sapiens
  misc_RNA (1)...(19): siRNA sense strand
ggaagaagugacagaggca

SEQ ID NO: 2331785 - RNA, 19 nt, Homo sapiens
  misc_RNA (1)...(19): siRNA sense strand
agcuagaagcggugaauuu

SEQ ID NO: 2331786 - RNA, 19 nt, Homo sapiens
  misc_RNA (1)...(19): siRNA sense strand
gggaggugcacgacagcua

SEQ ID NO: 2331787 - RNA, 19 nt, Homo sapiens
  misc_RNA (1)...(19): siRNA sense strand
gggcugagcacguugaaaa

SEQ ID NO: 2331788 - RNA, 19 nt, Homo sapiens
  misc_RNA (1)...(19): siRNA sense strand
ccgucagaauucagaaaca

SEQ ID NO: 2331789 - RNA, 19 nt, Homo sapiens
  misc_RNA (1)...(19): siRNA sense strand
ggaggagaaugaugggcau

SEQ ID NO: 2331790 - RNA, 19 nt, Homo sapiens
  misc_RNA (1)...(19): siRNA sense strand
cagagggcgagcagaguua

SEQ ID NO: 2331791 - RNA, 19 nt, Homo sapiens
  misc_RNA (1)...(19): siRNA sense strand
gcgcgaggaguacgggaua

SEQ ID NO: 2331792 - RNA, 19 nt, Homo sapiens
  misc_RNA (1)...(19): siRNA sense strand
aggcuuccgaggagagaaa

SEQ ID NO: 2331793 - RNA, 19 nt, Homo sapiens
  misc_RNA (1)...(19): siRNA sense strand
uagauaaggaagcgagaca

SEQ ID NO: 2331794 - RNA, 19 nt, Homo sapiens
  misc_RNA (1)...(19): siRNA sense strand
augaggaggaggagaauga

SEQ ID NO: 2331795 - RNA, 19 nt, Homo sapiens
  misc_RNA (1)...(19): siRNA sense strand
aggagaagagugugcgaga

SEQ ID NO: 2331796 - RNA, 19 nt, Homo sapiens
  misc_RNA (1)...(19): siRNA sense strand
gaggagcggcagagaguga

SEQ ID NO: 2331797 - RNA, 19 nt, Homo sapiens
  misc_RNA (1)...(19): siRNA sense strand
ucacuacuacagagggaaa

SEQ ID NO: 2331798 - RNA, 19 nt, Homo sapiens
  misc_RNA (1)...(19): siRNA sense strand
ugacagaaaccguagcaga

SEQ ID NO: 2331799 - RNA, 19 nt, Homo sapiens
  misc_RNA (1)...(19): siRNA sense strand
aggaaaacaaagacugaaa

SEQ ID NO: 2331800 - RNA, 19 nt, Homo sapiens
  misc_RNA (1)...(19): siRNA sense strand
uauuggaaggagaaaguaa

SEQ ID NO: 2331801 - RNA, 19 nt, Homo sapiens
  misc_RNA (1)...(19): siRNA sense strand
ggacagaagagcagaggug

SEQ ID NO: 2331802 - RNA, 19 nt, Homo sapiens
  misc_RNA (1)...(19): siRNA sense strand
aggccauguuugauaagaa

SEQ ID NO: 2331803 - RNA, 19 nt, Homo sapiens
  misc_RNA (1)...(19): siRNA sense strand
cauucaaaguggaggaggu

SEQ ID NO: 2331804 - RNA, 19 nt, Homo sapiens
  misc_RNA (1)...(19): siRNA sense strand
ggcgauuccaugacagaaa

SEQ ID NO: 2331805 - RNA, 19 nt, Homo sapiens
  misc_RNA (1)...(19): siRNA sense strand
gaaagaaaacagaagugaa

SEQ ID NO: 2331806 - RNA, 19 nt, Homo sapiens
  misc_RNA (1)...(19): siRNA sense strand
gggagacggugcagcugua

SEQ ID NO: 2331807 - RNA, 19 nt, Homo sapiens
  misc_RNA (1)...(19): siRNA sense strand
gcuucuugggcucgggaua

SEQ ID NO: 2331808 - RNA, 19 nt, Homo sapiens
  misc_RNA (1)...(19): siRNA sense strand
aggacucacugaaggagaa

SEQ ID NO: 2331809 - RNA, 19 nt, Homo sapiens
  misc_RNA (1)...(19): siRNA sense strand
cgguagagaggcagaagca

SEQ ID NO: 2331810 - RNA, 19 nt, Homo sapiens
  misc_RNA (1)...(19): siRNA sense strand
ggggaaaggaaaacaaaga

SEQ ID NO: 2331811 - RNA, 19 nt, Homo sapiens
  misc_RNA (1)...(19): siRNA sense strand
cugaaauacuuguggaguc

SEQ ID NO: 2331812 - RNA, 19 nt, Homo sapiens
  misc_RNA (1)...(19): siRNA sense strand
cuggaaagaacaagcuaga

SEQ ID NO: 2331813 - RNA, 19 nt, Homo sapiens
  misc_RNA (1)...(19): siRNA sense strand
cuacagagggaaaaugaaa

SEQ ID NO: 2331814 - RNA, 19 nt, Homo sapiens
  misc_RNA (1)...(19): siRNA sense strand
caggaaaacucauacggaa

SEQ ID NO: 2331815 - RNA, 19 nt, Homo sapiens
  misc_RNA (1)...(19): siRNA sense strand
gagaaaccuaagaugggaa

SEQ ID NO: 2331816 - RNA, 19 nt, Homo sapiens
  misc_RNA (1)...(19): siRNA sense strand
ucggaaagcacacggucaa

SEQ ID NO: 2331817 - RNA, 19 nt, Homo sapiens
  misc_RNA (1)...(19): siRNA sense strand
ugaguaacguagaggcgau

SEQ ID NO: 2331818 - RNA, 19 nt, Homo sapiens
  misc_RNA (1)...(19): siRNA sense strand
gagggaaaaugaaaggaau

SEQ ID NO: 2331819 - RNA, 19 nt, Homo sapiens
  misc_RNA (1)...(19): siRNA sense strand
agucacaggugcuggagga

SEQ ID NO: 2331820 - RNA, 19 nt, Homo sapiens
  misc_RNA (1)...(19): siRNA sense strand
acguggagaucguggagga

SEQ ID NO: 2331821 - RNA, 19 nt, Homo sapiens
  misc_RNA (1)...(19): siRNA sense strand
ucaaaguggaggaggucga

SEQ ID NO: 2331822 - RNA, 19 nt, Homo sapiens
  misc_RNA (1)...(19): siRNA sense strand
gagaacagggcaaggagca

SEQ ID NO: 2331823 - RNA, 19 nt, Homo sapiens
  misc_RNA (1)...(19): siRNA sense strand
aaggagaaggcuaaggaga

SEQ ID NO: 2331824 - RNA, 19 nt, Homo sapiens
  misc_RNA (1)...(19): siRNA sense strand
cagaaaccguagcagaaaa

SEQ ID NO: 2331825 - RNA, 19 nt, Homo sapiens
  misc_RNA (1)...(19): siRNA sense strand
gaaacagaccagaaaccau

SEQ ID NO: 2331826 - RNA, 19 nt, Homo sapiens
  misc_RNA (1)...(19): siRNA sense strand
gucagaauucagaaacaaa

SEQ ID NO: 2331827 - RNA, 19 nt, Homo sapiens
  misc_RNA (1)...(19): siRNA sense strand
gccacuacccagcaggaaa

SEQ ID NO: 2331828 - RNA, 19 nt, Homo sapiens
  misc_RNA (1)...(19): siRNA sense strand
ccuauggccuuuuaagaaa

SEQ ID NO: 2331829 - RNA, 19 nt, Homo sapiens
  misc_RNA (1)...(19): siRNA sense strand
accaaaagccggagauaca

SEQ ID NO: 2331830 - RNA, 19 nt, Homo sapiens
  misc_RNA (1)...(19): siRNA sense strand
ucaaaugagaggaccguca

SEQ ID NO: 2331831 - RNA, 19 nt, Homo sapiens
  misc_RNA (1)...(19): siRNA sense strand
ccgagcagaugauaggaga

SEQ ID NO: 2331832 - RNA, 19 nt, Homo sapiens
  misc_RNA (1)...(19): siRNA sense strand
aggaaauuagcaagggaaa

SEQ ID NO: 2331833 - RNA, 19 nt, Homo sapiens
  misc_RNA (1)...(19): siRNA sense strand
gggaaagaggaaagaggau

SEQ ID NO: 2331834 - RNA, 19 nt, Homo sapiens
  misc_RNA (1)...(19): siRNA sense strand
uggaaaucaacgagaacuu

SEQ ID NO: 2331835 - RNA, 19 nt, Homo sapiens
  misc_RNA (1)...(19): siRNA sense strand
ugaagaaaacccaggaaau

SEQ ID NO: 2331836 - RNA, 19 nt, Homo sapiens
  misc_RNA (1)...(19): siRNA sense strand
caggaaauuagcaagggaa

SEQ ID NO: 2331837 - RNA, 19 nt, Homo sapiens
  misc_RNA (1)...(19): siRNA sense strand
aggaaagaggauagcuuga

SEQ ID NO: 2331838 - RNA, 19 nt, Homo sapiens
  misc_RNA (1)...(19): siRNA sense strand
agaggaaagaggauagcuu

SEQ ID NO: 2331839 - RNA, 19 nt, Homo sapiens
  misc_RNA (1)...(19): siRNA sense strand
uuagcaagggaaagaggaa

SEQ ID NO: 2331840 - RNA, 19 nt, Homo sapiens
  misc_RNA (1)...(19): siRNA sense strand
gaggauagcuugacugccu

SEQ ID NO: 2331841 - RNA, 19 nt, Homo sapiens
  misc_RNA (1)...(19): siRNA sense strand
ccaggaaauuagcaaggga

SEQ ID NO: 2331842 - RNA, 19 nt, Homo sapiens
  misc_RNA (1)...(19): siRNA sense strand
uagcaagggaaagaggaaa

SEQ ID NO: 2331843 - RNA, 19 nt, Homo sapiens
  misc_RNA (1)...(19): siRNA sense strand
gggaagaaacugaaagcaa

SEQ ID NO: 2331844 - RNA, 19 nt, Homo sapiens
  misc_RNA (1)...(19): siRNA sense strand
cagcaaacagugaaggaaa

SEQ ID NO: 2331845 - RNA, 19 nt, Homo sapiens
  misc_RNA (1)...(19): siRNA sense strand
agaugaagaggaagagaaa

SEQ ID NO: 2331846 - RNA, 19 nt, Homo sapiens
  misc_RNA (1)...(19): siRNA sense strand
aagugaaagagaagagaua

SEQ ID NO: 2331847 - RNA, 19 nt, Homo sapiens
  misc_RNA (1)...(19): siRNA sense strand
gagaggaagaugaggaaga

SEQ ID NO: 2331848 - RNA, 19 nt, Homo sapiens
  misc_RNA (1)...(19): siRNA sense strand
gugaaagagaagagauaga

SEQ ID NO: 2331849 - RNA, 19 nt, Homo sapiens
  misc_RNA (1)...(19): siRNA sense strand
cagugaaagugaaagagaa

SEQ ID NO: 2331850 - RNA, 19 nt, Homo sapiens
  misc_RNA (1)...(19): siRNA sense strand
gugaagaggaagaugaaga

SEQ ID NO: 2331851 - RNA, 19 nt, Homo sapiens
  misc_RNA (1)...(19): siRNA sense strand
aagaagacgaacagaggaa

SEQ ID NO: 2331852 - RNA, 19 nt, Homo sapiens
  misc_RNA (1)...(19): siRNA sense strand
agagaaaacagaagacaaa

SEQ ID NO: 2331853 - RNA, 19 nt, Homo sapiens
  misc_RNA (1)...(19): siRNA sense strand
gaggagaggcagaagucaa

SEQ ID NO: 2331854 - RNA, 19 nt, Homo sapiens
  misc_RNA (1)...(19): siRNA sense strand
acaacugacuagugaaaga

SEQ ID NO: 2331855 - RNA, 19 nt, Homo sapiens
  misc_RNA (1)...(19): siRNA sense strand
uuuaagaguuggagcuauu

SEQ ID NO: 2331856 - RNA, 19 nt, Homo sapiens
  misc_RNA (1)...(19): siRNA sense strand
acucagaugaagaggaaga

SEQ ID NO: 2331857 - RNA, 19 nt, Homo sapiens
  misc_RNA (1)...(19): siRNA sense strand
gaccaaugugugaaagaaa

SEQ ID NO: 2331858 - RNA, 19 nt, Homo sapiens
  misc_RNA (1)...(19): siRNA sense strand
ugauaguauugcugaagaa

SEQ ID NO: 2331859 - RNA, 19 nt, Homo sapiens
  misc_RNA (1)...(19): siRNA sense strand
augauaagcuagaugaaga

SEQ ID NO: 2331860 - RNA, 19 nt, Homo sapiens
  misc_RNA (1)...(19): siRNA sense strand
cagaugaagaggaagagaa

SEQ ID NO: 2331861 - RNA, 19 nt, Homo sapiens
  misc_RNA (1)...(19): siRNA sense strand
caaagguggaccaaagaaa

SEQ ID NO: 2331862 - RNA, 19 nt, Homo sapiens
  misc_RNA (1)...(19): siRNA sense strand
gagagagagagcagagaga

SEQ ID NO: 2331863 - RNA, 19 nt, Homo sapiens
  misc_RNA (1)...(19): siRNA sense strand
agagugaaccugaggaaaa

SEQ ID NO: 2331864 - RNA, 19 nt, Homo sapiens
  misc_RNA (1)...(19): siRNA sense strand
gaagaaacugaaagcaaau

SEQ ID NO: 2331865 - RNA, 19 nt, Homo sapiens
  misc_RNA (1)...(19): siRNA sense strand
cauuaaggaaguagacauu

SEQ ID NO: 2331866 - RNA, 19 nt, Homo sapiens
  misc_RNA (1)...(19): siRNA sense strand
uagaagaaucaauggaaga

SEQ ID NO: 2331867 - RNA, 19 nt, Homo sapiens
  misc_RNA (1)...(19): siRNA sense strand
cugaaaggagagagacauu

SEQ ID NO: 2331868 - RNA, 19 nt, Homo sapiens
  misc_RNA (1)...(19): siRNA sense strand
gggugaaggcugacaggau

SEQ ID NO: 2331869 - RNA, 19 nt, Homo sapiens
  misc_RNA (1)...(19): siRNA sense strand
guauuggaucugagggaau

SEQ ID NO: 2331870 - RNA, 19 nt, Homo sapiens
  misc_RNA (1)...(19): siRNA sense strand
cagaagaagaggugccuga

SEQ ID NO: 2331871 - RNA, 19 nt, Homo sapiens
  misc_RNA (1)...(19): siRNA sense strand
ucaaacagugaaagugaaa

SEQ ID NO: 2331872 - RNA, 19 nt, Homo sapiens
  misc_RNA (1)...(19): siRNA sense strand
aaacagugaaagugaaaga

SEQ ID NO: 2331873 - RNA, 19 nt, Homo sapiens
  misc_RNA (1)...(19): siRNA sense strand
gggaagacgaagcaagaca

SEQ ID NO: 2331874 - RNA, 19 nt, Homo sapiens
  misc_RNA (1)...(19): siRNA sense strand
gaagagugaaccugaggaa

SEQ ID NO: 2331875 - RNA, 19 nt, Homo sapiens
  misc_RNA (1)...(19): siRNA sense strand
aggaaauugaagaagagaa

SEQ ID NO: 2331876 - RNA, 19 nt, Homo sapiens
  misc_RNA (1)...(19): siRNA sense strand
gugaaggcugacaggauaa

SEQ ID NO: 2331877 - RNA, 19 nt, Homo sapiens
  misc_RNA (1)...(19): siRNA sense strand
cagaagaugcuuuagaaaa

SEQ ID NO: 2331878 - RNA, 19 nt, Homo sapiens
  misc_RNA (1)...(19): siRNA sense strand
ggaagaagaaagcagugaa

SEQ ID NO: 2331879 - RNA, 19 nt, Homo sapiens
  misc_RNA (1)...(19): siRNA sense strand
aagaggaagaugaagacaa

SEQ ID NO: 2331880 - RNA, 19 nt, Homo sapiens
  misc_RNA (1)...(19): siRNA sense strand
aagaaaggacauuaaggaa

SEQ ID NO: 2331881 - RNA, 19 nt, Homo sapiens
  misc_RNA (1)...(19): siRNA sense strand
gaaagagaagagauagaau

SEQ ID NO: 2331882 - RNA, 19 nt, Homo sapiens
  misc_RNA (1)...(19): siRNA sense strand
acaaagacucagaugaaga

SEQ ID NO: 2331883 - RNA, 19 nt, Homo sapiens
  misc_RNA (1)...(19): siRNA sense strand
uagcaagaaaggacauuaa

SEQ ID NO: 2331884 - RNA, 19 nt, Homo sapiens
  misc_RNA (1)...(19): siRNA sense strand
ugaaaaggcuggugaaagu

SEQ ID NO: 2331885 - RNA, 19 nt, Homo sapiens
  misc_RNA (1)...(19): siRNA sense strand
caguagugaugaugaagau

SEQ ID NO: 2331886 - RNA, 19 nt, Homo sapiens
  misc_RNA (1)...(19): siRNA sense strand
ugaacaguacagagagaau

SEQ ID NO: 2331887 - RNA, 19 nt, Homo sapiens
  misc_RNA (1)...(19): siRNA sense strand
guacaagaugaccaaguaa

SEQ ID NO: 2331888 - RNA, 19 nt, Homo sapiens
  misc_RNA (1)...(19): siRNA sense strand
acagaagaugcuuuagaaa

SEQ ID NO: 2331889 - RNA, 19 nt, Homo sapiens
  misc_RNA (1)...(19): siRNA sense strand
gaaaagaaguugaaacgga

SEQ ID NO: 2331890 - RNA, 19 nt, Homo sapiens
  misc_RNA (1)...(19): siRNA sense strand
aaugaugaagagaaggaaa

SEQ ID NO: 2331891 - RNA, 19 nt, Homo sapiens
  misc_RNA (1)...(19): siRNA sense strand
acggaaaauacuaggacaa

SEQ ID NO: 2331892 - RNA, 19 nt, Homo sapiens
  misc_RNA (1)...(19): siRNA sense strand
gugagagggaaucggcaaa

SEQ ID NO: 2331893 - RNA, 19 nt, Homo sapiens
  misc_RNA (1)...(19): siRNA sense strand
gagagagagcagagagaag

SEQ ID NO: 2331894 - RNA, 19 nt, Homo sapiens
  misc_RNA (1)...(19): siRNA sense strand
ccauagacaggaggagaaa

SEQ ID NO: 2331895 - RNA, 19 nt, Homo sapiens
  misc_RNA (1)...(19): siRNA sense strand
auuaacaaauccagagcau

SEQ ID NO: 2331896 - RNA, 19 nt, Homo sapiens
  misc_RNA (1)...(19): siRNA sense strand
cagugaagaggaagaugaa

SEQ ID NO: 2331897 - RNA, 19 nt, Homo sapiens
  misc_RNA (1)...(19): siRNA sense strand
ccgucucaaugaugaauua

SEQ ID NO: 2331898 - RNA, 19 nt, Homo sapiens
  misc_RNA (1)...(19): siRNA sense strand
aggaagaugaggaagacau

SEQ ID NO: 2331899 - RNA, 19 nt, Homo sapiens
  misc_RNA (1)...(19): siRNA sense strand
aggagaggcagaagucaaa

SEQ ID NO: 2331900 - RNA, 19 nt, Homo sapiens
  misc_RNA (1)...(19): siRNA sense strand
ugauaagcuagaugaagaa

SEQ ID NO: 2331901 - RNA, 19 nt, Homo sapiens
  misc_RNA (1)...(19): siRNA sense strand
auggaauggaaaugacaaa

SEQ ID NO: 2331902 - RNA, 19 nt, Homo sapiens
  misc_RNA (1)...(19): siRNA sense strand
gggaagaaacugaaagcaa

SEQ ID NO: 2331903 - RNA, 19 nt, Homo sapiens
  misc_RNA (1)...(19): siRNA sense strand
cagcaaacagugaaggaaa

SEQ ID NO: 2331904 - RNA, 19 nt, Homo sapiens
  misc_RNA (1)...(19): siRNA sense strand
agaugaagaggaagagaaa

SEQ ID NO: 2331905 - RNA, 19 nt, Homo sapiens
  misc_RNA (1)...(19): siRNA sense strand
aagugaaagagaagagaua

SEQ ID NO: 2331906 - RNA, 19 nt, Homo sapiens
  misc_RNA (1)...(19): siRNA sense strand
gagaggaagaugaggaaga

SEQ ID NO: 2331907 - RNA, 19 nt, Homo sapiens
  misc_RNA (1)...(19): siRNA sense strand
gugaaagagaagagauaga

SEQ ID NO: 2331908 - RNA, 19 nt, Homo sapiens
  misc_RNA (1)...(19): siRNA sense strand
cagugaaagugaaagagaa

SEQ ID NO: 2331909 - RNA, 19 nt, Homo sapiens
  misc_RNA (1)...(19): siRNA sense strand
gugaagaggaagaugaaga

SEQ ID NO: 2331910 - RNA, 19 nt, Homo sapiens
  misc_RNA (1)...(19): siRNA sense strand
aagaagacgaacagaggaa

SEQ ID NO: 2331911 - RNA, 19 nt, Homo sapiens
  misc_RNA (1)...(19): siRNA sense strand
agagaaaacagaagacaaa

SEQ ID NO: 2331912 - RNA, 19 nt, Homo sapiens
  misc_RNA (1)...(19): siRNA sense strand
gaggagaggcagaagucaa

SEQ ID NO: 2331913 - RNA, 19 nt, Homo sapiens
  misc_RNA (1)...(19): siRNA sense strand
acaacugacuagugaaaga

SEQ ID NO: 2331914 - RNA, 19 nt, Homo sapiens
  misc_RNA (1)...(19): siRNA sense strand
uuuaagaguuggagcuauu

SEQ ID NO: 2331915 - RNA, 19 nt, Homo sapiens
  misc_RNA (1)...(19): siRNA sense strand
acucagaugaagaggaaga

SEQ ID NO: 2331916 - RNA, 19 nt, Homo sapiens
  misc_RNA (1)...(19): siRNA sense strand
gaccaaugugugaaagaaa

SEQ ID NO: 2331917 - RNA, 19 nt, Homo sapiens
  misc_RNA (1)...(19): siRNA sense strand
ugauaguauugcugaagaa

SEQ ID NO: 2331918 - RNA, 19 nt, Homo sapiens
  misc_RNA (1)...(19): siRNA sense strand
augauaagcuagaugaaga

SEQ ID NO: 2331919 - RNA, 19 nt, Homo sapiens
  misc_RNA (1)...(19): siRNA sense strand
cagaugaagaggaagagaa

SEQ ID NO: 2331920 - RNA, 19 nt, Homo sapiens
  misc_RNA (1)...(19): siRNA sense strand
caaagguggaccaaagaaa

SEQ ID NO: 2331921 - RNA, 19 nt, Homo sapiens
  misc_RNA (1)...(19): siRNA sense strand
gagagagagagcagagaga

SEQ ID NO: 2331922 - RNA, 19 nt, Homo sapiens
  misc_RNA (1)...(19): siRNA sense strand
agagugaaccugaggaaaa

SEQ ID NO: 2331923 - RNA, 19 nt, Homo sapiens
  misc_RNA (1)...(19): siRNA sense strand
gaagaaacugaaagcaaau

SEQ ID NO: 2331924 - RNA, 19 nt, Homo sapiens
  misc_RNA (1)...(19): siRNA sense strand
cauuaaggaaguagacauu

SEQ ID NO: 2331925 - RNA, 19 nt, Homo sapiens
  misc_RNA (1)...(19): siRNA sense strand
uagaagaaucaauggaaga

SEQ ID NO: 2331926 - RNA, 19 nt, Homo sapiens
  misc_RNA (1)...(19): siRNA sense strand
cugaaaggagagagacauu

SEQ ID NO: 2331927 - RNA, 19 nt, Homo sapiens
  misc_RNA (1)...(19): siRNA sense strand
gggugaaggcugacaggau

SEQ ID NO: 2331928 - RNA, 19 nt, Homo sapiens
  misc_RNA (1)...(19): siRNA sense strand
guauuggaucugagggaau

SEQ ID NO: 2331929 - RNA, 19 nt, Homo sapiens
  misc_RNA (1)...(19): siRNA sense strand
cagaagaagaggugccuga

SEQ ID NO: 2331930 - RNA, 19 nt, Homo sapiens
  misc_RNA (1)...(19): siRNA sense strand
ucaaacagugaaagugaaa

SEQ ID NO: 2331931 - RNA, 19 nt, Homo sapiens
  misc_RNA (1)...(19): siRNA sense strand
aaacagugaaagugaaaga

SEQ ID NO: 2331932 - RNA, 19 nt, Homo sapiens
  misc_RNA (1)...(19): siRNA sense strand
gggaagacgaagcaagaca

SEQ ID NO: 2331933 - RNA, 19 nt, Homo sapiens
  misc_RNA (1)...(19): siRNA sense strand
gaagagugaaccugaggaa

SEQ ID NO: 2331934 - RNA, 19 nt, Homo sapiens
  misc_RNA (1)...(19): siRNA sense strand
aggaaauugaagaagagaa

SEQ ID NO: 2331935 - RNA, 19 nt, Homo sapiens
  misc_RNA (1)...(19): siRNA sense strand
gugaaggcugacaggauaa

SEQ ID NO: 2331936 - RNA, 19 nt, Homo sapiens
  misc_RNA (1)...(19): siRNA sense strand
cagaagaugcuuuagaaaa

SEQ ID NO: 2331937 - RNA, 19 nt, Homo sapiens
  misc_RNA (1)...(19): siRNA sense strand
ggaagaagaaagcagugaa

SEQ ID NO: 2331938 - RNA, 19 nt, Homo sapiens
  misc_RNA (1)...(19): siRNA sense strand
aagaggaagaugaagacaa

SEQ ID NO: 2331939 - RNA, 19 nt, Homo sapiens
  misc_RNA (1)...(19): siRNA sense strand
aagaaaggacauuaaggaa

SEQ ID NO: 2331940 - RNA, 19 nt, Homo sapiens
  misc_RNA (1)...(19): siRNA sense strand
gaaagagaagagauagaau

SEQ ID NO: 2331941 - RNA, 19 nt, Homo sapiens
  misc_RNA (1)...(19): siRNA sense strand
acaaagacucagaugaaga

SEQ ID NO: 2331942 - RNA, 19 nt, Homo sapiens
  misc_RNA (1)...(19): siRNA sense strand
uagcaagaaaggacauuaa

SEQ ID NO: 2331943 - RNA, 19 nt, Homo sapiens
  misc_RNA (1)...(19): siRNA sense strand
ugaaaaggcuggugaaagu

SEQ ID NO: 2331944 - RNA, 19 nt, Homo sapiens
  misc_RNA (1)...(19): siRNA sense strand
caguagugaugaugaagau

SEQ ID NO: 2331945 - RNA, 19 nt, Homo sapiens
  misc_RNA (1)...(19): siRNA sense strand
ugaacaguacagagagaau

SEQ ID NO: 2331946 - RNA, 19 nt, Homo sapiens
  misc_RNA (1)...(19): siRNA sense strand
guacaagaugaccaaguaa

SEQ ID NO: 2331947 - RNA, 19 nt, Homo sapiens
  misc_RNA (1)...(19): siRNA sense strand
acagaagaugcuuuagaaa

SEQ ID NO: 2331948 - RNA, 19 nt, Homo sapiens
  misc_RNA (1)...(19): siRNA sense strand
gaaaagaaguugaaacgga

SEQ ID NO: 2331949 - RNA, 19 nt, Homo sapiens
  misc_RNA (1)...(19): siRNA sense strand
aaugaugaagagaaggaaa

SEQ ID NO: 2331950 - RNA, 19 nt, Homo sapiens
  misc_RNA (1)...(19): siRNA sense strand
acggaaaauacuaggacaa

SEQ ID NO: 2331951 - RNA, 19 nt, Homo sapiens
  misc_RNA (1)...(19): siRNA sense strand
gugagagggaaucggcaaa

SEQ ID NO: 2331952 - RNA, 19 nt, Homo sapiens
  misc_RNA (1)...(19): siRNA sense strand
gagagagagcagagagaag

SEQ ID NO: 2331953 - RNA, 19 nt, Homo sapiens
  misc_RNA (1)...(19): siRNA sense strand
ccauagacaggaggagaaa

SEQ ID NO: 2331954 - RNA, 19 nt, Homo sapiens
  misc_RNA (1)...(19): siRNA sense strand
auuaacaaauccagagcau

SEQ ID NO: 2331955 - RNA, 19 nt, Homo sapiens
  misc_RNA (1)...(19): siRNA sense strand
cagugaagaggaagaugaa

SEQ ID NO: 2331956 - RNA, 19 nt, Homo sapiens
  misc_RNA (1)...(19): siRNA sense strand
ccgucucaaugaugaauua

SEQ ID NO: 2331957 - RNA, 19 nt, Homo sapiens
  misc_RNA (1)...(19): siRNA sense strand
aggaagaugaggaagacau

SEQ ID NO: 2331958 - RNA, 19 nt, Homo sapiens
  misc_RNA (1)...(19): siRNA sense strand
aggagaggcagaagucaaa

SEQ ID NO: 2331959 - RNA, 19 nt, Homo sapiens
  misc_RNA (1)...(19): siRNA sense strand
ugauaagcuagaugaagaa

SEQ ID NO: 2331960 - RNA, 19 nt, Homo sapiens
  misc_RNA (1)...(19): siRNA sense strand
auggaauggaaaugacaaa

SEQ ID NO: 2331961 - RNA, 19 nt, Homo sapiens
  misc_RNA (1)...(19): siRNA sense strand
gggaagaaacugaaagcaa

SEQ ID NO: 2331962 - RNA, 19 nt, Homo sapiens
  misc_RNA (1)...(19): siRNA sense strand
cagcaaacagugaaggaaa

SEQ ID NO: 2331963 - RNA, 19 nt, Homo sapiens
  misc_RNA (1)...(19): siRNA sense strand
agaugaagaggaagagaaa

SEQ ID NO: 2331964 - RNA, 19 nt, Homo sapiens
  misc_RNA (1)...(19): siRNA sense strand
aagugaaagagaagagaua

SEQ ID NO: 2331965 - RNA, 19 nt, Homo sapiens
  misc_RNA (1)...(19): siRNA sense strand
gagaggaagaugaggaaga

SEQ ID NO: 2331966 - RNA, 19 nt, Homo sapiens
  misc_RNA (1)...(19): siRNA sense strand
gugaaagagaagagauaga

SEQ ID NO: 2331967 - RNA, 19 nt, Homo sapiens
  misc_RNA (1)...(19): siRNA sense strand
cagugaaagugaaagagaa

SEQ ID NO: 2331968 - RNA, 19 nt, Homo sapiens
  misc_RNA (1)...(19): siRNA sense strand
gugaagaggaagaugaaga

SEQ ID NO: 2331969 - RNA, 19 nt, Homo sapiens
  misc_RNA (1)...(19): siRNA sense strand
aagaagacgaacagaggaa

SEQ ID NO: 2331970 - RNA, 19 nt, Homo sapiens
  misc_RNA (1)...(19): siRNA sense strand
agagaaaacagaagacaaa

SEQ ID NO: 2331971 - RNA, 19 nt, Homo sapiens
  misc_RNA (1)...(19): siRNA sense strand
gaggagaggcagaagucaa

SEQ ID NO: 2331972 - RNA, 19 nt, Homo sapiens
  misc_RNA (1)...(19): siRNA sense strand
acaacugacuagugaaaga

SEQ ID NO: 2331973 - RNA, 19 nt, Homo sapiens
  misc_RNA (1)...(19): siRNA sense strand
uuuaagaguuggagcuauu

SEQ ID NO: 2331974 - RNA, 19 nt, Homo sapiens
  misc_RNA (1)...(19): siRNA sense strand
acucagaugaagaggaaga

SEQ ID NO: 2331975 - RNA, 19 nt, Homo sapiens
  misc_RNA (1)...(19): siRNA sense strand
gaccaaugugugaaagaaa

SEQ ID NO: 2331976 - RNA, 19 nt, Homo sapiens
  misc_RNA (1)...(19): siRNA sense strand
ugauaguauugcugaagaa

SEQ ID NO: 2331977 - RNA, 19 nt, Homo sapiens
  misc_RNA (1)...(19): siRNA sense strand
augauaagcuagaugaaga

SEQ ID NO: 2331978 - RNA, 19 nt, Homo sapiens
  misc_RNA (1)...(19): siRNA sense strand
cagaugaagaggaagagaa

SEQ ID NO: 2331979 - RNA, 19 nt, Homo sapiens
  misc_RNA (1)...(19): siRNA sense strand
caaagguggaccaaagaaa

SEQ ID NO: 2331980 - RNA, 19 nt, Homo sapiens
  misc_RNA (1)...(19): siRNA sense strand
gagagagagagcagagaga

SEQ ID NO: 2331981 - RNA, 19 nt, Homo sapiens
  misc_RNA (1)...(19): siRNA sense strand
agagugaaccugaggaaaa

SEQ ID NO: 2331982 - RNA, 19 nt, Homo sapiens
  misc_RNA (1)...(19): siRNA sense strand
gaagaaacugaaagcaaau

SEQ ID NO: 2331983 - RNA, 19 nt, Homo sapiens
  misc_RNA (1)...(19): siRNA sense strand
cauuaaggaaguagacauu

SEQ ID NO: 2331984 - RNA, 19 nt, Homo sapiens
  misc_RNA (1)...(19): siRNA sense strand
uagaagaaucaauggaaga

SEQ ID NO: 2331985 - RNA, 19 nt, Homo sapiens
  misc_RNA (1)...(19): siRNA sense strand
cugaaaggagagagacauu

SEQ ID NO: 2331986 - RNA, 19 nt, Homo sapiens
  misc_RNA (1)...(19): siRNA sense strand
gggugaaggcugacaggau

SEQ ID NO: 2331987 - RNA, 19 nt, Homo sapiens
  misc_RNA (1)...(19): siRNA sense strand
guauuggaucugagggaau

SEQ ID NO: 2331988 - RNA, 19 nt, Homo sapiens
  misc_RNA (1)...(19): siRNA sense strand
cagaagaagaggugccuga

SEQ ID NO: 2331989 - RNA, 19 nt, Homo sapiens
  misc_RNA (1)...(19): siRNA sense strand
ucaaacagugaaagugaaa

SEQ ID NO: 2331990 - RNA, 19 nt, Homo sapiens
  misc_RNA (1)...(19): siRNA sense strand
aaacagugaaagugaaaga

SEQ ID NO: 2331991 - RNA, 19 nt, Homo sapiens
  misc_RNA (1)...(19): siRNA sense strand
gggaagacgaagcaagaca

SEQ ID NO: 2331992 - RNA, 19 nt, Homo sapiens
  misc_RNA (1)...(19): siRNA sense strand
gaagagugaaccugaggaa

SEQ ID NO: 2331993 - RNA, 19 nt, Homo sapiens
  misc_RNA (1)...(19): siRNA sense strand
aggaaauugaagaagagaa

SEQ ID NO: 2331994 - RNA, 19 nt, Homo sapiens
  misc_RNA (1)...(19): siRNA sense strand
gugaaggcugacaggauaa

SEQ ID NO: 2331995 - RNA, 19 nt, Homo sapiens
  misc_RNA (1)...(19): siRNA sense strand
cagaagaugcuuuagaaaa

SEQ ID NO: 2331996 - RNA, 19 nt, Homo sapiens
  misc_RNA (1)...(19): siRNA sense strand
ggaagaagaaagcagugaa

SEQ ID NO: 2331997 - RNA, 19 nt, Homo sapiens
  misc_RNA (1)...(19): siRNA sense strand
aagaggaagaugaagacaa

SEQ ID NO: 2331998 - RNA, 19 nt, Homo sapiens
  misc_RNA (1)...(19): siRNA sense strand
aagaaaggacauuaaggaa

SEQ ID NO: 2331999 - RNA, 19 nt, Homo sapiens
  misc_RNA (1)...(19): siRNA sense strand
gaaagagaagagauagaau

SEQ ID NO: 2332000 - RNA, 19 nt, Homo sapiens
  misc_RNA (1)...(19): siRNA sense strand
acaaagacucagaugaaga

SEQ ID NO: 2332001 - RNA, 19 nt, Homo sapiens
  misc_RNA (1)...(19): siRNA sense strand
uagcaagaaaggacauuaa

SEQ ID NO: 2332002 - RNA, 19 nt, Homo sapiens
  misc_RNA (1)...(19): siRNA sense strand
ugaaaaggcuggugaaagu

SEQ ID NO: 2332003 - RNA, 19 nt, Homo sapiens
  misc_RNA (1)...(19): siRNA sense strand
caguagugaugaugaagau

SEQ ID NO: 2332004 - RNA, 19 nt, Homo sapiens
  misc_RNA (1)...(19): siRNA sense strand
ugaacaguacagagagaau

SEQ ID NO: 2332005 - RNA, 19 nt, Homo sapiens
  misc_RNA (1)...(19): siRNA sense strand
guacaagaugaccaaguaa

SEQ ID NO: 2332006 - RNA, 19 nt, Homo sapiens
  misc_RNA (1)...(19): siRNA sense strand
acagaagaugcuuuagaaa

SEQ ID NO: 2332007 - RNA, 19 nt, Homo sapiens
  misc_RNA (1)...(19): siRNA sense strand
gaaaagaaguugaaacgga

SEQ ID NO: 2332008 - RNA, 19 nt, Homo sapiens
  misc_RNA (1)...(19): siRNA sense strand
aaugaugaagagaaggaaa

SEQ ID NO: 2332009 - RNA, 19 nt, Homo sapiens
  misc_RNA (1)...(19): siRNA sense strand
acggaaaauacuaggacaa

SEQ ID NO: 2332010 - RNA, 19 nt, Homo sapiens
  misc_RNA (1)...(19): siRNA sense strand
gugagagggaaucggcaaa

SEQ ID NO: 2332011 - RNA, 19 nt, Homo sapiens
  misc_RNA (1)...(19): siRNA sense strand
gagagagagcagagagaag

SEQ ID NO: 2332012 - RNA, 19 nt, Homo sapiens
  misc_RNA (1)...(19): siRNA sense strand
ccauagacaggaggagaaa

SEQ ID NO: 2332013 - RNA, 19 nt, Homo sapiens
  misc_RNA (1)...(19): siRNA sense strand
auuaacaaauccagagcau

SEQ ID NO: 2332014 - RNA, 19 nt, Homo sapiens
  misc_RNA (1)...(19): siRNA sense strand
cagugaagaggaagaugaa

SEQ ID NO: 2332015 - RNA, 19 nt, Homo sapiens
  misc_RNA (1)...(19): siRNA sense strand
ccgucucaaugaugaauua

SEQ ID NO: 2332016 - RNA, 19 nt, Homo sapiens
  misc_RNA (1)...(19): siRNA sense strand
aggaagaugaggaagacau

SEQ ID NO: 2332017 - RNA, 19 nt, Homo sapiens
  misc_RNA (1)...(19): siRNA sense strand
aggagaggcagaagucaaa

SEQ ID NO: 2332018 - RNA, 19 nt, Homo sapiens
  misc_RNA (1)...(19): siRNA sense strand
ugauaagcuagaugaagaa

SEQ ID NO: 2332019 - RNA, 19 nt, Homo sapiens
  misc_RNA (1)...(19): siRNA sense strand
auggaauggaaaugacaaa

SEQ ID NO: 2332020 - RNA, 19 nt, Homo sapiens
  misc_RNA (1)...(19): siRNA sense strand
ggacaaagacggugagcug

SEQ ID NO: 2332021 - RNA, 19 nt, Homo sapiens
  misc_RNA (1)...(19): siRNA sense strand
guauaugccuggaacggua

SEQ ID NO: 2332022 - RNA, 19 nt, Homo sapiens
  misc_RNA (1)...(19): siRNA sense strand
ccguuuaagcugaaaguga

SEQ ID NO: 2332023 - RNA, 19 nt, Homo sapiens
  misc_RNA (1)...(19): siRNA sense strand
ggacauaaucauugccgau

SEQ ID NO: 2332024 - RNA, 19 nt, Homo sapiens
  misc_RNA (1)...(19): siRNA sense strand
uggaaaacgaaaagagaau

SEQ ID NO: 2332025 - RNA, 19 nt, Homo sapiens
  misc_RNA (1)...(19): siRNA sense strand
uuauggaauuggaggucaa

SEQ ID NO: 2332026 - RNA, 19 nt, Homo sapiens
  misc_RNA (1)...(19): siRNA sense strand
guuugguagccgaggaaau

SEQ ID NO: 2332027 - RNA, 19 nt, Homo sapiens
  misc_RNA (1)...(19): siRNA sense strand
uggaauuggaggucaacua

SEQ ID NO: 2332028 - RNA, 19 nt, Homo sapiens
  misc_RNA (1)...(19): siRNA sense strand
cucaaauggagaaggaaau

SEQ ID NO: 2332029 - RNA, 19 nt, Homo sapiens
  misc_RNA (1)...(19): siRNA sense strand
ugaagaagcagaugagcga

SEQ ID NO: 2332030 - RNA, 19 nt, Homo sapiens
  misc_RNA (1)...(19): siRNA sense strand
ucacaaaccugauggacgu

SEQ ID NO: 2332031 - RNA, 19 nt, Homo sapiens
  misc_RNA (1)...(19): siRNA sense strand
agacuuuaaaugugcgcaa

SEQ ID NO: 2332032 - RNA, 19 nt, Homo sapiens
  misc_RNA (1)...(19): siRNA sense strand
guuuaaucaggaaggagaa

SEQ ID NO: 2332033 - RNA, 19 nt, Homo sapiens
  misc_RNA (1)...(19): siRNA sense strand
cugaagaaguccauccaca

SEQ ID NO: 2332034 - RNA, 19 nt, Homo sapiens
  misc_RNA (1)...(19): siRNA sense strand
caguggauucaaauggaaa

SEQ ID NO: 2332035 - RNA, 19 nt, Homo sapiens
  misc_RNA (1)...(19): siRNA sense strand
aggaagaaauaaaggagag

SEQ ID NO: 2332036 - RNA, 19 nt, Homo sapiens
  misc_RNA (1)...(19): siRNA sense strand
augggaaugugauggaauu

SEQ ID NO: 2332037 - RNA, 19 nt, Homo sapiens
  misc_RNA (1)...(19): siRNA sense strand
caagcagaaagcugugaaa

SEQ ID NO: 2332038 - RNA, 19 nt, Homo sapiens
  misc_RNA (1)...(19): siRNA sense strand
aagaagcagaugagcgaga

SEQ ID NO: 2332039 - RNA, 19 nt, Homo sapiens
  misc_RNA (1)...(19): siRNA sense strand
ccaaggacaaagacgguga

SEQ ID NO: 2332040 - RNA, 19 nt, Homo sapiens
  misc_RNA (1)...(19): siRNA sense strand
caggaaagcugaugggacc

SEQ ID NO: 2332041 - RNA, 19 nt, Homo sapiens
  misc_RNA (1)...(19): siRNA sense strand
uguuuaaucaggaaggaga

SEQ ID NO: 2332042 - RNA, 19 nt, Homo sapiens
  misc_RNA (1)...(19): siRNA sense strand
gaaacaucauuguggccga

SEQ ID NO: 2332043 - RNA, 19 nt, Homo sapiens
  misc_RNA (1)...(19): siRNA sense strand
ccgagguccuacuggugaa

SEQ ID NO: 2332044 - RNA, 19 nt, Homo sapiens
  misc_RNA (1)...(19): siRNA sense strand
uguuuaucuuccagccaaa

SEQ ID NO: 2332045 - RNA, 19 nt, Homo sapiens
  misc_RNA (1)...(19): siRNA sense strand
cugcacacuuucugcgaga

SEQ ID NO: 2332046 - RNA, 19 nt, Homo sapiens
  misc_RNA (1)...(19): siRNA sense strand
agguccuacuggugaagaa

SEQ ID NO: 2332047 - RNA, 19 nt, Homo sapiens
  misc_RNA (1)...(19): siRNA sense strand
gaugggaaugugauggaau

SEQ ID NO: 2332048 - RNA, 19 nt, Homo sapiens
  misc_RNA (1)...(19): siRNA sense strand
ggcgugaagaggcgcguua

SEQ ID NO: 2332049 - RNA, 19 nt, Homo sapiens
  misc_RNA (1)...(19): siRNA sense strand
guuucugauuugcaguaua

SEQ ID NO: 2332050 - RNA, 19 nt, Homo sapiens
  misc_RNA (1)...(19): siRNA sense strand
ggaagaaauaaaggagagu

SEQ ID NO: 2332051 - RNA, 19 nt, Homo sapiens
  misc_RNA (1)...(19): siRNA sense strand
cagaugagcgagaagcuga

SEQ ID NO: 2332052 - RNA, 19 nt, Homo sapiens
  misc_RNA (1)...(19): siRNA sense strand
cugcaucuacaaauggaaa

SEQ ID NO: 2332053 - RNA, 19 nt, Homo sapiens
  misc_RNA (1)...(19): siRNA sense strand
aaggaagaaauaaaggaga

SEQ ID NO: 2332054 - RNA, 19 nt, Homo sapiens
  misc_RNA (1)...(19): siRNA sense strand
ggguaccaaaggaagaaau

SEQ ID NO: 2332055 - RNA, 19 nt, Homo sapiens
  misc_RNA (1)...(19): siRNA sense strand
gggagaacgaccagcugga

SEQ ID NO: 2332056 - RNA, 19 nt, Homo sapiens
  misc_RNA (1)...(19): siRNA sense strand
ccaucaccaccaaggacaa

SEQ ID NO: 2332057 - RNA, 19 nt, Homo sapiens
  misc_RNA (1)...(19): siRNA sense strand
caaagaacgaagagagaaa

SEQ ID NO: 2332058 - RNA, 19 nt, Homo sapiens
  misc_RNA (1)...(19): siRNA sense strand
ggaaagaaauggaagccaa

SEQ ID NO: 2332059 - RNA, 19 nt, Homo sapiens
  misc_RNA (1)...(19): siRNA sense strand
ccaaauaugcugugggaga

SEQ ID NO: 2332060 - RNA, 19 nt, Homo sapiens
  misc_RNA (1)...(19): siRNA sense strand
gcuaagaaggaacgggaaa

SEQ ID NO: 2332061 - RNA, 19 nt, Homo sapiens
  misc_RNA (1)...(19): siRNA sense strand
ccucagggaauaagagaaa

SEQ ID NO: 2332062 - RNA, 19 nt, Homo sapiens
  misc_RNA (1)...(19): siRNA sense strand
gagaaauggaagacagcaa

SEQ ID NO: 2332063 - RNA, 19 nt, Homo sapiens
  misc_RNA (1)...(19): siRNA sense strand
aggcaaaacugauaggaaa

SEQ ID NO: 2332064 - RNA, 19 nt, Homo sapiens
  misc_RNA (1)...(19): siRNA sense strand
gggaauaagagaaagucaa

SEQ ID NO: 2332065 - RNA, 19 nt, Homo sapiens
  misc_RNA (1)...(19): siRNA sense strand
uaagaagagagcagagaaa

SEQ ID NO: 2332066 - RNA, 19 nt, Homo sapiens
  misc_RNA (1)...(19): siRNA sense strand
gugaagaugaugagaguga

SEQ ID NO: 2332067 - RNA, 19 nt, Homo sapiens
  misc_RNA (1)...(19): siRNA sense strand
aagaugaauuggugaagaa

SEQ ID NO: 2332068 - RNA, 19 nt, Homo sapiens
  misc_RNA (1)...(19): siRNA sense strand
acaaagacagggaggacaa

SEQ ID NO: 2332069 - RNA, 19 nt, Homo sapiens
  misc_RNA (1)...(19): siRNA sense strand
gggaaauccaggaaagaga

SEQ ID NO: 2332070 - RNA, 19 nt, Homo sapiens
  misc_RNA (1)...(19): siRNA sense strand
agaaguugcuguagagaca

SEQ ID NO: 2332071 - RNA, 19 nt, Homo sapiens
  misc_RNA (1)...(19): siRNA sense strand
gaugaaggaaggagagaga

SEQ ID NO: 2332072 - RNA, 19 nt, Homo sapiens
  misc_RNA (1)...(19): siRNA sense strand
ggcaaagggcagaagcaaa

SEQ ID NO: 2332073 - RNA, 19 nt, Homo sapiens
  misc_RNA (1)...(19): siRNA sense strand
uggagaaaguggaugaaga

SEQ ID NO: 2332074 - RNA, 19 nt, Homo sapiens
  misc_RNA (1)...(19): siRNA sense strand
ggacagaaauccacaggga

SEQ ID NO: 2332075 - RNA, 19 nt, Homo sapiens
  misc_RNA (1)...(19): siRNA sense strand
acagaaauccacagggaau

SEQ ID NO: 2332076 - RNA, 19 nt, Homo sapiens
  misc_RNA (1)...(19): siRNA sense strand
aggaggaggaagaagauua

SEQ ID NO: 2332077 - RNA, 19 nt, Homo sapiens
  misc_RNA (1)...(19): siRNA sense strand
cauccugaauggacagaaa

SEQ ID NO: 2332078 - RNA, 19 nt, Homo sapiens
  misc_RNA (1)...(19): siRNA sense strand
agaagagagcagagaaaca

SEQ ID NO: 2332079 - RNA, 19 nt, Homo sapiens
  misc_RNA (1)...(19): siRNA sense strand
gagaagagguaccaggaca

SEQ ID NO: 2332080 - RNA, 19 nt, Homo sapiens
  misc_RNA (1)...(19): siRNA sense strand
aggaagaagaggaggagga

SEQ ID NO: 2332081 - RNA, 19 nt, Homo sapiens
  misc_RNA (1)...(19): siRNA sense strand
gcucagacacagaugacaa

SEQ ID NO: 2332082 - RNA, 19 nt, Homo sapiens
  misc_RNA (1)...(19): siRNA sense strand
ugagaauggguuaggcaaa

SEQ ID NO: 2332083 - RNA, 19 nt, Homo sapiens
  misc_RNA (1)...(19): siRNA sense strand
agaaaaugcucaaggugaa

SEQ ID NO: 2332084 - RNA, 19 nt, Homo sapiens
  misc_RNA (1)...(19): siRNA sense strand
aggugaagauugugaagau

SEQ ID NO: 2332085 - RNA, 19 nt, Homo sapiens
  misc_RNA (1)...(19): siRNA sense strand
ucuacuaagaggaagaaua

SEQ ID NO: 2332086 - RNA, 19 nt, Homo sapiens
  misc_RNA (1)...(19): siRNA sense strand
uggccauggugguggaauu

SEQ ID NO: 2332087 - RNA, 19 nt, Homo sapiens
  misc_RNA (1)...(19): siRNA sense strand
gaagaaaaugguagaggaa

SEQ ID NO: 2332088 - RNA, 19 nt, Homo sapiens
  misc_RNA (1)...(19): siRNA sense strand
aggagaagcuacagaucuu

SEQ ID NO: 2332089 - RNA, 19 nt, Homo sapiens
  misc_RNA (1)...(19): siRNA sense strand
ccaggaaagagaaaugaaa

SEQ ID NO: 2332090 - RNA, 19 nt, Homo sapiens
  misc_RNA (1)...(19): siRNA sense strand
gagaaaugaaagugaaacu

SEQ ID NO: 2332091 - RNA, 19 nt, Homo sapiens
  misc_RNA (1)...(19): siRNA sense strand
ggccagugucauaaagaaa

SEQ ID NO: 2332092 - RNA, 19 nt, Homo sapiens
  misc_RNA (1)...(19): siRNA sense strand
aagaagaggaggaggagga

SEQ ID NO: 2332093 - RNA, 19 nt, Homo sapiens
  misc_RNA (1)...(19): siRNA sense strand
caggaagcccucaaagaaa

SEQ ID NO: 2332094 - RNA, 19 nt, Homo sapiens
  misc_RNA (1)...(19): siRNA sense strand
ccuccuacaagaugagaua

SEQ ID NO: 2332095 - RNA, 19 nt, Homo sapiens
  misc_RNA (1)...(19): siRNA sense strand
gccaaagaacgaagagaga

SEQ ID NO: 2332096 - RNA, 19 nt, Homo sapiens
  misc_RNA (1)...(19): siRNA sense strand
agagaaacagaaacggaaa

SEQ ID NO: 2332097 - RNA, 19 nt, Homo sapiens
  misc_RNA (1)...(19): siRNA sense strand
cugaggaaguggaugaaga

SEQ ID NO: 2332098 - RNA, 19 nt, Homo sapiens
  misc_RNA (1)...(19): siRNA sense strand
gugcuaagcugcaugguga

SEQ ID NO: 2332099 - RNA, 19 nt, Homo sapiens
  misc_RNA (1)...(19): siRNA sense strand
ggacgaagacagaagaagu

SEQ ID NO: 2332100 - RNA, 19 nt, Homo sapiens
  misc_RNA (1)...(19): siRNA sense strand
caauaaagauucagcugca

SEQ ID NO: 2332101 - RNA, 19 nt, Homo sapiens
  misc_RNA (1)...(19): siRNA sense strand
ggcaaaacugauaggaaaa

SEQ ID NO: 2332102 - RNA, 19 nt, Homo sapiens
  misc_RNA (1)...(19): siRNA sense strand
aggaaguggaugaagagaa

SEQ ID NO: 2332103 - RNA, 19 nt, Homo sapiens
  misc_RNA (1)...(19): siRNA sense strand
cgucagaggagaagcuaca

SEQ ID NO: 2332104 - RNA, 19 nt, Homo sapiens
  misc_RNA (1)...(19): siRNA sense strand
ugacauacucagugcaaga

SEQ ID NO: 2332105 - RNA, 19 nt, Homo sapiens
  misc_RNA (1)...(19): siRNA sense strand
aggagacaguugugaaaga

SEQ ID NO: 2332106 - RNA, 19 nt, Homo sapiens
  misc_RNA (1)...(19): siRNA sense strand
ccacuaaauccuaaguuau

SEQ ID NO: 2332107 - RNA, 19 nt, Homo sapiens
  misc_RNA (1)...(19): siRNA sense strand
cagugaagaugaugagagu

SEQ ID NO: 2332108 - RNA, 19 nt, Homo sapiens
  misc_RNA (1)...(19): siRNA sense strand
uuaccaaugcugagguuua

SEQ ID NO: 2332109 - RNA, 19 nt, Homo sapiens
  misc_RNA (1)...(19): siRNA sense strand
agaacaacggaaagaauau

SEQ ID NO: 2332110 - RNA, 19 nt, Homo sapiens
  misc_RNA (1)...(19): siRNA sense strand
auacagaagcugaagacau

SEQ ID NO: 2332111 - RNA, 19 nt, Homo sapiens
  misc_RNA (1)...(19): siRNA sense strand
aaacugaggaaguggauga

SEQ ID NO: 2332112 - RNA, 19 nt, Homo sapiens
  misc_RNA (1)...(19): siRNA sense strand
aagaacaacggaaagaaua

SEQ ID NO: 2332113 - RNA, 19 nt, Homo sapiens
  misc_RNA (1)...(19): siRNA sense strand
augaagaggaggaggagga

SEQ ID NO: 2332114 - RNA, 19 nt, Homo sapiens
  misc_RNA (1)...(19): siRNA sense strand
gggcagaagcaaaggcauc

SEQ ID NO: 2332115 - RNA, 19 nt, Homo sapiens
  misc_RNA (1)...(19): siRNA sense strand
gggaggaagaacaggaagu

SEQ ID NO: 2332116 - RNA, 19 nt, Homo sapiens
  misc_RNA (1)...(19): siRNA sense strand
cugaagaacaucuagaaga

SEQ ID NO: 2332117 - RNA, 19 nt, Homo sapiens
  misc_RNA (1)...(19): siRNA sense strand
cagagaaacagaaacggaa

SEQ ID NO: 2332118 - RNA, 19 nt, Homo sapiens
  misc_RNA (1)...(19): siRNA sense strand
cgauugagaccucgaaaga

SEQ ID NO: 2332119 - RNA, 19 nt, Homo sapiens
  misc_RNA (1)...(19): siRNA sense strand
caaagaacgaagagagaaa

SEQ ID NO: 2332120 - RNA, 19 nt, Homo sapiens
  misc_RNA (1)...(19): siRNA sense strand
ggaaagaaauggaagccaa

SEQ ID NO: 2332121 - RNA, 19 nt, Homo sapiens
  misc_RNA (1)...(19): siRNA sense strand
ccaaauaugcugugggaga

SEQ ID NO: 2332122 - RNA, 19 nt, Homo sapiens
  misc_RNA (1)...(19): siRNA sense strand
gcuaagaaggaacgggaaa

SEQ ID NO: 2332123 - RNA, 19 nt, Homo sapiens
  misc_RNA (1)...(19): siRNA sense strand
ccucagggaauaagagaaa

SEQ ID NO: 2332124 - RNA, 19 nt, Homo sapiens
  misc_RNA (1)...(19): siRNA sense strand
gagaaauggaagacagcaa

SEQ ID NO: 2332125 - RNA, 19 nt, Homo sapiens
  misc_RNA (1)...(19): siRNA sense strand
aggcaaaacugauaggaaa

SEQ ID NO: 2332126 - RNA, 19 nt, Homo sapiens
  misc_RNA (1)...(19): siRNA sense strand
gggaauaagagaaagucaa

SEQ ID NO: 2332127 - RNA, 19 nt, Homo sapiens
  misc_RNA (1)...(19): siRNA sense strand
uaagaagagagcagagaaa

SEQ ID NO: 2332128 - RNA, 19 nt, Homo sapiens
  misc_RNA (1)...(19): siRNA sense strand
gugaagaugaugagaguga

SEQ ID NO: 2332129 - RNA, 19 nt, Homo sapiens
  misc_RNA (1)...(19): siRNA sense strand
aagaugaauuggugaagaa

SEQ ID NO: 2332130 - RNA, 19 nt, Homo sapiens
  misc_RNA (1)...(19): siRNA sense strand
acaaagacagggaggacaa

SEQ ID NO: 2332131 - RNA, 19 nt, Homo sapiens
  misc_RNA (1)...(19): siRNA sense strand
gggaaauccaggaaagaga

SEQ ID NO: 2332132 - RNA, 19 nt, Homo sapiens
  misc_RNA (1)...(19): siRNA sense strand
agaaguugcuguagagaca

SEQ ID NO: 2332133 - RNA, 19 nt, Homo sapiens
  misc_RNA (1)...(19): siRNA sense strand
gaugaaggaaggagagaga

SEQ ID NO: 2332134 - RNA, 19 nt, Homo sapiens
  misc_RNA (1)...(19): siRNA sense strand
ggcaaagggcagaagcaaa

SEQ ID NO: 2332135 - RNA, 19 nt, Homo sapiens
  misc_RNA (1)...(19): siRNA sense strand
uggagaaaguggaugaaga

SEQ ID NO: 2332136 - RNA, 19 nt, Homo sapiens
  misc_RNA (1)...(19): siRNA sense strand
ggacagaaauccacaggga

SEQ ID NO: 2332137 - RNA, 19 nt, Homo sapiens
  misc_RNA (1)...(19): siRNA sense strand
acagaaauccacagggaau

SEQ ID NO: 2332138 - RNA, 19 nt, Homo sapiens
  misc_RNA (1)...(19): siRNA sense strand
aggaggaggaagaagauua

SEQ ID NO: 2332139 - RNA, 19 nt, Homo sapiens
  misc_RNA (1)...(19): siRNA sense strand
cauccugaauggacagaaa

SEQ ID NO: 2332140 - RNA, 19 nt, Homo sapiens
  misc_RNA (1)...(19): siRNA sense strand
agaagagagcagagaaaca

SEQ ID NO: 2332141 - RNA, 19 nt, Homo sapiens
  misc_RNA (1)...(19): siRNA sense strand
gagaagagguaccaggaca

SEQ ID NO: 2332142 - RNA, 19 nt, Homo sapiens
  misc_RNA (1)...(19): siRNA sense strand
aggaagaagaggaggagga

SEQ ID NO: 2332143 - RNA, 19 nt, Homo sapiens
  misc_RNA (1)...(19): siRNA sense strand
gcucagacacagaugacaa

SEQ ID NO: 2332144 - RNA, 19 nt, Homo sapiens
  misc_RNA (1)...(19): siRNA sense strand
ugagaauggguuaggcaaa

SEQ ID NO: 2332145 - RNA, 19 nt, Homo sapiens
  misc_RNA (1)...(19): siRNA sense strand
agaaaaugcucaaggugaa

SEQ ID NO: 2332146 - RNA, 19 nt, Homo sapiens
  misc_RNA (1)...(19): siRNA sense strand
aggugaagauugugaagau

SEQ ID NO: 2332147 - RNA, 19 nt, Homo sapiens
  misc_RNA (1)...(19): siRNA sense strand
ucuacuaagaggaagaaua

SEQ ID NO: 2332148 - RNA, 19 nt, Homo sapiens
  misc_RNA (1)...(19): siRNA sense strand
uggccauggugguggaauu

SEQ ID NO: 2332149 - RNA, 19 nt, Homo sapiens
  misc_RNA (1)...(19): siRNA sense strand
gaagaaaaugguagaggaa

SEQ ID NO: 2332150 - RNA, 19 nt, Homo sapiens
  misc_RNA (1)...(19): siRNA sense strand
aggagaagcuacagaucuu

SEQ ID NO: 2332151 - RNA, 19 nt, Homo sapiens
  misc_RNA (1)...(19): siRNA sense strand
ccaggaaagagaaaugaaa

SEQ ID NO: 2332152 - RNA, 19 nt, Homo sapiens
  misc_RNA (1)...(19): siRNA sense strand
gagaaaugaaagugaaacu

SEQ ID NO: 2332153 - RNA, 19 nt, Homo sapiens
  misc_RNA (1)...(19): siRNA sense strand
ggccagugucauaaagaaa

SEQ ID NO: 2332154 - RNA, 19 nt, Homo sapiens
  misc_RNA (1)...(19): siRNA sense strand
aagaagaggaggaggagga

SEQ ID NO: 2332155 - RNA, 19 nt, Homo sapiens
  misc_RNA (1)...(19): siRNA sense strand
caggaagcccucaaagaaa

SEQ ID NO: 2332156 - RNA, 19 nt, Homo sapiens
  misc_RNA (1)...(19): siRNA sense strand
ccuccuacaagaugagaua

SEQ ID NO: 2332157 - RNA, 19 nt, Homo sapiens
  misc_RNA (1)...(19): siRNA sense strand
gccaaagaacgaagagaga

SEQ ID NO: 2332158 - RNA, 19 nt, Homo sapiens
  misc_RNA (1)...(19): siRNA sense strand
agagaaacagaaacggaaa

SEQ ID NO: 2332159 - RNA, 19 nt, Homo sapiens
  misc_RNA (1)...(19): siRNA sense strand
cugaggaaguggaugaaga

SEQ ID NO: 2332160 - RNA, 19 nt, Homo sapiens
  misc_RNA (1)...(19): siRNA sense strand
gugcuaagcugcaugguga

SEQ ID NO: 2332161 - RNA, 19 nt, Homo sapiens
  misc_RNA (1)...(19): siRNA sense strand
ggacgaagacagaagaagu

SEQ ID NO: 2332162 - RNA, 19 nt, Homo sapiens
  misc_RNA (1)...(19): siRNA sense strand
caauaaagauucagcugca

SEQ ID NO: 2332163 - RNA, 19 nt, Homo sapiens
  misc_RNA (1)...(19): siRNA sense strand
ggcaaaacugauaggaaaa

SEQ ID NO: 2332164 - RNA, 19 nt, Homo sapiens
  misc_RNA (1)...(19): siRNA sense strand
aggaaguggaugaagagaa

SEQ ID NO: 2332165 - RNA, 19 nt, Homo sapiens
  misc_RNA (1)...(19): siRNA sense strand
cgucagaggagaagcuaca

SEQ ID NO: 2332166 - RNA, 19 nt, Homo sapiens
  misc_RNA (1)...(19): siRNA sense strand
ugacauacucagugcaaga

SEQ ID NO: 2332167 - RNA, 19 nt, Homo sapiens
  misc_RNA (1)...(19): siRNA sense strand
aggagacaguugugaaaga

SEQ ID NO: 2332168 - RNA, 19 nt, Homo sapiens
  misc_RNA (1)...(19): siRNA sense strand
ccacuaaauccuaaguuau

SEQ ID NO: 2332169 - RNA, 19 nt, Homo sapiens
  misc_RNA (1)...(19): siRNA sense strand
cagugaagaugaugagagu

SEQ ID NO: 2332170 - RNA, 19 nt, Homo sapiens
  misc_RNA (1)...(19): siRNA sense strand
uuaccaaugcugagguuua

SEQ ID NO: 2332171 - RNA, 19 nt, Homo sapiens
  misc_RNA (1)...(19): siRNA sense strand
agaacaacggaaagaauau

SEQ ID NO: 2332172 - RNA, 19 nt, Homo sapiens
  misc_RNA (1)...(19): siRNA sense strand
auacagaagcugaagacau

SEQ ID NO: 2332173 - RNA, 19 nt, Homo sapiens
  misc_RNA (1)...(19): siRNA sense strand
aaacugaggaaguggauga

SEQ ID NO: 2332174 - RNA, 19 nt, Homo sapiens
  misc_RNA (1)...(19): siRNA sense strand
aagaacaacggaaagaaua

SEQ ID NO: 2332175 - RNA, 19 nt, Homo sapiens
  misc_RNA (1)...(19): siRNA sense strand
augaagaggaggaggagga

SEQ ID NO: 2332176 - RNA, 19 nt, Homo sapiens
  misc_RNA (1)...(19): siRNA sense strand
gggcagaagcaaaggcauc

SEQ ID NO: 2332177 - RNA, 19 nt, Homo sapiens
  misc_RNA (1)...(19): siRNA sense strand
gggaggaagaacaggaagu

SEQ ID NO: 2332178 - RNA, 19 nt, Homo sapiens
  misc_RNA (1)...(19): siRNA sense strand
cugaagaacaucuagaaga

SEQ ID NO: 2332179 - RNA, 19 nt, Homo sapiens
  misc_RNA (1)...(19): siRNA sense strand
cagagaaacagaaacggaa

SEQ ID NO: 2332180 - RNA, 19 nt, Homo sapiens
  misc_RNA (1)...(19): siRNA sense strand
cgauugagaccucgaaaga

SEQ ID NO: 2332181 - RNA, 19 nt, Homo sapiens
  misc_RNA (1)...(19): siRNA sense strand
acaaguugcuggaagguga

SEQ ID NO: 2332182 - RNA, 19 nt, Homo sapiens
  misc_RNA (1)...(19): siRNA sense strand
uuggaguggaucagggaaa

SEQ ID NO: 2332183 - RNA, 19 nt, Homo sapiens
  misc_RNA (1)...(19): siRNA sense strand
agggaaaccaugaagagga

SEQ ID NO: 2332184 - RNA, 19 nt, Homo sapiens
  misc_RNA (1)...(19): siRNA sense strand
ugagagugcgccugggaga

SEQ ID NO: 2332185 - RNA, 19 nt, Homo sapiens
  misc_RNA (1)...(19): siRNA sense strand
acaaguugcuggaagguga

SEQ ID NO: 2332186 - RNA, 19 nt, Homo sapiens
  misc_RNA (1)...(19): siRNA sense strand
ugagagugcgccugggaga

SEQ ID NO: 2332187 - RNA, 19 nt, Homo sapiens
  misc_RNA (1)...(19): siRNA sense strand
acaaguugcuggaagguga

SEQ ID NO: 2332188 - RNA, 19 nt, Homo sapiens
  misc_RNA (1)...(19): siRNA sense strand
ugagagugcgccugggaga

SEQ ID NO: 2332189 - RNA, 19 nt, Homo sapiens
  misc_RNA (1)...(19): siRNA sense strand
acaaguugcuggaagguga

SEQ ID NO: 2332190 - RNA, 19 nt, Homo sapiens
  misc_RNA (1)...(19): siRNA sense strand
uuggaguggaucagggaaa

SEQ ID NO: 2332191 - RNA, 19 nt, Homo sapiens
  misc_RNA (1)...(19): siRNA sense strand
agggaaaccaugaagagga

SEQ ID NO: 2332192 - RNA, 19 nt, Homo sapiens
  misc_RNA (1)...(19): siRNA sense strand
ugagagugcgccugggaga

SEQ ID NO: 2332193 - RNA, 19 nt, Homo sapiens
  misc_RNA (1)...(19): siRNA sense strand
gagcgaaagaagagggaga

SEQ ID NO: 2332194 - RNA, 19 nt, Homo sapiens
  misc_RNA (1)...(19): siRNA sense strand
aggaagaugaagaggaaau

SEQ ID NO: 2332195 - RNA, 19 nt, Homo sapiens
  misc_RNA (1)...(19): siRNA sense strand
ggaaggagauucuggccaa

SEQ ID NO: 2332196 - RNA, 19 nt, Homo sapiens
  misc_RNA (1)...(19): siRNA sense strand
gcaaauauguugaugagga

SEQ ID NO: 2332197 - RNA, 19 nt, Homo sapiens
  misc_RNA (1)...(19): siRNA sense strand
gcagaaaggagaagaggga

SEQ ID NO: 2332198 - RNA, 19 nt, Homo sapiens
  misc_RNA (1)...(19): siRNA sense strand
gcgaaagaagagggagaaa

SEQ ID NO: 2332199 - RNA, 19 nt, Homo sapiens
  misc_RNA (1)...(19): siRNA sense strand
aagaagagggagaaagcaa

SEQ ID NO: 2332200 - RNA, 19 nt, Homo sapiens
  misc_RNA (1)...(19): siRNA sense strand
gggagaaagcaaagaagca

SEQ ID NO: 2332201 - RNA, 19 nt, Homo sapiens
  misc_RNA (1)...(19): siRNA sense strand
ugaaggacuacgagaggaa

SEQ ID NO: 2332202 - RNA, 19 nt, Homo sapiens
  misc_RNA (1)...(19): siRNA sense strand
ccgagaagaggcagagaca

SEQ ID NO: 2332203 - RNA, 19 nt, Homo sapiens
  misc_RNA (1)...(19): siRNA sense strand
ggucagagcaggaggagcu

SEQ ID NO: 2332204 - RNA, 19 nt, Homo sapiens
  misc_RNA (1)...(19): siRNA sense strand
cugaagggacagaaagaga

SEQ ID NO: 2332205 - RNA, 19 nt, Homo sapiens
  misc_RNA (1)...(19): siRNA sense strand
ggagaagagggaagagacu

SEQ ID NO: 2332206 - RNA, 19 nt, Homo sapiens
  misc_RNA (1)...(19): siRNA sense strand
cugaagaaccugaagagga

SEQ ID NO: 2332207 - RNA, 19 nt, Homo sapiens
  misc_RNA (1)...(19): siRNA sense strand
agccacaauuugaggaaga

SEQ ID NO: 2332208 - RNA, 19 nt, Homo sapiens
  misc_RNA (1)...(19): siRNA sense strand
acccagaagccuuggagaa

SEQ ID NO: 2332209 - RNA, 19 nt, Homo sapiens
  misc_RNA (1)...(19): siRNA sense strand
ccuuggagaagcagaagaa

SEQ ID NO: 2332210 - RNA, 19 nt, Homo sapiens
  misc_RNA (1)...(19): siRNA sense strand
ucgaguggcugaagggaca

SEQ ID NO: 2332211 - RNA, 19 nt, Homo sapiens
  misc_RNA (1)...(19): siRNA sense strand
agaaaggagaagagggaag

SEQ ID NO: 2332212 - RNA, 19 nt, Homo sapiens
  misc_RNA (1)...(19): siRNA sense strand
aagaagggcuugaagacga

SEQ ID NO: 2332213 - RNA, 19 nt, Homo sapiens
  misc_RNA (1)...(19): siRNA sense strand
cgggcaagaagaagcgcaa

SEQ ID NO: 2332214 - RNA, 19 nt, Homo sapiens
  misc_RNA (1)...(19): siRNA sense strand
ggaagagacucgggagcga

SEQ ID NO: 2332215 - RNA, 19 nt, Homo sapiens
  misc_RNA (1)...(19): siRNA sense strand
aggagaaggcccaggagga

SEQ ID NO: 2332216 - RNA, 19 nt, Homo sapiens
  misc_RNA (1)...(19): siRNA sense strand
gggcauuuguggaggacag

SEQ ID NO: 2332217 - RNA, 19 nt, Homo sapiens
  misc_RNA (1)...(19): siRNA sense strand
aggaggaggaagaggagga

SEQ ID NO: 2332218 - RNA, 19 nt, Homo sapiens
  misc_RNA (1)...(19): siRNA sense strand
aggaggaagaggaggagga

SEQ ID NO: 2332219 - RNA, 19 nt, Homo sapiens
  misc_RNA (1)...(19): siRNA sense strand
aggaggaggaagaugaaga

SEQ ID NO: 2332220 - RNA, 19 nt, Homo sapiens
  misc_RNA (1)...(19): siRNA sense strand
ggcugaagggacagaaaga

SEQ ID NO: 2332221 - RNA, 19 nt, Homo sapiens
  misc_RNA (1)...(19): siRNA sense strand
caucagacagugaggagga

SEQ ID NO: 2332222 - RNA, 19 nt, Homo sapiens
  misc_RNA (1)...(19): siRNA sense strand
ucuccuuguugaagaagaa

SEQ ID NO: 2332223 - RNA, 19 nt, Homo sapiens
  misc_RNA (1)...(19): siRNA sense strand
aggaggagcugcgggacaa

SEQ ID NO: 2332224 - RNA, 19 nt, Homo sapiens
  misc_RNA (1)...(19): siRNA sense strand
aguauuaccggcuggacua

SEQ ID NO: 2332225 - RNA, 19 nt, Homo sapiens
  misc_RNA (1)...(19): siRNA sense strand
augaagaggaaauggagga

SEQ ID NO: 2332226 - RNA, 19 nt, Homo sapiens
  misc_RNA (1)...(19): siRNA sense strand
gcaacgagaugcugggccu

SEQ ID NO: 2332227 - RNA, 19 nt, Homo sapiens
  misc_RNA (1)...(19): siRNA sense strand
aggaacagaaacagcucaa

SEQ ID NO: 2332228 - RNA, 19 nt, Homo sapiens
  misc_RNA (1)...(19): siRNA sense strand
gcugcagaaacgugccaaa

SEQ ID NO: 2332229 - RNA, 19 nt, Homo sapiens
  misc_RNA (1)...(19): siRNA sense strand
caacaaacgcuaugaggag

SEQ ID NO: 2332230 - RNA, 19 nt, Homo sapiens
  misc_RNA (1)...(19): siRNA sense strand
cguaaggaugagcgcagaa

SEQ ID NO: 2332231 - RNA, 19 nt, Homo sapiens
  misc_RNA (1)...(19): siRNA sense strand
gcggaaaguaacaggcaac

SEQ ID NO: 2332232 - RNA, 19 nt, Homo sapiens
  misc_RNA (1)...(19): siRNA sense strand
ugaggaagaagaagggcuu

SEQ ID NO: 2332233 - RNA, 19 nt, Homo sapiens
  misc_RNA (1)...(19): siRNA sense strand
gagaagaggcagagacacc

SEQ ID NO: 2332234 - RNA, 19 nt, Homo sapiens
  misc_RNA (1)...(19): siRNA sense strand
gacuacgagaggaagguua

SEQ ID NO: 2332235 - RNA, 19 nt, Homo sapiens
  misc_RNA (1)...(19): siRNA sense strand
ggcccagaacucauggaaa

SEQ ID NO: 2332236 - RNA, 19 nt, Homo sapiens
  misc_RNA (1)...(19): siRNA sense strand
aauauguugaugaggagaa

SEQ ID NO: 2332237 - RNA, 19 nt, Homo sapiens
  misc_RNA (1)...(19): siRNA sense strand
gggacaagacguucgagga

SEQ ID NO: 2332238 - RNA, 19 nt, Homo sapiens
  misc_RNA (1)...(19): siRNA sense strand
auguggaggaacagaaaca

SEQ ID NO: 2332239 - RNA, 19 nt, Homo sapiens
  misc_RNA (1)...(19): siRNA sense strand
aagagacucgggagcgaaa

SEQ ID NO: 2332240 - RNA, 19 nt, Homo sapiens
  misc_RNA (1)...(19): siRNA sense strand
uaacagaacagcaucguca

SEQ ID NO: 2332241 - RNA, 19 nt, Homo sapiens
  misc_RNA (1)...(19): siRNA sense strand
aggaggaagaugaagagga

SEQ ID NO: 2332242 - RNA, 19 nt, Homo sapiens
  misc_RNA (1)...(19): siRNA sense strand
ggcaagaagaagcgcaagu

SEQ ID NO: 2332243 - RNA, 19 nt, Homo sapiens
  misc_RNA (1)...(19): siRNA sense strand
guggcugaagggacagaaa

SEQ ID NO: 2332244 - RNA, 19 nt, Homo sapiens
  misc_RNA (1)...(19): siRNA sense strand
ucgaggaguaccuggauga

SEQ ID NO: 2332245 - RNA, 19 nt, Homo sapiens
  misc_RNA (1)...(19): siRNA sense strand
aguaccuggaugaguauua

SEQ ID NO: 2332246 - RNA, 19 nt, Homo sapiens
  misc_RNA (1)...(19): siRNA sense strand
guuauguggaggaacagaa

SEQ ID NO: 2332247 - RNA, 19 nt, Homo sapiens
  misc_RNA (1)...(19): siRNA sense strand
gagcgaaagaagagggaga

SEQ ID NO: 2332248 - RNA, 19 nt, Homo sapiens
  misc_RNA (1)...(19): siRNA sense strand
aggaagaugaagaggaaau

SEQ ID NO: 2332249 - RNA, 19 nt, Homo sapiens
  misc_RNA (1)...(19): siRNA sense strand
ggaaggagauucuggccaa

SEQ ID NO: 2332250 - RNA, 19 nt, Homo sapiens
  misc_RNA (1)...(19): siRNA sense strand
gcaaauauguugaugagga

SEQ ID NO: 2332251 - RNA, 19 nt, Homo sapiens
  misc_RNA (1)...(19): siRNA sense strand
gcagaaaggagaagaggga

SEQ ID NO: 2332252 - RNA, 19 nt, Homo sapiens
  misc_RNA (1)...(19): siRNA sense strand
gcgaaagaagagggagaaa

SEQ ID NO: 2332253 - RNA, 19 nt, Homo sapiens
  misc_RNA (1)...(19): siRNA sense strand
aagaagagggagaaagcaa

SEQ ID NO: 2332254 - RNA, 19 nt, Homo sapiens
  misc_RNA (1)...(19): siRNA sense strand
gggagaaagcaaagaagca

SEQ ID NO: 2332255 - RNA, 19 nt, Homo sapiens
  misc_RNA (1)...(19): siRNA sense strand
ugaaggacuacgagaggaa

SEQ ID NO: 2332256 - RNA, 19 nt, Homo sapiens
  misc_RNA (1)...(19): siRNA sense strand
ccgagaagaggcagagaca

SEQ ID NO: 2332257 - RNA, 19 nt, Homo sapiens
  misc_RNA (1)...(19): siRNA sense strand
ggucagagcaggaggagcu

SEQ ID NO: 2332258 - RNA, 19 nt, Homo sapiens
  misc_RNA (1)...(19): siRNA sense strand
cugaagggacagaaagaga

SEQ ID NO: 2332259 - RNA, 19 nt, Homo sapiens
  misc_RNA (1)...(19): siRNA sense strand
ggagaagagggaagagacu

SEQ ID NO: 2332260 - RNA, 19 nt, Homo sapiens
  misc_RNA (1)...(19): siRNA sense strand
cugaagaaccugaagagga

SEQ ID NO: 2332261 - RNA, 19 nt, Homo sapiens
  misc_RNA (1)...(19): siRNA sense strand
agccacaauuugaggaaga

SEQ ID NO: 2332262 - RNA, 19 nt, Homo sapiens
  misc_RNA (1)...(19): siRNA sense strand
ucgaguggcugaagggaca

SEQ ID NO: 2332263 - RNA, 19 nt, Homo sapiens
  misc_RNA (1)...(19): siRNA sense strand
agaaaggagaagagggaag

SEQ ID NO: 2332264 - RNA, 19 nt, Homo sapiens
  misc_RNA (1)...(19): siRNA sense strand
aagaagggcuugaagacga

SEQ ID NO: 2332265 - RNA, 19 nt, Homo sapiens
  misc_RNA (1)...(19): siRNA sense strand
cgggcaagaagaagcgcaa

SEQ ID NO: 2332266 - RNA, 19 nt, Homo sapiens
  misc_RNA (1)...(19): siRNA sense strand
ggaagagacucgggagcga

SEQ ID NO: 2332267 - RNA, 19 nt, Homo sapiens
  misc_RNA (1)...(19): siRNA sense strand
aggagaaggcccaggagga

SEQ ID NO: 2332268 - RNA, 19 nt, Homo sapiens
  misc_RNA (1)...(19): siRNA sense strand
gggcauuuguggaggacag

SEQ ID NO: 2332269 - RNA, 19 nt, Homo sapiens
  misc_RNA (1)...(19): siRNA sense strand
aggaggaggaagaggagga

SEQ ID NO: 2332270 - RNA, 19 nt, Homo sapiens
  misc_RNA (1)...(19): siRNA sense strand
aggaggaagaggaggagga

SEQ ID NO: 2332271 - RNA, 19 nt, Homo sapiens
  misc_RNA (1)...(19): siRNA sense strand
aggaggaggaagaugaaga

SEQ ID NO: 2332272 - RNA, 19 nt, Homo sapiens
  misc_RNA (1)...(19): siRNA sense strand
ggcugaagggacagaaaga

SEQ ID NO: 2332273 - RNA, 19 nt, Homo sapiens
  misc_RNA (1)...(19): siRNA sense strand
aggaggagcugcgggacaa

SEQ ID NO: 2332274 - RNA, 19 nt, Homo sapiens
  misc_RNA (1)...(19): siRNA sense strand
aguauuaccggcuggacua

SEQ ID NO: 2332275 - RNA, 19 nt, Homo sapiens
  misc_RNA (1)...(19): siRNA sense strand
augaagaggaaauggagga

SEQ ID NO: 2332276 - RNA, 19 nt, Homo sapiens
  misc_RNA (1)...(19): siRNA sense strand
gcaacgagaugcugggccu

SEQ ID NO: 2332277 - RNA, 19 nt, Homo sapiens
  misc_RNA (1)...(19): siRNA sense strand
aggaacagaaacagcucaa

SEQ ID NO: 2332278 - RNA, 19 nt, Homo sapiens
  misc_RNA (1)...(19): siRNA sense strand
gcugcagaaacgugccaaa

SEQ ID NO: 2332279 - RNA, 19 nt, Homo sapiens
  misc_RNA (1)...(19): siRNA sense strand
caacaaacgcuaugaggag

SEQ ID NO: 2332280 - RNA, 19 nt, Homo sapiens
  misc_RNA (1)...(19): siRNA sense strand
cguaaggaugagcgcagaa

SEQ ID NO: 2332281 - RNA, 19 nt, Homo sapiens
  misc_RNA (1)...(19): siRNA sense strand
gcggaaaguaacaggcaac

SEQ ID NO: 2332282 - RNA, 19 nt, Homo sapiens
  misc_RNA (1)...(19): siRNA sense strand
ugaggaagaagaagggcuu

SEQ ID NO: 2332283 - RNA, 19 nt, Homo sapiens
  misc_RNA (1)...(19): siRNA sense strand
gagaagaggcagagacacc

SEQ ID NO: 2332284 - RNA, 19 nt, Homo sapiens
  misc_RNA (1)...(19): siRNA sense strand
ggcccagaacucauggaaa

SEQ ID NO: 2332285 - RNA, 19 nt, Homo sapiens
  misc_RNA (1)...(19): siRNA sense strand
gacuacgagaggaagguua

SEQ ID NO: 2332286 - RNA, 19 nt, Homo sapiens
  misc_RNA (1)...(19): siRNA sense strand
aauauguugaugaggagaa

SEQ ID NO: 2332287 - RNA, 19 nt, Homo sapiens
  misc_RNA (1)...(19): siRNA sense strand
gggacaagacguucgagga

SEQ ID NO: 2332288 - RNA, 19 nt, Homo sapiens
  misc_RNA (1)...(19): siRNA sense strand
auguggaggaacagaaaca

SEQ ID NO: 2332289 - RNA, 19 nt, Homo sapiens
  misc_RNA (1)...(19): siRNA sense strand
aagagacucgggagcgaaa

SEQ ID NO: 2332290 - RNA, 19 nt, Homo sapiens
  misc_RNA (1)...(19): siRNA sense strand
aggaggaagaugaagagga

SEQ ID NO: 2332291 - RNA, 19 nt, Homo sapiens
  misc_RNA (1)...(19): siRNA sense strand
ggcaagaagaagcgcaagu

SEQ ID NO: 2332292 - RNA, 19 nt, Homo sapiens
  misc_RNA (1)...(19): siRNA sense strand
guggcugaagggacagaaa

SEQ ID NO: 2332293 - RNA, 19 nt, Homo sapiens
  misc_RNA (1)...(19): siRNA sense strand
ucgaggaguaccuggauga

SEQ ID NO: 2332294 - RNA, 19 nt, Homo sapiens
  misc_RNA (1)...(19): siRNA sense strand
aguaccuggaugaguauua

SEQ ID NO: 2332295 - RNA, 19 nt, Homo sapiens
  misc_RNA (1)...(19): siRNA sense strand
guuauguggaggaacagaa

SEQ ID NO: 2332296 - RNA, 19 nt, Homo sapiens
  misc_RNA (1)...(19): siRNA sense strand
ugaaagagccagugggcaa

SEQ ID NO: 2332297 - RNA, 19 nt, Homo sapiens
  misc_RNA (1)...(19): siRNA sense strand
agaaagaagcgcugagcaa

SEQ ID NO: 2332298 - RNA, 19 nt, Homo sapiens
  misc_RNA (1)...(19): siRNA sense strand
agaaagaagaaguggucaa

SEQ ID NO: 2332299 - RNA, 19 nt, Homo sapiens
  misc_RNA (1)...(19): siRNA sense strand
auggaaagaagaagagaaa

SEQ ID NO: 2332300 - RNA, 19 nt, Homo sapiens
  misc_RNA (1)...(19): siRNA sense strand
ccuaaggagaagcgaguaa

SEQ ID NO: 2332301 - RNA, 19 nt, Homo sapiens
  misc_RNA (1)...(19): siRNA sense strand
aagaagaagagaaacgaaa

SEQ ID NO: 2332302 - RNA, 19 nt, Homo sapiens
  misc_RNA (1)...(19): siRNA sense strand
cgagaaagagagaggcuga

SEQ ID NO: 2332303 - RNA, 19 nt, Homo sapiens
  misc_RNA (1)...(19): siRNA sense strand
aaggaggaggagagaaaua

SEQ ID NO: 2332304 - RNA, 19 nt, Homo sapiens
  misc_RNA (1)...(19): siRNA sense strand
gagaaggagcacaggccua

SEQ ID NO: 2332305 - RNA, 19 nt, Homo sapiens
  misc_RNA (1)...(19): siRNA sense strand
agaaauuggacaaagagaa

SEQ ID NO: 2332306 - RNA, 19 nt, Homo sapiens
  misc_RNA (1)...(19): siRNA sense strand
ggcugaaaguacagaauca

SEQ ID NO: 2332307 - RNA, 19 nt, Homo sapiens
  misc_RNA (1)...(19): siRNA sense strand
ccacagauaaugagaaaau

SEQ ID NO: 2332308 - RNA, 19 nt, Homo sapiens
  misc_RNA (1)...(19): siRNA sense strand
gcuaaagaagauagacaga

SEQ ID NO: 2332309 - RNA, 19 nt, Homo sapiens
  misc_RNA (1)...(19): siRNA sense strand
gagcacaggccuaaggaga

SEQ ID NO: 2332310 - RNA, 19 nt, Homo sapiens
  misc_RNA (1)...(19): siRNA sense strand
ggaaagugguauuagccau

SEQ ID NO: 2332311 - RNA, 19 nt, Homo sapiens
  misc_RNA (1)...(19): siRNA sense strand
ggaaagaagaagagaaacg

SEQ ID NO: 2332312 - RNA, 19 nt, Homo sapiens
  misc_RNA (1)...(19): siRNA sense strand
gaauuggacaaaagagaaa

SEQ ID NO: 2332313 - RNA, 19 nt, Homo sapiens
  misc_RNA (1)...(19): siRNA sense strand
agaagaaaagagagaagaa

SEQ ID NO: 2332314 - RNA, 19 nt, Homo sapiens
  misc_RNA (1)...(19): siRNA sense strand
gaagaaaggaggaggagag

SEQ ID NO: 2332315 - RNA, 19 nt, Homo sapiens
  misc_RNA (1)...(19): siRNA sense strand
aggaggagagaaauagaaa

SEQ ID NO: 2332316 - RNA, 19 nt, Homo sapiens
  misc_RNA (1)...(19): siRNA sense strand
aagauaagcaggaucgcaa

SEQ ID NO: 2332317 - RNA, 19 nt, Homo sapiens
  misc_RNA (1)...(19): siRNA sense strand
gcugaagcggcaagaagaa

SEQ ID NO: 2332318 - RNA, 19 nt, Homo sapiens
  misc_RNA (1)...(19): siRNA sense strand
aggagcagcuucaggaaca

SEQ ID NO: 2332319 - RNA, 19 nt, Homo sapiens
  misc_RNA (1)...(19): siRNA sense strand
aagcagagaaugagagaag

SEQ ID NO: 2332320 - RNA, 19 nt, Homo sapiens
  misc_RNA (1)...(19): siRNA sense strand
aagcuaaagaagauagaca

SEQ ID NO: 2332321 - RNA, 19 nt, Homo sapiens
  misc_RNA (1)...(19): siRNA sense strand
agagaggaggaaauggaaa

SEQ ID NO: 2332322 - RNA, 19 nt, Homo sapiens
  misc_RNA (1)...(19): siRNA sense strand
gagagaggcugaagcggca

SEQ ID NO: 2332323 - RNA, 19 nt, Homo sapiens
  misc_RNA (1)...(19): siRNA sense strand
agagaagaaaggaggagga

SEQ ID NO: 2332324 - RNA, 19 nt, Homo sapiens
  misc_RNA (1)...(19): siRNA sense strand
agaagaagagaggaggaaa

SEQ ID NO: 2332325 - RNA, 19 nt, Homo sapiens
  misc_RNA (1)...(19): siRNA sense strand
ggucaggaauaucccgcua

SEQ ID NO: 2332326 - RNA, 19 nt, Homo sapiens
  misc_RNA (1)...(19): siRNA sense strand
aauggaaagaagaagagaa

SEQ ID NO: 2332327 - RNA, 19 nt, Homo sapiens
  misc_RNA (1)...(19): siRNA sense strand
agagaaugagagaagaaaa

SEQ ID NO: 2332328 - RNA, 19 nt, Homo sapiens
  misc_RNA (1)...(19): siRNA sense strand
ugagagaagaaaagagaga

SEQ ID NO: 2332329 - RNA, 19 nt, Homo sapiens
  misc_RNA (1)...(19): siRNA sense strand
cagaaaggaagcaggaaag

SEQ ID NO: 2332330 - RNA, 19 nt, Homo sapiens
  misc_RNA (1)...(19): siRNA sense strand
agaagaagagaaacgaaaa

SEQ ID NO: 2332331 - RNA, 19 nt, Homo sapiens
  misc_RNA (1)...(19): siRNA sense strand
agaggaaauagaagcaaaa

SEQ ID NO: 2332332 - RNA, 19 nt, Homo sapiens
  misc_RNA (1)...(19): siRNA sense strand
gaagaaaagagagaagaaa

SEQ ID NO: 2332333 - RNA, 19 nt, Homo sapiens
  misc_RNA (1)...(19): siRNA sense strand
gcgcugagcaaggugguaa

SEQ ID NO: 2332334 - RNA, 19 nt, Homo sapiens
  misc_RNA (1)...(19): siRNA sense strand
cgaauaagaaacaaggauc

SEQ ID NO: 2332335 - RNA, 19 nt, Homo sapiens
  misc_RNA (1)...(19): siRNA sense strand
gaagcaggaaagugguauu

SEQ ID NO: 2332336 - RNA, 19 nt, Homo sapiens
  misc_RNA (1)...(19): siRNA sense strand
aggaggaaauggaaagaag

SEQ ID NO: 2332337 - RNA, 19 nt, Homo sapiens
  misc_RNA (1)...(19): siRNA sense strand
gcuagaggaaauagaagca

SEQ ID NO: 2332338 - RNA, 19 nt, Homo sapiens
  misc_RNA (1)...(19): siRNA sense strand
gaagagcgccguaggcaga

SEQ ID NO: 2332339 - RNA, 19 nt, Homo sapiens
  misc_RNA (1)...(19): siRNA sense strand
agagaagaagagaggagga

SEQ ID NO: 2332340 - RNA, 19 nt, Homo sapiens
  misc_RNA (1)...(19): siRNA sense strand
agagacacugcuagaggaa

SEQ ID NO: 2332341 - RNA, 19 nt, Homo sapiens
  misc_RNA (1)...(19): siRNA sense strand
guacauugcccaagcguuc

SEQ ID NO: 2332342 - RNA, 19 nt, Homo sapiens
  misc_RNA (1)...(19): siRNA sense strand
cagagaaugagagaagaaa

SEQ ID NO: 2332343 - RNA, 19 nt, Homo sapiens
  misc_RNA (1)...(19): siRNA sense strand
ugaaagagccagugggcaa

SEQ ID NO: 2332344 - RNA, 19 nt, Homo sapiens
  misc_RNA (1)...(19): siRNA sense strand
agaaagaagcgcugagcaa

SEQ ID NO: 2332345 - RNA, 19 nt, Homo sapiens
  misc_RNA (1)...(19): siRNA sense strand
agaaagaagaaguggucaa

SEQ ID NO: 2332346 - RNA, 19 nt, Homo sapiens
  misc_RNA (1)...(19): siRNA sense strand
auggaaagaagaagagaaa

SEQ ID NO: 2332347 - RNA, 19 nt, Homo sapiens
  misc_RNA (1)...(19): siRNA sense strand
ccuaaggagaagcgaguaa

SEQ ID NO: 2332348 - RNA, 19 nt, Homo sapiens
  misc_RNA (1)...(19): siRNA sense strand
aagaagaagagaaacgaaa

SEQ ID NO: 2332349 - RNA, 19 nt, Homo sapiens
  misc_RNA (1)...(19): siRNA sense strand
cgagaaagagagaggcuga

SEQ ID NO: 2332350 - RNA, 19 nt, Homo sapiens
  misc_RNA (1)...(19): siRNA sense strand
aaggaggaggagagaaaua

SEQ ID NO: 2332351 - RNA, 19 nt, Homo sapiens
  misc_RNA (1)...(19): siRNA sense strand
gagaaggagcacaggccua

SEQ ID NO: 2332352 - RNA, 19 nt, Homo sapiens
  misc_RNA (1)...(19): siRNA sense strand
agaaauuggacaaagagaa

SEQ ID NO: 2332353 - RNA, 19 nt, Homo sapiens
  misc_RNA (1)...(19): siRNA sense strand
ggcugaaaguacagaauca

SEQ ID NO: 2332354 - RNA, 19 nt, Homo sapiens
  misc_RNA (1)...(19): siRNA sense strand
ccacagauaaugagaaaau

SEQ ID NO: 2332355 - RNA, 19 nt, Homo sapiens
  misc_RNA (1)...(19): siRNA sense strand
gcuaaagaagauagacaga

SEQ ID NO: 2332356 - RNA, 19 nt, Homo sapiens
  misc_RNA (1)...(19): siRNA sense strand
gagcacaggccuaaggaga

SEQ ID NO: 2332357 - RNA, 19 nt, Homo sapiens
  misc_RNA (1)...(19): siRNA sense strand
ggaaagugguauuagccau

SEQ ID NO: 2332358 - RNA, 19 nt, Homo sapiens
  misc_RNA (1)...(19): siRNA sense strand
ggaaagaagaagagaaacg

SEQ ID NO: 2332359 - RNA, 19 nt, Homo sapiens
  misc_RNA (1)...(19): siRNA sense strand
gaauuggacaaaagagaaa

SEQ ID NO: 2332360 - RNA, 19 nt, Homo sapiens
  misc_RNA (1)...(19): siRNA sense strand
agaagaaaagagagaagaa

SEQ ID NO: 2332361 - RNA, 19 nt, Homo sapiens
  misc_RNA (1)...(19): siRNA sense strand
gaagaaaggaggaggagag

SEQ ID NO: 2332362 - RNA, 19 nt, Homo sapiens
  misc_RNA (1)...(19): siRNA sense strand
aggaggagagaaauagaaa

SEQ ID NO: 2332363 - RNA, 19 nt, Homo sapiens
  misc_RNA (1)...(19): siRNA sense strand
aagauaagcaggaucgcaa

SEQ ID NO: 2332364 - RNA, 19 nt, Homo sapiens
  misc_RNA (1)...(19): siRNA sense strand
gcugaagcggcaagaagaa

SEQ ID NO: 2332365 - RNA, 19 nt, Homo sapiens
  misc_RNA (1)...(19): siRNA sense strand
aggagcagcuucaggaaca

SEQ ID NO: 2332366 - RNA, 19 nt, Homo sapiens
  misc_RNA (1)...(19): siRNA sense strand
aagcagagaaugagagaag

SEQ ID NO: 2332367 - RNA, 19 nt, Homo sapiens
  misc_RNA (1)...(19): siRNA sense strand
aagcuaaagaagauagaca

SEQ ID NO: 2332368 - RNA, 19 nt, Homo sapiens
  misc_RNA (1)...(19): siRNA sense strand
agagaggaggaaauggaaa

SEQ ID NO: 2332369 - RNA, 19 nt, Homo sapiens
  misc_RNA (1)...(19): siRNA sense strand
gagagaggcugaagcggca

SEQ ID NO: 2332370 - RNA, 19 nt, Homo sapiens
  misc_RNA (1)...(19): siRNA sense strand
agagaagaaaggaggagga

SEQ ID NO: 2332371 - RNA, 19 nt, Homo sapiens
  misc_RNA (1)...(19): siRNA sense strand
agaagaagagaggaggaaa

SEQ ID NO: 2332372 - RNA, 19 nt, Homo sapiens
  misc_RNA (1)...(19): siRNA sense strand
ggucaggaauaucccgcua

SEQ ID NO: 2332373 - RNA, 19 nt, Homo sapiens
  misc_RNA (1)...(19): siRNA sense strand
aauggaaagaagaagagaa

SEQ ID NO: 2332374 - RNA, 19 nt, Homo sapiens
  misc_RNA (1)...(19): siRNA sense strand
agagaaugagagaagaaaa

SEQ ID NO: 2332375 - RNA, 19 nt, Homo sapiens
  misc_RNA (1)...(19): siRNA sense strand
ugagagaagaaaagagaga

SEQ ID NO: 2332376 - RNA, 19 nt, Homo sapiens
  misc_RNA (1)...(19): siRNA sense strand
cagaaaggaagcaggaaag

SEQ ID NO: 2332377 - RNA, 19 nt, Homo sapiens
  misc_RNA (1)...(19): siRNA sense strand
agaagaagagaaacgaaaa

SEQ ID NO: 2332378 - RNA, 19 nt, Homo sapiens
  misc_RNA (1)...(19): siRNA sense strand
agaggaaauagaagcaaaa

SEQ ID NO: 2332379 - RNA, 19 nt, Homo sapiens
  misc_RNA (1)...(19): siRNA sense strand
gaagaaaagagagaagaaa

SEQ ID NO: 2332380 - RNA, 19 nt, Homo sapiens
  misc_RNA (1)...(19): siRNA sense strand
gcgcugagcaaggugguaa

SEQ ID NO: 2332381 - RNA, 19 nt, Homo sapiens
  misc_RNA (1)...(19): siRNA sense strand
cgaauaagaaacaaggauc

SEQ ID NO: 2332382 - RNA, 19 nt, Homo sapiens
  misc_RNA (1)...(19): siRNA sense strand
gaagcaggaaagugguauu

SEQ ID NO: 2332383 - RNA, 19 nt, Homo sapiens
  misc_RNA (1)...(19): siRNA sense strand
aggaggaaauggaaagaag

SEQ ID NO: 2332384 - RNA, 19 nt, Homo sapiens
  misc_RNA (1)...(19): siRNA sense strand
gcuagaggaaauagaagca

SEQ ID NO: 2332385 - RNA, 19 nt, Homo sapiens
  misc_RNA (1)...(19): siRNA sense strand
gaagagcgccguaggcaga

SEQ ID NO: 2332386 - RNA, 19 nt, Homo sapiens
  misc_RNA (1)...(19): siRNA sense strand
agagaagaagagaggagga

SEQ ID NO: 2332387 - RNA, 19 nt, Homo sapiens
  misc_RNA (1)...(19): siRNA sense strand
agagacacugcuagaggaa

SEQ ID NO: 2332388 - RNA, 19 nt, Homo sapiens
  misc_RNA (1)...(19): siRNA sense strand
guacauugcccaagcguuc

SEQ ID NO: 2332389 - RNA, 19 nt, Homo sapiens
  misc_RNA (1)...(19): siRNA sense strand
cagagaaugagagaagaaa

SEQ ID NO: 2332390 - RNA, 19 nt, Homo sapiens
  misc_RNA (1)...(19): siRNA sense strand
acaagaaucugaagcacaa

SEQ ID NO: 2332391 - RNA, 19 nt, Homo sapiens
  misc_RNA (1)...(19): siRNA sense strand
acggaggaggagagaguua

SEQ ID NO: 2332392 - RNA, 19 nt, Homo sapiens
  misc_RNA (1)...(19): siRNA sense strand
ccagaaggagugaggauga

SEQ ID NO: 2332393 - RNA, 19 nt, Homo sapiens
  misc_RNA (1)...(19): siRNA sense strand
cgagaagaacggaggagga

SEQ ID NO: 2332394 - RNA, 19 nt, Homo sapiens
  misc_RNA (1)...(19): siRNA sense strand
agaaagaggagaggagauu

SEQ ID NO: 2332395 - RNA, 19 nt, Homo sapiens
  misc_RNA (1)...(19): siRNA sense strand
aggaggagagaguuagaaa

SEQ ID NO: 2332396 - RNA, 19 nt, Homo sapiens
  misc_RNA (1)...(19): siRNA sense strand
aagaaagaggagaggagau

SEQ ID NO: 2332397 - RNA, 19 nt, Homo sapiens
  misc_RNA (1)...(19): siRNA sense strand
gauaaagagcacagggaug

SEQ ID NO: 2332398 - RNA, 19 nt, Homo sapiens
  misc_RNA (1)...(19): siRNA sense strand
agaaaauugcagagaaaga

SEQ ID NO: 2332399 - RNA, 19 nt, Homo sapiens
  misc_RNA (1)...(19): siRNA sense strand
agaagagggaagaggcaga

SEQ ID NO: 2332400 - RNA, 19 nt, Homo sapiens
  misc_RNA (1)...(19): siRNA sense strand
cagagaaagaaguaaggau

SEQ ID NO: 2332401 - RNA, 19 nt, Homo sapiens
  misc_RNA (1)...(19): siRNA sense strand
acagagaaaccaaaagaaa

SEQ ID NO: 2332402 - RNA, 19 nt, Homo sapiens
  misc_RNA (1)...(19): siRNA sense strand
ggggaaaggaccuggccaa

SEQ ID NO: 2332403 - RNA, 19 nt, Homo sapiens
  misc_RNA (1)...(19): siRNA sense strand
gaagagaagaccagugcca

SEQ ID NO: 2332404 - RNA, 19 nt, Homo sapiens
  misc_RNA (1)...(19): siRNA sense strand
agagaaaccaaaagaaaga

SEQ ID NO: 2332405 - RNA, 19 nt, Homo sapiens
  misc_RNA (1)...(19): siRNA sense strand
gcgcagaggugugacgaca

SEQ ID NO: 2332406 - RNA, 19 nt, Homo sapiens
  misc_RNA (1)...(19): siRNA sense strand
aggagcagcuggaggagca

SEQ ID NO: 2332407 - RNA, 19 nt, Homo sapiens
  misc_RNA (1)...(19): siRNA sense strand
ccaaggagcagcuggagga

SEQ ID NO: 2332408 - RNA, 19 nt, Homo sapiens
  misc_RNA (1)...(19): siRNA sense strand
cggcagugauaaagagcac

SEQ ID NO: 2332409 - RNA, 19 nt, Homo sapiens
  misc_RNA (1)...(19): siRNA sense strand
agagaauucgagaagagaa

SEQ ID NO: 2332410 - RNA, 19 nt, Homo sapiens
  misc_RNA (1)...(19): siRNA sense strand
ggaggagagaguuagaaaa

SEQ ID NO: 2332411 - RNA, 19 nt, Homo sapiens
  misc_RNA (1)...(19): siRNA sense strand
cgagaagagaagcgagaag

SEQ ID NO: 2332412 - RNA, 19 nt, Homo sapiens
  misc_RNA (1)...(19): siRNA sense strand
ggagauugauacuggaggu

SEQ ID NO: 2332413 - RNA, 19 nt, Homo sapiens
  misc_RNA (1)...(19): siRNA sense strand
agaacaagaaucugaagca

SEQ ID NO: 2332414 - RNA, 19 nt, Homo sapiens
  misc_RNA (1)...(19): siRNA sense strand
uggccaagacagagggaag

SEQ ID NO: 2332415 - RNA, 19 nt, Homo sapiens
  misc_RNA (1)...(19): siRNA sense strand
agaaguaaggauuaagcuu

SEQ ID NO: 2332416 - RNA, 19 nt, Homo sapiens
  misc_RNA (1)...(19): siRNA sense strand
gguccugagaagagggaag

SEQ ID NO: 2332417 - RNA, 19 nt, Homo sapiens
  misc_RNA (1)...(19): siRNA sense strand
agaggagaggagauugaua

SEQ ID NO: 2332418 - RNA, 19 nt, Homo sapiens
  misc_RNA (1)...(19): siRNA sense strand
gugauaaagagcacaggga

SEQ ID NO: 2332419 - RNA, 19 nt, Homo sapiens
  misc_RNA (1)...(19): siRNA sense strand
auaucuuccuugacagcaa

SEQ ID NO: 2332420 - RNA, 19 nt, Homo sapiens
  misc_RNA (1)...(19): siRNA sense strand
aaagaaacguuugcgggaa

SEQ ID NO: 2332421 - RNA, 19 nt, Homo sapiens
  misc_RNA (1)...(19): siRNA sense strand
gcucauugcuagaagaacc

SEQ ID NO: 2332422 - RNA, 19 nt, Homo sapiens
  misc_RNA (1)...(19): siRNA sense strand
gcgagaguguggcggaaac

SEQ ID NO: 2332423 - RNA, 19 nt, Homo sapiens
  misc_RNA (1)...(19): siRNA sense strand
agaggacggcccugagcaa

SEQ ID NO: 2332424 - RNA, 19 nt, Homo sapiens
  misc_RNA (1)...(19): siRNA sense strand
ugagaagagggaagaggca

SEQ ID NO: 2332425 - RNA, 19 nt, Homo sapiens
  misc_RNA (1)...(19): siRNA sense strand
gagagaguuagaaaagaaa

SEQ ID NO: 2332426 - RNA, 19 nt, Homo sapiens
  misc_RNA (1)...(19): siRNA sense strand
acaagaaucugaagcacaa

SEQ ID NO: 2332427 - RNA, 19 nt, Homo sapiens
  misc_RNA (1)...(19): siRNA sense strand
acggaggaggagagaguua

SEQ ID NO: 2332428 - RNA, 19 nt, Homo sapiens
  misc_RNA (1)...(19): siRNA sense strand
ccagaaggagugaggauga

SEQ ID NO: 2332429 - RNA, 19 nt, Homo sapiens
  misc_RNA (1)...(19): siRNA sense strand
cgagaagaacggaggagga

SEQ ID NO: 2332430 - RNA, 19 nt, Homo sapiens
  misc_RNA (1)...(19): siRNA sense strand
agaaagaggagaggagauu

SEQ ID NO: 2332431 - RNA, 19 nt, Homo sapiens
  misc_RNA (1)...(19): siRNA sense strand
aggaggagagaguuagaaa

SEQ ID NO: 2332432 - RNA, 19 nt, Homo sapiens
  misc_RNA (1)...(19): siRNA sense strand
aagaaagaggagaggagau

SEQ ID NO: 2332433 - RNA, 19 nt, Homo sapiens
  misc_RNA (1)...(19): siRNA sense strand
gauaaagagcacagggaug

SEQ ID NO: 2332434 - RNA, 19 nt, Homo sapiens
  misc_RNA (1)...(19): siRNA sense strand
agaaaauugcagagaaaga

SEQ ID NO: 2332435 - RNA, 19 nt, Homo sapiens
  misc_RNA (1)...(19): siRNA sense strand
agaagagggaagaggcaga

SEQ ID NO: 2332436 - RNA, 19 nt, Homo sapiens
  misc_RNA (1)...(19): siRNA sense strand
cagagaaagaaguaaggau

SEQ ID NO: 2332437 - RNA, 19 nt, Homo sapiens
  misc_RNA (1)...(19): siRNA sense strand
acagagaaaccaaaagaaa

SEQ ID NO: 2332438 - RNA, 19 nt, Homo sapiens
  misc_RNA (1)...(19): siRNA sense strand
ggggaaaggaccuggccaa

SEQ ID NO: 2332439 - RNA, 19 nt, Homo sapiens
  misc_RNA (1)...(19): siRNA sense strand
gaagagaagaccagugcca

SEQ ID NO: 2332440 - RNA, 19 nt, Homo sapiens
  misc_RNA (1)...(19): siRNA sense strand
agagaaaccaaaagaaaga

SEQ ID NO: 2332441 - RNA, 19 nt, Homo sapiens
  misc_RNA (1)...(19): siRNA sense strand
gcgcagaggugugacgaca

SEQ ID NO: 2332442 - RNA, 19 nt, Homo sapiens
  misc_RNA (1)...(19): siRNA sense strand
aggagcagcuggaggagca

SEQ ID NO: 2332443 - RNA, 19 nt, Homo sapiens
  misc_RNA (1)...(19): siRNA sense strand
ccaaggagcagcuggagga

SEQ ID NO: 2332444 - RNA, 19 nt, Homo sapiens
  misc_RNA (1)...(19): siRNA sense strand
cggcagugauaaagagcac

SEQ ID NO: 2332445 - RNA, 19 nt, Homo sapiens
  misc_RNA (1)...(19): siRNA sense strand
agagaauucgagaagagaa

SEQ ID NO: 2332446 - RNA, 19 nt, Homo sapiens
  misc_RNA (1)...(19): siRNA sense strand
ggaggagagaguuagaaaa

SEQ ID NO: 2332447 - RNA, 19 nt, Homo sapiens
  misc_RNA (1)...(19): siRNA sense strand
cgagaagagaagcgagaag

SEQ ID NO: 2332448 - RNA, 19 nt, Homo sapiens
  misc_RNA (1)...(19): siRNA sense strand
ggagauugauacuggaggu

SEQ ID NO: 2332449 - RNA, 19 nt, Homo sapiens
  misc_RNA (1)...(19): siRNA sense strand
agaacaagaaucugaagca

SEQ ID NO: 2332450 - RNA, 19 nt, Homo sapiens
  misc_RNA (1)...(19): siRNA sense strand
uggccaagacagagggaag

SEQ ID NO: 2332451 - RNA, 19 nt, Homo sapiens
  misc_RNA (1)...(19): siRNA sense strand
agaaguaaggauuaagcuu

SEQ ID NO: 2332452 - RNA, 19 nt, Homo sapiens
  misc_RNA (1)...(19): siRNA sense strand
gguccugagaagagggaag

SEQ ID NO: 2332453 - RNA, 19 nt, Homo sapiens
  misc_RNA (1)...(19): siRNA sense strand
agaggagaggagauugaua

SEQ ID NO: 2332454 - RNA, 19 nt, Homo sapiens
  misc_RNA (1)...(19): siRNA sense strand
gugauaaagagcacaggga

SEQ ID NO: 2332455 - RNA, 19 nt, Homo sapiens
  misc_RNA (1)...(19): siRNA sense strand
auaucuuccuugacagcaa

SEQ ID NO: 2332456 - RNA, 19 nt, Homo sapiens
  misc_RNA (1)...(19): siRNA sense strand
aaagaaacguuugcgggaa

SEQ ID NO: 2332457 - RNA, 19 nt, Homo sapiens
  misc_RNA (1)...(19): siRNA sense strand
gcucauugcuagaagaacc

SEQ ID NO: 2332458 - RNA, 19 nt, Homo sapiens
  misc_RNA (1)...(19): siRNA sense strand
gcgagaguguggcggaaac

SEQ ID NO: 2332459 - RNA, 19 nt, Homo sapiens
  misc_RNA (1)...(19): siRNA sense strand
agaggacggcccugagcaa

SEQ ID NO: 2332460 - RNA, 19 nt, Homo sapiens
  misc_RNA (1)...(19): siRNA sense strand
ugagaagagggaagaggca

SEQ ID NO: 2332461 - RNA, 19 nt, Homo sapiens
  misc_RNA (1)...(19): siRNA sense strand
gagagaguuagaaaagaaa

SEQ ID NO: 2332462 - RNA, 19 nt, Homo sapiens
  misc_RNA (1)...(19): siRNA sense strand
ggacagaguuugacagcag

SEQ ID NO: 2332463 - RNA, 19 nt, Homo sapiens
  misc_RNA (1)...(19): siRNA sense strand
ucaagaagcggguggacca

SEQ ID NO: 2332464 - RNA, 19 nt, Homo sapiens
  misc_RNA (1)...(19): siRNA sense strand
gaagcuggaagaugggaca

SEQ ID NO: 2332465 - RNA, 19 nt, Homo sapiens
  misc_RNA (1)...(19): siRNA sense strand
ggacagaguuugacagcag

SEQ ID NO: 2332466 - RNA, 19 nt, Homo sapiens
  misc_RNA (1)...(19): siRNA sense strand
ucaagaagcggguggacca

SEQ ID NO: 2332467 - RNA, 19 nt, Homo sapiens
  misc_RNA (1)...(19): siRNA sense strand
gaagcuggaagaugggaca

SEQ ID NO: 2332468 - RNA, 19 nt, Homo sapiens
  misc_RNA (1)...(19): siRNA sense strand
acggaaugccagugguaaa

SEQ ID NO: 2332469 - RNA, 19 nt, Homo sapiens
  misc_RNA (1)...(19): siRNA sense strand
aggaagacuuuguugggaa

SEQ ID NO: 2332470 - RNA, 19 nt, Homo sapiens
  misc_RNA (1)...(19): siRNA sense strand
gcacagacuuugaaggauc

SEQ ID NO: 2332471 - RNA, 19 nt, Homo sapiens
  misc_RNA (1)...(19): siRNA sense strand
uggaacaggaacugaaauu

SEQ ID NO: 2332472 - RNA, 19 nt, Homo sapiens
  misc_RNA (1)...(19): siRNA sense strand
guauaaugcaacuuggaau

SEQ ID NO: 2332473 - RNA, 19 nt, Homo sapiens
  misc_RNA (1)...(19): siRNA sense strand
gagacgugguacucagcaa

SEQ ID NO: 2332474 - RNA, 19 nt, Homo sapiens
  misc_RNA (1)...(19): siRNA sense strand
ccaugaaagcugugguucu

SEQ ID NO: 2332475 - RNA, 19 nt, Homo sapiens
  misc_RNA (1)...(19): siRNA sense strand
gcacaaaaucaucaaucaa

SEQ ID NO: 2332476 - RNA, 19 nt, Homo sapiens
  misc_RNA (1)...(19): siRNA sense strand
aguuauauucacagcaaga

SEQ ID NO: 2332477 - RNA, 19 nt, Homo sapiens
  misc_RNA (1)...(19): siRNA sense strand
caaucaaaccgcggagaau

SEQ ID NO: 2332478 - RNA, 19 nt, Homo sapiens
  misc_RNA (1)...(19): siRNA sense strand
aguuggaugugcuggaaca

SEQ ID NO: 2332479 - RNA, 19 nt, Homo sapiens
  misc_RNA (1)...(19): siRNA sense strand
acuuaaagccgucggaucu

SEQ ID NO: 2332480 - RNA, 19 nt, Homo sapiens
  misc_RNA (1)...(19): siRNA sense strand
cugaagaugaaacaagaau

SEQ ID NO: 2332481 - RNA, 19 nt, Homo sapiens
  misc_RNA (1)...(19): siRNA sense strand
ugauuagacgaguuguaaa

SEQ ID NO: 2332482 - RNA, 19 nt, Homo sapiens
  misc_RNA (1)...(19): siRNA sense strand
cugagaaagguuaucaauu

SEQ ID NO: 2332483 - RNA, 19 nt, Homo sapiens
  misc_RNA (1)...(19): siRNA sense strand
agauaugcuaggaaacauu

SEQ ID NO: 2332484 - RNA, 19 nt, Homo sapiens
  misc_RNA (1)...(19): siRNA sense strand
gcacaaaggcaacggugac

SEQ ID NO: 2332485 - RNA, 19 nt, Homo sapiens
  misc_RNA (1)...(19): siRNA sense strand
ucaaucaaaccgcggagaa

SEQ ID NO: 2332486 - RNA, 19 nt, Homo sapiens
  misc_RNA (1)...(19): siRNA sense strand
ggaagacuuuguugggaac

SEQ ID NO: 2332487 - RNA, 19 nt, Homo sapiens
  misc_RNA (1)...(19): siRNA sense strand
auguuauacaguaggugaa

SEQ ID NO: 2332488 - RNA, 19 nt, Homo sapiens
  misc_RNA (1)...(19): siRNA sense strand
aguuaaaguuggaugugcu

SEQ ID NO: 2332489 - RNA, 19 nt, Homo sapiens
  misc_RNA (1)...(19): siRNA sense strand
aggaaacauuacagguucu

SEQ ID NO: 2332490 - RNA, 19 nt, Homo sapiens
  misc_RNA (1)...(19): siRNA sense strand
augacgauggcgaggaaga

SEQ ID NO: 2332491 - RNA, 19 nt, Homo sapiens
  misc_RNA (1)...(19): siRNA sense strand
acggaaugccagugguaaa

SEQ ID NO: 2332492 - RNA, 19 nt, Homo sapiens
  misc_RNA (1)...(19): siRNA sense strand
aggaagacuuuguugggaa

SEQ ID NO: 2332493 - RNA, 19 nt, Homo sapiens
  misc_RNA (1)...(19): siRNA sense strand
gcacagacuuugaaggauc

SEQ ID NO: 2332494 - RNA, 19 nt, Homo sapiens
  misc_RNA (1)...(19): siRNA sense strand
uggaacaggaacugaaauu

SEQ ID NO: 2332495 - RNA, 19 nt, Homo sapiens
  misc_RNA (1)...(19): siRNA sense strand
guauaaugcaacuuggaau

SEQ ID NO: 2332496 - RNA, 19 nt, Homo sapiens
  misc_RNA (1)...(19): siRNA sense strand
gagacgugguacucagcaa

SEQ ID NO: 2332497 - RNA, 19 nt, Homo sapiens
  misc_RNA (1)...(19): siRNA sense strand
ccaugaaagcugugguucu

SEQ ID NO: 2332498 - RNA, 19 nt, Homo sapiens
  misc_RNA (1)...(19): siRNA sense strand
gcacaaaaucaucaaucaa

SEQ ID NO: 2332499 - RNA, 19 nt, Homo sapiens
  misc_RNA (1)...(19): siRNA sense strand
aguuauauucacagcaaga

SEQ ID NO: 2332500 - RNA, 19 nt, Homo sapiens
  misc_RNA (1)...(19): siRNA sense strand
caaucaaaccgcggagaau

SEQ ID NO: 2332501 - RNA, 19 nt, Homo sapiens
  misc_RNA (1)...(19): siRNA sense strand
aguuggaugugcuggaaca

SEQ ID NO: 2332502 - RNA, 19 nt, Homo sapiens
  misc_RNA (1)...(19): siRNA sense strand
acuuaaagccgucggaucu

SEQ ID NO: 2332503 - RNA, 19 nt, Homo sapiens
  misc_RNA (1)...(19): siRNA sense strand
cugaagaugaaacaagaau

SEQ ID NO: 2332504 - RNA, 19 nt, Homo sapiens
  misc_RNA (1)...(19): siRNA sense strand
ugauuagacgaguuguaaa

SEQ ID NO: 2332505 - RNA, 19 nt, Homo sapiens
  misc_RNA (1)...(19): siRNA sense strand
cugagaaagguuaucaauu

SEQ ID NO: 2332506 - RNA, 19 nt, Homo sapiens
  misc_RNA (1)...(19): siRNA sense strand
agauaugcuaggaaacauu

SEQ ID NO: 2332507 - RNA, 19 nt, Homo sapiens
  misc_RNA (1)...(19): siRNA sense strand
gcacaaaggcaacggugac

SEQ ID NO: 2332508 - RNA, 19 nt, Homo sapiens
  misc_RNA (1)...(19): siRNA sense strand
ucaaucaaaccgcggagaa

SEQ ID NO: 2332509 - RNA, 19 nt, Homo sapiens
  misc_RNA (1)...(19): siRNA sense strand
ggaagacuuuguugggaac

SEQ ID NO: 2332510 - RNA, 19 nt, Homo sapiens
  misc_RNA (1)...(19): siRNA sense strand
auguuauacaguaggugaa

SEQ ID NO: 2332511 - RNA, 19 nt, Homo sapiens
  misc_RNA (1)...(19): siRNA sense strand
aguuaaaguuggaugugcu

SEQ ID NO: 2332512 - RNA, 19 nt, Homo sapiens
  misc_RNA (1)...(19): siRNA sense strand
aggaaacauuacagguucu

SEQ ID NO: 2332513 - RNA, 19 nt, Homo sapiens
  misc_RNA (1)...(19): siRNA sense strand
augacgauggcgaggaaga

SEQ ID NO: 2332514 - RNA, 19 nt, Homo sapiens
  misc_RNA (1)...(19): siRNA sense strand
acggaaugccagugguaaa

SEQ ID NO: 2332515 - RNA, 19 nt, Homo sapiens
  misc_RNA (1)...(19): siRNA sense strand
aggaagacuuuguugggaa

SEQ ID NO: 2332516 - RNA, 19 nt, Homo sapiens
  misc_RNA (1)...(19): siRNA sense strand
gcacagacuuugaaggauc

SEQ ID NO: 2332517 - RNA, 19 nt, Homo sapiens
  misc_RNA (1)...(19): siRNA sense strand
uggaacaggaacugaaauu

SEQ ID NO: 2332518 - RNA, 19 nt, Homo sapiens
  misc_RNA (1)...(19): siRNA sense strand
guauaaugcaacuuggaau

SEQ ID NO: 2332519 - RNA, 19 nt, Homo sapiens
  misc_RNA (1)...(19): siRNA sense strand
gagacgugguacucagcaa

SEQ ID NO: 2332520 - RNA, 19 nt, Homo sapiens
  misc_RNA (1)...(19): siRNA sense strand
ccaugaaagcugugguucu

SEQ ID NO: 2332521 - RNA, 19 nt, Homo sapiens
  misc_RNA (1)...(19): siRNA sense strand
gcacaaaaucaucaaucaa

SEQ ID NO: 2332522 - RNA, 19 nt, Homo sapiens
  misc_RNA (1)...(19): siRNA sense strand
aguuauauucacagcaaga

SEQ ID NO: 2332523 - RNA, 19 nt, Homo sapiens
  misc_RNA (1)...(19): siRNA sense strand
caaucaaaccgcggagaau

SEQ ID NO: 2332524 - RNA, 19 nt, Homo sapiens
  misc_RNA (1)...(19): siRNA sense strand
aguuggaugugcuggaaca

SEQ ID NO: 2332525 - RNA, 19 nt, Homo sapiens
  misc_RNA (1)...(19): siRNA sense strand
acuuaaagccgucggaucu

SEQ ID NO: 2332526 - RNA, 19 nt, Homo sapiens
  misc_RNA (1)...(19): siRNA sense strand
cugaagaugaaacaagaau

SEQ ID NO: 2332527 - RNA, 19 nt, Homo sapiens
  misc_RNA (1)...(19): siRNA sense strand
ugauuagacgaguuguaaa

SEQ ID NO: 2332528 - RNA, 19 nt, Homo sapiens
  misc_RNA (1)...(19): siRNA sense strand
cugagaaagguuaucaauu

SEQ ID NO: 2332529 - RNA, 19 nt, Homo sapiens
  misc_RNA (1)...(19): siRNA sense strand
agauaugcuaggaaacauu

SEQ ID NO: 2332530 - RNA, 19 nt, Homo sapiens
  misc_RNA (1)...(19): siRNA sense strand
gcacaaaggcaacggugac

SEQ ID NO: 2332531 - RNA, 19 nt, Homo sapiens
  misc_RNA (1)...(19): siRNA sense strand
ucaaucaaaccgcggagaa

SEQ ID NO: 2332532 - RNA, 19 nt, Homo sapiens
  misc_RNA (1)...(19): siRNA sense strand
ggaagacuuuguugggaac

SEQ ID NO: 2332533 - RNA, 19 nt, Homo sapiens
  misc_RNA (1)...(19): siRNA sense strand
auguuauacaguaggugaa

SEQ ID NO: 2332534 - RNA, 19 nt, Homo sapiens
  misc_RNA (1)...(19): siRNA sense strand
aguuaaaguuggaugugcu

SEQ ID NO: 2332535 - RNA, 19 nt, Homo sapiens
  misc_RNA (1)...(19): siRNA sense strand
aggaaacauuacagguucu

SEQ ID NO: 2332536 - RNA, 19 nt, Homo sapiens
  misc_RNA (1)...(19): siRNA sense strand
augacgauggcgaggaaga

SEQ ID NO: 2332537 - RNA, 19 nt, Homo sapiens
  misc_RNA (1)...(19): siRNA sense strand
acggaaugccagugguaaa

SEQ ID NO: 2332538 - RNA, 19 nt, Homo sapiens
  misc_RNA (1)...(19): siRNA sense strand
aggaagacuuuguugggaa

SEQ ID NO: 2332539 - RNA, 19 nt, Homo sapiens
  misc_RNA (1)...(19): siRNA sense strand
gcacagacuuugaaggauc

SEQ ID NO: 2332540 - RNA, 19 nt, Homo sapiens
  misc_RNA (1)...(19): siRNA sense strand
uggaacaggaacugaaauu

SEQ ID NO: 2332541 - RNA, 19 nt, Homo sapiens
  misc_RNA (1)...(19): siRNA sense strand
guauaaugcaacuuggaau

SEQ ID NO: 2332542 - RNA, 19 nt, Homo sapiens
  misc_RNA (1)...(19): siRNA sense strand
gagacgugguacucagcaa

SEQ ID NO: 2332543 - RNA, 19 nt, Homo sapiens
  misc_RNA (1)...(19): siRNA sense strand
ccaugaaagcugugguucu

SEQ ID NO: 2332544 - RNA, 19 nt, Homo sapiens
  misc_RNA (1)...(19): siRNA sense strand
gcacaaaaucaucaaucaa

SEQ ID NO: 2332545 - RNA, 19 nt, Homo sapiens
  misc_RNA (1)...(19): siRNA sense strand
aguuauauucacagcaaga

SEQ ID NO: 2332546 - RNA, 19 nt, Homo sapiens
  misc_RNA (1)...(19): siRNA sense strand
caaucaaaccgcggagaau

SEQ ID NO: 2332547 - RNA, 19 nt, Homo sapiens
  misc_RNA (1)...(19): siRNA sense strand
aguuggaugugcuggaaca

SEQ ID NO: 2332548 - RNA, 19 nt, Homo sapiens
  misc_RNA (1)...(19): siRNA sense strand
acuuaaagccgucggaucu

SEQ ID NO: 2332549 - RNA, 19 nt, Homo sapiens
  misc_RNA (1)...(19): siRNA sense strand
cugaagaugaaacaagaau

SEQ ID NO: 2332550 - RNA, 19 nt, Homo sapiens
  misc_RNA (1)...(19): siRNA sense strand
ugauuagacgaguuguaaa

SEQ ID NO: 2332551 - RNA, 19 nt, Homo sapiens
  misc_RNA (1)...(19): siRNA sense strand
cugagaaagguuaucaauu

SEQ ID NO: 2332552 - RNA, 19 nt, Homo sapiens
  misc_RNA (1)...(19): siRNA sense strand
agauaugcuaggaaacauu

SEQ ID NO: 2332553 - RNA, 19 nt, Homo sapiens
  misc_RNA (1)...(19): siRNA sense strand
gcacaaaggcaacggugac

SEQ ID NO: 2332554 - RNA, 19 nt, Homo sapiens
  misc_RNA (1)...(19): siRNA sense strand
ucaaucaaaccgcggagaa

SEQ ID NO: 2332555 - RNA, 19 nt, Homo sapiens
  misc_RNA (1)...(19): siRNA sense strand
ggaagacuuuguugggaac

SEQ ID NO: 2332556 - RNA, 19 nt, Homo sapiens
  misc_RNA (1)...(19): siRNA sense strand
auguuauacaguaggugaa

SEQ ID NO: 2332557 - RNA, 19 nt, Homo sapiens
  misc_RNA (1)...(19): siRNA sense strand
aguuaaaguuggaugugcu

SEQ ID NO: 2332558 - RNA, 19 nt, Homo sapiens
  misc_RNA (1)...(19): siRNA sense strand
aggaaacauuacagguucu

SEQ ID NO: 2332559 - RNA, 19 nt, Homo sapiens
  misc_RNA (1)...(19): siRNA sense strand
augacgauggcgaggaaga

SEQ ID NO: 2332560 - RNA, 19 nt, Homo sapiens
  misc_RNA (1)...(19): siRNA sense strand
acggaaugccagugguaaa

SEQ ID NO: 2332561 - RNA, 19 nt, Homo sapiens
  misc_RNA (1)...(19): siRNA sense strand
aggaagacuuuguugggaa

SEQ ID NO: 2332562 - RNA, 19 nt, Homo sapiens
  misc_RNA (1)...(19): siRNA sense strand
gcacagacuuugaaggauc

SEQ ID NO: 2332563 - RNA, 19 nt, Homo sapiens
  misc_RNA (1)...(19): siRNA sense strand
uggaacaggaacugaaauu

SEQ ID NO: 2332564 - RNA, 19 nt, Homo sapiens
  misc_RNA (1)...(19): siRNA sense strand
guauaaugcaacuuggaau

SEQ ID NO: 2332565 - RNA, 19 nt, Homo sapiens
  misc_RNA (1)...(19): siRNA sense strand
gagacgugguacucagcaa

SEQ ID NO: 2332566 - RNA, 19 nt, Homo sapiens
  misc_RNA (1)...(19): siRNA sense strand
ccaugaaagcugugguucu

SEQ ID NO: 2332567 - RNA, 19 nt, Homo sapiens
  misc_RNA (1)...(19): siRNA sense strand
gcacaaaaucaucaaucaa

SEQ ID NO: 2332568 - RNA, 19 nt, Homo sapiens
  misc_RNA (1)...(19): siRNA sense strand
aguuauauucacagcaaga

SEQ ID NO: 2332569 - RNA, 19 nt, Homo sapiens
  misc_RNA (1)...(19): siRNA sense strand
caaucaaaccgcggagaau

SEQ ID NO: 2332570 - RNA, 19 nt, Homo sapiens
  misc_RNA (1)...(19): siRNA sense strand
aguuggaugugcuggaaca

SEQ ID NO: 2332571 - RNA, 19 nt, Homo sapiens
  misc_RNA (1)...(19): siRNA sense strand
acuuaaagccgucggaucu

SEQ ID NO: 2332572 - RNA, 19 nt, Homo sapiens
  misc_RNA (1)...(19): siRNA sense strand
cugaagaugaaacaagaau

SEQ ID NO: 2332573 - RNA, 19 nt, Homo sapiens
  misc_RNA (1)...(19): siRNA sense strand
ugauuagacgaguuguaaa

SEQ ID NO: 2332574 - RNA, 19 nt, Homo sapiens
  misc_RNA (1)...(19): siRNA sense strand
cugagaaagguuaucaauu

SEQ ID NO: 2332575 - RNA, 19 nt, Homo sapiens
  misc_RNA (1)...(19): siRNA sense strand
agauaugcuaggaaacauu

SEQ ID NO: 2332576 - RNA, 19 nt, Homo sapiens
  misc_RNA (1)...(19): siRNA sense strand
gcacaaaggcaacggugac

SEQ ID NO: 2332577 - RNA, 19 nt, Homo sapiens
  misc_RNA (1)...(19): siRNA sense strand
ucaaucaaaccgcggagaa

SEQ ID NO: 2332578 - RNA, 19 nt, Homo sapiens
  misc_RNA (1)...(19): siRNA sense strand
ggaagacuuuguugggaac

SEQ ID NO: 2332579 - RNA, 19 nt, Homo sapiens
  misc_RNA (1)...(19): siRNA sense strand
auguuauacaguaggugaa

SEQ ID NO: 2332580 - RNA, 19 nt, Homo sapiens
  misc_RNA (1)...(19): siRNA sense strand
aguuaaaguuggaugugcu

SEQ ID NO: 2332581 - RNA, 19 nt, Homo sapiens
  misc_RNA (1)...(19): siRNA sense strand
aggaaacauuacagguucu

SEQ ID NO: 2332582 - RNA, 19 nt, Homo sapiens
  misc_RNA (1)...(19): siRNA sense strand
augacgauggcgaggaaga

SEQ ID NO: 2332583 - RNA, 19 nt, Homo sapiens
  misc_RNA (1)...(19): siRNA sense strand
ccauguggguggugagcua

SEQ ID NO: 2332584 - RNA, 19 nt, Homo sapiens
  misc_RNA (1)...(19): siRNA sense strand
uggucaaggugaagggcaa

SEQ ID NO: 2332585 - RNA, 19 nt, Homo sapiens
  misc_RNA (1)...(19): siRNA sense strand
ggaaagaggagaaggccau

SEQ ID NO: 2332586 - RNA, 19 nt, Homo sapiens
  misc_RNA (1)...(19): siRNA sense strand
auguggagcuggaggcaaa

SEQ ID NO: 2332587 - RNA, 19 nt, Homo sapiens
  misc_RNA (1)...(19): siRNA sense strand
ggcucauggugguguguaa

SEQ ID NO: 2332588 - RNA, 19 nt, Homo sapiens
  misc_RNA (1)...(19): siRNA sense strand
aggcaaacaaugagggugu

SEQ ID NO: 2332589 - RNA, 19 nt, Homo sapiens
  misc_RNA (1)...(19): siRNA sense strand
uugcagacauugagggcuu

SEQ ID NO: 2332590 - RNA, 19 nt, Homo sapiens
  misc_RNA (1)...(19): siRNA sense strand
agaaacggaaagaggagaa

SEQ ID NO: 2332591 - RNA, 19 nt, Homo sapiens
  misc_RNA (1)...(19): siRNA sense strand
cuaaaguggaugaacggaa

SEQ ID NO: 2332592 - RNA, 19 nt, Homo sapiens
  misc_RNA (1)...(19): siRNA sense strand
cggaaagaggagaaggcca

SEQ ID NO: 2332593 - RNA, 19 nt, Homo sapiens
  misc_RNA (1)...(19): siRNA sense strand
gguacuucuuccagaugaa

SEQ ID NO: 2332594 - RNA, 19 nt, Homo sapiens
  misc_RNA (1)...(19): siRNA sense strand
uggaaaagaucaagacgau

SEQ ID NO: 2332595 - RNA, 19 nt, Homo sapiens
  misc_RNA (1)...(19): siRNA sense strand
gcuacguggugcugggcau

SEQ ID NO: 2332596 - RNA, 19 nt, Homo sapiens
  misc_RNA (1)...(19): siRNA sense strand
gcauugaucagcugcggaa

SEQ ID NO: 2332597 - RNA, 19 nt, Homo sapiens
  misc_RNA (1)...(19): siRNA sense strand
ccagaugggcauugaugau

SEQ ID NO: 2332598 - RNA, 19 nt, Homo sapiens
  misc_RNA (1)...(19): siRNA sense strand
cugaggaugagguggauga

SEQ ID NO: 2332599 - RNA, 19 nt, Homo sapiens
  misc_RNA (1)...(19): siRNA sense strand
cccugaacccugaggauga

SEQ ID NO: 2332600 - RNA, 19 nt, Homo sapiens
  misc_RNA (1)...(19): siRNA sense strand
agaaggaggagauggagga

SEQ ID NO: 2332601 - RNA, 19 nt, Homo sapiens
  misc_RNA (1)...(19): siRNA sense strand
aggaggagauggaggagcu

SEQ ID NO: 2332602 - RNA, 19 nt, Homo sapiens
  misc_RNA (1)...(19): siRNA sense strand
gcaacuuaaccguggugau

SEQ ID NO: 2332603 - RNA, 19 nt, Homo sapiens
  misc_RNA (1)...(19): siRNA sense strand
aaucacugccugaggauca

SEQ ID NO: 2332604 - RNA, 19 nt, Homo sapiens
  misc_RNA (1)...(19): siRNA sense strand
acgcguaccucaaggagca

SEQ ID NO: 2332605 - RNA, 19 nt, Homo sapiens
  misc_RNA (1)...(19): siRNA sense strand
aggagauggaggagcuaca

SEQ ID NO: 2332606 - RNA, 19 nt, Homo sapiens
  misc_RNA (1)...(19): siRNA sense strand
uagacaugauugaggccau

SEQ ID NO: 2332607 - RNA, 19 nt, Homo sapiens
  misc_RNA (1)...(19): siRNA sense strand
acauacagaagcaugacaa

SEQ ID NO: 2332608 - RNA, 19 nt, Homo sapiens
  misc_RNA (1)...(19): siRNA sense strand
agaucuacauacagaagca

SEQ ID NO: 2332609 - RNA, 19 nt, Homo sapiens
  misc_RNA (1)...(19): siRNA sense strand
gcggagaaucacugccuga

SEQ ID NO: 2332610 - RNA, 19 nt, Homo sapiens
  misc_RNA (1)...(19): siRNA sense strand
gagaagaaguacucccgga

SEQ ID NO: 2332611 - RNA, 19 nt, Homo sapiens
  misc_RNA (1)...(19): siRNA sense strand
ccaccugcagcaugagaau

SEQ ID NO: 2332612 - RNA, 19 nt, Homo sapiens
  misc_RNA (1)...(19): siRNA sense strand
ugaggugacaggugugaau

SEQ ID NO: 2332613 - RNA, 19 nt, Homo sapiens
  misc_RNA (1)...(19): siRNA sense strand
cggaaauggcaguucgaug

SEQ ID NO: 2332614 - RNA, 19 nt, Homo sapiens
  misc_RNA (1)...(19): siRNA sense strand
agaagaaguacucccggaa

SEQ ID NO: 2332615 - RNA, 19 nt, Homo sapiens
  misc_RNA (1)...(19): siRNA sense strand
uggucaaggugaagggcaa

SEQ ID NO: 2332616 - RNA, 19 nt, Homo sapiens
  misc_RNA (1)...(19): siRNA sense strand
ggaaagaggagaaggccau

SEQ ID NO: 2332617 - RNA, 19 nt, Homo sapiens
  misc_RNA (1)...(19): siRNA sense strand
auguggagcuggaggcaaa

SEQ ID NO: 2332618 - RNA, 19 nt, Homo sapiens
  misc_RNA (1)...(19): siRNA sense strand
ggcucauggugguguguaa

SEQ ID NO: 2332619 - RNA, 19 nt, Homo sapiens
  misc_RNA (1)...(19): siRNA sense strand
aggcaaacaaugagggugu

SEQ ID NO: 2332620 - RNA, 19 nt, Homo sapiens
  misc_RNA (1)...(19): siRNA sense strand
uugcagacauugagggcuu

SEQ ID NO: 2332621 - RNA, 19 nt, Homo sapiens
  misc_RNA (1)...(19): siRNA sense strand
agaaacggaaagaggagaa

SEQ ID NO: 2332622 - RNA, 19 nt, Homo sapiens
  misc_RNA (1)...(19): siRNA sense strand
cuaaaguggaugaacggaa

SEQ ID NO: 2332623 - RNA, 19 nt, Homo sapiens
  misc_RNA (1)...(19): siRNA sense strand
cggaaagaggagaaggcca

SEQ ID NO: 2332624 - RNA, 19 nt, Homo sapiens
  misc_RNA (1)...(19): siRNA sense strand
gguacuucuuccagaugaa

SEQ ID NO: 2332625 - RNA, 19 nt, Homo sapiens
  misc_RNA (1)...(19): siRNA sense strand
uggaaaagaucaagacgau

SEQ ID NO: 2332626 - RNA, 19 nt, Homo sapiens
  misc_RNA (1)...(19): siRNA sense strand
gcauugaucagcugcggaa

SEQ ID NO: 2332627 - RNA, 19 nt, Homo sapiens
  misc_RNA (1)...(19): siRNA sense strand
ccagaugggcauugaugau

SEQ ID NO: 2332628 - RNA, 19 nt, Homo sapiens
  misc_RNA (1)...(19): siRNA sense strand
cugaggaugagguggauga

SEQ ID NO: 2332629 - RNA, 19 nt, Homo sapiens
  misc_RNA (1)...(19): siRNA sense strand
cccugaacccugaggauga

SEQ ID NO: 2332630 - RNA, 19 nt, Homo sapiens
  misc_RNA (1)...(19): siRNA sense strand
agaaggaggagauggagga

SEQ ID NO: 2332631 - RNA, 19 nt, Homo sapiens
  misc_RNA (1)...(19): siRNA sense strand
aggaggagauggaggagcu

SEQ ID NO: 2332632 - RNA, 19 nt, Homo sapiens
  misc_RNA (1)...(19): siRNA sense strand
gcaacuuaaccguggugau

SEQ ID NO: 2332633 - RNA, 19 nt, Homo sapiens
  misc_RNA (1)...(19): siRNA sense strand
aaucacugccugaggauca

SEQ ID NO: 2332634 - RNA, 19 nt, Homo sapiens
  misc_RNA (1)...(19): siRNA sense strand
acgcguaccucaaggagca

SEQ ID NO: 2332635 - RNA, 19 nt, Homo sapiens
  misc_RNA (1)...(19): siRNA sense strand
aggagauggaggagcuaca

SEQ ID NO: 2332636 - RNA, 19 nt, Homo sapiens
  misc_RNA (1)...(19): siRNA sense strand
uagacaugauugaggccau

SEQ ID NO: 2332637 - RNA, 19 nt, Homo sapiens
  misc_RNA (1)...(19): siRNA sense strand
acauacagaagcaugacaa

SEQ ID NO: 2332638 - RNA, 19 nt, Homo sapiens
  misc_RNA (1)...(19): siRNA sense strand
agaucuacauacagaagca

SEQ ID NO: 2332639 - RNA, 19 nt, Homo sapiens
  misc_RNA (1)...(19): siRNA sense strand
gcggagaaucacugccuga

SEQ ID NO: 2332640 - RNA, 19 nt, Homo sapiens
  misc_RNA (1)...(19): siRNA sense strand
gagaagaaguacucccgga

SEQ ID NO: 2332641 - RNA, 19 nt, Homo sapiens
  misc_RNA (1)...(19): siRNA sense strand
ccaccugcagcaugagaau

SEQ ID NO: 2332642 - RNA, 19 nt, Homo sapiens
  misc_RNA (1)...(19): siRNA sense strand
ugaggugacaggugugaau

SEQ ID NO: 2332643 - RNA, 19 nt, Homo sapiens
  misc_RNA (1)...(19): siRNA sense strand
cggaaauggcaguucgaug

SEQ ID NO: 2332644 - RNA, 19 nt, Homo sapiens
  misc_RNA (1)...(19): siRNA sense strand
agaagaaguacucccggaa

SEQ ID NO: 2332645 - RNA, 19 nt, Homo sapiens
  misc_RNA (1)...(19): siRNA sense strand
cgaaagaaggagaaagagu

SEQ ID NO: 2332646 - RNA, 19 nt, Homo sapiens
  misc_RNA (1)...(19): siRNA sense strand
aagacaaagcaaagcuaaa

SEQ ID NO: 2332647 - RNA, 19 nt, Homo sapiens
  misc_RNA (1)...(19): siRNA sense strand
agaaagaguuugaggagac

SEQ ID NO: 2332648 - RNA, 19 nt, Homo sapiens
  misc_RNA (1)...(19): siRNA sense strand
ccugaaucuggaagagaaa

SEQ ID NO: 2332649 - RNA, 19 nt, Homo sapiens
  misc_RNA (1)...(19): siRNA sense strand
ccaaggaggaggagggacu

SEQ ID NO: 2332650 - RNA, 19 nt, Homo sapiens
  misc_RNA (1)...(19): siRNA sense strand
gagauggaauugaggcaga

SEQ ID NO: 2332651 - RNA, 19 nt, Homo sapiens
  misc_RNA (1)...(19): siRNA sense strand
aggcagagcugauccggaa

SEQ ID NO: 2332652 - RNA, 19 nt, Homo sapiens
  misc_RNA (1)...(19): siRNA sense strand
gcuaaaagagcuggagaaa

SEQ ID NO: 2332653 - RNA, 19 nt, Homo sapiens
  misc_RNA (1)...(19): siRNA sense strand
caggaauggaagagcaaaa

SEQ ID NO: 2332654 - RNA, 19 nt, Homo sapiens
  misc_RNA (1)...(19): siRNA sense strand
cugaggagaugguggagau

SEQ ID NO: 2332655 - RNA, 19 nt, Homo sapiens
  misc_RNA (1)...(19): siRNA sense strand
gggcccuggcagugaguua

SEQ ID NO: 2332656 - RNA, 19 nt, Homo sapiens
  misc_RNA (1)...(19): siRNA sense strand
gagaaagaguuugaggaga

SEQ ID NO: 2332657 - RNA, 19 nt, Homo sapiens
  misc_RNA (1)...(19): siRNA sense strand
aagaagauccgaaggcgaa

SEQ ID NO: 2332658 - RNA, 19 nt, Homo sapiens
  misc_RNA (1)...(19): siRNA sense strand
cacucaagauuaagggaga

SEQ ID NO: 2332659 - RNA, 19 nt, Homo sapiens
  misc_RNA (1)...(19): siRNA sense strand
ugcgaaagaaggagaaaga

SEQ ID NO: 2332660 - RNA, 19 nt, Homo sapiens
  misc_RNA (1)...(19): siRNA sense strand
aggaggagcagcaggauga

SEQ ID NO: 2332661 - RNA, 19 nt, Homo sapiens
  misc_RNA (1)...(19): siRNA sense strand
ugaaacgggcagaagacaa

SEQ ID NO: 2332662 - RNA, 19 nt, Homo sapiens
  misc_RNA (1)...(19): siRNA sense strand
gugcgcgaguugagggaga

SEQ ID NO: 2332663 - RNA, 19 nt, Homo sapiens
  misc_RNA (1)...(19): siRNA sense strand
cugcaugaguguggaggua

SEQ ID NO: 2332664 - RNA, 19 nt, Homo sapiens
  misc_RNA (1)...(19): siRNA sense strand
ccucagagaagcaggagca

SEQ ID NO: 2332665 - RNA, 19 nt, Homo sapiens
  misc_RNA (1)...(19): siRNA sense strand
agacuaaggcccaugccaa

SEQ ID NO: 2332666 - RNA, 19 nt, Homo sapiens
  misc_RNA (1)...(19): siRNA sense strand
uggaagagaaagugcgcga

SEQ ID NO: 2332667 - RNA, 19 nt, Homo sapiens
  misc_RNA (1)...(19): siRNA sense strand
ugagggagacugugggaga

SEQ ID NO: 2332668 - RNA, 19 nt, Homo sapiens
  misc_RNA (1)...(19): siRNA sense strand
aggagaaacuagagacccu

SEQ ID NO: 2332669 - RNA, 19 nt, Homo sapiens
  misc_RNA (1)...(19): siRNA sense strand
aagcaagcgagcagaucua

SEQ ID NO: 2332670 - RNA, 19 nt, Homo sapiens
  misc_RNA (1)...(19): siRNA sense strand
gauuaagggagaggagcua

SEQ ID NO: 2332671 - RNA, 19 nt, Homo sapiens
  misc_RNA (1)...(19): siRNA sense strand
acacagucuacaugggcaa

SEQ ID NO: 2332672 - RNA, 19 nt, Homo sapiens
  misc_RNA (1)...(19): siRNA sense strand
cuuaagucccugagugaca

SEQ ID NO: 2332673 - RNA, 19 nt, Homo sapiens
  misc_RNA (1)...(19): siRNA sense strand
gugcaggaauggaagagca

SEQ ID NO: 2332674 - RNA, 19 nt, Homo sapiens
  misc_RNA (1)...(19): siRNA sense strand
cgaugaaugagaugaacga

SEQ ID NO: 2332675 - RNA, 19 nt, Homo sapiens
  misc_RNA (1)...(19): siRNA sense strand
caagaagauccgaaggcga

SEQ ID NO: 2332676 - RNA, 19 nt, Homo sapiens
  misc_RNA (1)...(19): siRNA sense strand
ccacuuuggacaaggagau

SEQ ID NO: 2332677 - RNA, 19 nt, Homo sapiens
  misc_RNA (1)...(19): siRNA sense strand
aagcgaugaaugagaugaa

SEQ ID NO: 2332678 - RNA, 19 nt, Homo sapiens
  misc_RNA (1)...(19): siRNA sense strand
guuauuaaggaguugaaga

SEQ ID NO: 2332679 - RNA, 19 nt, Homo sapiens
  misc_RNA (1)...(19): siRNA sense strand
cuggagaagaaguuggaca

SEQ ID NO: 2332680 - RNA, 19 nt, Homo sapiens
  misc_RNA (1)...(19): siRNA sense strand
gcaaaaugcaggagcagca

SEQ ID NO: 2332681 - RNA, 19 nt, Homo sapiens
  misc_RNA (1)...(19): siRNA sense strand
cgagaaaggaagccaagga

SEQ ID NO: 2332682 - RNA, 19 nt, Homo sapiens
  misc_RNA (1)...(19): siRNA sense strand
auuaaggaguugaagaagu

SEQ ID NO: 2332683 - RNA, 19 nt, Homo sapiens
  misc_RNA (1)...(19): siRNA sense strand
ugaaggagcggguggacga

SEQ ID NO: 2332684 - RNA, 19 nt, Homo sapiens
  misc_RNA (1)...(19): siRNA sense strand
ucgaccagcuggaggcaga

SEQ ID NO: 2332685 - RNA, 19 nt, Homo sapiens
  misc_RNA (1)...(19): siRNA sense strand
acuuggaagcgaugaauga

SEQ ID NO: 2332686 - RNA, 19 nt, Homo sapiens
  misc_RNA (1)...(19): siRNA sense strand
ggagaaagaguuugaggag

SEQ ID NO: 2332687 - RNA, 19 nt, Homo sapiens
  misc_RNA (1)...(19): siRNA sense strand
gagacuuggaagcgaugaa

SEQ ID NO: 2332688 - RNA, 19 nt, Homo sapiens
  misc_RNA (1)...(19): siRNA sense strand
agggagaggagcuaaguga

SEQ ID NO: 2332689 - RNA, 19 nt, Homo sapiens
  misc_RNA (1)...(19): siRNA sense strand
agcaaguggcucagcuuaa

SEQ ID NO: 2332690 - RNA, 19 nt, Homo sapiens
  misc_RNA (1)...(19): siRNA sense strand
uggacaaggagauggcuga

SEQ ID NO: 2332691 - RNA, 19 nt, Homo sapiens
  misc_RNA (1)...(19): siRNA sense strand
ccaaggaggagcagcagga

SEQ ID NO: 2332692 - RNA, 19 nt, Homo sapiens
  misc_RNA (1)...(19): siRNA sense strand
ggcagagaaggcagaacua

SEQ ID NO: 2332693 - RNA, 19 nt, Homo sapiens
  misc_RNA (1)...(19): siRNA sense strand
accugaaucuggaagagaa

SEQ ID NO: 2332694 - RNA, 19 nt, Homo sapiens
  misc_RNA (1)...(19): siRNA sense strand
ucaagggagcccagaugaa

SEQ ID NO: 2332695 - RNA, 19 nt, Homo sapiens
  misc_RNA (1)...(19): siRNA sense strand
gcuggaaguugugaggcaa

SEQ ID NO: 2332696 - RNA, 19 nt, Homo sapiens
  misc_RNA (1)...(19): siRNA sense strand
aagcaucuguggagaggca

SEQ ID NO: 2332697 - RNA, 19 nt, Homo sapiens
  misc_RNA (1)...(19): siRNA sense strand
gaggcaaaggaacgcuaua

SEQ ID NO: 2332698 - RNA, 19 nt, Homo sapiens
  misc_RNA (1)...(19): siRNA sense strand
aggagacgguugcagacua

SEQ ID NO: 2332699 - RNA, 19 nt, Homo sapiens
  misc_RNA (1)...(19): siRNA sense strand
aaucaaguuugcugagacu

SEQ ID NO: 2332700 - RNA, 19 nt, Homo sapiens
  misc_RNA (1)...(19): siRNA sense strand
ccgaacagccugaggacug

SEQ ID NO: 2332701 - RNA, 19 nt, Homo sapiens
  misc_RNA (1)...(19): siRNA sense strand
ggacagaugcuccugggau

SEQ ID NO: 2332702 - RNA, 19 nt, Homo sapiens
  misc_RNA (1)...(19): siRNA sense strand
cgaaagaaggagaaagagu

SEQ ID NO: 2332703 - RNA, 19 nt, Homo sapiens
  misc_RNA (1)...(19): siRNA sense strand
aagacaaagcaaagcuaaa

SEQ ID NO: 2332704 - RNA, 19 nt, Homo sapiens
  misc_RNA (1)...(19): siRNA sense strand
agaaagaguuugaggagac

SEQ ID NO: 2332705 - RNA, 19 nt, Homo sapiens
  misc_RNA (1)...(19): siRNA sense strand
ccugaaucuggaagagaaa

SEQ ID NO: 2332706 - RNA, 19 nt, Homo sapiens
  misc_RNA (1)...(19): siRNA sense strand
ccaaggaggaggagggacu

SEQ ID NO: 2332707 - RNA, 19 nt, Homo sapiens
  misc_RNA (1)...(19): siRNA sense strand
gagauggaauugaggcaga

SEQ ID NO: 2332708 - RNA, 19 nt, Homo sapiens
  misc_RNA (1)...(19): siRNA sense strand
aggcagagcugauccggaa

SEQ ID NO: 2332709 - RNA, 19 nt, Homo sapiens
  misc_RNA (1)...(19): siRNA sense strand
gcuaaaagagcuggagaaa

SEQ ID NO: 2332710 - RNA, 19 nt, Homo sapiens
  misc_RNA (1)...(19): siRNA sense strand
caggaauggaagagcaaaa

SEQ ID NO: 2332711 - RNA, 19 nt, Homo sapiens
  misc_RNA (1)...(19): siRNA sense strand
cugaggagaugguggagau

SEQ ID NO: 2332712 - RNA, 19 nt, Homo sapiens
  misc_RNA (1)...(19): siRNA sense strand
gggcccuggcagugaguua

SEQ ID NO: 2332713 - RNA, 19 nt, Homo sapiens
  misc_RNA (1)...(19): siRNA sense strand
gagaaagaguuugaggaga

SEQ ID NO: 2332714 - RNA, 19 nt, Homo sapiens
  misc_RNA (1)...(19): siRNA sense strand
aagaagauccgaaggcgaa

SEQ ID NO: 2332715 - RNA, 19 nt, Homo sapiens
  misc_RNA (1)...(19): siRNA sense strand
cacucaagauuaagggaga

SEQ ID NO: 2332716 - RNA, 19 nt, Homo sapiens
  misc_RNA (1)...(19): siRNA sense strand
ugcgaaagaaggagaaaga

SEQ ID NO: 2332717 - RNA, 19 nt, Homo sapiens
  misc_RNA (1)...(19): siRNA sense strand
aggaggagcagcaggauga

SEQ ID NO: 2332718 - RNA, 19 nt, Homo sapiens
  misc_RNA (1)...(19): siRNA sense strand
ugaaacgggcagaagacaa

SEQ ID NO: 2332719 - RNA, 19 nt, Homo sapiens
  misc_RNA (1)...(19): siRNA sense strand
gugcgcgaguugagggaga

SEQ ID NO: 2332720 - RNA, 19 nt, Homo sapiens
  misc_RNA (1)...(19): siRNA sense strand
cugcaugaguguggaggua

SEQ ID NO: 2332721 - RNA, 19 nt, Homo sapiens
  misc_RNA (1)...(19): siRNA sense strand
ccucagagaagcaggagca

SEQ ID NO: 2332722 - RNA, 19 nt, Homo sapiens
  misc_RNA (1)...(19): siRNA sense strand
agacuaaggcccaugccaa

SEQ ID NO: 2332723 - RNA, 19 nt, Homo sapiens
  misc_RNA (1)...(19): siRNA sense strand
uggaagagaaagugcgcga

SEQ ID NO: 2332724 - RNA, 19 nt, Homo sapiens
  misc_RNA (1)...(19): siRNA sense strand
ugagggagacugugggaga

SEQ ID NO: 2332725 - RNA, 19 nt, Homo sapiens
  misc_RNA (1)...(19): siRNA sense strand
aggagaaacuagagacccu

SEQ ID NO: 2332726 - RNA, 19 nt, Homo sapiens
  misc_RNA (1)...(19): siRNA sense strand
aagcaagcgagcagaucua

SEQ ID NO: 2332727 - RNA, 19 nt, Homo sapiens
  misc_RNA (1)...(19): siRNA sense strand
gauuaagggagaggagcua

SEQ ID NO: 2332728 - RNA, 19 nt, Homo sapiens
  misc_RNA (1)...(19): siRNA sense strand
acacagucuacaugggcaa

SEQ ID NO: 2332729 - RNA, 19 nt, Homo sapiens
  misc_RNA (1)...(19): siRNA sense strand
cuuaagucccugagugaca

SEQ ID NO: 2332730 - RNA, 19 nt, Homo sapiens
  misc_RNA (1)...(19): siRNA sense strand
gugcaggaauggaagagca

SEQ ID NO: 2332731 - RNA, 19 nt, Homo sapiens
  misc_RNA (1)...(19): siRNA sense strand
cgaugaaugagaugaacga

SEQ ID NO: 2332732 - RNA, 19 nt, Homo sapiens
  misc_RNA (1)...(19): siRNA sense strand
caagaagauccgaaggcga

SEQ ID NO: 2332733 - RNA, 19 nt, Homo sapiens
  misc_RNA (1)...(19): siRNA sense strand
ccacuuuggacaaggagau

SEQ ID NO: 2332734 - RNA, 19 nt, Homo sapiens
  misc_RNA (1)...(19): siRNA sense strand
aagcgaugaaugagaugaa

SEQ ID NO: 2332735 - RNA, 19 nt, Homo sapiens
  misc_RNA (1)...(19): siRNA sense strand
guuauuaaggaguugaaga

SEQ ID NO: 2332736 - RNA, 19 nt, Homo sapiens
  misc_RNA (1)...(19): siRNA sense strand
cuggagaagaaguuggaca

SEQ ID NO: 2332737 - RNA, 19 nt, Homo sapiens
  misc_RNA (1)...(19): siRNA sense strand
gcaaaaugcaggagcagca

SEQ ID NO: 2332738 - RNA, 19 nt, Homo sapiens
  misc_RNA (1)...(19): siRNA sense strand
cgagaaaggaagccaagga

SEQ ID NO: 2332739 - RNA, 19 nt, Homo sapiens
  misc_RNA (1)...(19): siRNA sense strand
auuaaggaguugaagaagu

SEQ ID NO: 2332740 - RNA, 19 nt, Homo sapiens
  misc_RNA (1)...(19): siRNA sense strand
ugaaggagcggguggacga

SEQ ID NO: 2332741 - RNA, 19 nt, Homo sapiens
  misc_RNA (1)...(19): siRNA sense strand
ucgaccagcuggaggcaga

SEQ ID NO: 2332742 - RNA, 19 nt, Homo sapiens
  misc_RNA (1)...(19): siRNA sense strand
acuuggaagcgaugaauga

SEQ ID NO: 2332743 - RNA, 19 nt, Homo sapiens
  misc_RNA (1)...(19): siRNA sense strand
ggagaaagaguuugaggag

SEQ ID NO: 2332744 - RNA, 19 nt, Homo sapiens
  misc_RNA (1)...(19): siRNA sense strand
gagacuuggaagcgaugaa

SEQ ID NO: 2332745 - RNA, 19 nt, Homo sapiens
  misc_RNA (1)...(19): siRNA sense strand
agggagaggagcuaaguga

SEQ ID NO: 2332746 - RNA, 19 nt, Homo sapiens
  misc_RNA (1)...(19): siRNA sense strand
agcaaguggcucagcuuaa

SEQ ID NO: 2332747 - RNA, 19 nt, Homo sapiens
  misc_RNA (1)...(19): siRNA sense strand
uggacaaggagauggcuga

SEQ ID NO: 2332748 - RNA, 19 nt, Homo sapiens
  misc_RNA (1)...(19): siRNA sense strand
ccaaggaggagcagcagga

SEQ ID NO: 2332749 - RNA, 19 nt, Homo sapiens
  misc_RNA (1)...(19): siRNA sense strand
ggcagagaaggcagaacua

SEQ ID NO: 2332750 - RNA, 19 nt, Homo sapiens
  misc_RNA (1)...(19): siRNA sense strand
accugaaucuggaagagaa

SEQ ID NO: 2332751 - RNA, 19 nt, Homo sapiens
  misc_RNA (1)...(19): siRNA sense strand
ucaagggagcccagaugaa

SEQ ID NO: 2332752 - RNA, 19 nt, Homo sapiens
  misc_RNA (1)...(19): siRNA sense strand
gcuggaaguugugaggcaa

SEQ ID NO: 2332753 - RNA, 19 nt, Homo sapiens
  misc_RNA (1)...(19): siRNA sense strand
aagcaucuguggagaggca

SEQ ID NO: 2332754 - RNA, 19 nt, Homo sapiens
  misc_RNA (1)...(19): siRNA sense strand
gaggcaaaggaacgcuaua

SEQ ID NO: 2332755 - RNA, 19 nt, Homo sapiens
  misc_RNA (1)...(19): siRNA sense strand
aggagacgguugcagacua

SEQ ID NO: 2332756 - RNA, 19 nt, Homo sapiens
  misc_RNA (1)...(19): siRNA sense strand
aaucaaguuugcugagacu

SEQ ID NO: 2332757 - RNA, 19 nt, Homo sapiens
  misc_RNA (1)...(19): siRNA sense strand
ccgaacagccugaggacug

SEQ ID NO: 2332758 - RNA, 19 nt, Homo sapiens
  misc_RNA (1)...(19): siRNA sense strand
ggacagaugcuccugggau

SEQ ID NO: 2332759 - RNA, 19 nt, Homo sapiens
  misc_RNA (1)...(19): siRNA sense strand
cagcaaucacucugagaaa

SEQ ID NO: 2332760 - RNA, 19 nt, Homo sapiens
  misc_RNA (1)...(19): siRNA sense strand
gcagaaaagaaaagaggaa

SEQ ID NO: 2332761 - RNA, 19 nt, Homo sapiens
  misc_RNA (1)...(19): siRNA sense strand
aauuagaaccagaggaaca

SEQ ID NO: 2332762 - RNA, 19 nt, Homo sapiens
  misc_RNA (1)...(19): siRNA sense strand
acugaaauucggagacaua

SEQ ID NO: 2332763 - RNA, 19 nt, Homo sapiens
  misc_RNA (1)...(19): siRNA sense strand
ccaaagaagaagaucaaaa

SEQ ID NO: 2332764 - RNA, 19 nt, Homo sapiens
  misc_RNA (1)...(19): siRNA sense strand
caugaaagcagaaaagaaa

SEQ ID NO: 2332765 - RNA, 19 nt, Homo sapiens
  misc_RNA (1)...(19): siRNA sense strand
gggaaacacaauucagcaa

SEQ ID NO: 2332766 - RNA, 19 nt, Homo sapiens
  misc_RNA (1)...(19): siRNA sense strand
ggaacaaaauagaccaaau

SEQ ID NO: 2332767 - RNA, 19 nt, Homo sapiens
  misc_RNA (1)...(19): siRNA sense strand
cagagaaagcauugaaaau

SEQ ID NO: 2332768 - RNA, 19 nt, Homo sapiens
  misc_RNA (1)...(19): siRNA sense strand
acacaagaccacaugaaau

SEQ ID NO: 2332769 - RNA, 19 nt, Homo sapiens
  misc_RNA (1)...(19): siRNA sense strand
gcaugaaagcagaaaagaa

SEQ ID NO: 2332770 - RNA, 19 nt, Homo sapiens
  misc_RNA (1)...(19): siRNA sense strand
guuaaaauagccuggaaaa

SEQ ID NO: 2332771 - RNA, 19 nt, Homo sapiens
  misc_RNA (1)...(19): siRNA sense strand
caaccaaacaagccagcaa

SEQ ID NO: 2332772 - RNA, 19 nt, Homo sapiens
  misc_RNA (1)...(19): siRNA sense strand
aagaggugcccgagaauau

SEQ ID NO: 2332773 - RNA, 19 nt, Homo sapiens
  misc_RNA (1)...(19): siRNA sense strand
uggauuugcagaaguguaa

SEQ ID NO: 2332774 - RNA, 19 nt, Homo sapiens
  misc_RNA (1)...(19): siRNA sense strand
ugccaaagaagaagaucaa

SEQ ID NO: 2332775 - RNA, 19 nt, Homo sapiens
  misc_RNA (1)...(19): siRNA sense strand
augaagaauuacuggcuga

SEQ ID NO: 2332776 - RNA, 19 nt, Homo sapiens
  misc_RNA (1)...(19): siRNA sense strand
gugccaaagaagaagauca

SEQ ID NO: 2332777 - RNA, 19 nt, Homo sapiens
  misc_RNA (1)...(19): siRNA sense strand
ugggaaauuuaucgaucaa

SEQ ID NO: 2332778 - RNA, 19 nt, Homo sapiens
  misc_RNA (1)...(19): siRNA sense strand
acacgaaaucaaagcauga

SEQ ID NO: 2332779 - RNA, 19 nt, Homo sapiens
  misc_RNA (1)...(19): siRNA sense strand
gaaacaaaagauucggaaa

SEQ ID NO: 2332780 - RNA, 19 nt, Homo sapiens
  misc_RNA (1)...(19): siRNA sense strand
cuacaccaaaccagagaaa

SEQ ID NO: 2332781 - RNA, 19 nt, Homo sapiens
  misc_RNA (1)...(19): siRNA sense strand
acaccaaaccagagaaaug

SEQ ID NO: 2332782 - RNA, 19 nt, Homo sapiens
  misc_RNA (1)...(19): siRNA sense strand
aagccaacgcagaguguau

SEQ ID NO: 2332783 - RNA, 19 nt, Homo sapiens
  misc_RNA (1)...(19): siRNA sense strand
aggaggaugccuuugauaa

SEQ ID NO: 2332784 - RNA, 19 nt, Homo sapiens
  misc_RNA (1)...(19): siRNA sense strand
ugauaacaacagugacauu

SEQ ID NO: 2332785 - RNA, 19 nt, Homo sapiens
  misc_RNA (1)...(19): siRNA sense strand
accaaauaccagucauaua

SEQ ID NO: 2332786 - RNA, 19 nt, Homo sapiens
  misc_RNA (1)...(19): siRNA sense strand
gcuuuggugcaguuagaaa

SEQ ID NO: 2332787 - RNA, 19 nt, Homo sapiens
  misc_RNA (1)...(19): siRNA sense strand
cacaugaaauucuggaaaa

SEQ ID NO: 2332788 - RNA, 19 nt, Homo sapiens
  misc_RNA (1)...(19): siRNA sense strand
gcuuauaauuucuacacca

SEQ ID NO: 2332789 - RNA, 19 nt, Homo sapiens
  misc_RNA (1)...(19): siRNA sense strand
cacaagugcggaagaggaa

SEQ ID NO: 2332790 - RNA, 19 nt, Homo sapiens
  misc_RNA (1)...(19): siRNA sense strand
agguugugccaaagaagaa

SEQ ID NO: 2332791 - RNA, 19 nt, Homo sapiens
  misc_RNA (1)...(19): siRNA sense strand
ccuccaaaaccgaaguuaa

SEQ ID NO: 2332792 - RNA, 19 nt, Homo sapiens
  misc_RNA (1)...(19): siRNA sense strand
ugaagaugguggccagaca

SEQ ID NO: 2332793 - RNA, 19 nt, Homo sapiens
  misc_RNA (1)...(19): siRNA sense strand
cugaagagcgcaagucaca

SEQ ID NO: 2332794 - RNA, 19 nt, Homo sapiens
  misc_RNA (1)...(19): siRNA sense strand
acgaaaucaaagcaugaaa

SEQ ID NO: 2332795 - RNA, 19 nt, Homo sapiens
  misc_RNA (1)...(19): siRNA sense strand
caagaucugaagagcgcaa

SEQ ID NO: 2332796 - RNA, 19 nt, Homo sapiens
  misc_RNA (1)...(19): siRNA sense strand
gaccaagaucugugcugaa

SEQ ID NO: 2332797 - RNA, 19 nt, Homo sapiens
  misc_RNA (1)...(19): siRNA sense strand
augcaagggaucaugggaa

SEQ ID NO: 2332798 - RNA, 19 nt, Homo sapiens
  misc_RNA (1)...(19): siRNA sense strand
cagaaaagaaaagaggaaa

SEQ ID NO: 2332799 - RNA, 19 nt, Homo sapiens
  misc_RNA (1)...(19): siRNA sense strand
ugaagaggcuuuaucccaa

SEQ ID NO: 2332800 - RNA, 19 nt, Homo sapiens
  misc_RNA (1)...(19): siRNA sense strand
cuccaaaaccgaaguuaaa

SEQ ID NO: 2332801 - RNA, 19 nt, Homo sapiens
  misc_RNA (1)...(19): siRNA sense strand
gggaauugguaacaaaaca

SEQ ID NO: 2332802 - RNA, 19 nt, Homo sapiens
  misc_RNA (1)...(19): siRNA sense strand
agaagaaagaauagaacag

SEQ ID NO: 2332803 - RNA, 19 nt, Homo sapiens
  misc_RNA (1)...(19): siRNA sense strand
ucagaaauuccaaacacaa

SEQ ID NO: 2332804 - RNA, 19 nt, Homo sapiens
  misc_RNA (1)...(19): siRNA sense strand
guuuauucaacaaagggaa

SEQ ID NO: 2332805 - RNA, 19 nt, Homo sapiens
  misc_RNA (1)...(19): siRNA sense strand
aagaagcaacagagaagau

SEQ ID NO: 2332806 - RNA, 19 nt, Homo sapiens
  misc_RNA (1)...(19): siRNA sense strand
caucaaucaguguguauga

SEQ ID NO: 2332807 - RNA, 19 nt, Homo sapiens
  misc_RNA (1)...(19): siRNA sense strand
aguguuugcucuucagaau

SEQ ID NO: 2332808 - RNA, 19 nt, Homo sapiens
  misc_RNA (1)...(19): siRNA sense strand
aaucaaagcaugaaagcag

SEQ ID NO: 2332809 - RNA, 19 nt, Homo sapiens
  misc_RNA (1)...(19): siRNA sense strand
aagggaagaaccaguacua

SEQ ID NO: 2332810 - RNA, 19 nt, Homo sapiens
  misc_RNA (1)...(19): siRNA sense strand
acacaagugcggaagagga

SEQ ID NO: 2332811 - RNA, 19 nt, Homo sapiens
  misc_RNA (1)...(19): siRNA sense strand
uuugauaacaacagugaca

SEQ ID NO: 2332812 - RNA, 19 nt, Homo sapiens
  misc_RNA (1)...(19): siRNA sense strand
caguagaaaagaagcaaca

SEQ ID NO: 2332813 - RNA, 19 nt, Homo sapiens
  misc_RNA (1)...(19): siRNA sense strand
agaccaaaugagaggguug

SEQ ID NO: 2332814 - RNA, 19 nt, Homo sapiens
  misc_RNA (1)...(19): siRNA sense strand
ccaagaucugugcugaaua

SEQ ID NO: 2332815 - RNA, 19 nt, Homo sapiens
  misc_RNA (1)...(19): siRNA sense strand
auccagaauggcagggaau

SEQ ID NO: 2332816 - RNA, 19 nt, Homo sapiens
  misc_RNA (1)...(19): siRNA sense strand
uaaaugaaguacaggcaag

SEQ ID NO: 2332817 - RNA, 19 nt, Homo sapiens
  misc_RNA (1)...(19): siRNA sense strand
ucagaaugcuacaggggau

SEQ ID NO: 2332818 - RNA, 19 nt, Homo sapiens
  misc_RNA (1)...(19): siRNA sense strand
cagcaaucacucugagaaa

SEQ ID NO: 2332819 - RNA, 19 nt, Homo sapiens
  misc_RNA (1)...(19): siRNA sense strand
gcagaaaagaaaagaggaa

SEQ ID NO: 2332820 - RNA, 19 nt, Homo sapiens
  misc_RNA (1)...(19): siRNA sense strand
aauuagaaccagaggaaca

SEQ ID NO: 2332821 - RNA, 19 nt, Homo sapiens
  misc_RNA (1)...(19): siRNA sense strand
acugaaauucggagacaua

SEQ ID NO: 2332822 - RNA, 19 nt, Homo sapiens
  misc_RNA (1)...(19): siRNA sense strand
ccaaagaagaagaucaaaa

SEQ ID NO: 2332823 - RNA, 19 nt, Homo sapiens
  misc_RNA (1)...(19): siRNA sense strand
caugaaagcagaaaagaaa

SEQ ID NO: 2332824 - RNA, 19 nt, Homo sapiens
  misc_RNA (1)...(19): siRNA sense strand
gggaaacacaauucagcaa

SEQ ID NO: 2332825 - RNA, 19 nt, Homo sapiens
  misc_RNA (1)...(19): siRNA sense strand
ggaacaaaauagaccaaau

SEQ ID NO: 2332826 - RNA, 19 nt, Homo sapiens
  misc_RNA (1)...(19): siRNA sense strand
cagagaaagcauugaaaau

SEQ ID NO: 2332827 - RNA, 19 nt, Homo sapiens
  misc_RNA (1)...(19): siRNA sense strand
acacaagaccacaugaaau

SEQ ID NO: 2332828 - RNA, 19 nt, Homo sapiens
  misc_RNA (1)...(19): siRNA sense strand
gcaugaaagcagaaaagaa

SEQ ID NO: 2332829 - RNA, 19 nt, Homo sapiens
  misc_RNA (1)...(19): siRNA sense strand
guuaaaauagccuggaaaa

SEQ ID NO: 2332830 - RNA, 19 nt, Homo sapiens
  misc_RNA (1)...(19): siRNA sense strand
caaccaaacaagccagcaa

SEQ ID NO: 2332831 - RNA, 19 nt, Homo sapiens
  misc_RNA (1)...(19): siRNA sense strand
aagaggugcccgagaauau

SEQ ID NO: 2332832 - RNA, 19 nt, Homo sapiens
  misc_RNA (1)...(19): siRNA sense strand
uggauuugcagaaguguaa

SEQ ID NO: 2332833 - RNA, 19 nt, Homo sapiens
  misc_RNA (1)...(19): siRNA sense strand
ugccaaagaagaagaucaa

SEQ ID NO: 2332834 - RNA, 19 nt, Homo sapiens
  misc_RNA (1)...(19): siRNA sense strand
augaagaauuacuggcuga

SEQ ID NO: 2332835 - RNA, 19 nt, Homo sapiens
  misc_RNA (1)...(19): siRNA sense strand
gugccaaagaagaagauca

SEQ ID NO: 2332836 - RNA, 19 nt, Homo sapiens
  misc_RNA (1)...(19): siRNA sense strand
ugggaaauuuaucgaucaa

SEQ ID NO: 2332837 - RNA, 19 nt, Homo sapiens
  misc_RNA (1)...(19): siRNA sense strand
acacgaaaucaaagcauga

SEQ ID NO: 2332838 - RNA, 19 nt, Homo sapiens
  misc_RNA (1)...(19): siRNA sense strand
gaaacaaaagauucggaaa

SEQ ID NO: 2332839 - RNA, 19 nt, Homo sapiens
  misc_RNA (1)...(19): siRNA sense strand
cuacaccaaaccagagaaa

SEQ ID NO: 2332840 - RNA, 19 nt, Homo sapiens
  misc_RNA (1)...(19): siRNA sense strand
acaccaaaccagagaaaug

SEQ ID NO: 2332841 - RNA, 19 nt, Homo sapiens
  misc_RNA (1)...(19): siRNA sense strand
aagccaacgcagaguguau

SEQ ID NO: 2332842 - RNA, 19 nt, Homo sapiens
  misc_RNA (1)...(19): siRNA sense strand
aggaggaugccuuugauaa

SEQ ID NO: 2332843 - RNA, 19 nt, Homo sapiens
  misc_RNA (1)...(19): siRNA sense strand
ugauaacaacagugacauu

SEQ ID NO: 2332844 - RNA, 19 nt, Homo sapiens
  misc_RNA (1)...(19): siRNA sense strand
accaaauaccagucauaua

SEQ ID NO: 2332845 - RNA, 19 nt, Homo sapiens
  misc_RNA (1)...(19): siRNA sense strand
gcuuuggugcaguuagaaa

SEQ ID NO: 2332846 - RNA, 19 nt, Homo sapiens
  misc_RNA (1)...(19): siRNA sense strand
cacaugaaauucuggaaaa

SEQ ID NO: 2332847 - RNA, 19 nt, Homo sapiens
  misc_RNA (1)...(19): siRNA sense strand
gcuuauaauuucuacacca

SEQ ID NO: 2332848 - RNA, 19 nt, Homo sapiens
  misc_RNA (1)...(19): siRNA sense strand
cacaagugcggaagaggaa

SEQ ID NO: 2332849 - RNA, 19 nt, Homo sapiens
  misc_RNA (1)...(19): siRNA sense strand
agguugugccaaagaagaa

SEQ ID NO: 2332850 - RNA, 19 nt, Homo sapiens
  misc_RNA (1)...(19): siRNA sense strand
ccuccaaaaccgaaguuaa

SEQ ID NO: 2332851 - RNA, 19 nt, Homo sapiens
  misc_RNA (1)...(19): siRNA sense strand
ugaagaugguggccagaca

SEQ ID NO: 2332852 - RNA, 19 nt, Homo sapiens
  misc_RNA (1)...(19): siRNA sense strand
cugaagagcgcaagucaca

SEQ ID NO: 2332853 - RNA, 19 nt, Homo sapiens
  misc_RNA (1)...(19): siRNA sense strand
acgaaaucaaagcaugaaa

SEQ ID NO: 2332854 - RNA, 19 nt, Homo sapiens
  misc_RNA (1)...(19): siRNA sense strand
caagaucugaagagcgcaa

SEQ ID NO: 2332855 - RNA, 19 nt, Homo sapiens
  misc_RNA (1)...(19): siRNA sense strand
gaccaagaucugugcugaa

SEQ ID NO: 2332856 - RNA, 19 nt, Homo sapiens
  misc_RNA (1)...(19): siRNA sense strand
augcaagggaucaugggaa

SEQ ID NO: 2332857 - RNA, 19 nt, Homo sapiens
  misc_RNA (1)...(19): siRNA sense strand
cagaaaagaaaagaggaaa

SEQ ID NO: 2332858 - RNA, 19 nt, Homo sapiens
  misc_RNA (1)...(19): siRNA sense strand
ugaagaggcuuuaucccaa

SEQ ID NO: 2332859 - RNA, 19 nt, Homo sapiens
  misc_RNA (1)...(19): siRNA sense strand
cuccaaaaccgaaguuaaa

SEQ ID NO: 2332860 - RNA, 19 nt, Homo sapiens
  misc_RNA (1)...(19): siRNA sense strand
gggaauugguaacaaaaca

SEQ ID NO: 2332861 - RNA, 19 nt, Homo sapiens
  misc_RNA (1)...(19): siRNA sense strand
agaagaaagaauagaacag

SEQ ID NO: 2332862 - RNA, 19 nt, Homo sapiens
  misc_RNA (1)...(19): siRNA sense strand
ucagaaauuccaaacacaa

SEQ ID NO: 2332863 - RNA, 19 nt, Homo sapiens
  misc_RNA (1)...(19): siRNA sense strand
guuuauucaacaaagggaa

SEQ ID NO: 2332864 - RNA, 19 nt, Homo sapiens
  misc_RNA (1)...(19): siRNA sense strand
aagaagcaacagagaagau

SEQ ID NO: 2332865 - RNA, 19 nt, Homo sapiens
  misc_RNA (1)...(19): siRNA sense strand
caucaaucaguguguauga

SEQ ID NO: 2332866 - RNA, 19 nt, Homo sapiens
  misc_RNA (1)...(19): siRNA sense strand
aguguuugcucuucagaau

SEQ ID NO: 2332867 - RNA, 19 nt, Homo sapiens
  misc_RNA (1)...(19): siRNA sense strand
aaucaaagcaugaaagcag

SEQ ID NO: 2332868 - RNA, 19 nt, Homo sapiens
  misc_RNA (1)...(19): siRNA sense strand
aagggaagaaccaguacua

SEQ ID NO: 2332869 - RNA, 19 nt, Homo sapiens
  misc_RNA (1)...(19): siRNA sense strand
acacaagugcggaagagga

SEQ ID NO: 2332870 - RNA, 19 nt, Homo sapiens
  misc_RNA (1)...(19): siRNA sense strand
uuugauaacaacagugaca

SEQ ID NO: 2332871 - RNA, 19 nt, Homo sapiens
  misc_RNA (1)...(19): siRNA sense strand
caguagaaaagaagcaaca

SEQ ID NO: 2332872 - RNA, 19 nt, Homo sapiens
  misc_RNA (1)...(19): siRNA sense strand
agaccaaaugagaggguug

SEQ ID NO: 2332873 - RNA, 19 nt, Homo sapiens
  misc_RNA (1)...(19): siRNA sense strand
ccaagaucugugcugaaua

SEQ ID NO: 2332874 - RNA, 19 nt, Homo sapiens
  misc_RNA (1)...(19): siRNA sense strand
auccagaauggcagggaau

SEQ ID NO: 2332875 - RNA, 19 nt, Homo sapiens
  misc_RNA (1)...(19): siRNA sense strand
uaaaugaaguacaggcaag

SEQ ID NO: 2332876 - RNA, 19 nt, Homo sapiens
  misc_RNA (1)...(19): siRNA sense strand
ucagaaugcuacaggggau

SEQ ID NO: 2332877 - RNA, 19 nt, Homo sapiens
  misc_RNA (1)...(19): siRNA sense strand
ggacaaagacaauucccaa

SEQ ID NO: 2332878 - RNA, 19 nt, Homo sapiens
  misc_RNA (1)...(19): siRNA sense strand
aguacaagcuauucggaga

SEQ ID NO: 2332879 - RNA, 19 nt, Homo sapiens
  misc_RNA (1)...(19): siRNA sense strand
gugcugaggaccuggagaa

SEQ ID NO: 2332880 - RNA, 19 nt, Homo sapiens
  misc_RNA (1)...(19): siRNA sense strand
gucugaugauggagaguuu

SEQ ID NO: 2332881 - RNA, 19 nt, Homo sapiens
  misc_RNA (1)...(19): siRNA sense strand
aggagaaguacaagcuauu

SEQ ID NO: 2332882 - RNA, 19 nt, Homo sapiens
  misc_RNA (1)...(19): siRNA sense strand
caaugaaacuguaaaccca

SEQ ID NO: 2332883 - RNA, 19 nt, Homo sapiens
  misc_RNA (1)...(19): siRNA sense strand
aggaagauacacugagcuu

SEQ ID NO: 2332884 - RNA, 19 nt, Homo sapiens
  misc_RNA (1)...(19): siRNA sense strand
ucucauuggacaaagacaa

SEQ ID NO: 2332885 - RNA, 19 nt, Homo sapiens
  misc_RNA (1)...(19): siRNA sense strand
caggaaugcaucaaagaca

SEQ ID NO: 2332886 - RNA, 19 nt, Homo sapiens
  misc_RNA (1)...(19): siRNA sense strand
uggaaugcucugcuggaaa

SEQ ID NO: 2332887 - RNA, 19 nt, Homo sapiens
  misc_RNA (1)...(19): siRNA sense strand
ugagcaaguaccugaagaa

SEQ ID NO: 2332888 - RNA, 19 nt, Homo sapiens
  misc_RNA (1)...(19): siRNA sense strand
caucaaauguggaaaggag

SEQ ID NO: 2332889 - RNA, 19 nt, Homo sapiens
  misc_RNA (1)...(19): siRNA sense strand
ccagcugacccaagggaga

SEQ ID NO: 2332890 - RNA, 19 nt, Homo sapiens
  misc_RNA (1)...(19): siRNA sense strand
cugauauuauuguggacuu

SEQ ID NO: 2332891 - RNA, 19 nt, Homo sapiens
  misc_RNA (1)...(19): siRNA sense strand
caggagucucauuggacaa

SEQ ID NO: 2332892 - RNA, 19 nt, Homo sapiens
  misc_RNA (1)...(19): siRNA sense strand
ugacaugcagaaaggaaga

SEQ ID NO: 2332893 - RNA, 19 nt, Homo sapiens
  misc_RNA (1)...(19): siRNA sense strand
gaggaugggcacaagguca

SEQ ID NO: 2332894 - RNA, 19 nt, Homo sapiens
  misc_RNA (1)...(19): siRNA sense strand
agguggagaugaaccgcaa

SEQ ID NO: 2332895 - RNA, 19 nt, Homo sapiens
  misc_RNA (1)...(19): siRNA sense strand
uggagagagacuuguggaa

SEQ ID NO: 2332896 - RNA, 19 nt, Homo sapiens
  misc_RNA (1)...(19): siRNA sense strand
aagaaguaugccaaugaaa

SEQ ID NO: 2332897 - RNA, 19 nt, Homo sapiens
  misc_RNA (1)...(19): siRNA sense strand
augcagaaaggaagauaca

SEQ ID NO: 2332898 - RNA, 19 nt, Homo sapiens
  misc_RNA (1)...(19): siRNA sense strand
acacugagcuuguugagga

SEQ ID NO: 2332899 - RNA, 19 nt, Homo sapiens
  misc_RNA (1)...(19): siRNA sense strand
accuauaccaugacugaua

SEQ ID NO: 2332900 - RNA, 19 nt, Homo sapiens
  misc_RNA (1)...(19): siRNA sense strand
ugcuauaacaaccgugaua

SEQ ID NO: 2332901 - RNA, 19 nt, Homo sapiens
  misc_RNA (1)...(19): siRNA sense strand
gggaacugacucuggacau

SEQ ID NO: 2332902 - RNA, 19 nt, Homo sapiens
  misc_RNA (1)...(19): siRNA sense strand
aggaggagcaagaaguuga

SEQ ID NO: 2332903 - RNA, 19 nt, Homo sapiens
  misc_RNA (1)...(19): siRNA sense strand
uggagaagaaguaugccaa

SEQ ID NO: 2332904 - RNA, 19 nt, Homo sapiens
  misc_RNA (1)...(19): siRNA sense strand
gcguaagaaggguggucca

SEQ ID NO: 2332905 - RNA, 19 nt, Homo sapiens
  misc_RNA (1)...(19): siRNA sense strand
cugagcuuguugaggagaa

SEQ ID NO: 2332906 - RNA, 19 nt, Homo sapiens
  misc_RNA (1)...(19): siRNA sense strand
guugacaugcagaaaggaa

SEQ ID NO: 2332907 - RNA, 19 nt, Homo sapiens
  misc_RNA (1)...(19): siRNA sense strand
gggaagacaggaauggagu

SEQ ID NO: 2332908 - RNA, 19 nt, Homo sapiens
  misc_RNA (1)...(19): siRNA sense strand
uggaaucgguguugggaug

SEQ ID NO: 2332909 - RNA, 19 nt, Homo sapiens
  misc_RNA (1)...(19): siRNA sense strand
gaaccuggcucguggcuac

SEQ ID NO: 2332910 - RNA, 19 nt, Homo sapiens
  misc_RNA (1)...(19): siRNA sense strand
acaucagcuucaagguuau

SEQ ID NO: 2332911 - RNA, 19 nt, Homo sapiens
  misc_RNA (1)...(19): siRNA sense strand
aauucgucuuggagagaga

SEQ ID NO: 2332912 - RNA, 19 nt, Homo sapiens
  misc_RNA (1)...(19): siRNA sense strand
ggucaucaaauguggaaag

SEQ ID NO: 2332913 - RNA, 19 nt, Homo sapiens
  misc_RNA (1)...(19): siRNA sense strand
ucuccuguccagaagaaua

SEQ ID NO: 2332914 - RNA, 19 nt, Homo sapiens
  misc_RNA (1)...(19): siRNA sense strand
gagaagguguauaugguuc

SEQ ID NO: 2332915 - RNA, 19 nt, Homo sapiens
  misc_RNA (1)...(19): siRNA sense strand
acccauauuuggucaucaa

SEQ ID NO: 2332916 - RNA, 19 nt, Homo sapiens
  misc_RNA (1)...(19): siRNA sense strand
caugacugauauucgcaaa

SEQ ID NO: 2332917 - RNA, 19 nt, Homo sapiens
  misc_RNA (1)...(19): siRNA sense strand
gguuauuuccagcgaugau

SEQ ID NO: 2332918 - RNA, 19 nt, Homo sapiens
  misc_RNA (1)...(19): siRNA sense strand
guaaggugcuggagggugu

SEQ ID NO: 2332919 - RNA, 19 nt, Homo sapiens
  misc_RNA (1)...(19): siRNA sense strand
acaagaaggaguaccggaa

SEQ ID NO: 2332920 - RNA, 19 nt, Homo sapiens
  misc_RNA (1)...(19): siRNA sense strand
acaucuuaccacagggaga

SEQ ID NO: 2332921 - RNA, 19 nt, Homo sapiens
  misc_RNA (1)...(19): siRNA sense strand
ccauuaaaguggaaggagg

SEQ ID NO: 2332922 - RNA, 19 nt, Homo sapiens
  misc_RNA (1)...(19): siRNA sense strand
gggaaaagcuagaggggca

SEQ ID NO: 2332923 - RNA, 19 nt, Homo sapiens
  misc_RNA (1)...(19): siRNA sense strand
gggauaaauugguugguga

SEQ ID NO: 2332924 - RNA, 19 nt, Homo sapiens
  misc_RNA (1)...(19): siRNA sense strand
augaaaaguuggagggaga

SEQ ID NO: 2332925 - RNA, 19 nt, Homo sapiens
  misc_RNA (1)...(19): siRNA sense strand
ugauguagguaaaaggaaa

SEQ ID NO: 2332926 - RNA, 19 nt, Homo sapiens
  misc_RNA (1)...(19): siRNA sense strand
gagaaaaggaauaugugaa

SEQ ID NO: 2332927 - RNA, 19 nt, Homo sapiens
  misc_RNA (1)...(19): siRNA sense strand
gauuaaaaggugucaagaa

SEQ ID NO: 2332928 - RNA, 19 nt, Homo sapiens
  misc_RNA (1)...(19): siRNA sense strand
gaugauauggaauggaaaa

SEQ ID NO: 2332929 - RNA, 19 nt, Homo sapiens
  misc_RNA (1)...(19): siRNA sense strand
gaaugauguaaauguggaa

SEQ ID NO: 2332930 - RNA, 19 nt, Homo sapiens
  misc_RNA (1)...(19): siRNA sense strand
gaggcugugagaugggaaa

SEQ ID NO: 2332931 - RNA, 19 nt, Homo sapiens
  misc_RNA (1)...(19): siRNA sense strand
uggugagaucaaagaagaa

SEQ ID NO: 2332932 - RNA, 19 nt, Homo sapiens
  misc_RNA (1)...(19): siRNA sense strand
ggaacagaaaccagaugau

SEQ ID NO: 2332933 - RNA, 19 nt, Homo sapiens
  misc_RNA (1)...(19): siRNA sense strand
aaacuaugcugcugcccua

SEQ ID NO: 2332934 - RNA, 19 nt, Homo sapiens
  misc_RNA (1)...(19): siRNA sense strand
agauagugcagaugcuaau

SEQ ID NO: 2332935 - RNA, 19 nt, Homo sapiens
  misc_RNA (1)...(19): siRNA sense strand
ggagaugugccuacgccaa

SEQ ID NO: 2332936 - RNA, 19 nt, Homo sapiens
  misc_RNA (1)...(19): siRNA sense strand
ugaugauauggaauggaaa

SEQ ID NO: 2332937 - RNA, 19 nt, Homo sapiens
  misc_RNA (1)...(19): siRNA sense strand
gugucaagaagcucagaau

SEQ ID NO: 2332938 - RNA, 19 nt, Homo sapiens
  misc_RNA (1)...(19): siRNA sense strand
acagauuauuucagcagau

SEQ ID NO: 2332939 - RNA, 19 nt, Homo sapiens
  misc_RNA (1)...(19): siRNA sense strand
ugguucugaugaagugaaa

SEQ ID NO: 2332940 - RNA, 19 nt, Homo sapiens
  misc_RNA (1)...(19): siRNA sense strand
gguaaaaggaaaguugaaa

SEQ ID NO: 2332941 - RNA, 19 nt, Homo sapiens
  misc_RNA (1)...(19): siRNA sense strand
aaaucaaguaugacuggua

SEQ ID NO: 2332942 - RNA, 19 nt, Homo sapiens
  misc_RNA (1)...(19): siRNA sense strand
cuggucugauguagguaaa

SEQ ID NO: 2332943 - RNA, 19 nt, Homo sapiens
  misc_RNA (1)...(19): siRNA sense strand
guaucaaacagaaucucaa

SEQ ID NO: 2332944 - RNA, 19 nt, Homo sapiens
  misc_RNA (1)...(19): siRNA sense strand
caaaacaauucguagcaga

SEQ ID NO: 2332945 - RNA, 19 nt, Homo sapiens
  misc_RNA (1)...(19): siRNA sense strand
cugcaacaucccagagguu

SEQ ID NO: 2332946 - RNA, 19 nt, Homo sapiens
  misc_RNA (1)...(19): siRNA sense strand
ucagaauggcucagaaucu

SEQ ID NO: 2332947 - RNA, 19 nt, Homo sapiens
  misc_RNA (1)...(19): siRNA sense strand
ugaucaagaauguucagaa

SEQ ID NO: 2332948 - RNA, 19 nt, Homo sapiens
  misc_RNA (1)...(19): siRNA sense strand
gugagaucaaagaagaaga

SEQ ID NO: 2332949 - RNA, 19 nt, Homo sapiens
  misc_RNA (1)...(19): siRNA sense strand
gcaacaucccagagguuuu

SEQ ID NO: 2332950 - RNA, 19 nt, Homo sapiens
  misc_RNA (1)...(19): siRNA sense strand
agguaaaaggaaaguugaa

SEQ ID NO: 2332951 - RNA, 19 nt, Homo sapiens
  misc_RNA (1)...(19): siRNA sense strand
caacauaaccuuaggcuga

SEQ ID NO: 2332952 - RNA, 19 nt, Homo sapiens
  misc_RNA (1)...(19): siRNA sense strand
ccaaaaguaaggacagaaa

SEQ ID NO: 2332953 - RNA, 19 nt, Homo sapiens
  misc_RNA (1)...(19): siRNA sense strand
gggagaaagaccacagcau

SEQ ID NO: 2332954 - RNA, 19 nt, Homo sapiens
  misc_RNA (1)...(19): siRNA sense strand
ccacagugaugcaaggcuu

SEQ ID NO: 2332955 - RNA, 19 nt, Homo sapiens
  misc_RNA (1)...(19): siRNA sense strand
guaaauaacauaugccagu

SEQ ID NO: 2332956 - RNA, 19 nt, Homo sapiens
  misc_RNA (1)...(19): siRNA sense strand
agaccauguaugugggcau

SEQ ID NO: 2332957 - RNA, 19 nt, Homo sapiens
  misc_RNA (1)...(19): siRNA sense strand
cauguaugcaagggagaaa

SEQ ID NO: 2332958 - RNA, 19 nt, Homo sapiens
  misc_RNA (1)...(19): siRNA sense strand
caacauaaccuuaggcuga

SEQ ID NO: 2332959 - RNA, 19 nt, Homo sapiens
  misc_RNA (1)...(19): siRNA sense strand
ccaaaaguaaggacagaaa

SEQ ID NO: 2332960 - RNA, 19 nt, Homo sapiens
  misc_RNA (1)...(19): siRNA sense strand
gggagaaagaccacagcau

SEQ ID NO: 2332961 - RNA, 19 nt, Homo sapiens
  misc_RNA (1)...(19): siRNA sense strand
ccacagugaugcaaggcuu

SEQ ID NO: 2332962 - RNA, 19 nt, Homo sapiens
  misc_RNA (1)...(19): siRNA sense strand
guaaauaacauaugccagu

SEQ ID NO: 2332963 - RNA, 19 nt, Homo sapiens
  misc_RNA (1)...(19): siRNA sense strand
agaccauguaugugggcau

SEQ ID NO: 2332964 - RNA, 19 nt, Homo sapiens
  misc_RNA (1)...(19): siRNA sense strand
cauguaugcaagggagaaa

SEQ ID NO: 2332965 - RNA, 19 nt, Homo sapiens
  misc_RNA (1)...(19): siRNA sense strand
ccauaaaggccuaaagaca

SEQ ID NO: 2332966 - RNA, 19 nt, Homo sapiens
  misc_RNA (1)...(19): siRNA sense strand
gccuaaagacauugaggaa

SEQ ID NO: 2332967 - RNA, 19 nt, Homo sapiens
  misc_RNA (1)...(19): siRNA sense strand
ggacagaggcaauagccaa

SEQ ID NO: 2332968 - RNA, 19 nt, Homo sapiens
  misc_RNA (1)...(19): siRNA sense strand
ugcaagaaguucagggaga

SEQ ID NO: 2332969 - RNA, 19 nt, Homo sapiens
  misc_RNA (1)...(19): siRNA sense strand
ccaaaauacuaucuggaaa

SEQ ID NO: 2332970 - RNA, 19 nt, Homo sapiens
  misc_RNA (1)...(19): siRNA sense strand
gcacuuaagaagacugcaa

SEQ ID NO: 2332971 - RNA, 19 nt, Homo sapiens
  misc_RNA (1)...(19): siRNA sense strand
aggcaauagccaagcauuu

SEQ ID NO: 2332972 - RNA, 19 nt, Homo sapiens
  misc_RNA (1)...(19): siRNA sense strand
cugcuuaccugguggugaa

SEQ ID NO: 2332973 - RNA, 19 nt, Homo sapiens
  misc_RNA (1)...(19): siRNA sense strand
gagcagaacuugaaaggcu

SEQ ID NO: 2332974 - RNA, 19 nt, Homo sapiens
  misc_RNA (1)...(19): siRNA sense strand
ggguaauugaagaacuuaa

SEQ ID NO: 2332975 - RNA, 19 nt, Homo sapiens
  misc_RNA (1)...(19): siRNA sense strand
gaaaauggacagaggcaau

SEQ ID NO: 2332976 - RNA, 19 nt, Homo sapiens
  misc_RNA (1)...(19): siRNA sense strand
aagaagacugcaagagcua

SEQ ID NO: 2332977 - RNA, 19 nt, Homo sapiens
  misc_RNA (1)...(19): siRNA sense strand
acgcaagaugacaaggaaa

SEQ ID NO: 2332978 - RNA, 19 nt, Homo sapiens
  misc_RNA (1)...(19): siRNA sense strand
gcuugaagagacaaauaaa

SEQ ID NO: 2332979 - RNA, 19 nt, Homo sapiens
  misc_RNA (1)...(19): siRNA sense strand
cagcagguacagaugguaa

SEQ ID NO: 2332980 - RNA, 19 nt, Homo sapiens
  misc_RNA (1)...(19): siRNA sense strand
ccucuucacuacaaggaaa

SEQ ID NO: 2332981 - RNA, 19 nt, Homo sapiens
  misc_RNA (1)...(19): siRNA sense strand
uguauuaagucaagagucu

SEQ ID NO: 2332982 - RNA, 19 nt, Homo sapiens
  misc_RNA (1)...(19): siRNA sense strand
gagcuaacaaucagcacaa

SEQ ID NO: 2332983 - RNA, 19 nt, Homo sapiens
  misc_RNA (1)...(19): siRNA sense strand
ugauggaagcagaagaauu

SEQ ID NO: 2332984 - RNA, 19 nt, Homo sapiens
  misc_RNA (1)...(19): siRNA sense strand
caucucaagcucaaagaaa

SEQ ID NO: 2332985 - RNA, 19 nt, Homo sapiens
  misc_RNA (1)...(19): siRNA sense strand
ggucaagaacccuuccaaa

SEQ ID NO: 2332986 - RNA, 19 nt, Homo sapiens
  misc_RNA (1)...(19): siRNA sense strand
agaaaugcucagaaaucaa

SEQ ID NO: 2332987 - RNA, 19 nt, Homo sapiens
  misc_RNA (1)...(19): siRNA sense strand
ggaugugaagaguaguaaa

SEQ ID NO: 2332988 - RNA, 19 nt, Homo sapiens
  misc_RNA (1)...(19): siRNA sense strand
ggacgauaaacuucgaaau

SEQ ID NO: 2332989 - RNA, 19 nt, Homo sapiens
  misc_RNA (1)...(19): siRNA sense strand
guuuuaucguggagugaaa

SEQ ID NO: 2332990 - RNA, 19 nt, Homo sapiens
  misc_RNA (1)...(19): siRNA sense strand
ugagagugcaagagcagaa

SEQ ID NO: 2332991 - RNA, 19 nt, Homo sapiens
  misc_RNA (1)...(19): siRNA sense strand
caagaaguucagggagaua

SEQ ID NO: 2332992 - RNA, 19 nt, Homo sapiens
  misc_RNA (1)...(19): siRNA sense strand
cagugaaaagugugauaaa

SEQ ID NO: 2332993 - RNA, 19 nt, Homo sapiens
  misc_RNA (1)...(19): siRNA sense strand
aagacugaggacaggaaua

SEQ ID NO: 2332994 - RNA, 19 nt, Homo sapiens
  misc_RNA (1)...(19): siRNA sense strand
cugccuggcuauacacaaa

SEQ ID NO: 2332995 - RNA, 19 nt, Homo sapiens
  misc_RNA (1)...(19): siRNA sense strand
cuauacagcaugaggggaa

SEQ ID NO: 2332996 - RNA, 19 nt, Homo sapiens
  misc_RNA (1)...(19): siRNA sense strand
cagcuggaaaggaacgaaa

SEQ ID NO: 2332997 - RNA, 19 nt, Homo sapiens
  misc_RNA (1)...(19): siRNA sense strand
ugugaagaguaguaaacau

SEQ ID NO: 2332998 - RNA, 19 nt, Homo sapiens
  misc_RNA (1)...(19): siRNA sense strand
gugaaaagugugauaaaga

SEQ ID NO: 2332999 - RNA, 19 nt, Homo sapiens
  misc_RNA (1)...(19): siRNA sense strand
agugaagaagugaauguaa

SEQ ID NO: 2333000 - RNA, 19 nt, Homo sapiens
  misc_RNA (1)...(19): siRNA sense strand
agucaaacaaauggacaua

SEQ ID NO: 2333001 - RNA, 19 nt, Homo sapiens
  misc_RNA (1)...(19): siRNA sense strand
uggcauacugcaauugaaa

SEQ ID NO: 2333002 - RNA, 19 nt, Homo sapiens
  misc_RNA (1)...(19): siRNA sense strand
cugcaagagcuaacaauca

SEQ ID NO: 2333003 - RNA, 19 nt, Homo sapiens
  misc_RNA (1)...(19): siRNA sense strand
cuguauaggguucagaaau

SEQ ID NO: 2333004 - RNA, 19 nt, Homo sapiens
  misc_RNA (1)...(19): siRNA sense strand
aagaagaucaagucaaaca

SEQ ID NO: 2333005 - RNA, 19 nt, Homo sapiens
  misc_RNA (1)...(19): siRNA sense strand
gacucuagcuuaaaggaga

SEQ ID NO: 2333006 - RNA, 19 nt, Homo sapiens
  misc_RNA (1)...(19): siRNA sense strand
aagaugacaaggaaagaau

SEQ ID NO: 2333007 - RNA, 19 nt, Homo sapiens
  misc_RNA (1)...(19): siRNA sense strand
ugugauggaagcagaagaa

SEQ ID NO: 2333008 - RNA, 19 nt, Homo sapiens
  misc_RNA (1)...(19): siRNA sense strand
cuugaaaggcugcggcuca

SEQ ID NO: 2333009 - RNA, 19 nt, Homo sapiens
  misc_RNA (1)...(19): siRNA sense strand
aaggguaauugaagaacuu

SEQ ID NO: 2333010 - RNA, 19 nt, Homo sapiens
  misc_RNA (1)...(19): siRNA sense strand
cugcuugaagagacaaaua

SEQ ID NO: 2333011 - RNA, 19 nt, Homo sapiens
  misc_RNA (1)...(19): siRNA sense strand
ggaagacugaggacaggaa

SEQ ID NO: 2333012 - RNA, 19 nt, Homo sapiens
  misc_RNA (1)...(19): siRNA sense strand
uuucaaacgaagggacaaa

SEQ ID NO: 2333013 - RNA, 19 nt, Homo sapiens
  misc_RNA (1)...(19): siRNA sense strand
aaauauugagagugcaaga

SEQ ID NO: 2333014 - RNA, 19 nt, Homo sapiens
  misc_RNA (1)...(19): siRNA sense strand
agacauugaggaagacuga

SEQ ID NO: 2333015 - RNA, 19 nt, Homo sapiens
  misc_RNA (1)...(19): siRNA sense strand
agccaagaaagcugggcaa

SEQ ID NO: 2333016 - RNA, 19 nt, Homo sapiens
  misc_RNA (1)...(19): siRNA sense strand
gaucagcagcucagcaaaa

SEQ ID NO: 2333017 - RNA, 19 nt, Homo sapiens
  misc_RNA (1)...(19): siRNA sense strand
uuaaauugagggcuggaaa

SEQ ID NO: 2333018 - RNA, 19 nt, Homo sapiens
  misc_RNA (1)...(19): siRNA sense strand
gggaagcaucaaagaagga

SEQ ID NO: 2333019 - RNA, 19 nt, Homo sapiens
  misc_RNA (1)...(19): siRNA sense strand
ccuguauaggguucagaaa

SEQ ID NO: 2333020 - RNA, 19 nt, Homo sapiens
  misc_RNA (1)...(19): siRNA sense strand
cuauacacaaagaggacuu

SEQ ID NO: 2333021 - RNA, 19 nt, Homo sapiens
  misc_RNA (1)...(19): siRNA sense strand
cauuauacauccaugggca

SEQ ID NO: 2333022 - RNA, 19 nt, Homo sapiens
  misc_RNA (1)...(19): siRNA sense strand
aggaaaauguacuggagca

SEQ ID NO: 2333023 - RNA, 19 nt, Homo sapiens
  misc_RNA (1)...(19): siRNA sense strand
aagucaaacaaauggacau

SEQ ID NO: 2333024 - RNA, 19 nt, Homo sapiens
  misc_RNA (1)...(19): siRNA sense strand
ccauaaaggccuaaagaca

SEQ ID NO: 2333025 - RNA, 19 nt, Homo sapiens
  misc_RNA (1)...(19): siRNA sense strand
gccuaaagacauugaggaa

SEQ ID NO: 2333026 - RNA, 19 nt, Homo sapiens
  misc_RNA (1)...(19): siRNA sense strand
ggacagaggcaauagccaa

SEQ ID NO: 2333027 - RNA, 19 nt, Homo sapiens
  misc_RNA (1)...(19): siRNA sense strand
ugcaagaaguucagggaga

SEQ ID NO: 2333028 - RNA, 19 nt, Homo sapiens
  misc_RNA (1)...(19): siRNA sense strand
ccaaaauacuaucuggaaa

SEQ ID NO: 2333029 - RNA, 19 nt, Homo sapiens
  misc_RNA (1)...(19): siRNA sense strand
gcacuuaagaagacugcaa

SEQ ID NO: 2333030 - RNA, 19 nt, Homo sapiens
  misc_RNA (1)...(19): siRNA sense strand
aggcaauagccaagcauuu

SEQ ID NO: 2333031 - RNA, 19 nt, Homo sapiens
  misc_RNA (1)...(19): siRNA sense strand
cugcuuaccugguggugaa

SEQ ID NO: 2333032 - RNA, 19 nt, Homo sapiens
  misc_RNA (1)...(19): siRNA sense strand
gagcagaacuugaaaggcu

SEQ ID NO: 2333033 - RNA, 19 nt, Homo sapiens
  misc_RNA (1)...(19): siRNA sense strand
ggguaauugaagaacuuaa

SEQ ID NO: 2333034 - RNA, 19 nt, Homo sapiens
  misc_RNA (1)...(19): siRNA sense strand
gaaaauggacagaggcaau

SEQ ID NO: 2333035 - RNA, 19 nt, Homo sapiens
  misc_RNA (1)...(19): siRNA sense strand
aagaagacugcaagagcua

SEQ ID NO: 2333036 - RNA, 19 nt, Homo sapiens
  misc_RNA (1)...(19): siRNA sense strand
acgcaagaugacaaggaaa

SEQ ID NO: 2333037 - RNA, 19 nt, Homo sapiens
  misc_RNA (1)...(19): siRNA sense strand
gcuugaagagacaaauaaa

SEQ ID NO: 2333038 - RNA, 19 nt, Homo sapiens
  misc_RNA (1)...(19): siRNA sense strand
cagcagguacagaugguaa

SEQ ID NO: 2333039 - RNA, 19 nt, Homo sapiens
  misc_RNA (1)...(19): siRNA sense strand
ccucuucacuacaaggaaa

SEQ ID NO: 2333040 - RNA, 19 nt, Homo sapiens
  misc_RNA (1)...(19): siRNA sense strand
uguauuaagucaagagucu

SEQ ID NO: 2333041 - RNA, 19 nt, Homo sapiens
  misc_RNA (1)...(19): siRNA sense strand
gagcuaacaaucagcacaa

SEQ ID NO: 2333042 - RNA, 19 nt, Homo sapiens
  misc_RNA (1)...(19): siRNA sense strand
ugauggaagcagaagaauu

SEQ ID NO: 2333043 - RNA, 19 nt, Homo sapiens
  misc_RNA (1)...(19): siRNA sense strand
caucucaagcucaaagaaa

SEQ ID NO: 2333044 - RNA, 19 nt, Homo sapiens
  misc_RNA (1)...(19): siRNA sense strand
ggucaagaacccuuccaaa

SEQ ID NO: 2333045 - RNA, 19 nt, Homo sapiens
  misc_RNA (1)...(19): siRNA sense strand
agaaaugcucagaaaucaa

SEQ ID NO: 2333046 - RNA, 19 nt, Homo sapiens
  misc_RNA (1)...(19): siRNA sense strand
ggaugugaagaguaguaaa

SEQ ID NO: 2333047 - RNA, 19 nt, Homo sapiens
  misc_RNA (1)...(19): siRNA sense strand
ggacgauaaacuucgaaau

SEQ ID NO: 2333048 - RNA, 19 nt, Homo sapiens
  misc_RNA (1)...(19): siRNA sense strand
guuuuaucguggagugaaa

SEQ ID NO: 2333049 - RNA, 19 nt, Homo sapiens
  misc_RNA (1)...(19): siRNA sense strand
ugagagugcaagagcagaa

SEQ ID NO: 2333050 - RNA, 19 nt, Homo sapiens
  misc_RNA (1)...(19): siRNA sense strand
caagaaguucagggagaua

SEQ ID NO: 2333051 - RNA, 19 nt, Homo sapiens
  misc_RNA (1)...(19): siRNA sense strand
cagugaaaagugugauaaa

SEQ ID NO: 2333052 - RNA, 19 nt, Homo sapiens
  misc_RNA (1)...(19): siRNA sense strand
aagacugaggacaggaaua

SEQ ID NO: 2333053 - RNA, 19 nt, Homo sapiens
  misc_RNA (1)...(19): siRNA sense strand
cugccuggcuauacacaaa

SEQ ID NO: 2333054 - RNA, 19 nt, Homo sapiens
  misc_RNA (1)...(19): siRNA sense strand
cuauacagcaugaggggaa

SEQ ID NO: 2333055 - RNA, 19 nt, Homo sapiens
  misc_RNA (1)...(19): siRNA sense strand
cagcuggaaaggaacgaaa

SEQ ID NO: 2333056 - RNA, 19 nt, Homo sapiens
  misc_RNA (1)...(19): siRNA sense strand
ugugaagaguaguaaacau

SEQ ID NO: 2333057 - RNA, 19 nt, Homo sapiens
  misc_RNA (1)...(19): siRNA sense strand
gugaaaagugugauaaaga

SEQ ID NO: 2333058 - RNA, 19 nt, Homo sapiens
  misc_RNA (1)...(19): siRNA sense strand
agugaagaagugaauguaa

SEQ ID NO: 2333059 - RNA, 19 nt, Homo sapiens
  misc_RNA (1)...(19): siRNA sense strand
agucaaacaaauggacaua

SEQ ID NO: 2333060 - RNA, 19 nt, Homo sapiens
  misc_RNA (1)...(19): siRNA sense strand
uggcauacugcaauugaaa

SEQ ID NO: 2333061 - RNA, 19 nt, Homo sapiens
  misc_RNA (1)...(19): siRNA sense strand
cugcaagagcuaacaauca

SEQ ID NO: 2333062 - RNA, 19 nt, Homo sapiens
  misc_RNA (1)...(19): siRNA sense strand
cuguauaggguucagaaau

SEQ ID NO: 2333063 - RNA, 19 nt, Homo sapiens
  misc_RNA (1)...(19): siRNA sense strand
aagaagaucaagucaaaca

SEQ ID NO: 2333064 - RNA, 19 nt, Homo sapiens
  misc_RNA (1)...(19): siRNA sense strand
gacucuagcuuaaaggaga

SEQ ID NO: 2333065 - RNA, 19 nt, Homo sapiens
  misc_RNA (1)...(19): siRNA sense strand
aagaugacaaggaaagaau

SEQ ID NO: 2333066 - RNA, 19 nt, Homo sapiens
  misc_RNA (1)...(19): siRNA sense strand
ugugauggaagcagaagaa

SEQ ID NO: 2333067 - RNA, 19 nt, Homo sapiens
  misc_RNA (1)...(19): siRNA sense strand
cuugaaaggcugcggcuca

SEQ ID NO: 2333068 - RNA, 19 nt, Homo sapiens
  misc_RNA (1)...(19): siRNA sense strand
aaggguaauugaagaacuu

SEQ ID NO: 2333069 - RNA, 19 nt, Homo sapiens
  misc_RNA (1)...(19): siRNA sense strand
cugcuugaagagacaaaua

SEQ ID NO: 2333070 - RNA, 19 nt, Homo sapiens
  misc_RNA (1)...(19): siRNA sense strand
ggaagacugaggacaggaa

SEQ ID NO: 2333071 - RNA, 19 nt, Homo sapiens
  misc_RNA (1)...(19): siRNA sense strand
uuucaaacgaagggacaaa

SEQ ID NO: 2333072 - RNA, 19 nt, Homo sapiens
  misc_RNA (1)...(19): siRNA sense strand
agccaagaaagcugggcaa

SEQ ID NO: 2333073 - RNA, 19 nt, Homo sapiens
  misc_RNA (1)...(19): siRNA sense strand
aaauauugagagugcaaga

SEQ ID NO: 2333074 - RNA, 19 nt, Homo sapiens
  misc_RNA (1)...(19): siRNA sense strand
agacauugaggaagacuga

SEQ ID NO: 2333075 - RNA, 19 nt, Homo sapiens
  misc_RNA (1)...(19): siRNA sense strand
gaucagcagcucagcaaaa

SEQ ID NO: 2333076 - RNA, 19 nt, Homo sapiens
  misc_RNA (1)...(19): siRNA sense strand
uuaaauugagggcuggaaa

SEQ ID NO: 2333077 - RNA, 19 nt, Homo sapiens
  misc_RNA (1)...(19): siRNA sense strand
gggaagcaucaaagaagga

SEQ ID NO: 2333078 - RNA, 19 nt, Homo sapiens
  misc_RNA (1)...(19): siRNA sense strand
ccuguauaggguucagaaa

SEQ ID NO: 2333079 - RNA, 19 nt, Homo sapiens
  misc_RNA (1)...(19): siRNA sense strand
cuauacacaaagaggacuu

SEQ ID NO: 2333080 - RNA, 19 nt, Homo sapiens
  misc_RNA (1)...(19): siRNA sense strand
cauuauacauccaugggca

SEQ ID NO: 2333081 - RNA, 19 nt, Homo sapiens
  misc_RNA (1)...(19): siRNA sense strand
aggaaaauguacuggagca

SEQ ID NO: 2333082 - RNA, 19 nt, Homo sapiens
  misc_RNA (1)...(19): siRNA sense strand
aagucaaacaaauggacau

SEQ ID NO: 2333083 - RNA, 19 nt, Homo sapiens
  misc_RNA (1)...(19): siRNA sense strand
ccaaguaccgugagggcaa

SEQ ID NO: 2333084 - RNA, 19 nt, Homo sapiens
  misc_RNA (1)...(19): siRNA sense strand
cgaugaagccccuggaaaa

SEQ ID NO: 2333085 - RNA, 19 nt, Homo sapiens
  misc_RNA (1)...(19): siRNA sense strand
gcaucagggagaaggacua

SEQ ID NO: 2333086 - RNA, 19 nt, Homo sapiens
  misc_RNA (1)...(19): siRNA sense strand
agagugauguggagcggaa

SEQ ID NO: 2333087 - RNA, 19 nt, Homo sapiens
  misc_RNA (1)...(19): siRNA sense strand
ggugcaugagacagagaaa

SEQ ID NO: 2333088 - RNA, 19 nt, Homo sapiens
  misc_RNA (1)...(19): siRNA sense strand
uggaagagaagaaggcaga

SEQ ID NO: 2333089 - RNA, 19 nt, Homo sapiens
  misc_RNA (1)...(19): siRNA sense strand
ccugagaaggaguggccua

SEQ ID NO: 2333090 - RNA, 19 nt, Homo sapiens
  misc_RNA (1)...(19): siRNA sense strand
ccuucgagguagugaaaau

SEQ ID NO: 2333091 - RNA, 19 nt, Homo sapiens
  misc_RNA (1)...(19): siRNA sense strand
gcacaauagcugcgccaca

SEQ ID NO: 2333092 - RNA, 19 nt, Homo sapiens
  misc_RNA (1)...(19): siRNA sense strand
uaucagaaacgauggguga

SEQ ID NO: 2333093 - RNA, 19 nt, Homo sapiens
  misc_RNA (1)...(19): siRNA sense strand
cggagaaggugcugcccau

SEQ ID NO: 2333094 - RNA, 19 nt, Homo sapiens
  misc_RNA (1)...(19): siRNA sense strand
agguguacacggagggaga

SEQ ID NO: 2333095 - RNA, 19 nt, Homo sapiens
  misc_RNA (1)...(19): siRNA sense strand
gcgcuuaucugcugggagu

SEQ ID NO: 2333096 - RNA, 19 nt, Homo sapiens
  misc_RNA (1)...(19): siRNA sense strand
gagaaggacuauuggaccu

SEQ ID NO: 2333097 - RNA, 19 nt, Homo sapiens
  misc_RNA (1)...(19): siRNA sense strand
agauugaggacgaggagga

SEQ ID NO: 2333098 - RNA, 19 nt, Homo sapiens
  misc_RNA (1)...(19): siRNA sense strand
aggcagagacugagcagca

SEQ ID NO: 2333099 - RNA, 19 nt, Homo sapiens
  misc_RNA (1)...(19): siRNA sense strand
cgaccaaggggaugaggaa

SEQ ID NO: 2333100 - RNA, 19 nt, Homo sapiens
  misc_RNA (1)...(19): siRNA sense strand
ugaagaagcaccaggccau

SEQ ID NO: 2333101 - RNA, 19 nt, Homo sapiens
  misc_RNA (1)...(19): siRNA sense strand
cuacaagaaucuagaggag

SEQ ID NO: 2333102 - RNA, 19 nt, Homo sapiens
  misc_RNA (1)...(19): siRNA sense strand
gggcagacaucgaagacac

SEQ ID NO: 2333103 - RNA, 19 nt, Homo sapiens
  misc_RNA (1)...(19): siRNA sense strand
augagaagcagcaguggua

SEQ ID NO: 2333104 - RNA, 19 nt, Homo sapiens
  misc_RNA (1)...(19): siRNA sense strand
guuuaguguggaugaggaa

SEQ ID NO: 2333105 - RNA, 19 nt, Homo sapiens
  misc_RNA (1)...(19): siRNA sense strand
gcugagcgagggagaggaa

SEQ ID NO: 2333106 - RNA, 19 nt, Homo sapiens
  misc_RNA (1)...(19): siRNA sense strand
uugaggacgaggaggagaa

SEQ ID NO: 2333107 - RNA, 19 nt, Homo sapiens
  misc_RNA (1)...(19): siRNA sense strand
acgagagggaggaggcaga

SEQ ID NO: 2333108 - RNA, 19 nt, Homo sapiens
  misc_RNA (1)...(19): siRNA sense strand
gggucaaguguauugcuaa

SEQ ID NO: 2333109 - RNA, 19 nt, Homo sapiens
  misc_RNA (1)...(19): siRNA sense strand
ucgacaugagcgugggcaa

SEQ ID NO: 2333110 - RNA, 19 nt, Homo sapiens
  misc_RNA (1)...(19): siRNA sense strand
gauucgggccagcgagauu

SEQ ID NO: 2333111 - RNA, 19 nt, Homo sapiens
  misc_RNA (1)...(19): siRNA sense strand
gggcagagagugaugugga

SEQ ID NO: 2333112 - RNA, 19 nt, Homo sapiens
  misc_RNA (1)...(19): siRNA sense strand
ugcaugagacagagaaaca

SEQ ID NO: 2333113 - RNA, 19 nt, Homo sapiens
  misc_RNA (1)...(19): siRNA sense strand
caguggugcaugagacaga

SEQ ID NO: 2333114 - RNA, 19 nt, Homo sapiens
  misc_RNA (1)...(19): siRNA sense strand
aggaguaccaccugggcau

SEQ ID NO: 2333115 - RNA, 19 nt, Homo sapiens
  misc_RNA (1)...(19): siRNA sense strand
uggcauaccagcagccuga

SEQ ID NO: 2333116 - RNA, 19 nt, Homo sapiens
  misc_RNA (1)...(19): siRNA sense strand
gugacgggguccugagcua

SEQ ID NO: 2333117 - RNA, 19 nt, Homo sapiens
  misc_RNA (1)...(19): siRNA sense strand
uguaucuggaagagaagaa

SEQ ID NO: 2333118 - RNA, 19 nt, Homo sapiens
  misc_RNA (1)...(19): siRNA sense strand
ccggcuggguaguguguca

SEQ ID NO: 2333119 - RNA, 19 nt, Homo sapiens
  misc_RNA (1)...(19): siRNA sense strand
ugggcaacgugaaggaagu

SEQ ID NO: 2333120 - RNA, 19 nt, Homo sapiens
  misc_RNA (1)...(19): siRNA sense strand
ccgcaagugugggcagaca

SEQ ID NO: 2333121 - RNA, 19 nt, Homo sapiens
  misc_RNA (1)...(19): siRNA sense strand
ugguggaagaccucauuaa

SEQ ID NO: 2333122 - RNA, 19 nt, Homo sapiens
  misc_RNA (1)...(19): siRNA sense strand
agagaagaaggcagagacu

SEQ ID NO: 2333123 - RNA, 19 nt, Homo sapiens
  misc_RNA (1)...(19): siRNA sense strand
gugaagaagcaccaggcca

SEQ ID NO: 2333124 - RNA, 19 nt, Homo sapiens
  misc_RNA (1)...(19): siRNA sense strand
ccaaguaccgugagggcaa

SEQ ID NO: 2333125 - RNA, 19 nt, Homo sapiens
  misc_RNA (1)...(19): siRNA sense strand
cgaugaagccccuggaaaa

SEQ ID NO: 2333126 - RNA, 19 nt, Homo sapiens
  misc_RNA (1)...(19): siRNA sense strand
gcaucagggagaaggacua

SEQ ID NO: 2333127 - RNA, 19 nt, Homo sapiens
  misc_RNA (1)...(19): siRNA sense strand
agagugauguggagcggaa

SEQ ID NO: 2333128 - RNA, 19 nt, Homo sapiens
  misc_RNA (1)...(19): siRNA sense strand
ggugcaugagacagagaaa

SEQ ID NO: 2333129 - RNA, 19 nt, Homo sapiens
  misc_RNA (1)...(19): siRNA sense strand
uggaagagaagaaggcaga

SEQ ID NO: 2333130 - RNA, 19 nt, Homo sapiens
  misc_RNA (1)...(19): siRNA sense strand
ccugagaaggaguggccua

SEQ ID NO: 2333131 - RNA, 19 nt, Homo sapiens
  misc_RNA (1)...(19): siRNA sense strand
ccuucgagguagugaaaau

SEQ ID NO: 2333132 - RNA, 19 nt, Homo sapiens
  misc_RNA (1)...(19): siRNA sense strand
gcacaauagcugcgccaca

SEQ ID NO: 2333133 - RNA, 19 nt, Homo sapiens
  misc_RNA (1)...(19): siRNA sense strand
uaucagaaacgauggguga

SEQ ID NO: 2333134 - RNA, 19 nt, Homo sapiens
  misc_RNA (1)...(19): siRNA sense strand
cggagaaggugcugcccau

SEQ ID NO: 2333135 - RNA, 19 nt, Homo sapiens
  misc_RNA (1)...(19): siRNA sense strand
agguguacacggagggaga

SEQ ID NO: 2333136 - RNA, 19 nt, Homo sapiens
  misc_RNA (1)...(19): siRNA sense strand
gcgcuuaucugcugggagu

SEQ ID NO: 2333137 - RNA, 19 nt, Homo sapiens
  misc_RNA (1)...(19): siRNA sense strand
gagaaggacuauuggaccu

SEQ ID NO: 2333138 - RNA, 19 nt, Homo sapiens
  misc_RNA (1)...(19): siRNA sense strand
agauugaggacgaggagga

SEQ ID NO: 2333139 - RNA, 19 nt, Homo sapiens
  misc_RNA (1)...(19): siRNA sense strand
aggcagagacugagcagca

SEQ ID NO: 2333140 - RNA, 19 nt, Homo sapiens
  misc_RNA (1)...(19): siRNA sense strand
cgaccaaggggaugaggaa

SEQ ID NO: 2333141 - RNA, 19 nt, Homo sapiens
  misc_RNA (1)...(19): siRNA sense strand
ugaagaagcaccaggccau

SEQ ID NO: 2333142 - RNA, 19 nt, Homo sapiens
  misc_RNA (1)...(19): siRNA sense strand
cuacaagaaucuagaggag

SEQ ID NO: 2333143 - RNA, 19 nt, Homo sapiens
  misc_RNA (1)...(19): siRNA sense strand
gggcagacaucgaagacac

SEQ ID NO: 2333144 - RNA, 19 nt, Homo sapiens
  misc_RNA (1)...(19): siRNA sense strand
augagaagcagcaguggua

SEQ ID NO: 2333145 - RNA, 19 nt, Homo sapiens
  misc_RNA (1)...(19): siRNA sense strand
guuuaguguggaugaggaa

SEQ ID NO: 2333146 - RNA, 19 nt, Homo sapiens
  misc_RNA (1)...(19): siRNA sense strand
gcugagcgagggagaggaa

SEQ ID NO: 2333147 - RNA, 19 nt, Homo sapiens
  misc_RNA (1)...(19): siRNA sense strand
uugaggacgaggaggagaa

SEQ ID NO: 2333148 - RNA, 19 nt, Homo sapiens
  misc_RNA (1)...(19): siRNA sense strand
acgagagggaggaggcaga

SEQ ID NO: 2333149 - RNA, 19 nt, Homo sapiens
  misc_RNA (1)...(19): siRNA sense strand
gggucaaguguauugcuaa

SEQ ID NO: 2333150 - RNA, 19 nt, Homo sapiens
  misc_RNA (1)...(19): siRNA sense strand
ucgacaugagcgugggcaa

SEQ ID NO: 2333151 - RNA, 19 nt, Homo sapiens
  misc_RNA (1)...(19): siRNA sense strand
gauucgggccagcgagauu

SEQ ID NO: 2333152 - RNA, 19 nt, Homo sapiens
  misc_RNA (1)...(19): siRNA sense strand
gggcagagagugaugugga

SEQ ID NO: 2333153 - RNA, 19 nt, Homo sapiens
  misc_RNA (1)...(19): siRNA sense strand
ugcaugagacagagaaaca

SEQ ID NO: 2333154 - RNA, 19 nt, Homo sapiens
  misc_RNA (1)...(19): siRNA sense strand
caguggugcaugagacaga

SEQ ID NO: 2333155 - RNA, 19 nt, Homo sapiens
  misc_RNA (1)...(19): siRNA sense strand
aggaguaccaccugggcau

SEQ ID NO: 2333156 - RNA, 19 nt, Homo sapiens
  misc_RNA (1)...(19): siRNA sense strand
uggcauaccagcagccuga

SEQ ID NO: 2333157 - RNA, 19 nt, Homo sapiens
  misc_RNA (1)...(19): siRNA sense strand
gugacgggguccugagcua

SEQ ID NO: 2333158 - RNA, 19 nt, Homo sapiens
  misc_RNA (1)...(19): siRNA sense strand
uguaucuggaagagaagaa

SEQ ID NO: 2333159 - RNA, 19 nt, Homo sapiens
  misc_RNA (1)...(19): siRNA sense strand
ccggcuggguaguguguca

SEQ ID NO: 2333160 - RNA, 19 nt, Homo sapiens
  misc_RNA (1)...(19): siRNA sense strand
ugggcaacgugaaggaagu

SEQ ID NO: 2333161 - RNA, 19 nt, Homo sapiens
  misc_RNA (1)...(19): siRNA sense strand
ccgcaagugugggcagaca

SEQ ID NO: 2333162 - RNA, 19 nt, Homo sapiens
  misc_RNA (1)...(19): siRNA sense strand
ugguggaagaccucauuaa

SEQ ID NO: 2333163 - RNA, 19 nt, Homo sapiens
  misc_RNA (1)...(19): siRNA sense strand
agagaagaaggcagagacu

SEQ ID NO: 2333164 - RNA, 19 nt, Homo sapiens
  misc_RNA (1)...(19): siRNA sense strand
gugaagaagcaccaggcca

SEQ ID NO: 2333165 - RNA, 19 nt, Homo sapiens
  misc_RNA (1)...(19): siRNA sense strand
cggcagaaguugagguaaa

SEQ ID NO: 2333166 - RNA, 19 nt, Homo sapiens
  misc_RNA (1)...(19): siRNA sense strand
cuuuaaagguguugggaaa

SEQ ID NO: 2333167 - RNA, 19 nt, Homo sapiens
  misc_RNA (1)...(19): siRNA sense strand
acaauaaagcugagugaaa

SEQ ID NO: 2333168 - RNA, 19 nt, Homo sapiens
  misc_RNA (1)...(19): siRNA sense strand
cugagaaguuagagagaga

SEQ ID NO: 2333169 - RNA, 19 nt, Homo sapiens
  misc_RNA (1)...(19): siRNA sense strand
aguuaaaguuggucacaua

SEQ ID NO: 2333170 - RNA, 19 nt, Homo sapiens
  misc_RNA (1)...(19): siRNA sense strand
cggcagagaagaagcuaaa

SEQ ID NO: 2333171 - RNA, 19 nt, Homo sapiens
  misc_RNA (1)...(19): siRNA sense strand
cuacagagacugaagacaa

SEQ ID NO: 2333172 - RNA, 19 nt, Homo sapiens
  misc_RNA (1)...(19): siRNA sense strand
ggauauaaaguacaggaaa

SEQ ID NO: 2333173 - RNA, 19 nt, Homo sapiens
  misc_RNA (1)...(19): siRNA sense strand
cuacaaagugccagaauau

SEQ ID NO: 2333174 - RNA, 19 nt, Homo sapiens
  misc_RNA (1)...(19): siRNA sense strand
cugagaaacugguucguaa

SEQ ID NO: 2333175 - RNA, 19 nt, Homo sapiens
  misc_RNA (1)...(19): siRNA sense strand
gggaaaagaaggauacaaa

SEQ ID NO: 2333176 - RNA, 19 nt, Homo sapiens
  misc_RNA (1)...(19): siRNA sense strand
cagaauacuuggaugaaaa

SEQ ID NO: 2333177 - RNA, 19 nt, Homo sapiens
  misc_RNA (1)...(19): siRNA sense strand
ugaaauaaacgcaaagcua

SEQ ID NO: 2333178 - RNA, 19 nt, Homo sapiens
  misc_RNA (1)...(19): siRNA sense strand
aggcugaaguggagaugua

SEQ ID NO: 2333179 - RNA, 19 nt, Homo sapiens
  misc_RNA (1)...(19): siRNA sense strand
gcuugaacccuuagaaauu

SEQ ID NO: 2333180 - RNA, 19 nt, Homo sapiens
  misc_RNA (1)...(19): siRNA sense strand
gaaucagugaagugggaaa

SEQ ID NO: 2333181 - RNA, 19 nt, Homo sapiens
  misc_RNA (1)...(19): siRNA sense strand
cuguauacaacuaaggaaa

SEQ ID NO: 2333182 - RNA, 19 nt, Homo sapiens
  misc_RNA (1)...(19): siRNA sense strand
ccaaaggcgagaugauaaa

SEQ ID NO: 2333183 - RNA, 19 nt, Homo sapiens
  misc_RNA (1)...(19): siRNA sense strand
gagagagaauuuaaggaau

SEQ ID NO: 2333184 - RNA, 19 nt, Homo sapiens
  misc_RNA (1)...(19): siRNA sense strand
agguaaagaaagcuggaua

SEQ ID NO: 2333185 - RNA, 19 nt, Homo sapiens
  misc_RNA (1)...(19): siRNA sense strand
gggacuaugugguggacuu

SEQ ID NO: 2333186 - RNA, 19 nt, Homo sapiens
  misc_RNA (1)...(19): siRNA sense strand
ccguauuggaagaaauuua

SEQ ID NO: 2333187 - RNA, 19 nt, Homo sapiens
  misc_RNA (1)...(19): siRNA sense strand
agccagaagaugagaacua

SEQ ID NO: 2333188 - RNA, 19 nt, Homo sapiens
  misc_RNA (1)...(19): siRNA sense strand
cugaagaaggaaaugauaa

SEQ ID NO: 2333189 - RNA, 19 nt, Homo sapiens
  misc_RNA (1)...(19): siRNA sense strand
agugaauaguauaguggaa

SEQ ID NO: 2333190 - RNA, 19 nt, Homo sapiens
  misc_RNA (1)...(19): siRNA sense strand
uguuggagauugugaacua

SEQ ID NO: 2333191 - RNA, 19 nt, Homo sapiens
  misc_RNA (1)...(19): siRNA sense strand
aggauugggugcagaaauu

SEQ ID NO: 2333192 - RNA, 19 nt, Homo sapiens
  misc_RNA (1)...(19): siRNA sense strand
acaaagugccagaauauaa

SEQ ID NO: 2333193 - RNA, 19 nt, Homo sapiens
  misc_RNA (1)...(19): siRNA sense strand
aucuaaaggugacgaguaa

SEQ ID NO: 2333194 - RNA, 19 nt, Homo sapiens
  misc_RNA (1)...(19): siRNA sense strand
cauuaaaucuugagguugu

SEQ ID NO: 2333195 - RNA, 19 nt, Homo sapiens
  misc_RNA (1)...(19): siRNA sense strand
gauauaaaguacaggaaag

SEQ ID NO: 2333196 - RNA, 19 nt, Homo sapiens
  misc_RNA (1)...(19): siRNA sense strand
cguaaaggaucuagcacca

SEQ ID NO: 2333197 - RNA, 19 nt, Homo sapiens
  misc_RNA (1)...(19): siRNA sense strand
uggauuuguuaguggcaua

SEQ ID NO: 2333198 - RNA, 19 nt, Homo sapiens
  misc_RNA (1)...(19): siRNA sense strand
aguaguugaucaagaacaa

SEQ ID NO: 2333199 - RNA, 19 nt, Homo sapiens
  misc_RNA (1)...(19): siRNA sense strand
cuacaagggauuauggaau

SEQ ID NO: 2333200 - RNA, 19 nt, Homo sapiens
  misc_RNA (1)...(19): siRNA sense strand
uggaauauguaaaggcuga

SEQ ID NO: 2333201 - RNA, 19 nt, Homo sapiens
  misc_RNA (1)...(19): siRNA sense strand
acgcaaagcuaaggaauau

SEQ ID NO: 2333202 - RNA, 19 nt, Homo sapiens
  misc_RNA (1)...(19): siRNA sense strand
uguagaaaccagugugcaa

SEQ ID NO: 2333203 - RNA, 19 nt, Homo sapiens
  misc_RNA (1)...(19): siRNA sense strand
cauaaagccuaaucagcaa

SEQ ID NO: 2333204 - RNA, 19 nt, Homo sapiens
  misc_RNA (1)...(19): siRNA sense strand
gagaaguuagagagagaau

SEQ ID NO: 2333205 - RNA, 19 nt, Homo sapiens
  misc_RNA (1)...(19): siRNA sense strand
ggaugggacuggaaaucaa

SEQ ID NO: 2333206 - RNA, 19 nt, Homo sapiens
  misc_RNA (1)...(19): siRNA sense strand
augccaaacuugugaugaa

SEQ ID NO: 2333207 - RNA, 19 nt, Homo sapiens
  misc_RNA (1)...(19): siRNA sense strand
aagcaggauuguucaguaa

SEQ ID NO: 2333208 - RNA, 19 nt, Homo sapiens
  misc_RNA (1)...(19): siRNA sense strand
cggaauucaucgaaagcau

SEQ ID NO: 2333209 - RNA, 19 nt, Homo sapiens
  misc_RNA (1)...(19): siRNA sense strand
aggcuuaguuucuggauuu

SEQ ID NO: 2333210 - RNA, 19 nt, Homo sapiens
  misc_RNA (1)...(19): siRNA sense strand
uugaaagaguucugcuuaa

SEQ ID NO: 2333211 - RNA, 19 nt, Homo sapiens
  misc_RNA (1)...(19): siRNA sense strand
gaacaacaucugccggaaa

SEQ ID NO: 2333212 - RNA, 19 nt, Homo sapiens
  misc_RNA (1)...(19): siRNA sense strand
ugaauuaccagaugugaaa

SEQ ID NO: 2333213 - RNA, 19 nt, Homo sapiens
  misc_RNA (1)...(19): siRNA sense strand
aguacaaagcagacggaau

SEQ ID NO: 2333214 - RNA, 19 nt, Homo sapiens
  misc_RNA (1)...(19): siRNA sense strand
cagcauuaaaaguggaaua

SEQ ID NO: 2333215 - RNA, 19 nt, Homo sapiens
  misc_RNA (1)...(19): siRNA sense strand
caacagaagagaagagaag

SEQ ID NO: 2333216 - RNA, 19 nt, Homo sapiens
  misc_RNA (1)...(19): siRNA sense strand
uggaauugauugaaagcau

SEQ ID NO: 2333217 - RNA, 19 nt, Homo sapiens
  misc_RNA (1)...(19): siRNA sense strand
agguugugguugaacgaaa

SEQ ID NO: 2333218 - RNA, 19 nt, Homo sapiens
  misc_RNA (1)...(19): siRNA sense strand
acuacaaagugccagaaua

SEQ ID NO: 2333219 - RNA, 19 nt, Homo sapiens
  misc_RNA (1)...(19): siRNA sense strand
acaugaugaaacugagaaa

SEQ ID NO: 2333220 - RNA, 19 nt, Homo sapiens
  misc_RNA (1)...(19): siRNA sense strand
gcacaaaaucugccauaua

SEQ ID NO: 2333221 - RNA, 19 nt, Homo sapiens
  misc_RNA (1)...(19): siRNA sense strand
gugcagaaauugagauuag

SEQ ID NO: 2333222 - RNA, 19 nt, Homo sapiens
  misc_RNA (1)...(19): siRNA sense strand
caacauaccauuaggaucu

SEQ ID NO: 2333223 - RNA, 19 nt, Homo sapiens
  misc_RNA (1)...(19): siRNA sense strand
ugaaacaaggugaggccaa

SEQ ID NO: 2333224 - RNA, 19 nt, Homo sapiens
  misc_RNA (1)...(19): siRNA sense strand
acaaaggagaugucauuaa

SEQ ID NO: 2333225 - RNA, 19 nt, Homo sapiens
  misc_RNA (1)...(19): siRNA sense strand
agaaguaccuacacaggaa

SEQ ID NO: 2333226 - RNA, 19 nt, Homo sapiens
  misc_RNA (1)...(19): siRNA sense strand
aggaauggcacuaggacuu

SEQ ID NO: 2333227 - RNA, 19 nt, Homo sapiens
  misc_RNA (1)...(19): siRNA sense strand
aauuaagauugaagggcuu

SEQ ID NO: 2333228 - RNA, 19 nt, Homo sapiens
  misc_RNA (1)...(19): siRNA sense strand
cagugaagugggaaauuaa

SEQ ID NO: 2333229 - RNA, 19 nt, Homo sapiens
  misc_RNA (1)...(19): siRNA sense strand
acaauuuagucaaggcauu

SEQ ID NO: 2333230 - RNA, 19 nt, Homo sapiens
  misc_RNA (1)...(19): siRNA sense strand
uuacaauacuggucagaca

SEQ ID NO: 2333231 - RNA, 19 nt, Homo sapiens
  misc_RNA (1)...(19): siRNA sense strand
ccguacagguugagggaug

SEQ ID NO: 2333232 - RNA, 19 nt, Homo sapiens
  misc_RNA (1)...(19): siRNA sense strand
aagcaaagcaacaggaacu

SEQ ID NO: 2333233 - RNA, 19 nt, Homo sapiens
  misc_RNA (1)...(19): siRNA sense strand
cauggaagcauauuagaaa

SEQ ID NO: 2333234 - RNA, 19 nt, Homo sapiens
  misc_RNA (1)...(19): siRNA sense strand
ggacuaauuacaaugacaa

SEQ ID NO: 2333235 - RNA, 19 nt, Homo sapiens
  misc_RNA (1)...(19): siRNA sense strand
ccucaugucaagaaagcaa

SEQ ID NO: 2333236 - RNA, 19 nt, Homo sapiens
  misc_RNA (1)...(19): siRNA sense strand
ucagaaagguacagaucca

SEQ ID NO: 2333237 - RNA, 19 nt, Homo sapiens
  misc_RNA (1)...(19): siRNA sense strand
agaagaugguugggauuua

SEQ ID NO: 2333238 - RNA, 19 nt, Homo sapiens
  misc_RNA (1)...(19): siRNA sense strand
ugggaaagguuuaguagga

SEQ ID NO: 2333239 - RNA, 19 nt, Homo sapiens
  misc_RNA (1)...(19): siRNA sense strand
cggcagaaguugagguaaa

SEQ ID NO: 2333240 - RNA, 19 nt, Homo sapiens
  misc_RNA (1)...(19): siRNA sense strand
cuuuaaagguguugggaaa

SEQ ID NO: 2333241 - RNA, 19 nt, Homo sapiens
  misc_RNA (1)...(19): siRNA sense strand
acaauaaagcugagugaaa

SEQ ID NO: 2333242 - RNA, 19 nt, Homo sapiens
  misc_RNA (1)...(19): siRNA sense strand
cugagaaguuagagagaga

SEQ ID NO: 2333243 - RNA, 19 nt, Homo sapiens
  misc_RNA (1)...(19): siRNA sense strand
aguuaaaguuggucacaua

SEQ ID NO: 2333244 - RNA, 19 nt, Homo sapiens
  misc_RNA (1)...(19): siRNA sense strand
cggcagagaagaagcuaaa

SEQ ID NO: 2333245 - RNA, 19 nt, Homo sapiens
  misc_RNA (1)...(19): siRNA sense strand
cuacagagacugaagacaa

SEQ ID NO: 2333246 - RNA, 19 nt, Homo sapiens
  misc_RNA (1)...(19): siRNA sense strand
ggauauaaaguacaggaaa

SEQ ID NO: 2333247 - RNA, 19 nt, Homo sapiens
  misc_RNA (1)...(19): siRNA sense strand
cuacaaagugccagaauau

SEQ ID NO: 2333248 - RNA, 19 nt, Homo sapiens
  misc_RNA (1)...(19): siRNA sense strand
cugagaaacugguucguaa

SEQ ID NO: 2333249 - RNA, 19 nt, Homo sapiens
  misc_RNA (1)...(19): siRNA sense strand
gggaaaagaaggauacaaa

SEQ ID NO: 2333250 - RNA, 19 nt, Homo sapiens
  misc_RNA (1)...(19): siRNA sense strand
cagaauacuuggaugaaaa

SEQ ID NO: 2333251 - RNA, 19 nt, Homo sapiens
  misc_RNA (1)...(19): siRNA sense strand
ugaaauaaacgcaaagcua

SEQ ID NO: 2333252 - RNA, 19 nt, Homo sapiens
  misc_RNA (1)...(19): siRNA sense strand
aggcugaaguggagaugua

SEQ ID NO: 2333253 - RNA, 19 nt, Homo sapiens
  misc_RNA (1)...(19): siRNA sense strand
gcuugaacccuuagaaauu

SEQ ID NO: 2333254 - RNA, 19 nt, Homo sapiens
  misc_RNA (1)...(19): siRNA sense strand
gaaucagugaagugggaaa

SEQ ID NO: 2333255 - RNA, 19 nt, Homo sapiens
  misc_RNA (1)...(19): siRNA sense strand
cuguauacaacuaaggaaa

SEQ ID NO: 2333256 - RNA, 19 nt, Homo sapiens
  misc_RNA (1)...(19): siRNA sense strand
ccaaaggcgagaugauaaa

SEQ ID NO: 2333257 - RNA, 19 nt, Homo sapiens
  misc_RNA (1)...(19): siRNA sense strand
gagagagaauuuaaggaau

SEQ ID NO: 2333258 - RNA, 19 nt, Homo sapiens
  misc_RNA (1)...(19): siRNA sense strand
agguaaagaaagcuggaua

SEQ ID NO: 2333259 - RNA, 19 nt, Homo sapiens
  misc_RNA (1)...(19): siRNA sense strand
gggacuaugugguggacuu

SEQ ID NO: 2333260 - RNA, 19 nt, Homo sapiens
  misc_RNA (1)...(19): siRNA sense strand
ccguauuggaagaaauuua

SEQ ID NO: 2333261 - RNA, 19 nt, Homo sapiens
  misc_RNA (1)...(19): siRNA sense strand
agccagaagaugagaacua

SEQ ID NO: 2333262 - RNA, 19 nt, Homo sapiens
  misc_RNA (1)...(19): siRNA sense strand
cugaagaaggaaaugauaa

SEQ ID NO: 2333263 - RNA, 19 nt, Homo sapiens
  misc_RNA (1)...(19): siRNA sense strand
agugaauaguauaguggaa

SEQ ID NO: 2333264 - RNA, 19 nt, Homo sapiens
  misc_RNA (1)...(19): siRNA sense strand
uguuggagauugugaacua

SEQ ID NO: 2333265 - RNA, 19 nt, Homo sapiens
  misc_RNA (1)...(19): siRNA sense strand
aggauugggugcagaaauu

SEQ ID NO: 2333266 - RNA, 19 nt, Homo sapiens
  misc_RNA (1)...(19): siRNA sense strand
acaaagugccagaauauaa

SEQ ID NO: 2333267 - RNA, 19 nt, Homo sapiens
  misc_RNA (1)...(19): siRNA sense strand
aucuaaaggugacgaguaa

SEQ ID NO: 2333268 - RNA, 19 nt, Homo sapiens
  misc_RNA (1)...(19): siRNA sense strand
cauuaaaucuugagguugu

SEQ ID NO: 2333269 - RNA, 19 nt, Homo sapiens
  misc_RNA (1)...(19): siRNA sense strand
gauauaaaguacaggaaag

SEQ ID NO: 2333270 - RNA, 19 nt, Homo sapiens
  misc_RNA (1)...(19): siRNA sense strand
cguaaaggaucuagcacca

SEQ ID NO: 2333271 - RNA, 19 nt, Homo sapiens
  misc_RNA (1)...(19): siRNA sense strand
uggauuuguuaguggcaua

SEQ ID NO: 2333272 - RNA, 19 nt, Homo sapiens
  misc_RNA (1)...(19): siRNA sense strand
aguaguugaucaagaacaa

SEQ ID NO: 2333273 - RNA, 19 nt, Homo sapiens
  misc_RNA (1)...(19): siRNA sense strand
cuacaagggauuauggaau

SEQ ID NO: 2333274 - RNA, 19 nt, Homo sapiens
  misc_RNA (1)...(19): siRNA sense strand
uggaauauguaaaggcuga

SEQ ID NO: 2333275 - RNA, 19 nt, Homo sapiens
  misc_RNA (1)...(19): siRNA sense strand
acgcaaagcuaaggaauau

SEQ ID NO: 2333276 - RNA, 19 nt, Homo sapiens
  misc_RNA (1)...(19): siRNA sense strand
uguagaaaccagugugcaa

SEQ ID NO: 2333277 - RNA, 19 nt, Homo sapiens
  misc_RNA (1)...(19): siRNA sense strand
cauaaagccuaaucagcaa

SEQ ID NO: 2333278 - RNA, 19 nt, Homo sapiens
  misc_RNA (1)...(19): siRNA sense strand
gagaaguuagagagagaau

SEQ ID NO: 2333279 - RNA, 19 nt, Homo sapiens
  misc_RNA (1)...(19): siRNA sense strand
ggaugggacuggaaaucaa

SEQ ID NO: 2333280 - RNA, 19 nt, Homo sapiens
  misc_RNA (1)...(19): siRNA sense strand
augccaaacuugugaugaa

SEQ ID NO: 2333281 - RNA, 19 nt, Homo sapiens
  misc_RNA (1)...(19): siRNA sense strand
aagcaggauuguucaguaa

SEQ ID NO: 2333282 - RNA, 19 nt, Homo sapiens
  misc_RNA (1)...(19): siRNA sense strand
cggaauucaucgaaagcau

SEQ ID NO: 2333283 - RNA, 19 nt, Homo sapiens
  misc_RNA (1)...(19): siRNA sense strand
aggcuuaguuucuggauuu

SEQ ID NO: 2333284 - RNA, 19 nt, Homo sapiens
  misc_RNA (1)...(19): siRNA sense strand
uugaaagaguucugcuuaa

SEQ ID NO: 2333285 - RNA, 19 nt, Homo sapiens
  misc_RNA (1)...(19): siRNA sense strand
gaacaacaucugccggaaa

SEQ ID NO: 2333286 - RNA, 19 nt, Homo sapiens
  misc_RNA (1)...(19): siRNA sense strand
ugaauuaccagaugugaaa

SEQ ID NO: 2333287 - RNA, 19 nt, Homo sapiens
  misc_RNA (1)...(19): siRNA sense strand
aguacaaagcagacggaau

SEQ ID NO: 2333288 - RNA, 19 nt, Homo sapiens
  misc_RNA (1)...(19): siRNA sense strand
cagcauuaaaaguggaaua

SEQ ID NO: 2333289 - RNA, 19 nt, Homo sapiens
  misc_RNA (1)...(19): siRNA sense strand
caacagaagagaagagaag

SEQ ID NO: 2333290 - RNA, 19 nt, Homo sapiens
  misc_RNA (1)...(19): siRNA sense strand
uggaauugauugaaagcau

SEQ ID NO: 2333291 - RNA, 19 nt, Homo sapiens
  misc_RNA (1)...(19): siRNA sense strand
agguugugguugaacgaaa

SEQ ID NO: 2333292 - RNA, 19 nt, Homo sapiens
  misc_RNA (1)...(19): siRNA sense strand
acuacaaagugccagaaua

SEQ ID NO: 2333293 - RNA, 19 nt, Homo sapiens
  misc_RNA (1)...(19): siRNA sense strand
acaugaugaaacugagaaa

SEQ ID NO: 2333294 - RNA, 19 nt, Homo sapiens
  misc_RNA (1)...(19): siRNA sense strand
gcacaaaaucugccauaua

SEQ ID NO: 2333295 - RNA, 19 nt, Homo sapiens
  misc_RNA (1)...(19): siRNA sense strand
gugcagaaauugagauuag

SEQ ID NO: 2333296 - RNA, 19 nt, Homo sapiens
  misc_RNA (1)...(19): siRNA sense strand
caacauaccauuaggaucu

SEQ ID NO: 2333297 - RNA, 19 nt, Homo sapiens
  misc_RNA (1)...(19): siRNA sense strand
ugaaacaaggugaggccaa

SEQ ID NO: 2333298 - RNA, 19 nt, Homo sapiens
  misc_RNA (1)...(19): siRNA sense strand
acaaaggagaugucauuaa

SEQ ID NO: 2333299 - RNA, 19 nt, Homo sapiens
  misc_RNA (1)...(19): siRNA sense strand
agaaguaccuacacaggaa

SEQ ID NO: 2333300 - RNA, 19 nt, Homo sapiens
  misc_RNA (1)...(19): siRNA sense strand
aggaauggcacuaggacuu

SEQ ID NO: 2333301 - RNA, 19 nt, Homo sapiens
  misc_RNA (1)...(19): siRNA sense strand
aauuaagauugaagggcuu

SEQ ID NO: 2333302 - RNA, 19 nt, Homo sapiens
  misc_RNA (1)...(19): siRNA sense strand
cagugaagugggaaauuaa

SEQ ID NO: 2333303 - RNA, 19 nt, Homo sapiens
  misc_RNA (1)...(19): siRNA sense strand
acaauuuagucaaggcauu

SEQ ID NO: 2333304 - RNA, 19 nt, Homo sapiens
  misc_RNA (1)...(19): siRNA sense strand
uuacaauacuggucagaca

SEQ ID NO: 2333305 - RNA, 19 nt, Homo sapiens
  misc_RNA (1)...(19): siRNA sense strand
ccguacagguugagggaug

SEQ ID NO: 2333306 - RNA, 19 nt, Homo sapiens
  misc_RNA (1)...(19): siRNA sense strand
aagcaaagcaacaggaacu

SEQ ID NO: 2333307 - RNA, 19 nt, Homo sapiens
  misc_RNA (1)...(19): siRNA sense strand
cauggaagcauauuagaaa

SEQ ID NO: 2333308 - RNA, 19 nt, Homo sapiens
  misc_RNA (1)...(19): siRNA sense strand
ggacuaauuacaaugacaa

SEQ ID NO: 2333309 - RNA, 19 nt, Homo sapiens
  misc_RNA (1)...(19): siRNA sense strand
ccucaugucaagaaagcaa

SEQ ID NO: 2333310 - RNA, 19 nt, Homo sapiens
  misc_RNA (1)...(19): siRNA sense strand
ucagaaagguacagaucca

SEQ ID NO: 2333311 - RNA, 19 nt, Homo sapiens
  misc_RNA (1)...(19): siRNA sense strand
agaagaugguugggauuua

SEQ ID NO: 2333312 - RNA, 19 nt, Homo sapiens
  misc_RNA (1)...(19): siRNA sense strand
ugggaaagguuuaguagga

SEQ ID NO: 2333313 - RNA, 19 nt, Homo sapiens
  misc_RNA (1)...(19): siRNA sense strand
cagaagagugucagaacaa

SEQ ID NO: 2333314 - RNA, 19 nt, Homo sapiens
  misc_RNA (1)...(19): siRNA sense strand
guagagaaacacaaggaaa

SEQ ID NO: 2333315 - RNA, 19 nt, Homo sapiens
  misc_RNA (1)...(19): siRNA sense strand
ucgaagaacuaaagcaaca

SEQ ID NO: 2333316 - RNA, 19 nt, Homo sapiens
  misc_RNA (1)...(19): siRNA sense strand
cuaucugaguggagaagaa

SEQ ID NO: 2333317 - RNA, 19 nt, Homo sapiens
  misc_RNA (1)...(19): siRNA sense strand
cggagaagcugauacggaa

SEQ ID NO: 2333318 - RNA, 19 nt, Homo sapiens
  misc_RNA (1)...(19): siRNA sense strand
uuaugaagaaggagguaaa

SEQ ID NO: 2333319 - RNA, 19 nt, Homo sapiens
  misc_RNA (1)...(19): siRNA sense strand
uaacagaaguggaagcaca

SEQ ID NO: 2333320 - RNA, 19 nt, Homo sapiens
  misc_RNA (1)...(19): siRNA sense strand
uagagaaacacaaggaaau

SEQ ID NO: 2333321 - RNA, 19 nt, Homo sapiens
  misc_RNA (1)...(19): siRNA sense strand
aaccaaaggacuugaacaa

SEQ ID NO: 2333322 - RNA, 19 nt, Homo sapiens
  misc_RNA (1)...(19): siRNA sense strand
aaaugaaagaccugguuaa

SEQ ID NO: 2333323 - RNA, 19 nt, Homo sapiens
  misc_RNA (1)...(19): siRNA sense strand
aggaaguggugcaguauau

SEQ ID NO: 2333324 - RNA, 19 nt, Homo sapiens
  misc_RNA (1)...(19): siRNA sense strand
agguggagcuggagcaaga

SEQ ID NO: 2333325 - RNA, 19 nt, Homo sapiens
  misc_RNA (1)...(19): siRNA sense strand
aaacaaggagacagagcua

SEQ ID NO: 2333326 - RNA, 19 nt, Homo sapiens
  misc_RNA (1)...(19): siRNA sense strand
acuggaagaugaagaagaa

SEQ ID NO: 2333327 - RNA, 19 nt, Homo sapiens
  misc_RNA (1)...(19): siRNA sense strand
aaguaaagaaagaggcuga

SEQ ID NO: 2333328 - RNA, 19 nt, Homo sapiens
  misc_RNA (1)...(19): siRNA sense strand
caucgaagaacuaaagcaa

SEQ ID NO: 2333329 - RNA, 19 nt, Homo sapiens
  misc_RNA (1)...(19): siRNA sense strand
cggcaagaacaguauuaua

SEQ ID NO: 2333330 - RNA, 19 nt, Homo sapiens
  misc_RNA (1)...(19): siRNA sense strand
ggagaagcugauacggaaa

SEQ ID NO: 2333331 - RNA, 19 nt, Homo sapiens
  misc_RNA (1)...(19): siRNA sense strand
uggaagaggagaagacaga

SEQ ID NO: 2333332 - RNA, 19 nt, Homo sapiens
  misc_RNA (1)...(19): siRNA sense strand
caacaaaccugcuggccca

SEQ ID NO: 2333333 - RNA, 19 nt, Homo sapiens
  misc_RNA (1)...(19): siRNA sense strand
agaacuaaagcaacagaaa

SEQ ID NO: 2333334 - RNA, 19 nt, Homo sapiens
  misc_RNA (1)...(19): siRNA sense strand
aggaagugauagaagcaau

SEQ ID NO: 2333335 - RNA, 19 nt, Homo sapiens
  misc_RNA (1)...(19): siRNA sense strand
agcuaaauccaaagacaaa

SEQ ID NO: 2333336 - RNA, 19 nt, Homo sapiens
  misc_RNA (1)...(19): siRNA sense strand
caccaugacaacugaaaua

SEQ ID NO: 2333337 - RNA, 19 nt, Homo sapiens
  misc_RNA (1)...(19): siRNA sense strand
gauacaaggaggaaggcau

SEQ ID NO: 2333338 - RNA, 19 nt, Homo sapiens
  misc_RNA (1)...(19): siRNA sense strand
uagaugggauaguggcaaa

SEQ ID NO: 2333339 - RNA, 19 nt, Homo sapiens
  misc_RNA (1)...(19): siRNA sense strand
ggcuauggccacagaagaa

SEQ ID NO: 2333340 - RNA, 19 nt, Homo sapiens
  misc_RNA (1)...(19): siRNA sense strand
ggaacagagagcuaagcaa

SEQ ID NO: 2333341 - RNA, 19 nt, Homo sapiens
  misc_RNA (1)...(19): siRNA sense strand
ggaagugauagaagcaauu

SEQ ID NO: 2333342 - RNA, 19 nt, Homo sapiens
  misc_RNA (1)...(19): siRNA sense strand
agacaauggaccuggcuau

SEQ ID NO: 2333343 - RNA, 19 nt, Homo sapiens
  misc_RNA (1)...(19): siRNA sense strand
agaagauaacagaagcuaa

SEQ ID NO: 2333344 - RNA, 19 nt, Homo sapiens
  misc_RNA (1)...(19): siRNA sense strand
aggaagccaugaaaggaaa

SEQ ID NO: 2333345 - RNA, 19 nt, Homo sapiens
  misc_RNA (1)...(19): siRNA sense strand
cugauggaacagagagcua

SEQ ID NO: 2333346 - RNA, 19 nt, Homo sapiens
  misc_RNA (1)...(19): siRNA sense strand
gaagaggagaagacagaga

SEQ ID NO: 2333347 - RNA, 19 nt, Homo sapiens
  misc_RNA (1)...(19): siRNA sense strand
ccaaauucgucaaguggga

SEQ ID NO: 2333348 - RNA, 19 nt, Homo sapiens
  misc_RNA (1)...(19): siRNA sense strand
uuaauagacuugaaggaca

SEQ ID NO: 2333349 - RNA, 19 nt, Homo sapiens
  misc_RNA (1)...(19): siRNA sense strand
aagaaaucugugagaaaga

SEQ ID NO: 2333350 - RNA, 19 nt, Homo sapiens
  misc_RNA (1)...(19): siRNA sense strand
aggagaagacagagaugau

SEQ ID NO: 2333351 - RNA, 19 nt, Homo sapiens
  misc_RNA (1)...(19): siRNA sense strand
acaacagccucgccagaaa

SEQ ID NO: 2333352 - RNA, 19 nt, Homo sapiens
  misc_RNA (1)...(19): siRNA sense strand
agagaaacacaaggaaaua

SEQ ID NO: 2333353 - RNA, 19 nt, Homo sapiens
  misc_RNA (1)...(19): siRNA sense strand
cguggaaaccaaaggacuu

SEQ ID NO: 2333354 - RNA, 19 nt, Homo sapiens
  misc_RNA (1)...(19): siRNA sense strand
aagcuaaauccaaagacaa

SEQ ID NO: 2333355 - RNA, 19 nt, Homo sapiens
  misc_RNA (1)...(19): siRNA sense strand
caggaagccaugaaaggaa

SEQ ID NO: 2333356 - RNA, 19 nt, Homo sapiens
  misc_RNA (1)...(19): siRNA sense strand
aaagaagcucucagaacaa

SEQ ID NO: 2333357 - RNA, 19 nt, Homo sapiens
  misc_RNA (1)...(19): siRNA sense strand
ccaaaacaucccaaggaaa

SEQ ID NO: 2333358 - RNA, 19 nt, Homo sapiens
  misc_RNA (1)...(19): siRNA sense strand
ggcugauccuggagaaaca

SEQ ID NO: 2333359 - RNA, 19 nt, Homo sapiens
  misc_RNA (1)...(19): siRNA sense strand
gaaaucugugagaaagaaa

SEQ ID NO: 2333360 - RNA, 19 nt, Homo sapiens
  misc_RNA (1)...(19): siRNA sense strand
ggccugaccucgugaacau

SEQ ID NO: 2333361 - RNA, 19 nt, Homo sapiens
  misc_RNA (1)...(19): siRNA sense strand
ugucagaacaaucaguuaa

SEQ ID NO: 2333362 - RNA, 19 nt, Homo sapiens
  misc_RNA (1)...(19): siRNA sense strand
aguuaaagaagcucaaaga

SEQ ID NO: 2333363 - RNA, 19 nt, Homo sapiens
  misc_RNA (1)...(19): siRNA sense strand
gugagaaagaaaagaaaga

SEQ ID NO: 2333364 - RNA, 19 nt, Homo sapiens
  misc_RNA (1)...(19): siRNA sense strand
cuuucaaggaagugauaga

SEQ ID NO: 2333365 - RNA, 19 nt, Homo sapiens
  misc_RNA (1)...(19): siRNA sense strand
ugucuuaacagaaguggaa

SEQ ID NO: 2333366 - RNA, 19 nt, Homo sapiens
  misc_RNA (1)...(19): siRNA sense strand
ggaauggacaaaugagguu

SEQ ID NO: 2333367 - RNA, 19 nt, Homo sapiens
  misc_RNA (1)...(19): siRNA sense strand
cagaaaauggggugaauca

SEQ ID NO: 2333368 - RNA, 19 nt, Homo sapiens
  misc_RNA (1)...(19): siRNA sense strand
cagaacaaucaguuaaaga

SEQ ID NO: 2333369 - RNA, 19 nt, Homo sapiens
  misc_RNA (1)...(19): siRNA sense strand
agaaacuggauuugaauga

SEQ ID NO: 2333370 - RNA, 19 nt, Homo sapiens
  misc_RNA (1)...(19): siRNA sense strand
ggaagaguggcuacagauu

SEQ ID NO: 2333371 - RNA, 19 nt, Homo sapiens
  misc_RNA (1)...(19): siRNA sense strand
augugaaccugauggaaca

SEQ ID NO: 2333372 - RNA, 19 nt, Homo sapiens
  misc_RNA (1)...(19): siRNA sense strand
uccaagaagaaguggccaa

SEQ ID NO: 2333373 - RNA, 19 nt, Homo sapiens
  misc_RNA (1)...(19): siRNA sense strand
cgccagaaaaggacaaaua

SEQ ID NO: 2333374 - RNA, 19 nt, Homo sapiens
  misc_RNA (1)...(19): siRNA sense strand
gucagauggaagaggagaa

SEQ ID NO: 2333375 - RNA, 19 nt, Homo sapiens
  misc_RNA (1)...(19): siRNA sense strand
gcaugaucacaguggugua

SEQ ID NO: 2333376 - RNA, 19 nt, Homo sapiens
  misc_RNA (1)...(19): siRNA sense strand
cagaagagugucagaacaa

SEQ ID NO: 2333377 - RNA, 19 nt, Homo sapiens
  misc_RNA (1)...(19): siRNA sense strand
guagagaaacacaaggaaa

SEQ ID NO: 2333378 - RNA, 19 nt, Homo sapiens
  misc_RNA (1)...(19): siRNA sense strand
ucgaagaacuaaagcaaca

SEQ ID NO: 2333379 - RNA, 19 nt, Homo sapiens
  misc_RNA (1)...(19): siRNA sense strand
cuaucugaguggagaagaa

SEQ ID NO: 2333380 - RNA, 19 nt, Homo sapiens
  misc_RNA (1)...(19): siRNA sense strand
cggagaagcugauacggaa

SEQ ID NO: 2333381 - RNA, 19 nt, Homo sapiens
  misc_RNA (1)...(19): siRNA sense strand
uuaugaagaaggagguaaa

SEQ ID NO: 2333382 - RNA, 19 nt, Homo sapiens
  misc_RNA (1)...(19): siRNA sense strand
uaacagaaguggaagcaca

SEQ ID NO: 2333383 - RNA, 19 nt, Homo sapiens
  misc_RNA (1)...(19): siRNA sense strand
uagagaaacacaaggaaau

SEQ ID NO: 2333384 - RNA, 19 nt, Homo sapiens
  misc_RNA (1)...(19): siRNA sense strand
aaccaaaggacuugaacaa

SEQ ID NO: 2333385 - RNA, 19 nt, Homo sapiens
  misc_RNA (1)...(19): siRNA sense strand
aaaugaaagaccugguuaa

SEQ ID NO: 2333386 - RNA, 19 nt, Homo sapiens
  misc_RNA (1)...(19): siRNA sense strand
aggaaguggugcaguauau

SEQ ID NO: 2333387 - RNA, 19 nt, Homo sapiens
  misc_RNA (1)...(19): siRNA sense strand
aaacaaggagacagagcua

SEQ ID NO: 2333388 - RNA, 19 nt, Homo sapiens
  misc_RNA (1)...(19): siRNA sense strand
acuggaagaugaagaagaa

SEQ ID NO: 2333389 - RNA, 19 nt, Homo sapiens
  misc_RNA (1)...(19): siRNA sense strand
aaguaaagaaagaggcuga

SEQ ID NO: 2333390 - RNA, 19 nt, Homo sapiens
  misc_RNA (1)...(19): siRNA sense strand
caucgaagaacuaaagcaa

SEQ ID NO: 2333391 - RNA, 19 nt, Homo sapiens
  misc_RNA (1)...(19): siRNA sense strand
cggcaagaacaguauuaua

SEQ ID NO: 2333392 - RNA, 19 nt, Homo sapiens
  misc_RNA (1)...(19): siRNA sense strand
ggagaagcugauacggaaa

SEQ ID NO: 2333393 - RNA, 19 nt, Homo sapiens
  misc_RNA (1)...(19): siRNA sense strand
uggaagaggagaagacaga

SEQ ID NO: 2333394 - RNA, 19 nt, Homo sapiens
  misc_RNA (1)...(19): siRNA sense strand
caacaaaccugcuggccca

SEQ ID NO: 2333395 - RNA, 19 nt, Homo sapiens
  misc_RNA (1)...(19): siRNA sense strand
agaacuaaagcaacagaaa

SEQ ID NO: 2333396 - RNA, 19 nt, Homo sapiens
  misc_RNA (1)...(19): siRNA sense strand
aggaagugauagaagcaau

SEQ ID NO: 2333397 - RNA, 19 nt, Homo sapiens
  misc_RNA (1)...(19): siRNA sense strand
agcuaaauccaaagacaaa

SEQ ID NO: 2333398 - RNA, 19 nt, Homo sapiens
  misc_RNA (1)...(19): siRNA sense strand
caccaugacaacugaaaua

SEQ ID NO: 2333399 - RNA, 19 nt, Homo sapiens
  misc_RNA (1)...(19): siRNA sense strand
gauacaaggaggaaggcau

SEQ ID NO: 2333400 - RNA, 19 nt, Homo sapiens
  misc_RNA (1)...(19): siRNA sense strand
uagaugggauaguggcaaa

SEQ ID NO: 2333401 - RNA, 19 nt, Homo sapiens
  misc_RNA (1)...(19): siRNA sense strand
ggcuauggccacagaagaa

SEQ ID NO: 2333402 - RNA, 19 nt, Homo sapiens
  misc_RNA (1)...(19): siRNA sense strand
ggaacagagagcuaagcaa

SEQ ID NO: 2333403 - RNA, 19 nt, Homo sapiens
  misc_RNA (1)...(19): siRNA sense strand
ggaagugauagaagcaauu

SEQ ID NO: 2333404 - RNA, 19 nt, Homo sapiens
  misc_RNA (1)...(19): siRNA sense strand
agacaauggaccuggcuau

SEQ ID NO: 2333405 - RNA, 19 nt, Homo sapiens
  misc_RNA (1)...(19): siRNA sense strand
agaagauaacagaagcuaa

SEQ ID NO: 2333406 - RNA, 19 nt, Homo sapiens
  misc_RNA (1)...(19): siRNA sense strand
cugauggaacagagagcua

SEQ ID NO: 2333407 - RNA, 19 nt, Homo sapiens
  misc_RNA (1)...(19): siRNA sense strand
gaagaggagaagacagaga

SEQ ID NO: 2333408 - RNA, 19 nt, Homo sapiens
  misc_RNA (1)...(19): siRNA sense strand
ccaaauucgucaaguggga

SEQ ID NO: 2333409 - RNA, 19 nt, Homo sapiens
  misc_RNA (1)...(19): siRNA sense strand
uuaauagacuugaaggaca

SEQ ID NO: 2333410 - RNA, 19 nt, Homo sapiens
  misc_RNA (1)...(19): siRNA sense strand
aagaaaucugugagaaaga

SEQ ID NO: 2333411 - RNA, 19 nt, Homo sapiens
  misc_RNA (1)...(19): siRNA sense strand
aggagaagacagagaugau

SEQ ID NO: 2333412 - RNA, 19 nt, Homo sapiens
  misc_RNA (1)...(19): siRNA sense strand
acaacagccucgccagaaa

SEQ ID NO: 2333413 - RNA, 19 nt, Homo sapiens
  misc_RNA (1)...(19): siRNA sense strand
agagaaacacaaggaaaua

SEQ ID NO: 2333414 - RNA, 19 nt, Homo sapiens
  misc_RNA (1)...(19): siRNA sense strand
cguggaaaccaaaggacuu

SEQ ID NO: 2333415 - RNA, 19 nt, Homo sapiens
  misc_RNA (1)...(19): siRNA sense strand
aagcuaaauccaaagacaa

SEQ ID NO: 2333416 - RNA, 19 nt, Homo sapiens
  misc_RNA (1)...(19): siRNA sense strand
aaagaagcucucagaacaa

SEQ ID NO: 2333417 - RNA, 19 nt, Homo sapiens
  misc_RNA (1)...(19): siRNA sense strand
ccaaaacaucccaaggaaa

SEQ ID NO: 2333418 - RNA, 19 nt, Homo sapiens
  misc_RNA (1)...(19): siRNA sense strand
ggcugauccuggagaaaca

SEQ ID NO: 2333419 - RNA, 19 nt, Homo sapiens
  misc_RNA (1)...(19): siRNA sense strand
gaaaucugugagaaagaaa

SEQ ID NO: 2333420 - RNA, 19 nt, Homo sapiens
  misc_RNA (1)...(19): siRNA sense strand
ggccugaccucgugaacau

SEQ ID NO: 2333421 - RNA, 19 nt, Homo sapiens
  misc_RNA (1)...(19): siRNA sense strand
ugucagaacaaucaguuaa

SEQ ID NO: 2333422 - RNA, 19 nt, Homo sapiens
  misc_RNA (1)...(19): siRNA sense strand
aguuaaagaagcucaaaga

SEQ ID NO: 2333423 - RNA, 19 nt, Homo sapiens
  misc_RNA (1)...(19): siRNA sense strand
gugagaaagaaaagaaaga

SEQ ID NO: 2333424 - RNA, 19 nt, Homo sapiens
  misc_RNA (1)...(19): siRNA sense strand
cuuucaaggaagugauaga

SEQ ID NO: 2333425 - RNA, 19 nt, Homo sapiens
  misc_RNA (1)...(19): siRNA sense strand
ugucuuaacagaaguggaa

SEQ ID NO: 2333426 - RNA, 19 nt, Homo sapiens
  misc_RNA (1)...(19): siRNA sense strand
ggaauggacaaaugagguu

SEQ ID NO: 2333427 - RNA, 19 nt, Homo sapiens
  misc_RNA (1)...(19): siRNA sense strand
cagaaaauggggugaauca

SEQ ID NO: 2333428 - RNA, 19 nt, Homo sapiens
  misc_RNA (1)...(19): siRNA sense strand
cagaacaaucaguuaaaga

SEQ ID NO: 2333429 - RNA, 19 nt, Homo sapiens
  misc_RNA (1)...(19): siRNA sense strand
agaaacuggauuugaauga

SEQ ID NO: 2333430 - RNA, 19 nt, Homo sapiens
  misc_RNA (1)...(19): siRNA sense strand
ggaagaguggcuacagauu

SEQ ID NO: 2333431 - RNA, 19 nt, Homo sapiens
  misc_RNA (1)...(19): siRNA sense strand
augugaaccugauggaaca

SEQ ID NO: 2333432 - RNA, 19 nt, Homo sapiens
  misc_RNA (1)...(19): siRNA sense strand
uccaagaagaaguggccaa

SEQ ID NO: 2333433 - RNA, 19 nt, Homo sapiens
  misc_RNA (1)...(19): siRNA sense strand
cgccagaaaaggacaaaua

SEQ ID NO: 2333434 - RNA, 19 nt, Homo sapiens
  misc_RNA (1)...(19): siRNA sense strand
gucagauggaagaggagaa

SEQ ID NO: 2333435 - RNA, 19 nt, Homo sapiens
  misc_RNA (1)...(19): siRNA sense strand
gcaugaucacaguggugua

SEQ ID NO: 2333436 - RNA, 19 nt, Homo sapiens
  misc_RNA (1)...(19): siRNA sense strand
gaagaaguggccaaggaau

SEQ ID NO: 2333437 - RNA, 19 nt, Homo sapiens
  misc_RNA (1)...(19): siRNA sense strand
gcuacagauugaagccaga

SEQ ID NO: 2333438 - RNA, 19 nt, Homo sapiens
  misc_RNA (1)...(19): siRNA sense strand
caaaacaucccaaggaaau

SEQ ID NO: 2333439 - RNA, 19 nt, Homo sapiens
  misc_RNA (1)...(19): siRNA sense strand
ugaaagacuaugugccaga

SEQ ID NO: 2333440 - RNA, 19 nt, Homo sapiens
  misc_RNA (1)...(19): siRNA sense strand
aguuaauagacuugaagga

SEQ ID NO: 2333441 - RNA, 19 nt, Homo sapiens
  misc_RNA (1)...(19): siRNA sense strand
acacaacgcugaauggcuu

SEQ ID NO: 2333442 - RNA, 19 nt, Homo sapiens
  misc_RNA (1)...(19): siRNA sense strand
cugcagagguucaaggccu

SEQ ID NO: 2333443 - RNA, 19 nt, Homo sapiens
  misc_RNA (1)...(19): siRNA sense strand
ccuucauccuggagaccuu

SEQ ID NO: 2333444 - RNA, 19 nt, Homo sapiens
  misc_RNA (1)...(19): siRNA sense strand
auacagaggaagauccaga

SEQ ID NO: 2333445 - RNA, 19 nt, Homo sapiens
  misc_RNA (1)...(19): siRNA sense strand
uggccaagugggagaucuu

SEQ ID NO: 2333446 - RNA, 19 nt, Homo sapiens
  misc_RNA (1)...(19): siRNA sense strand
acugauggccagagcuuga

SEQ ID NO: 2333447 - RNA, 19 nt, Homo sapiens
  misc_RNA (1)...(19): siRNA sense strand
augugagcaaggaggcuaa

SEQ ID NO: 2333448 - RNA, 19 nt, Homo sapiens
  misc_RNA (1)...(19): siRNA sense strand
agaaaacaguccaggagca

SEQ ID NO: 2333449 - RNA, 19 nt, Homo sapiens
  misc_RNA (1)...(19): siRNA sense strand
uggcauuaauggaggguau

SEQ ID NO: 2333450 - RNA, 19 nt, Homo sapiens
  misc_RNA (1)...(19): siRNA sense strand
ggaugcagcuguagggaca

SEQ ID NO: 2333451 - RNA, 19 nt, Homo sapiens
  misc_RNA (1)...(19): siRNA sense strand
ggucagucacggacggaua

SEQ ID NO: 2333452 - RNA, 19 nt, Homo sapiens
  misc_RNA (1)...(19): siRNA sense strand
gacuauagcuugugggcca

SEQ ID NO: 2333453 - RNA, 19 nt, Homo sapiens
  misc_RNA (1)...(19): siRNA sense strand
gaauaaagucguagggccu

SEQ ID NO: 2333454 - RNA, 19 nt, Homo sapiens
  misc_RNA (1)...(19): siRNA sense strand
cagagcacgcagaggauaa

SEQ ID NO: 2333455 - RNA, 19 nt, Homo sapiens
  misc_RNA (1)...(19): siRNA sense strand
ugaaggagcuggaggagca

SEQ ID NO: 2333456 - RNA, 19 nt, Homo sapiens
  misc_RNA (1)...(19): siRNA sense strand
aagaagaggaggaggagga

SEQ ID NO: 2333457 - RNA, 19 nt, Homo sapiens
  misc_RNA (1)...(19): siRNA sense strand
aggaggaggaggaggauga

SEQ ID NO: 2333458 - RNA, 19 nt, Homo sapiens
  misc_RNA (1)...(19): siRNA sense strand
acaaagaaauugagcugca

SEQ ID NO: 2333459 - RNA, 19 nt, Homo sapiens
  misc_RNA (1)...(19): siRNA sense strand
uggaaaucagagagaggua

SEQ ID NO: 2333460 - RNA, 19 nt, Homo sapiens
  misc_RNA (1)...(19): siRNA sense strand
ggagaagacuggaacagga

SEQ ID NO: 2333461 - RNA, 19 nt, Homo sapiens
  misc_RNA (1)...(19): siRNA sense strand
gggaauuauacauugacua

SEQ ID NO: 2333462 - RNA, 19 nt, Homo sapiens
  misc_RNA (1)...(19): siRNA sense strand
gaggagaacaugaacgaca

SEQ ID NO: 2333463 - RNA, 19 nt, Homo sapiens
  misc_RNA (1)...(19): siRNA sense strand
gcugcuggaucgaggaaaa

SEQ ID NO: 2333464 - RNA, 19 nt, Homo sapiens
  misc_RNA (1)...(19): siRNA sense strand
acuaugaggaggaagaaau

SEQ ID NO: 2333465 - RNA, 19 nt, Homo sapiens
  misc_RNA (1)...(19): siRNA sense strand
aggaagaaauggagaccgu

SEQ ID NO: 2333466 - RNA, 19 nt, Homo sapiens
  misc_RNA (1)...(19): siRNA sense strand
ccucagaaggaaagccaau

SEQ ID NO: 2333467 - RNA, 19 nt, Homo sapiens
  misc_RNA (1)...(19): siRNA sense strand
cuguaaggaugcagcugua

SEQ ID NO: 2333468 - RNA, 19 nt, Homo sapiens
  misc_RNA (1)...(19): siRNA sense strand
ggugcagaccagagaccaa

SEQ ID NO: 2333469 - RNA, 19 nt, Homo sapiens
  misc_RNA (1)...(19): siRNA sense strand
ggauaaaggaguuccggca

SEQ ID NO: 2333470 - RNA, 19 nt, Homo sapiens
  misc_RNA (1)...(19): siRNA sense strand
uugaagaagaggaggagga

SEQ ID NO: 2333471 - RNA, 19 nt, Homo sapiens
  misc_RNA (1)...(19): siRNA sense strand
gagcagaagauccaggaca

SEQ ID NO: 2333472 - RNA, 19 nt, Homo sapiens
  misc_RNA (1)...(19): siRNA sense strand
ugugaagaccaaagaguca

SEQ ID NO: 2333473 - RNA, 19 nt, Homo sapiens
  misc_RNA (1)...(19): siRNA sense strand
ccaucaugaagaagaaaga

SEQ ID NO: 2333474 - RNA, 19 nt, Homo sapiens
  misc_RNA (1)...(19): siRNA sense strand
gaacagagcacgcagagga

SEQ ID NO: 2333475 - RNA, 19 nt, Homo sapiens
  misc_RNA (1)...(19): siRNA sense strand
gugugaugucauugaguau

SEQ ID NO: 2333476 - RNA, 19 nt, Homo sapiens
  misc_RNA (1)...(19): siRNA sense strand
aguccaucaugaagaagaa

SEQ ID NO: 2333477 - RNA, 19 nt, Homo sapiens
  misc_RNA (1)...(19): siRNA sense strand
aggaggaggaggaugaaga

SEQ ID NO: 2333478 - RNA, 19 nt, Homo sapiens
  misc_RNA (1)...(19): siRNA sense strand
cugccaggguggaagauga

SEQ ID NO: 2333479 - RNA, 19 nt, Homo sapiens
  misc_RNA (1)...(19): siRNA sense strand
gcuucagaauggauaccaa

SEQ ID NO: 2333480 - RNA, 19 nt, Homo sapiens
  misc_RNA (1)...(19): siRNA sense strand
cagagaaggacaugcggau

SEQ ID NO: 2333481 - RNA, 19 nt, Homo sapiens
  misc_RNA (1)...(19): siRNA sense strand
guaaggugguggaggcagu

SEQ ID NO: 2333482 - RNA, 19 nt, Homo sapiens
  misc_RNA (1)...(19): siRNA sense strand
uuaaggagaggguggaaau

SEQ ID NO: 2333483 - RNA, 19 nt, Homo sapiens
  misc_RNA (1)...(19): siRNA sense strand
ggcagaagcuuucggggaa

SEQ ID NO: 2333484 - RNA, 19 nt, Homo sapiens
  misc_RNA (1)...(19): siRNA sense strand
gauaaaggaguuccggcaa

SEQ ID NO: 2333485 - RNA, 19 nt, Homo sapiens
  misc_RNA (1)...(19): siRNA sense strand
aaacaaacaguguaggcau

SEQ ID NO: 2333486 - RNA, 19 nt, Homo sapiens
  misc_RNA (1)...(19): siRNA sense strand
gggaauggcagaagggcac

SEQ ID NO: 2333487 - RNA, 19 nt, Homo sapiens
  misc_RNA (1)...(19): siRNA sense strand
ccagcaaagauaugagguu

SEQ ID NO: 2333488 - RNA, 19 nt, Homo sapiens
  misc_RNA (1)...(19): siRNA sense strand
aagcaggacacaaggacau

SEQ ID NO: 2333489 - RNA, 19 nt, Homo sapiens
  misc_RNA (1)...(19): siRNA sense strand
gggauauaccuguaagugu

SEQ ID NO: 2333490 - RNA, 19 nt, Homo sapiens
  misc_RNA (1)...(19): siRNA sense strand
aagaggaggaggaggagga

SEQ ID NO: 2333491 - RNA, 19 nt, Homo sapiens
  misc_RNA (1)...(19): siRNA sense strand
acggucaccuagaggacaa

SEQ ID NO: 2333492 - RNA, 19 nt, Homo sapiens
  misc_RNA (1)...(19): siRNA sense strand
agccugaauguaagaauaa

SEQ ID NO: 2333493 - RNA, 19 nt, Homo sapiens
  misc_RNA (1)...(19): siRNA sense strand
guuaaggagaggguggaaa

SEQ ID NO: 2333494 - RNA, 19 nt, Homo sapiens
  misc_RNA (1)...(19): siRNA sense strand
gugacaagagugugagugu

SEQ ID NO: 2333495 - RNA, 19 nt, Homo sapiens
  misc_RNA (1)...(19): siRNA sense strand
auuaauggaggguaugaaa

SEQ ID NO: 2333496 - RNA, 19 nt, Homo sapiens
  misc_RNA (1)...(19): siRNA sense strand
uggcagacggcaacggcaa

SEQ ID NO: 2333497 - RNA, 19 nt, Homo sapiens
  misc_RNA (1)...(19): siRNA sense strand
cuguggaagcagagaagga

SEQ ID NO: 2333498 - RNA, 19 nt, Homo sapiens
  misc_RNA (1)...(19): siRNA sense strand
acgcagaggauaaaggagu

SEQ ID NO: 2333499 - RNA, 19 nt, Homo sapiens
  misc_RNA (1)...(19): siRNA sense strand
cgaaacaggcagcaacaca

SEQ ID NO: 2333500 - RNA, 19 nt, Homo sapiens
  misc_RNA (1)...(19): siRNA sense strand
ucaacuuggcagacggcaa

SEQ ID NO: 2333501 - RNA, 19 nt, Homo sapiens
  misc_RNA (1)...(19): siRNA sense strand
ugacaaagaaauugagcug

SEQ ID NO: 2333502 - RNA, 19 nt, Homo sapiens
  misc_RNA (1)...(19): siRNA sense strand
cugggaggucuguggaaau

SEQ ID NO: 2333503 - RNA, 19 nt, Homo sapiens
  misc_RNA (1)...(19): siRNA sense strand
caagagugugaguguggaa

SEQ ID NO: 2333504 - RNA, 19 nt, Homo sapiens
  misc_RNA (1)...(19): siRNA sense strand
gagaaaaggcaguuggucu

SEQ ID NO: 2333505 - RNA, 19 nt, Homo sapiens
  misc_RNA (1)...(19): siRNA sense strand
ccgaggagaacaugaacga

SEQ ID NO: 2333506 - RNA, 19 nt, Homo sapiens
  misc_RNA (1)...(19): siRNA sense strand
aggagaacaugaacgacau

SEQ ID NO: 2333507 - RNA, 19 nt, Homo sapiens
  misc_RNA (1)...(19): siRNA sense strand
uugacuaugaggaggaaga

SEQ ID NO: 2333508 - RNA, 19 nt, Homo sapiens
  misc_RNA (1)...(19): siRNA sense strand
agaagaaagaugguaacaa

SEQ ID NO: 2333509 - RNA, 19 nt, Homo sapiens
  misc_RNA (1)...(19): siRNA sense strand
gucuaagcacuuuggacaa

SEQ ID NO: 2333510 - RNA, 19 nt, Homo sapiens
  misc_RNA (1)...(19): siRNA sense strand
aaauggagaccguagaaca

SEQ ID NO: 2333511 - RNA, 19 nt, Homo sapiens
  misc_RNA (1)...(19): siRNA sense strand
gcacagauuuggaacaggu

SEQ ID NO: 2333512 - RNA, 19 nt, Homo sapiens
  misc_RNA (1)...(19): siRNA sense strand
uggcagaacagcagacacu

SEQ ID NO: 2333513 - RNA, 19 nt, Homo sapiens
  misc_RNA (1)...(19): siRNA sense strand
caucccagccugagcaaga

SEQ ID NO: 2333514 - RNA, 19 nt, Homo sapiens
  misc_RNA (1)...(19): siRNA sense strand
cgcagaggauaaaggaguu

SEQ ID NO: 2333515 - RNA, 19 nt, Homo sapiens
  misc_RNA (1)...(19): siRNA sense strand
gaugacugaagcugacaaa

SEQ ID NO: 2333516 - RNA, 19 nt, Homo sapiens
  misc_RNA (1)...(19): siRNA sense strand
uggcauuaauggaggguau

SEQ ID NO: 2333517 - RNA, 19 nt, Homo sapiens
  misc_RNA (1)...(19): siRNA sense strand
ggaugcagcuguagggaca

SEQ ID NO: 2333518 - RNA, 19 nt, Homo sapiens
  misc_RNA (1)...(19): siRNA sense strand
ggucagucacggacggaua

SEQ ID NO: 2333519 - RNA, 19 nt, Homo sapiens
  misc_RNA (1)...(19): siRNA sense strand
gacuauagcuugugggcca

SEQ ID NO: 2333520 - RNA, 19 nt, Homo sapiens
  misc_RNA (1)...(19): siRNA sense strand
gaauaaagucguagggccu

SEQ ID NO: 2333521 - RNA, 19 nt, Homo sapiens
  misc_RNA (1)...(19): siRNA sense strand
cagagcacgcagaggauaa

SEQ ID NO: 2333522 - RNA, 19 nt, Homo sapiens
  misc_RNA (1)...(19): siRNA sense strand
ugaaggagcuggaggagca

SEQ ID NO: 2333523 - RNA, 19 nt, Homo sapiens
  misc_RNA (1)...(19): siRNA sense strand
aagaagaggaggaggagga

SEQ ID NO: 2333524 - RNA, 19 nt, Homo sapiens
  misc_RNA (1)...(19): siRNA sense strand
aggaggaggaggaggauga

SEQ ID NO: 2333525 - RNA, 19 nt, Homo sapiens
  misc_RNA (1)...(19): siRNA sense strand
acaaagaaauugagcugca

SEQ ID NO: 2333526 - RNA, 19 nt, Homo sapiens
  misc_RNA (1)...(19): siRNA sense strand
uggaaaucagagagaggua

SEQ ID NO: 2333527 - RNA, 19 nt, Homo sapiens
  misc_RNA (1)...(19): siRNA sense strand
ggagaagacuggaacagga

SEQ ID NO: 2333528 - RNA, 19 nt, Homo sapiens
  misc_RNA (1)...(19): siRNA sense strand
gggaauuauacauugacua

SEQ ID NO: 2333529 - RNA, 19 nt, Homo sapiens
  misc_RNA (1)...(19): siRNA sense strand
gaggagaacaugaacgaca

SEQ ID NO: 2333530 - RNA, 19 nt, Homo sapiens
  misc_RNA (1)...(19): siRNA sense strand
gcugcuggaucgaggaaaa

SEQ ID NO: 2333531 - RNA, 19 nt, Homo sapiens
  misc_RNA (1)...(19): siRNA sense strand
acuaugaggaggaagaaau

SEQ ID NO: 2333532 - RNA, 19 nt, Homo sapiens
  misc_RNA (1)...(19): siRNA sense strand
aggaagaaauggagaccgu

SEQ ID NO: 2333533 - RNA, 19 nt, Homo sapiens
  misc_RNA (1)...(19): siRNA sense strand
ccucagaaggaaagccaau

SEQ ID NO: 2333534 - RNA, 19 nt, Homo sapiens
  misc_RNA (1)...(19): siRNA sense strand
cuguaaggaugcagcugua

SEQ ID NO: 2333535 - RNA, 19 nt, Homo sapiens
  misc_RNA (1)...(19): siRNA sense strand
ggugcagaccagagaccaa

SEQ ID NO: 2333536 - RNA, 19 nt, Homo sapiens
  misc_RNA (1)...(19): siRNA sense strand
ggauaaaggaguuccggca

SEQ ID NO: 2333537 - RNA, 19 nt, Homo sapiens
  misc_RNA (1)...(19): siRNA sense strand
uugaagaagaggaggagga

SEQ ID NO: 2333538 - RNA, 19 nt, Homo sapiens
  misc_RNA (1)...(19): siRNA sense strand
gagcagaagauccaggaca

SEQ ID NO: 2333539 - RNA, 19 nt, Homo sapiens
  misc_RNA (1)...(19): siRNA sense strand
ugugaagaccaaagaguca

SEQ ID NO: 2333540 - RNA, 19 nt, Homo sapiens
  misc_RNA (1)...(19): siRNA sense strand
ccaucaugaagaagaaaga

SEQ ID NO: 2333541 - RNA, 19 nt, Homo sapiens
  misc_RNA (1)...(19): siRNA sense strand
gaacagagcacgcagagga

SEQ ID NO: 2333542 - RNA, 19 nt, Homo sapiens
  misc_RNA (1)...(19): siRNA sense strand
gugugaugucauugaguau

SEQ ID NO: 2333543 - RNA, 19 nt, Homo sapiens
  misc_RNA (1)...(19): siRNA sense strand
aguccaucaugaagaagaa

SEQ ID NO: 2333544 - RNA, 19 nt, Homo sapiens
  misc_RNA (1)...(19): siRNA sense strand
aggaggaggaggaugaaga

SEQ ID NO: 2333545 - RNA, 19 nt, Homo sapiens
  misc_RNA (1)...(19): siRNA sense strand
cugccaggguggaagauga

SEQ ID NO: 2333546 - RNA, 19 nt, Homo sapiens
  misc_RNA (1)...(19): siRNA sense strand
gcuucagaauggauaccaa

SEQ ID NO: 2333547 - RNA, 19 nt, Homo sapiens
  misc_RNA (1)...(19): siRNA sense strand
cagagaaggacaugcggau

SEQ ID NO: 2333548 - RNA, 19 nt, Homo sapiens
  misc_RNA (1)...(19): siRNA sense strand
guaaggugguggaggcagu

SEQ ID NO: 2333549 - RNA, 19 nt, Homo sapiens
  misc_RNA (1)...(19): siRNA sense strand
uuaaggagaggguggaaau

SEQ ID NO: 2333550 - RNA, 19 nt, Homo sapiens
  misc_RNA (1)...(19): siRNA sense strand
ggcagaagcuuucggggaa

SEQ ID NO: 2333551 - RNA, 19 nt, Homo sapiens
  misc_RNA (1)...(19): siRNA sense strand
gauaaaggaguuccggcaa

SEQ ID NO: 2333552 - RNA, 19 nt, Homo sapiens
  misc_RNA (1)...(19): siRNA sense strand
aaacaaacaguguaggcau

SEQ ID NO: 2333553 - RNA, 19 nt, Homo sapiens
  misc_RNA (1)...(19): siRNA sense strand
gggaauggcagaagggcac

SEQ ID NO: 2333554 - RNA, 19 nt, Homo sapiens
  misc_RNA (1)...(19): siRNA sense strand
ccagcaaagauaugagguu

SEQ ID NO: 2333555 - RNA, 19 nt, Homo sapiens
  misc_RNA (1)...(19): siRNA sense strand
aagcaggacacaaggacau

SEQ ID NO: 2333556 - RNA, 19 nt, Homo sapiens
  misc_RNA (1)...(19): siRNA sense strand
gggauauaccuguaagugu

SEQ ID NO: 2333557 - RNA, 19 nt, Homo sapiens
  misc_RNA (1)...(19): siRNA sense strand
aagaggaggaggaggagga

SEQ ID NO: 2333558 - RNA, 19 nt, Homo sapiens
  misc_RNA (1)...(19): siRNA sense strand
acggucaccuagaggacaa

SEQ ID NO: 2333559 - RNA, 19 nt, Homo sapiens
  misc_RNA (1)...(19): siRNA sense strand
agccugaauguaagaauaa

SEQ ID NO: 2333560 - RNA, 19 nt, Homo sapiens
  misc_RNA (1)...(19): siRNA sense strand
guuaaggagaggguggaaa

SEQ ID NO: 2333561 - RNA, 19 nt, Homo sapiens
  misc_RNA (1)...(19): siRNA sense strand
gugacaagagugugagugu

SEQ ID NO: 2333562 - RNA, 19 nt, Homo sapiens
  misc_RNA (1)...(19): siRNA sense strand
auuaauggaggguaugaaa

SEQ ID NO: 2333563 - RNA, 19 nt, Homo sapiens
  misc_RNA (1)...(19): siRNA sense strand
uggcagacggcaacggcaa

SEQ ID NO: 2333564 - RNA, 19 nt, Homo sapiens
  misc_RNA (1)...(19): siRNA sense strand
cuguggaagcagagaagga

SEQ ID NO: 2333565 - RNA, 19 nt, Homo sapiens
  misc_RNA (1)...(19): siRNA sense strand
acgcagaggauaaaggagu

SEQ ID NO: 2333566 - RNA, 19 nt, Homo sapiens
  misc_RNA (1)...(19): siRNA sense strand
cgaaacaggcagcaacaca

SEQ ID NO: 2333567 - RNA, 19 nt, Homo sapiens
  misc_RNA (1)...(19): siRNA sense strand
ucaacuuggcagacggcaa

SEQ ID NO: 2333568 - RNA, 19 nt, Homo sapiens
  misc_RNA (1)...(19): siRNA sense strand
ugacaaagaaauugagcug

SEQ ID NO: 2333569 - RNA, 19 nt, Homo sapiens
  misc_RNA (1)...(19): siRNA sense strand
cugggaggucuguggaaau

SEQ ID NO: 2333570 - RNA, 19 nt, Homo sapiens
  misc_RNA (1)...(19): siRNA sense strand
caagagugugaguguggaa

SEQ ID NO: 2333571 - RNA, 19 nt, Homo sapiens
  misc_RNA (1)...(19): siRNA sense strand
gagaaaaggcaguuggucu

SEQ ID NO: 2333572 - RNA, 19 nt, Homo sapiens
  misc_RNA (1)...(19): siRNA sense strand
ccgaggagaacaugaacga

SEQ ID NO: 2333573 - RNA, 19 nt, Homo sapiens
  misc_RNA (1)...(19): siRNA sense strand
aggagaacaugaacgacau

SEQ ID NO: 2333574 - RNA, 19 nt, Homo sapiens
  misc_RNA (1)...(19): siRNA sense strand
uugacuaugaggaggaaga

SEQ ID NO: 2333575 - RNA, 19 nt, Homo sapiens
  misc_RNA (1)...(19): siRNA sense strand
agaagaaagaugguaacaa

SEQ ID NO: 2333576 - RNA, 19 nt, Homo sapiens
  misc_RNA (1)...(19): siRNA sense strand
gucuaagcacuuuggacaa

SEQ ID NO: 2333577 - RNA, 19 nt, Homo sapiens
  misc_RNA (1)...(19): siRNA sense strand
aaauggagaccguagaaca

SEQ ID NO: 2333578 - RNA, 19 nt, Homo sapiens
  misc_RNA (1)...(19): siRNA sense strand
gcacagauuuggaacaggu

SEQ ID NO: 2333579 - RNA, 19 nt, Homo sapiens
  misc_RNA (1)...(19): siRNA sense strand
uggcagaacagcagacacu

SEQ ID NO: 2333580 - RNA, 19 nt, Homo sapiens
  misc_RNA (1)...(19): siRNA sense strand
caucccagccugagcaaga

SEQ ID NO: 2333581 - RNA, 19 nt, Homo sapiens
  misc_RNA (1)...(19): siRNA sense strand
cgcagaggauaaaggaguu

SEQ ID NO: 2333582 - RNA, 19 nt, Homo sapiens
  misc_RNA (1)...(19): siRNA sense strand
gaugacugaagcugacaaa

SEQ ID NO: 2333583 - RNA, 19 nt, Homo sapiens
  misc_RNA (1)...(19): siRNA sense strand
acucagucgucgagguaau

SEQ ID NO: 2333584 - RNA, 19 nt, Homo sapiens
  misc_RNA (1)...(19): siRNA sense strand
gcgccaacauucuggacga

SEQ ID NO: 2333585 - RNA, 19 nt, Homo sapiens
  misc_RNA (1)...(19): siRNA sense strand
ucagagaggagcuggccua

SEQ ID NO: 2333586 - RNA, 19 nt, Homo sapiens
  misc_RNA (1)...(19): siRNA sense strand
aggaguucgacaaggagaa

SEQ ID NO: 2333587 - RNA, 19 nt, Homo sapiens
  misc_RNA (1)...(19): siRNA sense strand
ccagcgaggaggacugcaa

SEQ ID NO: 2333588 - RNA, 19 nt, Homo sapiens
  misc_RNA (1)...(19): siRNA sense strand
gcaagugucugguggaggu

SEQ ID NO: 2333589 - RNA, 19 nt, Homo sapiens
  misc_RNA (1)...(19): siRNA sense strand
gagaaagccuggagagccg

SEQ ID NO: 2333590 - RNA, 19 nt, Homo sapiens
  misc_RNA (1)...(19): siRNA sense strand
ugacaauauuggagagcua

SEQ ID NO: 2333591 - RNA, 19 nt, Homo sapiens
  misc_RNA (1)...(19): siRNA sense strand
agaacaaagccuacaguaa

SEQ ID NO: 2333592 - RNA, 19 nt, Homo sapiens
  misc_RNA (1)...(19): siRNA sense strand
agugaaagguacagcagaa

SEQ ID NO: 2333593 - RNA, 19 nt, Homo sapiens
  misc_RNA (1)...(19): siRNA sense strand
ccaaagaugaagaaggauu

SEQ ID NO: 2333594 - RNA, 19 nt, Homo sapiens
  misc_RNA (1)...(19): siRNA sense strand
agauaaggcagcagaagaa

SEQ ID NO: 2333595 - RNA, 19 nt, Homo sapiens
  misc_RNA (1)...(19): siRNA sense strand
gcuacuaggucaaaagaaa

SEQ ID NO: 2333596 - RNA, 19 nt, Homo sapiens
  misc_RNA (1)...(19): siRNA sense strand
guauaaauuccgugaacuu

SEQ ID NO: 2333597 - RNA, 19 nt, Homo sapiens
  misc_RNA (1)...(19): siRNA sense strand
acucaagaauacagcgauu

SEQ ID NO: 2333598 - RNA, 19 nt, Homo sapiens
  misc_RNA (1)...(19): siRNA sense strand
acgauaauguggaugacaa

SEQ ID NO: 2333599 - RNA, 19 nt, Homo sapiens
  misc_RNA (1)...(19): siRNA sense strand
uggcagagggaaugacuaa

SEQ ID NO: 2333600 - RNA, 19 nt, Homo sapiens
  misc_RNA (1)...(19): siRNA sense strand
gcaaaaugucagaaagauu

SEQ ID NO: 2333601 - RNA, 19 nt, Homo sapiens
  misc_RNA (1)...(19): siRNA sense strand
gggcaaaaugucagaaaga

SEQ ID NO: 2333602 - RNA, 19 nt, Homo sapiens
  misc_RNA (1)...(19): siRNA sense strand
ggucaagacauaaagcaau

SEQ ID NO: 2333603 - RNA, 19 nt, Homo sapiens
  misc_RNA (1)...(19): siRNA sense strand
cuagaagcagucagagaua

SEQ ID NO: 2333604 - RNA, 19 nt, Homo sapiens
  misc_RNA (1)...(19): siRNA sense strand
augauuuccuugagaacaa

SEQ ID NO: 2333605 - RNA, 19 nt, Homo sapiens
  misc_RNA (1)...(19): siRNA sense strand
agauacagcuggugaugau

SEQ ID NO: 2333606 - RNA, 19 nt, Homo sapiens
  misc_RNA (1)...(19): siRNA sense strand
agacaauguugcacuacaa

SEQ ID NO: 2333607 - RNA, 19 nt, Homo sapiens
  misc_RNA (1)...(19): siRNA sense strand
cgauaauguggaugacaau

SEQ ID NO: 2333608 - RNA, 19 nt, Homo sapiens
  misc_RNA (1)...(19): siRNA sense strand
cagcagaagaauuacagua

SEQ ID NO: 2333609 - RNA, 19 nt, Homo sapiens
  misc_RNA (1)...(19): siRNA sense strand
gauuaggucaagacauaaa

SEQ ID NO: 2333610 - RNA, 19 nt, Homo sapiens
  misc_RNA (1)...(19): siRNA sense strand
aggucaagacauaaagcaa

SEQ ID NO: 2333611 - RNA, 19 nt, Homo sapiens
  misc_RNA (1)...(19): siRNA sense strand
caaccaaaccaaaggucuu

SEQ ID NO: 2333612 - RNA, 19 nt, Homo sapiens
  misc_RNA (1)...(19): siRNA sense strand
acuuacgaguauucagaaa

SEQ ID NO: 2333613 - RNA, 19 nt, Homo sapiens
  misc_RNA (1)...(19): siRNA sense strand
gucagaaagauuaggucaa

SEQ ID NO: 2333614 - RNA, 19 nt, Homo sapiens
  misc_RNA (1)...(19): siRNA sense strand
uuuauuaagucgucagaga

SEQ ID NO: 2333615 - RNA, 19 nt, Homo sapiens
  misc_RNA (1)...(19): siRNA sense strand
ccugaaaugaugaaggcau

SEQ ID NO: 2333616 - RNA, 19 nt, Homo sapiens
  misc_RNA (1)...(19): siRNA sense strand
caguaaaggaaaaggggau

SEQ ID NO: 2333617 - RNA, 19 nt, Homo sapiens
  misc_RNA (1)...(19): siRNA sense strand
agaaagaugaucaagugaa

SEQ ID NO: 2333618 - RNA, 19 nt, Homo sapiens
  misc_RNA (1)...(19): siRNA sense strand
cuuugaaguugaaguugaa

SEQ ID NO: 2333619 - RNA, 19 nt, Homo sapiens
  misc_RNA (1)...(19): siRNA sense strand
aaguugaaauggagaagga

SEQ ID NO: 2333620 - RNA, 19 nt, Homo sapiens
  misc_RNA (1)...(19): siRNA sense strand
cgauacuuugucagggaaa

SEQ ID NO: 2333621 - RNA, 19 nt, Homo sapiens
  misc_RNA (1)...(19): siRNA sense strand
cagugguugcgaaggaaua

SEQ ID NO: 2333622 - RNA, 19 nt, Homo sapiens
  misc_RNA (1)...(19): siRNA sense strand
agucaggcaaagaaauaaa

SEQ ID NO: 2333623 - RNA, 19 nt, Homo sapiens
  misc_RNA (1)...(19): siRNA sense strand
cugaaaucuuugaugacau

SEQ ID NO: 2333624 - RNA, 19 nt, Homo sapiens
  misc_RNA (1)...(19): siRNA sense strand
agaagaaaugaaacgggaa

SEQ ID NO: 2333625 - RNA, 19 nt, Homo sapiens
  misc_RNA (1)...(19): siRNA sense strand
ugacauucaaagaaaggua

SEQ ID NO: 2333626 - RNA, 19 nt, Homo sapiens
  misc_RNA (1)...(19): siRNA sense strand
agaaaucagugguugcgaa

SEQ ID NO: 2333627 - RNA, 19 nt, Homo sapiens
  misc_RNA (1)...(19): siRNA sense strand
caauauuccacuuagggua

SEQ ID NO: 2333628 - RNA, 19 nt, Homo sapiens
  misc_RNA (1)...(19): siRNA sense strand
cuuuggacccuuuguaaua

SEQ ID NO: 2333629 - RNA, 19 nt, Homo sapiens
  misc_RNA (1)...(19): siRNA sense strand
agugaggagauguggaaaa

SEQ ID NO: 2333630 - RNA, 19 nt, Homo sapiens
  misc_RNA (1)...(19): siRNA sense strand
ugaugaaccucuccagcaa

SEQ ID NO: 2333631 - RNA, 19 nt, Homo sapiens
  misc_RNA (1)...(19): siRNA sense strand
guaaagaagguaugugacu

SEQ ID NO: 2333632 - RNA, 19 nt, Homo sapiens
  misc_RNA (1)...(19): siRNA sense strand
caguacaacuucaugccua

SEQ ID NO: 2333633 - RNA, 19 nt, Homo sapiens
  misc_RNA (1)...(19): siRNA sense strand
cggucaaagcagaugcaga

SEQ ID NO: 2333634 - RNA, 19 nt, Homo sapiens
  misc_RNA (1)...(19): siRNA sense strand
ggagauuuccagaacaaga

SEQ ID NO: 2333635 - RNA, 19 nt, Homo sapiens
  misc_RNA (1)...(19): siRNA sense strand
gagaacaagaguagcagga

SEQ ID NO: 2333636 - RNA, 19 nt, Homo sapiens
  misc_RNA (1)...(19): siRNA sense strand
cuacauauggcgauacuau

SEQ ID NO: 2333637 - RNA, 19 nt, Homo sapiens
  misc_RNA (1)...(19): siRNA sense strand
aguauucgaaugagaacaa

SEQ ID NO: 2333638 - RNA, 19 nt, Homo sapiens
  misc_RNA (1)...(19): siRNA sense strand
ccagaugagcugaagcaca

SEQ ID NO: 2333639 - RNA, 19 nt, Homo sapiens
  misc_RNA (1)...(19): siRNA sense strand
cugaacaguuugaaagucu

SEQ ID NO: 2333640 - RNA, 19 nt, Homo sapiens
  misc_RNA (1)...(19): siRNA sense strand
cagagaaguaccuagaaca

SEQ ID NO: 2333641 - RNA, 19 nt, Homo sapiens
  misc_RNA (1)...(19): siRNA sense strand
ucgaaugagaacaagagua

SEQ ID NO: 2333642 - RNA, 19 nt, Homo sapiens
  misc_RNA (1)...(19): siRNA sense strand
agccaggacuauuaagauu

SEQ ID NO: 2333643 - RNA, 19 nt, Homo sapiens
  misc_RNA (1)...(19): siRNA sense strand
cagcagaagaucuuguaga

SEQ ID NO: 2333644 - RNA, 19 nt, Homo sapiens
  misc_RNA (1)...(19): siRNA sense strand
ggagguuugccgugaucua

SEQ ID NO: 2333645 - RNA, 19 nt, Homo sapiens
  misc_RNA (1)...(19): siRNA sense strand
ucguaaagaagguauguga

SEQ ID NO: 2333646 - RNA, 19 nt, Homo sapiens
  misc_RNA (1)...(19): siRNA sense strand
caguuuuccuugagggauu

SEQ ID NO: 2333647 - RNA, 19 nt, Homo sapiens
  misc_RNA (1)...(19): siRNA sense strand
ugaaagucucucaagcaua

SEQ ID NO: 2333648 - RNA, 19 nt, Homo sapiens
  misc_RNA (1)...(19): siRNA sense strand
aacaagaguagcaggaaaa

SEQ ID NO: 2333649 - RNA, 19 nt, Homo sapiens
  misc_RNA (1)...(19): siRNA sense strand
caacagaaaauaacagaga

SEQ ID NO: 2333650 - RNA, 19 nt, Homo sapiens
  misc_RNA (1)...(19): siRNA sense strand
agacacaggcguuuguaau

SEQ ID NO: 2333651 - RNA, 19 nt, Homo sapiens
  misc_RNA (1)...(19): siRNA sense strand
agacaacacggaaagguau

SEQ ID NO: 2333652 - RNA, 19 nt, Homo sapiens
  misc_RNA (1)...(19): siRNA sense strand
ucuuugaaguugaaguuga

SEQ ID NO: 2333653 - RNA, 19 nt, Homo sapiens
  misc_RNA (1)...(19): siRNA sense strand
gggaauacauaauuggcuu

SEQ ID NO: 2333654 - RNA, 19 nt, Homo sapiens
  misc_RNA (1)...(19): siRNA sense strand
ccaaagagucagcugggaa

SEQ ID NO: 2333655 - RNA, 19 nt, Homo sapiens
  misc_RNA (1)...(19): siRNA sense strand
aguccauggugaaggaaga

SEQ ID NO: 2333656 - RNA, 19 nt, Homo sapiens
  misc_RNA (1)...(19): siRNA sense strand
gcacggauccagaagguga

SEQ ID NO: 2333657 - RNA, 19 nt, Homo sapiens
  misc_RNA (1)...(19): siRNA sense strand
gggacagagagcugaugaa

SEQ ID NO: 2333658 - RNA, 19 nt, Homo sapiens
  misc_RNA (1)...(19): siRNA sense strand
acacguuagaggaaguuaa

SEQ ID NO: 2333659 - RNA, 19 nt, Homo sapiens
  misc_RNA (1)...(19): siRNA sense strand
aagugaagaccaagguuau

SEQ ID NO: 2333660 - RNA, 19 nt, Homo sapiens
  misc_RNA (1)...(19): siRNA sense strand
ccaaagugaccucgggcuu

SEQ ID NO: 2333661 - RNA, 19 nt, Homo sapiens
  misc_RNA (1)...(19): siRNA sense strand
ggauccagaaggugaccaa

SEQ ID NO: 2333662 - RNA, 19 nt, Homo sapiens
  misc_RNA (1)...(19): siRNA sense strand
ucaucaaguccauggugaa

SEQ ID NO: 2333663 - RNA, 19 nt, Homo sapiens
  misc_RNA (1)...(19): siRNA sense strand
gcugaagagacagggcaua

SEQ ID NO: 2333664 - RNA, 19 nt, Homo sapiens
  misc_RNA (1)...(19): siRNA sense strand
cugcagugcccaagucaau

SEQ ID NO: 2333665 - RNA, 19 nt, Homo sapiens
  misc_RNA (1)...(19): siRNA sense strand
accacaugcugaagagaca

SEQ ID NO: 2333666 - RNA, 19 nt, Homo sapiens
  misc_RNA (1)...(19): siRNA sense strand
aggacaaugauaacaguuu

SEQ ID NO: 2333667 - RNA, 19 nt, Homo sapiens
  misc_RNA (1)...(19): siRNA sense strand
aggucauguugcuggccaa

SEQ ID NO: 2333668 - RNA, 19 nt, Homo sapiens
  misc_RNA (1)...(19): siRNA sense strand
gaaguuaacaacaacguga

SEQ ID NO: 2333669 - RNA, 19 nt, Homo sapiens
  misc_RNA (1)...(19): siRNA sense strand
gcagccaccuucugggaca

SEQ ID NO: 2333670 - RNA, 19 nt, Homo sapiens
  misc_RNA (1)...(19): siRNA sense strand
ugccugacucggaaggaaa

SEQ ID NO: 2333671 - RNA, 19 nt, Homo sapiens
  misc_RNA (1)...(19): siRNA sense strand
ugugagaacaagaggcgga

SEQ ID NO: 2333672 - RNA, 19 nt, Homo sapiens
  misc_RNA (1)...(19): siRNA sense strand
gggaaagccuggaguccug

SEQ ID NO: 2333673 - RNA, 19 nt, Homo sapiens
  misc_RNA (1)...(19): siRNA sense strand
uugaucagugugagaacaa

SEQ ID NO: 2333674 - RNA, 19 nt, Homo sapiens
  misc_RNA (1)...(19): siRNA sense strand
cccuaauguuccucccaaa

SEQ ID NO: 2333675 - RNA, 19 nt, Homo sapiens
  misc_RNA (1)...(19): siRNA sense strand
gggaauacauaauuggcuu

SEQ ID NO: 2333676 - RNA, 19 nt, Homo sapiens
  misc_RNA (1)...(19): siRNA sense strand
ccaaagagucagcugggaa

SEQ ID NO: 2333677 - RNA, 19 nt, Homo sapiens
  misc_RNA (1)...(19): siRNA sense strand
aguccauggugaaggaaga

SEQ ID NO: 2333678 - RNA, 19 nt, Homo sapiens
  misc_RNA (1)...(19): siRNA sense strand
gcacggauccagaagguga

SEQ ID NO: 2333679 - RNA, 19 nt, Homo sapiens
  misc_RNA (1)...(19): siRNA sense strand
gggacagagagcugaugaa

SEQ ID NO: 2333680 - RNA, 19 nt, Homo sapiens
  misc_RNA (1)...(19): siRNA sense strand
acacguuagaggaaguuaa

SEQ ID NO: 2333681 - RNA, 19 nt, Homo sapiens
  misc_RNA (1)...(19): siRNA sense strand
aagugaagaccaagguuau

SEQ ID NO: 2333682 - RNA, 19 nt, Homo sapiens
  misc_RNA (1)...(19): siRNA sense strand
ccaaagugaccucgggcuu

SEQ ID NO: 2333683 - RNA, 19 nt, Homo sapiens
  misc_RNA (1)...(19): siRNA sense strand
ggauccagaaggugaccaa

SEQ ID NO: 2333684 - RNA, 19 nt, Homo sapiens
  misc_RNA (1)...(19): siRNA sense strand
ucaucaaguccauggugaa

SEQ ID NO: 2333685 - RNA, 19 nt, Homo sapiens
  misc_RNA (1)...(19): siRNA sense strand
gcugaagagacagggcaua

SEQ ID NO: 2333686 - RNA, 19 nt, Homo sapiens
  misc_RNA (1)...(19): siRNA sense strand
cugcagugcccaagucaau

SEQ ID NO: 2333687 - RNA, 19 nt, Homo sapiens
  misc_RNA (1)...(19): siRNA sense strand
accacaugcugaagagaca

SEQ ID NO: 2333688 - RNA, 19 nt, Homo sapiens
  misc_RNA (1)...(19): siRNA sense strand
aggacaaugauaacaguuu

SEQ ID NO: 2333689 - RNA, 19 nt, Homo sapiens
  misc_RNA (1)...(19): siRNA sense strand
aggucauguugcuggccaa

SEQ ID NO: 2333690 - RNA, 19 nt, Homo sapiens
  misc_RNA (1)...(19): siRNA sense strand
gaaguuaacaacaacguga

SEQ ID NO: 2333691 - RNA, 19 nt, Homo sapiens
  misc_RNA (1)...(19): siRNA sense strand
gcagccaccuucugggaca

SEQ ID NO: 2333692 - RNA, 19 nt, Homo sapiens
  misc_RNA (1)...(19): siRNA sense strand
ugccugacucggaaggaaa

SEQ ID NO: 2333693 - RNA, 19 nt, Homo sapiens
  misc_RNA (1)...(19): siRNA sense strand
ugugagaacaagaggcgga

SEQ ID NO: 2333694 - RNA, 19 nt, Homo sapiens
  misc_RNA (1)...(19): siRNA sense strand
gggaaagccuggaguccug

SEQ ID NO: 2333695 - RNA, 19 nt, Homo sapiens
  misc_RNA (1)...(19): siRNA sense strand
uugaucagugugagaacaa

SEQ ID NO: 2333696 - RNA, 19 nt, Homo sapiens
  misc_RNA (1)...(19): siRNA sense strand
cccuaauguuccucccaaa

SEQ ID NO: 2333697 - RNA, 19 nt, Homo sapiens
  misc_RNA (1)...(19): siRNA sense strand
ccauaaaggcagugaucau

SEQ ID NO: 2333698 - RNA, 19 nt, Homo sapiens
  misc_RNA (1)...(19): siRNA sense strand
gcucaaaagaagagauauu

SEQ ID NO: 2333699 - RNA, 19 nt, Homo sapiens
  misc_RNA (1)...(19): siRNA sense strand
ccauagggauuuggggaaa

SEQ ID NO: 2333700 - RNA, 19 nt, Homo sapiens
  misc_RNA (1)...(19): siRNA sense strand
cuaaagaucaacaagguca

SEQ ID NO: 2333701 - RNA, 19 nt, Homo sapiens
  misc_RNA (1)...(19): siRNA sense strand
ccuuagaagaagaaagccu

SEQ ID NO: 2333702 - RNA, 19 nt, Homo sapiens
  misc_RNA (1)...(19): siRNA sense strand
gugaauugaccauagggau

SEQ ID NO: 2333703 - RNA, 19 nt, Homo sapiens
  misc_RNA (1)...(19): siRNA sense strand
gaaauagcaaguugaggga

SEQ ID NO: 2333704 - RNA, 19 nt, Homo sapiens
  misc_RNA (1)...(19): siRNA sense strand
gccaagugcaauagaggca

SEQ ID NO: 2333705 - RNA, 19 nt, Homo sapiens
  misc_RNA (1)...(19): siRNA sense strand
aauagcaaguugagggaag

SEQ ID NO: 2333706 - RNA, 19 nt, Homo sapiens
  misc_RNA (1)...(19): siRNA sense strand
acucaagauagccaauaua

SEQ ID NO: 2333707 - RNA, 19 nt, Homo sapiens
  misc_RNA (1)...(19): siRNA sense strand
aaguguuuccuuagaagaa

SEQ ID NO: 2333708 - RNA, 19 nt, Homo sapiens
  misc_RNA (1)...(19): siRNA sense strand
aauaauaaacugaggcaga

SEQ ID NO: 2333709 - RNA, 19 nt, Homo sapiens
  misc_RNA (1)...(19): siRNA sense strand
aguaagaucuuuauggaga

SEQ ID NO: 2333710 - RNA, 19 nt, Homo sapiens
  misc_RNA (1)...(19): siRNA sense strand
cagccuuauagcagcaaua

SEQ ID NO: 2333711 - RNA, 19 nt, Homo sapiens
  misc_RNA (1)...(19): siRNA sense strand
caauuuaguuaucgccaga

SEQ ID NO: 2333712 - RNA, 19 nt, Homo sapiens
  misc_RNA (1)...(19): siRNA sense strand
caguguaaugguuguaaau

SEQ ID NO: 2333713 - RNA, 19 nt, Homo sapiens
  misc_RNA (1)...(19): siRNA sense strand
guuucaugcaauugccaaa

SEQ ID NO: 2333714 - RNA, 19 nt, Homo sapiens
  misc_RNA (1)...(19): siRNA sense strand
augcaauugccaaacauaa

SEQ ID NO: 2333715 - RNA, 19 nt, Homo sapiens
  misc_RNA (1)...(19): siRNA sense strand
acaaguuagcuguggaguu

SEQ ID NO: 2333716 - RNA, 19 nt, Homo sapiens
  misc_RNA (1)...(19): siRNA sense strand
aauccuaauaacuggagaa

SEQ ID NO: 2333717 - RNA, 19 nt, Homo sapiens
  misc_RNA (1)...(19): siRNA sense strand
gugugaaggcaaagaggaa

SEQ ID NO: 2333718 - RNA, 19 nt, Homo sapiens
  misc_RNA (1)...(19): siRNA sense strand
gugaaggcaaagaggaaaa

SEQ ID NO: 2333719 - RNA, 19 nt, Homo sapiens
  misc_RNA (1)...(19): siRNA sense strand
cugguaaagaaaugagaau

SEQ ID NO: 2333720 - RNA, 19 nt, Homo sapiens
  misc_RNA (1)...(19): siRNA sense strand
ucuaaaggugauuuggaaa

SEQ ID NO: 2333721 - RNA, 19 nt, Homo sapiens
  misc_RNA (1)...(19): siRNA sense strand
ugucuaugccacugguaaa

SEQ ID NO: 2333722 - RNA, 19 nt, Homo sapiens
  misc_RNA (1)...(19): siRNA sense strand
cggaauuagcugugauuuu

SEQ ID NO: 2333723 - RNA, 19 nt, Homo sapiens
  misc_RNA (1)...(19): siRNA sense strand
aggcaaagaggaaaacaaa

SEQ ID NO: 2333724 - RNA, 19 nt, Homo sapiens
  misc_RNA (1)...(19): siRNA sense strand
ccuuccagccacugagaau

SEQ ID NO: 2333725 - RNA, 19 nt, Homo sapiens
  misc_RNA (1)...(19): siRNA sense strand
cauucauuggauugguaaa

SEQ ID NO: 2333726 - RNA, 19 nt, Homo sapiens
  misc_RNA (1)...(19): siRNA sense strand
uggagaauugacaggguga

SEQ ID NO: 2333727 - RNA, 19 nt, Homo sapiens
  misc_RNA (1)...(19): siRNA sense strand
gcagcuaagguaugggcua

SEQ ID NO: 2333728 - RNA, 19 nt, Homo sapiens
  misc_RNA (1)...(19): siRNA sense strand
cgauaugaaagaaacacaa

SEQ ID NO: 2333729 - RNA, 19 nt, Homo sapiens
  misc_RNA (1)...(19): siRNA sense strand
gaguaaacaaagugauucu

SEQ ID NO: 2333730 - RNA, 19 nt, Homo sapiens
  misc_RNA (1)...(19): siRNA sense strand
ccgauaugaaagaaacaca

SEQ ID NO: 2333731 - RNA, 19 nt, Homo sapiens
  misc_RNA (1)...(19): siRNA sense strand
aagaaacacaacuuggaau

SEQ ID NO: 2333732 - RNA, 19 nt, Homo sapiens
  misc_RNA (1)...(19): siRNA sense strand
uggaccgauaugaaagaaa

SEQ ID NO: 2333733 - RNA, 19 nt, Homo sapiens
  misc_RNA (1)...(19): siRNA sense strand
auugaagugcugugagaaa

SEQ ID NO: 2333734 - RNA, 19 nt, Homo sapiens
  misc_RNA (1)...(19): siRNA sense strand
uguuguaguuagugaguca

SEQ ID NO: 2333735 - RNA, 19 nt, Homo sapiens
  misc_RNA (1)...(19): siRNA sense strand
ugguugaagagcagaacaa

SEQ ID NO: 2333736 - RNA, 19 nt, Homo sapiens
  misc_RNA (1)...(19): siRNA sense strand
guugaagagcagaacaaau

SEQ ID NO: 2333737 - RNA, 19 nt, Homo sapiens
  misc_RNA (1)...(19): siRNA sense strand
cgguaaccuaauugaauau

SEQ ID NO: 2333738 - RNA, 19 nt, Homo sapiens
  misc_RNA (1)...(19): siRNA sense strand
uugacugugccaagaauaa

SEQ ID NO: 2333739 - RNA, 19 nt, Homo sapiens
  misc_RNA (1)...(19): siRNA sense strand
ggaauggauuuauuggacu

SEQ ID NO: 2333740 - RNA, 19 nt, Homo sapiens
  misc_RNA (1)...(19): siRNA sense strand
cugaaagguuggaggaaaa

SEQ ID NO: 2333741 - RNA, 19 nt, Homo sapiens
  misc_RNA (1)...(19): siRNA sense strand
gcaagaagaugcagcacac

SEQ ID NO: 2333742 - RNA, 19 nt, Homo sapiens
  misc_RNA (1)...(19): siRNA sense strand
cuacuguggcugagguaca

SEQ ID NO: 2333743 - RNA, 19 nt, Homo sapiens
  misc_RNA (1)...(19): siRNA sense strand
aggugaugggaauggcuua

SEQ ID NO: 2333744 - RNA, 19 nt, Homo sapiens
  misc_RNA (1)...(19): siRNA sense strand
uggaaacaucgcaagaaga

SEQ ID NO: 2333745 - RNA, 19 nt, Homo sapiens
  misc_RNA (1)...(19): siRNA sense strand
cugcaaaacaggaagacaa

SEQ ID NO: 2333746 - RNA, 19 nt, Homo sapiens
  misc_RNA (1)...(19): siRNA sense strand
aagggaagacugagagcga

SEQ ID NO: 2333747 - RNA, 19 nt, Homo sapiens
  misc_RNA (1)...(19): siRNA sense strand
cugaaugugcagaggauac

SEQ ID NO: 2333748 - RNA, 19 nt, Homo sapiens
  misc_RNA (1)...(19): siRNA sense strand
ccgacuacacggcgcagaa

SEQ ID NO: 2333749 - RNA, 19 nt, Homo sapiens
  misc_RNA (1)...(19): siRNA sense strand
agaacuuggaccacgggaa

SEQ ID NO: 2333750 - RNA, 19 nt, Homo sapiens
  misc_RNA (1)...(19): siRNA sense strand
gggccaugauuaucgcaga

SEQ ID NO: 2333751 - RNA, 19 nt, Homo sapiens
  misc_RNA (1)...(19): siRNA sense strand
caugauuaucgcagaacga

SEQ ID NO: 2333752 - RNA, 19 nt, Homo sapiens
  misc_RNA (1)...(19): siRNA sense strand
gaagacaaaggaagggcca

SEQ ID NO: 2333753 - RNA, 19 nt, Homo sapiens
  misc_RNA (1)...(19): siRNA sense strand
acaucaaacgcaagaacaa

SEQ ID NO: 2333754 - RNA, 19 nt, Homo sapiens
  misc_RNA (1)...(19): siRNA sense strand
cgagcaacaucaaacgcaa

SEQ ID NO: 2333755 - RNA, 19 nt, Homo sapiens
  misc_RNA (1)...(19): siRNA sense strand
gggaaugaguaucagccga

SEQ ID NO: 2333756 - RNA, 19 nt, Homo sapiens
  misc_RNA (1)...(19): siRNA sense strand
ggauauaagagcagaggcu

SEQ ID NO: 2333757 - RNA, 19 nt, Homo sapiens
  misc_RNA (1)...(19): siRNA sense strand
cuaaagagauugaauggga

SEQ ID NO: 2333758 - RNA, 19 nt, Homo sapiens
  misc_RNA (1)...(19): siRNA sense strand
gcaaggaugaagaugggaa

SEQ ID NO: 2333759 - RNA, 19 nt, Homo sapiens
  misc_RNA (1)...(19): siRNA sense strand
auauaagagcagaggcuga

SEQ ID NO: 2333760 - RNA, 19 nt, Homo sapiens
  misc_RNA (1)...(19): siRNA sense strand
gaggagggcuugaaggacu

SEQ ID NO: 2333761 - RNA, 19 nt, Homo sapiens
  misc_RNA (1)...(19): siRNA sense strand
cuggcugggagaagggaua

SEQ ID NO: 2333762 - RNA, 19 nt, Homo sapiens
  misc_RNA (1)...(19): siRNA sense strand
aagacaaagccaaguccaa

SEQ ID NO: 2333763 - RNA, 19 nt, Homo sapiens
  misc_RNA (1)...(19): siRNA sense strand
ugaaagugguccuggcguu

SEQ ID NO: 2333764 - RNA, 19 nt, Homo sapiens
  misc_RNA (1)...(19): siRNA sense strand
gccucagacugguggcaau

SEQ ID NO: 2333765 - RNA, 19 nt, Homo sapiens
  misc_RNA (1)...(19): siRNA sense strand
cuucauguuuggaggccau

SEQ ID NO: 2333766 - RNA, 19 nt, Homo sapiens
  misc_RNA (1)...(19): siRNA sense strand
ccaccuauucccagggcuu

SEQ ID NO: 2333767 - RNA, 19 nt, Homo sapiens
  misc_RNA (1)...(19): siRNA sense strand
cauugucagaugaggauau

SEQ ID NO: 2333768 - RNA, 19 nt, Homo sapiens
  misc_RNA (1)...(19): siRNA sense strand
cguugaugcugcugcacuu

SEQ ID NO: 2333769 - RNA, 19 nt, Homo sapiens
  misc_RNA (1)...(19): siRNA sense strand
gaugaagaugggaaggcau

SEQ ID NO: 2333770 - RNA, 19 nt, Homo sapiens
  misc_RNA (1)...(19): siRNA sense strand
augaagaugggaaggcauu

SEQ ID NO: 2333771 - RNA, 19 nt, Homo sapiens
  misc_RNA (1)...(19): siRNA sense strand
uguacaaccuugcgaggca

SEQ ID NO: 2333772 - RNA, 19 nt, Homo sapiens
  misc_RNA (1)...(19): siRNA sense strand
cagugcccuuguagagaaa

SEQ ID NO: 2333773 - RNA, 19 nt, Homo sapiens
  misc_RNA (1)...(19): siRNA sense strand
ggaugaagaugggaaggca

SEQ ID NO: 2333774 - RNA, 19 nt, Homo sapiens
  misc_RNA (1)...(19): siRNA sense strand
cagaauaccaggagcgcug

SEQ ID NO: 2333775 - RNA, 19 nt, Homo sapiens
  misc_RNA (1)...(19): siRNA sense strand
agaaaagaagccagcauau

SEQ ID NO: 2333776 - RNA, 19 nt, Homo sapiens
  misc_RNA (1)...(19): siRNA sense strand
guuaaaugggccagggaaa

SEQ ID NO: 2333777 - RNA, 19 nt, Homo sapiens
  misc_RNA (1)...(19): siRNA sense strand
agacauacggcgaguggaa

SEQ ID NO: 2333778 - RNA, 19 nt, Homo sapiens
  misc_RNA (1)...(19): siRNA sense strand
auaugggauuagugagaaa

SEQ ID NO: 2333779 - RNA, 19 nt, Homo sapiens
  misc_RNA (1)...(19): siRNA sense strand
ggacaguauucuuuggaca

SEQ ID NO: 2333780 - RNA, 19 nt, Homo sapiens
  misc_RNA (1)...(19): siRNA sense strand
agucguauucagagauaaa

SEQ ID NO: 2333781 - RNA, 19 nt, Homo sapiens
  misc_RNA (1)...(19): siRNA sense strand
caauaugggauuagugaga

SEQ ID NO: 2333782 - RNA, 19 nt, Homo sapiens
  misc_RNA (1)...(19): siRNA sense strand
cgaaguugggugaggaaga

SEQ ID NO: 2333783 - RNA, 19 nt, Homo sapiens
  misc_RNA (1)...(19): siRNA sense strand
cagcauuauuacugugauu

SEQ ID NO: 2333784 - RNA, 19 nt, Homo sapiens
  misc_RNA (1)...(19): siRNA sense strand
gcaaauuggcagagggcgu

SEQ ID NO: 2333785 - RNA, 19 nt, Homo sapiens
  misc_RNA (1)...(19): siRNA sense strand
acuugaagagccugagaaa

SEQ ID NO: 2333786 - RNA, 19 nt, Homo sapiens
  misc_RNA (1)...(19): siRNA sense strand
ggagcugaagugugggaua

SEQ ID NO: 2333787 - RNA, 19 nt, Homo sapiens
  misc_RNA (1)...(19): siRNA sense strand
ggguuaaucuacaggaagu

SEQ ID NO: 2333788 - RNA, 19 nt, Homo sapiens
  misc_RNA (1)...(19): siRNA sense strand
gugcaguugcuguuggaaa

SEQ ID NO: 2333789 - RNA, 19 nt, Homo sapiens
  misc_RNA (1)...(19): siRNA sense strand
uggcaaagacuuauugaau

SEQ ID NO: 2333790 - RNA, 19 nt, Homo sapiens
  misc_RNA (1)...(19): siRNA sense strand
gcugaguauuguugaauca

SEQ ID NO: 2333791 - RNA, 19 nt, Homo sapiens
  misc_RNA (1)...(19): siRNA sense strand
uuggagauauggauggaaa

SEQ ID NO: 2333792 - RNA, 19 nt, Homo sapiens
  misc_RNA (1)...(19): siRNA sense strand
uuuaagaaguggcagaaau

SEQ ID NO: 2333793 - RNA, 19 nt, Homo sapiens
  misc_RNA (1)...(19): siRNA sense strand
gggauuagugagaaaugaa

SEQ ID NO: 2333794 - RNA, 19 nt, Homo sapiens
  misc_RNA (1)...(19): siRNA sense strand
cuuuagaauggaugaacaa

SEQ ID NO: 2333795 - RNA, 19 nt, Homo sapiens
  misc_RNA (1)...(19): siRNA sense strand
aggaagaacccauugaaga

SEQ ID NO: 2333796 - RNA, 19 nt, Homo sapiens
  misc_RNA (1)...(19): siRNA sense strand
guucagugguuguggaauc

SEQ ID NO: 2333797 - RNA, 19 nt, Homo sapiens
  misc_RNA (1)...(19): siRNA sense strand
cgaaauucacggaacagua

SEQ ID NO: 2333798 - RNA, 19 nt, Homo sapiens
  misc_RNA (1)...(19): siRNA sense strand
gcuuuagaauggaugaaca

SEQ ID NO: 2333799 - RNA, 19 nt, Homo sapiens
  misc_RNA (1)...(19): siRNA sense strand
cugauguuguaaagguuaa

SEQ ID NO: 2333800 - RNA, 19 nt, Homo sapiens
  misc_RNA (1)...(19): siRNA sense strand
caccaaacaauaugggauu

SEQ ID NO: 2333801 - RNA, 19 nt, Homo sapiens
  misc_RNA (1)...(19): siRNA sense strand
caguuuaagaaguggcaga

SEQ ID NO: 2333802 - RNA, 19 nt, Homo sapiens
  misc_RNA (1)...(19): siRNA sense strand
gggaaaacuaucaccauaa

SEQ ID NO: 2333803 - RNA, 19 nt, Homo sapiens
  misc_RNA (1)...(19): siRNA sense strand
ggaagaagagcuaugcaga

SEQ ID NO: 2333804 - RNA, 19 nt, Homo sapiens
  misc_RNA (1)...(19): siRNA sense strand
ugcaggaggcagaaaguaa

SEQ ID NO: 2333805 - RNA, 19 nt, Homo sapiens
  misc_RNA (1)...(19): siRNA sense strand
agauaacaugauugggcaa

SEQ ID NO: 2333806 - RNA, 19 nt, Homo sapiens
  misc_RNA (1)...(19): siRNA sense strand
uuucaaggcucuaugguga

SEQ ID NO: 2333807 - RNA, 19 nt, Homo sapiens
  misc_RNA (1)...(19): siRNA sense strand
aaucgaaauucacggaaca

SEQ ID NO: 2333808 - RNA, 19 nt, Homo sapiens
  misc_RNA (1)...(19): siRNA sense strand
caguaguucugguguguca

SEQ ID NO: 2333809 - RNA, 19 nt, Homo sapiens
  misc_RNA (1)...(19): siRNA sense strand
ggcagaguauccagaggaa

SEQ ID NO: 2333810 - RNA, 19 nt, Homo sapiens
  misc_RNA (1)...(19): siRNA sense strand
cacugaggacacagagaaa

SEQ ID NO: 2333811 - RNA, 19 nt, Homo sapiens
  misc_RNA (1)...(19): siRNA sense strand
augcaaucagggugacaaa

SEQ ID NO: 2333812 - RNA, 19 nt, Homo sapiens
  misc_RNA (1)...(19): siRNA sense strand
guugaaggaaacucaguaa

SEQ ID NO: 2333813 - RNA, 19 nt, Homo sapiens
  misc_RNA (1)...(19): siRNA sense strand
auacauuagugcuuggaga

SEQ ID NO: 2333814 - RNA, 19 nt, Homo sapiens
  misc_RNA (1)...(19): siRNA sense strand
ccagauggaaguaugggua

SEQ ID NO: 2333815 - RNA, 19 nt, Homo sapiens
  misc_RNA (1)...(19): siRNA sense strand
aauggaugaacaagaguua

SEQ ID NO: 2333816 - RNA, 19 nt, Homo sapiens
  misc_RNA (1)...(19): siRNA sense strand
gguuaaaugggccagggaa

SEQ ID NO: 2333817 - RNA, 19 nt, Homo sapiens
  misc_RNA (1)...(19): siRNA sense strand
gugaaagaggcaaugauga

SEQ ID NO: 2333818 - RNA, 19 nt, Homo sapiens
  misc_RNA (1)...(19): siRNA sense strand
cugcugaugucaaugggaa

SEQ ID NO: 2333819 - RNA, 19 nt, Homo sapiens
  misc_RNA (1)...(19): siRNA sense strand
cuuucagcgugaugguuua

SEQ ID NO: 2333820 - RNA, 19 nt, Homo sapiens
  misc_RNA (1)...(19): siRNA sense strand
ccucaacaccaaacaauau

SEQ ID NO: 2333821 - RNA, 19 nt, Homo sapiens
  misc_RNA (1)...(19): siRNA sense strand
ugaaggaaacucaguaaaa

SEQ ID NO: 2333822 - RNA, 19 nt, Homo sapiens
  misc_RNA (1)...(19): siRNA sense strand
cugaagugugggauacuaa

SEQ ID NO: 2333823 - RNA, 19 nt, Homo sapiens
  misc_RNA (1)...(19): siRNA sense strand
gugggauacuaaagagguu

SEQ ID NO: 2333824 - RNA, 19 nt, Homo sapiens
  misc_RNA (1)...(19): siRNA sense strand
caacgaauaugauugccaa

SEQ ID NO: 2333825 - RNA, 19 nt, Homo sapiens
  misc_RNA (1)...(19): siRNA sense strand
gcucauaacaagcuggcca

SEQ ID NO: 2333826 - RNA, 19 nt, Homo sapiens
  misc_RNA (1)...(19): siRNA sense strand
agccacaggugccaagaaa

SEQ ID NO: 2333827 - RNA, 19 nt, Homo sapiens
  misc_RNA (1)...(19): siRNA sense strand
caugagauacuuugauaga

SEQ ID NO: 2333828 - RNA, 19 nt, Homo sapiens
  misc_RNA (1)...(19): siRNA sense strand
ucugcuacacaaagaguua

SEQ ID NO: 2333829 - RNA, 19 nt, Homo sapiens
  misc_RNA (1)...(19): siRNA sense strand
uggcagucguauucagaga

SEQ ID NO: 2333830 - RNA, 19 nt, Homo sapiens
  misc_RNA (1)...(19): siRNA sense strand
guucagauggugagcaguu

SEQ ID NO: 2333831 - RNA, 19 nt, Homo sapiens
  misc_RNA (1)...(19): siRNA sense strand
gggugugauugcaauagaa

SEQ ID NO: 2333832 - RNA, 19 nt, Homo sapiens
  misc_RNA (1)...(19): siRNA sense strand
gcaucagaguccuagagau

SEQ ID NO: 2333833 - RNA, 19 nt, Homo sapiens
  misc_RNA (1)...(19): siRNA sense strand
caguugaauucauugucua

SEQ ID NO: 2333834 - RNA, 19 nt, Homo sapiens
  misc_RNA (1)...(19): siRNA sense strand
gcugauguuguaaagguua

SEQ ID NO: 2333835 - RNA, 19 nt, Homo sapiens
  misc_RNA (1)...(19): siRNA sense strand
gugugagauccaagagcau

SEQ ID NO: 2333836 - RNA, 19 nt, Homo sapiens
  misc_RNA (1)...(19): siRNA sense strand
cuucaaaugaggaaccaga

SEQ ID NO: 2333837 - RNA, 19 nt, Homo sapiens
  misc_RNA (1)...(19): siRNA sense strand
uaaucuacaggaagugaaa

SEQ ID NO: 2333838 - RNA, 19 nt, Homo sapiens
  misc_RNA (1)...(19): siRNA sense strand
gcauuauuacugugauuca

SEQ ID NO: 2333839 - RNA, 19 nt, Homo sapiens
  misc_RNA (1)...(19): siRNA sense strand
cugaauacgagcaggacaa

SEQ ID NO: 2333840 - RNA, 19 nt, Homo sapiens
  misc_RNA (1)...(19): siRNA sense strand
cugcaggaguggacggcaa

SEQ ID NO: 2333841 - RNA, 19 nt, Homo sapiens
  misc_RNA (1)...(19): siRNA sense strand
ccuucaaguuccagagcuu

SEQ ID NO: 2333842 - RNA, 19 nt, Homo sapiens
  misc_RNA (1)...(19): siRNA sense strand
cgaggaacaucauggccaa

SEQ ID NO: 2333843 - RNA, 19 nt, Homo sapiens
  misc_RNA (1)...(19): siRNA sense strand
acuggaagcucaaggcgaa

SEQ ID NO: 2333844 - RNA, 19 nt, Homo sapiens
  misc_RNA (1)...(19): siRNA sense strand
ugucagagguugaaugcca

SEQ ID NO: 2333845 - RNA, 19 nt, Homo sapiens
  misc_RNA (1)...(19): siRNA sense strand
ggaaacauccauugccgaa

SEQ ID NO: 2333846 - RNA, 19 nt, Homo sapiens
  misc_RNA (1)...(19): siRNA sense strand
agugagagguuguagcaca

SEQ ID NO: 2333847 - RNA, 19 nt, Homo sapiens
  misc_RNA (1)...(19): siRNA sense strand
gugaggaaagugagagcuu

SEQ ID NO: 2333848 - RNA, 19 nt, Homo sapiens
  misc_RNA (1)...(19): siRNA sense strand
ggcguaagcuggagcggau

SEQ ID NO: 2333849 - RNA, 19 nt, Homo sapiens
  misc_RNA (1)...(19): siRNA sense strand
guccaagcccggagaucaa

SEQ ID NO: 2333850 - RNA, 19 nt, Homo sapiens
  misc_RNA (1)...(19): siRNA sense strand
cugaagaggugaagcaggu

SEQ ID NO: 2333851 - RNA, 19 nt, Homo sapiens
  misc_RNA (1)...(19): siRNA sense strand
gcacacagcacuugcggga

SEQ ID NO: 2333852 - RNA, 19 nt, Homo sapiens
  misc_RNA (1)...(19): siRNA sense strand
gggaaugcuuggugaggac

SEQ ID NO: 2333853 - RNA, 19 nt, Homo sapiens
  misc_RNA (1)...(19): siRNA sense strand
ccgagauucuggaugccaa

SEQ ID NO: 2333854 - RNA, 19 nt, Homo sapiens
  misc_RNA (1)...(19): siRNA sense strand
cguuuaacccucagaagga

SEQ ID NO: 2333855 - RNA, 19 nt, Homo sapiens
  misc_RNA (1)...(19): siRNA sense strand
gcgucaucguggacaguca

SEQ ID NO: 2333856 - RNA, 19 nt, Homo sapiens
  misc_RNA (1)...(19): siRNA sense strand
ggugucaacaagaggauca

SEQ ID NO: 2333857 - RNA, 19 nt, Homo sapiens
  misc_RNA (1)...(19): siRNA sense strand
caacugaauacgagcagga

SEQ ID NO: 2333858 - RNA, 19 nt, Homo sapiens
  misc_RNA (1)...(19): siRNA sense strand
acagaaagugagagguugu

SEQ ID NO: 2333859 - RNA, 19 nt, Homo sapiens
  misc_RNA (1)...(19): siRNA sense strand
acagugaagccgacgaaga

SEQ ID NO: 2333860 - RNA, 19 nt, Homo sapiens
  misc_RNA (1)...(19): siRNA sense strand
aaguggucgcugagggcaa

SEQ ID NO: 2333861 - RNA, 19 nt, Homo sapiens
  misc_RNA (1)...(19): siRNA sense strand
ccgcagagcaaaacagaca

SEQ ID NO: 2333862 - RNA, 19 nt, Homo sapiens
  misc_RNA (1)...(19): siRNA sense strand
acacagacagugaggaaag

SEQ ID NO: 2333863 - RNA, 19 nt, Homo sapiens
  misc_RNA (1)...(19): siRNA sense strand
ccgaacaguuacaggagcu

SEQ ID NO: 2333864 - RNA, 19 nt, Homo sapiens
  misc_RNA (1)...(19): siRNA sense strand
ccgugugaacagaaaguga

SEQ ID NO: 2333865 - RNA, 19 nt, Homo sapiens
  misc_RNA (1)...(19): siRNA sense strand
cuaaacacgccaaggucuu

SEQ ID NO: 2333866 - RNA, 19 nt, Homo sapiens
  misc_RNA (1)...(19): siRNA sense strand
ccucacgacuggaagcuca

SEQ ID NO: 2333867 - RNA, 19 nt, Homo sapiens
  misc_RNA (1)...(19): siRNA sense strand
agagagugggugaggagga

SEQ ID NO: 2333868 - RNA, 19 nt, Homo sapiens
  misc_RNA (1)...(19): siRNA sense strand
ccuggagaaguuugaggaa

SEQ ID NO: 2333869 - RNA, 19 nt, Homo sapiens
  misc_RNA (1)...(19): siRNA sense strand
aagggaagggugucaacaa

SEQ ID NO: 2333870 - RNA, 19 nt, Homo sapiens
  misc_RNA (1)...(19): siRNA sense strand
gcugauucuggaaggguga

SEQ ID NO: 2333871 - RNA, 19 nt, Homo sapiens
  misc_RNA (1)...(19): siRNA sense strand
cagacagugaggaaaguga

SEQ ID NO: 2333872 - RNA, 19 nt, Homo sapiens
  misc_RNA (1)...(19): siRNA sense strand
acacaccgguggaggagga

SEQ ID NO: 2333873 - RNA, 19 nt, Homo sapiens
  misc_RNA (1)...(19): siRNA sense strand
gggaggacguggaaaacca

SEQ ID NO: 2333874 - RNA, 19 nt, Homo sapiens
  misc_RNA (1)...(19): siRNA sense strand
ugagcaacgagaagggcau

SEQ ID NO: 2333875 - RNA, 19 nt, Homo sapiens
  misc_RNA (1)...(19): siRNA sense strand
gggacauauuucugaaggu

SEQ ID NO: 2333876 - RNA, 19 nt, Homo sapiens
  misc_RNA (1)...(19): siRNA sense strand
gagaagaagagaagagaaa

SEQ ID NO: 2333877 - RNA, 19 nt, Homo sapiens
  misc_RNA (1)...(19): siRNA sense strand
agacaacagcagagaaaua

SEQ ID NO: 2333878 - RNA, 19 nt, Homo sapiens
  misc_RNA (1)...(19): siRNA sense strand
guuuaaaagccuagagaaa

SEQ ID NO: 2333879 - RNA, 19 nt, Homo sapiens
  misc_RNA (1)...(19): siRNA sense strand
ggaaaguagaagagaucaa

SEQ ID NO: 2333880 - RNA, 19 nt, Homo sapiens
  misc_RNA (1)...(19): siRNA sense strand
caacaagagagucggaaua

SEQ ID NO: 2333881 - RNA, 19 nt, Homo sapiens
  misc_RNA (1)...(19): siRNA sense strand
acucagaaaugcagaggaa

SEQ ID NO: 2333882 - RNA, 19 nt, Homo sapiens
  misc_RNA (1)...(19): siRNA sense strand
gguagaaggcaaagccaaa

SEQ ID NO: 2333883 - RNA, 19 nt, Homo sapiens
  misc_RNA (1)...(19): siRNA sense strand
gagcaaacacagcaagaaa

SEQ ID NO: 2333884 - RNA, 19 nt, Homo sapiens
  misc_RNA (1)...(19): siRNA sense strand
uggaggagguggaggaaga

SEQ ID NO: 2333885 - RNA, 19 nt, Homo sapiens
  misc_RNA (1)...(19): siRNA sense strand
ggaauaaugaagagacuau

SEQ ID NO: 2333886 - RNA, 19 nt, Homo sapiens
  misc_RNA (1)...(19): siRNA sense strand
gcagaagguagaaggcaaa

SEQ ID NO: 2333887 - RNA, 19 nt, Homo sapiens
  misc_RNA (1)...(19): siRNA sense strand
guagacaacagcagagaaa

SEQ ID NO: 2333888 - RNA, 19 nt, Homo sapiens
  misc_RNA (1)...(19): siRNA sense strand
auaaagagguugugaaagu

SEQ ID NO: 2333889 - RNA, 19 nt, Homo sapiens
  misc_RNA (1)...(19): siRNA sense strand
agagagaagcccaguguua

SEQ ID NO: 2333890 - RNA, 19 nt, Homo sapiens
  misc_RNA (1)...(19): siRNA sense strand
gugaaggaauggaguggua

SEQ ID NO: 2333891 - RNA, 19 nt, Homo sapiens
  misc_RNA (1)...(19): siRNA sense strand
gagaaauaagcuucagaaa

SEQ ID NO: 2333892 - RNA, 19 nt, Homo sapiens
  misc_RNA (1)...(19): siRNA sense strand
aagaaggaaucuacaguaa

SEQ ID NO: 2333893 - RNA, 19 nt, Homo sapiens
  misc_RNA (1)...(19): siRNA sense strand
aggcaauaguagaacacaa

SEQ ID NO: 2333894 - RNA, 19 nt, Homo sapiens
  misc_RNA (1)...(19): siRNA sense strand
gcuaaaacucuuaaggaaa

SEQ ID NO: 2333895 - RNA, 19 nt, Homo sapiens
  misc_RNA (1)...(19): siRNA sense strand
aggcuaaauuggaagagaa

SEQ ID NO: 2333896 - RNA, 19 nt, Homo sapiens
  misc_RNA (1)...(19): siRNA sense strand
guccaaaggcuaauagaua

SEQ ID NO: 2333897 - RNA, 19 nt, Homo sapiens
  misc_RNA (1)...(19): siRNA sense strand
caguauggcauuagaagaa

SEQ ID NO: 2333898 - RNA, 19 nt, Homo sapiens
  misc_RNA (1)...(19): siRNA sense strand
ccugaaggguguaguggaa

SEQ ID NO: 2333899 - RNA, 19 nt, Homo sapiens
  misc_RNA (1)...(19): siRNA sense strand
ucauauaugucauggaaga

SEQ ID NO: 2333900 - RNA, 19 nt, Homo sapiens
  misc_RNA (1)...(19): siRNA sense strand
ggaggaaaguagaagagau

SEQ ID NO: 2333901 - RNA, 19 nt, Homo sapiens
  misc_RNA (1)...(19): siRNA sense strand
gaacgaagugugaaggaau

SEQ ID NO: 2333902 - RNA, 19 nt, Homo sapiens
  misc_RNA (1)...(19): siRNA sense strand
ucagaaaugcagaggaaga

SEQ ID NO: 2333903 - RNA, 19 nt, Homo sapiens
  misc_RNA (1)...(19): siRNA sense strand
gccaugaaucuuugggaaa

SEQ ID NO: 2333904 - RNA, 19 nt, Homo sapiens
  misc_RNA (1)...(19): siRNA sense strand
ccgaagagccuuuggaagu

SEQ ID NO: 2333905 - RNA, 19 nt, Homo sapiens
  misc_RNA (1)...(19): siRNA sense strand
uagaagagaucaaggcaga

SEQ ID NO: 2333906 - RNA, 19 nt, Homo sapiens
  misc_RNA (1)...(19): siRNA sense strand
ccugauaagucugaagaua

SEQ ID NO: 2333907 - RNA, 19 nt, Homo sapiens
  misc_RNA (1)...(19): siRNA sense strand
aggaggaggaggaggaaga

SEQ ID NO: 2333908 - RNA, 19 nt, Homo sapiens
  misc_RNA (1)...(19): siRNA sense strand
ugaucaaauuaccggauua

SEQ ID NO: 2333909 - RNA, 19 nt, Homo sapiens
  misc_RNA (1)...(19): siRNA sense strand
ccacagagggagaagccua

SEQ ID NO: 2333910 - RNA, 19 nt, Homo sapiens
  misc_RNA (1)...(19): siRNA sense strand
gaggagauccauaggaaga

SEQ ID NO: 2333911 - RNA, 19 nt, Homo sapiens
  misc_RNA (1)...(19): siRNA sense strand
agaggaagcugcagagcau

SEQ ID NO: 2333912 - RNA, 19 nt, Homo sapiens
  misc_RNA (1)...(19): siRNA sense strand
ccaaagacugugaucguua

SEQ ID NO: 2333913 - RNA, 19 nt, Homo sapiens
  misc_RNA (1)...(19): siRNA sense strand
uugcugaacuacaaagaaa

SEQ ID NO: 2333914 - RNA, 19 nt, Homo sapiens
  misc_RNA (1)...(19): siRNA sense strand
uaaaggaggcauagcuaaa

SEQ ID NO: 2333915 - RNA, 19 nt, Homo sapiens
  misc_RNA (1)...(19): siRNA sense strand
acagagaagccgaguauuu

SEQ ID NO: 2333916 - RNA, 19 nt, Homo sapiens
  misc_RNA (1)...(19): siRNA sense strand
agcagaagguagaaggcaa

SEQ ID NO: 2333917 - RNA, 19 nt, Homo sapiens
  misc_RNA (1)...(19): siRNA sense strand
ggaugaauagugaguuuaa

SEQ ID NO: 2333918 - RNA, 19 nt, Homo sapiens
  misc_RNA (1)...(19): siRNA sense strand
gaagaagagaagagaaaau

SEQ ID NO: 2333919 - RNA, 19 nt, Homo sapiens
  misc_RNA (1)...(19): siRNA sense strand
cagauagagaucaaaguaa

SEQ ID NO: 2333920 - RNA, 19 nt, Homo sapiens
  misc_RNA (1)...(19): siRNA sense strand
cagaugaccaugugaggaa

SEQ ID NO: 2333921 - RNA, 19 nt, Homo sapiens
  misc_RNA (1)...(19): siRNA sense strand
acaaagaagugauggauac

SEQ ID NO: 2333922 - RNA, 19 nt, Homo sapiens
  misc_RNA (1)...(19): siRNA sense strand
cuacaaagaaagccaacaa

SEQ ID NO: 2333923 - RNA, 19 nt, Homo sapiens
  misc_RNA (1)...(19): siRNA sense strand
ucacauaccugaagaggca

SEQ ID NO: 2333924 - RNA, 19 nt, Homo sapiens
  misc_RNA (1)...(19): siRNA sense strand
aagcaaagcgccaggugua

SEQ ID NO: 2333925 - RNA, 19 nt, Homo sapiens
  misc_RNA (1)...(19): siRNA sense strand
caugagacauucuuggaaa

SEQ ID NO: 2333926 - RNA, 19 nt, Homo sapiens
  misc_RNA (1)...(19): siRNA sense strand
ggcaauaguagaacacaaa

SEQ ID NO: 2333927 - RNA, 19 nt, Homo sapiens
  misc_RNA (1)...(19): siRNA sense strand
cagagaucuuaaacagaaa

SEQ ID NO: 2333928 - RNA, 19 nt, Homo sapiens
  misc_RNA (1)...(19): siRNA sense strand
agacaaacauagagaacac

SEQ ID NO: 2333929 - RNA, 19 nt, Homo sapiens
  misc_RNA (1)...(19): siRNA sense strand
ucacauagcgagaaaucua

SEQ ID NO: 2333930 - RNA, 19 nt, Homo sapiens
  misc_RNA (1)...(19): siRNA sense strand
ucuaaagcgaggaugaaua

SEQ ID NO: 2333931 - RNA, 19 nt, Homo sapiens
  misc_RNA (1)...(19): siRNA sense strand
auaguaaccuccaggcaaa

SEQ ID NO: 2333932 - RNA, 19 nt, Homo sapiens
  misc_RNA (1)...(19): siRNA sense strand
ccauauaagccuucuggua

SEQ ID NO: 2333933 - RNA, 19 nt, Homo sapiens
  misc_RNA (1)...(19): siRNA sense strand
cacucgagauguugggaua

SEQ ID NO: 2333934 - RNA, 19 nt, Homo sapiens
  misc_RNA (1)...(19): siRNA sense strand
cuacucacaaagagagaaa

SEQ ID NO: 2333935 - RNA, 19 nt, Homo sapiens
  misc_RNA (1)...(19): siRNA sense strand
cugaagaggcacagaaagu

SEQ ID NO: 2333936 - RNA, 19 nt, Homo sapiens
  misc_RNA (1)...(19): siRNA sense strand
cugaagaggcuuuggaagu

SEQ ID NO: 2333937 - RNA, 19 nt, Homo sapiens
  misc_RNA (1)...(19): siRNA sense strand
cagaagacugggauacaaa

SEQ ID NO: 2333938 - RNA, 19 nt, Homo sapiens
  misc_RNA (1)...(19): siRNA sense strand
guuauuuggucauggaaga

SEQ ID NO: 2333939 - RNA, 19 nt, Homo sapiens
  misc_RNA (1)...(19): siRNA sense strand
ucaaugugaauuugggaaa

SEQ ID NO: 2333940 - RNA, 19 nt, Homo sapiens
  misc_RNA (1)...(19): siRNA sense strand
agggagaagccuaguguuu

SEQ ID NO: 2333941 - RNA, 19 nt, Homo sapiens
  misc_RNA (1)...(19): siRNA sense strand
agagagaagcccagcauuu

SEQ ID NO: 2333942 - RNA, 19 nt, Homo sapiens
  misc_RNA (1)...(19): siRNA sense strand
cugaagaggcuaagaaugu

SEQ ID NO: 2333943 - RNA, 19 nt, Homo sapiens
  misc_RNA (1)...(19): siRNA sense strand
ggcaaauacaagugaacau

SEQ ID NO: 2333944 - RNA, 19 nt, Homo sapiens
  misc_RNA (1)...(19): siRNA sense strand
guauagacgacgaggagga

SEQ ID NO: 2333945 - RNA, 19 nt, Homo sapiens
  misc_RNA (1)...(19): siRNA sense strand
cagaagacugggacagcaa

SEQ ID NO: 2333946 - RNA, 19 nt, Homo sapiens
  misc_RNA (1)...(19): siRNA sense strand
aggaguggccagauaguua

SEQ ID NO: 2333947 - RNA, 19 nt, Homo sapiens
  misc_RNA (1)...(19): siRNA sense strand
ccaaaggcuaauagauaau

SEQ ID NO: 2333948 - RNA, 19 nt, Homo sapiens
  misc_RNA (1)...(19): siRNA sense strand
aggcagaguuauuugguca

SEQ ID NO: 2333949 - RNA, 19 nt, Homo sapiens
  misc_RNA (1)...(19): siRNA sense strand
caagauaccugcugggaga

SEQ ID NO: 2333950 - RNA, 19 nt, Homo sapiens
  misc_RNA (1)...(19): siRNA sense strand
cugaagaggcagagcccaa

SEQ ID NO: 2333951 - RNA, 19 nt, Homo sapiens
  misc_RNA (1)...(19): siRNA sense strand
ggaugagugcuguggaaau

SEQ ID NO: 2333952 - RNA, 19 nt, Homo sapiens
  misc_RNA (1)...(19): siRNA sense strand
ugcaggaggugguggcaaa

SEQ ID NO: 2333953 - RNA, 19 nt, Homo sapiens
  misc_RNA (1)...(19): siRNA sense strand
ccgucaaagaggugggcau

SEQ ID NO: 2333954 - RNA, 19 nt, Homo sapiens
  misc_RNA (1)...(19): siRNA sense strand
cguugacaguaaugaacaa

SEQ ID NO: 2333955 - RNA, 19 nt, Homo sapiens
  misc_RNA (1)...(19): siRNA sense strand
caucaaaggauuauggcca

SEQ ID NO: 2333956 - RNA, 19 nt, Homo sapiens
  misc_RNA (1)...(19): siRNA sense strand
ucaucaagguuguggagga

SEQ ID NO: 2333957 - RNA, 19 nt, Homo sapiens
  misc_RNA (1)...(19): siRNA sense strand
cuguggaaaucuuggauga

SEQ ID NO: 2333958 - RNA, 19 nt, Homo sapiens
  misc_RNA (1)...(19): siRNA sense strand
uggaaaucuuggaugauga

SEQ ID NO: 2333959 - RNA, 19 nt, Homo sapiens
  misc_RNA (1)...(19): siRNA sense strand
ggaaaaugucgaagcugaa

SEQ ID NO: 2333960 - RNA, 19 nt, Homo sapiens
  misc_RNA (1)...(19): siRNA sense strand
aaggaaacuuugaagagau

SEQ ID NO: 2333961 - RNA, 19 nt, Homo sapiens
  misc_RNA (1)...(19): siRNA sense strand
cuggaugagugcuguggaa

SEQ ID NO: 2333962 - RNA, 19 nt, Homo sapiens
  misc_RNA (1)...(19): siRNA sense strand
gcuccuauguaguggccau

SEQ ID NO: 2333963 - RNA, 19 nt, Homo sapiens
  misc_RNA (1)...(19): siRNA sense strand
aggaagugucccaguguuu

SEQ ID NO: 2333964 - RNA, 19 nt, Homo sapiens
  misc_RNA (1)...(19): siRNA sense strand
aggaaaaugucgaagcuga

SEQ ID NO: 2333965 - RNA, 19 nt, Homo sapiens
  misc_RNA (1)...(19): siRNA sense strand
cagcaaugguguauccuga

SEQ ID NO: 2333966 - RNA, 19 nt, Homo sapiens
  misc_RNA (1)...(19): siRNA sense strand
gcgauaauaaagaacucaa

SEQ ID NO: 2333967 - RNA, 19 nt, Homo sapiens
  misc_RNA (1)...(19): siRNA sense strand
uggagaggagguagaagaa

SEQ ID NO: 2333968 - RNA, 19 nt, Homo sapiens
  misc_RNA (1)...(19): siRNA sense strand
gugacaaauaccuggcuau

SEQ ID NO: 2333969 - RNA, 19 nt, Homo sapiens
  misc_RNA (1)...(19): siRNA sense strand
ugguggaauuuaacgggaa

SEQ ID NO: 2333970 - RNA, 19 nt, Homo sapiens
  misc_RNA (1)...(19): siRNA sense strand
cgagaaaaggaauucaaua

SEQ ID NO: 2333971 - RNA, 19 nt, Homo sapiens
  misc_RNA (1)...(19): siRNA sense strand
guuaaauggagaggaggua

SEQ ID NO: 2333972 - RNA, 19 nt, Homo sapiens
  misc_RNA (1)...(19): siRNA sense strand
gugaauggaaggagccuca

SEQ ID NO: 2333973 - RNA, 19 nt, Homo sapiens
  misc_RNA (1)...(19): siRNA sense strand
gcucuguccagcaguguaa

SEQ ID NO: 2333974 - RNA, 19 nt, Homo sapiens
  misc_RNA (1)...(19): siRNA sense strand
ccucaauucagauggcuau

SEQ ID NO: 2333975 - RNA, 19 nt, Homo sapiens
  misc_RNA (1)...(19): siRNA sense strand
ugguggaccuggagaggca

SEQ ID NO: 2333976 - RNA, 19 nt, Homo sapiens
  misc_RNA (1)...(19): siRNA sense strand
gcugaagcuuccaugguga

SEQ ID NO: 2333977 - RNA, 19 nt, Homo sapiens
  misc_RNA (1)...(19): siRNA sense strand
accucaaggaagugaacua

SEQ ID NO: 2333978 - RNA, 19 nt, Homo sapiens
  misc_RNA (1)...(19): siRNA sense strand
ggacaacagagaaggacgu

SEQ ID NO: 2333979 - RNA, 19 nt, Homo sapiens
  misc_RNA (1)...(19): siRNA sense strand
ccuccuaucaucaagcaaa

SEQ ID NO: 2333980 - RNA, 19 nt, Homo sapiens
  misc_RNA (1)...(19): siRNA sense strand
uaaauggagaggagguaga

SEQ ID NO: 2333981 - RNA, 19 nt, Homo sapiens
  misc_RNA (1)...(19): siRNA sense strand
auggagaggagguagaaga

SEQ ID NO: 2333982 - RNA, 19 nt, Homo sapiens
  misc_RNA (1)...(19): siRNA sense strand
cggcauuauuggcaucauu

SEQ ID NO: 2333983 - RNA, 19 nt, Homo sapiens
  misc_RNA (1)...(19): siRNA sense strand
cuugggagauggagcgcuu

SEQ ID NO: 2333984 - RNA, 19 nt, Homo sapiens
  misc_RNA (1)...(19): siRNA sense strand
ggagaggagguagaagaaa

SEQ ID NO: 2333985 - RNA, 19 nt, Homo sapiens
  misc_RNA (1)...(19): siRNA sense strand
ccuacuuaucauugaccaa

SEQ ID NO: 2333986 - RNA, 19 nt, Homo sapiens
  misc_RNA (1)...(19): siRNA sense strand
gguguauccugaagaggca

SEQ ID NO: 2333987 - RNA, 19 nt, Homo sapiens
  misc_RNA (1)...(19): siRNA sense strand
ggugacaaauaccuggcua

SEQ ID NO: 2333988 - RNA, 19 nt, Homo sapiens
  misc_RNA (1)...(19): siRNA sense strand
uugcugagugcuugacaua

SEQ ID NO: 2333989 - RNA, 19 nt, Homo sapiens
  misc_RNA (1)...(19): siRNA sense strand
ccauggaaaccuuuaccaa

SEQ ID NO: 2333990 - RNA, 19 nt, Homo sapiens
  misc_RNA (1)...(19): siRNA sense strand
uugaagagauugcucgaga

SEQ ID NO: 2333991 - RNA, 19 nt, Homo sapiens
  misc_RNA (1)...(19): siRNA sense strand
gguacaaccuccugcugga

SEQ ID NO: 2333992 - RNA, 19 nt, Homo sapiens
  misc_RNA (1)...(19): siRNA sense strand
gcgagagcauugacaucau

SEQ ID NO: 2333993 - RNA, 19 nt, Homo sapiens
  misc_RNA (1)...(19): siRNA sense strand
uggagaaggaggaacagau

SEQ ID NO: 2333994 - RNA, 19 nt, Homo sapiens
  misc_RNA (1)...(19): siRNA sense strand
caacguugacaguaaugaa

SEQ ID NO: 2333995 - RNA, 19 nt, Homo sapiens
  misc_RNA (1)...(19): siRNA sense strand
ccggaauggaauuggaauc

SEQ ID NO: 2333996 - RNA, 19 nt, Homo sapiens
  misc_RNA (1)...(19): siRNA sense strand
acccuaaucgugagacuua

SEQ ID NO: 2333997 - RNA, 19 nt, Homo sapiens
  misc_RNA (1)...(19): siRNA sense strand
cccucuaccugaagaccaa

SEQ ID NO: 2333998 - RNA, 19 nt, Homo sapiens
  misc_RNA (1)...(19): siRNA sense strand
caucauuacgcgagcccau

SEQ ID NO: 2333999 - RNA, 19 nt, Homo sapiens
  misc_RNA (1)...(19): siRNA sense strand
uuucaagguuauuccacua

SEQ ID NO: 2334000 - RNA, 19 nt, Homo sapiens
  misc_RNA (1)...(19): siRNA sense strand
agucaaucaccuaucacaa

SEQ ID NO: 2334001 - RNA, 19 nt, Homo sapiens
  misc_RNA (1)...(19): siRNA sense strand
agaaggaggaacagaugga

SEQ ID NO: 2334002 - RNA, 19 nt, Homo sapiens
  misc_RNA (1)...(19): siRNA sense strand
gggccaucaucauuggaca

SEQ ID NO: 2334003 - RNA, 19 nt, Homo sapiens
  misc_RNA (1)...(19): siRNA sense strand
ugauggguuucguggauga

SEQ ID NO: 2334004 - RNA, 19 nt, Homo sapiens
  misc_RNA (1)...(19): siRNA sense strand
augucaaccucaaggaagu

SEQ ID NO: 2334005 - RNA, 19 nt, Homo sapiens
  misc_RNA (1)...(19): siRNA sense strand
aaaucuuggaugaugacaa

SEQ ID NO: 2334006 - RNA, 19 nt, Homo sapiens
  misc_RNA (1)...(19): siRNA sense strand
acaccgagcggaagacaga

SEQ ID NO: 2334007 - RNA, 19 nt, Homo sapiens
  misc_RNA (1)...(19): siRNA sense strand
guuccuauaugguugccaa

SEQ ID NO: 2334008 - RNA, 19 nt, Homo sapiens
  misc_RNA (1)...(19): siRNA sense strand
gcaccaucgaugagaucca

SEQ ID NO: 2334009 - RNA, 19 nt, Homo sapiens
  misc_RNA (1)...(19): siRNA sense strand
cugcagacgaccucaucaa

SEQ ID NO: 2334010 - RNA, 19 nt, Homo sapiens
  misc_RNA (1)...(19): siRNA sense strand
acuagaucgcgauaauaaa

SEQ ID NO: 2334011 - RNA, 19 nt, Homo sapiens
  misc_RNA (1)...(19): siRNA sense strand
gggcacagcaaugguguau

SEQ ID NO: 2334012 - RNA, 19 nt, Homo sapiens
  misc_RNA (1)...(19): siRNA sense strand
uggaaggaaacuuugaaga

SEQ ID NO: 2334013 - RNA, 19 nt, Homo sapiens
  misc_RNA (1)...(19): siRNA sense strand
augcagaaucgacucaaua

SEQ ID NO: 2334014 - RNA, 19 nt, Homo sapiens
  misc_RNA (1)...(19): siRNA sense strand
gcauugaaguccaagacac

SEQ ID NO: 2334015 - RNA, 19 nt, Homo sapiens
  misc_RNA (1)...(19): siRNA sense strand
ucuuauaccaugaaggaua

SEQ ID NO: 2334016 - RNA, 19 nt, Homo sapiens
  misc_RNA (1)...(19): siRNA sense strand
ggaaguggaucaaggggaa

SEQ ID NO: 2334017 - RNA, 19 nt, Homo sapiens
  misc_RNA (1)...(19): siRNA sense strand
ggagaaauuaucaugggaa

SEQ ID NO: 2334018 - RNA, 19 nt, Homo sapiens
  misc_RNA (1)...(19): siRNA sense strand
cgguagcagcagaggauuu

SEQ ID NO: 2334019 - RNA, 19 nt, Homo sapiens
  misc_RNA (1)...(19): siRNA sense strand
gcaaagauaaggaugcgua

SEQ ID NO: 2334020 - RNA, 19 nt, Homo sapiens
  misc_RNA (1)...(19): siRNA sense strand
ccaaacagggucuggaaaa

SEQ ID NO: 2334021 - RNA, 19 nt, Homo sapiens
  misc_RNA (1)...(19): siRNA sense strand
gguuagaaaacauggcuua

SEQ ID NO: 2334022 - RNA, 19 nt, Homo sapiens
  misc_RNA (1)...(19): siRNA sense strand
gugacaaaucagaugaaga

SEQ ID NO: 2334023 - RNA, 19 nt, Homo sapiens
  misc_RNA (1)...(19): siRNA sense strand
gguauuagcaccaacgaga

SEQ ID NO: 2334024 - RNA, 19 nt, Homo sapiens
  misc_RNA (1)...(19): siRNA sense strand
ucguagaauagucgaacaa

SEQ ID NO: 2334025 - RNA, 19 nt, Homo sapiens
  misc_RNA (1)...(19): siRNA sense strand
cuugauggcuugugcccaa

SEQ ID NO: 2334026 - RNA, 19 nt, Homo sapiens
  misc_RNA (1)...(19): siRNA sense strand
cguagugauucaagaggga

SEQ ID NO: 2334027 - RNA, 19 nt, Homo sapiens
  misc_RNA (1)...(19): siRNA sense strand
agaugaagaugauugguca

SEQ ID NO: 2334028 - RNA, 19 nt, Homo sapiens
  misc_RNA (1)...(19): siRNA sense strand
cagcagaggauuuggugga

SEQ ID NO: 2334029 - RNA, 19 nt, Homo sapiens
  misc_RNA (1)...(19): siRNA sense strand
cgagaagcuacuagagguu

SEQ ID NO: 2334030 - RNA, 19 nt, Homo sapiens
  misc_RNA (1)...(19): siRNA sense strand
aguucaggguggaguucua

SEQ ID NO: 2334031 - RNA, 19 nt, Homo sapiens
  misc_RNA (1)...(19): siRNA sense strand
gaugaagaugauuggucaa

SEQ ID NO: 2334032 - RNA, 19 nt, Homo sapiens
  misc_RNA (1)...(19): siRNA sense strand
gaccguucucagagggaua

SEQ ID NO: 2334033 - RNA, 19 nt, Homo sapiens
  misc_RNA (1)...(19): siRNA sense strand
cagcaagaggacuggacau

SEQ ID NO: 2334034 - RNA, 19 nt, Homo sapiens
  misc_RNA (1)...(19): siRNA sense strand
uaaucagaguggaggaagu

SEQ ID NO: 2334035 - RNA, 19 nt, Homo sapiens
  misc_RNA (1)...(19): siRNA sense strand
gugccgucuugguuagaaa

SEQ ID NO: 2334036 - RNA, 19 nt, Homo sapiens
  misc_RNA (1)...(19): siRNA sense strand
gggguugacugguggggua

SEQ ID NO: 2334037 - RNA, 19 nt, Homo sapiens
  misc_RNA (1)...(19): siRNA sense strand
ggguggaguucuagcaaag

SEQ ID NO: 2334038 - RNA, 19 nt, Homo sapiens
  misc_RNA (1)...(19): siRNA sense strand
gauucaagagggaagucua

SEQ ID NO: 2334039 - RNA, 19 nt, Homo sapiens
  misc_RNA (1)...(19): siRNA sense strand
ggguggaagaaucagacaa

SEQ ID NO: 2334040 - RNA, 19 nt, Homo sapiens
  misc_RNA (1)...(19): siRNA sense strand
gaacaccacuacaagggua

SEQ ID NO: 2334041 - RNA, 19 nt, Homo sapiens
  misc_RNA (1)...(19): siRNA sense strand
gguuuaugguggugccgau

SEQ ID NO: 2334042 - RNA, 19 nt, Homo sapiens
  misc_RNA (1)...(19): siRNA sense strand
ucuacgaagaagccagaaa

SEQ ID NO: 2334043 - RNA, 19 nt, Homo sapiens
  misc_RNA (1)...(19): siRNA sense strand
gauguugagaugggagaaa

SEQ ID NO: 2334044 - RNA, 19 nt, Homo sapiens
  misc_RNA (1)...(19): siRNA sense strand
uguugagaugggagaaauu

SEQ ID NO: 2334045 - RNA, 19 nt, Homo sapiens
  misc_RNA (1)...(19): siRNA sense strand
ggguagcagucguggacgu

SEQ ID NO: 2334046 - RNA, 19 nt, Homo sapiens
  misc_RNA (1)...(19): siRNA sense strand
cuaguggauaugauggaaa

SEQ ID NO: 2334047 - RNA, 19 nt, Homo sapiens
  misc_RNA (1)...(19): siRNA sense strand
cguucuaagaguagcagau

SEQ ID NO: 2334048 - RNA, 19 nt, Homo sapiens
  misc_RNA (1)...(19): siRNA sense strand
caaagauaaggaugcguau

SEQ ID NO: 2334049 - RNA, 19 nt, Homo sapiens
  misc_RNA (1)...(19): siRNA sense strand
uaguguuuguggagaccaa

SEQ ID NO: 2334050 - RNA, 19 nt, Homo sapiens
  misc_RNA (1)...(19): siRNA sense strand
uggauauggaggaaauuau

SEQ ID NO: 2334051 - RNA, 19 nt, Homo sapiens
  misc_RNA (1)...(19): siRNA sense strand
cauucuuuaacgagaggaa

SEQ ID NO: 2334052 - RNA, 19 nt, Homo sapiens
  misc_RNA (1)...(19): siRNA sense strand
uuuacaacagugauggaua

SEQ ID NO: 2334053 - RNA, 19 nt, Homo sapiens
  misc_RNA (1)...(19): siRNA sense strand
aggaaguacagccagcaaa

SEQ ID NO: 2334054 - RNA, 19 nt, Homo sapiens
  misc_RNA (1)...(19): siRNA sense strand
ugaaaacaucacacagaaa

SEQ ID NO: 2334055 - RNA, 19 nt, Homo sapiens
  misc_RNA (1)...(19): siRNA sense strand
gauaaucagaguggaggaa

SEQ ID NO: 2334056 - RNA, 19 nt, Homo sapiens
  misc_RNA (1)...(19): siRNA sense strand
gggagaaauuaucauggga

SEQ ID NO: 2334057 - RNA, 19 nt, Homo sapiens
  misc_RNA (1)...(19): siRNA sense strand
ucgcccaacuccagugcaa

SEQ ID NO: 2334058 - RNA, 19 nt, Homo sapiens
  misc_RNA (1)...(19): siRNA sense strand
cagcauuucuguugcccau

SEQ ID NO: 2334059 - RNA, 19 nt, Homo sapiens
  misc_RNA (1)...(19): siRNA sense strand
agugauggauauggaggaa

SEQ ID NO: 2334060 - RNA, 19 nt, Homo sapiens
  misc_RNA (1)...(19): siRNA sense strand
uggcagccguggugacaga

SEQ ID NO: 2334061 - RNA, 19 nt, Homo sapiens
  misc_RNA (1)...(19): siRNA sense strand
cugaucggauguuggauau

SEQ ID NO: 2334062 - RNA, 19 nt, Homo sapiens
  misc_RNA (1)...(19): siRNA sense strand
ccuaaaugcaacaggcaag

SEQ ID NO: 2334063 - RNA, 19 nt, Homo sapiens
  misc_RNA (1)...(19): siRNA sense strand
uugagggccaugaaggaaa

SEQ ID NO: 2334064 - RNA, 19 nt, Homo sapiens
  misc_RNA (1)...(19): siRNA sense strand
ggauaugauggaaagagga

SEQ ID NO: 2334065 - RNA, 19 nt, Homo sapiens
  misc_RNA (1)...(19): siRNA sense strand
guaccagcauccauggaga

SEQ ID NO: 2334066 - RNA, 19 nt, Homo sapiens
  misc_RNA (1)...(19): siRNA sense strand
uggaguucuagcaaagaua

SEQ ID NO: 2334067 - RNA, 19 nt, Homo sapiens
  misc_RNA (1)...(19): siRNA sense strand
auuugaacgugguggaaac

SEQ ID NO: 2334068 - RNA, 19 nt, Homo sapiens
  misc_RNA (1)...(19): siRNA sense strand
ugacauuccaguugaggca

SEQ ID NO: 2334069 - RNA, 19 nt, Homo sapiens
  misc_RNA (1)...(19): siRNA sense strand
caugggaaacauugagcuu

SEQ ID NO: 2334070 - RNA, 19 nt, Homo sapiens
  misc_RNA (1)...(19): siRNA sense strand
agaugaagcugaucggaug

SEQ ID NO: 2334071 - RNA, 19 nt, Homo sapiens
  misc_RNA (1)...(19): siRNA sense strand
gaggaaguacagccagcaa

SEQ ID NO: 2334072 - RNA, 19 nt, Homo sapiens
  misc_RNA (1)...(19): siRNA sense strand
ucuuauaccaugaaggaua

SEQ ID NO: 2334073 - RNA, 19 nt, Homo sapiens
  misc_RNA (1)...(19): siRNA sense strand
ggaaguggaucaaggggaa

SEQ ID NO: 2334074 - RNA, 19 nt, Homo sapiens
  misc_RNA (1)...(19): siRNA sense strand
ggagaaauuaucaugggaa

SEQ ID NO: 2334075 - RNA, 19 nt, Homo sapiens
  misc_RNA (1)...(19): siRNA sense strand
cgguagcagcagaggauuu

SEQ ID NO: 2334076 - RNA, 19 nt, Homo sapiens
  misc_RNA (1)...(19): siRNA sense strand
gcaaagauaaggaugcgua

SEQ ID NO: 2334077 - RNA, 19 nt, Homo sapiens
  misc_RNA (1)...(19): siRNA sense strand
ccaaacagggucuggaaaa

SEQ ID NO: 2334078 - RNA, 19 nt, Homo sapiens
  misc_RNA (1)...(19): siRNA sense strand
gguuagaaaacauggcuua

SEQ ID NO: 2334079 - RNA, 19 nt, Homo sapiens
  misc_RNA (1)...(19): siRNA sense strand
gugacaaaucagaugaaga

SEQ ID NO: 2334080 - RNA, 19 nt, Homo sapiens
  misc_RNA (1)...(19): siRNA sense strand
gguauuagcaccaacgaga

SEQ ID NO: 2334081 - RNA, 19 nt, Homo sapiens
  misc_RNA (1)...(19): siRNA sense strand
ucguagaauagucgaacaa

SEQ ID NO: 2334082 - RNA, 19 nt, Homo sapiens
  misc_RNA (1)...(19): siRNA sense strand
cuugauggcuugugcccaa

SEQ ID NO: 2334083 - RNA, 19 nt, Homo sapiens
  misc_RNA (1)...(19): siRNA sense strand
cguagugauucaagaggga

SEQ ID NO: 2334084 - RNA, 19 nt, Homo sapiens
  misc_RNA (1)...(19): siRNA sense strand
agaugaagaugauugguca

SEQ ID NO: 2334085 - RNA, 19 nt, Homo sapiens
  misc_RNA (1)...(19): siRNA sense strand
cagcagaggauuuggugga

SEQ ID NO: 2334086 - RNA, 19 nt, Homo sapiens
  misc_RNA (1)...(19): siRNA sense strand
cgagaagcuacuagagguu

SEQ ID NO: 2334087 - RNA, 19 nt, Homo sapiens
  misc_RNA (1)...(19): siRNA sense strand
aguucaggguggaguucua

SEQ ID NO: 2334088 - RNA, 19 nt, Homo sapiens
  misc_RNA (1)...(19): siRNA sense strand
gaugaagaugauuggucaa

SEQ ID NO: 2334089 - RNA, 19 nt, Homo sapiens
  misc_RNA (1)...(19): siRNA sense strand
gaccguucucagagggaua

SEQ ID NO: 2334090 - RNA, 19 nt, Homo sapiens
  misc_RNA (1)...(19): siRNA sense strand
cagcaagaggacuggacau

SEQ ID NO: 2334091 - RNA, 19 nt, Homo sapiens
  misc_RNA (1)...(19): siRNA sense strand
uaaucagaguggaggaagu

SEQ ID NO: 2334092 - RNA, 19 nt, Homo sapiens
  misc_RNA (1)...(19): siRNA sense strand
gugccgucuugguuagaaa

SEQ ID NO: 2334093 - RNA, 19 nt, Homo sapiens
  misc_RNA (1)...(19): siRNA sense strand
gggguugacugguggggua

SEQ ID NO: 2334094 - RNA, 19 nt, Homo sapiens
  misc_RNA (1)...(19): siRNA sense strand
ggguggaguucuagcaaag

SEQ ID NO: 2334095 - RNA, 19 nt, Homo sapiens
  misc_RNA (1)...(19): siRNA sense strand
gauucaagagggaagucua

SEQ ID NO: 2334096 - RNA, 19 nt, Homo sapiens
  misc_RNA (1)...(19): siRNA sense strand
ggguggaagaaucagacaa

SEQ ID NO: 2334097 - RNA, 19 nt, Homo sapiens
  misc_RNA (1)...(19): siRNA sense strand
gaacaccacuacaagggua

SEQ ID NO: 2334098 - RNA, 19 nt, Homo sapiens
  misc_RNA (1)...(19): siRNA sense strand
gguuuaugguggugccgau

SEQ ID NO: 2334099 - RNA, 19 nt, Homo sapiens
  misc_RNA (1)...(19): siRNA sense strand
ucuacgaagaagccagaaa

SEQ ID NO: 2334100 - RNA, 19 nt, Homo sapiens
  misc_RNA (1)...(19): siRNA sense strand
gauguugagaugggagaaa

SEQ ID NO: 2334101 - RNA, 19 nt, Homo sapiens
  misc_RNA (1)...(19): siRNA sense strand
uguugagaugggagaaauu

SEQ ID NO: 2334102 - RNA, 19 nt, Homo sapiens
  misc_RNA (1)...(19): siRNA sense strand
ggguagcagucguggacgu

SEQ ID NO: 2334103 - RNA, 19 nt, Homo sapiens
  misc_RNA (1)...(19): siRNA sense strand
cuaguggauaugauggaaa

SEQ ID NO: 2334104 - RNA, 19 nt, Homo sapiens
  misc_RNA (1)...(19): siRNA sense strand
cguucuaagaguagcagau

SEQ ID NO: 2334105 - RNA, 19 nt, Homo sapiens
  misc_RNA (1)...(19): siRNA sense strand
caaagauaaggaugcguau

SEQ ID NO: 2334106 - RNA, 19 nt, Homo sapiens
  misc_RNA (1)...(19): siRNA sense strand
uaguguuuguggagaccaa

SEQ ID NO: 2334107 - RNA, 19 nt, Homo sapiens
  misc_RNA (1)...(19): siRNA sense strand
uggauauggaggaaauuau

SEQ ID NO: 2334108 - RNA, 19 nt, Homo sapiens
  misc_RNA (1)...(19): siRNA sense strand
cauucuuuaacgagaggaa

SEQ ID NO: 2334109 - RNA, 19 nt, Homo sapiens
  misc_RNA (1)...(19): siRNA sense strand
uuuacaacagugauggaua

SEQ ID NO: 2334110 - RNA, 19 nt, Homo sapiens
  misc_RNA (1)...(19): siRNA sense strand
aggaaguacagccagcaaa

SEQ ID NO: 2334111 - RNA, 19 nt, Homo sapiens
  misc_RNA (1)...(19): siRNA sense strand
ugaaaacaucacacagaaa

SEQ ID NO: 2334112 - RNA, 19 nt, Homo sapiens
  misc_RNA (1)...(19): siRNA sense strand
gauaaucagaguggaggaa

SEQ ID NO: 2334113 - RNA, 19 nt, Homo sapiens
  misc_RNA (1)...(19): siRNA sense strand
gggagaaauuaucauggga

SEQ ID NO: 2334114 - RNA, 19 nt, Homo sapiens
  misc_RNA (1)...(19): siRNA sense strand
ucgcccaacuccagugcaa

SEQ ID NO: 2334115 - RNA, 19 nt, Homo sapiens
  misc_RNA (1)...(19): siRNA sense strand
cagcauuucuguugcccau

SEQ ID NO: 2334116 - RNA, 19 nt, Homo sapiens
  misc_RNA (1)...(19): siRNA sense strand
agugauggauauggaggaa

SEQ ID NO: 2334117 - RNA, 19 nt, Homo sapiens
  misc_RNA (1)...(19): siRNA sense strand
uggcagccguggugacaga

SEQ ID NO: 2334118 - RNA, 19 nt, Homo sapiens
  misc_RNA (1)...(19): siRNA sense strand
cugaucggauguuggauau

SEQ ID NO: 2334119 - RNA, 19 nt, Homo sapiens
  misc_RNA (1)...(19): siRNA sense strand
ccuaaaugcaacaggcaag

SEQ ID NO: 2334120 - RNA, 19 nt, Homo sapiens
  misc_RNA (1)...(19): siRNA sense strand
uugagggccaugaaggaaa

SEQ ID NO: 2334121 - RNA, 19 nt, Homo sapiens
  misc_RNA (1)...(19): siRNA sense strand
ggauaugauggaaagagga

SEQ ID NO: 2334122 - RNA, 19 nt, Homo sapiens
  misc_RNA (1)...(19): siRNA sense strand
guaccagcauccauggaga

SEQ ID NO: 2334123 - RNA, 19 nt, Homo sapiens
  misc_RNA (1)...(19): siRNA sense strand
uggaguucuagcaaagaua

SEQ ID NO: 2334124 - RNA, 19 nt, Homo sapiens
  misc_RNA (1)...(19): siRNA sense strand
auuugaacgugguggaaac

SEQ ID NO: 2334125 - RNA, 19 nt, Homo sapiens
  misc_RNA (1)...(19): siRNA sense strand
ugacauuccaguugaggca

SEQ ID NO: 2334126 - RNA, 19 nt, Homo sapiens
  misc_RNA (1)...(19): siRNA sense strand
caugggaaacauugagcuu

SEQ ID NO: 2334127 - RNA, 19 nt, Homo sapiens
  misc_RNA (1)...(19): siRNA sense strand
agaugaagcugaucggaug

SEQ ID NO: 2334128 - RNA, 19 nt, Homo sapiens
  misc_RNA (1)...(19): siRNA sense strand
gaggaaguacagccagcaa

SEQ ID NO: 2334129 - RNA, 19 nt, Homo sapiens
  misc_RNA (1)...(19): siRNA sense strand
gcaaagcacuccaugacga

SEQ ID NO: 2334130 - RNA, 19 nt, Homo sapiens
  misc_RNA (1)...(19): siRNA sense strand
agacacuggagcuggagaa

SEQ ID NO: 2334131 - RNA, 19 nt, Homo sapiens
  misc_RNA (1)...(19): siRNA sense strand
aggaauauucacagagcga

SEQ ID NO: 2334132 - RNA, 19 nt, Homo sapiens
  misc_RNA (1)...(19): siRNA sense strand
cggcgcaugaaguggaaaa

SEQ ID NO: 2334133 - RNA, 19 nt, Homo sapiens
  misc_RNA (1)...(19): siRNA sense strand
gcaaaguucacgugagcac

SEQ ID NO: 2334134 - RNA, 19 nt, Homo sapiens
  misc_RNA (1)...(19): siRNA sense strand
gcgcaaaguucacgugagc

SEQ ID NO: 2334135 - RNA, 19 nt, Homo sapiens
  misc_RNA (1)...(19): siRNA sense strand
aaucaaaguuauugggacu

SEQ ID NO: 2334136 - RNA, 19 nt, Homo sapiens
  misc_RNA (1)...(19): siRNA sense strand
aucaaucgccacagagaaa

SEQ ID NO: 2334137 - RNA, 19 nt, Homo sapiens
  misc_RNA (1)...(19): siRNA sense strand
cgcagaaaucaaaguuauu

SEQ ID NO: 2334138 - RNA, 19 nt, Homo sapiens
  misc_RNA (1)...(19): siRNA sense strand
aaucaaaguuauugggacu

SEQ ID NO: 2334139 - RNA, 19 nt, Homo sapiens
  misc_RNA (1)...(19): siRNA sense strand
aucaaucgccacagagaaa

SEQ ID NO: 2334140 - RNA, 19 nt, Homo sapiens
  misc_RNA (1)...(19): siRNA sense strand
cgcagaaaucaaaguuauu

SEQ ID NO: 2334141 - RNA, 19 nt, Homo sapiens
  misc_RNA (1)...(19): siRNA sense strand
aaucaaaguuauugggacu

SEQ ID NO: 2334142 - RNA, 19 nt, Homo sapiens
  misc_RNA (1)...(19): siRNA sense strand
aucaaucgccacagagaaa

SEQ ID NO: 2334143 - RNA, 19 nt, Homo sapiens
  misc_RNA (1)...(19): siRNA sense strand
cgcagaaaucaaaguuauu

SEQ ID NO: 2334144 - RNA, 19 nt, Homo sapiens
  misc_RNA (1)...(19): siRNA sense strand
gcaaagacggggaggacga

SEQ ID NO: 2334145 - RNA, 19 nt, Homo sapiens
  misc_RNA (1)...(19): siRNA sense strand
acagcaaguacaagccaaa

SEQ ID NO: 2334146 - RNA, 19 nt, Homo sapiens
  misc_RNA (1)...(19): siRNA sense strand
gccuucaguuccagggcua

SEQ ID NO: 2334147 - RNA, 19 nt, Homo sapiens
  misc_RNA (1)...(19): siRNA sense strand
gcugauagcucgaugugac

SEQ ID NO: 2334148 - RNA, 19 nt, Homo sapiens
  misc_RNA (1)...(19): siRNA sense strand
acagcaaguacaagccaaa

SEQ ID NO: 2334149 - RNA, 19 nt, Homo sapiens
  misc_RNA (1)...(19): siRNA sense strand
gccuucaguuccagggcua

SEQ ID NO: 2334150 - RNA, 19 nt, Homo sapiens
  misc_RNA (1)...(19): siRNA sense strand
acagcaaguacaagccaaa

SEQ ID NO: 2334151 - RNA, 19 nt, Homo sapiens
  misc_RNA (1)...(19): siRNA sense strand
gccuucaguuccagggcua

SEQ ID NO: 2334152 - RNA, 19 nt, Homo sapiens
  misc_RNA (1)...(19): siRNA sense strand
gcaaagacggggaggacga

SEQ ID NO: 2334153 - RNA, 19 nt, Homo sapiens
  misc_RNA (1)...(19): siRNA sense strand
acagcaaguacaagccaaa

SEQ ID NO: 2334154 - RNA, 19 nt, Homo sapiens
  misc_RNA (1)...(19): siRNA sense strand
gccuucaguuccagggcua

SEQ ID NO: 2334155 - RNA, 19 nt, Homo sapiens
  misc_RNA (1)...(19): siRNA sense strand
gcugauagcucgaugugac

SEQ ID NO: 2334156 - RNA, 19 nt, Homo sapiens
  misc_RNA (1)...(19): siRNA sense strand
ggacagaccugcuggagac

SEQ ID NO: 2334157 - RNA, 19 nt, Homo sapiens
  misc_RNA (1)...(19): siRNA sense strand
ggacagaccugcuggagac

SEQ ID NO: 2334158 - RNA, 19 nt, Homo sapiens
  misc_RNA (1)...(19): siRNA sense strand
cagaagaaggagaggcaaa

SEQ ID NO: 2334159 - RNA, 19 nt, Homo sapiens
  misc_RNA (1)...(19): siRNA sense strand
uggaaagccuagaggaaau

SEQ ID NO: 2334160 - RNA, 19 nt, Homo sapiens
  misc_RNA (1)...(19): siRNA sense strand
gggaauagaaaucgaucaa

SEQ ID NO: 2334161 - RNA, 19 nt, Homo sapiens
  misc_RNA (1)...(19): siRNA sense strand
agguagagcuggacggaca

SEQ ID NO: 2334162 - RNA, 19 nt, Homo sapiens
  misc_RNA (1)...(19): siRNA sense strand
gagacugauagaagagaaa

SEQ ID NO: 2334163 - RNA, 19 nt, Homo sapiens
  misc_RNA (1)...(19): siRNA sense strand
cagaaagguuacaggcaga

SEQ ID NO: 2334164 - RNA, 19 nt, Homo sapiens
  misc_RNA (1)...(19): siRNA sense strand
ggguauacaaaguugcaaa

SEQ ID NO: 2334165 - RNA, 19 nt, Homo sapiens
  misc_RNA (1)...(19): siRNA sense strand
uagaagacgaagugggaau

SEQ ID NO: 2334166 - RNA, 19 nt, Homo sapiens
  misc_RNA (1)...(19): siRNA sense strand
ucugaaaggucgaggggua

SEQ ID NO: 2334167 - RNA, 19 nt, Homo sapiens
  misc_RNA (1)...(19): siRNA sense strand
ggaucagauguuagauuua

SEQ ID NO: 2334168 - RNA, 19 nt, Homo sapiens
  misc_RNA (1)...(19): siRNA sense strand
aagagaagcuaaauggaga

SEQ ID NO: 2334169 - RNA, 19 nt, Homo sapiens
  misc_RNA (1)...(19): siRNA sense strand
gcucaagcacggacaggaa

SEQ ID NO: 2334170 - RNA, 19 nt, Homo sapiens
  misc_RNA (1)...(19): siRNA sense strand
ggaugagaaaucagaaaca

SEQ ID NO: 2334171 - RNA, 19 nt, Homo sapiens
  misc_RNA (1)...(19): siRNA sense strand
ucuggaaagccuagaggaa

SEQ ID NO: 2334172 - RNA, 19 nt, Homo sapiens
  misc_RNA (1)...(19): siRNA sense strand
ccaugaauccacacauaaa

SEQ ID NO: 2334173 - RNA, 19 nt, Homo sapiens
  misc_RNA (1)...(19): siRNA sense strand
aagagaaagaggucaacua

SEQ ID NO: 2334174 - RNA, 19 nt, Homo sapiens
  misc_RNA (1)...(19): siRNA sense strand
gggucugaagggagggcua

SEQ ID NO: 2334175 - RNA, 19 nt, Homo sapiens
  misc_RNA (1)...(19): siRNA sense strand
accaagagaaagaggucaa

SEQ ID NO: 2334176 - RNA, 19 nt, Homo sapiens
  misc_RNA (1)...(19): siRNA sense strand
cuccaaagaaaucaagaaa

SEQ ID NO: 2334177 - RNA, 19 nt, Homo sapiens
  misc_RNA (1)...(19): siRNA sense strand
cagagaagguaguuuuaaa

SEQ ID NO: 2334178 - RNA, 19 nt, Homo sapiens
  misc_RNA (1)...(19): siRNA sense strand
ccagauaugaacagguuga

SEQ ID NO: 2334179 - RNA, 19 nt, Homo sapiens
  misc_RNA (1)...(19): siRNA sense strand
gagaccaagaagaauguaa

SEQ ID NO: 2334180 - RNA, 19 nt, Homo sapiens
  misc_RNA (1)...(19): siRNA sense strand
gguagaagacgaaguggga

SEQ ID NO: 2334181 - RNA, 19 nt, Homo sapiens
  misc_RNA (1)...(19): siRNA sense strand
uggaaagaacuuaacagaa

SEQ ID NO: 2334182 - RNA, 19 nt, Homo sapiens
  misc_RNA (1)...(19): siRNA sense strand
acuaagauauguggaacaa

SEQ ID NO: 2334183 - RNA, 19 nt, Homo sapiens
  misc_RNA (1)...(19): siRNA sense strand
cuggaaagccuagaggaaa

SEQ ID NO: 2334184 - RNA, 19 nt, Homo sapiens
  misc_RNA (1)...(19): siRNA sense strand
acaagaugguagaagacga

SEQ ID NO: 2334185 - RNA, 19 nt, Homo sapiens
  misc_RNA (1)...(19): siRNA sense strand
caagaugguagaagacgaa

SEQ ID NO: 2334186 - RNA, 19 nt, Homo sapiens
  misc_RNA (1)...(19): siRNA sense strand
aaauggagacacugaagaa

SEQ ID NO: 2334187 - RNA, 19 nt, Homo sapiens
  misc_RNA (1)...(19): siRNA sense strand
auaauaaacuagaggagac

SEQ ID NO: 2334188 - RNA, 19 nt, Homo sapiens
  misc_RNA (1)...(19): siRNA sense strand
cggacagggauuuguauau

SEQ ID NO: 2334189 - RNA, 19 nt, Homo sapiens
  misc_RNA (1)...(19): siRNA sense strand
uuaucaaccaagagaaaga

SEQ ID NO: 2334190 - RNA, 19 nt, Homo sapiens
  misc_RNA (1)...(19): siRNA sense strand
ucaacuaagauauguggaa

SEQ ID NO: 2334191 - RNA, 19 nt, Homo sapiens
  misc_RNA (1)...(19): siRNA sense strand
gaacuuaacagaaagcuga

SEQ ID NO: 2334192 - RNA, 19 nt, Homo sapiens
  misc_RNA (1)...(19): siRNA sense strand
gguuacaggcagaguggca

SEQ ID NO: 2334193 - RNA, 19 nt, Homo sapiens
  misc_RNA (1)...(19): siRNA sense strand
uggaggaguccgagagcca

SEQ ID NO: 2334194 - RNA, 19 nt, Homo sapiens
  misc_RNA (1)...(19): siRNA sense strand
gacuauaaagcuucugaaa

SEQ ID NO: 2334195 - RNA, 19 nt, Homo sapiens
  misc_RNA (1)...(19): siRNA sense strand
agacgaagugggaauagaa

SEQ ID NO: 2334196 - RNA, 19 nt, Homo sapiens
  misc_RNA (1)...(19): siRNA sense strand
ucggaugagaaaucagaaa

SEQ ID NO: 2334197 - RNA, 19 nt, Homo sapiens
  misc_RNA (1)...(19): siRNA sense strand
gaagaaaagaucuaccaaa

SEQ ID NO: 2334198 - RNA, 19 nt, Homo sapiens
  misc_RNA (1)...(19): siRNA sense strand
aaacugauucugaagacaa

SEQ ID NO: 2334199 - RNA, 19 nt, Homo sapiens
  misc_RNA (1)...(19): siRNA sense strand
agagacugauagaagagaa

SEQ ID NO: 2334200 - RNA, 19 nt, Homo sapiens
  misc_RNA (1)...(19): siRNA sense strand
aacagaaagcugaguagua

SEQ ID NO: 2334201 - RNA, 19 nt, Homo sapiens
  misc_RNA (1)...(19): siRNA sense strand
cgaagugggaauagaaauc

SEQ ID NO: 2334202 - RNA, 19 nt, Homo sapiens
  misc_RNA (1)...(19): siRNA sense strand
ucgaaaugguauugacauc

SEQ ID NO: 2334203 - RNA, 19 nt, Homo sapiens
  misc_RNA (1)...(19): siRNA sense strand
gccagaagaaggagaggca

SEQ ID NO: 2334204 - RNA, 19 nt, Homo sapiens
  misc_RNA (1)...(19): siRNA sense strand
agacacugaagaaggauuu

SEQ ID NO: 2334205 - RNA, 19 nt, Homo sapiens
  misc_RNA (1)...(19): siRNA sense strand
gauaauaaacuagaggaga

SEQ ID NO: 2334206 - RNA, 19 nt, Homo sapiens
  misc_RNA (1)...(19): siRNA sense strand
cagccaaauuaccugaaau

SEQ ID NO: 2334207 - RNA, 19 nt, Homo sapiens
  misc_RNA (1)...(19): siRNA sense strand
gacaggaacaggaaagaca

SEQ ID NO: 2334208 - RNA, 19 nt, Homo sapiens
  misc_RNA (1)...(19): siRNA sense strand
aaguugaccuggugauuca

SEQ ID NO: 2334209 - RNA, 19 nt, Homo sapiens
  misc_RNA (1)...(19): siRNA sense strand
ccaacaagggaacuggcaa

SEQ ID NO: 2334210 - RNA, 19 nt, Homo sapiens
  misc_RNA (1)...(19): siRNA sense strand
cagaaugugccuccugaaa

SEQ ID NO: 2334211 - RNA, 19 nt, Homo sapiens
  misc_RNA (1)...(19): siRNA sense strand
aguccgagagccagaagaa

SEQ ID NO: 2334212 - RNA, 19 nt, Homo sapiens
  misc_RNA (1)...(19): siRNA sense strand
acaucauaucaaagccaaa

SEQ ID NO: 2334213 - RNA, 19 nt, Homo sapiens
  misc_RNA (1)...(19): siRNA sense strand
gguugaccuuguuggaaaa

SEQ ID NO: 2334214 - RNA, 19 nt, Homo sapiens
  misc_RNA (1)...(19): siRNA sense strand
gaguaguaaugcagugucu

SEQ ID NO: 2334215 - RNA, 19 nt, Homo sapiens
  misc_RNA (1)...(19): siRNA sense strand
ucuucuaauuccagacaga

SEQ ID NO: 2334216 - RNA, 19 nt, Homo sapiens
  misc_RNA (1)...(19): siRNA sense strand
cagaggaguggcuggucaa

SEQ ID NO: 2334217 - RNA, 19 nt, Homo sapiens
  misc_RNA (1)...(19): siRNA sense strand
gauauaacuaggaaacuca

SEQ ID NO: 2334218 - RNA, 19 nt, Homo sapiens
  misc_RNA (1)...(19): siRNA sense strand
agguagacagagucgacaa

SEQ ID NO: 2334219 - RNA, 19 nt, Homo sapiens
  misc_RNA (1)...(19): siRNA sense strand
ucugugagaccaagaagaa

SEQ ID NO: 2334220 - RNA, 19 nt, Homo sapiens
  misc_RNA (1)...(19): siRNA sense strand
ccaggaagcagcaggguca

SEQ ID NO: 2334221 - RNA, 19 nt, Homo sapiens
  misc_RNA (1)...(19): siRNA sense strand
ccgacauggaacagggacu

SEQ ID NO: 2334222 - RNA, 19 nt, Homo sapiens
  misc_RNA (1)...(19): siRNA sense strand
ccaggaagcagcaggguca

SEQ ID NO: 2334223 - RNA, 19 nt, Homo sapiens
  misc_RNA (1)...(19): siRNA sense strand
ccgacauggaacagggacu

SEQ ID NO: 2334224 - RNA, 19 nt, Homo sapiens
  misc_RNA (1)...(19): siRNA sense strand
cugcaacaucuguggcaaa

SEQ ID NO: 2334225 - RNA, 19 nt, Homo sapiens
  misc_RNA (1)...(19): siRNA sense strand
gagaagacgcacuggcuga

SEQ ID NO: 2334226 - RNA, 19 nt, Homo sapiens
  misc_RNA (1)...(19): siRNA sense strand
aggaggaggagaacggcaa

SEQ ID NO: 2334227 - RNA, 19 nt, Homo sapiens
  misc_RNA (1)...(19): siRNA sense strand
ucaucaucaugguggagaa

SEQ ID NO: 2334228 - RNA, 19 nt, Homo sapiens
  misc_RNA (1)...(19): siRNA sense strand
ggaagaaggaguggggcaa

SEQ ID NO: 2334229 - RNA, 19 nt, Homo sapiens
  misc_RNA (1)...(19): siRNA sense strand
ggagagaagcagggcccaa

SEQ ID NO: 2334230 - RNA, 19 nt, Homo sapiens
  misc_RNA (1)...(19): siRNA sense strand
ccugcaaggaggaggagga

SEQ ID NO: 2334231 - RNA, 19 nt, Homo sapiens
  misc_RNA (1)...(19): siRNA sense strand
cggaagaaggaguggggca

SEQ ID NO: 2334232 - RNA, 19 nt, Homo sapiens
  misc_RNA (1)...(19): siRNA sense strand
caacaacaaugcuggcaau

SEQ ID NO: 2334233 - RNA, 19 nt, Homo sapiens
  misc_RNA (1)...(19): siRNA sense strand
ggccaaacgguuagaccaa

SEQ ID NO: 2334234 - RNA, 19 nt, Homo sapiens
  misc_RNA (1)...(19): siRNA sense strand
gguuagaccaauuacacua

SEQ ID NO: 2334235 - RNA, 19 nt, Homo sapiens
  misc_RNA (1)...(19): siRNA sense strand
ggccaguggugguguccaa

SEQ ID NO: 2334236 - RNA, 19 nt, Homo sapiens
  misc_RNA (1)...(19): siRNA sense strand
cagaacagcgacaguacaa

SEQ ID NO: 2334237 - RNA, 19 nt, Homo sapiens
  misc_RNA (1)...(19): siRNA sense strand
ccagcaagguggacagcca

SEQ ID NO: 2334238 - RNA, 19 nt, Homo sapiens
  misc_RNA (1)...(19): siRNA sense strand
gaacguacagcaaggccaa

SEQ ID NO: 2334239 - RNA, 19 nt, Homo sapiens
  misc_RNA (1)...(19): siRNA sense strand
ccaacaacaaugcuggcaa

SEQ ID NO: 2334240 - RNA, 19 nt, Homo sapiens
  misc_RNA (1)...(19): siRNA sense strand
uggaaugugaggaggagga

SEQ ID NO: 2334241 - RNA, 19 nt, Homo sapiens
  misc_RNA (1)...(19): siRNA sense strand
gugaauacccuuaacacca

SEQ ID NO: 2334242 - RNA, 19 nt, Homo sapiens
  misc_RNA (1)...(19): siRNA sense strand
cuguucaggucaugcagaa

SEQ ID NO: 2334243 - RNA, 19 nt, Homo sapiens
  misc_RNA (1)...(19): siRNA sense strand
cucuguaguugaagauuau

SEQ ID NO: 2334244 - RNA, 19 nt, Homo sapiens
  misc_RNA (1)...(19): siRNA sense strand
agguugggauugugcugaa

SEQ ID NO: 2334245 - RNA, 19 nt, Homo sapiens
  misc_RNA (1)...(19): siRNA sense strand
ucaaagaaccagcggaccu

SEQ ID NO: 2334246 - RNA, 19 nt, Homo sapiens
  misc_RNA (1)...(19): siRNA sense strand
ccacaaguguucucccaga

SEQ ID NO: 2334247 - RNA, 19 nt, Homo sapiens
  misc_RNA (1)...(19): siRNA sense strand
caaugaaucagguugggau

SEQ ID NO: 2334248 - RNA, 19 nt, Homo sapiens
  misc_RNA (1)...(19): siRNA sense strand
aaugugaggaggaggaguu

SEQ ID NO: 2334249 - RNA, 19 nt, Homo sapiens
  misc_RNA (1)...(19): siRNA sense strand
gcacagaacagcgacagua

SEQ ID NO: 2334250 - RNA, 19 nt, Homo sapiens
  misc_RNA (1)...(19): siRNA sense strand
caacaacaaugcuggcaau

SEQ ID NO: 2334251 - RNA, 19 nt, Homo sapiens
  misc_RNA (1)...(19): siRNA sense strand
ggccaaacgguuagaccaa

SEQ ID NO: 2334252 - RNA, 19 nt, Homo sapiens
  misc_RNA (1)...(19): siRNA sense strand
gguuagaccaauuacacua

SEQ ID NO: 2334253 - RNA, 19 nt, Homo sapiens
  misc_RNA (1)...(19): siRNA sense strand
ggccaguggugguguccaa

SEQ ID NO: 2334254 - RNA, 19 nt, Homo sapiens
  misc_RNA (1)...(19): siRNA sense strand
cagaacagcgacaguacaa

SEQ ID NO: 2334255 - RNA, 19 nt, Homo sapiens
  misc_RNA (1)...(19): siRNA sense strand
ccagcaagguggacagcca

SEQ ID NO: 2334256 - RNA, 19 nt, Homo sapiens
  misc_RNA (1)...(19): siRNA sense strand
gaacguacagcaaggccaa

SEQ ID NO: 2334257 - RNA, 19 nt, Homo sapiens
  misc_RNA (1)...(19): siRNA sense strand
ccaacaacaaugcuggcaa

SEQ ID NO: 2334258 - RNA, 19 nt, Homo sapiens
  misc_RNA (1)...(19): siRNA sense strand
uggaaugugaggaggagga

SEQ ID NO: 2334259 - RNA, 19 nt, Homo sapiens
  misc_RNA (1)...(19): siRNA sense strand
gugaauacccuuaacacca

SEQ ID NO: 2334260 - RNA, 19 nt, Homo sapiens
  misc_RNA (1)...(19): siRNA sense strand
cuguucaggucaugcagaa

SEQ ID NO: 2334261 - RNA, 19 nt, Homo sapiens
  misc_RNA (1)...(19): siRNA sense strand
cucuguaguugaagauuau

SEQ ID NO: 2334262 - RNA, 19 nt, Homo sapiens
  misc_RNA (1)...(19): siRNA sense strand
agguugggauugugcugaa

SEQ ID NO: 2334263 - RNA, 19 nt, Homo sapiens
  misc_RNA (1)...(19): siRNA sense strand
ucaaagaaccagcggaccu

SEQ ID NO: 2334264 - RNA, 19 nt, Homo sapiens
  misc_RNA (1)...(19): siRNA sense strand
ccacaaguguucucccaga

SEQ ID NO: 2334265 - RNA, 19 nt, Homo sapiens
  misc_RNA (1)...(19): siRNA sense strand
caaugaaucagguugggau

SEQ ID NO: 2334266 - RNA, 19 nt, Homo sapiens
  misc_RNA (1)...(19): siRNA sense strand
aaugugaggaggaggaguu

SEQ ID NO: 2334267 - RNA, 19 nt, Homo sapiens
  misc_RNA (1)...(19): siRNA sense strand
gcacagaacagcgacagua

SEQ ID NO: 2334268 - RNA, 19 nt, Homo sapiens
  misc_RNA (1)...(19): siRNA sense strand
aggagaagcuggagcgcua

SEQ ID NO: 2334269 - RNA, 19 nt, Homo sapiens
  misc_RNA (1)...(19): siRNA sense strand
caggagaagcagagcacaa

SEQ ID NO: 2334270 - RNA, 19 nt, Homo sapiens
  misc_RNA (1)...(19): siRNA sense strand
gggaugaggugacggguga

SEQ ID NO: 2334271 - RNA, 19 nt, Homo sapiens
  misc_RNA (1)...(19): siRNA sense strand
agauaaaggagaagcugga

SEQ ID NO: 2334272 - RNA, 19 nt, Homo sapiens
  misc_RNA (1)...(19): siRNA sense strand
ugaagaggagccugggcaa

SEQ ID NO: 2334273 - RNA, 19 nt, Homo sapiens
  misc_RNA (1)...(19): siRNA sense strand
gcuacguccuacagggcuu

SEQ ID NO: 2334274 - RNA, 19 nt, Homo sapiens
  misc_RNA (1)...(19): siRNA sense strand
aagcagagcacaagggcac

SEQ ID NO: 2334275 - RNA, 19 nt, Homo sapiens
  misc_RNA (1)...(19): siRNA sense strand
gcggaagcgccuggaagaa

SEQ ID NO: 2334276 - RNA, 19 nt, Homo sapiens
  misc_RNA (1)...(19): siRNA sense strand
aggaggagaaugagaaacu

SEQ ID NO: 2334277 - RNA, 19 nt, Homo sapiens
  misc_RNA (1)...(19): siRNA sense strand
cugcaguuccagaagagua

SEQ ID NO: 2334278 - RNA, 19 nt, Homo sapiens
  misc_RNA (1)...(19): siRNA sense strand
cugaaggaggagaaugaga

SEQ ID NO: 2334279 - RNA, 19 nt, Homo sapiens
  misc_RNA (1)...(19): siRNA sense strand
cuuucagccuggcggagaa

SEQ ID NO: 2334280 - RNA, 19 nt, Homo sapiens
  misc_RNA (1)...(19): siRNA sense strand
gggacagugcucagaggga

SEQ ID NO: 2334281 - RNA, 19 nt, Homo sapiens
  misc_RNA (1)...(19): siRNA sense strand
acugggaagagaaggaaca

SEQ ID NO: 2334282 - RNA, 19 nt, Homo sapiens
  misc_RNA (1)...(19): siRNA sense strand
cagaagaguaagauggccu

SEQ ID NO: 2334283 - RNA, 19 nt, Homo sapiens
  misc_RNA (1)...(19): siRNA sense strand
ucuacagggagaaggugaa

SEQ ID NO: 2334284 - RNA, 19 nt, Homo sapiens
  misc_RNA (1)...(19): siRNA sense strand
aguacugggaagagaagga

SEQ ID NO: 2334285 - RNA, 19 nt, Homo sapiens
  misc_RNA (1)...(19): siRNA sense strand
aggaggagaaugagaaacu

SEQ ID NO: 2334286 - RNA, 19 nt, Homo sapiens
  misc_RNA (1)...(19): siRNA sense strand
cugcaguuccagaagagua

SEQ ID NO: 2334287 - RNA, 19 nt, Homo sapiens
  misc_RNA (1)...(19): siRNA sense strand
cugaaggaggagaaugaga

SEQ ID NO: 2334288 - RNA, 19 nt, Homo sapiens
  misc_RNA (1)...(19): siRNA sense strand
cuuucagccuggcggagaa

SEQ ID NO: 2334289 - RNA, 19 nt, Homo sapiens
  misc_RNA (1)...(19): siRNA sense strand
gggacagugcucagaggga

SEQ ID NO: 2334290 - RNA, 19 nt, Homo sapiens
  misc_RNA (1)...(19): siRNA sense strand
acugggaagagaaggaaca

SEQ ID NO: 2334291 - RNA, 19 nt, Homo sapiens
  misc_RNA (1)...(19): siRNA sense strand
cagaagaguaagauggccu

SEQ ID NO: 2334292 - RNA, 19 nt, Homo sapiens
  misc_RNA (1)...(19): siRNA sense strand
ucuacagggagaaggugaa

SEQ ID NO: 2334293 - RNA, 19 nt, Homo sapiens
  misc_RNA (1)...(19): siRNA sense strand
aguacugggaagagaagga

SEQ ID NO: 2334294 - RNA, 19 nt, Homo sapiens
  misc_RNA (1)...(19): siRNA sense strand
ucaacgaccuggagcccaa

SEQ ID NO: 2334295 - RNA, 19 nt, Homo sapiens
  misc_RNA (1)...(19): siRNA sense strand
ccaagauccugguguggca

SEQ ID NO: 2334296 - RNA, 19 nt, Homo sapiens
  misc_RNA (1)...(19): siRNA sense strand
gaagagaugcgcagcacca

SEQ ID NO: 2334297 - RNA, 19 nt, Homo sapiens
  misc_RNA (1)...(19): siRNA sense strand
ccuacagccuggagcucuu

SEQ ID NO: 2334298 - RNA, 19 nt, Homo sapiens
  misc_RNA (1)...(19): siRNA sense strand
uggcacacacggacagaga

SEQ ID NO: 2334299 - RNA, 19 nt, Homo sapiens
  misc_RNA (1)...(19): siRNA sense strand
ucaacgaccuggagcccaa

SEQ ID NO: 2334300 - RNA, 19 nt, Homo sapiens
  misc_RNA (1)...(19): siRNA sense strand
ccaagauccugguguggca

SEQ ID NO: 2334301 - RNA, 19 nt, Homo sapiens
  misc_RNA (1)...(19): siRNA sense strand
gaagagaugcgcagcacca

SEQ ID NO: 2334302 - RNA, 19 nt, Homo sapiens
  misc_RNA (1)...(19): siRNA sense strand
ccuacagccuggagcucuu

SEQ ID NO: 2334303 - RNA, 19 nt, Homo sapiens
  misc_RNA (1)...(19): siRNA sense strand
uggcacacacggacagaga

SEQ ID NO: 2334304 - RNA, 19 nt, Homo sapiens
  misc_RNA (1)...(19): siRNA sense strand
aguuagagcuggaacggau

SEQ ID NO: 2334305 - RNA, 19 nt, Homo sapiens
  misc_RNA (1)...(19): siRNA sense strand
gauuacaggagguggcaga

SEQ ID NO: 2334306 - RNA, 19 nt, Homo sapiens
  misc_RNA (1)...(19): siRNA sense strand
cagaacaguuagagcugga

SEQ ID NO: 2334307 - RNA, 19 nt, Homo sapiens
  misc_RNA (1)...(19): siRNA sense strand
acaugaggaggaaggaauu

SEQ ID NO: 2334308 - RNA, 19 nt, Homo sapiens
  misc_RNA (1)...(19): siRNA sense strand
ggaacggauaggaccacaa

SEQ ID NO: 2334309 - RNA, 19 nt, Homo sapiens
  misc_RNA (1)...(19): siRNA sense strand
uaugaaugagcaaggagaa

SEQ ID NO: 2334310 - RNA, 19 nt, Homo sapiens
  misc_RNA (1)...(19): siRNA sense strand
aggaaggaauugaaaccca

SEQ ID NO: 2334311 - RNA, 19 nt, Homo sapiens
  misc_RNA (1)...(19): siRNA sense strand
cugaagaagaacuugacuu

SEQ ID NO: 2334312 - RNA, 19 nt, Homo sapiens
  misc_RNA (1)...(19): siRNA sense strand
gcgguuacgacuuuggcua

SEQ ID NO: 2334313 - RNA, 19 nt, Homo sapiens
  misc_RNA (1)...(19): siRNA sense strand
ccucaugaagagcugcaaa

SEQ ID NO: 2334314 - RNA, 19 nt, Homo sapiens
  misc_RNA (1)...(19): siRNA sense strand
uuaauuugacggaggacau

SEQ ID NO: 2334315 - RNA, 19 nt, Homo sapiens
  misc_RNA (1)...(19): siRNA sense strand
aacaugaggaggaaggaau

SEQ ID NO: 2334316 - RNA, 19 nt, Homo sapiens
  misc_RNA (1)...(19): siRNA sense strand
acggauaggaccacaacau

SEQ ID NO: 2334317 - RNA, 19 nt, Homo sapiens
  misc_RNA (1)...(19): siRNA sense strand
guuagagcuggaacggaua

SEQ ID NO: 2334318 - RNA, 19 nt, Homo sapiens
  misc_RNA (1)...(19): siRNA sense strand
uuggagaauucaggagcaa

SEQ ID NO: 2334319 - RNA, 19 nt, Homo sapiens
  misc_RNA (1)...(19): siRNA sense strand
uugcaagacccauuggaga

SEQ ID NO: 2334320 - RNA, 19 nt, Homo sapiens
  misc_RNA (1)...(19): siRNA sense strand
aguuagagcuggaacggau

SEQ ID NO: 2334321 - RNA, 19 nt, Homo sapiens
  misc_RNA (1)...(19): siRNA sense strand
gauuacaggagguggcaga

SEQ ID NO: 2334322 - RNA, 19 nt, Homo sapiens
  misc_RNA (1)...(19): siRNA sense strand
cagaacaguuagagcugga

SEQ ID NO: 2334323 - RNA, 19 nt, Homo sapiens
  misc_RNA (1)...(19): siRNA sense strand
acaugaggaggaaggaauu

SEQ ID NO: 2334324 - RNA, 19 nt, Homo sapiens
  misc_RNA (1)...(19): siRNA sense strand
ggaacggauaggaccacaa

SEQ ID NO: 2334325 - RNA, 19 nt, Homo sapiens
  misc_RNA (1)...(19): siRNA sense strand
uaugaaugagcaaggagaa

SEQ ID NO: 2334326 - RNA, 19 nt, Homo sapiens
  misc_RNA (1)...(19): siRNA sense strand
aggaaggaauugaaaccca

SEQ ID NO: 2334327 - RNA, 19 nt, Homo sapiens
  misc_RNA (1)...(19): siRNA sense strand
cugaagaagaacuugacuu

SEQ ID NO: 2334328 - RNA, 19 nt, Homo sapiens
  misc_RNA (1)...(19): siRNA sense strand
gcgguuacgacuuuggcua

SEQ ID NO: 2334329 - RNA, 19 nt, Homo sapiens
  misc_RNA (1)...(19): siRNA sense strand
ccucaugaagagcugcaaa

SEQ ID NO: 2334330 - RNA, 19 nt, Homo sapiens
  misc_RNA (1)...(19): siRNA sense strand
uuaauuugacggaggacau

SEQ ID NO: 2334331 - RNA, 19 nt, Homo sapiens
  misc_RNA (1)...(19): siRNA sense strand
aacaugaggaggaaggaau

SEQ ID NO: 2334332 - RNA, 19 nt, Homo sapiens
  misc_RNA (1)...(19): siRNA sense strand
acggauaggaccacaacau

SEQ ID NO: 2334333 - RNA, 19 nt, Homo sapiens
  misc_RNA (1)...(19): siRNA sense strand
guuagagcuggaacggaua

SEQ ID NO: 2334334 - RNA, 19 nt, Homo sapiens
  misc_RNA (1)...(19): siRNA sense strand
uuggagaauucaggagcaa

SEQ ID NO: 2334335 - RNA, 19 nt, Homo sapiens
  misc_RNA (1)...(19): siRNA sense strand
uugcaagacccauuggaga

SEQ ID NO: 2334336 - RNA, 19 nt, Homo sapiens
  misc_RNA (1)...(19): siRNA sense strand
uggaaaugagagaggagaa

SEQ ID NO: 2334337 - RNA, 19 nt, Homo sapiens
  misc_RNA (1)...(19): siRNA sense strand
gcaacaaacuggugagcac

SEQ ID NO: 2334338 - RNA, 19 nt, Homo sapiens
  misc_RNA (1)...(19): siRNA sense strand
cugcuuucgacaagaauaa

SEQ ID NO: 2334339 - RNA, 19 nt, Homo sapiens
  misc_RNA (1)...(19): siRNA sense strand
cugagaaaaucuugauaga

SEQ ID NO: 2334340 - RNA, 19 nt, Homo sapiens
  misc_RNA (1)...(19): siRNA sense strand
gcuuauagugauuuaggau

SEQ ID NO: 2334341 - RNA, 19 nt, Homo sapiens
  misc_RNA (1)...(19): siRNA sense strand
aagaauaaccccagcaaca

SEQ ID NO: 2334342 - RNA, 19 nt, Homo sapiens
  misc_RNA (1)...(19): siRNA sense strand
acaauaagaaagaugcuga

SEQ ID NO: 2334343 - RNA, 19 nt, Homo sapiens
  misc_RNA (1)...(19): siRNA sense strand
ccaacgugucugagaaaau

SEQ ID NO: 2334344 - RNA, 19 nt, Homo sapiens
  misc_RNA (1)...(19): siRNA sense strand
cagagaaucagucggccua

SEQ ID NO: 2334345 - RNA, 19 nt, Homo sapiens
  misc_RNA (1)...(19): siRNA sense strand
cuggugagcacgagcaaca

SEQ ID NO: 2334346 - RNA, 19 nt, Homo sapiens
  misc_RNA (1)...(19): siRNA sense strand
cugaugacacugaagaaaa

SEQ ID NO: 2334347 - RNA, 19 nt, Homo sapiens
  misc_RNA (1)...(19): siRNA sense strand
cgugcuaugucuaccggaa

SEQ ID NO: 2334348 - RNA, 19 nt, Homo sapiens
  misc_RNA (1)...(19): siRNA sense strand
acccaacgugucugagaaa

SEQ ID NO: 2334349 - RNA, 19 nt, Homo sapiens
  misc_RNA (1)...(19): siRNA sense strand
ggcugaugacacugaagaa

SEQ ID NO: 2334350 - RNA, 19 nt, Homo sapiens
  misc_RNA (1)...(19): siRNA sense strand
acagaggaggugacagaca

SEQ ID NO: 2334351 - RNA, 19 nt, Homo sapiens
  misc_RNA (1)...(19): siRNA sense strand
ggacagggaagguggagga

SEQ ID NO: 2334352 - RNA, 19 nt, Homo sapiens
  misc_RNA (1)...(19): siRNA sense strand
cagggaagguggaggagug

SEQ ID NO: 2334353 - RNA, 19 nt, Homo sapiens
  misc_RNA (1)...(19): siRNA sense strand
agaagaaagaugagaagaa

SEQ ID NO: 2334354 - RNA, 19 nt, Homo sapiens
  misc_RNA (1)...(19): siRNA sense strand
cagcagaggagaagaaaga

SEQ ID NO: 2334355 - RNA, 19 nt, Homo sapiens
  misc_RNA (1)...(19): siRNA sense strand
aggagaagaaagaugagaa

SEQ ID NO: 2334356 - RNA, 19 nt, Homo sapiens
  misc_RNA (1)...(19): siRNA sense strand
ucaacaagguuaucaguga

SEQ ID NO: 2334357 - RNA, 19 nt, Homo sapiens
  misc_RNA (1)...(19): siRNA sense strand
ggagaagaaagaugagaag

SEQ ID NO: 2334358 - RNA, 19 nt, Homo sapiens
  misc_RNA (1)...(19): siRNA sense strand
cagaggagaagaaagauga

SEQ ID NO: 2334359 - RNA, 19 nt, Homo sapiens
  misc_RNA (1)...(19): siRNA sense strand
ugacaugggauuuggccuu

SEQ ID NO: 2334360 - RNA, 19 nt, Homo sapiens
  misc_RNA (1)...(19): siRNA sense strand
cgucauugcccaggguauu

SEQ ID NO: 2334361 - RNA, 19 nt, Homo sapiens
  misc_RNA (1)...(19): siRNA sense strand
gcagaggagaagaaagaug

SEQ ID NO: 2334362 - RNA, 19 nt, Homo sapiens
  misc_RNA (1)...(19): siRNA sense strand
ccaacaaagaccugggcuu

SEQ ID NO: 2334363 - RNA, 19 nt, Homo sapiens
  misc_RNA (1)...(19): siRNA sense strand
ggacauagauucugcagcu

SEQ ID NO: 2334364 - RNA, 19 nt, Homo sapiens
  misc_RNA (1)...(19): siRNA sense strand
ugauuguggaagauagaaa

SEQ ID NO: 2334365 - RNA, 19 nt, Homo sapiens
  misc_RNA (1)...(19): siRNA sense strand
acaagaacagucaggaaau

SEQ ID NO: 2334366 - RNA, 19 nt, Homo sapiens
  misc_RNA (1)...(19): siRNA sense strand
gugaaagacgugaacgaca

SEQ ID NO: 2334367 - RNA, 19 nt, Homo sapiens
  misc_RNA (1)...(19): siRNA sense strand
uagcggaagaccaggacaa

SEQ ID NO: 2334368 - RNA, 19 nt, Homo sapiens
  misc_RNA (1)...(19): siRNA sense strand
ucaccguggaccagaguua

SEQ ID NO: 2334369 - RNA, 19 nt, Homo sapiens
  misc_RNA (1)...(19): siRNA sense strand
gggacuaacauguacaaca

SEQ ID NO: 2334370 - RNA, 19 nt, Homo sapiens
  misc_RNA (1)...(19): siRNA sense strand
ggaggauccaggagugcua

SEQ ID NO: 2334371 - RNA, 19 nt, Homo sapiens
  misc_RNA (1)...(19): siRNA sense strand
ccgugcuggccguggauaa

SEQ ID NO: 2334372 - RNA, 19 nt, Homo sapiens
  misc_RNA (1)...(19): siRNA sense strand
cuguggauguggacaagaa

SEQ ID NO: 2334373 - RNA, 19 nt, Homo sapiens
  misc_RNA (1)...(19): siRNA sense strand
uccaggaggaggagggcaa

SEQ ID NO: 2334374 - RNA, 19 nt, Homo sapiens
  misc_RNA (1)...(19): siRNA sense strand
cggacgugagccuggauua

SEQ ID NO: 2334375 - RNA, 19 nt, Homo sapiens
  misc_RNA (1)...(19): siRNA sense strand
cggaagagcuacaaccgga

SEQ ID NO: 2334376 - RNA, 19 nt, Homo sapiens
  misc_RNA (1)...(19): siRNA sense strand
acucuguggauguggacaa

SEQ ID NO: 2334377 - RNA, 19 nt, Homo sapiens
  misc_RNA (1)...(19): siRNA sense strand
cuugaugagcugaguguga

SEQ ID NO: 2334378 - RNA, 19 nt, Homo sapiens
  misc_RNA (1)...(19): siRNA sense strand
ggugauuguggaagauaga

SEQ ID NO: 2334379 - RNA, 19 nt, Homo sapiens
  misc_RNA (1)...(19): siRNA sense strand
agacgaugauucagggaac

SEQ ID NO: 2334380 - RNA, 19 nt, Homo sapiens
  misc_RNA (1)...(19): siRNA sense strand
ccacagacuccgucagcca

SEQ ID NO: 2334381 - RNA, 19 nt, Homo sapiens
  misc_RNA (1)...(19): siRNA sense strand
gccaaggaggccaggaaga

SEQ ID NO: 2334382 - RNA, 19 nt, Homo sapiens
  misc_RNA (1)...(19): siRNA sense strand
ccaucacuguggaggacau

SEQ ID NO: 2334383 - RNA, 19 nt, Homo sapiens
  misc_RNA (1)...(19): siRNA sense strand
augugaaagacgugaacga

SEQ ID NO: 2334384 - RNA, 19 nt, Homo sapiens
  misc_RNA (1)...(19): siRNA sense strand
agagcaaagccaucgacua

SEQ ID NO: 2334385 - RNA, 19 nt, Homo sapiens
  misc_RNA (1)...(19): siRNA sense strand
caggagugcuagugggcgu

SEQ ID NO: 2334386 - RNA, 19 nt, Homo sapiens
  misc_RNA (1)...(19): siRNA sense strand
uggaagauagaaacgacaa

SEQ ID NO: 2334387 - RNA, 19 nt, Homo sapiens
  misc_RNA (1)...(19): siRNA sense strand
gagugauggacgucaauga

SEQ ID NO: 2334388 - RNA, 19 nt, Homo sapiens
  misc_RNA (1)...(19): siRNA sense strand
gcuuccaggccuacagcaa

SEQ ID NO: 2334389 - RNA, 19 nt, Homo sapiens
  misc_RNA (1)...(19): siRNA sense strand
acuccuaccucgaugccua

SEQ ID NO: 2334390 - RNA, 19 nt, Homo sapiens
  misc_RNA (1)...(19): siRNA sense strand
gcaccuaccaagugacagu

SEQ ID NO: 2334391 - RNA, 19 nt, Homo sapiens
  misc_RNA (1)...(19): siRNA sense strand
cugccaaggaggccaggaa

SEQ ID NO: 2334392 - RNA, 19 nt, Homo sapiens
  misc_RNA (1)...(19): siRNA sense strand
uguacaucaaccagagcaa

SEQ ID NO: 2334393 - RNA, 19 nt, Homo sapiens
  misc_RNA (1)...(19): siRNA sense strand
uugaggacgugaaugacaa

SEQ ID NO: 2334394 - RNA, 19 nt, Homo sapiens
  misc_RNA (1)...(19): siRNA sense strand
agaacagucaggaaaucaa

SEQ ID NO: 2334395 - RNA, 19 nt, Homo sapiens
  misc_RNA (1)...(19): siRNA sense strand
cauccaccuuagagacauu

SEQ ID NO: 2334396 - RNA, 19 nt, Homo sapiens
  misc_RNA (1)...(19): siRNA sense strand
ggaagagcuacaaccggaa

SEQ ID NO: 2334397 - RNA, 19 nt, Homo sapiens
  misc_RNA (1)...(19): siRNA sense strand
cggaccagacggaagccaa

SEQ ID NO: 2334398 - RNA, 19 nt, Homo sapiens
  misc_RNA (1)...(19): siRNA sense strand
cugcaggcauggucgugua

SEQ ID NO: 2334399 - RNA, 19 nt, Homo sapiens
  misc_RNA (1)...(19): siRNA sense strand
ggaaggagaucaugaggcu

SEQ ID NO: 2334400 - RNA, 19 nt, Homo sapiens
  misc_RNA (1)...(19): siRNA sense strand
uggaugaggcugauggaga

SEQ ID NO: 2334401 - RNA, 19 nt, Homo sapiens
  misc_RNA (1)...(19): siRNA sense strand
acgagcagcuggaagcgua

SEQ ID NO: 2334402 - RNA, 19 nt, Homo sapiens
  misc_RNA (1)...(19): siRNA sense strand
ggaugaggcugauggagac

SEQ ID NO: 2334403 - RNA, 19 nt, Homo sapiens
  misc_RNA (1)...(19): siRNA sense strand
gccacaugacccuggacaa

SEQ ID NO: 2334404 - RNA, 19 nt, Homo sapiens
  misc_RNA (1)...(19): siRNA sense strand
uggagcagacggugaccaa

SEQ ID NO: 2334405 - RNA, 19 nt, Homo sapiens
  misc_RNA (1)...(19): siRNA sense strand
gggcagagaucgagggugu

SEQ ID NO: 2334406 - RNA, 19 nt, Homo sapiens
  misc_RNA (1)...(19): siRNA sense strand
agaaauaccaagagcgaga

SEQ ID NO: 2334407 - RNA, 19 nt, Homo sapiens
  misc_RNA (1)...(19): siRNA sense strand
agguggagcuucaggccaa

SEQ ID NO: 2334408 - RNA, 19 nt, Homo sapiens
  misc_RNA (1)...(19): siRNA sense strand
gcgagaucauagagcucaa

SEQ ID NO: 2334409 - RNA, 19 nt, Homo sapiens
  misc_RNA (1)...(19): siRNA sense strand
aggaaugggagguggcuuu

SEQ ID NO: 2334410 - RNA, 19 nt, Homo sapiens
  misc_RNA (1)...(19): siRNA sense strand
cggcuauggagguggcuuu

SEQ ID NO: 2334411 - RNA, 19 nt, Homo sapiens
  misc_RNA (1)...(19): siRNA sense strand
cccucaaaguggagacuga

SEQ ID NO: 2334412 - RNA, 19 nt, Homo sapiens
  misc_RNA (1)...(19): siRNA sense strand
uggcuuuggugguggcaga

SEQ ID NO: 2334413 - RNA, 19 nt, Homo sapiens
  misc_RNA (1)...(19): siRNA sense strand
gaagcaaggccgaagcuga

SEQ ID NO: 2334414 - RNA, 19 nt, Homo sapiens
  misc_RNA (1)...(19): siRNA sense strand
ugaagaacauggaggaccu

SEQ ID NO: 2334415 - RNA, 19 nt, Homo sapiens
  misc_RNA (1)...(19): siRNA sense strand
agaucaagacccucaacaa

SEQ ID NO: 2334416 - RNA, 19 nt, Homo sapiens
  misc_RNA (1)...(19): siRNA sense strand
caaacaaccuugagccucu

SEQ ID NO: 2334417 - RNA, 19 nt, Homo sapiens
  misc_RNA (1)...(19): siRNA sense strand
uaagaaauaccaagagcga

SEQ ID NO: 2334418 - RNA, 19 nt, Homo sapiens
  misc_RNA (1)...(19): siRNA sense strand
ucaagaagcagaaugccaa

SEQ ID NO: 2334419 - RNA, 19 nt, Homo sapiens
  misc_RNA (1)...(19): siRNA sense strand
gggaacagaucaagacccu

SEQ ID NO: 2334420 - RNA, 19 nt, Homo sapiens
  misc_RNA (1)...(19): siRNA sense strand
gaacagaucaagacccuca

SEQ ID NO: 2334421 - RNA, 19 nt, Homo sapiens
  misc_RNA (1)...(19): siRNA sense strand
agaacaaaguccuggagac

SEQ ID NO: 2334422 - RNA, 19 nt, Homo sapiens
  misc_RNA (1)...(19): siRNA sense strand
ucucagaugcagagccaca

SEQ ID NO: 2334423 - RNA, 19 nt, Homo sapiens
  misc_RNA (1)...(19): siRNA sense strand
gggcggugguuuaggaggu

SEQ ID NO: 2334424 - RNA, 19 nt, Homo sapiens
  misc_RNA (1)...(19): siRNA sense strand
uggcuauggagguggcuuu

SEQ ID NO: 2334425 - RNA, 19 nt, Homo sapiens
  misc_RNA (1)...(19): siRNA sense strand
agacaagccagcaagacau

SEQ ID NO: 2334426 - RNA, 19 nt, Homo sapiens
  misc_RNA (1)...(19): siRNA sense strand
caauaaacguacagcugcu

SEQ ID NO: 2334427 - RNA, 19 nt, Homo sapiens
  misc_RNA (1)...(19): siRNA sense strand
agaucgagggugucaagaa

SEQ ID NO: 2334428 - RNA, 19 nt, Homo sapiens
  misc_RNA (1)...(19): siRNA sense strand
cggcucaggcauuggcuuu

SEQ ID NO: 2334429 - RNA, 19 nt, Homo sapiens
  misc_RNA (1)...(19): siRNA sense strand
auaccaagagcgagaucau

SEQ ID NO: 2334430 - RNA, 19 nt, Homo sapiens
  misc_RNA (1)...(19): siRNA sense strand
ccuugauagaugagaucga

SEQ ID NO: 2334431 - RNA, 19 nt, Homo sapiens
  misc_RNA (1)...(19): siRNA sense strand
ugaagaaggauguggacag

SEQ ID NO: 2334432 - RNA, 19 nt, Homo sapiens
  misc_RNA (1)...(19): siRNA sense strand
acagaaugauccagaggcu

SEQ ID NO: 2334433 - RNA, 19 nt, Homo sapiens
  misc_RNA (1)...(19): siRNA sense strand
guugggaagaggagaggaa

SEQ ID NO: 2334434 - RNA, 19 nt, Homo sapiens
  misc_RNA (1)...(19): siRNA sense strand
aguuagacaucgaggaaac

SEQ ID NO: 2334435 - RNA, 19 nt, Homo sapiens
  misc_RNA (1)...(19): siRNA sense strand
gagaacagcaacagaggga

SEQ ID NO: 2334436 - RNA, 19 nt, Homo sapiens
  misc_RNA (1)...(19): siRNA sense strand
auaugaugcacaagacaaa

SEQ ID NO: 2334437 - RNA, 19 nt, Homo sapiens
  misc_RNA (1)...(19): siRNA sense strand
aaaugggaagcaagagaaa

SEQ ID NO: 2334438 - RNA, 19 nt, Homo sapiens
  misc_RNA (1)...(19): siRNA sense strand
ccugugaagcagaggacau

SEQ ID NO: 2334439 - RNA, 19 nt, Homo sapiens
  misc_RNA (1)...(19): siRNA sense strand
ccuucaagugauggagaaa

SEQ ID NO: 2334440 - RNA, 19 nt, Homo sapiens
  misc_RNA (1)...(19): siRNA sense strand
gauccagagagaacagcaa

SEQ ID NO: 2334441 - RNA, 19 nt, Homo sapiens
  misc_RNA (1)...(19): siRNA sense strand
caacagagggagcaagcga

SEQ ID NO: 2334442 - RNA, 19 nt, Homo sapiens
  misc_RNA (1)...(19): siRNA sense strand
cuuuacaaguuucgacaca

SEQ ID NO: 2334443 - RNA, 19 nt, Homo sapiens
  misc_RNA (1)...(19): siRNA sense strand
aagcgaagcaggaguacca

SEQ ID NO: 2334444 - RNA, 19 nt, Homo sapiens
  misc_RNA (1)...(19): siRNA sense strand
cagccuauguagacagcca

SEQ ID NO: 2334445 - RNA, 19 nt, Homo sapiens
  misc_RNA (1)...(19): siRNA sense strand
aaaagaacucaguggguuu

SEQ ID NO: 2334446 - RNA, 19 nt, Homo sapiens
  misc_RNA (1)...(19): siRNA sense strand
cccaaaaugaugaagacaa

SEQ ID NO: 2334447 - RNA, 19 nt, Homo sapiens
  misc_RNA (1)...(19): siRNA sense strand
ccaaaaugaugaagacaac

SEQ ID NO: 2334448 - RNA, 19 nt, Homo sapiens
  misc_RNA (1)...(19): siRNA sense strand
guucccaguuguauggcua

SEQ ID NO: 2334449 - RNA, 19 nt, Homo sapiens
  misc_RNA (1)...(19): siRNA sense strand
aggaaacagagcaguccaa

SEQ ID NO: 2334450 - RNA, 19 nt, Homo sapiens
  misc_RNA (1)...(19): siRNA sense strand
caguugauccagagagaac

SEQ ID NO: 2334451 - RNA, 19 nt, Homo sapiens
  misc_RNA (1)...(19): siRNA sense strand
ucagaaagcagcaaaggca

SEQ ID NO: 2334452 - RNA, 19 nt, Homo sapiens
  misc_RNA (1)...(19): siRNA sense strand
gggaagagauagaucaugc

SEQ ID NO: 2334453 - RNA, 19 nt, Homo sapiens
  misc_RNA (1)...(19): siRNA sense strand
acugcugguaccugagaaa

SEQ ID NO: 2334454 - RNA, 19 nt, Homo sapiens
  misc_RNA (1)...(19): siRNA sense strand
ugggaagaggagaggaacu

SEQ ID NO: 2334455 - RNA, 19 nt, Homo sapiens
  misc_RNA (1)...(19): siRNA sense strand
aauaugaugcacaagacaa

SEQ ID NO: 2334456 - RNA, 19 nt, Homo sapiens
  misc_RNA (1)...(19): siRNA sense strand
ggagaggaacuuuggugca

SEQ ID NO: 2334457 - RNA, 19 nt, Homo sapiens
  misc_RNA (1)...(19): siRNA sense strand
gcuaugcacuucuugggaa

SEQ ID NO: 2334458 - RNA, 19 nt, Homo sapiens
  misc_RNA (1)...(19): siRNA sense strand
cccuucaagugauggagaa

SEQ ID NO: 2334459 - RNA, 19 nt, Homo sapiens
  misc_RNA (1)...(19): siRNA sense strand
cuugcaucuuuaauggaua

SEQ ID NO: 2334460 - RNA, 19 nt, Homo sapiens
  misc_RNA (1)...(19): siRNA sense strand
cagaaagcagcaaaggcau

SEQ ID NO: 2334461 - RNA, 19 nt, Homo sapiens
  misc_RNA (1)...(19): siRNA sense strand
ccuuagaguuccugagaaa

SEQ ID NO: 2334462 - RNA, 19 nt, Homo sapiens
  misc_RNA (1)...(19): siRNA sense strand
aggaagagaaagagagaau

SEQ ID NO: 2334463 - RNA, 19 nt, Homo sapiens
  misc_RNA (1)...(19): siRNA sense strand
ggguguaacuggaguagaa

SEQ ID NO: 2334464 - RNA, 19 nt, Homo sapiens
  misc_RNA (1)...(19): siRNA sense strand
ggaaaguuguagauagaau

SEQ ID NO: 2334465 - RNA, 19 nt, Homo sapiens
  misc_RNA (1)...(19): siRNA sense strand
aagcagagcaagagagaga

SEQ ID NO: 2334466 - RNA, 19 nt, Homo sapiens
  misc_RNA (1)...(19): siRNA sense strand
guaagaaagcgguggaaca

SEQ ID NO: 2334467 - RNA, 19 nt, Homo sapiens
  misc_RNA (1)...(19): siRNA sense strand
agagagagauggagcgaga

SEQ ID NO: 2334468 - RNA, 19 nt, Homo sapiens
  misc_RNA (1)...(19): siRNA sense strand
uggaaaaucuggagaaauu

SEQ ID NO: 2334469 - RNA, 19 nt, Homo sapiens
  misc_RNA (1)...(19): siRNA sense strand
gcauauuggaguuggagaa

SEQ ID NO: 2334470 - RNA, 19 nt, Homo sapiens
  misc_RNA (1)...(19): siRNA sense strand
uggcaauauucaaggagaa

SEQ ID NO: 2334471 - RNA, 19 nt, Homo sapiens
  misc_RNA (1)...(19): siRNA sense strand
ugaagagaguccagaacaa

SEQ ID NO: 2334472 - RNA, 19 nt, Homo sapiens
  misc_RNA (1)...(19): siRNA sense strand
aaagagagccaaagagcaa

SEQ ID NO: 2334473 - RNA, 19 nt, Homo sapiens
  misc_RNA (1)...(19): siRNA sense strand
uugaaaugcuccaggaaau

SEQ ID NO: 2334474 - RNA, 19 nt, Homo sapiens
  misc_RNA (1)...(19): siRNA sense strand
gugaacugguuuaagaaua

SEQ ID NO: 2334475 - RNA, 19 nt, Homo sapiens
  misc_RNA (1)...(19): siRNA sense strand
agaaagagcagcagauaga

SEQ ID NO: 2334476 - RNA, 19 nt, Homo sapiens
  misc_RNA (1)...(19): siRNA sense strand
cuagaguagcugagauuaa

SEQ ID NO: 2334477 - RNA, 19 nt, Homo sapiens
  misc_RNA (1)...(19): siRNA sense strand
caacaagacugcuggcaca

SEQ ID NO: 2334478 - RNA, 19 nt, Homo sapiens
  misc_RNA (1)...(19): siRNA sense strand
gaucagaugggaagagcua

SEQ ID NO: 2334479 - RNA, 19 nt, Homo sapiens
  misc_RNA (1)...(19): siRNA sense strand
cgauagaacaagaucagaa

SEQ ID NO: 2334480 - RNA, 19 nt, Homo sapiens
  misc_RNA (1)...(19): siRNA sense strand
gcaacagagagcacagaaa

SEQ ID NO: 2334481 - RNA, 19 nt, Homo sapiens
  misc_RNA (1)...(19): siRNA sense strand
cagcagacuuauuagacaa

SEQ ID NO: 2334482 - RNA, 19 nt, Homo sapiens
  misc_RNA (1)...(19): siRNA sense strand
ggaagagagugaaagccaa

SEQ ID NO: 2334483 - RNA, 19 nt, Homo sapiens
  misc_RNA (1)...(19): siRNA sense strand
caauauucaaggagaagaa

SEQ ID NO: 2334484 - RNA, 19 nt, Homo sapiens
  misc_RNA (1)...(19): siRNA sense strand
gcugaaugaauuugaacaa

SEQ ID NO: 2334485 - RNA, 19 nt, Homo sapiens
  misc_RNA (1)...(19): siRNA sense strand
gugaagaucaguugaaaga

SEQ ID NO: 2334486 - RNA, 19 nt, Homo sapiens
  misc_RNA (1)...(19): siRNA sense strand
ucaugagaauggagaagaa

SEQ ID NO: 2334487 - RNA, 19 nt, Homo sapiens
  misc_RNA (1)...(19): siRNA sense strand
ggacacuggucuugaacau

SEQ ID NO: 2334488 - RNA, 19 nt, Homo sapiens
  misc_RNA (1)...(19): siRNA sense strand
uggauuaaaugaagaccaa

SEQ ID NO: 2334489 - RNA, 19 nt, Homo sapiens
  misc_RNA (1)...(19): siRNA sense strand
aagcggugcaagagagaaa

SEQ ID NO: 2334490 - RNA, 19 nt, Homo sapiens
  misc_RNA (1)...(19): siRNA sense strand
cuaaauggauccaggcaga

SEQ ID NO: 2334491 - RNA, 19 nt, Homo sapiens
  misc_RNA (1)...(19): siRNA sense strand
gauguuagucaguggacaa

SEQ ID NO: 2334492 - RNA, 19 nt, Homo sapiens
  misc_RNA (1)...(19): siRNA sense strand
aggaacaagaucaggacua

SEQ ID NO: 2334493 - RNA, 19 nt, Homo sapiens
  misc_RNA (1)...(19): siRNA sense strand
cgaauugaacaguggaaga

SEQ ID NO: 2334494 - RNA, 19 nt, Homo sapiens
  misc_RNA (1)...(19): siRNA sense strand
uaacugaggaagagaaaga

SEQ ID NO: 2334495 - RNA, 19 nt, Homo sapiens
  misc_RNA (1)...(19): siRNA sense strand
cuaccaaacuccucagaau

SEQ ID NO: 2334496 - RNA, 19 nt, Homo sapiens
  misc_RNA (1)...(19): siRNA sense strand
agacaaugaugaaggccau

SEQ ID NO: 2334497 - RNA, 19 nt, Homo sapiens
  misc_RNA (1)...(19): siRNA sense strand
aggugaagcugaaugaauu

SEQ ID NO: 2334498 - RNA, 19 nt, Homo sapiens
  misc_RNA (1)...(19): siRNA sense strand
gguagaagcauuaugugaa

SEQ ID NO: 2334499 - RNA, 19 nt, Homo sapiens
  misc_RNA (1)...(19): siRNA sense strand
ggacgguagcuuagaugaa

SEQ ID NO: 2334500 - RNA, 19 nt, Homo sapiens
  misc_RNA (1)...(19): siRNA sense strand
gagaaaugguucaguugau

SEQ ID NO: 2334501 - RNA, 19 nt, Homo sapiens
  misc_RNA (1)...(19): siRNA sense strand
aaguugaacaagauggaaa

SEQ ID NO: 2334502 - RNA, 19 nt, Homo sapiens
  misc_RNA (1)...(19): siRNA sense strand
agaaucaguuguuggagaa

SEQ ID NO: 2334503 - RNA, 19 nt, Homo sapiens
  misc_RNA (1)...(19): siRNA sense strand
cugaauaugcaguugcuaa

SEQ ID NO: 2334504 - RNA, 19 nt, Homo sapiens
  misc_RNA (1)...(19): siRNA sense strand
gugaagacaacgaagaaga

SEQ ID NO: 2334505 - RNA, 19 nt, Homo sapiens
  misc_RNA (1)...(19): siRNA sense strand
gguaaaagccuuagaguuc

SEQ ID NO: 2334506 - RNA, 19 nt, Homo sapiens
  misc_RNA (1)...(19): siRNA sense strand
gaauauaaaucauggcaag

SEQ ID NO: 2334507 - RNA, 19 nt, Homo sapiens
  misc_RNA (1)...(19): siRNA sense strand
cagaaguggcagucuauaa

SEQ ID NO: 2334508 - RNA, 19 nt, Homo sapiens
  misc_RNA (1)...(19): siRNA sense strand
gggcaaacuacuggaggaa

SEQ ID NO: 2334509 - RNA, 19 nt, Homo sapiens
  misc_RNA (1)...(19): siRNA sense strand
gauggaaggugcagcguca

SEQ ID NO: 2334510 - RNA, 19 nt, Homo sapiens
  misc_RNA (1)...(19): siRNA sense strand
ggcaauucagacagagaaa

SEQ ID NO: 2334511 - RNA, 19 nt, Homo sapiens
  misc_RNA (1)...(19): siRNA sense strand
aaggacaauugguuggaaa

SEQ ID NO: 2334512 - RNA, 19 nt, Homo sapiens
  misc_RNA (1)...(19): siRNA sense strand
gggaauugcugucugguca

SEQ ID NO: 2334513 - RNA, 19 nt, Homo sapiens
  misc_RNA (1)...(19): siRNA sense strand
acacuauaacugaggaaga

SEQ ID NO: 2334514 - RNA, 19 nt, Homo sapiens
  misc_RNA (1)...(19): siRNA sense strand
gugaagaccaaauggccaa

SEQ ID NO: 2334515 - RNA, 19 nt, Homo sapiens
  misc_RNA (1)...(19): siRNA sense strand
gggucagguucgaagucaa

SEQ ID NO: 2334516 - RNA, 19 nt, Homo sapiens
  misc_RNA (1)...(19): siRNA sense strand
cugaaaaugugguaaagua

SEQ ID NO: 2334517 - RNA, 19 nt, Homo sapiens
  misc_RNA (1)...(19): siRNA sense strand
cagaaucaguuguuggaga

SEQ ID NO: 2334518 - RNA, 19 nt, Homo sapiens
  misc_RNA (1)...(19): siRNA sense strand
caacacaugcaauggaaau

SEQ ID NO: 2334519 - RNA, 19 nt, Homo sapiens
  misc_RNA (1)...(19): siRNA sense strand
ggggaauacacguuagaaa

SEQ ID NO: 2334520 - RNA, 19 nt, Homo sapiens
  misc_RNA (1)...(19): siRNA sense strand
ggaacauaacauccagaua

SEQ ID NO: 2334521 - RNA, 19 nt, Homo sapiens
  misc_RNA (1)...(19): siRNA sense strand
ugaauaugcaguugcuaaa

SEQ ID NO: 2334522 - RNA, 19 nt, Homo sapiens
  misc_RNA (1)...(19): siRNA sense strand
cagaaaggugguugacaau

SEQ ID NO: 2334523 - RNA, 19 nt, Homo sapiens
  misc_RNA (1)...(19): siRNA sense strand
aagaugaggugaagagagu

SEQ ID NO: 2334524 - RNA, 19 nt, Homo sapiens
  misc_RNA (1)...(19): siRNA sense strand
caguauuggaagaguuaau

SEQ ID NO: 2334525 - RNA, 19 nt, Homo sapiens
  misc_RNA (1)...(19): siRNA sense strand
acacaaagucagaguaucu

SEQ ID NO: 2334526 - RNA, 19 nt, Homo sapiens
  misc_RNA (1)...(19): siRNA sense strand
guggacaacugcagacaau

SEQ ID NO: 2334527 - RNA, 19 nt, Homo sapiens
  misc_RNA (1)...(19): siRNA sense strand
cugcagugacagugagaca

SEQ ID NO: 2334528 - RNA, 19 nt, Homo sapiens
  misc_RNA (1)...(19): siRNA sense strand
gagugaagacaacgaagaa

SEQ ID NO: 2334529 - RNA, 19 nt, Homo sapiens
  misc_RNA (1)...(19): siRNA sense strand
ccuuagaguuccugagaaa

SEQ ID NO: 2334530 - RNA, 19 nt, Homo sapiens
  misc_RNA (1)...(19): siRNA sense strand
aggaagagaaagagagaau

SEQ ID NO: 2334531 - RNA, 19 nt, Homo sapiens
  misc_RNA (1)...(19): siRNA sense strand
ggguguaacuggaguagaa

SEQ ID NO: 2334532 - RNA, 19 nt, Homo sapiens
  misc_RNA (1)...(19): siRNA sense strand
ggaaaguuguagauagaau

SEQ ID NO: 2334533 - RNA, 19 nt, Homo sapiens
  misc_RNA (1)...(19): siRNA sense strand
aagcagagcaagagagaga

SEQ ID NO: 2334534 - RNA, 19 nt, Homo sapiens
  misc_RNA (1)...(19): siRNA sense strand
guaagaaagcgguggaaca

SEQ ID NO: 2334535 - RNA, 19 nt, Homo sapiens
  misc_RNA (1)...(19): siRNA sense strand
agagagagauggagcgaga

SEQ ID NO: 2334536 - RNA, 19 nt, Homo sapiens
  misc_RNA (1)...(19): siRNA sense strand
uggaaaaucuggagaaauu

SEQ ID NO: 2334537 - RNA, 19 nt, Homo sapiens
  misc_RNA (1)...(19): siRNA sense strand
gcauauuggaguuggagaa

SEQ ID NO: 2334538 - RNA, 19 nt, Homo sapiens
  misc_RNA (1)...(19): siRNA sense strand
uggcaauauucaaggagaa

SEQ ID NO: 2334539 - RNA, 19 nt, Homo sapiens
  misc_RNA (1)...(19): siRNA sense strand
ugaagagaguccagaacaa

SEQ ID NO: 2334540 - RNA, 19 nt, Homo sapiens
  misc_RNA (1)...(19): siRNA sense strand
aaagagagccaaagagcaa

SEQ ID NO: 2334541 - RNA, 19 nt, Homo sapiens
  misc_RNA (1)...(19): siRNA sense strand
uugaaaugcuccaggaaau

SEQ ID NO: 2334542 - RNA, 19 nt, Homo sapiens
  misc_RNA (1)...(19): siRNA sense strand
gugaacugguuuaagaaua

SEQ ID NO: 2334543 - RNA, 19 nt, Homo sapiens
  misc_RNA (1)...(19): siRNA sense strand
agaaagagcagcagauaga

SEQ ID NO: 2334544 - RNA, 19 nt, Homo sapiens
  misc_RNA (1)...(19): siRNA sense strand
cuagaguagcugagauuaa

SEQ ID NO: 2334545 - RNA, 19 nt, Homo sapiens
  misc_RNA (1)...(19): siRNA sense strand
caacaagacugcuggcaca

SEQ ID NO: 2334546 - RNA, 19 nt, Homo sapiens
  misc_RNA (1)...(19): siRNA sense strand
gaucagaugggaagagcua

SEQ ID NO: 2334547 - RNA, 19 nt, Homo sapiens
  misc_RNA (1)...(19): siRNA sense strand
cgauagaacaagaucagaa

SEQ ID NO: 2334548 - RNA, 19 nt, Homo sapiens
  misc_RNA (1)...(19): siRNA sense strand
gcaacagagagcacagaaa

SEQ ID NO: 2334549 - RNA, 19 nt, Homo sapiens
  misc_RNA (1)...(19): siRNA sense strand
cagcagacuuauuagacaa

SEQ ID NO: 2334550 - RNA, 19 nt, Homo sapiens
  misc_RNA (1)...(19): siRNA sense strand
ggaagagagugaaagccaa

SEQ ID NO: 2334551 - RNA, 19 nt, Homo sapiens
  misc_RNA (1)...(19): siRNA sense strand
caauauucaaggagaagaa

SEQ ID NO: 2334552 - RNA, 19 nt, Homo sapiens
  misc_RNA (1)...(19): siRNA sense strand
gcugaaugaauuugaacaa

SEQ ID NO: 2334553 - RNA, 19 nt, Homo sapiens
  misc_RNA (1)...(19): siRNA sense strand
gugaagaucaguugaaaga

SEQ ID NO: 2334554 - RNA, 19 nt, Homo sapiens
  misc_RNA (1)...(19): siRNA sense strand
ucaugagaauggagaagaa

SEQ ID NO: 2334555 - RNA, 19 nt, Homo sapiens
  misc_RNA (1)...(19): siRNA sense strand
ggacacuggucuugaacau

SEQ ID NO: 2334556 - RNA, 19 nt, Homo sapiens
  misc_RNA (1)...(19): siRNA sense strand
uggauuaaaugaagaccaa

SEQ ID NO: 2334557 - RNA, 19 nt, Homo sapiens
  misc_RNA (1)...(19): siRNA sense strand
aagcggugcaagagagaaa

SEQ ID NO: 2334558 - RNA, 19 nt, Homo sapiens
  misc_RNA (1)...(19): siRNA sense strand
cuaaauggauccaggcaga

SEQ ID NO: 2334559 - RNA, 19 nt, Homo sapiens
  misc_RNA (1)...(19): siRNA sense strand
gauguuagucaguggacaa

SEQ ID NO: 2334560 - RNA, 19 nt, Homo sapiens
  misc_RNA (1)...(19): siRNA sense strand
aggaacaagaucaggacua

SEQ ID NO: 2334561 - RNA, 19 nt, Homo sapiens
  misc_RNA (1)...(19): siRNA sense strand
cgaauugaacaguggaaga

SEQ ID NO: 2334562 - RNA, 19 nt, Homo sapiens
  misc_RNA (1)...(19): siRNA sense strand
uaacugaggaagagaaaga

SEQ ID NO: 2334563 - RNA, 19 nt, Homo sapiens
  misc_RNA (1)...(19): siRNA sense strand
cuaccaaacuccucagaau

SEQ ID NO: 2334564 - RNA, 19 nt, Homo sapiens
  misc_RNA (1)...(19): siRNA sense strand
agacaaugaugaaggccau

SEQ ID NO: 2334565 - RNA, 19 nt, Homo sapiens
  misc_RNA (1)...(19): siRNA sense strand
aggugaagcugaaugaauu

SEQ ID NO: 2334566 - RNA, 19 nt, Homo sapiens
  misc_RNA (1)...(19): siRNA sense strand
gguagaagcauuaugugaa

SEQ ID NO: 2334567 - RNA, 19 nt, Homo sapiens
  misc_RNA (1)...(19): siRNA sense strand
ggacgguagcuuagaugaa

SEQ ID NO: 2334568 - RNA, 19 nt, Homo sapiens
  misc_RNA (1)...(19): siRNA sense strand
gagaaaugguucaguugau

SEQ ID NO: 2334569 - RNA, 19 nt, Homo sapiens
  misc_RNA (1)...(19): siRNA sense strand
aaguugaacaagauggaaa

SEQ ID NO: 2334570 - RNA, 19 nt, Homo sapiens
  misc_RNA (1)...(19): siRNA sense strand
agaaucaguuguuggagaa

SEQ ID NO: 2334571 - RNA, 19 nt, Homo sapiens
  misc_RNA (1)...(19): siRNA sense strand
cugaauaugcaguugcuaa

SEQ ID NO: 2334572 - RNA, 19 nt, Homo sapiens
  misc_RNA (1)...(19): siRNA sense strand
gugaagacaacgaagaaga

SEQ ID NO: 2334573 - RNA, 19 nt, Homo sapiens
  misc_RNA (1)...(19): siRNA sense strand
gguaaaagccuuagaguuc

SEQ ID NO: 2334574 - RNA, 19 nt, Homo sapiens
  misc_RNA (1)...(19): siRNA sense strand
gaauauaaaucauggcaag

SEQ ID NO: 2334575 - RNA, 19 nt, Homo sapiens
  misc_RNA (1)...(19): siRNA sense strand
cagaaguggcagucuauaa

SEQ ID NO: 2334576 - RNA, 19 nt, Homo sapiens
  misc_RNA (1)...(19): siRNA sense strand
gggcaaacuacuggaggaa

SEQ ID NO: 2334577 - RNA, 19 nt, Homo sapiens
  misc_RNA (1)...(19): siRNA sense strand
gauggaaggugcagcguca

SEQ ID NO: 2334578 - RNA, 19 nt, Homo sapiens
  misc_RNA (1)...(19): siRNA sense strand
ggcaauucagacagagaaa

SEQ ID NO: 2334579 - RNA, 19 nt, Homo sapiens
  misc_RNA (1)...(19): siRNA sense strand
aaggacaauugguuggaaa

SEQ ID NO: 2334580 - RNA, 19 nt, Homo sapiens
  misc_RNA (1)...(19): siRNA sense strand
gggaauugcugucugguca

SEQ ID NO: 2334581 - RNA, 19 nt, Homo sapiens
  misc_RNA (1)...(19): siRNA sense strand
acacuauaacugaggaaga

SEQ ID NO: 2334582 - RNA, 19 nt, Homo sapiens
  misc_RNA (1)...(19): siRNA sense strand
gugaagaccaaauggccaa

SEQ ID NO: 2334583 - RNA, 19 nt, Homo sapiens
  misc_RNA (1)...(19): siRNA sense strand
gggucagguucgaagucaa

SEQ ID NO: 2334584 - RNA, 19 nt, Homo sapiens
  misc_RNA (1)...(19): siRNA sense strand
cugaaaaugugguaaagua

SEQ ID NO: 2334585 - RNA, 19 nt, Homo sapiens
  misc_RNA (1)...(19): siRNA sense strand
cagaaucaguuguuggaga

SEQ ID NO: 2334586 - RNA, 19 nt, Homo sapiens
  misc_RNA (1)...(19): siRNA sense strand
caacacaugcaauggaaau

SEQ ID NO: 2334587 - RNA, 19 nt, Homo sapiens
  misc_RNA (1)...(19): siRNA sense strand
ggggaauacacguuagaaa

SEQ ID NO: 2334588 - RNA, 19 nt, Homo sapiens
  misc_RNA (1)...(19): siRNA sense strand
ggaacauaacauccagaua

SEQ ID NO: 2334589 - RNA, 19 nt, Homo sapiens
  misc_RNA (1)...(19): siRNA sense strand
ugaauaugcaguugcuaaa

SEQ ID NO: 2334590 - RNA, 19 nt, Homo sapiens
  misc_RNA (1)...(19): siRNA sense strand
cagaaaggugguugacaau

SEQ ID NO: 2334591 - RNA, 19 nt, Homo sapiens
  misc_RNA (1)...(19): siRNA sense strand
aagaugaggugaagagagu

SEQ ID NO: 2334592 - RNA, 19 nt, Homo sapiens
  misc_RNA (1)...(19): siRNA sense strand
caguauuggaagaguuaau

SEQ ID NO: 2334593 - RNA, 19 nt, Homo sapiens
  misc_RNA (1)...(19): siRNA sense strand
acacaaagucagaguaucu

SEQ ID NO: 2334594 - RNA, 19 nt, Homo sapiens
  misc_RNA (1)...(19): siRNA sense strand
guggacaacugcagacaau

SEQ ID NO: 2334595 - RNA, 19 nt, Homo sapiens
  misc_RNA (1)...(19): siRNA sense strand
cugcagugacagugagaca

SEQ ID NO: 2334596 - RNA, 19 nt, Homo sapiens
  misc_RNA (1)...(19): siRNA sense strand
gcauaggcccagagggaga

SEQ ID NO: 2334597 - RNA, 19 nt, Homo sapiens
  misc_RNA (1)...(19): siRNA sense strand
cgaagggaguauugggaga

SEQ ID NO: 2334598 - RNA, 19 nt, Homo sapiens
  misc_RNA (1)...(19): siRNA sense strand
gugcauaggcccagaggga

SEQ ID NO: 2334599 - RNA, 19 nt, Homo sapiens
  misc_RNA (1)...(19): siRNA sense strand
agugaggacaauauggaaa

SEQ ID NO: 2334600 - RNA, 19 nt, Homo sapiens
  misc_RNA (1)...(19): siRNA sense strand
cuccagaggcagugauaga

SEQ ID NO: 2334601 - RNA, 19 nt, Homo sapiens
  misc_RNA (1)...(19): siRNA sense strand
cagggaaguggcuggcaaa

SEQ ID NO: 2334602 - RNA, 19 nt, Homo sapiens
  misc_RNA (1)...(19): siRNA sense strand
gggcaauugcagaggagcu

SEQ ID NO: 2334603 - RNA, 19 nt, Homo sapiens
  misc_RNA (1)...(19): siRNA sense strand
gaucaaaugucaugcagac

SEQ ID NO: 2334604 - RNA, 19 nt, Homo sapiens
  misc_RNA (1)...(19): siRNA sense strand
auggaaagcaagugggaag

SEQ ID NO: 2334605 - RNA, 19 nt, Homo sapiens
  misc_RNA (1)...(19): siRNA sense strand
gggcuguggaagucuuaaa

SEQ ID NO: 2334606 - RNA, 19 nt, Homo sapiens
  misc_RNA (1)...(19): siRNA sense strand
cagaauaucccuuuggacu

SEQ ID NO: 2334607 - RNA, 19 nt, Homo sapiens
  misc_RNA (1)...(19): siRNA sense strand
gcuguggauuugagcccua

SEQ ID NO: 2334608 - RNA, 19 nt, Homo sapiens
  misc_RNA (1)...(19): siRNA sense strand
gggagguugugauuggaga

SEQ ID NO: 2334609 - RNA, 19 nt, Homo sapiens
  misc_RNA (1)...(19): siRNA sense strand
cagauagacccguggcagu

SEQ ID NO: 2334610 - RNA, 19 nt, Homo sapiens
  misc_RNA (1)...(19): siRNA sense strand
gagaaugugcugugaggcu

SEQ ID NO: 2334611 - RNA, 19 nt, Homo sapiens
  misc_RNA (1)...(19): siRNA sense strand
ggaucaaaugucaugcaga

SEQ ID NO: 2334612 - RNA, 19 nt, Homo sapiens
  misc_RNA (1)...(19): siRNA sense strand
agaaggaugaagcuagaau

SEQ ID NO: 2334613 - RNA, 19 nt, Homo sapiens
  misc_RNA (1)...(19): siRNA sense strand
aaacccuggauuagagcaa

SEQ ID NO: 2334614 - RNA, 19 nt, Homo sapiens
  misc_RNA (1)...(19): siRNA sense strand
uccuagagaaguacggaua

SEQ ID NO: 2334615 - RNA, 19 nt, Homo sapiens
  misc_RNA (1)...(19): siRNA sense strand
gugcagagccuguauggga

SEQ ID NO: 2334616 - RNA, 19 nt, Homo sapiens
  misc_RNA (1)...(19): siRNA sense strand
aggccaaacugcaggcaac

SEQ ID NO: 2334617 - RNA, 19 nt, Homo sapiens
  misc_RNA (1)...(19): siRNA sense strand
acaacgaugggcugggcaa

SEQ ID NO: 2334618 - RNA, 19 nt, Homo sapiens
  misc_RNA (1)...(19): siRNA sense strand
acaaaugguacaagcagca

SEQ ID NO: 2334619 - RNA, 19 nt, Homo sapiens
  misc_RNA (1)...(19): siRNA sense strand
uccuagagaaguacggaua

SEQ ID NO: 2334620 - RNA, 19 nt, Homo sapiens
  misc_RNA (1)...(19): siRNA sense strand
gugcagagccuguauggga

SEQ ID NO: 2334621 - RNA, 19 nt, Homo sapiens
  misc_RNA (1)...(19): siRNA sense strand
acaacgaugggcugggcaa

SEQ ID NO: 2334622 - RNA, 19 nt, Homo sapiens
  misc_RNA (1)...(19): siRNA sense strand
acaaaugguacaagcagca

SEQ ID NO: 2334623 - RNA, 19 nt, Homo sapiens
  misc_RNA (1)...(19): siRNA sense strand
gcacaaugguggaggaggu

SEQ ID NO: 2334624 - RNA, 19 nt, Homo sapiens
  misc_RNA (1)...(19): siRNA sense strand
augaggaagugguggucua

SEQ ID NO: 2334625 - RNA, 19 nt, Homo sapiens
  misc_RNA (1)...(19): siRNA sense strand
aggagaaggccaugagcau

SEQ ID NO: 2334626 - RNA, 19 nt, Homo sapiens
  misc_RNA (1)...(19): siRNA sense strand
gaacagaacgugaacggau

SEQ ID NO: 2334627 - RNA, 19 nt, Homo sapiens
  misc_RNA (1)...(19): siRNA sense strand
ccguaggacucgaguggga

SEQ ID NO: 2334628 - RNA, 19 nt, Homo sapiens
  misc_RNA (1)...(19): siRNA sense strand
agucagagugcaugaucua

SEQ ID NO: 2334629 - RNA, 19 nt, Homo sapiens
  misc_RNA (1)...(19): siRNA sense strand
ggacaguguuuguggagac

SEQ ID NO: 2334630 - RNA, 19 nt, Homo sapiens
  misc_RNA (1)...(19): siRNA sense strand
cucaggaagcuucgggaaa

SEQ ID NO: 2334631 - RNA, 19 nt, Homo sapiens
  misc_RNA (1)...(19): siRNA sense strand
augauggauugguggagua

SEQ ID NO: 2334632 - RNA, 19 nt, Homo sapiens
  misc_RNA (1)...(19): siRNA sense strand
agccagagauucaaggaca

SEQ ID NO: 2334633 - RNA, 19 nt, Homo sapiens
  misc_RNA (1)...(19): siRNA sense strand
ggaacgagaccguaggacu

SEQ ID NO: 2334634 - RNA, 19 nt, Homo sapiens
  misc_RNA (1)...(19): siRNA sense strand
aguuuggccugaagggauu

SEQ ID NO: 2334635 - RNA, 19 nt, Homo sapiens
  misc_RNA (1)...(19): siRNA sense strand
aagaagaaggcgcaggaga

SEQ ID NO: 2334636 - RNA, 19 nt, Homo sapiens
  misc_RNA (1)...(19): siRNA sense strand
aaaucaagcugcugccaga

SEQ ID NO: 2334637 - RNA, 19 nt, Homo sapiens
  misc_RNA (1)...(19): siRNA sense strand
aggagaggaccuuuguaaa

SEQ ID NO: 2334638 - RNA, 19 nt, Homo sapiens
  misc_RNA (1)...(19): siRNA sense strand
ggaaggugcgggaagccua

SEQ ID NO: 2334639 - RNA, 19 nt, Homo sapiens
  misc_RNA (1)...(19): siRNA sense strand
ggaugggacuggaggagcu

SEQ ID NO: 2334640 - RNA, 19 nt, Homo sapiens
  misc_RNA (1)...(19): siRNA sense strand
gggagcagucagagugcau

SEQ ID NO: 2334641 - RNA, 19 nt, Homo sapiens
  misc_RNA (1)...(19): siRNA sense strand
agccuaagccagagauuca

SEQ ID NO: 2334642 - RNA, 19 nt, Homo sapiens
  misc_RNA (1)...(19): siRNA sense strand
ggaccuuuguaaaacgaaa

SEQ ID NO: 2334643 - RNA, 19 nt, Homo sapiens
  misc_RNA (1)...(19): siRNA sense strand
acgaaaaccccgagggauc

SEQ ID NO: 2334644 - RNA, 19 nt, Homo sapiens
  misc_RNA (1)...(19): siRNA sense strand
uggaggagcugcaaagcca

SEQ ID NO: 2334645 - RNA, 19 nt, Homo sapiens
  misc_RNA (1)...(19): siRNA sense strand
acgugaucccugagaccaa

SEQ ID NO: 2334646 - RNA, 19 nt, Homo sapiens
  misc_RNA (1)...(19): siRNA sense strand
ccaagaagaaggcgcagga

SEQ ID NO: 2334647 - RNA, 19 nt, Homo sapiens
  misc_RNA (1)...(19): siRNA sense strand
ugaucuaccaguacggcaa

SEQ ID NO: 2334648 - RNA, 19 nt, Homo sapiens
  misc_RNA (1)...(19): siRNA sense strand
aggacacacgagugaacua

SEQ ID NO: 2334649 - RNA, 19 nt, Homo sapiens
  misc_RNA (1)...(19): siRNA sense strand
ugggcuacgucaacagcaa

SEQ ID NO: 2334650 - RNA, 19 nt, Homo sapiens
  misc_RNA (1)...(19): siRNA sense strand
ggcgugaaugugugggcua

SEQ ID NO: 2334651 - RNA, 19 nt, Homo sapiens
  misc_RNA (1)...(19): siRNA sense strand
ccucaggaagcuucgggaa

SEQ ID NO: 2334652 - RNA, 19 nt, Homo sapiens
  misc_RNA (1)...(19): siRNA sense strand
cuugaacuuuggaggcauu

SEQ ID NO: 2334653 - RNA, 19 nt, Homo sapiens
  misc_RNA (1)...(19): siRNA sense strand
auggacagguggaacgaga

SEQ ID NO: 2334654 - RNA, 19 nt, Homo sapiens
  misc_RNA (1)...(19): siRNA sense strand
cuggagaauucgacugcca

SEQ ID NO: 2334655 - RNA, 19 nt, Homo sapiens
  misc_RNA (1)...(19): siRNA sense strand
caguuuggccugaagggau

SEQ ID NO: 2334656 - RNA, 19 nt, Homo sapiens
  misc_RNA (1)...(19): siRNA sense strand
ggaccgcauugguagccua

SEQ ID NO: 2334657 - RNA, 19 nt, Homo sapiens
  misc_RNA (1)...(19): siRNA sense strand
gacccaaaucucuggauca

SEQ ID NO: 2334658 - RNA, 19 nt, Homo sapiens
  misc_RNA (1)...(19): siRNA sense strand
auggauugguggaguaacu

SEQ ID NO: 2334659 - RNA, 19 nt, Homo sapiens
  misc_RNA (1)...(19): siRNA sense strand
uuaaagaugugguggaaaa

SEQ ID NO: 2334660 - RNA, 19 nt, Homo sapiens
  misc_RNA (1)...(19): siRNA sense strand
aggaagaauuucaggaguu

SEQ ID NO: 2334661 - RNA, 19 nt, Homo sapiens
  misc_RNA (1)...(19): siRNA sense strand
acgaagguguugagcggua

SEQ ID NO: 2334662 - RNA, 19 nt, Homo sapiens
  misc_RNA (1)...(19): siRNA sense strand
uagauaaagcaaaggaaga

SEQ ID NO: 2334663 - RNA, 19 nt, Homo sapiens
  misc_RNA (1)...(19): siRNA sense strand
gaugauggcaagaaagcaa

SEQ ID NO: 2334664 - RNA, 19 nt, Homo sapiens
  misc_RNA (1)...(19): siRNA sense strand
cgaaacauucccuggcaaa

SEQ ID NO: 2334665 - RNA, 19 nt, Homo sapiens
  misc_RNA (1)...(19): siRNA sense strand
gcugaggaacgaaaggaaa

SEQ ID NO: 2334666 - RNA, 19 nt, Homo sapiens
  misc_RNA (1)...(19): siRNA sense strand
aguaugugauagaugguaa

SEQ ID NO: 2334667 - RNA, 19 nt, Homo sapiens
  misc_RNA (1)...(19): siRNA sense strand
ccuauguaguggaaaguau

SEQ ID NO: 2334668 - RNA, 19 nt, Homo sapiens
  misc_RNA (1)...(19): siRNA sense strand
aacaaaugccagacggaaa

SEQ ID NO: 2334669 - RNA, 19 nt, Homo sapiens
  misc_RNA (1)...(19): siRNA sense strand
ggugagucgcauugugaaa

SEQ ID NO: 2334670 - RNA, 19 nt, Homo sapiens
  misc_RNA (1)...(19): siRNA sense strand
acgcuaagauugagcacuu

SEQ ID NO: 2334671 - RNA, 19 nt, Homo sapiens
  misc_RNA (1)...(19): siRNA sense strand
cguaaggccucuuuggcua

SEQ ID NO: 2334672 - RNA, 19 nt, Homo sapiens
  misc_RNA (1)...(19): siRNA sense strand
acuuagagaagcugaggaa

SEQ ID NO: 2334673 - RNA, 19 nt, Homo sapiens
  misc_RNA (1)...(19): siRNA sense strand
aggcaaccugggagaguaa

SEQ ID NO: 2334674 - RNA, 19 nt, Homo sapiens
  misc_RNA (1)...(19): siRNA sense strand
aggaguugcuuuuggaaua

SEQ ID NO: 2334675 - RNA, 19 nt, Homo sapiens
  misc_RNA (1)...(19): siRNA sense strand
cuaagaaaccaaagcccaa

SEQ ID NO: 2334676 - RNA, 19 nt, Homo sapiens
  misc_RNA (1)...(19): siRNA sense strand
agauaaagcaaaggaagaa

SEQ ID NO: 2334677 - RNA, 19 nt, Homo sapiens
  misc_RNA (1)...(19): siRNA sense strand
ggauaaucauuuaguccau

SEQ ID NO: 2334678 - RNA, 19 nt, Homo sapiens
  misc_RNA (1)...(19): siRNA sense strand
agaagaagauaucgagcca

SEQ ID NO: 2334679 - RNA, 19 nt, Homo sapiens
  misc_RNA (1)...(19): siRNA sense strand
ugagcaauuuugagaguaa

SEQ ID NO: 2334680 - RNA, 19 nt, Homo sapiens
  misc_RNA (1)...(19): siRNA sense strand
acaucaguguggugggauu

SEQ ID NO: 2334681 - RNA, 19 nt, Homo sapiens
  misc_RNA (1)...(19): siRNA sense strand
cuuaauacagcaaggucaa

SEQ ID NO: 2334682 - RNA, 19 nt, Homo sapiens
  misc_RNA (1)...(19): siRNA sense strand
agcauaaacuugagaucuu

SEQ ID NO: 2334683 - RNA, 19 nt, Homo sapiens
  misc_RNA (1)...(19): siRNA sense strand
ggauguucugggagaggaa

SEQ ID NO: 2334684 - RNA, 19 nt, Homo sapiens
  misc_RNA (1)...(19): siRNA sense strand
gcuuaauacagcaagguca

SEQ ID NO: 2334685 - RNA, 19 nt, Homo sapiens
  misc_RNA (1)...(19): siRNA sense strand
ugggagaggaacagcgauu

SEQ ID NO: 2334686 - RNA, 19 nt, Homo sapiens
  misc_RNA (1)...(19): siRNA sense strand
cguauaacaugcagaucga

SEQ ID NO: 2334687 - RNA, 19 nt, Homo sapiens
  misc_RNA (1)...(19): siRNA sense strand
ggagaagauggguguuauu

SEQ ID NO: 2334688 - RNA, 19 nt, Homo sapiens
  misc_RNA (1)...(19): siRNA sense strand
guaugugauagaugguaaa

SEQ ID NO: 2334689 - RNA, 19 nt, Homo sapiens
  misc_RNA (1)...(19): siRNA sense strand
ccugcaggauucagaagaa

SEQ ID NO: 2334690 - RNA, 19 nt, Homo sapiens
  misc_RNA (1)...(19): siRNA sense strand
ccauggaugcuguggugaa

SEQ ID NO: 2334691 - RNA, 19 nt, Homo sapiens
  misc_RNA (1)...(19): siRNA sense strand
cagcagauagcuacagcaa

SEQ ID NO: 2334692 - RNA, 19 nt, Homo sapiens
  misc_RNA (1)...(19): siRNA sense strand
cagcaaaagacaaguauga

SEQ ID NO: 2334693 - RNA, 19 nt, Homo sapiens
  misc_RNA (1)...(19): siRNA sense strand
ccggaaagccuugggaaga

SEQ ID NO: 2334694 - RNA, 19 nt, Homo sapiens
  misc_RNA (1)...(19): siRNA sense strand
gagaacuggcugaguguca

SEQ ID NO: 2334695 - RNA, 19 nt, Homo sapiens
  misc_RNA (1)...(19): siRNA sense strand
gagcuuucccugaggccaa

SEQ ID NO: 2334696 - RNA, 19 nt, Homo sapiens
  misc_RNA (1)...(19): siRNA sense strand
ccuggaggauuguguggaa

SEQ ID NO: 2334697 - RNA, 19 nt, Homo sapiens
  misc_RNA (1)...(19): siRNA sense strand
ccuggaagggacucagaaa

SEQ ID NO: 2334698 - RNA, 19 nt, Homo sapiens
  misc_RNA (1)...(19): siRNA sense strand
aguggaaaguauagagaag

SEQ ID NO: 2334699 - RNA, 19 nt, Homo sapiens
  misc_RNA (1)...(19): siRNA sense strand
gugaagugcaggauauuau

SEQ ID NO: 2334700 - RNA, 19 nt, Homo sapiens
  misc_RNA (1)...(19): siRNA sense strand
cuccagaauaccaggacua

SEQ ID NO: 2334701 - RNA, 19 nt, Homo sapiens
  misc_RNA (1)...(19): siRNA sense strand
cugaggaacgaaaggaaaa

SEQ ID NO: 2334702 - RNA, 19 nt, Homo sapiens
  misc_RNA (1)...(19): siRNA sense strand
auagagaagaguagagagu

SEQ ID NO: 2334703 - RNA, 19 nt, Homo sapiens
  misc_RNA (1)...(19): siRNA sense strand
gaguaaacugaacaacaaa

SEQ ID NO: 2334704 - RNA, 19 nt, Homo sapiens
  misc_RNA (1)...(19): siRNA sense strand
guacauuagagaugcacau

SEQ ID NO: 2334705 - RNA, 19 nt, Homo sapiens
  misc_RNA (1)...(19): siRNA sense strand
agugcaacucauugauaaa

SEQ ID NO: 2334706 - RNA, 19 nt, Homo sapiens
  misc_RNA (1)...(19): siRNA sense strand
acggauucccuuugauuua

SEQ ID NO: 2334707 - RNA, 19 nt, Homo sapiens
  misc_RNA (1)...(19): siRNA sense strand
aagcaaaggaagaauuuca

SEQ ID NO: 2334708 - RNA, 19 nt, Homo sapiens
  misc_RNA (1)...(19): siRNA sense strand
gcaaggagaagaugggugu

SEQ ID NO: 2334709 - RNA, 19 nt, Homo sapiens
  misc_RNA (1)...(19): siRNA sense strand
ucaacaaagcccaguccaa

SEQ ID NO: 2334710 - RNA, 19 nt, Homo sapiens
  misc_RNA (1)...(19): siRNA sense strand
cgggaaugguucugacagu

SEQ ID NO: 2334711 - RNA, 19 nt, Homo sapiens
  misc_RNA (1)...(19): siRNA sense strand
cagaauucuugaagugguu

SEQ ID NO: 2334712 - RNA, 19 nt, Homo sapiens
  misc_RNA (1)...(19): siRNA sense strand
cagcgagauccaauguaaa

SEQ ID NO: 2334713 - RNA, 19 nt, Homo sapiens
  misc_RNA (1)...(19): siRNA sense strand
cuauguaguggaaaguaua

SEQ ID NO: 2334714 - RNA, 19 nt, Homo sapiens
  misc_RNA (1)...(19): siRNA sense strand
agaaagagccgguugguuc

SEQ ID NO: 2334715 - RNA, 19 nt, Homo sapiens
  misc_RNA (1)...(19): siRNA sense strand
caaggaaugaagaagaaaa

SEQ ID NO: 2334716 - RNA, 19 nt, Homo sapiens
  misc_RNA (1)...(19): siRNA sense strand
cauacgaaacagacgaaga

SEQ ID NO: 2334717 - RNA, 19 nt, Homo sapiens
  misc_RNA (1)...(19): siRNA sense strand
gaauauucuucgcagccua

SEQ ID NO: 2334718 - RNA, 19 nt, Homo sapiens
  misc_RNA (1)...(19): siRNA sense strand
ggaaugaagaagaaaacau

SEQ ID NO: 2334719 - RNA, 19 nt, Homo sapiens
  misc_RNA (1)...(19): siRNA sense strand
ccaauguaaacguggacuu

SEQ ID NO: 2334720 - RNA, 19 nt, Homo sapiens
  misc_RNA (1)...(19): siRNA sense strand
augacaaguaugugauaga

SEQ ID NO: 2334721 - RNA, 19 nt, Homo sapiens
  misc_RNA (1)...(19): siRNA sense strand
uuugugaagugcaggauau

SEQ ID NO: 2334722 - RNA, 19 nt, Homo sapiens
  misc_RNA (1)...(19): siRNA sense strand
aaggaggaacacuaagaaa

SEQ ID NO: 2334723 - RNA, 19 nt, Homo sapiens
  misc_RNA (1)...(19): siRNA sense strand
acaaaggcaaccugggaga

SEQ ID NO: 2334724 - RNA, 19 nt, Homo sapiens
  misc_RNA (1)...(19): siRNA sense strand
ccgaaacauucccuggcaa

SEQ ID NO: 2334725 - RNA, 19 nt, Homo sapiens
  misc_RNA (1)...(19): siRNA sense strand
ccucagcaccagugacuuu

SEQ ID NO: 2334726 - RNA, 19 nt, Homo sapiens
  misc_RNA (1)...(19): siRNA sense strand
uuaaagaugugguggaaaa

SEQ ID NO: 2334727 - RNA, 19 nt, Homo sapiens
  misc_RNA (1)...(19): siRNA sense strand
aggaagaauuucaggaguu

SEQ ID NO: 2334728 - RNA, 19 nt, Homo sapiens
  misc_RNA (1)...(19): siRNA sense strand
acgaagguguugagcggua

SEQ ID NO: 2334729 - RNA, 19 nt, Homo sapiens
  misc_RNA (1)...(19): siRNA sense strand
uagauaaagcaaaggaaga

SEQ ID NO: 2334730 - RNA, 19 nt, Homo sapiens
  misc_RNA (1)...(19): siRNA sense strand
gaugauggcaagaaagcaa

SEQ ID NO: 2334731 - RNA, 19 nt, Homo sapiens
  misc_RNA (1)...(19): siRNA sense strand
gcugaggaacgaaaggaaa

SEQ ID NO: 2334732 - RNA, 19 nt, Homo sapiens
  misc_RNA (1)...(19): siRNA sense strand
aguaugugauagaugguaa

SEQ ID NO: 2334733 - RNA, 19 nt, Homo sapiens
  misc_RNA (1)...(19): siRNA sense strand
ccuauguaguggaaaguau

SEQ ID NO: 2334734 - RNA, 19 nt, Homo sapiens
  misc_RNA (1)...(19): siRNA sense strand
aacaaaugccagacggaaa

SEQ ID NO: 2334735 - RNA, 19 nt, Homo sapiens
  misc_RNA (1)...(19): siRNA sense strand
ggugagucgcauugugaaa

SEQ ID NO: 2334736 - RNA, 19 nt, Homo sapiens
  misc_RNA (1)...(19): siRNA sense strand
acgcuaagauugagcacuu

SEQ ID NO: 2334737 - RNA, 19 nt, Homo sapiens
  misc_RNA (1)...(19): siRNA sense strand
cguaaggccucuuuggcua

SEQ ID NO: 2334738 - RNA, 19 nt, Homo sapiens
  misc_RNA (1)...(19): siRNA sense strand
acuuagagaagcugaggaa

SEQ ID NO: 2334739 - RNA, 19 nt, Homo sapiens
  misc_RNA (1)...(19): siRNA sense strand
aggcaaccugggagaguaa

SEQ ID NO: 2334740 - RNA, 19 nt, Homo sapiens
  misc_RNA (1)...(19): siRNA sense strand
aggaguugcuuuuggaaua

SEQ ID NO: 2334741 - RNA, 19 nt, Homo sapiens
  misc_RNA (1)...(19): siRNA sense strand
cuaagaaaccaaagcccaa

SEQ ID NO: 2334742 - RNA, 19 nt, Homo sapiens
  misc_RNA (1)...(19): siRNA sense strand
agauaaagcaaaggaagaa

SEQ ID NO: 2334743 - RNA, 19 nt, Homo sapiens
  misc_RNA (1)...(19): siRNA sense strand
ggauaaucauuuaguccau

SEQ ID NO: 2334744 - RNA, 19 nt, Homo sapiens
  misc_RNA (1)...(19): siRNA sense strand
agaagaagauaucgagcca

SEQ ID NO: 2334745 - RNA, 19 nt, Homo sapiens
  misc_RNA (1)...(19): siRNA sense strand
ugagcaauuuugagaguaa

SEQ ID NO: 2334746 - RNA, 19 nt, Homo sapiens
  misc_RNA (1)...(19): siRNA sense strand
acaucaguguggugggauu

SEQ ID NO: 2334747 - RNA, 19 nt, Homo sapiens
  misc_RNA (1)...(19): siRNA sense strand
cuuaauacagcaaggucaa

SEQ ID NO: 2334748 - RNA, 19 nt, Homo sapiens
  misc_RNA (1)...(19): siRNA sense strand
agcauaaacuugagaucuu

SEQ ID NO: 2334749 - RNA, 19 nt, Homo sapiens
  misc_RNA (1)...(19): siRNA sense strand
ggauguucugggagaggaa

SEQ ID NO: 2334750 - RNA, 19 nt, Homo sapiens
  misc_RNA (1)...(19): siRNA sense strand
gcuuaauacagcaagguca

SEQ ID NO: 2334751 - RNA, 19 nt, Homo sapiens
  misc_RNA (1)...(19): siRNA sense strand
ugggagaggaacagcgauu

SEQ ID NO: 2334752 - RNA, 19 nt, Homo sapiens
  misc_RNA (1)...(19): siRNA sense strand
cguauaacaugcagaucga

SEQ ID NO: 2334753 - RNA, 19 nt, Homo sapiens
  misc_RNA (1)...(19): siRNA sense strand
ggagaagauggguguuauu

SEQ ID NO: 2334754 - RNA, 19 nt, Homo sapiens
  misc_RNA (1)...(19): siRNA sense strand
guaugugauagaugguaaa

SEQ ID NO: 2334755 - RNA, 19 nt, Homo sapiens
  misc_RNA (1)...(19): siRNA sense strand
ccugcaggauucagaagaa

SEQ ID NO: 2334756 - RNA, 19 nt, Homo sapiens
  misc_RNA (1)...(19): siRNA sense strand
ccauggaugcuguggugaa

SEQ ID NO: 2334757 - RNA, 19 nt, Homo sapiens
  misc_RNA (1)...(19): siRNA sense strand
cagcagauagcuacagcaa

SEQ ID NO: 2334758 - RNA, 19 nt, Homo sapiens
  misc_RNA (1)...(19): siRNA sense strand
cagcaaaagacaaguauga

SEQ ID NO: 2334759 - RNA, 19 nt, Homo sapiens
  misc_RNA (1)...(19): siRNA sense strand
ccggaaagccuugggaaga

SEQ ID NO: 2334760 - RNA, 19 nt, Homo sapiens
  misc_RNA (1)...(19): siRNA sense strand
gagaacuggcugaguguca

SEQ ID NO: 2334761 - RNA, 19 nt, Homo sapiens
  misc_RNA (1)...(19): siRNA sense strand
gagcuuucccugaggccaa

SEQ ID NO: 2334762 - RNA, 19 nt, Homo sapiens
  misc_RNA (1)...(19): siRNA sense strand
ccuggaggauuguguggaa

SEQ ID NO: 2334763 - RNA, 19 nt, Homo sapiens
  misc_RNA (1)...(19): siRNA sense strand
ccuggaagggacucagaaa

SEQ ID NO: 2334764 - RNA, 19 nt, Homo sapiens
  misc_RNA (1)...(19): siRNA sense strand
aguggaaaguauagagaag

SEQ ID NO: 2334765 - RNA, 19 nt, Homo sapiens
  misc_RNA (1)...(19): siRNA sense strand
gugaagugcaggauauuau

SEQ ID NO: 2334766 - RNA, 19 nt, Homo sapiens
  misc_RNA (1)...(19): siRNA sense strand
cuccagaauaccaggacua

SEQ ID NO: 2334767 - RNA, 19 nt, Homo sapiens
  misc_RNA (1)...(19): siRNA sense strand
cugaggaacgaaaggaaaa

SEQ ID NO: 2334768 - RNA, 19 nt, Homo sapiens
  misc_RNA (1)...(19): siRNA sense strand
auagagaagaguagagagu

SEQ ID NO: 2334769 - RNA, 19 nt, Homo sapiens
  misc_RNA (1)...(19): siRNA sense strand
gaguaaacugaacaacaaa

SEQ ID NO: 2334770 - RNA, 19 nt, Homo sapiens
  misc_RNA (1)...(19): siRNA sense strand
guacauuagagaugcacau

SEQ ID NO: 2334771 - RNA, 19 nt, Homo sapiens
  misc_RNA (1)...(19): siRNA sense strand
agugcaacucauugauaaa

SEQ ID NO: 2334772 - RNA, 19 nt, Homo sapiens
  misc_RNA (1)...(19): siRNA sense strand
acggauucccuuugauuua

SEQ ID NO: 2334773 - RNA, 19 nt, Homo sapiens
  misc_RNA (1)...(19): siRNA sense strand
aagcaaaggaagaauuuca

SEQ ID NO: 2334774 - RNA, 19 nt, Homo sapiens
  misc_RNA (1)...(19): siRNA sense strand
gcaaggagaagaugggugu

SEQ ID NO: 2334775 - RNA, 19 nt, Homo sapiens
  misc_RNA (1)...(19): siRNA sense strand
ucaacaaagcccaguccaa

SEQ ID NO: 2334776 - RNA, 19 nt, Homo sapiens
  misc_RNA (1)...(19): siRNA sense strand
cgggaaugguucugacagu

SEQ ID NO: 2334777 - RNA, 19 nt, Homo sapiens
  misc_RNA (1)...(19): siRNA sense strand
cagaauucuugaagugguu

SEQ ID NO: 2334778 - RNA, 19 nt, Homo sapiens
  misc_RNA (1)...(19): siRNA sense strand
cagcgagauccaauguaaa

SEQ ID NO: 2334779 - RNA, 19 nt, Homo sapiens
  misc_RNA (1)...(19): siRNA sense strand
cuauguaguggaaaguaua

SEQ ID NO: 2334780 - RNA, 19 nt, Homo sapiens
  misc_RNA (1)...(19): siRNA sense strand
agaaagagccgguugguuc

SEQ ID NO: 2334781 - RNA, 19 nt, Homo sapiens
  misc_RNA (1)...(19): siRNA sense strand
caaggaaugaagaagaaaa

SEQ ID NO: 2334782 - RNA, 19 nt, Homo sapiens
  misc_RNA (1)...(19): siRNA sense strand
cauacgaaacagacgaaga

SEQ ID NO: 2334783 - RNA, 19 nt, Homo sapiens
  misc_RNA (1)...(19): siRNA sense strand
gaauauucuucgcagccua

SEQ ID NO: 2334784 - RNA, 19 nt, Homo sapiens
  misc_RNA (1)...(19): siRNA sense strand
ggaaugaagaagaaaacau

SEQ ID NO: 2334785 - RNA, 19 nt, Homo sapiens
  misc_RNA (1)...(19): siRNA sense strand
ccaauguaaacguggacuu

SEQ ID NO: 2334786 - RNA, 19 nt, Homo sapiens
  misc_RNA (1)...(19): siRNA sense strand
augacaaguaugugauaga

SEQ ID NO: 2334787 - RNA, 19 nt, Homo sapiens
  misc_RNA (1)...(19): siRNA sense strand
uuugugaagugcaggauau

SEQ ID NO: 2334788 - RNA, 19 nt, Homo sapiens
  misc_RNA (1)...(19): siRNA sense strand
aaggaggaacacuaagaaa

SEQ ID NO: 2334789 - RNA, 19 nt, Homo sapiens
  misc_RNA (1)...(19): siRNA sense strand
acaaaggcaaccugggaga

SEQ ID NO: 2334790 - RNA, 19 nt, Homo sapiens
  misc_RNA (1)...(19): siRNA sense strand
ccucagcaccagugacuuu

SEQ ID NO: 2334791 - RNA, 19 nt, Homo sapiens
  misc_RNA (1)...(19): siRNA sense strand
gcgcagugauccugggcuu

SEQ ID NO: 2334792 - RNA, 19 nt, Homo sapiens
  misc_RNA (1)...(19): siRNA sense strand
gggacuacgugcaggcuca

SEQ ID NO: 2334793 - RNA, 19 nt, Homo sapiens
  misc_RNA (1)...(19): siRNA sense strand
ucacuaugcucaugggcuu

SEQ ID NO: 2334794 - RNA, 19 nt, Homo sapiens
  misc_RNA (1)...(19): siRNA sense strand
caggagggcugcauggaga

SEQ ID NO: 2334795 - RNA, 19 nt, Homo sapiens
  misc_RNA (1)...(19): siRNA sense strand
gggaagaggacaacagccu

SEQ ID NO: 2334796 - RNA, 19 nt, Homo sapiens
  misc_RNA (1)...(19): siRNA sense strand
ugacugagcucauucgaga

SEQ ID NO: 2334797 - RNA, 19 nt, Homo sapiens
  misc_RNA (1)...(19): siRNA sense strand
cagacaacgcugagcucau

SEQ ID NO: 2334798 - RNA, 19 nt, Homo sapiens
  misc_RNA (1)...(19): siRNA sense strand
auuccgaagacuacagcaa

SEQ ID NO: 2334799 - RNA, 19 nt, Homo sapiens
  misc_RNA (1)...(19): siRNA sense strand
gggaauacuggcagagcaa

SEQ ID NO: 2334800 - RNA, 19 nt, Homo sapiens
  misc_RNA (1)...(19): siRNA sense strand
gaguguaauaagcgagaua

SEQ ID NO: 2334801 - RNA, 19 nt, Homo sapiens
  misc_RNA (1)...(19): siRNA sense strand
aggcauaaacuucgacaaa

SEQ ID NO: 2334802 - RNA, 19 nt, Homo sapiens
  misc_RNA (1)...(19): siRNA sense strand
auacagaagagguggaaga

SEQ ID NO: 2334803 - RNA, 19 nt, Homo sapiens
  misc_RNA (1)...(19): siRNA sense strand
cugcaugguuggaagaaau

SEQ ID NO: 2334804 - RNA, 19 nt, Homo sapiens
  misc_RNA (1)...(19): siRNA sense strand
guguaauaagcgagauaau

SEQ ID NO: 2334805 - RNA, 19 nt, Homo sapiens
  misc_RNA (1)...(19): siRNA sense strand
ucguugaaauucugcgaaa

SEQ ID NO: 2334806 - RNA, 19 nt, Homo sapiens
  misc_RNA (1)...(19): siRNA sense strand
ggacgagauuugauggcuu

SEQ ID NO: 2334807 - RNA, 19 nt, Homo sapiens
  misc_RNA (1)...(19): siRNA sense strand
cgacacuauucuuguggaa

SEQ ID NO: 2334808 - RNA, 19 nt, Homo sapiens
  misc_RNA (1)...(19): siRNA sense strand
gaauacuggcagagcaauu

SEQ ID NO: 2334809 - RNA, 19 nt, Homo sapiens
  misc_RNA (1)...(19): siRNA sense strand
caucaaaggaacagcgcca

SEQ ID NO: 2334810 - RNA, 19 nt, Homo sapiens
  misc_RNA (1)...(19): siRNA sense strand
cagaagagguggaagaggu

SEQ ID NO: 2334811 - RNA, 19 nt, Homo sapiens
  misc_RNA (1)...(19): siRNA sense strand
uggagaaaauggagacaau

SEQ ID NO: 2334812 - RNA, 19 nt, Homo sapiens
  misc_RNA (1)...(19): siRNA sense strand
gauggauaucauaggcaaa

SEQ ID NO: 2334813 - RNA, 19 nt, Homo sapiens
  misc_RNA (1)...(19): siRNA sense strand
cagaaguggcaguggaagu

SEQ ID NO: 2334814 - RNA, 19 nt, Homo sapiens
  misc_RNA (1)...(19): siRNA sense strand
agaagcagaaggaggagaa

SEQ ID NO: 2334815 - RNA, 19 nt, Homo sapiens
  misc_RNA (1)...(19): siRNA sense strand
agaaagggcaagagcacuu

SEQ ID NO: 2334816 - RNA, 19 nt, Homo sapiens
  misc_RNA (1)...(19): siRNA sense strand
cugaauaacaacauugcua

SEQ ID NO: 2334817 - RNA, 19 nt, Homo sapiens
  misc_RNA (1)...(19): siRNA sense strand
gcauguuggauauggguuu

SEQ ID NO: 2334818 - RNA, 19 nt, Homo sapiens
  misc_RNA (1)...(19): siRNA sense strand
ccguggaggauuuggucua

SEQ ID NO: 2334819 - RNA, 19 nt, Homo sapiens
  misc_RNA (1)...(19): siRNA sense strand
aggauuuggucuaggaagu

SEQ ID NO: 2334820 - RNA, 19 nt, Homo sapiens
  misc_RNA (1)...(19): siRNA sense strand
agaagagguggaagaggua

SEQ ID NO: 2334821 - RNA, 19 nt, Homo sapiens
  misc_RNA (1)...(19): siRNA sense strand
cgagauaauacauccacaa

SEQ ID NO: 2334822 - RNA, 19 nt, Homo sapiens
  misc_RNA (1)...(19): siRNA sense strand
ugaaauucugcgaaacaua

SEQ ID NO: 2334823 - RNA, 19 nt, Homo sapiens
  misc_RNA (1)...(19): siRNA sense strand
uaucauacuugcaggacga

SEQ ID NO: 2334824 - RNA, 19 nt, Homo sapiens
  misc_RNA (1)...(19): siRNA sense strand
gcggcuaucgagauggaaa

SEQ ID NO: 2334825 - RNA, 19 nt, Homo sapiens
  misc_RNA (1)...(19): siRNA sense strand
cggcuaucgagauggaaau

SEQ ID NO: 2334826 - RNA, 19 nt, Homo sapiens
  misc_RNA (1)...(19): siRNA sense strand
guugaaauucugcgaaaca

SEQ ID NO: 2334827 - RNA, 19 nt, Homo sapiens
  misc_RNA (1)...(19): siRNA sense strand
gcacauuaucagacaggca

SEQ ID NO: 2334828 - RNA, 19 nt, Homo sapiens
  misc_RNA (1)...(19): siRNA sense strand
guguauuauuguagcacca

SEQ ID NO: 2334829 - RNA, 19 nt, Homo sapiens
  misc_RNA (1)...(19): siRNA sense strand
guguaagagcuguuguuau

SEQ ID NO: 2334830 - RNA, 19 nt, Homo sapiens
  misc_RNA (1)...(19): siRNA sense strand
ucaaaggaacagcgccaaa

SEQ ID NO: 2334831 - RNA, 19 nt, Homo sapiens
  misc_RNA (1)...(19): siRNA sense strand
agaaauugccuuuaguaca

SEQ ID NO: 2334832 - RNA, 19 nt, Homo sapiens
  misc_RNA (1)...(19): siRNA sense strand
cuucagugguaguacaaga

SEQ ID NO: 2334833 - RNA, 19 nt, Homo sapiens
  misc_RNA (1)...(19): siRNA sense strand
agugguaguacaagaggaa

SEQ ID NO: 2334834 - RNA, 19 nt, Homo sapiens
  misc_RNA (1)...(19): siRNA sense strand
acaaauaguacaaggcugu

SEQ ID NO: 2334835 - RNA, 19 nt, Homo sapiens
  misc_RNA (1)...(19): siRNA sense strand
agaaaagauuggucucaaa

SEQ ID NO: 2334836 - RNA, 19 nt, Homo sapiens
  misc_RNA (1)...(19): siRNA sense strand
cuacaaguauucaugguga

SEQ ID NO: 2334837 - RNA, 19 nt, Homo sapiens
  misc_RNA (1)...(19): siRNA sense strand
aggaaugccaucaaaggaa

SEQ ID NO: 2334838 - RNA, 19 nt, Homo sapiens
  misc_RNA (1)...(19): siRNA sense strand
aaacauaggggaugaaaga

SEQ ID NO: 2334839 - RNA, 19 nt, Homo sapiens
  misc_RNA (1)...(19): siRNA sense strand
agaaaagcucguugaaauu

SEQ ID NO: 2334840 - RNA, 19 nt, Homo sapiens
  misc_RNA (1)...(19): siRNA sense strand
gggaacagagagagcggga

SEQ ID NO: 2334841 - RNA, 19 nt, Homo sapiens
  misc_RNA (1)...(19): siRNA sense strand
ggauauggguuuuggucca

SEQ ID NO: 2334842 - RNA, 19 nt, Homo sapiens
  misc_RNA (1)...(19): siRNA sense strand
agaaauggaugauggaccu

SEQ ID NO: 2334843 - RNA, 19 nt, Homo sapiens
  misc_RNA (1)...(19): siRNA sense strand
ucucaaagcagaaguggca

SEQ ID NO: 2334844 - RNA, 19 nt, Homo sapiens
  misc_RNA (1)...(19): siRNA sense strand
gggagaugaagauugggaa

SEQ ID NO: 2334845 - RNA, 19 nt, Homo sapiens
  misc_RNA (1)...(19): siRNA sense strand
ggguggagcauguagagau

SEQ ID NO: 2334846 - RNA, 19 nt, Homo sapiens
  misc_RNA (1)...(19): siRNA sense strand
ggauauugaaaaugugcaa

SEQ ID NO: 2334847 - RNA, 19 nt, Homo sapiens
  misc_RNA (1)...(19): siRNA sense strand
ccagaaagggcaagagcac

SEQ ID NO: 2334848 - RNA, 19 nt, Homo sapiens
  misc_RNA (1)...(19): siRNA sense strand
uggcaguggaagugaacga

SEQ ID NO: 2334849 - RNA, 19 nt, Homo sapiens
  misc_RNA (1)...(19): siRNA sense strand
acacuauucuuguggaagu

SEQ ID NO: 2334850 - RNA, 19 nt, Homo sapiens
  misc_RNA (1)...(19): siRNA sense strand
ggauaucauaggcaaagaa

SEQ ID NO: 2334851 - RNA, 19 nt, Homo sapiens
  misc_RNA (1)...(19): siRNA sense strand
uggaaauaauucagaagcu

SEQ ID NO: 2334852 - RNA, 19 nt, Homo sapiens
  misc_RNA (1)...(19): siRNA sense strand
uggcacagguaauggugau

SEQ ID NO: 2334853 - RNA, 19 nt, Homo sapiens
  misc_RNA (1)...(19): siRNA sense strand
gaugaaagaacuauggucu

SEQ ID NO: 2334854 - RNA, 19 nt, Homo sapiens
  misc_RNA (1)...(19): siRNA sense strand
ccagcuucaucaucagaaa

SEQ ID NO: 2334855 - RNA, 19 nt, Homo sapiens
  misc_RNA (1)...(19): siRNA sense strand
agcagaaggaggagaaagu

SEQ ID NO: 2334856 - RNA, 19 nt, Homo sapiens
  misc_RNA (1)...(19): siRNA sense strand
guacauacauuccuggcuu

SEQ ID NO: 2334857 - RNA, 19 nt, Homo sapiens
  misc_RNA (1)...(19): siRNA sense strand
aaauaaugacuuagaccca

SEQ ID NO: 2334858 - RNA, 19 nt, Homo sapiens
  misc_RNA (1)...(19): siRNA sense strand
cggauaaccauuuagcaca

SEQ ID NO: 2334859 - RNA, 19 nt, Homo sapiens
  misc_RNA (1)...(19): siRNA sense strand
ccugcaugguuggaagaaa

SEQ ID NO: 2334860 - RNA, 19 nt, Homo sapiens
  misc_RNA (1)...(19): siRNA sense strand
auaugaugcaugauggaau

SEQ ID NO: 2334861 - RNA, 19 nt, Homo sapiens
  misc_RNA (1)...(19): siRNA sense strand
uggucuuuguugaaacuaa

SEQ ID NO: 2334862 - RNA, 19 nt, Homo sapiens
  misc_RNA (1)...(19): siRNA sense strand
acagagagagcgggagcaa

SEQ ID NO: 2334863 - RNA, 19 nt, Homo sapiens
  misc_RNA (1)...(19): siRNA sense strand
uuugagaaggauagguauu

SEQ ID NO: 2334864 - RNA, 19 nt, Homo sapiens
  misc_RNA (1)...(19): siRNA sense strand
uucuagaagaccaguauua

SEQ ID NO: 2334865 - RNA, 19 nt, Homo sapiens
  misc_RNA (1)...(19): siRNA sense strand
gggacauucaauucgacaa

SEQ ID NO: 2334866 - RNA, 19 nt, Homo sapiens
  misc_RNA (1)...(19): siRNA sense strand
gggaauacuggcagagcaa

SEQ ID NO: 2334867 - RNA, 19 nt, Homo sapiens
  misc_RNA (1)...(19): siRNA sense strand
gaguguaauaagcgagaua

SEQ ID NO: 2334868 - RNA, 19 nt, Homo sapiens
  misc_RNA (1)...(19): siRNA sense strand
aggcauaaacuucgacaaa

SEQ ID NO: 2334869 - RNA, 19 nt, Homo sapiens
  misc_RNA (1)...(19): siRNA sense strand
auacagaagagguggaaga

SEQ ID NO: 2334870 - RNA, 19 nt, Homo sapiens
  misc_RNA (1)...(19): siRNA sense strand
cugcaugguuggaagaaau

SEQ ID NO: 2334871 - RNA, 19 nt, Homo sapiens
  misc_RNA (1)...(19): siRNA sense strand
guguaauaagcgagauaau

SEQ ID NO: 2334872 - RNA, 19 nt, Homo sapiens
  misc_RNA (1)...(19): siRNA sense strand
ucguugaaauucugcgaaa

SEQ ID NO: 2334873 - RNA, 19 nt, Homo sapiens
  misc_RNA (1)...(19): siRNA sense strand
ggacgagauuugauggcuu

SEQ ID NO: 2334874 - RNA, 19 nt, Homo sapiens
  misc_RNA (1)...(19): siRNA sense strand
cgacacuauucuuguggaa

SEQ ID NO: 2334875 - RNA, 19 nt, Homo sapiens
  misc_RNA (1)...(19): siRNA sense strand
gaauacuggcagagcaauu

SEQ ID NO: 2334876 - RNA, 19 nt, Homo sapiens
  misc_RNA (1)...(19): siRNA sense strand
caucaaaggaacagcgcca

SEQ ID NO: 2334877 - RNA, 19 nt, Homo sapiens
  misc_RNA (1)...(19): siRNA sense strand
cagaagagguggaagaggu

SEQ ID NO: 2334878 - RNA, 19 nt, Homo sapiens
  misc_RNA (1)...(19): siRNA sense strand
uggagaaaauggagacaau

SEQ ID NO: 2334879 - RNA, 19 nt, Homo sapiens
  misc_RNA (1)...(19): siRNA sense strand
gauggauaucauaggcaaa

SEQ ID NO: 2334880 - RNA, 19 nt, Homo sapiens
  misc_RNA (1)...(19): siRNA sense strand
cagaaguggcaguggaagu

SEQ ID NO: 2334881 - RNA, 19 nt, Homo sapiens
  misc_RNA (1)...(19): siRNA sense strand
agaagcagaaggaggagaa

SEQ ID NO: 2334882 - RNA, 19 nt, Homo sapiens
  misc_RNA (1)...(19): siRNA sense strand
agaaagggcaagagcacuu

SEQ ID NO: 2334883 - RNA, 19 nt, Homo sapiens
  misc_RNA (1)...(19): siRNA sense strand
cugaauaacaacauugcua

SEQ ID NO: 2334884 - RNA, 19 nt, Homo sapiens
  misc_RNA (1)...(19): siRNA sense strand
gcauguuggauauggguuu

SEQ ID NO: 2334885 - RNA, 19 nt, Homo sapiens
  misc_RNA (1)...(19): siRNA sense strand
ccguggaggauuuggucua

SEQ ID NO: 2334886 - RNA, 19 nt, Homo sapiens
  misc_RNA (1)...(19): siRNA sense strand
aggauuuggucuaggaagu

SEQ ID NO: 2334887 - RNA, 19 nt, Homo sapiens
  misc_RNA (1)...(19): siRNA sense strand
agaagagguggaagaggua

SEQ ID NO: 2334888 - RNA, 19 nt, Homo sapiens
  misc_RNA (1)...(19): siRNA sense strand
cgagauaauacauccacaa

SEQ ID NO: 2334889 - RNA, 19 nt, Homo sapiens
  misc_RNA (1)...(19): siRNA sense strand
ugaaauucugcgaaacaua

SEQ ID NO: 2334890 - RNA, 19 nt, Homo sapiens
  misc_RNA (1)...(19): siRNA sense strand
uaucauacuugcaggacga

SEQ ID NO: 2334891 - RNA, 19 nt, Homo sapiens
  misc_RNA (1)...(19): siRNA sense strand
gcggcuaucgagauggaaa

SEQ ID NO: 2334892 - RNA, 19 nt, Homo sapiens
  misc_RNA (1)...(19): siRNA sense strand
cggcuaucgagauggaaau

SEQ ID NO: 2334893 - RNA, 19 nt, Homo sapiens
  misc_RNA (1)...(19): siRNA sense strand
guugaaauucugcgaaaca

SEQ ID NO: 2334894 - RNA, 19 nt, Homo sapiens
  misc_RNA (1)...(19): siRNA sense strand
gcacauuaucagacaggca

SEQ ID NO: 2334895 - RNA, 19 nt, Homo sapiens
  misc_RNA (1)...(19): siRNA sense strand
guguauuauuguagcacca

SEQ ID NO: 2334896 - RNA, 19 nt, Homo sapiens
  misc_RNA (1)...(19): siRNA sense strand
guguaagagcuguuguuau

SEQ ID NO: 2334897 - RNA, 19 nt, Homo sapiens
  misc_RNA (1)...(19): siRNA sense strand
ucaaaggaacagcgccaaa

SEQ ID NO: 2334898 - RNA, 19 nt, Homo sapiens
  misc_RNA (1)...(19): siRNA sense strand
agaaauugccuuuaguaca

SEQ ID NO: 2334899 - RNA, 19 nt, Homo sapiens
  misc_RNA (1)...(19): siRNA sense strand
cuucagugguaguacaaga

SEQ ID NO: 2334900 - RNA, 19 nt, Homo sapiens
  misc_RNA (1)...(19): siRNA sense strand
agugguaguacaagaggaa

SEQ ID NO: 2334901 - RNA, 19 nt, Homo sapiens
  misc_RNA (1)...(19): siRNA sense strand
acaaauaguacaaggcugu

SEQ ID NO: 2334902 - RNA, 19 nt, Homo sapiens
  misc_RNA (1)...(19): siRNA sense strand
agaaaagauuggucucaaa

SEQ ID NO: 2334903 - RNA, 19 nt, Homo sapiens
  misc_RNA (1)...(19): siRNA sense strand
cuacaaguauucaugguga

SEQ ID NO: 2334904 - RNA, 19 nt, Homo sapiens
  misc_RNA (1)...(19): siRNA sense strand
aggaaugccaucaaaggaa

SEQ ID NO: 2334905 - RNA, 19 nt, Homo sapiens
  misc_RNA (1)...(19): siRNA sense strand
aaacauaggggaugaaaga

SEQ ID NO: 2334906 - RNA, 19 nt, Homo sapiens
  misc_RNA (1)...(19): siRNA sense strand
agaaaagcucguugaaauu

SEQ ID NO: 2334907 - RNA, 19 nt, Homo sapiens
  misc_RNA (1)...(19): siRNA sense strand
gggaacagagagagcggga

SEQ ID NO: 2334908 - RNA, 19 nt, Homo sapiens
  misc_RNA (1)...(19): siRNA sense strand
ggauauggguuuuggucca

SEQ ID NO: 2334909 - RNA, 19 nt, Homo sapiens
  misc_RNA (1)...(19): siRNA sense strand
agaaauggaugauggaccu

SEQ ID NO: 2334910 - RNA, 19 nt, Homo sapiens
  misc_RNA (1)...(19): siRNA sense strand
ucucaaagcagaaguggca

SEQ ID NO: 2334911 - RNA, 19 nt, Homo sapiens
  misc_RNA (1)...(19): siRNA sense strand
gggagaugaagauugggaa

SEQ ID NO: 2334912 - RNA, 19 nt, Homo sapiens
  misc_RNA (1)...(19): siRNA sense strand
ggguggagcauguagagau

SEQ ID NO: 2334913 - RNA, 19 nt, Homo sapiens
  misc_RNA (1)...(19): siRNA sense strand
ggauauugaaaaugugcaa

SEQ ID NO: 2334914 - RNA, 19 nt, Homo sapiens
  misc_RNA (1)...(19): siRNA sense strand
ccagaaagggcaagagcac

SEQ ID NO: 2334915 - RNA, 19 nt, Homo sapiens
  misc_RNA (1)...(19): siRNA sense strand
uggcaguggaagugaacga

SEQ ID NO: 2334916 - RNA, 19 nt, Homo sapiens
  misc_RNA (1)...(19): siRNA sense strand
acacuauucuuguggaagu

SEQ ID NO: 2334917 - RNA, 19 nt, Homo sapiens
  misc_RNA (1)...(19): siRNA sense strand
ggauaucauaggcaaagaa

SEQ ID NO: 2334918 - RNA, 19 nt, Homo sapiens
  misc_RNA (1)...(19): siRNA sense strand
uggaaauaauucagaagcu

SEQ ID NO: 2334919 - RNA, 19 nt, Homo sapiens
  misc_RNA (1)...(19): siRNA sense strand
uggcacagguaauggugau

SEQ ID NO: 2334920 - RNA, 19 nt, Homo sapiens
  misc_RNA (1)...(19): siRNA sense strand
gaugaaagaacuauggucu

SEQ ID NO: 2334921 - RNA, 19 nt, Homo sapiens
  misc_RNA (1)...(19): siRNA sense strand
ccagcuucaucaucagaaa

SEQ ID NO: 2334922 - RNA, 19 nt, Homo sapiens
  misc_RNA (1)...(19): siRNA sense strand
agcagaaggaggagaaagu

SEQ ID NO: 2334923 - RNA, 19 nt, Homo sapiens
  misc_RNA (1)...(19): siRNA sense strand
guacauacauuccuggcuu

SEQ ID NO: 2334924 - RNA, 19 nt, Homo sapiens
  misc_RNA (1)...(19): siRNA sense strand
aaauaaugacuuagaccca

SEQ ID NO: 2334925 - RNA, 19 nt, Homo sapiens
  misc_RNA (1)...(19): siRNA sense strand
cggauaaccauuuagcaca

SEQ ID NO: 2334926 - RNA, 19 nt, Homo sapiens
  misc_RNA (1)...(19): siRNA sense strand
ccugcaugguuggaagaaa

SEQ ID NO: 2334927 - RNA, 19 nt, Homo sapiens
  misc_RNA (1)...(19): siRNA sense strand
auaugaugcaugauggaau

SEQ ID NO: 2334928 - RNA, 19 nt, Homo sapiens
  misc_RNA (1)...(19): siRNA sense strand
uggucuuuguugaaacuaa

SEQ ID NO: 2334929 - RNA, 19 nt, Homo sapiens
  misc_RNA (1)...(19): siRNA sense strand
acagagagagcgggagcaa

SEQ ID NO: 2334930 - RNA, 19 nt, Homo sapiens
  misc_RNA (1)...(19): siRNA sense strand
uuugagaaggauagguauu

SEQ ID NO: 2334931 - RNA, 19 nt, Homo sapiens
  misc_RNA (1)...(19): siRNA sense strand
uucuagaagaccaguauua

SEQ ID NO: 2334932 - RNA, 19 nt, Homo sapiens
  misc_RNA (1)...(19): siRNA sense strand
gggacauucaauucgacaa

SEQ ID NO: 2334933 - RNA, 19 nt, Homo sapiens
  misc_RNA (1)...(19): siRNA sense strand
ggucaaagaucaacggcua

SEQ ID NO: 2334934 - RNA, 19 nt, Homo sapiens
  misc_RNA (1)...(19): siRNA sense strand
acaagacacacuagagaaa

SEQ ID NO: 2334935 - RNA, 19 nt, Homo sapiens
  misc_RNA (1)...(19): siRNA sense strand
uggugcaacuaaagggaaa

SEQ ID NO: 2334936 - RNA, 19 nt, Homo sapiens
  misc_RNA (1)...(19): siRNA sense strand
aagcauuuguagaggaaaa

SEQ ID NO: 2334937 - RNA, 19 nt, Homo sapiens
  misc_RNA (1)...(19): siRNA sense strand
aagcaugcacaaagagaua

SEQ ID NO: 2334938 - RNA, 19 nt, Homo sapiens
  misc_RNA (1)...(19): siRNA sense strand
cgucaacugcagauggaua

SEQ ID NO: 2334939 - RNA, 19 nt, Homo sapiens
  misc_RNA (1)...(19): siRNA sense strand
gugaaaagcaggaagaaga

SEQ ID NO: 2334940 - RNA, 19 nt, Homo sapiens
  misc_RNA (1)...(19): siRNA sense strand
gcgccauuugcuagagaua

SEQ ID NO: 2334941 - RNA, 19 nt, Homo sapiens
  misc_RNA (1)...(19): siRNA sense strand
aaggaguacaggaguaaua

SEQ ID NO: 2334942 - RNA, 19 nt, Homo sapiens
  misc_RNA (1)...(19): siRNA sense strand
ggcaaugguuuaagguaca

SEQ ID NO: 2334943 - RNA, 19 nt, Homo sapiens
  misc_RNA (1)...(19): siRNA sense strand
cggccaagcugcaacaaaa

SEQ ID NO: 2334944 - RNA, 19 nt, Homo sapiens
  misc_RNA (1)...(19): siRNA sense strand
uugcaauauuacuggguau

SEQ ID NO: 2334945 - RNA, 19 nt, Homo sapiens
  misc_RNA (1)...(19): siRNA sense strand
ggguagaggaugaaaauga

SEQ ID NO: 2334946 - RNA, 19 nt, Homo sapiens
  misc_RNA (1)...(19): siRNA sense strand
agagauauucccagaguga

SEQ ID NO: 2334947 - RNA, 19 nt, Homo sapiens
  misc_RNA (1)...(19): siRNA sense strand
agauauucccagagugaca

SEQ ID NO: 2334948 - RNA, 19 nt, Homo sapiens
  misc_RNA (1)...(19): siRNA sense strand
gcccaauaugugcggauua

SEQ ID NO: 2334949 - RNA, 19 nt, Homo sapiens
  misc_RNA (1)...(19): siRNA sense strand
aguccuggcaauagacaaa

SEQ ID NO: 2334950 - RNA, 19 nt, Homo sapiens
  misc_RNA (1)...(19): siRNA sense strand
ggcaauagacaaagaugau

SEQ ID NO: 2334951 - RNA, 19 nt, Homo sapiens
  misc_RNA (1)...(19): siRNA sense strand
cgaaaauagaaauggcaau

SEQ ID NO: 2334952 - RNA, 19 nt, Homo sapiens
  misc_RNA (1)...(19): siRNA sense strand
agaguuaaucugugugaau

SEQ ID NO: 2334953 - RNA, 19 nt, Homo sapiens
  misc_RNA (1)...(19): siRNA sense strand
uagaaagagacacuggaaa

SEQ ID NO: 2334954 - RNA, 19 nt, Homo sapiens
  misc_RNA (1)...(19): siRNA sense strand
uguggaaaucuuacgaaua

SEQ ID NO: 2334955 - RNA, 19 nt, Homo sapiens
  misc_RNA (1)...(19): siRNA sense strand
caaaaucagcacagacaaa

SEQ ID NO: 2334956 - RNA, 19 nt, Homo sapiens
  misc_RNA (1)...(19): siRNA sense strand
agaagauggccuugacuuu

SEQ ID NO: 2334957 - RNA, 19 nt, Homo sapiens
  misc_RNA (1)...(19): siRNA sense strand
ugcuagaacaucagaagaa

SEQ ID NO: 2334958 - RNA, 19 nt, Homo sapiens
  misc_RNA (1)...(19): siRNA sense strand
gccuguggaucgugaagaa

SEQ ID NO: 2334959 - RNA, 19 nt, Homo sapiens
  misc_RNA (1)...(19): siRNA sense strand
cgugcgacuucaaggagua

SEQ ID NO: 2334960 - RNA, 19 nt, Homo sapiens
  misc_RNA (1)...(19): siRNA sense strand
cgucaagugaaccuggaaa

SEQ ID NO: 2334961 - RNA, 19 nt, Homo sapiens
  misc_RNA (1)...(19): siRNA sense strand
agacaaaauaauuggcaga

SEQ ID NO: 2334962 - RNA, 19 nt, Homo sapiens
  misc_RNA (1)...(19): siRNA sense strand
uggacguggaguugauaaa

SEQ ID NO: 2334963 - RNA, 19 nt, Homo sapiens
  misc_RNA (1)...(19): siRNA sense strand
ccuaaagguuggaucacca

SEQ ID NO: 2334964 - RNA, 19 nt, Homo sapiens
  misc_RNA (1)...(19): siRNA sense strand
aaugauaauccaccagaaa

SEQ ID NO: 2334965 - RNA, 19 nt, Homo sapiens
  misc_RNA (1)...(19): siRNA sense strand
uggcaauagacaaagauga

SEQ ID NO: 2334966 - RNA, 19 nt, Homo sapiens
  misc_RNA (1)...(19): siRNA sense strand
acuuauaacuaugagggaa

SEQ ID NO: 2334967 - RNA, 19 nt, Homo sapiens
  misc_RNA (1)...(19): siRNA sense strand
cuguggaucgugaagaaua

SEQ ID NO: 2334968 - RNA, 19 nt, Homo sapiens
  misc_RNA (1)...(19): siRNA sense strand
uggaaauuggaguaaacaa

SEQ ID NO: 2334969 - RNA, 19 nt, Homo sapiens
  misc_RNA (1)...(19): siRNA sense strand
uggcaaugguuuaagguac

SEQ ID NO: 2334970 - RNA, 19 nt, Homo sapiens
  misc_RNA (1)...(19): siRNA sense strand
gcagaguuaauuuggaaga

SEQ ID NO: 2334971 - RNA, 19 nt, Homo sapiens
  misc_RNA (1)...(19): siRNA sense strand
aauaaguggacguggaguu

SEQ ID NO: 2334972 - RNA, 19 nt, Homo sapiens
  misc_RNA (1)...(19): siRNA sense strand
ggauagggagguugaaacu

SEQ ID NO: 2334973 - RNA, 19 nt, Homo sapiens
  misc_RNA (1)...(19): siRNA sense strand
guaucgaagacaagacaca

SEQ ID NO: 2334974 - RNA, 19 nt, Homo sapiens
  misc_RNA (1)...(19): siRNA sense strand
acguggaguugauaaagaa

SEQ ID NO: 2334975 - RNA, 19 nt, Homo sapiens
  misc_RNA (1)...(19): siRNA sense strand
gggaaaugaaaauggacau

SEQ ID NO: 2334976 - RNA, 19 nt, Homo sapiens
  misc_RNA (1)...(19): siRNA sense strand
augcuggauuucaagaaua

SEQ ID NO: 2334977 - RNA, 19 nt, Homo sapiens
  misc_RNA (1)...(19): siRNA sense strand
gaacacuugcugugaacau

SEQ ID NO: 2334978 - RNA, 19 nt, Homo sapiens
  misc_RNA (1)...(19): siRNA sense strand
gcaccuauuccuugcucua

SEQ ID NO: 2334979 - RNA, 19 nt, Homo sapiens
  misc_RNA (1)...(19): siRNA sense strand
cauaacaguaacagauuca

SEQ ID NO: 2334980 - RNA, 19 nt, Homo sapiens
  misc_RNA (1)...(19): siRNA sense strand
ccuauagaagauaaggauu

SEQ ID NO: 2334981 - RNA, 19 nt, Homo sapiens
  misc_RNA (1)...(19): siRNA sense strand
cagcacagacaaagaaacu

SEQ ID NO: 2334982 - RNA, 19 nt, Homo sapiens
  misc_RNA (1)...(19): siRNA sense strand
ccuggaaauuggaguaaac

SEQ ID NO: 2334983 - RNA, 19 nt, Homo sapiens
  misc_RNA (1)...(19): siRNA sense strand
agacaagacacacuagaga

SEQ ID NO: 2334984 - RNA, 19 nt, Homo sapiens
  misc_RNA (1)...(19): siRNA sense strand
acacagaagcaccuggaga

SEQ ID NO: 2334985 - RNA, 19 nt, Homo sapiens
  misc_RNA (1)...(19): siRNA sense strand
uguggaucgugaagaauau

SEQ ID NO: 2334986 - RNA, 19 nt, Homo sapiens
  misc_RNA (1)...(19): siRNA sense strand
aguaaacaaugaagcgcca

SEQ ID NO: 2334987 - RNA, 19 nt, Homo sapiens
  misc_RNA (1)...(19): siRNA sense strand
uucaaggaguacaggagua

SEQ ID NO: 2334988 - RNA, 19 nt, Homo sapiens
  misc_RNA (1)...(19): siRNA sense strand
ucaaggaguacaggaguaa

SEQ ID NO: 2334989 - RNA, 19 nt, Homo sapiens
  misc_RNA (1)...(19): siRNA sense strand
agaaacuaaugaagguguu

SEQ ID NO: 2334990 - RNA, 19 nt, Homo sapiens
  misc_RNA (1)...(19): siRNA sense strand
agaagaagguaucgaagac

SEQ ID NO: 2334991 - RNA, 19 nt, Homo sapiens
  misc_RNA (1)...(19): siRNA sense strand
ggucaaagaucaacggcua

SEQ ID NO: 2334992 - RNA, 19 nt, Homo sapiens
  misc_RNA (1)...(19): siRNA sense strand
acaagacacacuagagaaa

SEQ ID NO: 2334993 - RNA, 19 nt, Homo sapiens
  misc_RNA (1)...(19): siRNA sense strand
uggugcaacuaaagggaaa

SEQ ID NO: 2334994 - RNA, 19 nt, Homo sapiens
  misc_RNA (1)...(19): siRNA sense strand
aagcauuuguagaggaaaa

SEQ ID NO: 2334995 - RNA, 19 nt, Homo sapiens
  misc_RNA (1)...(19): siRNA sense strand
cgucaacugcagauggaua

SEQ ID NO: 2334996 - RNA, 19 nt, Homo sapiens
  misc_RNA (1)...(19): siRNA sense strand
gcgccauuugcuagagaua

SEQ ID NO: 2334997 - RNA, 19 nt, Homo sapiens
  misc_RNA (1)...(19): siRNA sense strand
aaggaguacaggaguaaua

SEQ ID NO: 2334998 - RNA, 19 nt, Homo sapiens
  misc_RNA (1)...(19): siRNA sense strand
ggcaaugguuuaagguaca

SEQ ID NO: 2334999 - RNA, 19 nt, Homo sapiens
  misc_RNA (1)...(19): siRNA sense strand
cggccaagcugcaacaaaa

SEQ ID NO: 2335000 - RNA, 19 nt, Homo sapiens
  misc_RNA (1)...(19): siRNA sense strand
uugcaauauuacuggguau

SEQ ID NO: 2335001 - RNA, 19 nt, Homo sapiens
  misc_RNA (1)...(19): siRNA sense strand
ggguagaggaugaaaauga

SEQ ID NO: 2335002 - RNA, 19 nt, Homo sapiens
  misc_RNA (1)...(19): siRNA sense strand
agagauauucccagaguga

SEQ ID NO: 2335003 - RNA, 19 nt, Homo sapiens
  misc_RNA (1)...(19): siRNA sense strand
agauauucccagagugaca

SEQ ID NO: 2335004 - RNA, 19 nt, Homo sapiens
  misc_RNA (1)...(19): siRNA sense strand
gcccaauaugugcggauua

SEQ ID NO: 2335005 - RNA, 19 nt, Homo sapiens
  misc_RNA (1)...(19): siRNA sense strand
aguccuggcaauagacaaa

SEQ ID NO: 2335006 - RNA, 19 nt, Homo sapiens
  misc_RNA (1)...(19): siRNA sense strand
ggcaauagacaaagaugau

SEQ ID NO: 2335007 - RNA, 19 nt, Homo sapiens
  misc_RNA (1)...(19): siRNA sense strand
cgaaaauagaaauggcaau

SEQ ID NO: 2335008 - RNA, 19 nt, Homo sapiens
  misc_RNA (1)...(19): siRNA sense strand
agaguuaaucugugugaau

SEQ ID NO: 2335009 - RNA, 19 nt, Homo sapiens
  misc_RNA (1)...(19): siRNA sense strand
uagaaagagacacuggaaa

SEQ ID NO: 2335010 - RNA, 19 nt, Homo sapiens
  misc_RNA (1)...(19): siRNA sense strand
uguggaaaucuuacgaaua

SEQ ID NO: 2335011 - RNA, 19 nt, Homo sapiens
  misc_RNA (1)...(19): siRNA sense strand
caaaaucagcacagacaaa

SEQ ID NO: 2335012 - RNA, 19 nt, Homo sapiens
  misc_RNA (1)...(19): siRNA sense strand
ugcuagaacaucagaagaa

SEQ ID NO: 2335013 - RNA, 19 nt, Homo sapiens
  misc_RNA (1)...(19): siRNA sense strand
gccuguggaucgugaagaa

SEQ ID NO: 2335014 - RNA, 19 nt, Homo sapiens
  misc_RNA (1)...(19): siRNA sense strand
cgugcgacuucaaggagua

SEQ ID NO: 2335015 - RNA, 19 nt, Homo sapiens
  misc_RNA (1)...(19): siRNA sense strand
cgucaagugaaccuggaaa

SEQ ID NO: 2335016 - RNA, 19 nt, Homo sapiens
  misc_RNA (1)...(19): siRNA sense strand
agacaaaauaauuggcaga

SEQ ID NO: 2335017 - RNA, 19 nt, Homo sapiens
  misc_RNA (1)...(19): siRNA sense strand
uggacguggaguugauaaa

SEQ ID NO: 2335018 - RNA, 19 nt, Homo sapiens
  misc_RNA (1)...(19): siRNA sense strand
ccuaaagguuggaucacca

SEQ ID NO: 2335019 - RNA, 19 nt, Homo sapiens
  misc_RNA (1)...(19): siRNA sense strand
aaugauaauccaccagaaa

SEQ ID NO: 2335020 - RNA, 19 nt, Homo sapiens
  misc_RNA (1)...(19): siRNA sense strand
uggcaauagacaaagauga

SEQ ID NO: 2335021 - RNA, 19 nt, Homo sapiens
  misc_RNA (1)...(19): siRNA sense strand
cuguggaucgugaagaaua

SEQ ID NO: 2335022 - RNA, 19 nt, Homo sapiens
  misc_RNA (1)...(19): siRNA sense strand
uggaaauuggaguaaacaa

SEQ ID NO: 2335023 - RNA, 19 nt, Homo sapiens
  misc_RNA (1)...(19): siRNA sense strand
uggcaaugguuuaagguac

SEQ ID NO: 2335024 - RNA, 19 nt, Homo sapiens
  misc_RNA (1)...(19): siRNA sense strand
gcagaguuaauuuggaaga

SEQ ID NO: 2335025 - RNA, 19 nt, Homo sapiens
  misc_RNA (1)...(19): siRNA sense strand
aauaaguggacguggaguu

SEQ ID NO: 2335026 - RNA, 19 nt, Homo sapiens
  misc_RNA (1)...(19): siRNA sense strand
ggauagggagguugaaacu

SEQ ID NO: 2335027 - RNA, 19 nt, Homo sapiens
  misc_RNA (1)...(19): siRNA sense strand
guaucgaagacaagacaca

SEQ ID NO: 2335028 - RNA, 19 nt, Homo sapiens
  misc_RNA (1)...(19): siRNA sense strand
acguggaguugauaaagaa

SEQ ID NO: 2335029 - RNA, 19 nt, Homo sapiens
  misc_RNA (1)...(19): siRNA sense strand
gggaaaugaaaauggacau

SEQ ID NO: 2335030 - RNA, 19 nt, Homo sapiens
  misc_RNA (1)...(19): siRNA sense strand
augcuggauuucaagaaua

SEQ ID NO: 2335031 - RNA, 19 nt, Homo sapiens
  misc_RNA (1)...(19): siRNA sense strand
gaacacuugcugugaacau

SEQ ID NO: 2335032 - RNA, 19 nt, Homo sapiens
  misc_RNA (1)...(19): siRNA sense strand
gcaccuauuccuugcucua

SEQ ID NO: 2335033 - RNA, 19 nt, Homo sapiens
  misc_RNA (1)...(19): siRNA sense strand
cauaacaguaacagauuca

SEQ ID NO: 2335034 - RNA, 19 nt, Homo sapiens
  misc_RNA (1)...(19): siRNA sense strand
ccuauagaagauaaggauu

SEQ ID NO: 2335035 - RNA, 19 nt, Homo sapiens
  misc_RNA (1)...(19): siRNA sense strand
cagcacagacaaagaaacu

SEQ ID NO: 2335036 - RNA, 19 nt, Homo sapiens
  misc_RNA (1)...(19): siRNA sense strand
ccuggaaauuggaguaaac

SEQ ID NO: 2335037 - RNA, 19 nt, Homo sapiens
  misc_RNA (1)...(19): siRNA sense strand
agacaagacacacuagaga

SEQ ID NO: 2335038 - RNA, 19 nt, Homo sapiens
  misc_RNA (1)...(19): siRNA sense strand
acacagaagcaccuggaga

SEQ ID NO: 2335039 - RNA, 19 nt, Homo sapiens
  misc_RNA (1)...(19): siRNA sense strand
uguggaucgugaagaauau

SEQ ID NO: 2335040 - RNA, 19 nt, Homo sapiens
  misc_RNA (1)...(19): siRNA sense strand
aguaaacaaugaagcgcca

SEQ ID NO: 2335041 - RNA, 19 nt, Homo sapiens
  misc_RNA (1)...(19): siRNA sense strand
uucaaggaguacaggagua

SEQ ID NO: 2335042 - RNA, 19 nt, Homo sapiens
  misc_RNA (1)...(19): siRNA sense strand
ucaaggaguacaggaguaa

SEQ ID NO: 2335043 - RNA, 19 nt, Homo sapiens
  misc_RNA (1)...(19): siRNA sense strand
agaaacuaaugaagguguu

SEQ ID NO: 2335044 - RNA, 19 nt, Homo sapiens
  misc_RNA (1)...(19): siRNA sense strand
agaagaagguaucgaagac

SEQ ID NO: 2335045 - RNA, 19 nt, Homo sapiens
  misc_RNA (1)...(19): siRNA sense strand
gucaagugaaccuggaaau

SEQ ID NO: 2335046 - RNA, 19 nt, Homo sapiens
  misc_RNA (1)...(19): siRNA sense strand
ugaaaugaugaaaggagga

SEQ ID NO: 2335047 - RNA, 19 nt, Homo sapiens
  misc_RNA (1)...(19): siRNA sense strand
aagacacacuagagaaacu

SEQ ID NO: 2335048 - RNA, 19 nt, Homo sapiens
  misc_RNA (1)...(19): siRNA sense strand
cucaauaaguggacgugga

SEQ ID NO: 2335049 - RNA, 19 nt, Homo sapiens
  misc_RNA (1)...(19): siRNA sense strand
ccgaaaauagaaauggcaa

SEQ ID NO: 2335050 - RNA, 19 nt, Homo sapiens
  misc_RNA (1)...(19): siRNA sense strand
ucgaaauggacuugagaaa

SEQ ID NO: 2335051 - RNA, 19 nt, Homo sapiens
  misc_RNA (1)...(19): siRNA sense strand
aggaagaugaugagacuaa

SEQ ID NO: 2335052 - RNA, 19 nt, Homo sapiens
  misc_RNA (1)...(19): siRNA sense strand
gcgcagaagacauggaaaa

SEQ ID NO: 2335053 - RNA, 19 nt, Homo sapiens
  misc_RNA (1)...(19): siRNA sense strand
gagcaaaggcaguggagca

SEQ ID NO: 2335054 - RNA, 19 nt, Homo sapiens
  misc_RNA (1)...(19): siRNA sense strand
ccauagaaaguuugagauu

SEQ ID NO: 2335055 - RNA, 19 nt, Homo sapiens
  misc_RNA (1)...(19): siRNA sense strand
uggcagugauagaggauuu

SEQ ID NO: 2335056 - RNA, 19 nt, Homo sapiens
  misc_RNA (1)...(19): siRNA sense strand
ccuuagaguuucauagaca

SEQ ID NO: 2335057 - RNA, 19 nt, Homo sapiens
  misc_RNA (1)...(19): siRNA sense strand
caucaauggaaacaagaaa

SEQ ID NO: 2335058 - RNA, 19 nt, Homo sapiens
  misc_RNA (1)...(19): siRNA sense strand
gaguuuagcuccauggaca

SEQ ID NO: 2335059 - RNA, 19 nt, Homo sapiens
  misc_RNA (1)...(19): siRNA sense strand
ugggaauauuagagaacuu

SEQ ID NO: 2335060 - RNA, 19 nt, Homo sapiens
  misc_RNA (1)...(19): siRNA sense strand
auaucaaagaccaaggaaa

SEQ ID NO: 2335061 - RNA, 19 nt, Homo sapiens
  misc_RNA (1)...(19): siRNA sense strand
agucaagagugaagaaauc

SEQ ID NO: 2335062 - RNA, 19 nt, Homo sapiens
  misc_RNA (1)...(19): siRNA sense strand
gagaaagcagccagggaga

SEQ ID NO: 2335063 - RNA, 19 nt, Homo sapiens
  misc_RNA (1)...(19): siRNA sense strand
ggacuuucucuuugggaau

SEQ ID NO: 2335064 - RNA, 19 nt, Homo sapiens
  misc_RNA (1)...(19): siRNA sense strand
ggacgauauuggaaaacua

SEQ ID NO: 2335065 - RNA, 19 nt, Homo sapiens
  misc_RNA (1)...(19): siRNA sense strand
gguggagauaauagaacaa

SEQ ID NO: 2335066 - RNA, 19 nt, Homo sapiens
  misc_RNA (1)...(19): siRNA sense strand
uggauaauuugcuggaaga

SEQ ID NO: 2335067 - RNA, 19 nt, Homo sapiens
  misc_RNA (1)...(19): siRNA sense strand
aaacccagccagaggcaaa

SEQ ID NO: 2335068 - RNA, 19 nt, Homo sapiens
  misc_RNA (1)...(19): siRNA sense strand
ggaaagguuauuaguucaa

SEQ ID NO: 2335069 - RNA, 19 nt, Homo sapiens
  misc_RNA (1)...(19): siRNA sense strand
ggaugauguccaggaaaua

SEQ ID NO: 2335070 - RNA, 19 nt, Homo sapiens
  misc_RNA (1)...(19): siRNA sense strand
cgacagacgaagagacaag

SEQ ID NO: 2335071 - RNA, 19 nt, Homo sapiens
  misc_RNA (1)...(19): siRNA sense strand
ggggaauaguguucuguaa

SEQ ID NO: 2335072 - RNA, 19 nt, Homo sapiens
  misc_RNA (1)...(19): siRNA sense strand
cggcuaaggaugggccaaa

SEQ ID NO: 2335073 - RNA, 19 nt, Homo sapiens
  misc_RNA (1)...(19): siRNA sense strand
cgguggagauaauagaaca

SEQ ID NO: 2335074 - RNA, 19 nt, Homo sapiens
  misc_RNA (1)...(19): siRNA sense strand
ggggaaaggaagaugauga

SEQ ID NO: 2335075 - RNA, 19 nt, Homo sapiens
  misc_RNA (1)...(19): siRNA sense strand
agcugaaauuacuuggaaa

SEQ ID NO: 2335076 - RNA, 19 nt, Homo sapiens
  misc_RNA (1)...(19): siRNA sense strand
uggaaagguuauuaguuca

SEQ ID NO: 2335077 - RNA, 19 nt, Homo sapiens
  misc_RNA (1)...(19): siRNA sense strand
aggccaaagcccagaaagu

SEQ ID NO: 2335078 - RNA, 19 nt, Homo sapiens
  misc_RNA (1)...(19): siRNA sense strand
cgauuuaaacccagccaga

SEQ ID NO: 2335079 - RNA, 19 nt, Homo sapiens
  misc_RNA (1)...(19): siRNA sense strand
agaacaacuucacagacaa

SEQ ID NO: 2335080 - RNA, 19 nt, Homo sapiens
  misc_RNA (1)...(19): siRNA sense strand
ucugagaacgucugaggaa

SEQ ID NO: 2335081 - RNA, 19 nt, Homo sapiens
  misc_RNA (1)...(19): siRNA sense strand
ggaaaagugugcugagaac

SEQ ID NO: 2335082 - RNA, 19 nt, Homo sapiens
  misc_RNA (1)...(19): siRNA sense strand
cugaauguccggacgauau

SEQ ID NO: 2335083 - RNA, 19 nt, Homo sapiens
  misc_RNA (1)...(19): siRNA sense strand
ugagauugccagucgaaau

SEQ ID NO: 2335084 - RNA, 19 nt, Homo sapiens
  misc_RNA (1)...(19): siRNA sense strand
ugauggcgguggagauaau

SEQ ID NO: 2335085 - RNA, 19 nt, Homo sapiens
  misc_RNA (1)...(19): siRNA sense strand
caggaaacuuacagcucau

SEQ ID NO: 2335086 - RNA, 19 nt, Homo sapiens
  misc_RNA (1)...(19): siRNA sense strand
caacuggaugaaacagaaa

SEQ ID NO: 2335087 - RNA, 19 nt, Homo sapiens
  misc_RNA (1)...(19): siRNA sense strand
ggaccuagcagcagugacu

SEQ ID NO: 2335088 - RNA, 19 nt, Homo sapiens
  misc_RNA (1)...(19): siRNA sense strand
aagucaagagugaagaaau

SEQ ID NO: 2335089 - RNA, 19 nt, Homo sapiens
  misc_RNA (1)...(19): siRNA sense strand
uuugaaagccaucaugaaa

SEQ ID NO: 2335090 - RNA, 19 nt, Homo sapiens
  misc_RNA (1)...(19): siRNA sense strand
cgaaauggacuugagaaau

SEQ ID NO: 2335091 - RNA, 19 nt, Homo sapiens
  misc_RNA (1)...(19): siRNA sense strand
gggagaaagcagccaggga

SEQ ID NO: 2335092 - RNA, 19 nt, Homo sapiens
  misc_RNA (1)...(19): siRNA sense strand
gugccgaucaucaugguaa

SEQ ID NO: 2335093 - RNA, 19 nt, Homo sapiens
  misc_RNA (1)...(19): siRNA sense strand
ccugauggcgguggagaua

SEQ ID NO: 2335094 - RNA, 19 nt, Homo sapiens
  misc_RNA (1)...(19): siRNA sense strand
aagaagaccaugaagcuga

SEQ ID NO: 2335095 - RNA, 19 nt, Homo sapiens
  misc_RNA (1)...(19): siRNA sense strand
gugaaggcgcagaagacau

SEQ ID NO: 2335096 - RNA, 19 nt, Homo sapiens
  misc_RNA (1)...(19): siRNA sense strand
acacaaggcagcgggacaa

SEQ ID NO: 2335097 - RNA, 19 nt, Homo sapiens
  misc_RNA (1)...(19): siRNA sense strand
aagcagaguuuacaggcau

SEQ ID NO: 2335098 - RNA, 19 nt, Homo sapiens
  misc_RNA (1)...(19): siRNA sense strand
cacacaaggcagcgggaca

SEQ ID NO: 2335099 - RNA, 19 nt, Homo sapiens
  misc_RNA (1)...(19): siRNA sense strand
gagcagauucuuaaggaac

SEQ ID NO: 2335100 - RNA, 19 nt, Homo sapiens
  misc_RNA (1)...(19): siRNA sense strand
gaagaugaugagacuaaau

SEQ ID NO: 2335101 - RNA, 19 nt, Homo sapiens
  misc_RNA (1)...(19): siRNA sense strand
caaucuggcaagaguguca

SEQ ID NO: 2335102 - RNA, 19 nt, Homo sapiens
  misc_RNA (1)...(19): siRNA sense strand
aaggaugggccaaagagaa

SEQ ID NO: 2335103 - RNA, 19 nt, Homo sapiens
  misc_RNA (1)...(19): siRNA sense strand
cgaaagugccgaucaucau

SEQ ID NO: 2335104 - RNA, 19 nt, Homo sapiens
  misc_RNA (1)...(19): siRNA sense strand
ucucugaccuucacggcua

SEQ ID NO: 2335105 - RNA, 19 nt, Homo sapiens
  misc_RNA (1)...(19): siRNA sense strand
gcugaaauuacuuggaaag

SEQ ID NO: 2335106 - RNA, 19 nt, Homo sapiens
  misc_RNA (1)...(19): siRNA sense strand
acaagaggcaagugagucu

SEQ ID NO: 2335107 - RNA, 19 nt, Homo sapiens
  misc_RNA (1)...(19): siRNA sense strand
ccacauacaucuuugggaa

SEQ ID NO: 2335108 - RNA, 19 nt, Homo sapiens
  misc_RNA (1)...(19): siRNA sense strand
caguacuggaggagaguua

SEQ ID NO: 2335109 - RNA, 19 nt, Homo sapiens
  misc_RNA (1)...(19): siRNA sense strand
ccauaguaagcgacggcaa

SEQ ID NO: 2335110 - RNA, 19 nt, Homo sapiens
  misc_RNA (1)...(19): siRNA sense strand
gccaagaagaacaaagaca

SEQ ID NO: 2335111 - RNA, 19 nt, Homo sapiens
  misc_RNA (1)...(19): siRNA sense strand
gcuccuaccagguggacca

SEQ ID NO: 2335112 - RNA, 19 nt, Homo sapiens
  misc_RNA (1)...(19): siRNA sense strand
aggccaagaagaacaaaga

SEQ ID NO: 2335113 - RNA, 19 nt, Homo sapiens
  misc_RNA (1)...(19): siRNA sense strand
gagaguuaauauugcccau

SEQ ID NO: 2335114 - RNA, 19 nt, Homo sapiens
  misc_RNA (1)...(19): siRNA sense strand
ccauguauaaguaccgcaa

SEQ ID NO: 2335115 - RNA, 19 nt, Homo sapiens
  misc_RNA (1)...(19): siRNA sense strand
ccacauacaucuuugggaa

SEQ ID NO: 2335116 - RNA, 19 nt, Homo sapiens
  misc_RNA (1)...(19): siRNA sense strand
caguacuggaggagaguua

SEQ ID NO: 2335117 - RNA, 19 nt, Homo sapiens
  misc_RNA (1)...(19): siRNA sense strand
ccauaguaagcgacggcaa

SEQ ID NO: 2335118 - RNA, 19 nt, Homo sapiens
  misc_RNA (1)...(19): siRNA sense strand
gccaagaagaacaaagaca

SEQ ID NO: 2335119 - RNA, 19 nt, Homo sapiens
  misc_RNA (1)...(19): siRNA sense strand
gcuccuaccagguggacca

SEQ ID NO: 2335120 - RNA, 19 nt, Homo sapiens
  misc_RNA (1)...(19): siRNA sense strand
aggccaagaagaacaaaga

SEQ ID NO: 2335121 - RNA, 19 nt, Homo sapiens
  misc_RNA (1)...(19): siRNA sense strand
gagaguuaauauugcccau

SEQ ID NO: 2335122 - RNA, 19 nt, Homo sapiens
  misc_RNA (1)...(19): siRNA sense strand
ccauguauaaguaccgcaa

SEQ ID NO: 2335123 - RNA, 19 nt, Homo sapiens
  misc_RNA (1)...(19): siRNA sense strand
ccacauacaucuuugggaa

SEQ ID NO: 2335124 - RNA, 19 nt, Homo sapiens
  misc_RNA (1)...(19): siRNA sense strand
caguacuggaggagaguua

SEQ ID NO: 2335125 - RNA, 19 nt, Homo sapiens
  misc_RNA (1)...(19): siRNA sense strand
ccauaguaagcgacggcaa

SEQ ID NO: 2335126 - RNA, 19 nt, Homo sapiens
  misc_RNA (1)...(19): siRNA sense strand
gccaagaagaacaaagaca

SEQ ID NO: 2335127 - RNA, 19 nt, Homo sapiens
  misc_RNA (1)...(19): siRNA sense strand
gcuccuaccagguggacca

SEQ ID NO: 2335128 - RNA, 19 nt, Homo sapiens
  misc_RNA (1)...(19): siRNA sense strand
aggccaagaagaacaaaga

SEQ ID NO: 2335129 - RNA, 19 nt, Homo sapiens
  misc_RNA (1)...(19): siRNA sense strand
gagaguuaauauugcccau

SEQ ID NO: 2335130 - RNA, 19 nt, Homo sapiens
  misc_RNA (1)...(19): siRNA sense strand
ccauguauaaguaccgcaa

SEQ ID NO: 2335131 - RNA, 19 nt, Homo sapiens
  misc_RNA (1)...(19): siRNA sense strand
aggacuagauggagcaaaa

SEQ ID NO: 2335132 - RNA, 19 nt, Homo sapiens
  misc_RNA (1)...(19): siRNA sense strand
agaaaggcuuccagggaga

SEQ ID NO: 2335133 - RNA, 19 nt, Homo sapiens
  misc_RNA (1)...(19): siRNA sense strand
ccauugggcuggacggcaa

SEQ ID NO: 2335134 - RNA, 19 nt, Homo sapiens
  misc_RNA (1)...(19): siRNA sense strand
cgguaaaccaggagacaug

SEQ ID NO: 2335135 - RNA, 19 nt, Homo sapiens
  misc_RNA (1)...(19): siRNA sense strand
ggaaaggagagauggugga

SEQ ID NO: 2335136 - RNA, 19 nt, Homo sapiens
  misc_RNA (1)...(19): siRNA sense strand
acccagggauccagggcua

SEQ ID NO: 2335137 - RNA, 19 nt, Homo sapiens
  misc_RNA (1)...(19): siRNA sense strand
uggaggaggcagaggggaa

SEQ ID NO: 2335138 - RNA, 19 nt, Homo sapiens
  misc_RNA (1)...(19): siRNA sense strand
ggggcagaagggagagaaa

SEQ ID NO: 2335139 - RNA, 19 nt, Homo sapiens
  misc_RNA (1)...(19): siRNA sense strand
gggucaguguggagaguac

SEQ ID NO: 2335140 - RNA, 19 nt, Homo sapiens
  misc_RNA (1)...(19): siRNA sense strand
uggcugggaugaaggguga

SEQ ID NO: 2335141 - RNA, 19 nt, Homo sapiens
  misc_RNA (1)...(19): siRNA sense strand
uggagcaaaaggagagaaa

SEQ ID NO: 2335142 - RNA, 19 nt, Homo sapiens
  misc_RNA (1)...(19): siRNA sense strand
ccaagguguuccuggacca

SEQ ID NO: 2335143 - RNA, 19 nt, Homo sapiens
  misc_RNA (1)...(19): siRNA sense strand
agaaaggcgaugcuggcaa

SEQ ID NO: 2335144 - RNA, 19 nt, Homo sapiens
  misc_RNA (1)...(19): siRNA sense strand
ugguggauuacaauggaaa

SEQ ID NO: 2335145 - RNA, 19 nt, Homo sapiens
  misc_RNA (1)...(19): siRNA sense strand
ccaggagugaagggagaaa

SEQ ID NO: 2335146 - RNA, 19 nt, Homo sapiens
  misc_RNA (1)...(19): siRNA sense strand
caaaggagacccugggaug

SEQ ID NO: 2335147 - RNA, 19 nt, Homo sapiens
  misc_RNA (1)...(19): siRNA sense strand
ucaaucaacugcuggacga

SEQ ID NO: 2335148 - RNA, 19 nt, Homo sapiens
  misc_RNA (1)...(19): siRNA sense strand
agagaaaggcuuccaggga

SEQ ID NO: 2335149 - RNA, 19 nt, Homo sapiens
  misc_RNA (1)...(19): siRNA sense strand
gaaaagggaccucgcggua

SEQ ID NO: 2335150 - RNA, 19 nt, Homo sapiens
  misc_RNA (1)...(19): siRNA sense strand
aggacuagauggagcaaaa

SEQ ID NO: 2335151 - RNA, 19 nt, Homo sapiens
  misc_RNA (1)...(19): siRNA sense strand
agaaaggcuuccagggaga

SEQ ID NO: 2335152 - RNA, 19 nt, Homo sapiens
  misc_RNA (1)...(19): siRNA sense strand
ccauugggcuggacggcaa

SEQ ID NO: 2335153 - RNA, 19 nt, Homo sapiens
  misc_RNA (1)...(19): siRNA sense strand
cgguaaaccaggagacaug

SEQ ID NO: 2335154 - RNA, 19 nt, Homo sapiens
  misc_RNA (1)...(19): siRNA sense strand
ggaaaggagagauggugga

SEQ ID NO: 2335155 - RNA, 19 nt, Homo sapiens
  misc_RNA (1)...(19): siRNA sense strand
acccagggauccagggcua

SEQ ID NO: 2335156 - RNA, 19 nt, Homo sapiens
  misc_RNA (1)...(19): siRNA sense strand
uggaggaggcagaggggaa

SEQ ID NO: 2335157 - RNA, 19 nt, Homo sapiens
  misc_RNA (1)...(19): siRNA sense strand
ggggcagaagggagagaaa

SEQ ID NO: 2335158 - RNA, 19 nt, Homo sapiens
  misc_RNA (1)...(19): siRNA sense strand
gggucaguguggagaguac

SEQ ID NO: 2335159 - RNA, 19 nt, Homo sapiens
  misc_RNA (1)...(19): siRNA sense strand
uggcugggaugaaggguga

SEQ ID NO: 2335160 - RNA, 19 nt, Homo sapiens
  misc_RNA (1)...(19): siRNA sense strand
uggagcaaaaggagagaaa

SEQ ID NO: 2335161 - RNA, 19 nt, Homo sapiens
  misc_RNA (1)...(19): siRNA sense strand
ccaagguguuccuggacca

SEQ ID NO: 2335162 - RNA, 19 nt, Homo sapiens
  misc_RNA (1)...(19): siRNA sense strand
agaaaggcgaugcuggcaa

SEQ ID NO: 2335163 - RNA, 19 nt, Homo sapiens
  misc_RNA (1)...(19): siRNA sense strand
ugguggauuacaauggaaa

SEQ ID NO: 2335164 - RNA, 19 nt, Homo sapiens
  misc_RNA (1)...(19): siRNA sense strand
ccaggagugaagggagaaa

SEQ ID NO: 2335165 - RNA, 19 nt, Homo sapiens
  misc_RNA (1)...(19): siRNA sense strand
caaaggagacccugggaug

SEQ ID NO: 2335166 - RNA, 19 nt, Homo sapiens
  misc_RNA (1)...(19): siRNA sense strand
ucaaucaacugcuggacga

SEQ ID NO: 2335167 - RNA, 19 nt, Homo sapiens
  misc_RNA (1)...(19): siRNA sense strand
agagaaaggcuuccaggga

SEQ ID NO: 2335168 - RNA, 19 nt, Homo sapiens
  misc_RNA (1)...(19): siRNA sense strand
gaaaagggaccucgcggua

SEQ ID NO: 2335169 - RNA, 19 nt, Homo sapiens
  misc_RNA (1)...(19): siRNA sense strand
aggacuagauggagcaaaa

SEQ ID NO: 2335170 - RNA, 19 nt, Homo sapiens
  misc_RNA (1)...(19): siRNA sense strand
agaaaggcuuccagggaga

SEQ ID NO: 2335171 - RNA, 19 nt, Homo sapiens
  misc_RNA (1)...(19): siRNA sense strand
ccauugggcuggacggcaa

SEQ ID NO: 2335172 - RNA, 19 nt, Homo sapiens
  misc_RNA (1)...(19): siRNA sense strand
cgguaaaccaggagacaug

SEQ ID NO: 2335173 - RNA, 19 nt, Homo sapiens
  misc_RNA (1)...(19): siRNA sense strand
ggaaaggagagauggugga

SEQ ID NO: 2335174 - RNA, 19 nt, Homo sapiens
  misc_RNA (1)...(19): siRNA sense strand
acccagggauccagggcua

SEQ ID NO: 2335175 - RNA, 19 nt, Homo sapiens
  misc_RNA (1)...(19): siRNA sense strand
uggaggaggcagaggggaa

SEQ ID NO: 2335176 - RNA, 19 nt, Homo sapiens
  misc_RNA (1)...(19): siRNA sense strand
ggggcagaagggagagaaa

SEQ ID NO: 2335177 - RNA, 19 nt, Homo sapiens
  misc_RNA (1)...(19): siRNA sense strand
gggucaguguggagaguac

SEQ ID NO: 2335178 - RNA, 19 nt, Homo sapiens
  misc_RNA (1)...(19): siRNA sense strand
uggcugggaugaaggguga

SEQ ID NO: 2335179 - RNA, 19 nt, Homo sapiens
  misc_RNA (1)...(19): siRNA sense strand
uggagcaaaaggagagaaa

SEQ ID NO: 2335180 - RNA, 19 nt, Homo sapiens
  misc_RNA (1)...(19): siRNA sense strand
ccaagguguuccuggacca

SEQ ID NO: 2335181 - RNA, 19 nt, Homo sapiens
  misc_RNA (1)...(19): siRNA sense strand
agaaaggcgaugcuggcaa

SEQ ID NO: 2335182 - RNA, 19 nt, Homo sapiens
  misc_RNA (1)...(19): siRNA sense strand
ugguggauuacaauggaaa

SEQ ID NO: 2335183 - RNA, 19 nt, Homo sapiens
  misc_RNA (1)...(19): siRNA sense strand
ccaggagugaagggagaaa

SEQ ID NO: 2335184 - RNA, 19 nt, Homo sapiens
  misc_RNA (1)...(19): siRNA sense strand
caaaggagacccugggaug

SEQ ID NO: 2335185 - RNA, 19 nt, Homo sapiens
  misc_RNA (1)...(19): siRNA sense strand
ucaaucaacugcuggacga

SEQ ID NO: 2335186 - RNA, 19 nt, Homo sapiens
  misc_RNA (1)...(19): siRNA sense strand
agagaaaggcuuccaggga

SEQ ID NO: 2335187 - RNA, 19 nt, Homo sapiens
  misc_RNA (1)...(19): siRNA sense strand
gaaaagggaccucgcggua

SEQ ID NO: 2335188 - RNA, 19 nt, Homo sapiens
  misc_RNA (1)...(19): siRNA sense strand
aggacuagauggagcaaaa

SEQ ID NO: 2335189 - RNA, 19 nt, Homo sapiens
  misc_RNA (1)...(19): siRNA sense strand
agaaaggcuuccagggaga

SEQ ID NO: 2335190 - RNA, 19 nt, Homo sapiens
  misc_RNA (1)...(19): siRNA sense strand
ccauugggcuggacggcaa

SEQ ID NO: 2335191 - RNA, 19 nt, Homo sapiens
  misc_RNA (1)...(19): siRNA sense strand
cgguaaaccaggagacaug

SEQ ID NO: 2335192 - RNA, 19 nt, Homo sapiens
  misc_RNA (1)...(19): siRNA sense strand
ggaaaggagagauggugga

SEQ ID NO: 2335193 - RNA, 19 nt, Homo sapiens
  misc_RNA (1)...(19): siRNA sense strand
acccagggauccagggcua

SEQ ID NO: 2335194 - RNA, 19 nt, Homo sapiens
  misc_RNA (1)...(19): siRNA sense strand
uggaggaggcagaggggaa

SEQ ID NO: 2335195 - RNA, 19 nt, Homo sapiens
  misc_RNA (1)...(19): siRNA sense strand
ggggcagaagggagagaaa

SEQ ID NO: 2335196 - RNA, 19 nt, Homo sapiens
  misc_RNA (1)...(19): siRNA sense strand
gggucaguguggagaguac

SEQ ID NO: 2335197 - RNA, 19 nt, Homo sapiens
  misc_RNA (1)...(19): siRNA sense strand
uggcugggaugaaggguga

SEQ ID NO: 2335198 - RNA, 19 nt, Homo sapiens
  misc_RNA (1)...(19): siRNA sense strand
uggagcaaaaggagagaaa

SEQ ID NO: 2335199 - RNA, 19 nt, Homo sapiens
  misc_RNA (1)...(19): siRNA sense strand
ccaagguguuccuggacca

SEQ ID NO: 2335200 - RNA, 19 nt, Homo sapiens
  misc_RNA (1)...(19): siRNA sense strand
agaaaggcgaugcuggcaa

SEQ ID NO: 2335201 - RNA, 19 nt, Homo sapiens
  misc_RNA (1)...(19): siRNA sense strand
ugguggauuacaauggaaa

SEQ ID NO: 2335202 - RNA, 19 nt, Homo sapiens
  misc_RNA (1)...(19): siRNA sense strand
ccaggagugaagggagaaa

SEQ ID NO: 2335203 - RNA, 19 nt, Homo sapiens
  misc_RNA (1)...(19): siRNA sense strand
caaaggagacccugggaug

SEQ ID NO: 2335204 - RNA, 19 nt, Homo sapiens
  misc_RNA (1)...(19): siRNA sense strand
ucaaucaacugcuggacga

SEQ ID NO: 2335205 - RNA, 19 nt, Homo sapiens
  misc_RNA (1)...(19): siRNA sense strand
agagaaaggcuuccaggga

SEQ ID NO: 2335206 - RNA, 19 nt, Homo sapiens
  misc_RNA (1)...(19): siRNA sense strand
gaaaagggaccucgcggua

SEQ ID NO: 2335207 - RNA, 19 nt, Homo sapiens
  misc_RNA (1)...(19): siRNA sense strand
aggacuagauggagcaaaa

SEQ ID NO: 2335208 - RNA, 19 nt, Homo sapiens
  misc_RNA (1)...(19): siRNA sense strand
agaaaggcuuccagggaga

SEQ ID NO: 2335209 - RNA, 19 nt, Homo sapiens
  misc_RNA (1)...(19): siRNA sense strand
ccauugggcuggacggcaa

SEQ ID NO: 2335210 - RNA, 19 nt, Homo sapiens
  misc_RNA (1)...(19): siRNA sense strand
cgguaaaccaggagacaug

SEQ ID NO: 2335211 - RNA, 19 nt, Homo sapiens
  misc_RNA (1)...(19): siRNA sense strand
ggaaaggagagauggugga

SEQ ID NO: 2335212 - RNA, 19 nt, Homo sapiens
  misc_RNA (1)...(19): siRNA sense strand
acccagggauccagggcua

SEQ ID NO: 2335213 - RNA, 19 nt, Homo sapiens
  misc_RNA (1)...(19): siRNA sense strand
uggaggaggcagaggggaa

SEQ ID NO: 2335214 - RNA, 19 nt, Homo sapiens
  misc_RNA (1)...(19): siRNA sense strand
ggggcagaagggagagaaa

SEQ ID NO: 2335215 - RNA, 19 nt, Homo sapiens
  misc_RNA (1)...(19): siRNA sense strand
gggucaguguggagaguac

SEQ ID NO: 2335216 - RNA, 19 nt, Homo sapiens
  misc_RNA (1)...(19): siRNA sense strand
uggcugggaugaaggguga

SEQ ID NO: 2335217 - RNA, 19 nt, Homo sapiens
  misc_RNA (1)...(19): siRNA sense strand
uggagcaaaaggagagaaa

SEQ ID NO: 2335218 - RNA, 19 nt, Homo sapiens
  misc_RNA (1)...(19): siRNA sense strand
ccaagguguuccuggacca

SEQ ID NO: 2335219 - RNA, 19 nt, Homo sapiens
  misc_RNA (1)...(19): siRNA sense strand
agaaaggcgaugcuggcaa

SEQ ID NO: 2335220 - RNA, 19 nt, Homo sapiens
  misc_RNA (1)...(19): siRNA sense strand
ugguggauuacaauggaaa

SEQ ID NO: 2335221 - RNA, 19 nt, Homo sapiens
  misc_RNA (1)...(19): siRNA sense strand
ccaggagugaagggagaaa

SEQ ID NO: 2335222 - RNA, 19 nt, Homo sapiens
  misc_RNA (1)...(19): siRNA sense strand
caaaggagacccugggaug

SEQ ID NO: 2335223 - RNA, 19 nt, Homo sapiens
  misc_RNA (1)...(19): siRNA sense strand
ucaaucaacugcuggacga

SEQ ID NO: 2335224 - RNA, 19 nt, Homo sapiens
  misc_RNA (1)...(19): siRNA sense strand
agagaaaggcuuccaggga

SEQ ID NO: 2335225 - RNA, 19 nt, Homo sapiens
  misc_RNA (1)...(19): siRNA sense strand
gaaaagggaccucgcggua

SEQ ID NO: 2335226 - RNA, 19 nt, Homo sapiens
  misc_RNA (1)...(19): siRNA sense strand
aggacuagauggagcaaaa

SEQ ID NO: 2335227 - RNA, 19 nt, Homo sapiens
  misc_RNA (1)...(19): siRNA sense strand
agaaaggcuuccagggaga

SEQ ID NO: 2335228 - RNA, 19 nt, Homo sapiens
  misc_RNA (1)...(19): siRNA sense strand
ccauugggcuggacggcaa

SEQ ID NO: 2335229 - RNA, 19 nt, Homo sapiens
  misc_RNA (1)...(19): siRNA sense strand
cgguaaaccaggagacaug

SEQ ID NO: 2335230 - RNA, 19 nt, Homo sapiens
  misc_RNA (1)...(19): siRNA sense strand
ggaaaggagagauggugga

SEQ ID NO: 2335231 - RNA, 19 nt, Homo sapiens
  misc_RNA (1)...(19): siRNA sense strand
acccagggauccagggcua

SEQ ID NO: 2335232 - RNA, 19 nt, Homo sapiens
  misc_RNA (1)...(19): siRNA sense strand
uggaggaggcagaggggaa

SEQ ID NO: 2335233 - RNA, 19 nt, Homo sapiens
  misc_RNA (1)...(19): siRNA sense strand
ggggcagaagggagagaaa

SEQ ID NO: 2335234 - RNA, 19 nt, Homo sapiens
  misc_RNA (1)...(19): siRNA sense strand
gggucaguguggagaguac

SEQ ID NO: 2335235 - RNA, 19 nt, Homo sapiens
  misc_RNA (1)...(19): siRNA sense strand
uggcugggaugaaggguga

SEQ ID NO: 2335236 - RNA, 19 nt, Homo sapiens
  misc_RNA (1)...(19): siRNA sense strand
uggagcaaaaggagagaaa

SEQ ID NO: 2335237 - RNA, 19 nt, Homo sapiens
  misc_RNA (1)...(19): siRNA sense strand
ccaagguguuccuggacca

SEQ ID NO: 2335238 - RNA, 19 nt, Homo sapiens
  misc_RNA (1)...(19): siRNA sense strand
agaaaggcgaugcuggcaa

SEQ ID NO: 2335239 - RNA, 19 nt, Homo sapiens
  misc_RNA (1)...(19): siRNA sense strand
ugguggauuacaauggaaa

SEQ ID NO: 2335240 - RNA, 19 nt, Homo sapiens
  misc_RNA (1)...(19): siRNA sense strand
ccaggagugaagggagaaa

SEQ ID NO: 2335241 - RNA, 19 nt, Homo sapiens
  misc_RNA (1)...(19): siRNA sense strand
caaaggagacccugggaug

SEQ ID NO: 2335242 - RNA, 19 nt, Homo sapiens
  misc_RNA (1)...(19): siRNA sense strand
ucaaucaacugcuggacga

SEQ ID NO: 2335243 - RNA, 19 nt, Homo sapiens
  misc_RNA (1)...(19): siRNA sense strand
agagaaaggcuuccaggga

SEQ ID NO: 2335244 - RNA, 19 nt, Homo sapiens
  misc_RNA (1)...(19): siRNA sense strand
gaaaagggaccucgcggua

SEQ ID NO: 2335245 - RNA, 19 nt, Homo sapiens
  misc_RNA (1)...(19): siRNA sense strand
aggacuagauggagcaaaa

SEQ ID NO: 2335246 - RNA, 19 nt, Homo sapiens
  misc_RNA (1)...(19): siRNA sense strand
agaaaggcuuccagggaga

SEQ ID NO: 2335247 - RNA, 19 nt, Homo sapiens
  misc_RNA (1)...(19): siRNA sense strand
ccauugggcuggacggcaa

SEQ ID NO: 2335248 - RNA, 19 nt, Homo sapiens
  misc_RNA (1)...(19): siRNA sense strand
cgguaaaccaggagacaug

SEQ ID NO: 2335249 - RNA, 19 nt, Homo sapiens
  misc_RNA (1)...(19): siRNA sense strand
ggaaaggagagauggugga

SEQ ID NO: 2335250 - RNA, 19 nt, Homo sapiens
  misc_RNA (1)...(19): siRNA sense strand
acccagggauccagggcua

SEQ ID NO: 2335251 - RNA, 19 nt, Homo sapiens
  misc_RNA (1)...(19): siRNA sense strand
uggaggaggcagaggggaa

SEQ ID NO: 2335252 - RNA, 19 nt, Homo sapiens
  misc_RNA (1)...(19): siRNA sense strand
ggggcagaagggagagaaa

SEQ ID NO: 2335253 - RNA, 19 nt, Homo sapiens
  misc_RNA (1)...(19): siRNA sense strand
gggucaguguggagaguac

SEQ ID NO: 2335254 - RNA, 19 nt, Homo sapiens
  misc_RNA (1)...(19): siRNA sense strand
uggcugggaugaaggguga

SEQ ID NO: 2335255 - RNA, 19 nt, Homo sapiens
  misc_RNA (1)...(19): siRNA sense strand
uggagcaaaaggagagaaa

SEQ ID NO: 2335256 - RNA, 19 nt, Homo sapiens
  misc_RNA (1)...(19): siRNA sense strand
ccaagguguuccuggacca

SEQ ID NO: 2335257 - RNA, 19 nt, Homo sapiens
  misc_RNA (1)...(19): siRNA sense strand
agaaaggcgaugcuggcaa

SEQ ID NO: 2335258 - RNA, 19 nt, Homo sapiens
  misc_RNA (1)...(19): siRNA sense strand
ugguggauuacaauggaaa

SEQ ID NO: 2335259 - RNA, 19 nt, Homo sapiens
  misc_RNA (1)...(19): siRNA sense strand
ccaggagugaagggagaaa

SEQ ID NO: 2335260 - RNA, 19 nt, Homo sapiens
  misc_RNA (1)...(19): siRNA sense strand
caaaggagacccugggaug

SEQ ID NO: 2335261 - RNA, 19 nt, Homo sapiens
  misc_RNA (1)...(19): siRNA sense strand
ucaaucaacugcuggacga

SEQ ID NO: 2335262 - RNA, 19 nt, Homo sapiens
  misc_RNA (1)...(19): siRNA sense strand
agagaaaggcuuccaggga

SEQ ID NO: 2335263 - RNA, 19 nt, Homo sapiens
  misc_RNA (1)...(19): siRNA sense strand
gaaaagggaccucgcggua

SEQ ID NO: 2335264 - RNA, 19 nt, Homo sapiens
  misc_RNA (1)...(19): siRNA sense strand
aggacuagauggagcaaaa

SEQ ID NO: 2335265 - RNA, 19 nt, Homo sapiens
  misc_RNA (1)...(19): siRNA sense strand
agaaaggcuuccagggaga

SEQ ID NO: 2335266 - RNA, 19 nt, Homo sapiens
  misc_RNA (1)...(19): siRNA sense strand
ccauugggcuggacggcaa

SEQ ID NO: 2335267 - RNA, 19 nt, Homo sapiens
  misc_RNA (1)...(19): siRNA sense strand
cgguaaaccaggagacaug

SEQ ID NO: 2335268 - RNA, 19 nt, Homo sapiens
  misc_RNA (1)...(19): siRNA sense strand
ggaaaggagagauggugga

SEQ ID NO: 2335269 - RNA, 19 nt, Homo sapiens
  misc_RNA (1)...(19): siRNA sense strand
acccagggauccagggcua

SEQ ID NO: 2335270 - RNA, 19 nt, Homo sapiens
  misc_RNA (1)...(19): siRNA sense strand
uggaggaggcagaggggaa

SEQ ID NO: 2335271 - RNA, 19 nt, Homo sapiens
  misc_RNA (1)...(19): siRNA sense strand
ggggcagaagggagagaaa

SEQ ID NO: 2335272 - RNA, 19 nt, Homo sapiens
  misc_RNA (1)...(19): siRNA sense strand
gggucaguguggagaguac

SEQ ID NO: 2335273 - RNA, 19 nt, Homo sapiens
  misc_RNA (1)...(19): siRNA sense strand
uggcugggaugaaggguga

SEQ ID NO: 2335274 - RNA, 19 nt, Homo sapiens
  misc_RNA (1)...(19): siRNA sense strand
uggagcaaaaggagagaaa

SEQ ID NO: 2335275 - RNA, 19 nt, Homo sapiens
  misc_RNA (1)...(19): siRNA sense strand
ccaagguguuccuggacca

SEQ ID NO: 2335276 - RNA, 19 nt, Homo sapiens
  misc_RNA (1)...(19): siRNA sense strand
agaaaggcgaugcuggcaa

SEQ ID NO: 2335277 - RNA, 19 nt, Homo sapiens
  misc_RNA (1)...(19): siRNA sense strand
ugguggauuacaauggaaa

SEQ ID NO: 2335278 - RNA, 19 nt, Homo sapiens
  misc_RNA (1)...(19): siRNA sense strand
ccaggagugaagggagaaa

SEQ ID NO: 2335279 - RNA, 19 nt, Homo sapiens
  misc_RNA (1)...(19): siRNA sense strand
caaaggagacccugggaug

SEQ ID NO: 2335280 - RNA, 19 nt, Homo sapiens
  misc_RNA (1)...(19): siRNA sense strand
ucaaucaacugcuggacga

SEQ ID NO: 2335281 - RNA, 19 nt, Homo sapiens
  misc_RNA (1)...(19): siRNA sense strand
agagaaaggcuuccaggga

SEQ ID NO: 2335282 - RNA, 19 nt, Homo sapiens
  misc_RNA (1)...(19): siRNA sense strand
gaaaagggaccucgcggua

SEQ ID NO: 2335283 - RNA, 19 nt, Homo sapiens
  misc_RNA (1)...(19): siRNA sense strand
aggacuagauggagcaaaa

SEQ ID NO: 2335284 - RNA, 19 nt, Homo sapiens
  misc_RNA (1)...(19): siRNA sense strand
agaaaggcuuccagggaga

SEQ ID NO: 2335285 - RNA, 19 nt, Homo sapiens
  misc_RNA (1)...(19): siRNA sense strand
ccauugggcuggacggcaa

SEQ ID NO: 2335286 - RNA, 19 nt, Homo sapiens
  misc_RNA (1)...(19): siRNA sense strand
cgguaaaccaggagacaug

SEQ ID NO: 2335287 - RNA, 19 nt, Homo sapiens
  misc_RNA (1)...(19): siRNA sense strand
ggaaaggagagauggugga

SEQ ID NO: 2335288 - RNA, 19 nt, Homo sapiens
  misc_RNA (1)...(19): siRNA sense strand
acccagggauccagggcua

SEQ ID NO: 2335289 - RNA, 19 nt, Homo sapiens
  misc_RNA (1)...(19): siRNA sense strand
uggaggaggcagaggggaa

SEQ ID NO: 2335290 - RNA, 19 nt, Homo sapiens
  misc_RNA (1)...(19): siRNA sense strand
ggggcagaagggagagaaa

SEQ ID NO: 2335291 - RNA, 19 nt, Homo sapiens
  misc_RNA (1)...(19): siRNA sense strand
gggucaguguggagaguac

SEQ ID NO: 2335292 - RNA, 19 nt, Homo sapiens
  misc_RNA (1)...(19): siRNA sense strand
uggcugggaugaaggguga

SEQ ID NO: 2335293 - RNA, 19 nt, Homo sapiens
  misc_RNA (1)...(19): siRNA sense strand
uggagcaaaaggagagaaa

SEQ ID NO: 2335294 - RNA, 19 nt, Homo sapiens
  misc_RNA (1)...(19): siRNA sense strand
ccaagguguuccuggacca

SEQ ID NO: 2335295 - RNA, 19 nt, Homo sapiens
  misc_RNA (1)...(19): siRNA sense strand
agaaaggcgaugcuggcaa

SEQ ID NO: 2335296 - RNA, 19 nt, Homo sapiens
  misc_RNA (1)...(19): siRNA sense strand
ugguggauuacaauggaaa

SEQ ID NO: 2335297 - RNA, 19 nt, Homo sapiens
  misc_RNA (1)...(19): siRNA sense strand
ccaggagugaagggagaaa

SEQ ID NO: 2335298 - RNA, 19 nt, Homo sapiens
  misc_RNA (1)...(19): siRNA sense strand
caaaggagacccugggaug

SEQ ID NO: 2335299 - RNA, 19 nt, Homo sapiens
  misc_RNA (1)...(19): siRNA sense strand
ucaaucaacugcuggacga

SEQ ID NO: 2335300 - RNA, 19 nt, Homo sapiens
  misc_RNA (1)...(19): siRNA sense strand
agagaaaggcuuccaggga

SEQ ID NO: 2335301 - RNA, 19 nt, Homo sapiens
  misc_RNA (1)...(19): siRNA sense strand
gaaaagggaccucgcggua

SEQ ID NO: 2335302 - RNA, 19 nt, Homo sapiens
  misc_RNA (1)...(19): siRNA sense strand
aggacuagauggagcaaaa

SEQ ID NO: 2335303 - RNA, 19 nt, Homo sapiens
  misc_RNA (1)...(19): siRNA sense strand
agaaaggcuuccagggaga

SEQ ID NO: 2335304 - RNA, 19 nt, Homo sapiens
  misc_RNA (1)...(19): siRNA sense strand
ccauugggcuggacggcaa

SEQ ID NO: 2335305 - RNA, 19 nt, Homo sapiens
  misc_RNA (1)...(19): siRNA sense strand
cgguaaaccaggagacaug

SEQ ID NO: 2335306 - RNA, 19 nt, Homo sapiens
  misc_RNA (1)...(19): siRNA sense strand
ggaaaggagagauggugga

SEQ ID NO: 2335307 - RNA, 19 nt, Homo sapiens
  misc_RNA (1)...(19): siRNA sense strand
acccagggauccagggcua

SEQ ID NO: 2335308 - RNA, 19 nt, Homo sapiens
  misc_RNA (1)...(19): siRNA sense strand
uggaggaggcagaggggaa

SEQ ID NO: 2335309 - RNA, 19 nt, Homo sapiens
  misc_RNA (1)...(19): siRNA sense strand
ggggcagaagggagagaaa

SEQ ID NO: 2335310 - RNA, 19 nt, Homo sapiens
  misc_RNA (1)...(19): siRNA sense strand
gggucaguguggagaguac

SEQ ID NO: 2335311 - RNA, 19 nt, Homo sapiens
  misc_RNA (1)...(19): siRNA sense strand
uggcugggaugaaggguga

SEQ ID NO: 2335312 - RNA, 19 nt, Homo sapiens
  misc_RNA (1)...(19): siRNA sense strand
uggagcaaaaggagagaaa

SEQ ID NO: 2335313 - RNA, 19 nt, Homo sapiens
  misc_RNA (1)...(19): siRNA sense strand
ccaagguguuccuggacca

SEQ ID NO: 2335314 - RNA, 19 nt, Homo sapiens
  misc_RNA (1)...(19): siRNA sense strand
agaaaggcgaugcuggcaa

SEQ ID NO: 2335315 - RNA, 19 nt, Homo sapiens
  misc_RNA (1)...(19): siRNA sense strand
ugguggauuacaauggaaa

SEQ ID NO: 2335316 - RNA, 19 nt, Homo sapiens
  misc_RNA (1)...(19): siRNA sense strand
ccaggagugaagggagaaa

SEQ ID NO: 2335317 - RNA, 19 nt, Homo sapiens
  misc_RNA (1)...(19): siRNA sense strand
caaaggagacccugggaug

SEQ ID NO: 2335318 - RNA, 19 nt, Homo sapiens
  misc_RNA (1)...(19): siRNA sense strand
ucaaucaacugcuggacga

SEQ ID NO: 2335319 - RNA, 19 nt, Homo sapiens
  misc_RNA (1)...(19): siRNA sense strand
agagaaaggcuuccaggga

SEQ ID NO: 2335320 - RNA, 19 nt, Homo sapiens
  misc_RNA (1)...(19): siRNA sense strand
gaaaagggaccucgcggua

SEQ ID NO: 2335321 - RNA, 19 nt, Homo sapiens
  misc_RNA (1)...(19): siRNA sense strand
aggacuagauggagcaaaa

SEQ ID NO: 2335322 - RNA, 19 nt, Homo sapiens
  misc_RNA (1)...(19): siRNA sense strand
agaaaggcuuccagggaga

SEQ ID NO: 2335323 - RNA, 19 nt, Homo sapiens
  misc_RNA (1)...(19): siRNA sense strand
ccauugggcuggacggcaa

SEQ ID NO: 2335324 - RNA, 19 nt, Homo sapiens
  misc_RNA (1)...(19): siRNA sense strand
cgguaaaccaggagacaug

SEQ ID NO: 2335325 - RNA, 19 nt, Homo sapiens
  misc_RNA (1)...(19): siRNA sense strand
ggaaaggagagauggugga

SEQ ID NO: 2335326 - RNA, 19 nt, Homo sapiens
  misc_RNA (1)...(19): siRNA sense strand
acccagggauccagggcua

SEQ ID NO: 2335327 - RNA, 19 nt, Homo sapiens
  misc_RNA (1)...(19): siRNA sense strand
uggaggaggcagaggggaa

SEQ ID NO: 2335328 - RNA, 19 nt, Homo sapiens
  misc_RNA (1)...(19): siRNA sense strand
ggggcagaagggagagaaa

SEQ ID NO: 2335329 - RNA, 19 nt, Homo sapiens
  misc_RNA (1)...(19): siRNA sense strand
gggucaguguggagaguac

SEQ ID NO: 2335330 - RNA, 19 nt, Homo sapiens
  misc_RNA (1)...(19): siRNA sense strand
uggcugggaugaaggguga

SEQ ID NO: 2335331 - RNA, 19 nt, Homo sapiens
  misc_RNA (1)...(19): siRNA sense strand
uggagcaaaaggagagaaa

SEQ ID NO: 2335332 - RNA, 19 nt, Homo sapiens
  misc_RNA (1)...(19): siRNA sense strand
ccaagguguuccuggacca

SEQ ID NO: 2335333 - RNA, 19 nt, Homo sapiens
  misc_RNA (1)...(19): siRNA sense strand
agaaaggcgaugcuggcaa

SEQ ID NO: 2335334 - RNA, 19 nt, Homo sapiens
  misc_RNA (1)...(19): siRNA sense strand
ugguggauuacaauggaaa

SEQ ID NO: 2335335 - RNA, 19 nt, Homo sapiens
  misc_RNA (1)...(19): siRNA sense strand
ccaggagugaagggagaaa

SEQ ID NO: 2335336 - RNA, 19 nt, Homo sapiens
  misc_RNA (1)...(19): siRNA sense strand
caaaggagacccugggaug

SEQ ID NO: 2335337 - RNA, 19 nt, Homo sapiens
  misc_RNA (1)...(19): siRNA sense strand
ucaaucaacugcuggacga

SEQ ID NO: 2335338 - RNA, 19 nt, Homo sapiens
  misc_RNA (1)...(19): siRNA sense strand
agagaaaggcuuccaggga

SEQ ID NO: 2335339 - RNA, 19 nt, Homo sapiens
  misc_RNA (1)...(19): siRNA sense strand
gaaaagggaccucgcggua

SEQ ID NO: 2335340 - RNA, 19 nt, Homo sapiens
  misc_RNA (1)...(19): siRNA sense strand
aggacuagauggagcaaaa

SEQ ID NO: 2335341 - RNA, 19 nt, Homo sapiens
  misc_RNA (1)...(19): siRNA sense strand
agaaaggcuuccagggaga

SEQ ID NO: 2335342 - RNA, 19 nt, Homo sapiens
  misc_RNA (1)...(19): siRNA sense strand
ccauugggcuggacggcaa

SEQ ID NO: 2335343 - RNA, 19 nt, Homo sapiens
  misc_RNA (1)...(19): siRNA sense strand
cgguaaaccaggagacaug

SEQ ID NO: 2335344 - RNA, 19 nt, Homo sapiens
  misc_RNA (1)...(19): siRNA sense strand
ggaaaggagagauggugga

SEQ ID NO: 2335345 - RNA, 19 nt, Homo sapiens
  misc_RNA (1)...(19): siRNA sense strand
acccagggauccagggcua

SEQ ID NO: 2335346 - RNA, 19 nt, Homo sapiens
  misc_RNA (1)...(19): siRNA sense strand
uggaggaggcagaggggaa

SEQ ID NO: 2335347 - RNA, 19 nt, Homo sapiens
  misc_RNA (1)...(19): siRNA sense strand
ggggcagaagggagagaaa

SEQ ID NO: 2335348 - RNA, 19 nt, Homo sapiens
  misc_RNA (1)...(19): siRNA sense strand
gggucaguguggagaguac

SEQ ID NO: 2335349 - RNA, 19 nt, Homo sapiens
  misc_RNA (1)...(19): siRNA sense strand
uggcugggaugaaggguga

SEQ ID NO: 2335350 - RNA, 19 nt, Homo sapiens
  misc_RNA (1)...(19): siRNA sense strand
uggagcaaaaggagagaaa

SEQ ID NO: 2335351 - RNA, 19 nt, Homo sapiens
  misc_RNA (1)...(19): siRNA sense strand
ccaagguguuccuggacca

SEQ ID NO: 2335352 - RNA, 19 nt, Homo sapiens
  misc_RNA (1)...(19): siRNA sense strand
agaaaggcgaugcuggcaa

SEQ ID NO: 2335353 - RNA, 19 nt, Homo sapiens
  misc_RNA (1)...(19): siRNA sense strand
ugguggauuacaauggaaa

SEQ ID NO: 2335354 - RNA, 19 nt, Homo sapiens
  misc_RNA (1)...(19): siRNA sense strand
ccaggagugaagggagaaa

SEQ ID NO: 2335355 - RNA, 19 nt, Homo sapiens
  misc_RNA (1)...(19): siRNA sense strand
caaaggagacccugggaug

SEQ ID NO: 2335356 - RNA, 19 nt, Homo sapiens
  misc_RNA (1)...(19): siRNA sense strand
ucaaucaacugcuggacga

SEQ ID NO: 2335357 - RNA, 19 nt, Homo sapiens
  misc_RNA (1)...(19): siRNA sense strand
agagaaaggcuuccaggga

SEQ ID NO: 2335358 - RNA, 19 nt, Homo sapiens
  misc_RNA (1)...(19): siRNA sense strand
gaaaagggaccucgcggua

SEQ ID NO: 2335359 - RNA, 19 nt, Homo sapiens
  misc_RNA (1)...(19): siRNA sense strand
aggacuagauggagcaaaa

SEQ ID NO: 2335360 - RNA, 19 nt, Homo sapiens
  misc_RNA (1)...(19): siRNA sense strand
agaaaggcuuccagggaga

SEQ ID NO: 2335361 - RNA, 19 nt, Homo sapiens
  misc_RNA (1)...(19): siRNA sense strand
ccauugggcuggacggcaa

SEQ ID NO: 2335362 - RNA, 19 nt, Homo sapiens
  misc_RNA (1)...(19): siRNA sense strand
cgguaaaccaggagacaug

SEQ ID NO: 2335363 - RNA, 19 nt, Homo sapiens
  misc_RNA (1)...(19): siRNA sense strand
ggaaaggagagauggugga

SEQ ID NO: 2335364 - RNA, 19 nt, Homo sapiens
  misc_RNA (1)...(19): siRNA sense strand
acccagggauccagggcua

SEQ ID NO: 2335365 - RNA, 19 nt, Homo sapiens
  misc_RNA (1)...(19): siRNA sense strand
uggaggaggcagaggggaa

SEQ ID NO: 2335366 - RNA, 19 nt, Homo sapiens
  misc_RNA (1)...(19): siRNA sense strand
ggggcagaagggagagaaa

SEQ ID NO: 2335367 - RNA, 19 nt, Homo sapiens
  misc_RNA (1)...(19): siRNA sense strand
gggucaguguggagaguac

SEQ ID NO: 2335368 - RNA, 19 nt, Homo sapiens
  misc_RNA (1)...(19): siRNA sense strand
uggcugggaugaaggguga

SEQ ID NO: 2335369 - RNA, 19 nt, Homo sapiens
  misc_RNA (1)...(19): siRNA sense strand
uggagcaaaaggagagaaa

SEQ ID NO: 2335370 - RNA, 19 nt, Homo sapiens
  misc_RNA (1)...(19): siRNA sense strand
ccaagguguuccuggacca

SEQ ID NO: 2335371 - RNA, 19 nt, Homo sapiens
  misc_RNA (1)...(19): siRNA sense strand
agaaaggcgaugcuggcaa

SEQ ID NO: 2335372 - RNA, 19 nt, Homo sapiens
  misc_RNA (1)...(19): siRNA sense strand
ugguggauuacaauggaaa

SEQ ID NO: 2335373 - RNA, 19 nt, Homo sapiens
  misc_RNA (1)...(19): siRNA sense strand
ccaggagugaagggagaaa

SEQ ID NO: 2335374 - RNA, 19 nt, Homo sapiens
  misc_RNA (1)...(19): siRNA sense strand
caaaggagacccugggaug

SEQ ID NO: 2335375 - RNA, 19 nt, Homo sapiens
  misc_RNA (1)...(19): siRNA sense strand
ucaaucaacugcuggacga

SEQ ID NO: 2335376 - RNA, 19 nt, Homo sapiens
  misc_RNA (1)...(19): siRNA sense strand
agagaaaggcuuccaggga

SEQ ID NO: 2335377 - RNA, 19 nt, Homo sapiens
  misc_RNA (1)...(19): siRNA sense strand
gaaaagggaccucgcggua

SEQ ID NO: 2335378 - RNA, 19 nt, Homo sapiens
  misc_RNA (1)...(19): siRNA sense strand
aggacuagauggagcaaaa

SEQ ID NO: 2335379 - RNA, 19 nt, Homo sapiens
  misc_RNA (1)...(19): siRNA sense strand
agaaaggcuuccagggaga

SEQ ID NO: 2335380 - RNA, 19 nt, Homo sapiens
  misc_RNA (1)...(19): siRNA sense strand
ccauugggcuggacggcaa

SEQ ID NO: 2335381 - RNA, 19 nt, Homo sapiens
  misc_RNA (1)...(19): siRNA sense strand
cgguaaaccaggagacaug

SEQ ID NO: 2335382 - RNA, 19 nt, Homo sapiens
  misc_RNA (1)...(19): siRNA sense strand
ggaaaggagagauggugga

SEQ ID NO: 2335383 - RNA, 19 nt, Homo sapiens
  misc_RNA (1)...(19): siRNA sense strand
acccagggauccagggcua

SEQ ID NO: 2335384 - RNA, 19 nt, Homo sapiens
  misc_RNA (1)...(19): siRNA sense strand
uggaggaggcagaggggaa

SEQ ID NO: 2335385 - RNA, 19 nt, Homo sapiens
  misc_RNA (1)...(19): siRNA sense strand
ggggcagaagggagagaaa

SEQ ID NO: 2335386 - RNA, 19 nt, Homo sapiens
  misc_RNA (1)...(19): siRNA sense strand
gggucaguguggagaguac

SEQ ID NO: 2335387 - RNA, 19 nt, Homo sapiens
  misc_RNA (1)...(19): siRNA sense strand
uggcugggaugaaggguga

SEQ ID NO: 2335388 - RNA, 19 nt, Homo sapiens
  misc_RNA (1)...(19): siRNA sense strand
uggagcaaaaggagagaaa

SEQ ID NO: 2335389 - RNA, 19 nt, Homo sapiens
  misc_RNA (1)...(19): siRNA sense strand
ccaagguguuccuggacca

SEQ ID NO: 2335390 - RNA, 19 nt, Homo sapiens
  misc_RNA (1)...(19): siRNA sense strand
agaaaggcgaugcuggcaa

SEQ ID NO: 2335391 - RNA, 19 nt, Homo sapiens
  misc_RNA (1)...(19): siRNA sense strand
ugguggauuacaauggaaa

SEQ ID NO: 2335392 - RNA, 19 nt, Homo sapiens
  misc_RNA (1)...(19): siRNA sense strand
ccaggagugaagggagaaa

SEQ ID NO: 2335393 - RNA, 19 nt, Homo sapiens
  misc_RNA (1)...(19): siRNA sense strand
caaaggagacccugggaug

SEQ ID NO: 2335394 - RNA, 19 nt, Homo sapiens
  misc_RNA (1)...(19): siRNA sense strand
ucaaucaacugcuggacga

SEQ ID NO: 2335395 - RNA, 19 nt, Homo sapiens
  misc_RNA (1)...(19): siRNA sense strand
agagaaaggcuuccaggga

SEQ ID NO: 2335396 - RNA, 19 nt, Homo sapiens
  misc_RNA (1)...(19): siRNA sense strand
gaaaagggaccucgcggua

SEQ ID NO: 2335397 - RNA, 19 nt, Homo sapiens
  misc_RNA (1)...(19): siRNA sense strand
aggacuagauggagcaaaa

SEQ ID NO: 2335398 - RNA, 19 nt, Homo sapiens
  misc_RNA (1)...(19): siRNA sense strand
agaaaggcuuccagggaga

SEQ ID NO: 2335399 - RNA, 19 nt, Homo sapiens
  misc_RNA (1)...(19): siRNA sense strand
ccauugggcuggacggcaa

SEQ ID NO: 2335400 - RNA, 19 nt, Homo sapiens
  misc_RNA (1)...(19): siRNA sense strand
cgguaaaccaggagacaug

SEQ ID NO: 2335401 - RNA, 19 nt, Homo sapiens
  misc_RNA (1)...(19): siRNA sense strand
ggaaaggagagauggugga

SEQ ID NO: 2335402 - RNA, 19 nt, Homo sapiens
  misc_RNA (1)...(19): siRNA sense strand
acccagggauccagggcua

SEQ ID NO: 2335403 - RNA, 19 nt, Homo sapiens
  misc_RNA (1)...(19): siRNA sense strand
uggaggaggcagaggggaa

SEQ ID NO: 2335404 - RNA, 19 nt, Homo sapiens
  misc_RNA (1)...(19): siRNA sense strand
ggggcagaagggagagaaa

SEQ ID NO: 2335405 - RNA, 19 nt, Homo sapiens
  misc_RNA (1)...(19): siRNA sense strand
gggucaguguggagaguac

SEQ ID NO: 2335406 - RNA, 19 nt, Homo sapiens
  misc_RNA (1)...(19): siRNA sense strand
uggcugggaugaaggguga

SEQ ID NO: 2335407 - RNA, 19 nt, Homo sapiens
  misc_RNA (1)...(19): siRNA sense strand
uggagcaaaaggagagaaa

SEQ ID NO: 2335408 - RNA, 19 nt, Homo sapiens
  misc_RNA (1)...(19): siRNA sense strand
ccaagguguuccuggacca

SEQ ID NO: 2335409 - RNA, 19 nt, Homo sapiens
  misc_RNA (1)...(19): siRNA sense strand
agaaaggcgaugcuggcaa

SEQ ID NO: 2335410 - RNA, 19 nt, Homo sapiens
  misc_RNA (1)...(19): siRNA sense strand
ugguggauuacaauggaaa

SEQ ID NO: 2335411 - RNA, 19 nt, Homo sapiens
  misc_RNA (1)...(19): siRNA sense strand
ccaggagugaagggagaaa

SEQ ID NO: 2335412 - RNA, 19 nt, Homo sapiens
  misc_RNA (1)...(19): siRNA sense strand
caaaggagacccugggaug

SEQ ID NO: 2335413 - RNA, 19 nt, Homo sapiens
  misc_RNA (1)...(19): siRNA sense strand
ucaaucaacugcuggacga

SEQ ID NO: 2335414 - RNA, 19 nt, Homo sapiens
  misc_RNA (1)...(19): siRNA sense strand
agagaaaggcuuccaggga

SEQ ID NO: 2335415 - RNA, 19 nt, Homo sapiens
  misc_RNA (1)...(19): siRNA sense strand
gaaaagggaccucgcggua

SEQ ID NO: 2335416 - RNA, 19 nt, Homo sapiens
  misc_RNA (1)...(19): siRNA sense strand
aggacuagauggagcaaaa

SEQ ID NO: 2335417 - RNA, 19 nt, Homo sapiens
  misc_RNA (1)...(19): siRNA sense strand
agaaaggcuuccagggaga

SEQ ID NO: 2335418 - RNA, 19 nt, Homo sapiens
  misc_RNA (1)...(19): siRNA sense strand
ccauugggcuggacggcaa

SEQ ID NO: 2335419 - RNA, 19 nt, Homo sapiens
  misc_RNA (1)...(19): siRNA sense strand
cgguaaaccaggagacaug

SEQ ID NO: 2335420 - RNA, 19 nt, Homo sapiens
  misc_RNA (1)...(19): siRNA sense strand
ggaaaggagagauggugga

SEQ ID NO: 2335421 - RNA, 19 nt, Homo sapiens
  misc_RNA (1)...(19): siRNA sense strand
acccagggauccagggcua

SEQ ID NO: 2335422 - RNA, 19 nt, Homo sapiens
  misc_RNA (1)...(19): siRNA sense strand
uggaggaggcagaggggaa

SEQ ID NO: 2335423 - RNA, 19 nt, Homo sapiens
  misc_RNA (1)...(19): siRNA sense strand
ggggcagaagggagagaaa

SEQ ID NO: 2335424 - RNA, 19 nt, Homo sapiens
  misc_RNA (1)...(19): siRNA sense strand
gggucaguguggagaguac

SEQ ID NO: 2335425 - RNA, 19 nt, Homo sapiens
  misc_RNA (1)...(19): siRNA sense strand
uggcugggaugaaggguga

SEQ ID NO: 2335426 - RNA, 19 nt, Homo sapiens
  misc_RNA (1)...(19): siRNA sense strand
uggagcaaaaggagagaaa

SEQ ID NO: 2335427 - RNA, 19 nt, Homo sapiens
  misc_RNA (1)...(19): siRNA sense strand
ccaagguguuccuggacca

SEQ ID NO: 2335428 - RNA, 19 nt, Homo sapiens
  misc_RNA (1)...(19): siRNA sense strand
agaaaggcgaugcuggcaa

SEQ ID NO: 2335429 - RNA, 19 nt, Homo sapiens
  misc_RNA (1)...(19): siRNA sense strand
ugguggauuacaauggaaa

SEQ ID NO: 2335430 - RNA, 19 nt, Homo sapiens
  misc_RNA (1)...(19): siRNA sense strand
ccaggagugaagggagaaa

SEQ ID NO: 2335431 - RNA, 19 nt, Homo sapiens
  misc_RNA (1)...(19): siRNA sense strand
caaaggagacccugggaug

SEQ ID NO: 2335432 - RNA, 19 nt, Homo sapiens
  misc_RNA (1)...(19): siRNA sense strand
ucaaucaacugcuggacga

SEQ ID NO: 2335433 - RNA, 19 nt, Homo sapiens
  misc_RNA (1)...(19): siRNA sense strand
agagaaaggcuuccaggga

SEQ ID NO: 2335434 - RNA, 19 nt, Homo sapiens
  misc_RNA (1)...(19): siRNA sense strand
gaaaagggaccucgcggua

SEQ ID NO: 2335435 - RNA, 19 nt, Homo sapiens
  misc_RNA (1)...(19): siRNA sense strand
aggacuagauggagcaaaa

SEQ ID NO: 2335436 - RNA, 19 nt, Homo sapiens
  misc_RNA (1)...(19): siRNA sense strand
agaaaggcuuccagggaga

SEQ ID NO: 2335437 - RNA, 19 nt, Homo sapiens
  misc_RNA (1)...(19): siRNA sense strand
ccauugggcuggacggcaa

SEQ ID NO: 2335438 - RNA, 19 nt, Homo sapiens
  misc_RNA (1)...(19): siRNA sense strand
cgguaaaccaggagacaug

SEQ ID NO: 2335439 - RNA, 19 nt, Homo sapiens
  misc_RNA (1)...(19): siRNA sense strand
ggaaaggagagauggugga

SEQ ID NO: 2335440 - RNA, 19 nt, Homo sapiens
  misc_RNA (1)...(19): siRNA sense strand
acccagggauccagggcua

SEQ ID NO: 2335441 - RNA, 19 nt, Homo sapiens
  misc_RNA (1)...(19): siRNA sense strand
uggaggaggcagaggggaa

SEQ ID NO: 2335442 - RNA, 19 nt, Homo sapiens
  misc_RNA (1)...(19): siRNA sense strand
ggggcagaagggagagaaa

SEQ ID NO: 2335443 - RNA, 19 nt, Homo sapiens
  misc_RNA (1)...(19): siRNA sense strand
gggucaguguggagaguac

SEQ ID NO: 2335444 - RNA, 19 nt, Homo sapiens
  misc_RNA (1)...(19): siRNA sense strand
uggcugggaugaaggguga

SEQ ID NO: 2335445 - RNA, 19 nt, Homo sapiens
  misc_RNA (1)...(19): siRNA sense strand
uggagcaaaaggagagaaa

SEQ ID NO: 2335446 - RNA, 19 nt, Homo sapiens
  misc_RNA (1)...(19): siRNA sense strand
ccaagguguuccuggacca

SEQ ID NO: 2335447 - RNA, 19 nt, Homo sapiens
  misc_RNA (1)...(19): siRNA sense strand
agaaaggcgaugcuggcaa

SEQ ID NO: 2335448 - RNA, 19 nt, Homo sapiens
  misc_RNA (1)...(19): siRNA sense strand
ugguggauuacaauggaaa

SEQ ID NO: 2335449 - RNA, 19 nt, Homo sapiens
  misc_RNA (1)...(19): siRNA sense strand
ccaggagugaagggagaaa

SEQ ID NO: 2335450 - RNA, 19 nt, Homo sapiens
  misc_RNA (1)...(19): siRNA sense strand
caaaggagacccugggaug

SEQ ID NO: 2335451 - RNA, 19 nt, Homo sapiens
  misc_RNA (1)...(19): siRNA sense strand
ucaaucaacugcuggacga

SEQ ID NO: 2335452 - RNA, 19 nt, Homo sapiens
  misc_RNA (1)...(19): siRNA sense strand
agagaaaggcuuccaggga

SEQ ID NO: 2335453 - RNA, 19 nt, Homo sapiens
  misc_RNA (1)...(19): siRNA sense strand
gaaaagggaccucgcggua

SEQ ID NO: 2335454 - RNA, 19 nt, Homo sapiens
  misc_RNA (1)...(19): siRNA sense strand
aggacuagauggagcaaaa

SEQ ID NO: 2335455 - RNA, 19 nt, Homo sapiens
  misc_RNA (1)...(19): siRNA sense strand
agaaaggcuuccagggaga

SEQ ID NO: 2335456 - RNA, 19 nt, Homo sapiens
  misc_RNA (1)...(19): siRNA sense strand
ccauugggcuggacggcaa

SEQ ID NO: 2335457 - RNA, 19 nt, Homo sapiens
  misc_RNA (1)...(19): siRNA sense strand
cgguaaaccaggagacaug

SEQ ID NO: 2335458 - RNA, 19 nt, Homo sapiens
  misc_RNA (1)...(19): siRNA sense strand
ggaaaggagagauggugga

SEQ ID NO: 2335459 - RNA, 19 nt, Homo sapiens
  misc_RNA (1)...(19): siRNA sense strand
acccagggauccagggcua

SEQ ID NO: 2335460 - RNA, 19 nt, Homo sapiens
  misc_RNA (1)...(19): siRNA sense strand
uggaggaggcagaggggaa

SEQ ID NO: 2335461 - RNA, 19 nt, Homo sapiens
  misc_RNA (1)...(19): siRNA sense strand
ggggcagaagggagagaaa

SEQ ID NO: 2335462 - RNA, 19 nt, Homo sapiens
  misc_RNA (1)...(19): siRNA sense strand
gggucaguguggagaguac

SEQ ID NO: 2335463 - RNA, 19 nt, Homo sapiens
  misc_RNA (1)...(19): siRNA sense strand
uggcugggaugaaggguga

SEQ ID NO: 2335464 - RNA, 19 nt, Homo sapiens
  misc_RNA (1)...(19): siRNA sense strand
uggagcaaaaggagagaaa

SEQ ID NO: 2335465 - RNA, 19 nt, Homo sapiens
  misc_RNA (1)...(19): siRNA sense strand
ccaagguguuccuggacca

SEQ ID NO: 2335466 - RNA, 19 nt, Homo sapiens
  misc_RNA (1)...(19): siRNA sense strand
agaaaggcgaugcuggcaa

SEQ ID NO: 2335467 - RNA, 19 nt, Homo sapiens
  misc_RNA (1)...(19): siRNA sense strand
ugguggauuacaauggaaa

SEQ ID NO: 2335468 - RNA, 19 nt, Homo sapiens
  misc_RNA (1)...(19): siRNA sense strand
ccaggagugaagggagaaa

SEQ ID NO: 2335469 - RNA, 19 nt, Homo sapiens
  misc_RNA (1)...(19): siRNA sense strand
caaaggagacccugggaug

SEQ ID NO: 2335470 - RNA, 19 nt, Homo sapiens
  misc_RNA (1)...(19): siRNA sense strand
ucaaucaacugcuggacga

SEQ ID NO: 2335471 - RNA, 19 nt, Homo sapiens
  misc_RNA (1)...(19): siRNA sense strand
agagaaaggcuuccaggga

SEQ ID NO: 2335472 - RNA, 19 nt, Homo sapiens
  misc_RNA (1)...(19): siRNA sense strand
gaaaagggaccucgcggua

SEQ ID NO: 2335473 - RNA, 19 nt, Homo sapiens
  misc_RNA (1)...(19): siRNA sense strand
aggacuagauggagcaaaa

SEQ ID NO: 2335474 - RNA, 19 nt, Homo sapiens
  misc_RNA (1)...(19): siRNA sense strand
agaaaggcuuccagggaga

SEQ ID NO: 2335475 - RNA, 19 nt, Homo sapiens
  misc_RNA (1)...(19): siRNA sense strand
ccauugggcuggacggcaa

SEQ ID NO: 2335476 - RNA, 19 nt, Homo sapiens
  misc_RNA (1)...(19): siRNA sense strand
cgguaaaccaggagacaug

SEQ ID NO: 2335477 - RNA, 19 nt, Homo sapiens
  misc_RNA (1)...(19): siRNA sense strand
ggaaaggagagauggugga

SEQ ID NO: 2335478 - RNA, 19 nt, Homo sapiens
  misc_RNA (1)...(19): siRNA sense strand
acccagggauccagggcua

SEQ ID NO: 2335479 - RNA, 19 nt, Homo sapiens
  misc_RNA (1)...(19): siRNA sense strand
uggaggaggcagaggggaa

SEQ ID NO: 2335480 - RNA, 19 nt, Homo sapiens
  misc_RNA (1)...(19): siRNA sense strand
ggggcagaagggagagaaa

SEQ ID NO: 2335481 - RNA, 19 nt, Homo sapiens
  misc_RNA (1)...(19): siRNA sense strand
gggucaguguggagaguac

SEQ ID NO: 2335482 - RNA, 19 nt, Homo sapiens
  misc_RNA (1)...(19): siRNA sense strand
uggcugggaugaaggguga

SEQ ID NO: 2335483 - RNA, 19 nt, Homo sapiens
  misc_RNA (1)...(19): siRNA sense strand
uggagcaaaaggagagaaa

SEQ ID NO: 2335484 - RNA, 19 nt, Homo sapiens
  misc_RNA (1)...(19): siRNA sense strand
ccaagguguuccuggacca

SEQ ID NO: 2335485 - RNA, 19 nt, Homo sapiens
  misc_RNA (1)...(19): siRNA sense strand
agaaaggcgaugcuggcaa

SEQ ID NO: 2335486 - RNA, 19 nt, Homo sapiens
  misc_RNA (1)...(19): siRNA sense strand
ugguggauuacaauggaaa

SEQ ID NO: 2335487 - RNA, 19 nt, Homo sapiens
  misc_RNA (1)...(19): siRNA sense strand
ccaggagugaagggagaaa

SEQ ID NO: 2335488 - RNA, 19 nt, Homo sapiens
  misc_RNA (1)...(19): siRNA sense strand
caaaggagacccugggaug

SEQ ID NO: 2335489 - RNA, 19 nt, Homo sapiens
  misc_RNA (1)...(19): siRNA sense strand
ucaaucaacugcuggacga

SEQ ID NO: 2335490 - RNA, 19 nt, Homo sapiens
  misc_RNA (1)...(19): siRNA sense strand
agagaaaggcuuccaggga

SEQ ID NO: 2335491 - RNA, 19 nt, Homo sapiens
  misc_RNA (1)...(19): siRNA sense strand
gaaaagggaccucgcggua

SEQ ID NO: 2335492 - RNA, 19 nt, Homo sapiens
  misc_RNA (1)...(19): siRNA sense strand
gagcaugcacugcgggaga

SEQ ID NO: 2335493 - RNA, 19 nt, Homo sapiens
  misc_RNA (1)...(19): siRNA sense strand
agauggagaugaaggagga

SEQ ID NO: 2335494 - RNA, 19 nt, Homo sapiens
  misc_RNA (1)...(19): siRNA sense strand
uggagaagcugcugcgcga

SEQ ID NO: 2335495 - RNA, 19 nt, Homo sapiens
  misc_RNA (1)...(19): siRNA sense strand
ucuucugccucgaggacaa

SEQ ID NO: 2335496 - RNA, 19 nt, Homo sapiens
  misc_RNA (1)...(19): siRNA sense strand
acaucagugucaaggaaga

SEQ ID NO: 2335497 - RNA, 19 nt, Homo sapiens
  misc_RNA (1)...(19): siRNA sense strand
ggaagaacuggauggcuga

SEQ ID NO: 2335498 - RNA, 19 nt, Homo sapiens
  misc_RNA (1)...(19): siRNA sense strand
aggaagaacuggauggcug

SEQ ID NO: 2335499 - RNA, 19 nt, Homo sapiens
  misc_RNA (1)...(19): siRNA sense strand
ccaccugcccagugugcaa

SEQ ID NO: 2335500 - RNA, 19 nt, Homo sapiens
  misc_RNA (1)...(19): siRNA sense strand
ucuugagaguggaggagca

SEQ ID NO: 2335501 - RNA, 19 nt, Homo sapiens
  misc_RNA (1)...(19): siRNA sense strand
ccuaugaggccaucgccaa

SEQ ID NO: 2335502 - RNA, 19 nt, Homo sapiens
  misc_RNA (1)...(19): siRNA sense strand
gaguggaggagcaggccau

SEQ ID NO: 2335503 - RNA, 19 nt, Homo sapiens
  misc_RNA (1)...(19): siRNA sense strand
gagacaaggcagaagcaac

SEQ ID NO: 2335504 - RNA, 19 nt, Homo sapiens
  misc_RNA (1)...(19): siRNA sense strand
uggagaugaaggaggacga

SEQ ID NO: 2335505 - RNA, 19 nt, Homo sapiens
  misc_RNA (1)...(19): siRNA sense strand
augaaacacaagagccgaa

SEQ ID NO: 2335506 - RNA, 19 nt, Homo sapiens
  misc_RNA (1)...(19): siRNA sense strand
ccauggagccagagccagu

SEQ ID NO: 2335507 - RNA, 19 nt, Homo sapiens
  misc_RNA (1)...(19): siRNA sense strand
aggccaucgccaagcacaa

SEQ ID NO: 2335508 - RNA, 19 nt, Homo sapiens
  misc_RNA (1)...(19): siRNA sense strand
gagaagaugaagcagcuca

SEQ ID NO: 2335509 - RNA, 19 nt, Homo sapiens
  misc_RNA (1)...(19): siRNA sense strand
cuccagagccuuugcgcau

SEQ ID NO: 2335510 - RNA, 19 nt, Homo sapiens
  misc_RNA (1)...(19): siRNA sense strand
gagcaugcacugcgggaga

SEQ ID NO: 2335511 - RNA, 19 nt, Homo sapiens
  misc_RNA (1)...(19): siRNA sense strand
uggagaagcugcugcgcga

SEQ ID NO: 2335512 - RNA, 19 nt, Homo sapiens
  misc_RNA (1)...(19): siRNA sense strand
ucuucugccucgaggacaa

SEQ ID NO: 2335513 - RNA, 19 nt, Homo sapiens
  misc_RNA (1)...(19): siRNA sense strand
ccaccugcccagugugcaa

SEQ ID NO: 2335514 - RNA, 19 nt, Homo sapiens
  misc_RNA (1)...(19): siRNA sense strand
ccgaagaccuggagagcca

SEQ ID NO: 2335515 - RNA, 19 nt, Homo sapiens
  misc_RNA (1)...(19): siRNA sense strand
caagucaagaggagagaaa

SEQ ID NO: 2335516 - RNA, 19 nt, Homo sapiens
  misc_RNA (1)...(19): siRNA sense strand
augaagacauggaggauga

SEQ ID NO: 2335517 - RNA, 19 nt, Homo sapiens
  misc_RNA (1)...(19): siRNA sense strand
gaaaugaggaugaugaaga

SEQ ID NO: 2335518 - RNA, 19 nt, Homo sapiens
  misc_RNA (1)...(19): siRNA sense strand
gagaaaugaggaugaugaa

SEQ ID NO: 2335519 - RNA, 19 nt, Homo sapiens
  misc_RNA (1)...(19): siRNA sense strand
gagcagauccacagcgaca

SEQ ID NO: 2335520 - RNA, 19 nt, Homo sapiens
  misc_RNA (1)...(19): siRNA sense strand
ccuucgagaacgagagaga

SEQ ID NO: 2335521 - RNA, 19 nt, Homo sapiens
  misc_RNA (1)...(19): siRNA sense strand
cggagaaggaagccaagaa

SEQ ID NO: 2335522 - RNA, 19 nt, Homo sapiens
  misc_RNA (1)...(19): siRNA sense strand
gcaagaaguccaaggccga

SEQ ID NO: 2335523 - RNA, 19 nt, Homo sapiens
  misc_RNA (1)...(19): siRNA sense strand
ccaucauccugcuggagaa

SEQ ID NO: 2335524 - RNA, 19 nt, Homo sapiens
  misc_RNA (1)...(19): siRNA sense strand
aggagagaaaugaggauga

SEQ ID NO: 2335525 - RNA, 19 nt, Homo sapiens
  misc_RNA (1)...(19): siRNA sense strand
agagaaaugaggaugauga

SEQ ID NO: 2335526 - RNA, 19 nt, Homo sapiens
  misc_RNA (1)...(19): siRNA sense strand
gagaagcaccugcgggaga

SEQ ID NO: 2335527 - RNA, 19 nt, Homo sapiens
  misc_RNA (1)...(19): siRNA sense strand
caggaggccuagaaggaga

SEQ ID NO: 2335528 - RNA, 19 nt, Homo sapiens
  misc_RNA (1)...(19): siRNA sense strand
aggagaaccacaagaacau

SEQ ID NO: 2335529 - RNA, 19 nt, Homo sapiens
  misc_RNA (1)...(19): siRNA sense strand
gggcgaggaugauggcuca

SEQ ID NO: 2335530 - RNA, 19 nt, Homo sapiens
  misc_RNA (1)...(19): siRNA sense strand
cagaagaagaugcgggaug

SEQ ID NO: 2335531 - RNA, 19 nt, Homo sapiens
  misc_RNA (1)...(19): siRNA sense strand
acaaggagcaucuggccaa

SEQ ID NO: 2335532 - RNA, 19 nt, Homo sapiens
  misc_RNA (1)...(19): siRNA sense strand
acgcaagaaggcugaguuu

SEQ ID NO: 2335533 - RNA, 19 nt, Homo sapiens
  misc_RNA (1)...(19): siRNA sense strand
gaagacaggaacagcguga

SEQ ID NO: 2335534 - RNA, 19 nt, Homo sapiens
  misc_RNA (1)...(19): siRNA sense strand
agacauggaggaugaauca

SEQ ID NO: 2335535 - RNA, 19 nt, Homo sapiens
  misc_RNA (1)...(19): siRNA sense strand
gcuuaagaacccugaggca

SEQ ID NO: 2335536 - RNA, 19 nt, Homo sapiens
  misc_RNA (1)...(19): siRNA sense strand
uggccaagucggagaagga

SEQ ID NO: 2335537 - RNA, 19 nt, Homo sapiens
  misc_RNA (1)...(19): siRNA sense strand
aggccuagaaggagagcca

SEQ ID NO: 2335538 - RNA, 19 nt, Homo sapiens
  misc_RNA (1)...(19): siRNA sense strand
aaggagagccagagugcga

SEQ ID NO: 2335539 - RNA, 19 nt, Homo sapiens
  misc_RNA (1)...(19): siRNA sense strand
agucaagaggagagaaaug

SEQ ID NO: 2335540 - RNA, 19 nt, Homo sapiens
  misc_RNA (1)...(19): siRNA sense strand
aguccuucauggaggucua

SEQ ID NO: 2335541 - RNA, 19 nt, Homo sapiens
  misc_RNA (1)...(19): siRNA sense strand
ccggaaaggcacccagaca

SEQ ID NO: 2335542 - RNA, 19 nt, Homo sapiens
  misc_RNA (1)...(19): siRNA sense strand
aaggagaaccacaagaaca

SEQ ID NO: 2335543 - RNA, 19 nt, Homo sapiens
  misc_RNA (1)...(19): siRNA sense strand
ccaugaggccagcgaggau

SEQ ID NO: 2335544 - RNA, 19 nt, Homo sapiens
  misc_RNA (1)...(19): siRNA sense strand
agacaggaacagcgugaca

SEQ ID NO: 2335545 - RNA, 19 nt, Homo sapiens
  misc_RNA (1)...(19): siRNA sense strand
ggagagaaaugaggaugau

SEQ ID NO: 2335546 - RNA, 19 nt, Homo sapiens
  misc_RNA (1)...(19): siRNA sense strand
uggcagaccugacggacca

SEQ ID NO: 2335547 - RNA, 19 nt, Homo sapiens
  misc_RNA (1)...(19): siRNA sense strand
gccuagaaggagagccaga

SEQ ID NO: 2335548 - RNA, 19 nt, Homo sapiens
  misc_RNA (1)...(19): siRNA sense strand
gcaacugggacuuccgcaa

SEQ ID NO: 2335549 - RNA, 19 nt, Homo sapiens
  misc_RNA (1)...(19): siRNA sense strand
agaccauccacgcggacaa

SEQ ID NO: 2335550 - RNA, 19 nt, Homo sapiens
  misc_RNA (1)...(19): siRNA sense strand
acaucaaggagaaccacaa

SEQ ID NO: 2335551 - RNA, 19 nt, Homo sapiens
  misc_RNA (1)...(19): siRNA sense strand
cggaaaggcacccagacau

SEQ ID NO: 2335552 - RNA, 19 nt, Homo sapiens
  misc_RNA (1)...(19): siRNA sense strand
cagucuucguccaggccaa

SEQ ID NO: 2335553 - RNA, 19 nt, Homo sapiens
  misc_RNA (1)...(19): siRNA sense strand
ccacgcagaugaucggaga

SEQ ID NO: 2335554 - RNA, 19 nt, Homo sapiens
  misc_RNA (1)...(19): siRNA sense strand
agucggagaaggaagccaa

SEQ ID NO: 2335555 - RNA, 19 nt, Homo sapiens
  misc_RNA (1)...(19): siRNA sense strand
agguggagcugcagugcca

SEQ ID NO: 2335556 - RNA, 19 nt, Homo sapiens
  misc_RNA (1)...(19): siRNA sense strand
gaggacaccuucagccaga

SEQ ID NO: 2335557 - RNA, 19 nt, Homo sapiens
  misc_RNA (1)...(19): siRNA sense strand
cgggagaagcacugugugu

SEQ ID NO: 2335558 - RNA, 19 nt, Homo sapiens
  misc_RNA (1)...(19): siRNA sense strand
auaagaagaggguugaaga

SEQ ID NO: 2335559 - RNA, 19 nt, Homo sapiens
  misc_RNA (1)...(19): siRNA sense strand
ccuucauccgcuugagcua

SEQ ID NO: 2335560 - RNA, 19 nt, Homo sapiens
  misc_RNA (1)...(19): siRNA sense strand
cgguggaugaccugcagaa

SEQ ID NO: 2335561 - RNA, 19 nt, Homo sapiens
  misc_RNA (1)...(19): siRNA sense strand
agagcgaggaggaguuuau

SEQ ID NO: 2335562 - RNA, 19 nt, Homo sapiens
  misc_RNA (1)...(19): siRNA sense strand
gcgcuggaagacaggaaca

SEQ ID NO: 2335563 - RNA, 19 nt, Homo sapiens
  misc_RNA (1)...(19): siRNA sense strand
gcaacucacucacgggcuu

SEQ ID NO: 2335564 - RNA, 19 nt, Homo sapiens
  misc_RNA (1)...(19): siRNA sense strand
ucaauagccugcaggagca

SEQ ID NO: 2335565 - RNA, 19 nt, Homo sapiens
  misc_RNA (1)...(19): siRNA sense strand
cgagaacgagagagagauc

SEQ ID NO: 2335566 - RNA, 19 nt, Homo sapiens
  misc_RNA (1)...(19): siRNA sense strand
caaccacaugauugaggaa

SEQ ID NO: 2335567 - RNA, 19 nt, Homo sapiens
  misc_RNA (1)...(19): siRNA sense strand
gccagagugcgaucagaaa

SEQ ID NO: 2335568 - RNA, 19 nt, Homo sapiens
  misc_RNA (1)...(19): siRNA sense strand
aagacauaccagugcauca

SEQ ID NO: 2335569 - RNA, 19 nt, Homo sapiens
  misc_RNA (1)...(19): siRNA sense strand
guguaugagaggugugaaa

SEQ ID NO: 2335570 - RNA, 19 nt, Homo sapiens
  misc_RNA (1)...(19): siRNA sense strand
aggaaaaguuaaaggaaga

SEQ ID NO: 2335571 - RNA, 19 nt, Homo sapiens
  misc_RNA (1)...(19): siRNA sense strand
aguuaaaggaagagucauu

SEQ ID NO: 2335572 - RNA, 19 nt, Homo sapiens
  misc_RNA (1)...(19): siRNA sense strand
gggagaaguuccacagcga

SEQ ID NO: 2335573 - RNA, 19 nt, Homo sapiens
  misc_RNA (1)...(19): siRNA sense strand
ucagaauugcugugaggaa

SEQ ID NO: 2335574 - RNA, 19 nt, Homo sapiens
  misc_RNA (1)...(19): siRNA sense strand
gcgaaguaggagaagugaa

SEQ ID NO: 2335575 - RNA, 19 nt, Homo sapiens
  misc_RNA (1)...(19): siRNA sense strand
aaguaggagaagugaaaga

SEQ ID NO: 2335576 - RNA, 19 nt, Homo sapiens
  misc_RNA (1)...(19): siRNA sense strand
agaauuuggucaaggagga

SEQ ID NO: 2335577 - RNA, 19 nt, Homo sapiens
  misc_RNA (1)...(19): siRNA sense strand
caaccaagguggacagccu

SEQ ID NO: 2335578 - RNA, 19 nt, Homo sapiens
  misc_RNA (1)...(19): siRNA sense strand
cgaugaugcacucgcggaa

SEQ ID NO: 2335579 - RNA, 19 nt, Homo sapiens
  misc_RNA (1)...(19): siRNA sense strand
gcggaaauucuccaggcaa

SEQ ID NO: 2335580 - RNA, 19 nt, Homo sapiens
  misc_RNA (1)...(19): siRNA sense strand
caucaagauucgagacgcu

SEQ ID NO: 2335581 - RNA, 19 nt, Homo sapiens
  misc_RNA (1)...(19): siRNA sense strand
cgguacaagcugacauuca

SEQ ID NO: 2335582 - RNA, 19 nt, Homo sapiens
  misc_RNA (1)...(19): siRNA sense strand
ggucagugcgguggaggaa

SEQ ID NO: 2335583 - RNA, 19 nt, Homo sapiens
  misc_RNA (1)...(19): siRNA sense strand
ucaaggaggaacaagaaaa

SEQ ID NO: 2335584 - RNA, 19 nt, Homo sapiens
  misc_RNA (1)...(19): siRNA sense strand
agaauugcugugaggaaaa

SEQ ID NO: 2335585 - RNA, 19 nt, Homo sapiens
  misc_RNA (1)...(19): siRNA sense strand
acaaagaaccuauccgcuu

SEQ ID NO: 2335586 - RNA, 19 nt, Homo sapiens
  misc_RNA (1)...(19): siRNA sense strand
uggucaaggaggaacaaga

SEQ ID NO: 2335587 - RNA, 19 nt, Homo sapiens
  misc_RNA (1)...(19): siRNA sense strand
uugacuuggagguggacaa

SEQ ID NO: 2335588 - RNA, 19 nt, Homo sapiens
  misc_RNA (1)...(19): siRNA sense strand
gcugugaggaaaagaggaa

SEQ ID NO: 2335589 - RNA, 19 nt, Homo sapiens
  misc_RNA (1)...(19): siRNA sense strand
cuccagagucuuucagaau

SEQ ID NO: 2335590 - RNA, 19 nt, Homo sapiens
  misc_RNA (1)...(19): siRNA sense strand
ugccaaagucaaugagagu

SEQ ID NO: 2335591 - RNA, 19 nt, Homo sapiens
  misc_RNA (1)...(19): siRNA sense strand
uguacaaacaggugaugga

SEQ ID NO: 2335592 - RNA, 19 nt, Homo sapiens
  misc_RNA (1)...(19): siRNA sense strand
ggaggaagugcgaagccau

SEQ ID NO: 2335593 - RNA, 19 nt, Homo sapiens
  misc_RNA (1)...(19): siRNA sense strand
ugauugacuuggaggugga

SEQ ID NO: 2335594 - RNA, 19 nt, Homo sapiens
  misc_RNA (1)...(19): siRNA sense strand
ugucuugggcgcagccuaa

SEQ ID NO: 2335595 - RNA, 19 nt, Homo sapiens
  misc_RNA (1)...(19): siRNA sense strand
gugaaggugcugcaggaga

SEQ ID NO: 2335596 - RNA, 19 nt, Homo sapiens
  misc_RNA (1)...(19): siRNA sense strand
gugcuggagaugugcauga

SEQ ID NO: 2335597 - RNA, 19 nt, Homo sapiens
  misc_RNA (1)...(19): siRNA sense strand
caggaaaaguuaaaggaag

SEQ ID NO: 2335598 - RNA, 19 nt, Homo sapiens
  misc_RNA (1)...(19): siRNA sense strand
ugaccagcucauugggaga

SEQ ID NO: 2335599 - RNA, 19 nt, Homo sapiens
  misc_RNA (1)...(19): siRNA sense strand
ggacaauggaccugcgcag

SEQ ID NO: 2335600 - RNA, 19 nt, Homo sapiens
  misc_RNA (1)...(19): siRNA sense strand
aggaaaaguuaaaggaaga

SEQ ID NO: 2335601 - RNA, 19 nt, Homo sapiens
  misc_RNA (1)...(19): siRNA sense strand
aguuaaaggaagagucauu

SEQ ID NO: 2335602 - RNA, 19 nt, Homo sapiens
  misc_RNA (1)...(19): siRNA sense strand
gggagaaguuccacagcga

SEQ ID NO: 2335603 - RNA, 19 nt, Homo sapiens
  misc_RNA (1)...(19): siRNA sense strand
caucaagauucgagacgcu

SEQ ID NO: 2335604 - RNA, 19 nt, Homo sapiens
  misc_RNA (1)...(19): siRNA sense strand
gugcuggagaugugcauga

SEQ ID NO: 2335605 - RNA, 19 nt, Homo sapiens
  misc_RNA (1)...(19): siRNA sense strand
caggaaaaguuaaaggaag

SEQ ID NO: 2335606 - RNA, 19 nt, Homo sapiens
  misc_RNA (1)...(19): siRNA sense strand
gagacagauuggagagaau

SEQ ID NO: 2335607 - RNA, 19 nt, Homo sapiens
  misc_RNA (1)...(19): siRNA sense strand
caacugaagccaagagcaa

SEQ ID NO: 2335608 - RNA, 19 nt, Homo sapiens
  misc_RNA (1)...(19): siRNA sense strand
agauagaagccaaggucaa

SEQ ID NO: 2335609 - RNA, 19 nt, Homo sapiens
  misc_RNA (1)...(19): siRNA sense strand
cggagagaugagugagaua

SEQ ID NO: 2335610 - RNA, 19 nt, Homo sapiens
  misc_RNA (1)...(19): siRNA sense strand
aggagaagaugaaaggcaa

SEQ ID NO: 2335611 - RNA, 19 nt, Homo sapiens
  misc_RNA (1)...(19): siRNA sense strand
cggaaagccgugucagaua

SEQ ID NO: 2335612 - RNA, 19 nt, Homo sapiens
  misc_RNA (1)...(19): siRNA sense strand
agaacaaggaguagaugaa

SEQ ID NO: 2335613 - RNA, 19 nt, Homo sapiens
  misc_RNA (1)...(19): siRNA sense strand
ggccagaaagagugcgaua

SEQ ID NO: 2335614 - RNA, 19 nt, Homo sapiens
  misc_RNA (1)...(19): siRNA sense strand
agaugaaaggcaagaacaa

SEQ ID NO: 2335615 - RNA, 19 nt, Homo sapiens
  misc_RNA (1)...(19): siRNA sense strand
uggagaaguugaaggccaa

SEQ ID NO: 2335616 - RNA, 19 nt, Homo sapiens
  misc_RNA (1)...(19): siRNA sense strand
gggaguaucaggaaagcua

SEQ ID NO: 2335617 - RNA, 19 nt, Homo sapiens
  misc_RNA (1)...(19): siRNA sense strand
ccgaacauucagagaacaa

SEQ ID NO: 2335618 - RNA, 19 nt, Homo sapiens
  misc_RNA (1)...(19): siRNA sense strand
ccgaaaucgacauggagaa

SEQ ID NO: 2335619 - RNA, 19 nt, Homo sapiens
  misc_RNA (1)...(19): siRNA sense strand
ugauugaagcuguggagaa

SEQ ID NO: 2335620 - RNA, 19 nt, Homo sapiens
  misc_RNA (1)...(19): siRNA sense strand
acaaaugaccagugacuau

SEQ ID NO: 2335621 - RNA, 19 nt, Homo sapiens
  misc_RNA (1)...(19): siRNA sense strand
cuguaaaggcaguggagga

SEQ ID NO: 2335622 - RNA, 19 nt, Homo sapiens
  misc_RNA (1)...(19): siRNA sense strand
aagaauaucucgauggcau

SEQ ID NO: 2335623 - RNA, 19 nt, Homo sapiens
  misc_RNA (1)...(19): siRNA sense strand
ggauauggcaucuagggua

SEQ ID NO: 2335624 - RNA, 19 nt, Homo sapiens
  misc_RNA (1)...(19): siRNA sense strand
cagccaacccagagaauga

SEQ ID NO: 2335625 - RNA, 19 nt, Homo sapiens
  misc_RNA (1)...(19): siRNA sense strand
ccaaagaagguggcggaaa

SEQ ID NO: 2335626 - RNA, 19 nt, Homo sapiens
  misc_RNA (1)...(19): siRNA sense strand
ugaaggaagccguggauga

SEQ ID NO: 2335627 - RNA, 19 nt, Homo sapiens
  misc_RNA (1)...(19): siRNA sense strand
ccagaaagagugcgauaau

SEQ ID NO: 2335628 - RNA, 19 nt, Homo sapiens
  misc_RNA (1)...(19): siRNA sense strand
cggcggaaccagaggagau

SEQ ID NO: 2335629 - RNA, 19 nt, Homo sapiens
  misc_RNA (1)...(19): siRNA sense strand
acuccaagguucuggguga

SEQ ID NO: 2335630 - RNA, 19 nt, Homo sapiens
  misc_RNA (1)...(19): siRNA sense strand
ccacaagcgcccuggucaa

SEQ ID NO: 2335631 - RNA, 19 nt, Homo sapiens
  misc_RNA (1)...(19): siRNA sense strand
ugagggaagaugagggcua

SEQ ID NO: 2335632 - RNA, 19 nt, Homo sapiens
  misc_RNA (1)...(19): siRNA sense strand
gcuugugguccgauggaaa

SEQ ID NO: 2335633 - RNA, 19 nt, Homo sapiens
  misc_RNA (1)...(19): siRNA sense strand
auucagagaacaaggagua

SEQ ID NO: 2335634 - RNA, 19 nt, Homo sapiens
  misc_RNA (1)...(19): siRNA sense strand
gaaugagacugaugagcga

SEQ ID NO: 2335635 - RNA, 19 nt, Homo sapiens
  misc_RNA (1)...(19): siRNA sense strand
agaccagauccaagugaua

SEQ ID NO: 2335636 - RNA, 19 nt, Homo sapiens
  misc_RNA (1)...(19): siRNA sense strand
ccucaagacuguaaaggca

SEQ ID NO: 2335637 - RNA, 19 nt, Homo sapiens
  misc_RNA (1)...(19): siRNA sense strand
gcagaauaggaauaacaaa

SEQ ID NO: 2335638 - RNA, 19 nt, Homo sapiens
  misc_RNA (1)...(19): siRNA sense strand
guuaaauacuccaaagcca

SEQ ID NO: 2335639 - RNA, 19 nt, Homo sapiens
  misc_RNA (1)...(19): siRNA sense strand
gcucaggaaaugaugacua

SEQ ID NO: 2335640 - RNA, 19 nt, Homo sapiens
  misc_RNA (1)...(19): siRNA sense strand
gcggaagccaugaaaggaa

SEQ ID NO: 2335641 - RNA, 19 nt, Homo sapiens
  misc_RNA (1)...(19): siRNA sense strand
acacagaugaugaccuaaa

SEQ ID NO: 2335642 - RNA, 19 nt, Homo sapiens
  misc_RNA (1)...(19): siRNA sense strand
cggaugaagacccgaggaa

SEQ ID NO: 2335643 - RNA, 19 nt, Homo sapiens
  misc_RNA (1)...(19): siRNA sense strand
gggccagaguggagaguug

SEQ ID NO: 2335644 - RNA, 19 nt, Homo sapiens
  misc_RNA (1)...(19): siRNA sense strand
uguugguacuaaaggcaaa

SEQ ID NO: 2335645 - RNA, 19 nt, Homo sapiens
  misc_RNA (1)...(19): siRNA sense strand
ggacaauccuaaugaaccu

SEQ ID NO: 2335646 - RNA, 19 nt, Homo sapiens
  misc_RNA (1)...(19): siRNA sense strand
ggaugaagacccgaggaaa

SEQ ID NO: 2335647 - RNA, 19 nt, Homo sapiens
  misc_RNA (1)...(19): siRNA sense strand
cuucggugguccaggaaau

SEQ ID NO: 2335648 - RNA, 19 nt, Homo sapiens
  misc_RNA (1)...(19): siRNA sense strand
gcuacaggcggcaggaaau

SEQ ID NO: 2335649 - RNA, 19 nt, Homo sapiens
  misc_RNA (1)...(19): siRNA sense strand
uggugaaggagaagaugaa

SEQ ID NO: 2335650 - RNA, 19 nt, Homo sapiens
  misc_RNA (1)...(19): siRNA sense strand
agaacaaagucgacgaauc

SEQ ID NO: 2335651 - RNA, 19 nt, Homo sapiens
  misc_RNA (1)...(19): siRNA sense strand
gguacuaaaggcaaagaau

SEQ ID NO: 2335652 - RNA, 19 nt, Homo sapiens
  misc_RNA (1)...(19): siRNA sense strand
gauuuggacuagaagguga

SEQ ID NO: 2335653 - RNA, 19 nt, Homo sapiens
  misc_RNA (1)...(19): siRNA sense strand
gcugagagaagcugcagaa

SEQ ID NO: 2335654 - RNA, 19 nt, Homo sapiens
  misc_RNA (1)...(19): siRNA sense strand
ucucacacuccuugaauaa

SEQ ID NO: 2335655 - RNA, 19 nt, Homo sapiens
  misc_RNA (1)...(19): siRNA sense strand
ggaaaauggagaaguugaa

SEQ ID NO: 2335656 - RNA, 19 nt, Homo sapiens
  misc_RNA (1)...(19): siRNA sense strand
gagagaugagugagauaga

SEQ ID NO: 2335657 - RNA, 19 nt, Homo sapiens
  misc_RNA (1)...(19): siRNA sense strand
cugcauacuugguuggcau

SEQ ID NO: 2335658 - RNA, 19 nt, Homo sapiens
  misc_RNA (1)...(19): siRNA sense strand
gaugaagacccgaggaaag

SEQ ID NO: 2335659 - RNA, 19 nt, Homo sapiens
  misc_RNA (1)...(19): siRNA sense strand
auugagagugugauggaaa

SEQ ID NO: 2335660 - RNA, 19 nt, Homo sapiens
  misc_RNA (1)...(19): siRNA sense strand
gggauuucucugaagacaa

SEQ ID NO: 2335661 - RNA, 19 nt, Homo sapiens
  misc_RNA (1)...(19): siRNA sense strand
agaccaugcuggagaguuc

SEQ ID NO: 2335662 - RNA, 19 nt, Homo sapiens
  misc_RNA (1)...(19): siRNA sense strand
ggacauaaggugacacaac

SEQ ID NO: 2335663 - RNA, 19 nt, Homo sapiens
  misc_RNA (1)...(19): siRNA sense strand
ccagcaagccaguggacga

SEQ ID NO: 2335664 - RNA, 19 nt, Homo sapiens
  misc_RNA (1)...(19): siRNA sense strand
cauugcagaaacagaguua

SEQ ID NO: 2335665 - RNA, 19 nt, Homo sapiens
  misc_RNA (1)...(19): siRNA sense strand
ugcuaaagaaagagcgaga

SEQ ID NO: 2335666 - RNA, 19 nt, Homo sapiens
  misc_RNA (1)...(19): siRNA sense strand
acuggaagaagcaaggaaa

SEQ ID NO: 2335667 - RNA, 19 nt, Homo sapiens
  misc_RNA (1)...(19): siRNA sense strand
ucagauauguugacggcuu

SEQ ID NO: 2335668 - RNA, 19 nt, Homo sapiens
  misc_RNA (1)...(19): siRNA sense strand
ggcuacaggcggcaggaaa

SEQ ID NO: 2335669 - RNA, 19 nt, Homo sapiens
  misc_RNA (1)...(19): siRNA sense strand
cgggcagaacacuggauua

SEQ ID NO: 2335670 - RNA, 19 nt, Homo sapiens
  misc_RNA (1)...(19): siRNA sense strand
uuguagcagaauaggaaua

SEQ ID NO: 2335671 - RNA, 19 nt, Homo sapiens
  misc_RNA (1)...(19): siRNA sense strand
gagaacaaggaguagauga

SEQ ID NO: 2335672 - RNA, 19 nt, Homo sapiens
  misc_RNA (1)...(19): siRNA sense strand
ccaaggaagugcugcagga

SEQ ID NO: 2335673 - RNA, 19 nt, Homo sapiens
  misc_RNA (1)...(19): siRNA sense strand
cggaugagacccuggacuu

SEQ ID NO: 2335674 - RNA, 19 nt, Homo sapiens
  misc_RNA (1)...(19): siRNA sense strand
uguuacgagaugagaggaa

SEQ ID NO: 2335675 - RNA, 19 nt, Homo sapiens
  misc_RNA (1)...(19): siRNA sense strand
cucaggaaaugaugacuaa

SEQ ID NO: 2335676 - RNA, 19 nt, Homo sapiens
  misc_RNA (1)...(19): siRNA sense strand
ugagugagauagaagccaa

SEQ ID NO: 2335677 - RNA, 19 nt, Homo sapiens
  misc_RNA (1)...(19): siRNA sense strand
cggugacagcucaggaaau

SEQ ID NO: 2335678 - RNA, 19 nt, Homo sapiens
  misc_RNA (1)...(19): siRNA sense strand
guaucuuccuggugcagaa

SEQ ID NO: 2335679 - RNA, 19 nt, Homo sapiens
  misc_RNA (1)...(19): siRNA sense strand
acaaacaaguuaagggcaa

SEQ ID NO: 2335680 - RNA, 19 nt, Homo sapiens
  misc_RNA (1)...(19): siRNA sense strand
uuguagacaucaagggaau

SEQ ID NO: 2335681 - RNA, 19 nt, Homo sapiens
  misc_RNA (1)...(19): siRNA sense strand
gagaaagguaccuggguuc

SEQ ID NO: 2335682 - RNA, 19 nt, Homo sapiens
  misc_RNA (1)...(19): siRNA sense strand
agagaaagguaccuggguu

SEQ ID NO: 2335683 - RNA, 19 nt, Homo sapiens
  misc_RNA (1)...(19): siRNA sense strand
ccgagauagcuuccugaaa

SEQ ID NO: 2335684 - RNA, 19 nt, Homo sapiens
  misc_RNA (1)...(19): siRNA sense strand
ggguucaacuaaagcgcca

SEQ ID NO: 2335685 - RNA, 19 nt, Homo sapiens
  misc_RNA (1)...(19): siRNA sense strand
ggaaggagccugagcugcu

SEQ ID NO: 2335686 - RNA, 19 nt, Homo sapiens
  misc_RNA (1)...(19): siRNA sense strand
ccaaugggaaggagccuga

SEQ ID NO: 2335687 - RNA, 19 nt, Homo sapiens
  misc_RNA (1)...(19): siRNA sense strand
acaaacaaguuaagggcaa

SEQ ID NO: 2335688 - RNA, 19 nt, Homo sapiens
  misc_RNA (1)...(19): siRNA sense strand
ggaagagucuacaauguua

SEQ ID NO: 2335689 - RNA, 19 nt, Homo sapiens
  misc_RNA (1)...(19): siRNA sense strand
uuguagacaucaagggaau

SEQ ID NO: 2335690 - RNA, 19 nt, Homo sapiens
  misc_RNA (1)...(19): siRNA sense strand
cugaaacgugugaaggaaa

SEQ ID NO: 2335691 - RNA, 19 nt, Homo sapiens
  misc_RNA (1)...(19): siRNA sense strand
gaaggaaaaugaucagaaa

SEQ ID NO: 2335692 - RNA, 19 nt, Homo sapiens
  misc_RNA (1)...(19): siRNA sense strand
ugaaacgugugaaggaaaa

SEQ ID NO: 2335693 - RNA, 19 nt, Homo sapiens
  misc_RNA (1)...(19): siRNA sense strand
aggagaggcacccgauaua

SEQ ID NO: 2335694 - RNA, 19 nt, Homo sapiens
  misc_RNA (1)...(19): siRNA sense strand
ccugaaacgugugaaggaa

SEQ ID NO: 2335695 - RNA, 19 nt, Homo sapiens
  misc_RNA (1)...(19): siRNA sense strand
gagaaagguaccuggguuc

SEQ ID NO: 2335696 - RNA, 19 nt, Homo sapiens
  misc_RNA (1)...(19): siRNA sense strand
agagaauuaaugugcguau

SEQ ID NO: 2335697 - RNA, 19 nt, Homo sapiens
  misc_RNA (1)...(19): siRNA sense strand
agagaaagguaccuggguu

SEQ ID NO: 2335698 - RNA, 19 nt, Homo sapiens
  misc_RNA (1)...(19): siRNA sense strand
ccgagauagcuuccugaaa

SEQ ID NO: 2335699 - RNA, 19 nt, Homo sapiens
  misc_RNA (1)...(19): siRNA sense strand
ggguucaacuaaagcgcca

SEQ ID NO: 2335700 - RNA, 19 nt, Homo sapiens
  misc_RNA (1)...(19): siRNA sense strand
aagggaaagaggagaggca

SEQ ID NO: 2335701 - RNA, 19 nt, Homo sapiens
  misc_RNA (1)...(19): siRNA sense strand
acacaaagggaaagaggag

SEQ ID NO: 2335702 - RNA, 19 nt, Homo sapiens
  misc_RNA (1)...(19): siRNA sense strand
gaggagaggcacccgauau

SEQ ID NO: 2335703 - RNA, 19 nt, Homo sapiens
  misc_RNA (1)...(19): siRNA sense strand
cuggaagagucuacaaugu

SEQ ID NO: 2335704 - RNA, 19 nt, Homo sapiens
  misc_RNA (1)...(19): siRNA sense strand
cuacaauguuacccagcau

SEQ ID NO: 2335705 - RNA, 19 nt, Homo sapiens
  misc_RNA (1)...(19): siRNA sense strand
ccacauauaugcgaaucua

SEQ ID NO: 2335706 - RNA, 19 nt, Homo sapiens
  misc_RNA (1)...(19): siRNA sense strand
caagagaauuaaugugcgu

SEQ ID NO: 2335707 - RNA, 19 nt, Homo sapiens
  misc_RNA (1)...(19): siRNA sense strand
gaaucuauaagaaagguga

SEQ ID NO: 2335708 - RNA, 19 nt, Homo sapiens
  misc_RNA (1)...(19): siRNA sense strand
ggaaggagccugagcugcu

SEQ ID NO: 2335709 - RNA, 19 nt, Homo sapiens
  misc_RNA (1)...(19): siRNA sense strand
gagaauuaaugugcguauu

SEQ ID NO: 2335710 - RNA, 19 nt, Homo sapiens
  misc_RNA (1)...(19): siRNA sense strand
cuguuggcauuguuguaaa

SEQ ID NO: 2335711 - RNA, 19 nt, Homo sapiens
  misc_RNA (1)...(19): siRNA sense strand
ccaaugggaaggagccuga

SEQ ID NO: 2335712 - RNA, 19 nt, Homo sapiens
  misc_RNA (1)...(19): siRNA sense strand
gaaauuaagcuuaggagga

SEQ ID NO: 2335713 - RNA, 19 nt, Homo sapiens
  misc_RNA (1)...(19): siRNA sense strand
agaaacugcaggaggaaau

SEQ ID NO: 2335714 - RNA, 19 nt, Homo sapiens
  misc_RNA (1)...(19): siRNA sense strand
augaagaauggaagagauu

SEQ ID NO: 2335715 - RNA, 19 nt, Homo sapiens
  misc_RNA (1)...(19): siRNA sense strand
guggaaaacucaaggagau

SEQ ID NO: 2335716 - RNA, 19 nt, Homo sapiens
  misc_RNA (1)...(19): siRNA sense strand
uugacaugguggugaauga

SEQ ID NO: 2335717 - RNA, 19 nt, Homo sapiens
  misc_RNA (1)...(19): siRNA sense strand
ucucuauagcugaggauga

SEQ ID NO: 2335718 - RNA, 19 nt, Homo sapiens
  misc_RNA (1)...(19): siRNA sense strand
ccaaaggggugguggugau

SEQ ID NO: 2335719 - RNA, 19 nt, Homo sapiens
  misc_RNA (1)...(19): siRNA sense strand
gaggaugaagaauggaaga

SEQ ID NO: 2335720 - RNA, 19 nt, Homo sapiens
  misc_RNA (1)...(19): siRNA sense strand
gauucagcaagaagaacaa

SEQ ID NO: 2335721 - RNA, 19 nt, Homo sapiens
  misc_RNA (1)...(19): siRNA sense strand
cuaugagacuugagagggu

SEQ ID NO: 2335722 - RNA, 19 nt, Homo sapiens
  misc_RNA (1)...(19): siRNA sense strand
agaagaacaaggacaacau

SEQ ID NO: 2335723 - RNA, 19 nt, Homo sapiens
  misc_RNA (1)...(19): siRNA sense strand
caccguaaguggagccuga

SEQ ID NO: 2335724 - RNA, 19 nt, Homo sapiens
  misc_RNA (1)...(19): siRNA sense strand
agcaagaagaacaaggaca

SEQ ID NO: 2335725 - RNA, 19 nt, Homo sapiens
  misc_RNA (1)...(19): siRNA sense strand
ccaaaguacuggacagagc

SEQ ID NO: 2335726 - RNA, 19 nt, Homo sapiens
  misc_RNA (1)...(19): siRNA sense strand
cagaaacugcaggaggaaa

SEQ ID NO: 2335727 - RNA, 19 nt, Homo sapiens
  misc_RNA (1)...(19): siRNA sense strand
aaagauucagcaagaagaa

SEQ ID NO: 2335728 - RNA, 19 nt, Homo sapiens
  misc_RNA (1)...(19): siRNA sense strand
agaaagucgccucgaagau

SEQ ID NO: 2335729 - RNA, 19 nt, Homo sapiens
  misc_RNA (1)...(19): siRNA sense strand
agauucagcaagaagaaca

SEQ ID NO: 2335730 - RNA, 19 nt, Homo sapiens
  misc_RNA (1)...(19): siRNA sense strand
cuugagagggucugcaaaa

SEQ ID NO: 2335731 - RNA, 19 nt, Homo sapiens
  misc_RNA (1)...(19): siRNA sense strand
aggaugaaacagaagaaaa

SEQ ID NO: 2335732 - RNA, 19 nt, Homo sapiens
  misc_RNA (1)...(19): siRNA sense strand
ggaugaaacagaagaaaag

SEQ ID NO: 2335733 - RNA, 19 nt, Homo sapiens
  misc_RNA (1)...(19): siRNA sense strand
gcaccugaaugacacgcaa

SEQ ID NO: 2335734 - RNA, 19 nt, Homo sapiens
  misc_RNA (1)...(19): siRNA sense strand
cuacgaaccuggugccgca

SEQ ID NO: 2335735 - RNA, 19 nt, Homo sapiens
  misc_RNA (1)...(19): siRNA sense strand
gcgcacaacuucugccgua

SEQ ID NO: 2335736 - RNA, 19 nt, Homo sapiens
  misc_RNA (1)...(19): siRNA sense strand
gcuacguggcugagacaga

SEQ ID NO: 2335737 - RNA, 19 nt, Homo sapiens
  misc_RNA (1)...(19): siRNA sense strand
ccacgaagcucacggucca

SEQ ID NO: 2335738 - RNA, 19 nt, Homo sapiens
  misc_RNA (1)...(19): siRNA sense strand
cugagacagaggagggcau

SEQ ID NO: 2335739 - RNA, 19 nt, Homo sapiens
  misc_RNA (1)...(19): siRNA sense strand
cggacuucccggacgagua

SEQ ID NO: 2335740 - RNA, 19 nt, Homo sapiens
  misc_RNA (1)...(19): siRNA sense strand
gggaccagacgcagcaaca

SEQ ID NO: 2335741 - RNA, 19 nt, Homo sapiens
  misc_RNA (1)...(19): siRNA sense strand
gcgcacaacuucugccgua

SEQ ID NO: 2335742 - RNA, 19 nt, Homo sapiens
  misc_RNA (1)...(19): siRNA sense strand
gcuacguggcugagacaga

SEQ ID NO: 2335743 - RNA, 19 nt, Homo sapiens
  misc_RNA (1)...(19): siRNA sense strand
ccacgaagcucacggucca

SEQ ID NO: 2335744 - RNA, 19 nt, Homo sapiens
  misc_RNA (1)...(19): siRNA sense strand
cugagacagaggagggcau

SEQ ID NO: 2335745 - RNA, 19 nt, Homo sapiens
  misc_RNA (1)...(19): siRNA sense strand
cggacuucccggacgagua

SEQ ID NO: 2335746 - RNA, 19 nt, Homo sapiens
  misc_RNA (1)...(19): siRNA sense strand
gggaccagacgcagcaaca

SEQ ID NO: 2335747 - RNA, 19 nt, Homo sapiens
  misc_RNA (1)...(19): siRNA sense strand
gcgcacaacuucugccgua

SEQ ID NO: 2335748 - RNA, 19 nt, Homo sapiens
  misc_RNA (1)...(19): siRNA sense strand
gcuacguggcugagacaga

SEQ ID NO: 2335749 - RNA, 19 nt, Homo sapiens
  misc_RNA (1)...(19): siRNA sense strand
ccacgaagcucacggucca

SEQ ID NO: 2335750 - RNA, 19 nt, Homo sapiens
  misc_RNA (1)...(19): siRNA sense strand
cugagacagaggagggcau

SEQ ID NO: 2335751 - RNA, 19 nt, Homo sapiens
  misc_RNA (1)...(19): siRNA sense strand
cggacuucccggacgagua

SEQ ID NO: 2335752 - RNA, 19 nt, Homo sapiens
  misc_RNA (1)...(19): siRNA sense strand
gggaccagacgcagcaaca

SEQ ID NO: 2335753 - RNA, 19 nt, Homo sapiens
  misc_RNA (1)...(19): siRNA sense strand
gcgcacaacuucugccgua

SEQ ID NO: 2335754 - RNA, 19 nt, Homo sapiens
  misc_RNA (1)...(19): siRNA sense strand
gcuacguggcugagacaga

SEQ ID NO: 2335755 - RNA, 19 nt, Homo sapiens
  misc_RNA (1)...(19): siRNA sense strand
ccacgaagcucacggucca

SEQ ID NO: 2335756 - RNA, 19 nt, Homo sapiens
  misc_RNA (1)...(19): siRNA sense strand
cugagacagaggagggcau

SEQ ID NO: 2335757 - RNA, 19 nt, Homo sapiens
  misc_RNA (1)...(19): siRNA sense strand
cggacuucccggacgagua

SEQ ID NO: 2335758 - RNA, 19 nt, Homo sapiens
  misc_RNA (1)...(19): siRNA sense strand
gggaccagacgcagcaaca

SEQ ID NO: 2335759 - RNA, 19 nt, Homo sapiens
  misc_RNA (1)...(19): siRNA sense strand
gcucaaagauggaggcaag

SEQ ID NO: 2335760 - RNA, 19 nt, Homo sapiens
  misc_RNA (1)...(19): siRNA sense strand
ccaacaaagaugugguuca

SEQ ID NO: 2335761 - RNA, 19 nt, Homo sapiens
  misc_RNA (1)...(19): siRNA sense strand
cuggaaacaaagacaauaa

SEQ ID NO: 2335762 - RNA, 19 nt, Homo sapiens
  misc_RNA (1)...(19): siRNA sense strand
uggcagagcaugaggacga

SEQ ID NO: 2335763 - RNA, 19 nt, Homo sapiens
  misc_RNA (1)...(19): siRNA sense strand
agauggaagaggagcagaa

SEQ ID NO: 2335764 - RNA, 19 nt, Homo sapiens
  misc_RNA (1)...(19): siRNA sense strand
cugcccaaacugugagaaa

SEQ ID NO: 2335765 - RNA, 19 nt, Homo sapiens
  misc_RNA (1)...(19): siRNA sense strand
agagcaagucagaggccaa

SEQ ID NO: 2335766 - RNA, 19 nt, Homo sapiens
  misc_RNA (1)...(19): siRNA sense strand
acgucaagcccgugcagaa

SEQ ID NO: 2335767 - RNA, 19 nt, Homo sapiens
  misc_RNA (1)...(19): siRNA sense strand
ugucauggguagaaaacua

SEQ ID NO: 2335768 - RNA, 19 nt, Homo sapiens
  misc_RNA (1)...(19): siRNA sense strand
uguccuucuuguuggauaa

SEQ ID NO: 2335769 - RNA, 19 nt, Homo sapiens
  misc_RNA (1)...(19): siRNA sense strand
agaacuucaaggaggacaa

SEQ ID NO: 2335770 - RNA, 19 nt, Homo sapiens
  misc_RNA (1)...(19): siRNA sense strand
cggaugacggugagcucaa

SEQ ID NO: 2335771 - RNA, 19 nt, Homo sapiens
  misc_RNA (1)...(19): siRNA sense strand
cggcagcguacaagaguga

SEQ ID NO: 2335772 - RNA, 19 nt, Homo sapiens
  misc_RNA (1)...(19): siRNA sense strand
aaucaaagaccuggccaaa

SEQ ID NO: 2335773 - RNA, 19 nt, Homo sapiens
  misc_RNA (1)...(19): siRNA sense strand
gaggcaagaagaaagggaa

SEQ ID NO: 2335774 - RNA, 19 nt, Homo sapiens
  misc_RNA (1)...(19): siRNA sense strand
gcuucaaggacucagacua

SEQ ID NO: 2335775 - RNA, 19 nt, Homo sapiens
  misc_RNA (1)...(19): siRNA sense strand
caaaggaaaacguacgaaa

SEQ ID NO: 2335776 - RNA, 19 nt, Homo sapiens
  misc_RNA (1)...(19): siRNA sense strand
gugaccaaguacugccuaa

SEQ ID NO: 2335777 - RNA, 19 nt, Homo sapiens
  misc_RNA (1)...(19): siRNA sense strand
agaaugauguggagaggcu

SEQ ID NO: 2335778 - RNA, 19 nt, Homo sapiens
  misc_RNA (1)...(19): siRNA sense strand
aggccaaguggaaguacaa

SEQ ID NO: 2335779 - RNA, 19 nt, Homo sapiens
  misc_RNA (1)...(19): siRNA sense strand
aaguggaaguacaagaaca

SEQ ID NO: 2335780 - RNA, 19 nt, Homo sapiens
  misc_RNA (1)...(19): siRNA sense strand
uggacgacuacgaggaaga

SEQ ID NO: 2335781 - RNA, 19 nt, Homo sapiens
  misc_RNA (1)...(19): siRNA sense strand
uaaucaaagaccuggccaa

SEQ ID NO: 2335782 - RNA, 19 nt, Homo sapiens
  misc_RNA (1)...(19): siRNA sense strand
ggaguguggaugugacaga

SEQ ID NO: 2335783 - RNA, 19 nt, Homo sapiens
  misc_RNA (1)...(19): siRNA sense strand
ugaagauggaagaggagca

SEQ ID NO: 2335784 - RNA, 19 nt, Homo sapiens
  misc_RNA (1)...(19): siRNA sense strand
ucaaggaggacaagcccaa

SEQ ID NO: 2335785 - RNA, 19 nt, Homo sapiens
  misc_RNA (1)...(19): siRNA sense strand
aggcuuuggcagagcauga

SEQ ID NO: 2335786 - RNA, 19 nt, Homo sapiens
  misc_RNA (1)...(19): siRNA sense strand
aagaagaaagggaagaagu

SEQ ID NO: 2335787 - RNA, 19 nt, Homo sapiens
  misc_RNA (1)...(19): siRNA sense strand
gaagaaaaggaaaggcuca

SEQ ID NO: 2335788 - RNA, 19 nt, Homo sapiens
  misc_RNA (1)...(19): siRNA sense strand
acugcaagaugaagcugaa

SEQ ID NO: 2335789 - RNA, 19 nt, Homo sapiens
  misc_RNA (1)...(19): siRNA sense strand
agaaggacugcaagaugaa

SEQ ID NO: 2335790 - RNA, 19 nt, Homo sapiens
  misc_RNA (1)...(19): siRNA sense strand
aagaugaagcugaaggagu

SEQ ID NO: 2335791 - RNA, 19 nt, Homo sapiens
  misc_RNA (1)...(19): siRNA sense strand
guggaaaggagguugaaac

SEQ ID NO: 2335792 - RNA, 19 nt, Homo sapiens
  misc_RNA (1)...(19): siRNA sense strand
aagauggaggcaagaagaa

SEQ ID NO: 2335793 - RNA, 19 nt, Homo sapiens
  misc_RNA (1)...(19): siRNA sense strand
gcgagauguucuuugcuga

SEQ ID NO: 2335794 - RNA, 19 nt, Homo sapiens
  misc_RNA (1)...(19): siRNA sense strand
uggaaaggagguugaaacu

SEQ ID NO: 2335795 - RNA, 19 nt, Homo sapiens
  misc_RNA (1)...(19): siRNA sense strand
agauggaggcaagaagaaa

SEQ ID NO: 2335796 - RNA, 19 nt, Homo sapiens
  misc_RNA (1)...(19): siRNA sense strand
ggcaagaagaaagggaaga

SEQ ID NO: 2335797 - RNA, 19 nt, Homo sapiens
  misc_RNA (1)...(19): siRNA sense strand
aaaggaaaacguacgaaaa

SEQ ID NO: 2335798 - RNA, 19 nt, Homo sapiens
  misc_RNA (1)...(19): siRNA sense strand
gcuacaagugcaucgucaa

SEQ ID NO: 2335799 - RNA, 19 nt, Homo sapiens
  misc_RNA (1)...(19): siRNA sense strand
uggaagaggagcagaagcu

SEQ ID NO: 2335800 - RNA, 19 nt, Homo sapiens
  misc_RNA (1)...(19): siRNA sense strand
gggaugaguaugaguacgu

SEQ ID NO: 2335801 - RNA, 19 nt, Homo sapiens
  misc_RNA (1)...(19): siRNA sense strand
ccgcaaugccagagucaag

SEQ ID NO: 2335802 - RNA, 19 nt, Homo sapiens
  misc_RNA (1)...(19): siRNA sense strand
aaagaaacugucaugggua

SEQ ID NO: 2335803 - RNA, 19 nt, Homo sapiens
  misc_RNA (1)...(19): siRNA sense strand
aagaggagcagaagcuaga

SEQ ID NO: 2335804 - RNA, 19 nt, Homo sapiens
  misc_RNA (1)...(19): siRNA sense strand
acgaggaagagcaggacca

SEQ ID NO: 2335805 - RNA, 19 nt, Homo sapiens
  misc_RNA (1)...(19): siRNA sense strand
gugaagaugcccaagccau

SEQ ID NO: 2335806 - RNA, 19 nt, Homo sapiens
  misc_RNA (1)...(19): siRNA sense strand
gacuauuacuacagcacca

SEQ ID NO: 2335807 - RNA, 19 nt, Homo sapiens
  misc_RNA (1)...(19): siRNA sense strand
gccucuaaccacagcgaga

SEQ ID NO: 2335808 - RNA, 19 nt, Homo sapiens
  misc_RNA (1)...(19): siRNA sense strand
cauaugaaguggaaaggag

SEQ ID NO: 2335809 - RNA, 19 nt, Homo sapiens
  misc_RNA (1)...(19): siRNA sense strand
aggcaagaagaaagggaag

SEQ ID NO: 2335810 - RNA, 19 nt, Homo sapiens
  misc_RNA (1)...(19): siRNA sense strand
gauguggagaggcuggaaa

SEQ ID NO: 2335811 - RNA, 19 nt, Homo sapiens
  misc_RNA (1)...(19): siRNA sense strand
gcucaaagauggaggcaag

SEQ ID NO: 2335812 - RNA, 19 nt, Homo sapiens
  misc_RNA (1)...(19): siRNA sense strand
ccaacaaagaugugguuca

SEQ ID NO: 2335813 - RNA, 19 nt, Homo sapiens
  misc_RNA (1)...(19): siRNA sense strand
cuggaaacaaagacaauaa

SEQ ID NO: 2335814 - RNA, 19 nt, Homo sapiens
  misc_RNA (1)...(19): siRNA sense strand
uggcagagcaugaggacga

SEQ ID NO: 2335815 - RNA, 19 nt, Homo sapiens
  misc_RNA (1)...(19): siRNA sense strand
agauggaagaggagcagaa

SEQ ID NO: 2335816 - RNA, 19 nt, Homo sapiens
  misc_RNA (1)...(19): siRNA sense strand
cugcccaaacugugagaaa

SEQ ID NO: 2335817 - RNA, 19 nt, Homo sapiens
  misc_RNA (1)...(19): siRNA sense strand
agagcaagucagaggccaa

SEQ ID NO: 2335818 - RNA, 19 nt, Homo sapiens
  misc_RNA (1)...(19): siRNA sense strand
acgucaagcccgugcagaa

SEQ ID NO: 2335819 - RNA, 19 nt, Homo sapiens
  misc_RNA (1)...(19): siRNA sense strand
ugucauggguagaaaacua

SEQ ID NO: 2335820 - RNA, 19 nt, Homo sapiens
  misc_RNA (1)...(19): siRNA sense strand
uguccuucuuguuggauaa

SEQ ID NO: 2335821 - RNA, 19 nt, Homo sapiens
  misc_RNA (1)...(19): siRNA sense strand
agaacuucaaggaggacaa

SEQ ID NO: 2335822 - RNA, 19 nt, Homo sapiens
  misc_RNA (1)...(19): siRNA sense strand
cggaugacggugagcucaa

SEQ ID NO: 2335823 - RNA, 19 nt, Homo sapiens
  misc_RNA (1)...(19): siRNA sense strand
cggcagcguacaagaguga

SEQ ID NO: 2335824 - RNA, 19 nt, Homo sapiens
  misc_RNA (1)...(19): siRNA sense strand
aaucaaagaccuggccaaa

SEQ ID NO: 2335825 - RNA, 19 nt, Homo sapiens
  misc_RNA (1)...(19): siRNA sense strand
gaggcaagaagaaagggaa

SEQ ID NO: 2335826 - RNA, 19 nt, Homo sapiens
  misc_RNA (1)...(19): siRNA sense strand
gcuucaaggacucagacua

SEQ ID NO: 2335827 - RNA, 19 nt, Homo sapiens
  misc_RNA (1)...(19): siRNA sense strand
caaaggaaaacguacgaaa

SEQ ID NO: 2335828 - RNA, 19 nt, Homo sapiens
  misc_RNA (1)...(19): siRNA sense strand
gugaccaaguacugccuaa

SEQ ID NO: 2335829 - RNA, 19 nt, Homo sapiens
  misc_RNA (1)...(19): siRNA sense strand
agaaugauguggagaggcu

SEQ ID NO: 2335830 - RNA, 19 nt, Homo sapiens
  misc_RNA (1)...(19): siRNA sense strand
aggccaaguggaaguacaa

SEQ ID NO: 2335831 - RNA, 19 nt, Homo sapiens
  misc_RNA (1)...(19): siRNA sense strand
aaguggaaguacaagaaca

SEQ ID NO: 2335832 - RNA, 19 nt, Homo sapiens
  misc_RNA (1)...(19): siRNA sense strand
uggacgacuacgaggaaga

SEQ ID NO: 2335833 - RNA, 19 nt, Homo sapiens
  misc_RNA (1)...(19): siRNA sense strand
uaaucaaagaccuggccaa

SEQ ID NO: 2335834 - RNA, 19 nt, Homo sapiens
  misc_RNA (1)...(19): siRNA sense strand
ggaguguggaugugacaga

SEQ ID NO: 2335835 - RNA, 19 nt, Homo sapiens
  misc_RNA (1)...(19): siRNA sense strand
ugaagauggaagaggagca

SEQ ID NO: 2335836 - RNA, 19 nt, Homo sapiens
  misc_RNA (1)...(19): siRNA sense strand
ucaaggaggacaagcccaa

SEQ ID NO: 2335837 - RNA, 19 nt, Homo sapiens
  misc_RNA (1)...(19): siRNA sense strand
aggcuuuggcagagcauga

SEQ ID NO: 2335838 - RNA, 19 nt, Homo sapiens
  misc_RNA (1)...(19): siRNA sense strand
aagaagaaagggaagaagu

SEQ ID NO: 2335839 - RNA, 19 nt, Homo sapiens
  misc_RNA (1)...(19): siRNA sense strand
gaagaaaaggaaaggcuca

SEQ ID NO: 2335840 - RNA, 19 nt, Homo sapiens
  misc_RNA (1)...(19): siRNA sense strand
acugcaagaugaagcugaa

SEQ ID NO: 2335841 - RNA, 19 nt, Homo sapiens
  misc_RNA (1)...(19): siRNA sense strand
agaaggacugcaagaugaa

SEQ ID NO: 2335842 - RNA, 19 nt, Homo sapiens
  misc_RNA (1)...(19): siRNA sense strand
aagaugaagcugaaggagu

SEQ ID NO: 2335843 - RNA, 19 nt, Homo sapiens
  misc_RNA (1)...(19): siRNA sense strand
guggaaaggagguugaaac

SEQ ID NO: 2335844 - RNA, 19 nt, Homo sapiens
  misc_RNA (1)...(19): siRNA sense strand
aagauggaggcaagaagaa

SEQ ID NO: 2335845 - RNA, 19 nt, Homo sapiens
  misc_RNA (1)...(19): siRNA sense strand
gcgagauguucuuugcuga

SEQ ID NO: 2335846 - RNA, 19 nt, Homo sapiens
  misc_RNA (1)...(19): siRNA sense strand
uggaaaggagguugaaacu

SEQ ID NO: 2335847 - RNA, 19 nt, Homo sapiens
  misc_RNA (1)...(19): siRNA sense strand
agauggaggcaagaagaaa

SEQ ID NO: 2335848 - RNA, 19 nt, Homo sapiens
  misc_RNA (1)...(19): siRNA sense strand
ggcaagaagaaagggaaga

SEQ ID NO: 2335849 - RNA, 19 nt, Homo sapiens
  misc_RNA (1)...(19): siRNA sense strand
aaaggaaaacguacgaaaa

SEQ ID NO: 2335850 - RNA, 19 nt, Homo sapiens
  misc_RNA (1)...(19): siRNA sense strand
gcuacaagugcaucgucaa

SEQ ID NO: 2335851 - RNA, 19 nt, Homo sapiens
  misc_RNA (1)...(19): siRNA sense strand
uggaagaggagcagaagcu

SEQ ID NO: 2335852 - RNA, 19 nt, Homo sapiens
  misc_RNA (1)...(19): siRNA sense strand
gggaugaguaugaguacgu

SEQ ID NO: 2335853 - RNA, 19 nt, Homo sapiens
  misc_RNA (1)...(19): siRNA sense strand
ccgcaaugccagagucaag

SEQ ID NO: 2335854 - RNA, 19 nt, Homo sapiens
  misc_RNA (1)...(19): siRNA sense strand
aaagaaacugucaugggua

SEQ ID NO: 2335855 - RNA, 19 nt, Homo sapiens
  misc_RNA (1)...(19): siRNA sense strand
aagaggagcagaagcuaga

SEQ ID NO: 2335856 - RNA, 19 nt, Homo sapiens
  misc_RNA (1)...(19): siRNA sense strand
acgaggaagagcaggacca

SEQ ID NO: 2335857 - RNA, 19 nt, Homo sapiens
  misc_RNA (1)...(19): siRNA sense strand
gugaagaugcccaagccau

SEQ ID NO: 2335858 - RNA, 19 nt, Homo sapiens
  misc_RNA (1)...(19): siRNA sense strand
gacuauuacuacagcacca

SEQ ID NO: 2335859 - RNA, 19 nt, Homo sapiens
  misc_RNA (1)...(19): siRNA sense strand
gccucuaaccacagcgaga

SEQ ID NO: 2335860 - RNA, 19 nt, Homo sapiens
  misc_RNA (1)...(19): siRNA sense strand
cauaugaaguggaaaggag

SEQ ID NO: 2335861 - RNA, 19 nt, Homo sapiens
  misc_RNA (1)...(19): siRNA sense strand
aggcaagaagaaagggaag

SEQ ID NO: 2335862 - RNA, 19 nt, Homo sapiens
  misc_RNA (1)...(19): siRNA sense strand
gauguggagaggcuggaaa

SEQ ID NO: 2335863 - RNA, 19 nt, Homo sapiens
  misc_RNA (1)...(19): siRNA sense strand
ggaagaagaaauuugggaa

SEQ ID NO: 2335864 - RNA, 19 nt, Homo sapiens
  misc_RNA (1)...(19): siRNA sense strand
ugacugugguccagggaga

SEQ ID NO: 2335865 - RNA, 19 nt, Homo sapiens
  misc_RNA (1)...(19): siRNA sense strand
gggacgaggaagugcugaa

SEQ ID NO: 2335866 - RNA, 19 nt, Homo sapiens
  misc_RNA (1)...(19): siRNA sense strand
cagagagggacgaggaagu

SEQ ID NO: 2335867 - RNA, 19 nt, Homo sapiens
  misc_RNA (1)...(19): siRNA sense strand
cgacuuagcucgaggccug

SEQ ID NO: 2335868 - RNA, 19 nt, Homo sapiens
  misc_RNA (1)...(19): siRNA sense strand
acgaggaagugcugaacca

SEQ ID NO: 2335869 - RNA, 19 nt, Homo sapiens
  misc_RNA (1)...(19): siRNA sense strand
ccauuuacuugcaccggaa

SEQ ID NO: 2335870 - RNA, 19 nt, Homo sapiens
  misc_RNA (1)...(19): siRNA sense strand
uugagcuguucaugggaaa

SEQ ID NO: 2335871 - RNA, 19 nt, Homo sapiens
  misc_RNA (1)...(19): siRNA sense strand
uugcagaagcuguucgaga

SEQ ID NO: 2335872 - RNA, 19 nt, Homo sapiens
  misc_RNA (1)...(19): siRNA sense strand
agaccaaggaggagcugga

SEQ ID NO: 2335873 - RNA, 19 nt, Homo sapiens
  misc_RNA (1)...(19): siRNA sense strand
aggcaaagaccagcaggaa

SEQ ID NO: 2335874 - RNA, 19 nt, Homo sapiens
  misc_RNA (1)...(19): siRNA sense strand
caccagugcccgagaacca

SEQ ID NO: 2335875 - RNA, 19 nt, Homo sapiens
  misc_RNA (1)...(19): siRNA sense strand
acauugagaccaaggagga

SEQ ID NO: 2335876 - RNA, 19 nt, Homo sapiens
  misc_RNA (1)...(19): siRNA sense strand
agaccagcaggaagaagaa

SEQ ID NO: 2335877 - RNA, 19 nt, Homo sapiens
  misc_RNA (1)...(19): siRNA sense strand
gggaacugacuguggucca

SEQ ID NO: 2335878 - RNA, 19 nt, Homo sapiens
  misc_RNA (1)...(19): siRNA sense strand
gcuaggaacccacgggaac

SEQ ID NO: 2335879 - RNA, 19 nt, Homo sapiens
  misc_RNA (1)...(19): siRNA sense strand
ggaagaagaaauuugggaa

SEQ ID NO: 2335880 - RNA, 19 nt, Homo sapiens
  misc_RNA (1)...(19): siRNA sense strand
ugacugugguccagggaga

SEQ ID NO: 2335881 - RNA, 19 nt, Homo sapiens
  misc_RNA (1)...(19): siRNA sense strand
gggacgaggaagugcugaa

SEQ ID NO: 2335882 - RNA, 19 nt, Homo sapiens
  misc_RNA (1)...(19): siRNA sense strand
cagagagggacgaggaagu

SEQ ID NO: 2335883 - RNA, 19 nt, Homo sapiens
  misc_RNA (1)...(19): siRNA sense strand
cgacuuagcucgaggccug

SEQ ID NO: 2335884 - RNA, 19 nt, Homo sapiens
  misc_RNA (1)...(19): siRNA sense strand
acgaggaagugcugaacca

SEQ ID NO: 2335885 - RNA, 19 nt, Homo sapiens
  misc_RNA (1)...(19): siRNA sense strand
ccauuuacuugcaccggaa

SEQ ID NO: 2335886 - RNA, 19 nt, Homo sapiens
  misc_RNA (1)...(19): siRNA sense strand
uugagcuguucaugggaaa

SEQ ID NO: 2335887 - RNA, 19 nt, Homo sapiens
  misc_RNA (1)...(19): siRNA sense strand
uugcagaagcuguucgaga

SEQ ID NO: 2335888 - RNA, 19 nt, Homo sapiens
  misc_RNA (1)...(19): siRNA sense strand
agaccaaggaggagcugga

SEQ ID NO: 2335889 - RNA, 19 nt, Homo sapiens
  misc_RNA (1)...(19): siRNA sense strand
aggcaaagaccagcaggaa

SEQ ID NO: 2335890 - RNA, 19 nt, Homo sapiens
  misc_RNA (1)...(19): siRNA sense strand
caccagugcccgagaacca

SEQ ID NO: 2335891 - RNA, 19 nt, Homo sapiens
  misc_RNA (1)...(19): siRNA sense strand
acauugagaccaaggagga

SEQ ID NO: 2335892 - RNA, 19 nt, Homo sapiens
  misc_RNA (1)...(19): siRNA sense strand
agaccagcaggaagaagaa

SEQ ID NO: 2335893 - RNA, 19 nt, Homo sapiens
  misc_RNA (1)...(19): siRNA sense strand
gggaacugacuguggucca

SEQ ID NO: 2335894 - RNA, 19 nt, Homo sapiens
  misc_RNA (1)...(19): siRNA sense strand
gcuaggaacccacgggaac

SEQ ID NO: 2335895 - RNA, 19 nt, Homo sapiens
  misc_RNA (1)...(19): siRNA sense strand
ggaagaagaaauuugggaa

SEQ ID NO: 2335896 - RNA, 19 nt, Homo sapiens
  misc_RNA (1)...(19): siRNA sense strand
ugacugugguccagggaga

SEQ ID NO: 2335897 - RNA, 19 nt, Homo sapiens
  misc_RNA (1)...(19): siRNA sense strand
gggacgaggaagugcugaa

SEQ ID NO: 2335898 - RNA, 19 nt, Homo sapiens
  misc_RNA (1)...(19): siRNA sense strand
cagagagggacgaggaagu

SEQ ID NO: 2335899 - RNA, 19 nt, Homo sapiens
  misc_RNA (1)...(19): siRNA sense strand
cgacuuagcucgaggccug

SEQ ID NO: 2335900 - RNA, 19 nt, Homo sapiens
  misc_RNA (1)...(19): siRNA sense strand
acgaggaagugcugaacca

SEQ ID NO: 2335901 - RNA, 19 nt, Homo sapiens
  misc_RNA (1)...(19): siRNA sense strand
ccauuuacuugcaccggaa

SEQ ID NO: 2335902 - RNA, 19 nt, Homo sapiens
  misc_RNA (1)...(19): siRNA sense strand
uugagcuguucaugggaaa

SEQ ID NO: 2335903 - RNA, 19 nt, Homo sapiens
  misc_RNA (1)...(19): siRNA sense strand
uugcagaagcuguucgaga

SEQ ID NO: 2335904 - RNA, 19 nt, Homo sapiens
  misc_RNA (1)...(19): siRNA sense strand
agaccaaggaggagcugga

SEQ ID NO: 2335905 - RNA, 19 nt, Homo sapiens
  misc_RNA (1)...(19): siRNA sense strand
aggcaaagaccagcaggaa

SEQ ID NO: 2335906 - RNA, 19 nt, Homo sapiens
  misc_RNA (1)...(19): siRNA sense strand
caccagugcccgagaacca

SEQ ID NO: 2335907 - RNA, 19 nt, Homo sapiens
  misc_RNA (1)...(19): siRNA sense strand
acauugagaccaaggagga

SEQ ID NO: 2335908 - RNA, 19 nt, Homo sapiens
  misc_RNA (1)...(19): siRNA sense strand
agaccagcaggaagaagaa

SEQ ID NO: 2335909 - RNA, 19 nt, Homo sapiens
  misc_RNA (1)...(19): siRNA sense strand
gggaacugacuguggucca

SEQ ID NO: 2335910 - RNA, 19 nt, Homo sapiens
  misc_RNA (1)...(19): siRNA sense strand
gcuaggaacccacgggaac

SEQ ID NO: 2335911 - RNA, 19 nt, Homo sapiens
  misc_RNA (1)...(19): siRNA sense strand
caacaggacauucgggaga

SEQ ID NO: 2335912 - RNA, 19 nt, Homo sapiens
  misc_RNA (1)...(19): siRNA sense strand
gacgagaagucgaggcucu

SEQ ID NO: 2335913 - RNA, 19 nt, Homo sapiens
  misc_RNA (1)...(19): siRNA sense strand
agccggaagugguggcaga

SEQ ID NO: 2335914 - RNA, 19 nt, Homo sapiens
  misc_RNA (1)...(19): siRNA sense strand
ucguauaguccuagaaaca

SEQ ID NO: 2335915 - RNA, 19 nt, Homo sapiens
  misc_RNA (1)...(19): siRNA sense strand
ccuagaaacaguagaccga

SEQ ID NO: 2335916 - RNA, 19 nt, Homo sapiens
  misc_RNA (1)...(19): siRNA sense strand
aguuaugaaaggaggagau

SEQ ID NO: 2335917 - RNA, 19 nt, Homo sapiens
  misc_RNA (1)...(19): siRNA sense strand
caaaucagaugaaagccaa

SEQ ID NO: 2335918 - RNA, 19 nt, Homo sapiens
  misc_RNA (1)...(19): siRNA sense strand
ccaaaucagaugaaagcca

SEQ ID NO: 2335919 - RNA, 19 nt, Homo sapiens
  misc_RNA (1)...(19): siRNA sense strand
aagccaaggaagggaggaa

SEQ ID NO: 2335920 - RNA, 19 nt, Homo sapiens
  misc_RNA (1)...(19): siRNA sense strand
agaccacggcguagcagaa

SEQ ID NO: 2335921 - RNA, 19 nt, Homo sapiens
  misc_RNA (1)...(19): siRNA sense strand
gaugauuaugacagauaca

SEQ ID NO: 2335922 - RNA, 19 nt, Homo sapiens
  misc_RNA (1)...(19): siRNA sense strand
cauaauuuggacagaaagu

SEQ ID NO: 2335923 - RNA, 19 nt, Homo sapiens
  misc_RNA (1)...(19): siRNA sense strand
uggacggcagauugaaaua

SEQ ID NO: 2335924 - RNA, 19 nt, Homo sapiens
  misc_RNA (1)...(19): siRNA sense strand
cgucucuguucgucaggaa

SEQ ID NO: 2335925 - RNA, 19 nt, Homo sapiens
  misc_RNA (1)...(19): siRNA sense strand
ucguauaguccuagaaaca

SEQ ID NO: 2335926 - RNA, 19 nt, Homo sapiens
  misc_RNA (1)...(19): siRNA sense strand
ccuagaaacaguagaccga

SEQ ID NO: 2335927 - RNA, 19 nt, Homo sapiens
  misc_RNA (1)...(19): siRNA sense strand
aguuaugaaaggaggagau

SEQ ID NO: 2335928 - RNA, 19 nt, Homo sapiens
  misc_RNA (1)...(19): siRNA sense strand
caaaucagaugaaagccaa

SEQ ID NO: 2335929 - RNA, 19 nt, Homo sapiens
  misc_RNA (1)...(19): siRNA sense strand
ccaaaucagaugaaagcca

SEQ ID NO: 2335930 - RNA, 19 nt, Homo sapiens
  misc_RNA (1)...(19): siRNA sense strand
aagccaaggaagggaggaa

SEQ ID NO: 2335931 - RNA, 19 nt, Homo sapiens
  misc_RNA (1)...(19): siRNA sense strand
agaccacggcguagcagaa

SEQ ID NO: 2335932 - RNA, 19 nt, Homo sapiens
  misc_RNA (1)...(19): siRNA sense strand
gaugauuaugacagauaca

SEQ ID NO: 2335933 - RNA, 19 nt, Homo sapiens
  misc_RNA (1)...(19): siRNA sense strand
cauaauuuggacagaaagu

SEQ ID NO: 2335934 - RNA, 19 nt, Homo sapiens
  misc_RNA (1)...(19): siRNA sense strand
uggacggcagauugaaaua

SEQ ID NO: 2335935 - RNA, 19 nt, Homo sapiens
  misc_RNA (1)...(19): siRNA sense strand
cgucucuguucgucaggaa

SEQ ID NO: 2335936 - RNA, 19 nt, Homo sapiens
  misc_RNA (1)...(19): siRNA sense strand
ggagaaagccucagccgga

SEQ ID NO: 2335937 - RNA, 19 nt, Homo sapiens
  misc_RNA (1)...(19): siRNA sense strand
acaacaucaugguggugaa

SEQ ID NO: 2335938 - RNA, 19 nt, Homo sapiens
  misc_RNA (1)...(19): siRNA sense strand
acaucaugguggugaagga

SEQ ID NO: 2335939 - RNA, 19 nt, Homo sapiens
  misc_RNA (1)...(19): siRNA sense strand
uauugugauuggcgggauu

SEQ ID NO: 2335940 - RNA, 19 nt, Homo sapiens
  misc_RNA (1)...(19): siRNA sense strand
cagauauggaggugauugu

SEQ ID NO: 2335941 - RNA, 19 nt, Homo sapiens
  misc_RNA (1)...(19): siRNA sense strand
cagacgaccugcagcgugu

SEQ ID NO: 2335942 - RNA, 19 nt, Homo sapiens
  misc_RNA (1)...(19): siRNA sense strand
cggugaugcgguaugaaga

SEQ ID NO: 2335943 - RNA, 19 nt, Homo sapiens
  misc_RNA (1)...(19): siRNA sense strand
uguuggugacuuugggauu

SEQ ID NO: 2335944 - RNA, 19 nt, Homo sapiens
  misc_RNA (1)...(19): siRNA sense strand
ggagaaagccucagccgga

SEQ ID NO: 2335945 - RNA, 19 nt, Homo sapiens
  misc_RNA (1)...(19): siRNA sense strand
acaacaucaugguggugaa

SEQ ID NO: 2335946 - RNA, 19 nt, Homo sapiens
  misc_RNA (1)...(19): siRNA sense strand
acaucaugguggugaagga

SEQ ID NO: 2335947 - RNA, 19 nt, Homo sapiens
  misc_RNA (1)...(19): siRNA sense strand
uauugugauuggcgggauu

SEQ ID NO: 2335948 - RNA, 19 nt, Homo sapiens
  misc_RNA (1)...(19): siRNA sense strand
cagauauggaggugauugu

SEQ ID NO: 2335949 - RNA, 19 nt, Homo sapiens
  misc_RNA (1)...(19): siRNA sense strand
cagacgaccugcagcgugu

SEQ ID NO: 2335950 - RNA, 19 nt, Homo sapiens
  misc_RNA (1)...(19): siRNA sense strand
cggugaugcgguaugaaga

SEQ ID NO: 2335951 - RNA, 19 nt, Homo sapiens
  misc_RNA (1)...(19): siRNA sense strand
uguuggugacuuugggauu

SEQ ID NO: 2335952 - RNA, 19 nt, Homo sapiens
  misc_RNA (1)...(19): siRNA sense strand
gagcaaucuucaagcgcua

SEQ ID NO: 2335953 - RNA, 19 nt, Homo sapiens
  misc_RNA (1)...(19): siRNA sense strand
ccauauugacugugagaag

SEQ ID NO: 2335954 - RNA, 19 nt, Homo sapiens
  misc_RNA (1)...(19): siRNA sense strand
ggcgguugcugguggaaaa

SEQ ID NO: 2335955 - RNA, 19 nt, Homo sapiens
  misc_RNA (1)...(19): siRNA sense strand
ggaucaccguguaccgcaa

SEQ ID NO: 2335956 - RNA, 19 nt, Homo sapiens
  misc_RNA (1)...(19): siRNA sense strand
uggaggaagaccagcgcau

SEQ ID NO: 2335957 - RNA, 19 nt, Homo sapiens
  misc_RNA (1)...(19): siRNA sense strand
uggcauuccugaagcucau

SEQ ID NO: 2335958 - RNA, 19 nt, Homo sapiens
  misc_RNA (1)...(19): siRNA sense strand
gugaagaagucgaggagca

SEQ ID NO: 2335959 - RNA, 19 nt, Homo sapiens
  misc_RNA (1)...(19): siRNA sense strand
agaaaggagccaagggaga

SEQ ID NO: 2335960 - RNA, 19 nt, Homo sapiens
  misc_RNA (1)...(19): siRNA sense strand
cugcaggacccaagggcaa

SEQ ID NO: 2335961 - RNA, 19 nt, Homo sapiens
  misc_RNA (1)...(19): siRNA sense strand
aggugaugcaggacagaaa

SEQ ID NO: 2335962 - RNA, 19 nt, Homo sapiens
  misc_RNA (1)...(19): siRNA sense strand
ccaagggagacaagggaga

SEQ ID NO: 2335963 - RNA, 19 nt, Homo sapiens
  misc_RNA (1)...(19): siRNA sense strand
ggauuuggcaugaggggaa

SEQ ID NO: 2335964 - RNA, 19 nt, Homo sapiens
  misc_RNA (1)...(19): siRNA sense strand
gggugaucgcugagcugaa

SEQ ID NO: 2335965 - RNA, 19 nt, Homo sapiens
  misc_RNA (1)...(19): siRNA sense strand
aguuggaggcugaaaugaa

SEQ ID NO: 2335966 - RNA, 19 nt, Homo sapiens
  misc_RNA (1)...(19): siRNA sense strand
ccaaagggagacagaggca

SEQ ID NO: 2335967 - RNA, 19 nt, Homo sapiens
  misc_RNA (1)...(19): siRNA sense strand
cagaagagcguguggcaug

SEQ ID NO: 2335968 - RNA, 19 nt, Homo sapiens
  misc_RNA (1)...(19): siRNA sense strand
ccaagggugagaaggguga

SEQ ID NO: 2335969 - RNA, 19 nt, Homo sapiens
  misc_RNA (1)...(19): siRNA sense strand
ucauugacauggagggauc

SEQ ID NO: 2335970 - RNA, 19 nt, Homo sapiens
  misc_RNA (1)...(19): siRNA sense strand
ugaacggauugaaaggaga

SEQ ID NO: 2335971 - RNA, 19 nt, Homo sapiens
  misc_RNA (1)...(19): siRNA sense strand
agaccgaggugaugcagga

SEQ ID NO: 2335972 - RNA, 19 nt, Homo sapiens
  misc_RNA (1)...(19): siRNA sense strand
ccgcuggauuugaugacau

SEQ ID NO: 2335973 - RNA, 19 nt, Homo sapiens
  misc_RNA (1)...(19): siRNA sense strand
ccagaaaggagccaaggga

SEQ ID NO: 2335974 - RNA, 19 nt, Homo sapiens
  misc_RNA (1)...(19): siRNA sense strand
cguuaggagcucagacacu

SEQ ID NO: 2335975 - RNA, 19 nt, Homo sapiens
  misc_RNA (1)...(19): siRNA sense strand
gugaagaagucgaggagca

SEQ ID NO: 2335976 - RNA, 19 nt, Homo sapiens
  misc_RNA (1)...(19): siRNA sense strand
agaaaggagccaagggaga

SEQ ID NO: 2335977 - RNA, 19 nt, Homo sapiens
  misc_RNA (1)...(19): siRNA sense strand
cugcaggacccaagggcaa

SEQ ID NO: 2335978 - RNA, 19 nt, Homo sapiens
  misc_RNA (1)...(19): siRNA sense strand
aggugaugcaggacagaaa

SEQ ID NO: 2335979 - RNA, 19 nt, Homo sapiens
  misc_RNA (1)...(19): siRNA sense strand
ccaagggagacaagggaga

SEQ ID NO: 2335980 - RNA, 19 nt, Homo sapiens
  misc_RNA (1)...(19): siRNA sense strand
ggauuuggcaugaggggaa

SEQ ID NO: 2335981 - RNA, 19 nt, Homo sapiens
  misc_RNA (1)...(19): siRNA sense strand
gggugaucgcugagcugaa

SEQ ID NO: 2335982 - RNA, 19 nt, Homo sapiens
  misc_RNA (1)...(19): siRNA sense strand
aguuggaggcugaaaugaa

SEQ ID NO: 2335983 - RNA, 19 nt, Homo sapiens
  misc_RNA (1)...(19): siRNA sense strand
ccaaagggagacagaggca

SEQ ID NO: 2335984 - RNA, 19 nt, Homo sapiens
  misc_RNA (1)...(19): siRNA sense strand
cagaagagcguguggcaug

SEQ ID NO: 2335985 - RNA, 19 nt, Homo sapiens
  misc_RNA (1)...(19): siRNA sense strand
ccaagggugagaaggguga

SEQ ID NO: 2335986 - RNA, 19 nt, Homo sapiens
  misc_RNA (1)...(19): siRNA sense strand
ucauugacauggagggauc

SEQ ID NO: 2335987 - RNA, 19 nt, Homo sapiens
  misc_RNA (1)...(19): siRNA sense strand
ugaacggauugaaaggaga

SEQ ID NO: 2335988 - RNA, 19 nt, Homo sapiens
  misc_RNA (1)...(19): siRNA sense strand
agaccgaggugaugcagga

SEQ ID NO: 2335989 - RNA, 19 nt, Homo sapiens
  misc_RNA (1)...(19): siRNA sense strand
ccgcuggauuugaugacau

SEQ ID NO: 2335990 - RNA, 19 nt, Homo sapiens
  misc_RNA (1)...(19): siRNA sense strand
ccagaaaggagccaaggga

SEQ ID NO: 2335991 - RNA, 19 nt, Homo sapiens
  misc_RNA (1)...(19): siRNA sense strand
cguuaggagcucagacacu

SEQ ID NO: 2335992 - RNA, 19 nt, Homo sapiens
  misc_RNA (1)...(19): siRNA sense strand
gugaagaagucgaggagca

SEQ ID NO: 2335993 - RNA, 19 nt, Homo sapiens
  misc_RNA (1)...(19): siRNA sense strand
agaaaggagccaagggaga

SEQ ID NO: 2335994 - RNA, 19 nt, Homo sapiens
  misc_RNA (1)...(19): siRNA sense strand
cugcaggacccaagggcaa

SEQ ID NO: 2335995 - RNA, 19 nt, Homo sapiens
  misc_RNA (1)...(19): siRNA sense strand
aggugaugcaggacagaaa

SEQ ID NO: 2335996 - RNA, 19 nt, Homo sapiens
  misc_RNA (1)...(19): siRNA sense strand
ccaagggagacaagggaga

SEQ ID NO: 2335997 - RNA, 19 nt, Homo sapiens
  misc_RNA (1)...(19): siRNA sense strand
ggauuuggcaugaggggaa

SEQ ID NO: 2335998 - RNA, 19 nt, Homo sapiens
  misc_RNA (1)...(19): siRNA sense strand
gggugaucgcugagcugaa

SEQ ID NO: 2335999 - RNA, 19 nt, Homo sapiens
  misc_RNA (1)...(19): siRNA sense strand
aguuggaggcugaaaugaa

SEQ ID NO: 2336000 - RNA, 19 nt, Homo sapiens
  misc_RNA (1)...(19): siRNA sense strand
ccaaagggagacagaggca

SEQ ID NO: 2336001 - RNA, 19 nt, Homo sapiens
  misc_RNA (1)...(19): siRNA sense strand
cagaagagcguguggcaug

SEQ ID NO: 2336002 - RNA, 19 nt, Homo sapiens
  misc_RNA (1)...(19): siRNA sense strand
ccaagggugagaaggguga

SEQ ID NO: 2336003 - RNA, 19 nt, Homo sapiens
  misc_RNA (1)...(19): siRNA sense strand
ucauugacauggagggauc

SEQ ID NO: 2336004 - RNA, 19 nt, Homo sapiens
  misc_RNA (1)...(19): siRNA sense strand
ugaacggauugaaaggaga

SEQ ID NO: 2336005 - RNA, 19 nt, Homo sapiens
  misc_RNA (1)...(19): siRNA sense strand
agaccgaggugaugcagga

SEQ ID NO: 2336006 - RNA, 19 nt, Homo sapiens
  misc_RNA (1)...(19): siRNA sense strand
ccgcuggauuugaugacau

SEQ ID NO: 2336007 - RNA, 19 nt, Homo sapiens
  misc_RNA (1)...(19): siRNA sense strand
ccagaaaggagccaaggga

SEQ ID NO: 2336008 - RNA, 19 nt, Homo sapiens
  misc_RNA (1)...(19): siRNA sense strand
cguuaggagcucagacacu

SEQ ID NO: 2336009 - RNA, 19 nt, Homo sapiens
  misc_RNA (1)...(19): siRNA sense strand
aggcaaaggaggaggcaca

SEQ ID NO: 2336010 - RNA, 19 nt, Homo sapiens
  misc_RNA (1)...(19): siRNA sense strand
gcagagaaaccgagagcgu

SEQ ID NO: 2336011 - RNA, 19 nt, Homo sapiens
  misc_RNA (1)...(19): siRNA sense strand
gcagagagcgagagcacga

SEQ ID NO: 2336012 - RNA, 19 nt, Homo sapiens
  misc_RNA (1)...(19): siRNA sense strand
agcacgaauuccagagcaa

SEQ ID NO: 2336013 - RNA, 19 nt, Homo sapiens
  misc_RNA (1)...(19): siRNA sense strand
aggcacagauggaggugga

SEQ ID NO: 2336014 - RNA, 19 nt, Homo sapiens
  misc_RNA (1)...(19): siRNA sense strand
gcaauaccgcagagagcga

SEQ ID NO: 2336015 - RNA, 19 nt, Homo sapiens
  misc_RNA (1)...(19): siRNA sense strand
agagaaaccgagagcgugu

SEQ ID NO: 2336016 - RNA, 19 nt, Homo sapiens
  misc_RNA (1)...(19): siRNA sense strand
gagcaauaccgcagagagc

SEQ ID NO: 2336017 - RNA, 19 nt, Homo sapiens
  misc_RNA (1)...(19): siRNA sense strand
cuacaaggcgccaggugca

SEQ ID NO: 2336018 - RNA, 19 nt, Homo sapiens
  misc_RNA (1)...(19): siRNA sense strand
gcagagaaaccgagagcgu

SEQ ID NO: 2336019 - RNA, 19 nt, Homo sapiens
  misc_RNA (1)...(19): siRNA sense strand
gcagagagcgagagcacga

SEQ ID NO: 2336020 - RNA, 19 nt, Homo sapiens
  misc_RNA (1)...(19): siRNA sense strand
agcacgaauuccagagcaa

SEQ ID NO: 2336021 - RNA, 19 nt, Homo sapiens
  misc_RNA (1)...(19): siRNA sense strand
gcaauaccgcagagagcga

SEQ ID NO: 2336022 - RNA, 19 nt, Homo sapiens
  misc_RNA (1)...(19): siRNA sense strand
agagaaaccgagagcgugu

SEQ ID NO: 2336023 - RNA, 19 nt, Homo sapiens
  misc_RNA (1)...(19): siRNA sense strand
gagcaauaccgcagagagc

SEQ ID NO: 2336024 - RNA, 19 nt, Homo sapiens
  misc_RNA (1)...(19): siRNA sense strand
cuacaaggcgccaggugca

SEQ ID NO: 2336025 - RNA, 19 nt, Homo sapiens
  misc_RNA (1)...(19): siRNA sense strand
gugcaaagaaagagaacau

SEQ ID NO: 2336026 - RNA, 19 nt, Homo sapiens
  misc_RNA (1)...(19): siRNA sense strand
aaauagaacuccagagcca

SEQ ID NO: 2336027 - RNA, 19 nt, Homo sapiens
  misc_RNA (1)...(19): siRNA sense strand
agaagguguuacagagaau

SEQ ID NO: 2336028 - RNA, 19 nt, Homo sapiens
  misc_RNA (1)...(19): siRNA sense strand
ccuaaauauggaaggaaga

SEQ ID NO: 2336029 - RNA, 19 nt, Homo sapiens
  misc_RNA (1)...(19): siRNA sense strand
cggcaacagaagaucuuaa

SEQ ID NO: 2336030 - RNA, 19 nt, Homo sapiens
  misc_RNA (1)...(19): siRNA sense strand
ccuggaaauacuacgcaaa

SEQ ID NO: 2336031 - RNA, 19 nt, Homo sapiens
  misc_RNA (1)...(19): siRNA sense strand
gggaaaggcaagcagcuga

SEQ ID NO: 2336032 - RNA, 19 nt, Homo sapiens
  misc_RNA (1)...(19): siRNA sense strand
ucuaugaaacggugcagaa

SEQ ID NO: 2336033 - RNA, 19 nt, Homo sapiens
  misc_RNA (1)...(19): siRNA sense strand
ucaaagacauccaggccca

SEQ ID NO: 2336034 - RNA, 19 nt, Homo sapiens
  misc_RNA (1)...(19): siRNA sense strand
ccaccugcaugaugggaca

SEQ ID NO: 2336035 - RNA, 19 nt, Homo sapiens
  misc_RNA (1)...(19): siRNA sense strand
cagcugacagugaaagaau

SEQ ID NO: 2336036 - RNA, 19 nt, Homo sapiens
  misc_RNA (1)...(19): siRNA sense strand
aggugggcguagaggugaa

SEQ ID NO: 2336037 - RNA, 19 nt, Homo sapiens
  misc_RNA (1)...(19): siRNA sense strand
ccgaugagaagcacagaga

SEQ ID NO: 2336038 - RNA, 19 nt, Homo sapiens
  misc_RNA (1)...(19): siRNA sense strand
ggguuagaagcgcggaaga

SEQ ID NO: 2336039 - RNA, 19 nt, Homo sapiens
  misc_RNA (1)...(19): siRNA sense strand
uagagcacauugagcgcaa

SEQ ID NO: 2336040 - RNA, 19 nt, Homo sapiens
  misc_RNA (1)...(19): siRNA sense strand
gguuagaagcgcggaagau

SEQ ID NO: 2336041 - RNA, 19 nt, Homo sapiens
  misc_RNA (1)...(19): siRNA sense strand
cuaaauauggaaggaagaa

SEQ ID NO: 2336042 - RNA, 19 nt, Homo sapiens
  misc_RNA (1)...(19): siRNA sense strand
aguauaaaguucggcaaaa

SEQ ID NO: 2336043 - RNA, 19 nt, Homo sapiens
  misc_RNA (1)...(19): siRNA sense strand
gguuggaagaguauaaagu

SEQ ID NO: 2336044 - RNA, 19 nt, Homo sapiens
  misc_RNA (1)...(19): siRNA sense strand
agugaaagaaugcgaguac

SEQ ID NO: 2336045 - RNA, 19 nt, Homo sapiens
  misc_RNA (1)...(19): siRNA sense strand
auugguuggaagaguauaa

SEQ ID NO: 2336046 - RNA, 19 nt, Homo sapiens
  misc_RNA (1)...(19): siRNA sense strand
cguggagcuuguuugcaaa

SEQ ID NO: 2336047 - RNA, 19 nt, Homo sapiens
  misc_RNA (1)...(19): siRNA sense strand
gcgaguacuugaucggcca

SEQ ID NO: 2336048 - RNA, 19 nt, Homo sapiens
  misc_RNA (1)...(19): siRNA sense strand
auaacgugcugguggagga

SEQ ID NO: 2336049 - RNA, 19 nt, Homo sapiens
  misc_RNA (1)...(19): siRNA sense strand
acgcuauuucucagaguuu

SEQ ID NO: 2336050 - RNA, 19 nt, Homo sapiens
  misc_RNA (1)...(19): siRNA sense strand
gugcaaagaaagagaacau

SEQ ID NO: 2336051 - RNA, 19 nt, Homo sapiens
  misc_RNA (1)...(19): siRNA sense strand
aaauagaacuccagagcca

SEQ ID NO: 2336052 - RNA, 19 nt, Homo sapiens
  misc_RNA (1)...(19): siRNA sense strand
agaagguguuacagagaau

SEQ ID NO: 2336053 - RNA, 19 nt, Homo sapiens
  misc_RNA (1)...(19): siRNA sense strand
ccuaaauauggaaggaaga

SEQ ID NO: 2336054 - RNA, 19 nt, Homo sapiens
  misc_RNA (1)...(19): siRNA sense strand
cggcaacagaagaucuuaa

SEQ ID NO: 2336055 - RNA, 19 nt, Homo sapiens
  misc_RNA (1)...(19): siRNA sense strand
ccuggaaauacuacgcaaa

SEQ ID NO: 2336056 - RNA, 19 nt, Homo sapiens
  misc_RNA (1)...(19): siRNA sense strand
gggaaaggcaagcagcuga

SEQ ID NO: 2336057 - RNA, 19 nt, Homo sapiens
  misc_RNA (1)...(19): siRNA sense strand
ucuaugaaacggugcagaa

SEQ ID NO: 2336058 - RNA, 19 nt, Homo sapiens
  misc_RNA (1)...(19): siRNA sense strand
ucaaagacauccaggccca

SEQ ID NO: 2336059 - RNA, 19 nt, Homo sapiens
  misc_RNA (1)...(19): siRNA sense strand
ccaccugcaugaugggaca

SEQ ID NO: 2336060 - RNA, 19 nt, Homo sapiens
  misc_RNA (1)...(19): siRNA sense strand
cagcugacagugaaagaau

SEQ ID NO: 2336061 - RNA, 19 nt, Homo sapiens
  misc_RNA (1)...(19): siRNA sense strand
aggugggcguagaggugaa

SEQ ID NO: 2336062 - RNA, 19 nt, Homo sapiens
  misc_RNA (1)...(19): siRNA sense strand
ccgaugagaagcacagaga

SEQ ID NO: 2336063 - RNA, 19 nt, Homo sapiens
  misc_RNA (1)...(19): siRNA sense strand
ggguuagaagcgcggaaga

SEQ ID NO: 2336064 - RNA, 19 nt, Homo sapiens
  misc_RNA (1)...(19): siRNA sense strand
uagagcacauugagcgcaa

SEQ ID NO: 2336065 - RNA, 19 nt, Homo sapiens
  misc_RNA (1)...(19): siRNA sense strand
gguuagaagcgcggaagau

SEQ ID NO: 2336066 - RNA, 19 nt, Homo sapiens
  misc_RNA (1)...(19): siRNA sense strand
cuaaauauggaaggaagaa

SEQ ID NO: 2336067 - RNA, 19 nt, Homo sapiens
  misc_RNA (1)...(19): siRNA sense strand
aguauaaaguucggcaaaa

SEQ ID NO: 2336068 - RNA, 19 nt, Homo sapiens
  misc_RNA (1)...(19): siRNA sense strand
gguuggaagaguauaaagu

SEQ ID NO: 2336069 - RNA, 19 nt, Homo sapiens
  misc_RNA (1)...(19): siRNA sense strand
agugaaagaaugcgaguac

SEQ ID NO: 2336070 - RNA, 19 nt, Homo sapiens
  misc_RNA (1)...(19): siRNA sense strand
auugguuggaagaguauaa

SEQ ID NO: 2336071 - RNA, 19 nt, Homo sapiens
  misc_RNA (1)...(19): siRNA sense strand
cguggagcuuguuugcaaa

SEQ ID NO: 2336072 - RNA, 19 nt, Homo sapiens
  misc_RNA (1)...(19): siRNA sense strand
gcgaguacuugaucggcca

SEQ ID NO: 2336073 - RNA, 19 nt, Homo sapiens
  misc_RNA (1)...(19): siRNA sense strand
auaacgugcugguggagga

SEQ ID NO: 2336074 - RNA, 19 nt, Homo sapiens
  misc_RNA (1)...(19): siRNA sense strand
acgcuauuucucagaguuu

SEQ ID NO: 2336075 - RNA, 19 nt, Homo sapiens
  misc_RNA (1)...(19): siRNA sense strand
uggccaagauggagagcaa

SEQ ID NO: 2336076 - RNA, 19 nt, Homo sapiens
  misc_RNA (1)...(19): siRNA sense strand
aggaagaguuugacagaga

SEQ ID NO: 2336077 - RNA, 19 nt, Homo sapiens
  misc_RNA (1)...(19): siRNA sense strand
ggacagagggacagagcau

SEQ ID NO: 2336078 - RNA, 19 nt, Homo sapiens
  misc_RNA (1)...(19): siRNA sense strand
ugucaggagaagagugaaa

SEQ ID NO: 2336079 - RNA, 19 nt, Homo sapiens
  misc_RNA (1)...(19): siRNA sense strand
cagaagaggaacagauuga

SEQ ID NO: 2336080 - RNA, 19 nt, Homo sapiens
  misc_RNA (1)...(19): siRNA sense strand
ccuagauguaaauggaaua

SEQ ID NO: 2336081 - RNA, 19 nt, Homo sapiens
  misc_RNA (1)...(19): siRNA sense strand
guacaaagguggugcggcu

SEQ ID NO: 2336082 - RNA, 19 nt, Homo sapiens
  misc_RNA (1)...(19): siRNA sense strand
gauccgaggcugaggccaa

SEQ ID NO: 2336083 - RNA, 19 nt, Homo sapiens
  misc_RNA (1)...(19): siRNA sense strand
gugacagagcugaggaaga

SEQ ID NO: 2336084 - RNA, 19 nt, Homo sapiens
  misc_RNA (1)...(19): siRNA sense strand
acgaggacccugacagaaa

SEQ ID NO: 2336085 - RNA, 19 nt, Homo sapiens
  misc_RNA (1)...(19): siRNA sense strand
caaagaagcauguggccau

SEQ ID NO: 2336086 - RNA, 19 nt, Homo sapiens
  misc_RNA (1)...(19): siRNA sense strand
guucugaggacgaggauca

SEQ ID NO: 2336087 - RNA, 19 nt, Homo sapiens
  misc_RNA (1)...(19): siRNA sense strand
acuaauggucagaaggcaa

SEQ ID NO: 2336088 - RNA, 19 nt, Homo sapiens
  misc_RNA (1)...(19): siRNA sense strand
gagcaaggcauguggagca

SEQ ID NO: 2336089 - RNA, 19 nt, Homo sapiens
  misc_RNA (1)...(19): siRNA sense strand
cgaaaacaaaccuggaaaa

SEQ ID NO: 2336090 - RNA, 19 nt, Homo sapiens
  misc_RNA (1)...(19): siRNA sense strand
gcaagagauccgaggcuga

SEQ ID NO: 2336091 - RNA, 19 nt, Homo sapiens
  misc_RNA (1)...(19): siRNA sense strand
cugccuagucacagacaaa

SEQ ID NO: 2336092 - RNA, 19 nt, Homo sapiens
  misc_RNA (1)...(19): siRNA sense strand
agaaguggacagagggaca

SEQ ID NO: 2336093 - RNA, 19 nt, Homo sapiens
  misc_RNA (1)...(19): siRNA sense strand
acaguaaggcucuggaaau

SEQ ID NO: 2336094 - RNA, 19 nt, Homo sapiens
  misc_RNA (1)...(19): siRNA sense strand
caacaaggccccugaagaa

SEQ ID NO: 2336095 - RNA, 19 nt, Homo sapiens
  misc_RNA (1)...(19): siRNA sense strand
gcacaaaguuggugagccc

SEQ ID NO: 2336096 - RNA, 19 nt, Homo sapiens
  misc_RNA (1)...(19): siRNA sense strand
aagcacaaucagagaauga

SEQ ID NO: 2336097 - RNA, 19 nt, Homo sapiens
  misc_RNA (1)...(19): siRNA sense strand
ugguaaauggcuuggaaca

SEQ ID NO: 2336098 - RNA, 19 nt, Homo sapiens
  misc_RNA (1)...(19): siRNA sense strand
gaauaauagaagcuggaga

SEQ ID NO: 2336099 - RNA, 19 nt, Homo sapiens
  misc_RNA (1)...(19): siRNA sense strand
gaccacaagcaaugacaaa

SEQ ID NO: 2336100 - RNA, 19 nt, Homo sapiens
  misc_RNA (1)...(19): siRNA sense strand
gaucauucagcauggcaaa

SEQ ID NO: 2336101 - RNA, 19 nt, Homo sapiens
  misc_RNA (1)...(19): siRNA sense strand
uggacuuagaggagaguau

SEQ ID NO: 2336102 - RNA, 19 nt, Homo sapiens
  misc_RNA (1)...(19): siRNA sense strand
cggcagaacccaccagaga

SEQ ID NO: 2336103 - RNA, 19 nt, Homo sapiens
  misc_RNA (1)...(19): siRNA sense strand
aagaagaguccggcagaaa

SEQ ID NO: 2336104 - RNA, 19 nt, Homo sapiens
  misc_RNA (1)...(19): siRNA sense strand
ggaucaacuucuagucuca

SEQ ID NO: 2336105 - RNA, 19 nt, Homo sapiens
  misc_RNA (1)...(19): siRNA sense strand
caguguggcaggagggaca

SEQ ID NO: 2336106 - RNA, 19 nt, Homo sapiens
  misc_RNA (1)...(19): siRNA sense strand
ggcugaacaagcuggaaua

SEQ ID NO: 2336107 - RNA, 19 nt, Homo sapiens
  misc_RNA (1)...(19): siRNA sense strand
cagccuugcuccaggauca

SEQ ID NO: 2336108 - RNA, 19 nt, Homo sapiens
  misc_RNA (1)...(19): siRNA sense strand
caauacgaaacaagcauua

SEQ ID NO: 2336109 - RNA, 19 nt, Homo sapiens
  misc_RNA (1)...(19): siRNA sense strand
ccauuagaaaggcagaaua

SEQ ID NO: 2336110 - RNA, 19 nt, Homo sapiens
  misc_RNA (1)...(19): siRNA sense strand
aauaauagaagcuggagau

SEQ ID NO: 2336111 - RNA, 19 nt, Homo sapiens
  misc_RNA (1)...(19): siRNA sense strand
gggaaacgaaccagaaagu

SEQ ID NO: 2336112 - RNA, 19 nt, Homo sapiens
  misc_RNA (1)...(19): siRNA sense strand
uaguauugcuggaggucga

SEQ ID NO: 2336113 - RNA, 19 nt, Homo sapiens
  misc_RNA (1)...(19): siRNA sense strand
agaccaguggccaggguaa

SEQ ID NO: 2336114 - RNA, 19 nt, Homo sapiens
  misc_RNA (1)...(19): siRNA sense strand
gguaaauggcuuggaacau

SEQ ID NO: 2336115 - RNA, 19 nt, Homo sapiens
  misc_RNA (1)...(19): siRNA sense strand
agcaacuacucuagaaauu

SEQ ID NO: 2336116 - RNA, 19 nt, Homo sapiens
  misc_RNA (1)...(19): siRNA sense strand
aggaggaaguggcccuaaa

SEQ ID NO: 2336117 - RNA, 19 nt, Homo sapiens
  misc_RNA (1)...(19): siRNA sense strand
ggucagaaguggacagagg

SEQ ID NO: 2336118 - RNA, 19 nt, Homo sapiens
  misc_RNA (1)...(19): siRNA sense strand
uaguggaggccgaggauca

SEQ ID NO: 2336119 - RNA, 19 nt, Homo sapiens
  misc_RNA (1)...(19): siRNA sense strand
ggaaaugacaggaauccau

SEQ ID NO: 2336120 - RNA, 19 nt, Homo sapiens
  misc_RNA (1)...(19): siRNA sense strand
gcgaaagcacaaucagaga

SEQ ID NO: 2336121 - RNA, 19 nt, Homo sapiens
  misc_RNA (1)...(19): siRNA sense strand
ucaagaaagggauggauca

SEQ ID NO: 2336122 - RNA, 19 nt, Homo sapiens
  misc_RNA (1)...(19): siRNA sense strand
cagccaaugggaaggguuu

SEQ ID NO: 2336123 - RNA, 19 nt, Homo sapiens
  misc_RNA (1)...(19): siRNA sense strand
cagaaggaccugugcaguu

SEQ ID NO: 2336124 - RNA, 19 nt, Homo sapiens
  misc_RNA (1)...(19): siRNA sense strand
cagcaagacucgaucagca

SEQ ID NO: 2336125 - RNA, 19 nt, Homo sapiens
  misc_RNA (1)...(19): siRNA sense strand
cggagucagaagaggaaca

SEQ ID NO: 2336126 - RNA, 19 nt, Homo sapiens
  misc_RNA (1)...(19): siRNA sense strand
ccaacaugguaaauggcuu

SEQ ID NO: 2336127 - RNA, 19 nt, Homo sapiens
  misc_RNA (1)...(19): siRNA sense strand
uugaguuccugcagcgaaa

SEQ ID NO: 2336128 - RNA, 19 nt, Homo sapiens
  misc_RNA (1)...(19): siRNA sense strand
gcucugauucggaacuaaa

SEQ ID NO: 2336129 - RNA, 19 nt, Homo sapiens
  misc_RNA (1)...(19): siRNA sense strand
gugaugaggaagaguuuga

SEQ ID NO: 2336130 - RNA, 19 nt, Homo sapiens
  misc_RNA (1)...(19): siRNA sense strand
gaccuggagcagagggaau

SEQ ID NO: 2336131 - RNA, 19 nt, Homo sapiens
  misc_RNA (1)...(19): siRNA sense strand
cccuaagaauggagaaucu

SEQ ID NO: 2336132 - RNA, 19 nt, Homo sapiens
  misc_RNA (1)...(19): siRNA sense strand
agucagucggccagagaau

SEQ ID NO: 2336133 - RNA, 19 nt, Homo sapiens
  misc_RNA (1)...(19): siRNA sense strand
aggaguacauccagcugaa

SEQ ID NO: 2336134 - RNA, 19 nt, Homo sapiens
  misc_RNA (1)...(19): siRNA sense strand
caggaaaugucacgaucau

SEQ ID NO: 2336135 - RNA, 19 nt, Homo sapiens
  misc_RNA (1)...(19): siRNA sense strand
aaucagagaaugaagcaga

SEQ ID NO: 2336136 - RNA, 19 nt, Homo sapiens
  misc_RNA (1)...(19): siRNA sense strand
gcugaugguuggaguugau

SEQ ID NO: 2336137 - RNA, 19 nt, Homo sapiens
  misc_RNA (1)...(19): siRNA sense strand
ucacagagaaccugcccaa

SEQ ID NO: 2336138 - RNA, 19 nt, Homo sapiens
  misc_RNA (1)...(19): siRNA sense strand
cuaauggucagaaggcaaa

SEQ ID NO: 2336139 - RNA, 19 nt, Homo sapiens
  misc_RNA (1)...(19): siRNA sense strand
ccuaaaucuccuaagugua

SEQ ID NO: 2336140 - RNA, 19 nt, Homo sapiens
  misc_RNA (1)...(19): siRNA sense strand
cggcugaacaagcuggaau

SEQ ID NO: 2336141 - RNA, 19 nt, Homo sapiens
  misc_RNA (1)...(19): siRNA sense strand
ggaccugugcaguuauuaa

SEQ ID NO: 2336142 - RNA, 19 nt, Homo sapiens
  misc_RNA (1)...(19): siRNA sense strand
gggugacagagcugaggaa

SEQ ID NO: 2336143 - RNA, 19 nt, Homo sapiens
  misc_RNA (1)...(19): siRNA sense strand
agucagaagaggaacagau

SEQ ID NO: 2336144 - RNA, 19 nt, Homo sapiens
  misc_RNA (1)...(19): siRNA sense strand
uggccaagauggagagcaa

SEQ ID NO: 2336145 - RNA, 19 nt, Homo sapiens
  misc_RNA (1)...(19): siRNA sense strand
aggaagaguuugacagaga

SEQ ID NO: 2336146 - RNA, 19 nt, Homo sapiens
  misc_RNA (1)...(19): siRNA sense strand
ggacagagggacagagcau

SEQ ID NO: 2336147 - RNA, 19 nt, Homo sapiens
  misc_RNA (1)...(19): siRNA sense strand
ugucaggagaagagugaaa

SEQ ID NO: 2336148 - RNA, 19 nt, Homo sapiens
  misc_RNA (1)...(19): siRNA sense strand
cagaagaggaacagauuga

SEQ ID NO: 2336149 - RNA, 19 nt, Homo sapiens
  misc_RNA (1)...(19): siRNA sense strand
ccuagauguaaauggaaua

SEQ ID NO: 2336150 - RNA, 19 nt, Homo sapiens
  misc_RNA (1)...(19): siRNA sense strand
guacaaagguggugcggcu

SEQ ID NO: 2336151 - RNA, 19 nt, Homo sapiens
  misc_RNA (1)...(19): siRNA sense strand
gauccgaggcugaggccaa

SEQ ID NO: 2336152 - RNA, 19 nt, Homo sapiens
  misc_RNA (1)...(19): siRNA sense strand
gugacagagcugaggaaga

SEQ ID NO: 2336153 - RNA, 19 nt, Homo sapiens
  misc_RNA (1)...(19): siRNA sense strand
acgaggacccugacagaaa

SEQ ID NO: 2336154 - RNA, 19 nt, Homo sapiens
  misc_RNA (1)...(19): siRNA sense strand
caaagaagcauguggccau

SEQ ID NO: 2336155 - RNA, 19 nt, Homo sapiens
  misc_RNA (1)...(19): siRNA sense strand
guucugaggacgaggauca

SEQ ID NO: 2336156 - RNA, 19 nt, Homo sapiens
  misc_RNA (1)...(19): siRNA sense strand
acuaauggucagaaggcaa

SEQ ID NO: 2336157 - RNA, 19 nt, Homo sapiens
  misc_RNA (1)...(19): siRNA sense strand
gagcaaggcauguggagca

SEQ ID NO: 2336158 - RNA, 19 nt, Homo sapiens
  misc_RNA (1)...(19): siRNA sense strand
cgaaaacaaaccuggaaaa

SEQ ID NO: 2336159 - RNA, 19 nt, Homo sapiens
  misc_RNA (1)...(19): siRNA sense strand
gcaagagauccgaggcuga

SEQ ID NO: 2336160 - RNA, 19 nt, Homo sapiens
  misc_RNA (1)...(19): siRNA sense strand
cugccuagucacagacaaa

SEQ ID NO: 2336161 - RNA, 19 nt, Homo sapiens
  misc_RNA (1)...(19): siRNA sense strand
agaaguggacagagggaca

SEQ ID NO: 2336162 - RNA, 19 nt, Homo sapiens
  misc_RNA (1)...(19): siRNA sense strand
acaguaaggcucuggaaau

SEQ ID NO: 2336163 - RNA, 19 nt, Homo sapiens
  misc_RNA (1)...(19): siRNA sense strand
caacaaggccccugaagaa

SEQ ID NO: 2336164 - RNA, 19 nt, Homo sapiens
  misc_RNA (1)...(19): siRNA sense strand
gcacaaaguuggugagccc

SEQ ID NO: 2336165 - RNA, 19 nt, Homo sapiens
  misc_RNA (1)...(19): siRNA sense strand
aagcacaaucagagaauga

SEQ ID NO: 2336166 - RNA, 19 nt, Homo sapiens
  misc_RNA (1)...(19): siRNA sense strand
ugguaaauggcuuggaaca

SEQ ID NO: 2336167 - RNA, 19 nt, Homo sapiens
  misc_RNA (1)...(19): siRNA sense strand
gaauaauagaagcuggaga

SEQ ID NO: 2336168 - RNA, 19 nt, Homo sapiens
  misc_RNA (1)...(19): siRNA sense strand
gaccacaagcaaugacaaa

SEQ ID NO: 2336169 - RNA, 19 nt, Homo sapiens
  misc_RNA (1)...(19): siRNA sense strand
gaucauucagcauggcaaa

SEQ ID NO: 2336170 - RNA, 19 nt, Homo sapiens
  misc_RNA (1)...(19): siRNA sense strand
uggacuuagaggagaguau

SEQ ID NO: 2336171 - RNA, 19 nt, Homo sapiens
  misc_RNA (1)...(19): siRNA sense strand
cggcagaacccaccagaga

SEQ ID NO: 2336172 - RNA, 19 nt, Homo sapiens
  misc_RNA (1)...(19): siRNA sense strand
aagaagaguccggcagaaa

SEQ ID NO: 2336173 - RNA, 19 nt, Homo sapiens
  misc_RNA (1)...(19): siRNA sense strand
ggaucaacuucuagucuca

SEQ ID NO: 2336174 - RNA, 19 nt, Homo sapiens
  misc_RNA (1)...(19): siRNA sense strand
caguguggcaggagggaca

SEQ ID NO: 2336175 - RNA, 19 nt, Homo sapiens
  misc_RNA (1)...(19): siRNA sense strand
ggcugaacaagcuggaaua

SEQ ID NO: 2336176 - RNA, 19 nt, Homo sapiens
  misc_RNA (1)...(19): siRNA sense strand
cagccuugcuccaggauca

SEQ ID NO: 2336177 - RNA, 19 nt, Homo sapiens
  misc_RNA (1)...(19): siRNA sense strand
caauacgaaacaagcauua

SEQ ID NO: 2336178 - RNA, 19 nt, Homo sapiens
  misc_RNA (1)...(19): siRNA sense strand
aauaauagaagcuggagau

SEQ ID NO: 2336179 - RNA, 19 nt, Homo sapiens
  misc_RNA (1)...(19): siRNA sense strand
gggaaacgaaccagaaagu

SEQ ID NO: 2336180 - RNA, 19 nt, Homo sapiens
  misc_RNA (1)...(19): siRNA sense strand
uaguauugcuggaggucga

SEQ ID NO: 2336181 - RNA, 19 nt, Homo sapiens
  misc_RNA (1)...(19): siRNA sense strand
agaccaguggccaggguaa

SEQ ID NO: 2336182 - RNA, 19 nt, Homo sapiens
  misc_RNA (1)...(19): siRNA sense strand
gguaaauggcuuggaacau

SEQ ID NO: 2336183 - RNA, 19 nt, Homo sapiens
  misc_RNA (1)...(19): siRNA sense strand
agcaacuacucuagaaauu

SEQ ID NO: 2336184 - RNA, 19 nt, Homo sapiens
  misc_RNA (1)...(19): siRNA sense strand
aggaggaaguggcccuaaa

SEQ ID NO: 2336185 - RNA, 19 nt, Homo sapiens
  misc_RNA (1)...(19): siRNA sense strand
ggucagaaguggacagagg

SEQ ID NO: 2336186 - RNA, 19 nt, Homo sapiens
  misc_RNA (1)...(19): siRNA sense strand
uaguggaggccgaggauca

SEQ ID NO: 2336187 - RNA, 19 nt, Homo sapiens
  misc_RNA (1)...(19): siRNA sense strand
ggaaaugacaggaauccau

SEQ ID NO: 2336188 - RNA, 19 nt, Homo sapiens
  misc_RNA (1)...(19): siRNA sense strand
gcgaaagcacaaucagaga

SEQ ID NO: 2336189 - RNA, 19 nt, Homo sapiens
  misc_RNA (1)...(19): siRNA sense strand
ucaagaaagggauggauca

SEQ ID NO: 2336190 - RNA, 19 nt, Homo sapiens
  misc_RNA (1)...(19): siRNA sense strand
cagccaaugggaaggguuu

SEQ ID NO: 2336191 - RNA, 19 nt, Homo sapiens
  misc_RNA (1)...(19): siRNA sense strand
cagaaggaccugugcaguu

SEQ ID NO: 2336192 - RNA, 19 nt, Homo sapiens
  misc_RNA (1)...(19): siRNA sense strand
cagcaagacucgaucagca

SEQ ID NO: 2336193 - RNA, 19 nt, Homo sapiens
  misc_RNA (1)...(19): siRNA sense strand
cggagucagaagaggaaca

SEQ ID NO: 2336194 - RNA, 19 nt, Homo sapiens
  misc_RNA (1)...(19): siRNA sense strand
ccaacaugguaaauggcuu

SEQ ID NO: 2336195 - RNA, 19 nt, Homo sapiens
  misc_RNA (1)...(19): siRNA sense strand
uugaguuccugcagcgaaa

SEQ ID NO: 2336196 - RNA, 19 nt, Homo sapiens
  misc_RNA (1)...(19): siRNA sense strand
gcucugauucggaacuaaa

SEQ ID NO: 2336197 - RNA, 19 nt, Homo sapiens
  misc_RNA (1)...(19): siRNA sense strand
gugaugaggaagaguuuga

SEQ ID NO: 2336198 - RNA, 19 nt, Homo sapiens
  misc_RNA (1)...(19): siRNA sense strand
gaccuggagcagagggaau

SEQ ID NO: 2336199 - RNA, 19 nt, Homo sapiens
  misc_RNA (1)...(19): siRNA sense strand
cccuaagaauggagaaucu

SEQ ID NO: 2336200 - RNA, 19 nt, Homo sapiens
  misc_RNA (1)...(19): siRNA sense strand
agucagucggccagagaau

SEQ ID NO: 2336201 - RNA, 19 nt, Homo sapiens
  misc_RNA (1)...(19): siRNA sense strand
aggaguacauccagcugaa

SEQ ID NO: 2336202 - RNA, 19 nt, Homo sapiens
  misc_RNA (1)...(19): siRNA sense strand
caggaaaugucacgaucau

SEQ ID NO: 2336203 - RNA, 19 nt, Homo sapiens
  misc_RNA (1)...(19): siRNA sense strand
aaucagagaaugaagcaga

SEQ ID NO: 2336204 - RNA, 19 nt, Homo sapiens
  misc_RNA (1)...(19): siRNA sense strand
gcugaugguuggaguugau

SEQ ID NO: 2336205 - RNA, 19 nt, Homo sapiens
  misc_RNA (1)...(19): siRNA sense strand
ucacagagaaccugcccaa

SEQ ID NO: 2336206 - RNA, 19 nt, Homo sapiens
  misc_RNA (1)...(19): siRNA sense strand
cuaauggucagaaggcaaa

SEQ ID NO: 2336207 - RNA, 19 nt, Homo sapiens
  misc_RNA (1)...(19): siRNA sense strand
ccuaaaucuccuaagugua

SEQ ID NO: 2336208 - RNA, 19 nt, Homo sapiens
  misc_RNA (1)...(19): siRNA sense strand
cggcugaacaagcuggaau

SEQ ID NO: 2336209 - RNA, 19 nt, Homo sapiens
  misc_RNA (1)...(19): siRNA sense strand
ggaccugugcaguuauuaa

SEQ ID NO: 2336210 - RNA, 19 nt, Homo sapiens
  misc_RNA (1)...(19): siRNA sense strand
gggugacagagcugaggaa

SEQ ID NO: 2336211 - RNA, 19 nt, Homo sapiens
  misc_RNA (1)...(19): siRNA sense strand
agucagaagaggaacagau

SEQ ID NO: 2336212 - RNA, 19 nt, Homo sapiens
  misc_RNA (1)...(19): siRNA sense strand
agaacaaaccagcugaaaa

SEQ ID NO: 2336213 - RNA, 19 nt, Homo sapiens
  misc_RNA (1)...(19): siRNA sense strand
ggagaagacacuugaauau

SEQ ID NO: 2336214 - RNA, 19 nt, Homo sapiens
  misc_RNA (1)...(19): siRNA sense strand
gugaaaugcuggaggagga

SEQ ID NO: 2336215 - RNA, 19 nt, Homo sapiens
  misc_RNA (1)...(19): siRNA sense strand
gggagaagacacuugaaua

SEQ ID NO: 2336216 - RNA, 19 nt, Homo sapiens
  misc_RNA (1)...(19): siRNA sense strand
aagaacagauguacgguua

SEQ ID NO: 2336217 - RNA, 19 nt, Homo sapiens
  misc_RNA (1)...(19): siRNA sense strand
cugaaaagcccucaagaaa

SEQ ID NO: 2336218 - RNA, 19 nt, Homo sapiens
  misc_RNA (1)...(19): siRNA sense strand
uguaaaggaacuugaaaga

SEQ ID NO: 2336219 - RNA, 19 nt, Homo sapiens
  misc_RNA (1)...(19): siRNA sense strand
ugcaagaauuagaggcgua

SEQ ID NO: 2336220 - RNA, 19 nt, Homo sapiens
  misc_RNA (1)...(19): siRNA sense strand
gauguacgguuaagugaaa

SEQ ID NO: 2336221 - RNA, 19 nt, Homo sapiens
  misc_RNA (1)...(19): siRNA sense strand
gagacaaauugaaacaaca

SEQ ID NO: 2336222 - RNA, 19 nt, Homo sapiens
  misc_RNA (1)...(19): siRNA sense strand
uuaaauaugagcuggagaa

SEQ ID NO: 2336223 - RNA, 19 nt, Homo sapiens
  misc_RNA (1)...(19): siRNA sense strand
aauuagaggcguauagaga

SEQ ID NO: 2336224 - RNA, 19 nt, Homo sapiens
  misc_RNA (1)...(19): siRNA sense strand
uaaaggaacuugaaagagu

SEQ ID NO: 2336225 - RNA, 19 nt, Homo sapiens
  misc_RNA (1)...(19): siRNA sense strand
cuugaauauugcaaaggaa

SEQ ID NO: 2336226 - RNA, 19 nt, Homo sapiens
  misc_RNA (1)...(19): siRNA sense strand
gcugauuggacuucugaaa

SEQ ID NO: 2336227 - RNA, 19 nt, Homo sapiens
  misc_RNA (1)...(19): siRNA sense strand
caagaaagccucagugauc

SEQ ID NO: 2336228 - RNA, 19 nt, Homo sapiens
  misc_RNA (1)...(19): siRNA sense strand
cagugaucuuggugccaua

SEQ ID NO: 2336229 - RNA, 19 nt, Homo sapiens
  misc_RNA (1)...(19): siRNA sense strand
gcguauagagacaaauuga

SEQ ID NO: 2336230 - RNA, 19 nt, Homo sapiens
  misc_RNA (1)...(19): siRNA sense strand
caaauugaaacaacagcaa

SEQ ID NO: 2336231 - RNA, 19 nt, Homo sapiens
  misc_RNA (1)...(19): siRNA sense strand
ucuugcaaaucaaaggaaa

SEQ ID NO: 2336232 - RNA, 19 nt, Homo sapiens
  misc_RNA (1)...(19): siRNA sense strand
uuagaggcguauagagaca

SEQ ID NO: 2336233 - RNA, 19 nt, Homo sapiens
  misc_RNA (1)...(19): siRNA sense strand
guuuaggccuucuugcaaa

SEQ ID NO: 2336234 - RNA, 19 nt, Homo sapiens
  misc_RNA (1)...(19): siRNA sense strand
cugaacaagagcuuauuaa

SEQ ID NO: 2336235 - RNA, 19 nt, Homo sapiens
  misc_RNA (1)...(19): siRNA sense strand
cugcuuauguaaaggaacu

SEQ ID NO: 2336236 - RNA, 19 nt, Homo sapiens
  misc_RNA (1)...(19): siRNA sense strand
aaggaagaauucagggaac

SEQ ID NO: 2336237 - RNA, 19 nt, Homo sapiens
  misc_RNA (1)...(19): siRNA sense strand
gaaaggaagaauucaggga

SEQ ID NO: 2336238 - RNA, 19 nt, Homo sapiens
  misc_RNA (1)...(19): siRNA sense strand
ggaagaauucagggaacuu

SEQ ID NO: 2336239 - RNA, 19 nt, Homo sapiens
  misc_RNA (1)...(19): siRNA sense strand
acaaaugggagaagacacu

SEQ ID NO: 2336240 - RNA, 19 nt, Homo sapiens
  misc_RNA (1)...(19): siRNA sense strand
gaagauuauccaggagcua

SEQ ID NO: 2336241 - RNA, 19 nt, Homo sapiens
  misc_RNA (1)...(19): siRNA sense strand
ugcuggaggaggaagauua

SEQ ID NO: 2336242 - RNA, 19 nt, Homo sapiens
  misc_RNA (1)...(19): siRNA sense strand
aggaagaauucagggaacu

SEQ ID NO: 2336243 - RNA, 19 nt, Homo sapiens
  misc_RNA (1)...(19): siRNA sense strand
agauuauccaggagcuauu

SEQ ID NO: 2336244 - RNA, 19 nt, Homo sapiens
  misc_RNA (1)...(19): siRNA sense strand
uuaucgacuucuuggaaaa

SEQ ID NO: 2336245 - RNA, 19 nt, Homo sapiens
  misc_RNA (1)...(19): siRNA sense strand
uguucuugguuauguggaa

SEQ ID NO: 2336246 - RNA, 19 nt, Homo sapiens
  misc_RNA (1)...(19): siRNA sense strand
guuaaauaugagcuggaga

SEQ ID NO: 2336247 - RNA, 19 nt, Homo sapiens
  misc_RNA (1)...(19): siRNA sense strand
agaggcguauagagacaaa

SEQ ID NO: 2336248 - RNA, 19 nt, Homo sapiens
  misc_RNA (1)...(19): siRNA sense strand
agaacagauguacgguuaa

SEQ ID NO: 2336249 - RNA, 19 nt, Homo sapiens
  misc_RNA (1)...(19): siRNA sense strand
ugcaagauacuuuggaaca

SEQ ID NO: 2336250 - RNA, 19 nt, Homo sapiens
  misc_RNA (1)...(19): siRNA sense strand
ggaggaagauuauccagga

SEQ ID NO: 2336251 - RNA, 19 nt, Homo sapiens
  misc_RNA (1)...(19): siRNA sense strand
ggaagauuauccaggagcu

SEQ ID NO: 2336252 - RNA, 19 nt, Homo sapiens
  misc_RNA (1)...(19): siRNA sense strand
uuauuaagauuguggccaa

SEQ ID NO: 2336253 - RNA, 19 nt, Homo sapiens
  misc_RNA (1)...(19): siRNA sense strand
gaaaugacguguuugccaa

SEQ ID NO: 2336254 - RNA, 19 nt, Homo sapiens
  misc_RNA (1)...(19): siRNA sense strand
cugaugaaauagaugccua

SEQ ID NO: 2336255 - RNA, 19 nt, Homo sapiens
  misc_RNA (1)...(19): siRNA sense strand
agucaagacggaugugaau

SEQ ID NO: 2336256 - RNA, 19 nt, Homo sapiens
  misc_RNA (1)...(19): siRNA sense strand
ugagagacccggagagcca

SEQ ID NO: 2336257 - RNA, 19 nt, Homo sapiens
  misc_RNA (1)...(19): siRNA sense strand
uggugagaguaucggaaau

SEQ ID NO: 2336258 - RNA, 19 nt, Homo sapiens
  misc_RNA (1)...(19): siRNA sense strand
ugguuaugauggugagagu

SEQ ID NO: 2336259 - RNA, 19 nt, Homo sapiens
  misc_RNA (1)...(19): siRNA sense strand
ucuggagauacuugaauaa

SEQ ID NO: 2336260 - RNA, 19 nt, Homo sapiens
  misc_RNA (1)...(19): siRNA sense strand
gguaaagggguccgaagaa

SEQ ID NO: 2336261 - RNA, 19 nt, Homo sapiens
  misc_RNA (1)...(19): siRNA sense strand
uggccaagaaguacagaga

SEQ ID NO: 2336262 - RNA, 19 nt, Homo sapiens
  misc_RNA (1)...(19): siRNA sense strand
ggacagcguagaagccgaa

SEQ ID NO: 2336263 - RNA, 19 nt, Homo sapiens
  misc_RNA (1)...(19): siRNA sense strand
ugcugaaggcccugaggaa

SEQ ID NO: 2336264 - RNA, 19 nt, Homo sapiens
  misc_RNA (1)...(19): siRNA sense strand
ggaaaugacguguuugcca

SEQ ID NO: 2336265 - RNA, 19 nt, Homo sapiens
  misc_RNA (1)...(19): siRNA sense strand
gggacaacauacaagccga

SEQ ID NO: 2336266 - RNA, 19 nt, Homo sapiens
  misc_RNA (1)...(19): siRNA sense strand
aagucaagacggaugugaa

SEQ ID NO: 2336267 - RNA, 19 nt, Homo sapiens
  misc_RNA (1)...(19): siRNA sense strand
cccugaggaagcuggauaa

SEQ ID NO: 2336268 - RNA, 19 nt, Homo sapiens
  misc_RNA (1)...(19): siRNA sense strand
gggacagcguagaagccga

SEQ ID NO: 2336269 - RNA, 19 nt, Homo sapiens
  misc_RNA (1)...(19): siRNA sense strand
ggguaaagggguccgaaga

SEQ ID NO: 2336270 - RNA, 19 nt, Homo sapiens
  misc_RNA (1)...(19): siRNA sense strand
ucucaaacuccuugcacaa

SEQ ID NO: 2336271 - RNA, 19 nt, Homo sapiens
  misc_RNA (1)...(19): siRNA sense strand
agaaacuuguauugggaga

SEQ ID NO: 2336272 - RNA, 19 nt, Homo sapiens
  misc_RNA (1)...(19): siRNA sense strand
gaagaaacuuguauuggga

SEQ ID NO: 2336273 - RNA, 19 nt, Homo sapiens
  misc_RNA (1)...(19): siRNA sense strand
cuggaaugucuuugacuuu

SEQ ID NO: 2336274 - RNA, 19 nt, Homo sapiens
  misc_RNA (1)...(19): siRNA sense strand
cuggaagagugccuggaau

SEQ ID NO: 2336275 - RNA, 19 nt, Homo sapiens
  misc_RNA (1)...(19): siRNA sense strand
cggcacacuaucagggagu

SEQ ID NO: 2336276 - RNA, 19 nt, Homo sapiens
  misc_RNA (1)...(19): siRNA sense strand
acuuguauugggagaucaa

SEQ ID NO: 2336277 - RNA, 19 nt, Homo sapiens
  misc_RNA (1)...(19): siRNA sense strand
ucucaaacuccuugcacaa

SEQ ID NO: 2336278 - RNA, 19 nt, Homo sapiens
  misc_RNA (1)...(19): siRNA sense strand
agaaacuuguauugggaga

SEQ ID NO: 2336279 - RNA, 19 nt, Homo sapiens
  misc_RNA (1)...(19): siRNA sense strand
gaagaaacuuguauuggga

SEQ ID NO: 2336280 - RNA, 19 nt, Homo sapiens
  misc_RNA (1)...(19): siRNA sense strand
cuggaaugucuuugacuuu

SEQ ID NO: 2336281 - RNA, 19 nt, Homo sapiens
  misc_RNA (1)...(19): siRNA sense strand
cuggaagagugccuggaau

SEQ ID NO: 2336282 - RNA, 19 nt, Homo sapiens
  misc_RNA (1)...(19): siRNA sense strand
cggcacacuaucagggagu

SEQ ID NO: 2336283 - RNA, 19 nt, Homo sapiens
  misc_RNA (1)...(19): siRNA sense strand
acuuguauugggagaucaa

SEQ ID NO: 2336284 - RNA, 19 nt, Homo sapiens
  misc_RNA (1)...(19): siRNA sense strand
ucucaaacuccuugcacaa

SEQ ID NO: 2336285 - RNA, 19 nt, Homo sapiens
  misc_RNA (1)...(19): siRNA sense strand
agaaacuuguauugggaga

SEQ ID NO: 2336286 - RNA, 19 nt, Homo sapiens
  misc_RNA (1)...(19): siRNA sense strand
gaagaaacuuguauuggga

SEQ ID NO: 2336287 - RNA, 19 nt, Homo sapiens
  misc_RNA (1)...(19): siRNA sense strand
cuggaaugucuuugacuuu

SEQ ID NO: 2336288 - RNA, 19 nt, Homo sapiens
  misc_RNA (1)...(19): siRNA sense strand
cuggaagagugccuggaau

SEQ ID NO: 2336289 - RNA, 19 nt, Homo sapiens
  misc_RNA (1)...(19): siRNA sense strand
cggcacacuaucagggagu

SEQ ID NO: 2336290 - RNA, 19 nt, Homo sapiens
  misc_RNA (1)...(19): siRNA sense strand
acuuguauugggagaucaa

SEQ ID NO: 2336291 - RNA, 19 nt, Homo sapiens
  misc_RNA (1)...(19): siRNA sense strand
agaaacuuguauugggaga

SEQ ID NO: 2336292 - RNA, 19 nt, Homo sapiens
  misc_RNA (1)...(19): siRNA sense strand
gaagaaacuuguauuggga

SEQ ID NO: 2336293 - RNA, 19 nt, Homo sapiens
  misc_RNA (1)...(19): siRNA sense strand
cuggaaugucuuugacuuu

SEQ ID NO: 2336294 - RNA, 19 nt, Homo sapiens
  misc_RNA (1)...(19): siRNA sense strand
cuggaagagugccuggaau

SEQ ID NO: 2336295 - RNA, 19 nt, Homo sapiens
  misc_RNA (1)...(19): siRNA sense strand
cggcacacuaucagggagu

SEQ ID NO: 2336296 - RNA, 19 nt, Homo sapiens
  misc_RNA (1)...(19): siRNA sense strand
acuuguauugggagaucaa

SEQ ID NO: 2336297 - RNA, 19 nt, Homo sapiens
  misc_RNA (1)...(19): siRNA sense strand
cugaucagauguauggcaa

SEQ ID NO: 2336298 - RNA, 19 nt, Homo sapiens
  misc_RNA (1)...(19): siRNA sense strand
ucacggaggugcuggagga

SEQ ID NO: 2336299 - RNA, 19 nt, Homo sapiens
  misc_RNA (1)...(19): siRNA sense strand
ccugggagaagcagaguca

SEQ ID NO: 2336300 - RNA, 19 nt, Homo sapiens
  misc_RNA (1)...(19): siRNA sense strand
gagaaggauuugaaggaca

SEQ ID NO: 2336301 - RNA, 19 nt, Homo sapiens
  misc_RNA (1)...(19): siRNA sense strand
gaaggaaacuuuagcccaa

SEQ ID NO: 2336302 - RNA, 19 nt, Homo sapiens
  misc_RNA (1)...(19): siRNA sense strand
gucgcaagauugaaggaaa

SEQ ID NO: 2336303 - RNA, 19 nt, Homo sapiens
  misc_RNA (1)...(19): siRNA sense strand
gcucauacgcgcuuggaga

SEQ ID NO: 2336304 - RNA, 19 nt, Homo sapiens
  misc_RNA (1)...(19): siRNA sense strand
gcauugaccuggugcacga

SEQ ID NO: 2336305 - RNA, 19 nt, Homo sapiens
  misc_RNA (1)...(19): siRNA sense strand
cugagaacgccgugaggau

SEQ ID NO: 2336306 - RNA, 19 nt, Homo sapiens
  misc_RNA (1)...(19): siRNA sense strand
cucaaagcgaugugaacaa

SEQ ID NO: 2336307 - RNA, 19 nt, Homo sapiens
  misc_RNA (1)...(19): siRNA sense strand
acaaaggaugccagggaca

SEQ ID NO: 2336308 - RNA, 19 nt, Homo sapiens
  misc_RNA (1)...(19): siRNA sense strand
agaacagagacucgaggaa

SEQ ID NO: 2336309 - RNA, 19 nt, Homo sapiens
  misc_RNA (1)...(19): siRNA sense strand
ucgcaagauugaaggaaac

SEQ ID NO: 2336310 - RNA, 19 nt, Homo sapiens
  misc_RNA (1)...(19): siRNA sense strand
gggagaagcgcauuggcau

SEQ ID NO: 2336311 - RNA, 19 nt, Homo sapiens
  misc_RNA (1)...(19): siRNA sense strand
cagccaaugaucugcgcaa

SEQ ID NO: 2336312 - RNA, 19 nt, Homo sapiens
  misc_RNA (1)...(19): siRNA sense strand
ugauaaaggaggcugagau

SEQ ID NO: 2336313 - RNA, 19 nt, Homo sapiens
  misc_RNA (1)...(19): siRNA sense strand
uugaaaagaccacaagaaa

SEQ ID NO: 2336314 - RNA, 19 nt, Homo sapiens
  misc_RNA (1)...(19): siRNA sense strand
cugagaucauccagggcau

SEQ ID NO: 2336315 - RNA, 19 nt, Homo sapiens
  misc_RNA (1)...(19): siRNA sense strand
ggacaagcuggcugaucau

SEQ ID NO: 2336316 - RNA, 19 nt, Homo sapiens
  misc_RNA (1)...(19): siRNA sense strand
acgacacaguggagcauga

SEQ ID NO: 2336317 - RNA, 19 nt, Homo sapiens
  misc_RNA (1)...(19): siRNA sense strand
aggcagagcugaaagggcu

SEQ ID NO: 2336318 - RNA, 19 nt, Homo sapiens
  misc_RNA (1)...(19): siRNA sense strand
ccaauguggagaaggcuga

SEQ ID NO: 2336319 - RNA, 19 nt, Homo sapiens
  misc_RNA (1)...(19): siRNA sense strand
uguaugcagaugaggaaau

SEQ ID NO: 2336320 - RNA, 19 nt, Homo sapiens
  misc_RNA (1)...(19): siRNA sense strand
ugaacaagaaacuagaaca

SEQ ID NO: 2336321 - RNA, 19 nt, Homo sapiens
  misc_RNA (1)...(19): siRNA sense strand
uggaagacugguuggacuu

SEQ ID NO: 2336322 - RNA, 19 nt, Homo sapiens
  misc_RNA (1)...(19): siRNA sense strand
uggagaaggcugacaagca

SEQ ID NO: 2336323 - RNA, 19 nt, Homo sapiens
  misc_RNA (1)...(19): siRNA sense strand
cuggaagacugguuggacu

SEQ ID NO: 2336324 - RNA, 19 nt, Homo sapiens
  misc_RNA (1)...(19): siRNA sense strand
cccacaaugucgcaagauu

SEQ ID NO: 2336325 - RNA, 19 nt, Homo sapiens
  misc_RNA (1)...(19): siRNA sense strand
auacaaaggaugccaggga

SEQ ID NO: 2336326 - RNA, 19 nt, Homo sapiens
  misc_RNA (1)...(19): siRNA sense strand
uugagaaggauuugaagga

SEQ ID NO: 2336327 - RNA, 19 nt, Homo sapiens
  misc_RNA (1)...(19): siRNA sense strand
aacagagacucgaggaagu

SEQ ID NO: 2336328 - RNA, 19 nt, Homo sapiens
  misc_RNA (1)...(19): siRNA sense strand
cugacaagcagcggaacaa

SEQ ID NO: 2336329 - RNA, 19 nt, Homo sapiens
  misc_RNA (1)...(19): siRNA sense strand
uguguaugcagaugaggaa

SEQ ID NO: 2336330 - RNA, 19 nt, Homo sapiens
  misc_RNA (1)...(19): siRNA sense strand
gcgaugugaacaagaaacu

SEQ ID NO: 2336331 - RNA, 19 nt, Homo sapiens
  misc_RNA (1)...(19): siRNA sense strand
cccuggagaccuugaaaga

SEQ ID NO: 2336332 - RNA, 19 nt, Homo sapiens
  misc_RNA (1)...(19): siRNA sense strand
cauacagggagaagcgcau

SEQ ID NO: 2336333 - RNA, 19 nt, Homo sapiens
  misc_RNA (1)...(19): siRNA sense strand
caguggagcaugagcugau

SEQ ID NO: 2336334 - RNA, 19 nt, Homo sapiens
  misc_RNA (1)...(19): siRNA sense strand
agaaacuagaacagagacu

SEQ ID NO: 2336335 - RNA, 19 nt, Homo sapiens
  misc_RNA (1)...(19): siRNA sense strand
cuaacaagaaccaguacca

SEQ ID NO: 2336336 - RNA, 19 nt, Homo sapiens
  misc_RNA (1)...(19): siRNA sense strand
gugcaaauauaaugggaca

SEQ ID NO: 2336337 - RNA, 19 nt, Homo sapiens
  misc_RNA (1)...(19): siRNA sense strand
ccuacauccaugagaauua

SEQ ID NO: 2336338 - RNA, 19 nt, Homo sapiens
  misc_RNA (1)...(19): siRNA sense strand
ucagaaucaaagaggauaa

SEQ ID NO: 2336339 - RNA, 19 nt, Homo sapiens
  misc_RNA (1)...(19): siRNA sense strand
gcagagagauaucaggaga

SEQ ID NO: 2336340 - RNA, 19 nt, Homo sapiens
  misc_RNA (1)...(19): siRNA sense strand
uguuagaggaggagacaga

SEQ ID NO: 2336341 - RNA, 19 nt, Homo sapiens
  misc_RNA (1)...(19): siRNA sense strand
ccgucaggcacgagaagaa

SEQ ID NO: 2336342 - RNA, 19 nt, Homo sapiens
  misc_RNA (1)...(19): siRNA sense strand
agauaucaggagagagauu

SEQ ID NO: 2336343 - RNA, 19 nt, Homo sapiens
  misc_RNA (1)...(19): siRNA sense strand
ccagaguguuagaggagga

SEQ ID NO: 2336344 - RNA, 19 nt, Homo sapiens
  misc_RNA (1)...(19): siRNA sense strand
cgauagagcccgucaggca

SEQ ID NO: 2336345 - RNA, 19 nt, Homo sapiens
  misc_RNA (1)...(19): siRNA sense strand
cagaagaaguccaaccuga

SEQ ID NO: 2336346 - RNA, 19 nt, Homo sapiens
  misc_RNA (1)...(19): siRNA sense strand
uuaccaaggagaaggagaa

SEQ ID NO: 2336347 - RNA, 19 nt, Homo sapiens
  misc_RNA (1)...(19): siRNA sense strand
agucgacugcagagagaua

SEQ ID NO: 2336348 - RNA, 19 nt, Homo sapiens
  misc_RNA (1)...(19): siRNA sense strand
augugaaaguuuagaagga

SEQ ID NO: 2336349 - RNA, 19 nt, Homo sapiens
  misc_RNA (1)...(19): siRNA sense strand
uggaagauuuaaagaagca

SEQ ID NO: 2336350 - RNA, 19 nt, Homo sapiens
  misc_RNA (1)...(19): siRNA sense strand
aggcuguguaugagggaau

SEQ ID NO: 2336351 - RNA, 19 nt, Homo sapiens
  misc_RNA (1)...(19): siRNA sense strand
gagaaugagccuaaggugu

SEQ ID NO: 2336352 - RNA, 19 nt, Homo sapiens
  misc_RNA (1)...(19): siRNA sense strand
gcaagaagcuacuggagag

SEQ ID NO: 2336353 - RNA, 19 nt, Homo sapiens
  misc_RNA (1)...(19): siRNA sense strand
uagagaacgccaaggguga

SEQ ID NO: 2336354 - RNA, 19 nt, Homo sapiens
  misc_RNA (1)...(19): siRNA sense strand
acgaggacgucauggguca

SEQ ID NO: 2336355 - RNA, 19 nt, Homo sapiens
  misc_RNA (1)...(19): siRNA sense strand
augagagauuugagaaguu

SEQ ID NO: 2336356 - RNA, 19 nt, Homo sapiens
  misc_RNA (1)...(19): siRNA sense strand
cgaagcagggauugaucaa

SEQ ID NO: 2336357 - RNA, 19 nt, Homo sapiens
  misc_RNA (1)...(19): siRNA sense strand
cauggaagucacagaguca

SEQ ID NO: 2336358 - RNA, 19 nt, Homo sapiens
  misc_RNA (1)...(19): siRNA sense strand
augcugagaaugagccuaa

SEQ ID NO: 2336359 - RNA, 19 nt, Homo sapiens
  misc_RNA (1)...(19): siRNA sense strand
ggaagagaucaucaagaga

SEQ ID NO: 2336360 - RNA, 19 nt, Homo sapiens
  misc_RNA (1)...(19): siRNA sense strand
cugcacaguucucagacaa

SEQ ID NO: 2336361 - RNA, 19 nt, Homo sapiens
  misc_RNA (1)...(19): siRNA sense strand
cugaagaguccaagcaacu

SEQ ID NO: 2336362 - RNA, 19 nt, Homo sapiens
  misc_RNA (1)...(19): siRNA sense strand
aguaugugucucagaagaa

SEQ ID NO: 2336363 - RNA, 19 nt, Homo sapiens
  misc_RNA (1)...(19): siRNA sense strand
agaucgaugccgugaugua

SEQ ID NO: 2336364 - RNA, 19 nt, Homo sapiens
  misc_RNA (1)...(19): siRNA sense strand
gugaaaguuuagaaggaug

SEQ ID NO: 2336365 - RNA, 19 nt, Homo sapiens
  misc_RNA (1)...(19): siRNA sense strand
acaccggaugagagagcua

SEQ ID NO: 2336366 - RNA, 19 nt, Homo sapiens
  misc_RNA (1)...(19): siRNA sense strand
agaagcuacuggagagcca

SEQ ID NO: 2336367 - RNA, 19 nt, Homo sapiens
  misc_RNA (1)...(19): siRNA sense strand
uggcgacaaugcugagauu

SEQ ID NO: 2336368 - RNA, 19 nt, Homo sapiens
  misc_RNA (1)...(19): siRNA sense strand
aggugaaagucuucgacca

SEQ ID NO: 2336369 - RNA, 19 nt, Homo sapiens
  misc_RNA (1)...(19): siRNA sense strand
uccaagaacucgacaggga

SEQ ID NO: 2336370 - RNA, 19 nt, Homo sapiens
  misc_RNA (1)...(19): siRNA sense strand
ucugugacauccugagcaa

SEQ ID NO: 2336371 - RNA, 19 nt, Homo sapiens
  misc_RNA (1)...(19): siRNA sense strand
uggaaaauucuucggggaa

SEQ ID NO: 2336372 - RNA, 19 nt, Homo sapiens
  misc_RNA (1)...(19): siRNA sense strand
agaccauuccuguuacaaa

SEQ ID NO: 2336373 - RNA, 19 nt, Homo sapiens
  misc_RNA (1)...(19): siRNA sense strand
uuaucaaacccgaguggau

SEQ ID NO: 2336374 - RNA, 19 nt, Homo sapiens
  misc_RNA (1)...(19): siRNA sense strand
uuuaagagaccaagaucga

SEQ ID NO: 2336375 - RNA, 19 nt, Homo sapiens
  misc_RNA (1)...(19): siRNA sense strand
gauuauggccuuaacgagu

SEQ ID NO: 2336376 - RNA, 19 nt, Homo sapiens
  misc_RNA (1)...(19): siRNA sense strand
cgcuuugucuaaugggcaa

SEQ ID NO: 2336377 - RNA, 19 nt, Homo sapiens
  misc_RNA (1)...(19): siRNA sense strand
guccagaagguuugcaaca

SEQ ID NO: 2336378 - RNA, 19 nt, Homo sapiens
  misc_RNA (1)...(19): siRNA sense strand
aagagaucaucaagagagu

SEQ ID NO: 2336379 - RNA, 19 nt, Homo sapiens
  misc_RNA (1)...(19): siRNA sense strand
ccgugauguaugugaaagu

SEQ ID NO: 2336380 - RNA, 19 nt, Homo sapiens
  misc_RNA (1)...(19): siRNA sense strand
gguggacgaagcagggauu

SEQ ID NO: 2336381 - RNA, 19 nt, Homo sapiens
  misc_RNA (1)...(19): siRNA sense strand
ucuucgaguuuguggggaa

SEQ ID NO: 2336382 - RNA, 19 nt, Homo sapiens
  misc_RNA (1)...(19): siRNA sense strand
uggggaagaugcuggggaa

SEQ ID NO: 2336383 - RNA, 19 nt, Homo sapiens
  misc_RNA (1)...(19): siRNA sense strand
cugcccaacuacagcaaga

SEQ ID NO: 2336384 - RNA, 19 nt, Homo sapiens
  misc_RNA (1)...(19): siRNA sense strand
gugauguaugugaaaguuu

SEQ ID NO: 2336385 - RNA, 19 nt, Homo sapiens
  misc_RNA (1)...(19): siRNA sense strand
aggaggagacagauggguu

SEQ ID NO: 2336386 - RNA, 19 nt, Homo sapiens
  misc_RNA (1)...(19): siRNA sense strand
cauucaaacuggaagagcu

SEQ ID NO: 2336387 - RNA, 19 nt, Homo sapiens
  misc_RNA (1)...(19): siRNA sense strand
ggggaaaaggugaaagucu

SEQ ID NO: 2336388 - RNA, 19 nt, Homo sapiens
  misc_RNA (1)...(19): siRNA sense strand
ccuugaugacauugaaguu

SEQ ID NO: 2336389 - RNA, 19 nt, Homo sapiens
  misc_RNA (1)...(19): siRNA sense strand
gugcaaauauaaugggaca

SEQ ID NO: 2336390 - RNA, 19 nt, Homo sapiens
  misc_RNA (1)...(19): siRNA sense strand
ucagaaucaaagaggauaa

SEQ ID NO: 2336391 - RNA, 19 nt, Homo sapiens
  misc_RNA (1)...(19): siRNA sense strand
gcagagagauaucaggaga

SEQ ID NO: 2336392 - RNA, 19 nt, Homo sapiens
  misc_RNA (1)...(19): siRNA sense strand
uguuagaggaggagacaga

SEQ ID NO: 2336393 - RNA, 19 nt, Homo sapiens
  misc_RNA (1)...(19): siRNA sense strand
ccgucaggcacgagaagaa

SEQ ID NO: 2336394 - RNA, 19 nt, Homo sapiens
  misc_RNA (1)...(19): siRNA sense strand
agauaucaggagagagauu

SEQ ID NO: 2336395 - RNA, 19 nt, Homo sapiens
  misc_RNA (1)...(19): siRNA sense strand
ccagaguguuagaggagga

SEQ ID NO: 2336396 - RNA, 19 nt, Homo sapiens
  misc_RNA (1)...(19): siRNA sense strand
cgauagagcccgucaggca

SEQ ID NO: 2336397 - RNA, 19 nt, Homo sapiens
  misc_RNA (1)...(19): siRNA sense strand
cagaagaaguccaaccuga

SEQ ID NO: 2336398 - RNA, 19 nt, Homo sapiens
  misc_RNA (1)...(19): siRNA sense strand
uuaccaaggagaaggagaa

SEQ ID NO: 2336399 - RNA, 19 nt, Homo sapiens
  misc_RNA (1)...(19): siRNA sense strand
agucgacugcagagagaua

SEQ ID NO: 2336400 - RNA, 19 nt, Homo sapiens
  misc_RNA (1)...(19): siRNA sense strand
augugaaaguuuagaagga

SEQ ID NO: 2336401 - RNA, 19 nt, Homo sapiens
  misc_RNA (1)...(19): siRNA sense strand
gagaaugagccuaaggugu

SEQ ID NO: 2336402 - RNA, 19 nt, Homo sapiens
  misc_RNA (1)...(19): siRNA sense strand
gcaagaagcuacuggagag

SEQ ID NO: 2336403 - RNA, 19 nt, Homo sapiens
  misc_RNA (1)...(19): siRNA sense strand
uagagaacgccaaggguga

SEQ ID NO: 2336404 - RNA, 19 nt, Homo sapiens
  misc_RNA (1)...(19): siRNA sense strand
augagagauuugagaaguu

SEQ ID NO: 2336405 - RNA, 19 nt, Homo sapiens
  misc_RNA (1)...(19): siRNA sense strand
augcugagaaugagccuaa

SEQ ID NO: 2336406 - RNA, 19 nt, Homo sapiens
  misc_RNA (1)...(19): siRNA sense strand
cugcacaguucucagacaa

SEQ ID NO: 2336407 - RNA, 19 nt, Homo sapiens
  misc_RNA (1)...(19): siRNA sense strand
cugaagaguccaagcaacu

SEQ ID NO: 2336408 - RNA, 19 nt, Homo sapiens
  misc_RNA (1)...(19): siRNA sense strand
aguaugugucucagaagaa

SEQ ID NO: 2336409 - RNA, 19 nt, Homo sapiens
  misc_RNA (1)...(19): siRNA sense strand
agaucgaugccgugaugua

SEQ ID NO: 2336410 - RNA, 19 nt, Homo sapiens
  misc_RNA (1)...(19): siRNA sense strand
gugaaaguuuagaaggaug

SEQ ID NO: 2336411 - RNA, 19 nt, Homo sapiens
  misc_RNA (1)...(19): siRNA sense strand
agaagcuacuggagagcca

SEQ ID NO: 2336412 - RNA, 19 nt, Homo sapiens
  misc_RNA (1)...(19): siRNA sense strand
aggugaaagucuucgacca

SEQ ID NO: 2336413 - RNA, 19 nt, Homo sapiens
  misc_RNA (1)...(19): siRNA sense strand
uccaagaacucgacaggga

SEQ ID NO: 2336414 - RNA, 19 nt, Homo sapiens
  misc_RNA (1)...(19): siRNA sense strand
ucugugacauccugagcaa

SEQ ID NO: 2336415 - RNA, 19 nt, Homo sapiens
  misc_RNA (1)...(19): siRNA sense strand
uggaaaauucuucggggaa

SEQ ID NO: 2336416 - RNA, 19 nt, Homo sapiens
  misc_RNA (1)...(19): siRNA sense strand
uuuaagagaccaagaucga

SEQ ID NO: 2336417 - RNA, 19 nt, Homo sapiens
  misc_RNA (1)...(19): siRNA sense strand
gauuauggccuuaacgagu

SEQ ID NO: 2336418 - RNA, 19 nt, Homo sapiens
  misc_RNA (1)...(19): siRNA sense strand
cgcuuugucuaaugggcaa

SEQ ID NO: 2336419 - RNA, 19 nt, Homo sapiens
  misc_RNA (1)...(19): siRNA sense strand
guccagaagguuugcaaca

SEQ ID NO: 2336420 - RNA, 19 nt, Homo sapiens
  misc_RNA (1)...(19): siRNA sense strand
ccgugauguaugugaaagu

SEQ ID NO: 2336421 - RNA, 19 nt, Homo sapiens
  misc_RNA (1)...(19): siRNA sense strand
gugauguaugugaaaguuu

SEQ ID NO: 2336422 - RNA, 19 nt, Homo sapiens
  misc_RNA (1)...(19): siRNA sense strand
aggaggagacagauggguu

SEQ ID NO: 2336423 - RNA, 19 nt, Homo sapiens
  misc_RNA (1)...(19): siRNA sense strand
cauucaaacuggaagagcu

SEQ ID NO: 2336424 - RNA, 19 nt, Homo sapiens
  misc_RNA (1)...(19): siRNA sense strand
ggggaaaaggugaaagucu

SEQ ID NO: 2336425 - RNA, 19 nt, Homo sapiens
  misc_RNA (1)...(19): siRNA sense strand
ccuugaugacauugaaguu

SEQ ID NO: 2336426 - RNA, 19 nt, Homo sapiens
  misc_RNA (1)...(19): siRNA sense strand
gugcaaauauaaugggaca

SEQ ID NO: 2336427 - RNA, 19 nt, Homo sapiens
  misc_RNA (1)...(19): siRNA sense strand
ccuacauccaugagaauua

SEQ ID NO: 2336428 - RNA, 19 nt, Homo sapiens
  misc_RNA (1)...(19): siRNA sense strand
ucagaaucaaagaggauaa

SEQ ID NO: 2336429 - RNA, 19 nt, Homo sapiens
  misc_RNA (1)...(19): siRNA sense strand
gcagagagauaucaggaga

SEQ ID NO: 2336430 - RNA, 19 nt, Homo sapiens
  misc_RNA (1)...(19): siRNA sense strand
uguuagaggaggagacaga

SEQ ID NO: 2336431 - RNA, 19 nt, Homo sapiens
  misc_RNA (1)...(19): siRNA sense strand
ccgucaggcacgagaagaa

SEQ ID NO: 2336432 - RNA, 19 nt, Homo sapiens
  misc_RNA (1)...(19): siRNA sense strand
agauaucaggagagagauu

SEQ ID NO: 2336433 - RNA, 19 nt, Homo sapiens
  misc_RNA (1)...(19): siRNA sense strand
ccagaguguuagaggagga

SEQ ID NO: 2336434 - RNA, 19 nt, Homo sapiens
  misc_RNA (1)...(19): siRNA sense strand
cgauagagcccgucaggca

SEQ ID NO: 2336435 - RNA, 19 nt, Homo sapiens
  misc_RNA (1)...(19): siRNA sense strand
cagaagaaguccaaccuga

SEQ ID NO: 2336436 - RNA, 19 nt, Homo sapiens
  misc_RNA (1)...(19): siRNA sense strand
uuaccaaggagaaggagaa

SEQ ID NO: 2336437 - RNA, 19 nt, Homo sapiens
  misc_RNA (1)...(19): siRNA sense strand
agucgacugcagagagaua

SEQ ID NO: 2336438 - RNA, 19 nt, Homo sapiens
  misc_RNA (1)...(19): siRNA sense strand
augugaaaguuuagaagga

SEQ ID NO: 2336439 - RNA, 19 nt, Homo sapiens
  misc_RNA (1)...(19): siRNA sense strand
uggaagauuuaaagaagca

SEQ ID NO: 2336440 - RNA, 19 nt, Homo sapiens
  misc_RNA (1)...(19): siRNA sense strand
aggcuguguaugagggaau

SEQ ID NO: 2336441 - RNA, 19 nt, Homo sapiens
  misc_RNA (1)...(19): siRNA sense strand
gagaaugagccuaaggugu

SEQ ID NO: 2336442 - RNA, 19 nt, Homo sapiens
  misc_RNA (1)...(19): siRNA sense strand
gcaagaagcuacuggagag

SEQ ID NO: 2336443 - RNA, 19 nt, Homo sapiens
  misc_RNA (1)...(19): siRNA sense strand
uagagaacgccaaggguga

SEQ ID NO: 2336444 - RNA, 19 nt, Homo sapiens
  misc_RNA (1)...(19): siRNA sense strand
acgaggacgucauggguca

SEQ ID NO: 2336445 - RNA, 19 nt, Homo sapiens
  misc_RNA (1)...(19): siRNA sense strand
augagagauuugagaaguu

SEQ ID NO: 2336446 - RNA, 19 nt, Homo sapiens
  misc_RNA (1)...(19): siRNA sense strand
cgaagcagggauugaucaa

SEQ ID NO: 2336447 - RNA, 19 nt, Homo sapiens
  misc_RNA (1)...(19): siRNA sense strand
cauggaagucacagaguca

SEQ ID NO: 2336448 - RNA, 19 nt, Homo sapiens
  misc_RNA (1)...(19): siRNA sense strand
augcugagaaugagccuaa

SEQ ID NO: 2336449 - RNA, 19 nt, Homo sapiens
  misc_RNA (1)...(19): siRNA sense strand
ggaagagaucaucaagaga

SEQ ID NO: 2336450 - RNA, 19 nt, Homo sapiens
  misc_RNA (1)...(19): siRNA sense strand
cugcacaguucucagacaa

SEQ ID NO: 2336451 - RNA, 19 nt, Homo sapiens
  misc_RNA (1)...(19): siRNA sense strand
cugaagaguccaagcaacu

SEQ ID NO: 2336452 - RNA, 19 nt, Homo sapiens
  misc_RNA (1)...(19): siRNA sense strand
aguaugugucucagaagaa

SEQ ID NO: 2336453 - RNA, 19 nt, Homo sapiens
  misc_RNA (1)...(19): siRNA sense strand
agaucgaugccgugaugua

SEQ ID NO: 2336454 - RNA, 19 nt, Homo sapiens
  misc_RNA (1)...(19): siRNA sense strand
gugaaaguuuagaaggaug

SEQ ID NO: 2336455 - RNA, 19 nt, Homo sapiens
  misc_RNA (1)...(19): siRNA sense strand
acaccggaugagagagcua

SEQ ID NO: 2336456 - RNA, 19 nt, Homo sapiens
  misc_RNA (1)...(19): siRNA sense strand
agaagcuacuggagagcca

SEQ ID NO: 2336457 - RNA, 19 nt, Homo sapiens
  misc_RNA (1)...(19): siRNA sense strand
uggcgacaaugcugagauu

SEQ ID NO: 2336458 - RNA, 19 nt, Homo sapiens
  misc_RNA (1)...(19): siRNA sense strand
aggugaaagucuucgacca

SEQ ID NO: 2336459 - RNA, 19 nt, Homo sapiens
  misc_RNA (1)...(19): siRNA sense strand
uccaagaacucgacaggga

SEQ ID NO: 2336460 - RNA, 19 nt, Homo sapiens
  misc_RNA (1)...(19): siRNA sense strand
ucugugacauccugagcaa

SEQ ID NO: 2336461 - RNA, 19 nt, Homo sapiens
  misc_RNA (1)...(19): siRNA sense strand
uggaaaauucuucggggaa

SEQ ID NO: 2336462 - RNA, 19 nt, Homo sapiens
  misc_RNA (1)...(19): siRNA sense strand
agaccauuccuguuacaaa

SEQ ID NO: 2336463 - RNA, 19 nt, Homo sapiens
  misc_RNA (1)...(19): siRNA sense strand
uuaucaaacccgaguggau

SEQ ID NO: 2336464 - RNA, 19 nt, Homo sapiens
  misc_RNA (1)...(19): siRNA sense strand
uuuaagagaccaagaucga

SEQ ID NO: 2336465 - RNA, 19 nt, Homo sapiens
  misc_RNA (1)...(19): siRNA sense strand
gauuauggccuuaacgagu

SEQ ID NO: 2336466 - RNA, 19 nt, Homo sapiens
  misc_RNA (1)...(19): siRNA sense strand
cgcuuugucuaaugggcaa

SEQ ID NO: 2336467 - RNA, 19 nt, Homo sapiens
  misc_RNA (1)...(19): siRNA sense strand
guccagaagguuugcaaca

SEQ ID NO: 2336468 - RNA, 19 nt, Homo sapiens
  misc_RNA (1)...(19): siRNA sense strand
aagagaucaucaagagagu

SEQ ID NO: 2336469 - RNA, 19 nt, Homo sapiens
  misc_RNA (1)...(19): siRNA sense strand
ccgugauguaugugaaagu

SEQ ID NO: 2336470 - RNA, 19 nt, Homo sapiens
  misc_RNA (1)...(19): siRNA sense strand
gguggacgaagcagggauu

SEQ ID NO: 2336471 - RNA, 19 nt, Homo sapiens
  misc_RNA (1)...(19): siRNA sense strand
ucuucgaguuuguggggaa

SEQ ID NO: 2336472 - RNA, 19 nt, Homo sapiens
  misc_RNA (1)...(19): siRNA sense strand
uggggaagaugcuggggaa

SEQ ID NO: 2336473 - RNA, 19 nt, Homo sapiens
  misc_RNA (1)...(19): siRNA sense strand
cugcccaacuacagcaaga

SEQ ID NO: 2336474 - RNA, 19 nt, Homo sapiens
  misc_RNA (1)...(19): siRNA sense strand
gugauguaugugaaaguuu

SEQ ID NO: 2336475 - RNA, 19 nt, Homo sapiens
  misc_RNA (1)...(19): siRNA sense strand
aggaggagacagauggguu

SEQ ID NO: 2336476 - RNA, 19 nt, Homo sapiens
  misc_RNA (1)...(19): siRNA sense strand
cauucaaacuggaagagcu

SEQ ID NO: 2336477 - RNA, 19 nt, Homo sapiens
  misc_RNA (1)...(19): siRNA sense strand
ggggaaaaggugaaagucu

SEQ ID NO: 2336478 - RNA, 19 nt, Homo sapiens
  misc_RNA (1)...(19): siRNA sense strand
ccuugaugacauugaaguu

SEQ ID NO: 2336479 - RNA, 19 nt, Homo sapiens
  misc_RNA (1)...(19): siRNA sense strand
gcucauccuuguugggaga

SEQ ID NO: 2336480 - RNA, 19 nt, Homo sapiens
  misc_RNA (1)...(19): siRNA sense strand
ggaggaaggaagauggcga

SEQ ID NO: 2336481 - RNA, 19 nt, Homo sapiens
  misc_RNA (1)...(19): siRNA sense strand
ggaacagcauccugggcca

SEQ ID NO: 2336482 - RNA, 19 nt, Homo sapiens
  misc_RNA (1)...(19): siRNA sense strand
cggcuguggaaguggcuga

SEQ ID NO: 2336483 - RNA, 19 nt, Homo sapiens
  misc_RNA (1)...(19): siRNA sense strand
guuuagaagagaacgcuca

SEQ ID NO: 2336484 - RNA, 19 nt, Homo sapiens
  misc_RNA (1)...(19): siRNA sense strand
ggaagagcgccacugggaa

SEQ ID NO: 2336485 - RNA, 19 nt, Homo sapiens
  misc_RNA (1)...(19): siRNA sense strand
uuaaagaaguggugagcca

SEQ ID NO: 2336486 - RNA, 19 nt, Homo sapiens
  misc_RNA (1)...(19): siRNA sense strand
aagagaaguccaacagaaa

SEQ ID NO: 2336487 - RNA, 19 nt, Homo sapiens
  misc_RNA (1)...(19): siRNA sense strand
ggaagguguacaagggaau

SEQ ID NO: 2336488 - RNA, 19 nt, Homo sapiens
  misc_RNA (1)...(19): siRNA sense strand
cugugauguuggagagaga

SEQ ID NO: 2336489 - RNA, 19 nt, Homo sapiens
  misc_RNA (1)...(19): siRNA sense strand
cggaagguguacaagggaa

SEQ ID NO: 2336490 - RNA, 19 nt, Homo sapiens
  misc_RNA (1)...(19): siRNA sense strand
ggacagauacaaacggaga

SEQ ID NO: 2336491 - RNA, 19 nt, Homo sapiens
  misc_RNA (1)...(19): siRNA sense strand
uggcaaggauccuggccua

SEQ ID NO: 2336492 - RNA, 19 nt, Homo sapiens
  misc_RNA (1)...(19): siRNA sense strand
agagagaagggauggguau

SEQ ID NO: 2336493 - RNA, 19 nt, Homo sapiens
  misc_RNA (1)...(19): siRNA sense strand
ccagacaagcggaagagaa

SEQ ID NO: 2336494 - RNA, 19 nt, Homo sapiens
  misc_RNA (1)...(19): siRNA sense strand
gggcguuaguggaucagaa

SEQ ID NO: 2336495 - RNA, 19 nt, Homo sapiens
  misc_RNA (1)...(19): siRNA sense strand
ccuacaugcugcugaugaa

SEQ ID NO: 2336496 - RNA, 19 nt, Homo sapiens
  misc_RNA (1)...(19): siRNA sense strand
cugaauugcuacggcgaua

SEQ ID NO: 2336497 - RNA, 19 nt, Homo sapiens
  misc_RNA (1)...(19): siRNA sense strand
auagugaaauugagaccaa

SEQ ID NO: 2336498 - RNA, 19 nt, Homo sapiens
  misc_RNA (1)...(19): siRNA sense strand
agaaauuucaugagggcca

SEQ ID NO: 2336499 - RNA, 19 nt, Homo sapiens
  misc_RNA (1)...(19): siRNA sense strand
cugcaugaccuucgagaga

SEQ ID NO: 2336500 - RNA, 19 nt, Homo sapiens
  misc_RNA (1)...(19): siRNA sense strand
gcauucuguuagagcacaa

SEQ ID NO: 2336501 - RNA, 19 nt, Homo sapiens
  misc_RNA (1)...(19): siRNA sense strand
ugacauuaauggugauacu

SEQ ID NO: 2336502 - RNA, 19 nt, Homo sapiens
  misc_RNA (1)...(19): siRNA sense strand
gagucuuuguccugagcaa

SEQ ID NO: 2336503 - RNA, 19 nt, Homo sapiens
  misc_RNA (1)...(19): siRNA sense strand
aguucauagcagugaggaa

SEQ ID NO: 2336504 - RNA, 19 nt, Homo sapiens
  misc_RNA (1)...(19): siRNA sense strand
gaaccagacaagcggaaga

SEQ ID NO: 2336505 - RNA, 19 nt, Homo sapiens
  misc_RNA (1)...(19): siRNA sense strand
acaugaagaagcagacauu

SEQ ID NO: 2336506 - RNA, 19 nt, Homo sapiens
  misc_RNA (1)...(19): siRNA sense strand
agccaagcauaaaggagaa

SEQ ID NO: 2336507 - RNA, 19 nt, Homo sapiens
  misc_RNA (1)...(19): siRNA sense strand
cagcaaugcaggugaugga

SEQ ID NO: 2336508 - RNA, 19 nt, Homo sapiens
  misc_RNA (1)...(19): siRNA sense strand
guguugugcuuguggcgua

SEQ ID NO: 2336509 - RNA, 19 nt, Homo sapiens
  misc_RNA (1)...(19): siRNA sense strand
gaguagacaucgagguccu

SEQ ID NO: 2336510 - RNA, 19 nt, Homo sapiens
  misc_RNA (1)...(19): siRNA sense strand
gcguaguaacaucggaaca

SEQ ID NO: 2336511 - RNA, 19 nt, Homo sapiens
  misc_RNA (1)...(19): siRNA sense strand
ccugaagacuggugagggu

SEQ ID NO: 2336512 - RNA, 19 nt, Homo sapiens
  misc_RNA (1)...(19): siRNA sense strand
uaguggaucuggacagcaa

SEQ ID NO: 2336513 - RNA, 19 nt, Homo sapiens
  misc_RNA (1)...(19): siRNA sense strand
uccucaaucuggagaaauu

SEQ ID NO: 2336514 - RNA, 19 nt, Homo sapiens
  misc_RNA (1)...(19): siRNA sense strand
gcgcaugagccuucgggau

SEQ ID NO: 2336515 - RNA, 19 nt, Homo sapiens
  misc_RNA (1)...(19): siRNA sense strand
ggagauggaugauaaggca

SEQ ID NO: 2336516 - RNA, 19 nt, Homo sapiens
  misc_RNA (1)...(19): siRNA sense strand
aguccaacagaaaguguaa

SEQ ID NO: 2336517 - RNA, 19 nt, Homo sapiens
  misc_RNA (1)...(19): siRNA sense strand
augcagggacagauacaaa

SEQ ID NO: 2336518 - RNA, 19 nt, Homo sapiens
  misc_RNA (1)...(19): siRNA sense strand
cuggacagcaauaggguga

SEQ ID NO: 2336519 - RNA, 19 nt, Homo sapiens
  misc_RNA (1)...(19): siRNA sense strand
ggaugauaaggcagcagua

SEQ ID NO: 2336520 - RNA, 19 nt, Homo sapiens
  misc_RNA (1)...(19): siRNA sense strand
acacagcccaacagugaaa

SEQ ID NO: 2336521 - RNA, 19 nt, Homo sapiens
  misc_RNA (1)...(19): siRNA sense strand
aagccaagcauaaaggaga

SEQ ID NO: 2336522 - RNA, 19 nt, Homo sapiens
  misc_RNA (1)...(19): siRNA sense strand
gagagagaagggaugggua

SEQ ID NO: 2336523 - RNA, 19 nt, Homo sapiens
  misc_RNA (1)...(19): siRNA sense strand
auguauggcuaguggaucu

SEQ ID NO: 2336524 - RNA, 19 nt, Homo sapiens
  misc_RNA (1)...(19): siRNA sense strand
gagaaguccaacagaaagu

SEQ ID NO: 2336525 - RNA, 19 nt, Homo sapiens
  misc_RNA (1)...(19): siRNA sense strand
caaaggugcccgagagaag

SEQ ID NO: 2336526 - RNA, 19 nt, Homo sapiens
  misc_RNA (1)...(19): siRNA sense strand
acccaaaggcuauggcaca

SEQ ID NO: 2336527 - RNA, 19 nt, Homo sapiens
  misc_RNA (1)...(19): siRNA sense strand
acagauacaaacggagaua

SEQ ID NO: 2336528 - RNA, 19 nt, Homo sapiens
  misc_RNA (1)...(19): siRNA sense strand
ggaggaucacacugaguuu

SEQ ID NO: 2336529 - RNA, 19 nt, Homo sapiens
  misc_RNA (1)...(19): siRNA sense strand
cagacaagcggaagagaag

SEQ ID NO: 2336530 - RNA, 19 nt, Homo sapiens
  misc_RNA (1)...(19): siRNA sense strand
cugcagaaucagaaggaag

SEQ ID NO: 2336531 - RNA, 19 nt, Homo sapiens
  misc_RNA (1)...(19): siRNA sense strand
gaaucagaaggaagcagaa

SEQ ID NO: 2336532 - RNA, 19 nt, Homo sapiens
  misc_RNA (1)...(19): siRNA sense strand
gggcagaagcgaguagaca

SEQ ID NO: 2336533 - RNA, 19 nt, Homo sapiens
  misc_RNA (1)...(19): siRNA sense strand
gagacuggcaagugacuca

SEQ ID NO: 2336534 - RNA, 19 nt, Homo sapiens
  misc_RNA (1)...(19): siRNA sense strand
gcggaagagaaguccaaca

SEQ ID NO: 2336535 - RNA, 19 nt, Homo sapiens
  misc_RNA (1)...(19): siRNA sense strand
uuggugagacagaggagaa

SEQ ID NO: 2336536 - RNA, 19 nt, Homo sapiens
  misc_RNA (1)...(19): siRNA sense strand
ugugguacaugcagggaca

SEQ ID NO: 2336537 - RNA, 19 nt, Homo sapiens
  misc_RNA (1)...(19): siRNA sense strand
caccaauggcccacgaaau

SEQ ID NO: 2336538 - RNA, 19 nt, Homo sapiens
  misc_RNA (1)...(19): siRNA sense strand
ugauaguggcagugauagu

SEQ ID NO: 2336539 - RNA, 19 nt, Homo sapiens
  misc_RNA (1)...(19): siRNA sense strand
gaaggaagcagaagagccu

SEQ ID NO: 2336540 - RNA, 19 nt, Homo sapiens
  misc_RNA (1)...(19): siRNA sense strand
uggaagggaucaaccucaa

SEQ ID NO: 2336541 - RNA, 19 nt, Homo sapiens
  misc_RNA (1)...(19): siRNA sense strand
gccugaugauguauggcua

SEQ ID NO: 2336542 - RNA, 19 nt, Homo sapiens
  misc_RNA (1)...(19): siRNA sense strand
cccaaaggcuauggcacaa

SEQ ID NO: 2336543 - RNA, 19 nt, Homo sapiens
  misc_RNA (1)...(19): siRNA sense strand
caaugcaggugauggacca

SEQ ID NO: 2336544 - RNA, 19 nt, Homo sapiens
  misc_RNA (1)...(19): siRNA sense strand
guuaugauccgcagcucaa

SEQ ID NO: 2336545 - RNA, 19 nt, Homo sapiens
  misc_RNA (1)...(19): siRNA sense strand
uuaaagaaguggugagcca

SEQ ID NO: 2336546 - RNA, 19 nt, Homo sapiens
  misc_RNA (1)...(19): siRNA sense strand
aagagaaguccaacagaaa

SEQ ID NO: 2336547 - RNA, 19 nt, Homo sapiens
  misc_RNA (1)...(19): siRNA sense strand
ggaagguguacaagggaau

SEQ ID NO: 2336548 - RNA, 19 nt, Homo sapiens
  misc_RNA (1)...(19): siRNA sense strand
cugugauguuggagagaga

SEQ ID NO: 2336549 - RNA, 19 nt, Homo sapiens
  misc_RNA (1)...(19): siRNA sense strand
cggaagguguacaagggaa

SEQ ID NO: 2336550 - RNA, 19 nt, Homo sapiens
  misc_RNA (1)...(19): siRNA sense strand
ggacagauacaaacggaga

SEQ ID NO: 2336551 - RNA, 19 nt, Homo sapiens
  misc_RNA (1)...(19): siRNA sense strand
uggcaaggauccuggccua

SEQ ID NO: 2336552 - RNA, 19 nt, Homo sapiens
  misc_RNA (1)...(19): siRNA sense strand
agagagaagggauggguau

SEQ ID NO: 2336553 - RNA, 19 nt, Homo sapiens
  misc_RNA (1)...(19): siRNA sense strand
ccagacaagcggaagagaa

SEQ ID NO: 2336554 - RNA, 19 nt, Homo sapiens
  misc_RNA (1)...(19): siRNA sense strand
gggcguuaguggaucagaa

SEQ ID NO: 2336555 - RNA, 19 nt, Homo sapiens
  misc_RNA (1)...(19): siRNA sense strand
ccuacaugcugcugaugaa

SEQ ID NO: 2336556 - RNA, 19 nt, Homo sapiens
  misc_RNA (1)...(19): siRNA sense strand
cugaauugcuacggcgaua

SEQ ID NO: 2336557 - RNA, 19 nt, Homo sapiens
  misc_RNA (1)...(19): siRNA sense strand
auagugaaauugagaccaa

SEQ ID NO: 2336558 - RNA, 19 nt, Homo sapiens
  misc_RNA (1)...(19): siRNA sense strand
agaaauuucaugagggcca

SEQ ID NO: 2336559 - RNA, 19 nt, Homo sapiens
  misc_RNA (1)...(19): siRNA sense strand
cugcaugaccuucgagaga

SEQ ID NO: 2336560 - RNA, 19 nt, Homo sapiens
  misc_RNA (1)...(19): siRNA sense strand
gcauucuguuagagcacaa

SEQ ID NO: 2336561 - RNA, 19 nt, Homo sapiens
  misc_RNA (1)...(19): siRNA sense strand
ugacauuaauggugauacu

SEQ ID NO: 2336562 - RNA, 19 nt, Homo sapiens
  misc_RNA (1)...(19): siRNA sense strand
gagucuuuguccugagcaa

SEQ ID NO: 2336563 - RNA, 19 nt, Homo sapiens
  misc_RNA (1)...(19): siRNA sense strand
aguucauagcagugaggaa

SEQ ID NO: 2336564 - RNA, 19 nt, Homo sapiens
  misc_RNA (1)...(19): siRNA sense strand
gaaccagacaagcggaaga

SEQ ID NO: 2336565 - RNA, 19 nt, Homo sapiens
  misc_RNA (1)...(19): siRNA sense strand
acaugaagaagcagacauu

SEQ ID NO: 2336566 - RNA, 19 nt, Homo sapiens
  misc_RNA (1)...(19): siRNA sense strand
agccaagcauaaaggagaa

SEQ ID NO: 2336567 - RNA, 19 nt, Homo sapiens
  misc_RNA (1)...(19): siRNA sense strand
cagcaaugcaggugaugga

SEQ ID NO: 2336568 - RNA, 19 nt, Homo sapiens
  misc_RNA (1)...(19): siRNA sense strand
guguugugcuuguggcgua

SEQ ID NO: 2336569 - RNA, 19 nt, Homo sapiens
  misc_RNA (1)...(19): siRNA sense strand
gaguagacaucgagguccu

SEQ ID NO: 2336570 - RNA, 19 nt, Homo sapiens
  misc_RNA (1)...(19): siRNA sense strand
gcguaguaacaucggaaca

SEQ ID NO: 2336571 - RNA, 19 nt, Homo sapiens
  misc_RNA (1)...(19): siRNA sense strand
ccugaagacuggugagggu

SEQ ID NO: 2336572 - RNA, 19 nt, Homo sapiens
  misc_RNA (1)...(19): siRNA sense strand
uaguggaucuggacagcaa

SEQ ID NO: 2336573 - RNA, 19 nt, Homo sapiens
  misc_RNA (1)...(19): siRNA sense strand
uccucaaucuggagaaauu

SEQ ID NO: 2336574 - RNA, 19 nt, Homo sapiens
  misc_RNA (1)...(19): siRNA sense strand
gcgcaugagccuucgggau

SEQ ID NO: 2336575 - RNA, 19 nt, Homo sapiens
  misc_RNA (1)...(19): siRNA sense strand
ggagauggaugauaaggca

SEQ ID NO: 2336576 - RNA, 19 nt, Homo sapiens
  misc_RNA (1)...(19): siRNA sense strand
aguccaacagaaaguguaa

SEQ ID NO: 2336577 - RNA, 19 nt, Homo sapiens
  misc_RNA (1)...(19): siRNA sense strand
augcagggacagauacaaa

SEQ ID NO: 2336578 - RNA, 19 nt, Homo sapiens
  misc_RNA (1)...(19): siRNA sense strand
cuggacagcaauaggguga

SEQ ID NO: 2336579 - RNA, 19 nt, Homo sapiens
  misc_RNA (1)...(19): siRNA sense strand
ggaugauaaggcagcagua

SEQ ID NO: 2336580 - RNA, 19 nt, Homo sapiens
  misc_RNA (1)...(19): siRNA sense strand
acacagcccaacagugaaa

SEQ ID NO: 2336581 - RNA, 19 nt, Homo sapiens
  misc_RNA (1)...(19): siRNA sense strand
aagccaagcauaaaggaga

SEQ ID NO: 2336582 - RNA, 19 nt, Homo sapiens
  misc_RNA (1)...(19): siRNA sense strand
gagagagaagggaugggua

SEQ ID NO: 2336583 - RNA, 19 nt, Homo sapiens
  misc_RNA (1)...(19): siRNA sense strand
auguauggcuaguggaucu

SEQ ID NO: 2336584 - RNA, 19 nt, Homo sapiens
  misc_RNA (1)...(19): siRNA sense strand
gagaaguccaacagaaagu

SEQ ID NO: 2336585 - RNA, 19 nt, Homo sapiens
  misc_RNA (1)...(19): siRNA sense strand
caaaggugcccgagagaag

SEQ ID NO: 2336586 - RNA, 19 nt, Homo sapiens
  misc_RNA (1)...(19): siRNA sense strand
acccaaaggcuauggcaca

SEQ ID NO: 2336587 - RNA, 19 nt, Homo sapiens
  misc_RNA (1)...(19): siRNA sense strand
acagauacaaacggagaua

SEQ ID NO: 2336588 - RNA, 19 nt, Homo sapiens
  misc_RNA (1)...(19): siRNA sense strand
ggaggaucacacugaguuu

SEQ ID NO: 2336589 - RNA, 19 nt, Homo sapiens
  misc_RNA (1)...(19): siRNA sense strand
cagacaagcggaagagaag

SEQ ID NO: 2336590 - RNA, 19 nt, Homo sapiens
  misc_RNA (1)...(19): siRNA sense strand
cugcagaaucagaaggaag

SEQ ID NO: 2336591 - RNA, 19 nt, Homo sapiens
  misc_RNA (1)...(19): siRNA sense strand
gaaucagaaggaagcagaa

SEQ ID NO: 2336592 - RNA, 19 nt, Homo sapiens
  misc_RNA (1)...(19): siRNA sense strand
gggcagaagcgaguagaca

SEQ ID NO: 2336593 - RNA, 19 nt, Homo sapiens
  misc_RNA (1)...(19): siRNA sense strand
gagacuggcaagugacuca

SEQ ID NO: 2336594 - RNA, 19 nt, Homo sapiens
  misc_RNA (1)...(19): siRNA sense strand
gcggaagagaaguccaaca

SEQ ID NO: 2336595 - RNA, 19 nt, Homo sapiens
  misc_RNA (1)...(19): siRNA sense strand
uuggugagacagaggagaa

SEQ ID NO: 2336596 - RNA, 19 nt, Homo sapiens
  misc_RNA (1)...(19): siRNA sense strand
ugugguacaugcagggaca

SEQ ID NO: 2336597 - RNA, 19 nt, Homo sapiens
  misc_RNA (1)...(19): siRNA sense strand
caccaauggcccacgaaau

SEQ ID NO: 2336598 - RNA, 19 nt, Homo sapiens
  misc_RNA (1)...(19): siRNA sense strand
ugauaguggcagugauagu

SEQ ID NO: 2336599 - RNA, 19 nt, Homo sapiens
  misc_RNA (1)...(19): siRNA sense strand
gaaggaagcagaagagccu

SEQ ID NO: 2336600 - RNA, 19 nt, Homo sapiens
  misc_RNA (1)...(19): siRNA sense strand
uggaagggaucaaccucaa

SEQ ID NO: 2336601 - RNA, 19 nt, Homo sapiens
  misc_RNA (1)...(19): siRNA sense strand
gccugaugauguauggcua

SEQ ID NO: 2336602 - RNA, 19 nt, Homo sapiens
  misc_RNA (1)...(19): siRNA sense strand
cccaaaggcuauggcacaa

SEQ ID NO: 2336603 - RNA, 19 nt, Homo sapiens
  misc_RNA (1)...(19): siRNA sense strand
caaugcaggugauggacca

SEQ ID NO: 2336604 - RNA, 19 nt, Homo sapiens
  misc_RNA (1)...(19): siRNA sense strand
guuaugauccgcagcucaa

SEQ ID NO: 2336605 - RNA, 19 nt, Homo sapiens
  misc_RNA (1)...(19): siRNA sense strand
uuaaagaaguggugagcca

SEQ ID NO: 2336606 - RNA, 19 nt, Homo sapiens
  misc_RNA (1)...(19): siRNA sense strand
aagagaaguccaacagaaa

SEQ ID NO: 2336607 - RNA, 19 nt, Homo sapiens
  misc_RNA (1)...(19): siRNA sense strand
ggaagguguacaagggaau

SEQ ID NO: 2336608 - RNA, 19 nt, Homo sapiens
  misc_RNA (1)...(19): siRNA sense strand
cugugauguuggagagaga

SEQ ID NO: 2336609 - RNA, 19 nt, Homo sapiens
  misc_RNA (1)...(19): siRNA sense strand
cggaagguguacaagggaa

SEQ ID NO: 2336610 - RNA, 19 nt, Homo sapiens
  misc_RNA (1)...(19): siRNA sense strand
ggacagauacaaacggaga

SEQ ID NO: 2336611 - RNA, 19 nt, Homo sapiens
  misc_RNA (1)...(19): siRNA sense strand
uggcaaggauccuggccua

SEQ ID NO: 2336612 - RNA, 19 nt, Homo sapiens
  misc_RNA (1)...(19): siRNA sense strand
agagagaagggauggguau

SEQ ID NO: 2336613 - RNA, 19 nt, Homo sapiens
  misc_RNA (1)...(19): siRNA sense strand
ccagacaagcggaagagaa

SEQ ID NO: 2336614 - RNA, 19 nt, Homo sapiens
  misc_RNA (1)...(19): siRNA sense strand
gggcguuaguggaucagaa

SEQ ID NO: 2336615 - RNA, 19 nt, Homo sapiens
  misc_RNA (1)...(19): siRNA sense strand
ccuacaugcugcugaugaa

SEQ ID NO: 2336616 - RNA, 19 nt, Homo sapiens
  misc_RNA (1)...(19): siRNA sense strand
cugaauugcuacggcgaua

SEQ ID NO: 2336617 - RNA, 19 nt, Homo sapiens
  misc_RNA (1)...(19): siRNA sense strand
auagugaaauugagaccaa

SEQ ID NO: 2336618 - RNA, 19 nt, Homo sapiens
  misc_RNA (1)...(19): siRNA sense strand
agaaauuucaugagggcca

SEQ ID NO: 2336619 - RNA, 19 nt, Homo sapiens
  misc_RNA (1)...(19): siRNA sense strand
cugcaugaccuucgagaga

SEQ ID NO: 2336620 - RNA, 19 nt, Homo sapiens
  misc_RNA (1)...(19): siRNA sense strand
gcauucuguuagagcacaa

SEQ ID NO: 2336621 - RNA, 19 nt, Homo sapiens
  misc_RNA (1)...(19): siRNA sense strand
ugacauuaauggugauacu

SEQ ID NO: 2336622 - RNA, 19 nt, Homo sapiens
  misc_RNA (1)...(19): siRNA sense strand
gagucuuuguccugagcaa

SEQ ID NO: 2336623 - RNA, 19 nt, Homo sapiens
  misc_RNA (1)...(19): siRNA sense strand
aguucauagcagugaggaa

SEQ ID NO: 2336624 - RNA, 19 nt, Homo sapiens
  misc_RNA (1)...(19): siRNA sense strand
gaaccagacaagcggaaga

SEQ ID NO: 2336625 - RNA, 19 nt, Homo sapiens
  misc_RNA (1)...(19): siRNA sense strand
acaugaagaagcagacauu

SEQ ID NO: 2336626 - RNA, 19 nt, Homo sapiens
  misc_RNA (1)...(19): siRNA sense strand
agccaagcauaaaggagaa

SEQ ID NO: 2336627 - RNA, 19 nt, Homo sapiens
  misc_RNA (1)...(19): siRNA sense strand
cagcaaugcaggugaugga

SEQ ID NO: 2336628 - RNA, 19 nt, Homo sapiens
  misc_RNA (1)...(19): siRNA sense strand
guguugugcuuguggcgua

SEQ ID NO: 2336629 - RNA, 19 nt, Homo sapiens
  misc_RNA (1)...(19): siRNA sense strand
gaguagacaucgagguccu

SEQ ID NO: 2336630 - RNA, 19 nt, Homo sapiens
  misc_RNA (1)...(19): siRNA sense strand
gcguaguaacaucggaaca

SEQ ID NO: 2336631 - RNA, 19 nt, Homo sapiens
  misc_RNA (1)...(19): siRNA sense strand
ccugaagacuggugagggu

SEQ ID NO: 2336632 - RNA, 19 nt, Homo sapiens
  misc_RNA (1)...(19): siRNA sense strand
uaguggaucuggacagcaa

SEQ ID NO: 2336633 - RNA, 19 nt, Homo sapiens
  misc_RNA (1)...(19): siRNA sense strand
uccucaaucuggagaaauu

SEQ ID NO: 2336634 - RNA, 19 nt, Homo sapiens
  misc_RNA (1)...(19): siRNA sense strand
gcgcaugagccuucgggau

SEQ ID NO: 2336635 - RNA, 19 nt, Homo sapiens
  misc_RNA (1)...(19): siRNA sense strand
ggagauggaugauaaggca

SEQ ID NO: 2336636 - RNA, 19 nt, Homo sapiens
  misc_RNA (1)...(19): siRNA sense strand
aguccaacagaaaguguaa

SEQ ID NO: 2336637 - RNA, 19 nt, Homo sapiens
  misc_RNA (1)...(19): siRNA sense strand
augcagggacagauacaaa

SEQ ID NO: 2336638 - RNA, 19 nt, Homo sapiens
  misc_RNA (1)...(19): siRNA sense strand
cuggacagcaauaggguga

SEQ ID NO: 2336639 - RNA, 19 nt, Homo sapiens
  misc_RNA (1)...(19): siRNA sense strand
ggaugauaaggcagcagua

SEQ ID NO: 2336640 - RNA, 19 nt, Homo sapiens
  misc_RNA (1)...(19): siRNA sense strand
acacagcccaacagugaaa

SEQ ID NO: 2336641 - RNA, 19 nt, Homo sapiens
  misc_RNA (1)...(19): siRNA sense strand
aagccaagcauaaaggaga

SEQ ID NO: 2336642 - RNA, 19 nt, Homo sapiens
  misc_RNA (1)...(19): siRNA sense strand
gagagagaagggaugggua

SEQ ID NO: 2336643 - RNA, 19 nt, Homo sapiens
  misc_RNA (1)...(19): siRNA sense strand
auguauggcuaguggaucu

SEQ ID NO: 2336644 - RNA, 19 nt, Homo sapiens
  misc_RNA (1)...(19): siRNA sense strand
gagaaguccaacagaaagu

SEQ ID NO: 2336645 - RNA, 19 nt, Homo sapiens
  misc_RNA (1)...(19): siRNA sense strand
caaaggugcccgagagaag

SEQ ID NO: 2336646 - RNA, 19 nt, Homo sapiens
  misc_RNA (1)...(19): siRNA sense strand
acccaaaggcuauggcaca

SEQ ID NO: 2336647 - RNA, 19 nt, Homo sapiens
  misc_RNA (1)...(19): siRNA sense strand
acagauacaaacggagaua

SEQ ID NO: 2336648 - RNA, 19 nt, Homo sapiens
  misc_RNA (1)...(19): siRNA sense strand
ggaggaucacacugaguuu

SEQ ID NO: 2336649 - RNA, 19 nt, Homo sapiens
  misc_RNA (1)...(19): siRNA sense strand
cagacaagcggaagagaag

SEQ ID NO: 2336650 - RNA, 19 nt, Homo sapiens
  misc_RNA (1)...(19): siRNA sense strand
cugcagaaucagaaggaag

SEQ ID NO: 2336651 - RNA, 19 nt, Homo sapiens
  misc_RNA (1)...(19): siRNA sense strand
gaaucagaaggaagcagaa

SEQ ID NO: 2336652 - RNA, 19 nt, Homo sapiens
  misc_RNA (1)...(19): siRNA sense strand
gggcagaagcgaguagaca

SEQ ID NO: 2336653 - RNA, 19 nt, Homo sapiens
  misc_RNA (1)...(19): siRNA sense strand
gagacuggcaagugacuca

SEQ ID NO: 2336654 - RNA, 19 nt, Homo sapiens
  misc_RNA (1)...(19): siRNA sense strand
gcggaagagaaguccaaca

SEQ ID NO: 2336655 - RNA, 19 nt, Homo sapiens
  misc_RNA (1)...(19): siRNA sense strand
uuggugagacagaggagaa

SEQ ID NO: 2336656 - RNA, 19 nt, Homo sapiens
  misc_RNA (1)...(19): siRNA sense strand
ugugguacaugcagggaca

SEQ ID NO: 2336657 - RNA, 19 nt, Homo sapiens
  misc_RNA (1)...(19): siRNA sense strand
caccaauggcccacgaaau

SEQ ID NO: 2336658 - RNA, 19 nt, Homo sapiens
  misc_RNA (1)...(19): siRNA sense strand
ugauaguggcagugauagu

SEQ ID NO: 2336659 - RNA, 19 nt, Homo sapiens
  misc_RNA (1)...(19): siRNA sense strand
gaaggaagcagaagagccu

SEQ ID NO: 2336660 - RNA, 19 nt, Homo sapiens
  misc_RNA (1)...(19): siRNA sense strand
uggaagggaucaaccucaa

SEQ ID NO: 2336661 - RNA, 19 nt, Homo sapiens
  misc_RNA (1)...(19): siRNA sense strand
gccugaugauguauggcua

SEQ ID NO: 2336662 - RNA, 19 nt, Homo sapiens
  misc_RNA (1)...(19): siRNA sense strand
cccaaaggcuauggcacaa

SEQ ID NO: 2336663 - RNA, 19 nt, Homo sapiens
  misc_RNA (1)...(19): siRNA sense strand
caaugcaggugauggacca

SEQ ID NO: 2336664 - RNA, 19 nt, Homo sapiens
  misc_RNA (1)...(19): siRNA sense strand
guuaugauccgcagcucaa

SEQ ID NO: 2336665 - RNA, 19 nt, Homo sapiens
  misc_RNA (1)...(19): siRNA sense strand
uuaaagaaguggugagcca

SEQ ID NO: 2336666 - RNA, 19 nt, Homo sapiens
  misc_RNA (1)...(19): siRNA sense strand
aagagaaguccaacagaaa

SEQ ID NO: 2336667 - RNA, 19 nt, Homo sapiens
  misc_RNA (1)...(19): siRNA sense strand
ggaagguguacaagggaau

SEQ ID NO: 2336668 - RNA, 19 nt, Homo sapiens
  misc_RNA (1)...(19): siRNA sense strand
cugugauguuggagagaga

SEQ ID NO: 2336669 - RNA, 19 nt, Homo sapiens
  misc_RNA (1)...(19): siRNA sense strand
cggaagguguacaagggaa

SEQ ID NO: 2336670 - RNA, 19 nt, Homo sapiens
  misc_RNA (1)...(19): siRNA sense strand
ggacagauacaaacggaga

SEQ ID NO: 2336671 - RNA, 19 nt, Homo sapiens
  misc_RNA (1)...(19): siRNA sense strand
uggcaaggauccuggccua

SEQ ID NO: 2336672 - RNA, 19 nt, Homo sapiens
  misc_RNA (1)...(19): siRNA sense strand
agagagaagggauggguau

SEQ ID NO: 2336673 - RNA, 19 nt, Homo sapiens
  misc_RNA (1)...(19): siRNA sense strand
ccagacaagcggaagagaa

SEQ ID NO: 2336674 - RNA, 19 nt, Homo sapiens
  misc_RNA (1)...(19): siRNA sense strand
gggcguuaguggaucagaa

SEQ ID NO: 2336675 - RNA, 19 nt, Homo sapiens
  misc_RNA (1)...(19): siRNA sense strand
ccuacaugcugcugaugaa

SEQ ID NO: 2336676 - RNA, 19 nt, Homo sapiens
  misc_RNA (1)...(19): siRNA sense strand
cugaauugcuacggcgaua

SEQ ID NO: 2336677 - RNA, 19 nt, Homo sapiens
  misc_RNA (1)...(19): siRNA sense strand
auagugaaauugagaccaa

SEQ ID NO: 2336678 - RNA, 19 nt, Homo sapiens
  misc_RNA (1)...(19): siRNA sense strand
agaaauuucaugagggcca

SEQ ID NO: 2336679 - RNA, 19 nt, Homo sapiens
  misc_RNA (1)...(19): siRNA sense strand
cugcaugaccuucgagaga

SEQ ID NO: 2336680 - RNA, 19 nt, Homo sapiens
  misc_RNA (1)...(19): siRNA sense strand
gcauucuguuagagcacaa

SEQ ID NO: 2336681 - RNA, 19 nt, Homo sapiens
  misc_RNA (1)...(19): siRNA sense strand
ugacauuaauggugauacu

SEQ ID NO: 2336682 - RNA, 19 nt, Homo sapiens
  misc_RNA (1)...(19): siRNA sense strand
gagucuuuguccugagcaa

SEQ ID NO: 2336683 - RNA, 19 nt, Homo sapiens
  misc_RNA (1)...(19): siRNA sense strand
aguucauagcagugaggaa

SEQ ID NO: 2336684 - RNA, 19 nt, Homo sapiens
  misc_RNA (1)...(19): siRNA sense strand
gaaccagacaagcggaaga

SEQ ID NO: 2336685 - RNA, 19 nt, Homo sapiens
  misc_RNA (1)...(19): siRNA sense strand
acaugaagaagcagacauu

SEQ ID NO: 2336686 - RNA, 19 nt, Homo sapiens
  misc_RNA (1)...(19): siRNA sense strand
agccaagcauaaaggagaa

SEQ ID NO: 2336687 - RNA, 19 nt, Homo sapiens
  misc_RNA (1)...(19): siRNA sense strand
cagcaaugcaggugaugga

SEQ ID NO: 2336688 - RNA, 19 nt, Homo sapiens
  misc_RNA (1)...(19): siRNA sense strand
guguugugcuuguggcgua

SEQ ID NO: 2336689 - RNA, 19 nt, Homo sapiens
  misc_RNA (1)...(19): siRNA sense strand
gaguagacaucgagguccu

SEQ ID NO: 2336690 - RNA, 19 nt, Homo sapiens
  misc_RNA (1)...(19): siRNA sense strand
gcguaguaacaucggaaca

SEQ ID NO: 2336691 - RNA, 19 nt, Homo sapiens
  misc_RNA (1)...(19): siRNA sense strand
ccugaagacuggugagggu

SEQ ID NO: 2336692 - RNA, 19 nt, Homo sapiens
  misc_RNA (1)...(19): siRNA sense strand
uaguggaucuggacagcaa

SEQ ID NO: 2336693 - RNA, 19 nt, Homo sapiens
  misc_RNA (1)...(19): siRNA sense strand
uccucaaucuggagaaauu

SEQ ID NO: 2336694 - RNA, 19 nt, Homo sapiens
  misc_RNA (1)...(19): siRNA sense strand
gcgcaugagccuucgggau

SEQ ID NO: 2336695 - RNA, 19 nt, Homo sapiens
  misc_RNA (1)...(19): siRNA sense strand
ggagauggaugauaaggca

SEQ ID NO: 2336696 - RNA, 19 nt, Homo sapiens
  misc_RNA (1)...(19): siRNA sense strand
aguccaacagaaaguguaa

SEQ ID NO: 2336697 - RNA, 19 nt, Homo sapiens
  misc_RNA (1)...(19): siRNA sense strand
augcagggacagauacaaa

SEQ ID NO: 2336698 - RNA, 19 nt, Homo sapiens
  misc_RNA (1)...(19): siRNA sense strand
cuggacagcaauaggguga

SEQ ID NO: 2336699 - RNA, 19 nt, Homo sapiens
  misc_RNA (1)...(19): siRNA sense strand
ggaugauaaggcagcagua

SEQ ID NO: 2336700 - RNA, 19 nt, Homo sapiens
  misc_RNA (1)...(19): siRNA sense strand
acacagcccaacagugaaa

SEQ ID NO: 2336701 - RNA, 19 nt, Homo sapiens
  misc_RNA (1)...(19): siRNA sense strand
aagccaagcauaaaggaga

SEQ ID NO: 2336702 - RNA, 19 nt, Homo sapiens
  misc_RNA (1)...(19): siRNA sense strand
gagagagaagggaugggua

SEQ ID NO: 2336703 - RNA, 19 nt, Homo sapiens
  misc_RNA (1)...(19): siRNA sense strand
auguauggcuaguggaucu

SEQ ID NO: 2336704 - RNA, 19 nt, Homo sapiens
  misc_RNA (1)...(19): siRNA sense strand
gagaaguccaacagaaagu

SEQ ID NO: 2336705 - RNA, 19 nt, Homo sapiens
  misc_RNA (1)...(19): siRNA sense strand
caaaggugcccgagagaag

SEQ ID NO: 2336706 - RNA, 19 nt, Homo sapiens
  misc_RNA (1)...(19): siRNA sense strand
acccaaaggcuauggcaca

SEQ ID NO: 2336707 - RNA, 19 nt, Homo sapiens
  misc_RNA (1)...(19): siRNA sense strand
acagauacaaacggagaua

SEQ ID NO: 2336708 - RNA, 19 nt, Homo sapiens
  misc_RNA (1)...(19): siRNA sense strand
ggaggaucacacugaguuu

SEQ ID NO: 2336709 - RNA, 19 nt, Homo sapiens
  misc_RNA (1)...(19): siRNA sense strand
cagacaagcggaagagaag

SEQ ID NO: 2336710 - RNA, 19 nt, Homo sapiens
  misc_RNA (1)...(19): siRNA sense strand
cugcagaaucagaaggaag

SEQ ID NO: 2336711 - RNA, 19 nt, Homo sapiens
  misc_RNA (1)...(19): siRNA sense strand
gaaucagaaggaagcagaa

SEQ ID NO: 2336712 - RNA, 19 nt, Homo sapiens
  misc_RNA (1)...(19): siRNA sense strand
gggcagaagcgaguagaca

SEQ ID NO: 2336713 - RNA, 19 nt, Homo sapiens
  misc_RNA (1)...(19): siRNA sense strand
gagacuggcaagugacuca
